United States Patent Application Publication US 2021/0254056 A1 - sequence listing, part 26

SEQ ID NO: 52013 - DNA, 3329 bp, Homo sapiens
atgccttgccctggtctcctctcccacctgcccataactaaaggttttatgcccacagagcaggcagtttccaggacctgtgctacagaccttgtttattctgacgggtcagtgcctgttgtactggatagttaagcattttgattatcatcccagaaagaccaagagataacggagaagccagcggcaatgacatggggcaaaggtgtgcaggcaggtgagagcaaagatcagagattgcaggtgtatgtgtgaggaggggtggtgggagacaggcacgtgagggtctgaggcgccctgccctgcttgggaggccctggcagcagctccttgcctgccaaaggctcagacctggctccatcccaggacgccttggagggaggagctgtcagagccagttccaccaccttggggctaatcttcctcttcctcccccaacccctgccctgagttctcggccagcaccgccccctgccctcacaccaggtatctcagagaaaggggctttcctcaccccaaagccaaccctgattctgccactgcaggcctaggctcccaacacgcaggtaggcaggcaggcactcacccactacaaagggatccccaggcctgcccctccagttcatgcagtccttgaagttctgcttctcactgatatccaatacctcacatccatctgagtctgcaacccttcccctaaaatttaacactcttcttttgtggtctgggataagcctgatgatcctggggctcagtgggaggactaacggctcctttgtgagagagtgaactgagacttgggagggaatgaggaggcccctctaggaaaatagaagacatcatcctcccctagcctggctgctctaaaacaggtggctggactcaggactccgataggagtgagggctccgaggcaggagagtgataaaggccacctcctattgccttcttggcacaggagagaggggctagggctggctgataggacgactaatcttatgggaggctgtggataaaatgccccctgtggcttccccacttcctattcttggaagccagaagtgggtttcagccctcctctgcccatagatcctgatcctcaaccatttggggatccctacttgcccttagttaggcttcctagtccacagtgggccagctggtctgtactacccagggctggggcaggaacggagtaacccactcactgcaatgtagcaactgaacacagaggaaaacaggtgtaaccacatgagcggctgaaaaatcagagtaactgggacaggaaatagaacataactggtgggtctgccagacctaagaagtgcaaacagagtcactcagaacaaaaccagggtgaaactggtgtgaccaaggagtaactaggactgaggagtaactcaggcagggaaatgctcactcagagaacccacagagtaaccaagaggccagggagtaaccagaatgcttgtcgtcttctgcacagacgctgacagcatctgtctggataacagacagggcctgggagtcgctgagcaccaggtgagcaactttagacacgcgtcctctgtgcctgggcctagcttcctcccacccttctaccgtcagaatctgcctcccttcccacttcgctgttcgcagcccatgtggcctgcaccctctgcccccactcgtgcaaactgtcctcactcacttcaacctttggactttttgaggcttaattattcattagaggccagacacccaggacccaaataacctaataatggctcatttgcctccgccccctcccctacatctgggggctgggattctgggaatctggaggggtgtgggaggcaggggaagtggctggctgtcccagactgcaagcgtgaccgctgcccccagcctgttggctgagtcacttgtgggagggtaaacgatcggcactatcactggggagtaacagctgtcattctggcaagagtcggagctgtcagagagggggttagaaccgtggggaagaggactttggaagtcagcttgatcctccgcggttaagcgtgggggtcacagctggggaggtgggtccaggctaccttggaaaacacagccccttcggggaagtgagagtttggggagtgcaagggctggagagagaagggcttccccggctccctccactcaccaccaggatgagggtccccaggcactcggccagcgcctgtcggagcagccggtagcggatgtggagcatctccccgcagcgggacaccagctccttctgtcgacccatggcggggcaggcggcggcgctgtcgggcgggcaggggtggcgggaggcggtggcgcagcgagcagcggcctccagcgctggtggctccctttataggagcgctggagacacgggccccgcccgccctgcagccccgccctgcagtcccggagcgccgaggagtgcgcgccccctcgcccccgccccacctcggctgggaggctggtgcggacgccgggtggagggagctgcgggcatggagtgtgaggagctttgagggacgggtggccttcggagggcgcttaagggaggggacgtcaagggggctgagaggcttaggcagatctgagagccaatggtgggattataggcagggttcagggccatggctggagaggatgcagctgtcatagagaccacctgcgccctgtgatcaccccacttccttgcgggcaggaggagacctgtcagaaagaaactggccgcatctctccaggatgactggacccaacagatcctcagttcgaggcaggaggaggaggctgcgagccccaagtgagaagcaacactgtctcttctgtcaggacagataaggcaccgacccttcaaggggacagctagtgtcagaggggcagcagtccagactcaggtgggcacacagacacacgtgctgagttccaaccagacttcatgggcccttctccctgtgctatgagcacgtcgtgtgtcgcatgtcctggccagctatgtccacagctgtgtctacacatggcggatgtcctgtgtgcctaattgtacggctgggcattcctcgtggctgtgcacatgcctgttgaacatggctaggtgacctagcttgtcacacgtgtacctgcgtgcattgctcacatggctccagaggctgagctgcagttgccccgacatgccacatgccacatgtttgccagcaggctgagtcccagctgtttttaaccctctcctctcccatctgacttacccccagccaaggaagagtctgtctcttttttttttttagacggagtctctctctgtcgcctaggtggagtgcaat

SEQ ID NO: 52014 - DNA, 591 bp, Homo sapiens
cacatcttggcctgatataaaccagaaaattatactccccattcatttctgaagtagaagaggaagtctccctctggtttgaaacacccttcttcttggtcctccttggttccctggggcagtgtgagatgcctcctccttctccctctcaggggtagatgagcagattggcctttcctgtgaagggtacgggtgactcacgtgccccaggcttcccctcgcccttatcactcacctggattaatctgtgactcataaagcaagtaccggatgttgggggggttacatgtaaacttgggggaggggggctggctagcctaaatctgacttaataggtcagggactgagcagccctgaggatttcattgatataacatgccatatggaccccttaggcttggggttcttgctttcctcccccaaagtatggagctgggcagaggaaaatagggtcttcagctaacaggattcgggggtagaggaggttgtcagatgccatagccagaaaggagggcccttgttgagttcaccaaatgaggcttaggtcagtcagaacacgggaaactctgtatcctagcactttgggaggcc

SEQ ID NO: 52015 - DNA, 1264 bp, Homo sapiens
ggcctgggacttctcaaatgtctttcccattctcgctccaaccaaatcctgccaggttccacctcctctaggaagacctgactgcctcagtttacactaaatactcactgatggaaggagctagaaccgactggaccccagaggacacatttagcaagtcattaaatcctcaaaataattcttgaagacacttgaagtcccactattcactcgaggttccacaactggtacacccgtactatgagcaggcttcaaaggcaagcgtgcaggatcccaaaccttttcccctacagccgtgggcccatccgctccacgatgcctctcatcccagagagccttactggagcgctccaggagaggcaccgtatgccctccgctacagcggggagcacagaactggacacaaattctgtggaggaagatcccgcttatcgtcaaggaccaccaaataaaagaaacgacccaagtgtgggtctcttcaactttgaggtgcagagctccagaagagagcagaggctctaccggcttcactgcttctaaccaaatactgccaggttccatcacccctagcaagccctgtctcagtgccactggctggaaacatcctccagaatgggccgccggcatggctttcacccgcaagctgtcagatcacgccatctcgggccctgcagccaagggagcgcacattgagcctctgttcctccccgatggctcaacccacctctggctctccagtcgctccgcgaagctgctctccagctggcgccggccccatcactcagggtccagcactctcccgcacttcagattctagccgggtctatacctcatagcttcccacgtgggcggaaatgcctaactccaggcccaagtccagcccaccccaattcctcaggactccacccactccagagctattggattatcagtcgattactcgcttgccattggccgggcagtctcaaggcccgcccattaggggaggggacaaacgggtttctgtgctttacggcctcttcgcgacgctagaacggaagcctgcccgtagctaggcctttgctttcttttcctcacttccttcgcgtggctgcaatcgggaagggcggagctagtttgttccttttggtcaggtttgtttacagcagttattcctccctttttctttatttgctacaccttatcagttaacaaatcttgtcagttctacctccaaaacataccttgaatttattcatttttctgtgtcttcactgccaggttt

SEQ ID NO: 52016 - DNA, 883 bp, Homo sapiens
aaaaaggggcaatatactttataagaaaaattaccacagtaattcccaagaagaatgtgacaataagctctttgacgataatatatgtgcatcatctggtttctgttccaaagccttagtcagctcctacaaaaacaaacatgttgagtgtcagtaaaagttttttaaaagccatcaaataaattctaattaaaacatcatttttaaacaaataacttatgatcagaaactacttggaggaaagataacagggatgtaatcttggagtttttcctcgtaagaggatctccccggtttctcgcggtcctgctaaaacgctgtcaacctaacgctccaccagagaggcccgttggcttctcgggaggcgaccgagggagctcaggaggcggggaggcttttacaagaagcgaaaggacggcctcaggggtggccgggaacagcctggaatcagctggaggacatcagcaggactgaggaaagggccaccaccagcgtgaggaaaggggggagagggcagaacgcggcgaatggccgcgctcgagggctggcggggtcccagcgagcagcggctgggaaacaatggcgcgagcgtgacgtgggccggaggcgccgccgcggcgcggaggaaggggctgccgtgggactgtagagtctgtagagtcttttggaatttatgtgattacaatcttgcagtctgtgaatagagatggtttaactttcctgtaatctttataccttttagttttgttgctggctagtatgtccactattgaatagaaatagtgataatggacttccttgtcttggttgtaaaatcaagaggaaagcattcaatatcaagtgctttttctacctttattgaaatgttcatatgtatttttaa

SEQ ID NO: 52017 - DNA, 5946 bp, Homo sapiens
tggcactgcgcctgtagtcccagctactccggggactgaggtgggaggattgctggaacccaggaggcggaggttgcagcgagccaaaatcatgctactgcactccagcctgggtgacagagcaagactctgtctcagttaaaaaaaaaaaaaaaaaaaaaagaagaggaagaagaagaagtaccctggttggaaagtaccaggtgatgcctgacactgagcgttaagcgctctgttttctttttaaaaaaaaatattattttttaaatttaaattttgagtgctgtttttctttaccaccagagggcaccaatcaggcaagtcaatctacatgccattatgaaacaatatgagaaagctctaggaagctgtttctagcattcattctttttaacaaatatgttttgagcacttaatatgtgccaaacattggagtagctggtgtagagttttggaatttatagtcttgagcacctactatgtgcttgagagaacagataggcatggggatagagggtagggttcaatttgtgattttgtgattactcattgtcttcctgtccttggccatgagtctcttgagaacaattacttagtgtctactttgtgtcagatggtgtgcctgttgctgaggattcaggcatgaataagacacagtggcagtctactaataaacaatgtcttactggctagaataaaaacacatgagctagttctgtggaattccagttcctgtgacctgagaataaacagccttgattataaaactcattaacgcattgagcttccaacctcccagcatagaggcatgcccgcagtggatgcttagtgagtttgtgagttgacatgagcccagggggccgcttctggtctgagtgccaggtatacgttccagtgggttagactagggcttcatcaccctccaggtcagggtggggctgtgatgagtttttgtgggtgaaatgctttgaagatgacctttctacctatttatctgctcaccgccttgctattaaaggtgtcaacatcatctttcacatttccgggtcagcaatcctcttgtccctaaattgactggtactggagggaaagacagaatgggacataaaccatcattttgataagaggggctgcattcactaggatactccctcttctctgaggggagctctaattccagtagagttcggtctcaagacctggacagtagcgttggcggctagaaaaggatgttttaaaacactgagacctcgtcttttacaggaaaaaaaaggccaaaaaaaaaggagggggggctgcttaagtgtggattgtgtagagtgactccattccaaagagtacagtatagaaaaggggaggaaggggcagagtaactttacagtagaaagacttgacacacttcctcagccagacaatcaaggtcaacatcaacattgctaagtcatgttgctatttgtgcccttaatatgatgtgatgaaatggcatttcacctctgtgatcttaccctcaaaaactcataatcccagtctaatcatgagaaaagcatcacaatcccaattgagggacagtctacaaaatacttgaccagtattcttcaaaactgttaaggtcatcagaacaaagtctaagaaactgccacagtcaagaggaatctacagaaacaggaaaactgaatgtagtctggtatcctggatgagatcctggaacagcaaaaggtcagtaggtaaaaattagggaagtatgagcttcagtcaacagtgatgtatcaatattagctcattaattgtaatacatgtactctactaatgtaatatgttaataaaagggggaactgggcgccaggtgtaggggaacttgactatcttttcaatttttctataaatctaaaactgtccttggctgggcacagtggctcacgccagtaatcccagcactttgggaggctgaggtggacggatcacctgaggtcaagggttggagaccagcctcgccaacatggtgaaatcccgtctctactaaaaatacaaaaattagctgggcatggctgtgcacacctgtggtcctgctacttgggagactgaggttagaggatggcttaagcccaggaggttactgctagagtgagctataatcactctactgtactccagcctgggcaacagagtaagaccctgtctcaataaaaggggtgggtagtggtggtatccagaatacagctatgccttaaagtttttttctttcaagtttctatgaatcattaaccatgtgccagtcactacgctaaatgctgtacatacatttaatcattacaattgcttgtgttgggtataattaatccccttttacagaagctgattaaacagccgggtgtggaggcatgcacctgtagtcctagctacttgggaggctgaggtgggagaatcgcttgaacctgggaggcggaggttgcagtgggccatgatcgcgccactgtgctacagcctgggtgacagagcaagaccctgtctcaaacaaaacaaaaccaaaaaacaaaaaactgatgatacagggagaagtaatggaactagggttggaaccaagatctgtctagttccgaaactgtgtgtgtagaactctcacaatattctggcttttctaggaaatgttttttaggcagttatcctaggacatgccttcctaggagaaaggagtactgtattctgaaccacggggggaccaaagactgtccccacatctcacttcggttatgattatctcgaaagtccctcagttccagggtggacattcaagccacaagcacctatagggaactttgacccctaagttcaaccacagtagtttattttacaaatggcgaaggcgaagggcagcctgagcacttgccccaaatcacaatgagaagggctagagacccagtttgttattgtctttttcctcacaacttcctctttgtagttaagaagggaagcagaagctgacctttttgtctcaccccgtttctcacgtggaactgccgcacccagggtgagtaacgtgccaaagggcacacttgcctgtgggctggcctgcgggaaggtctgttcccaccgaaaagacccacattgtcagcacatcctaatcaagtagctactaagtggagggaccgcagactgggtgtcacggggaggggcctgcagcgaccaggcccgtcccaggatggctgcggaggcccctggatccacagtggggagggccccgagagccgggagacctgggttcccttcccgggcacgcctttggaactgcggcgtccagccgcacaaccgtcactctggggccacggcaatccctgcgcccgcccttggtccccgctgcttctgggatctttatgggcgggggacacgcgccagcgtcacaaagcgccgcgaccgcgcgggagaccgagaggaggcgtggaaacgggaggaggaggaggtggtagtggaggagagccaggcacggtggggggaggggagggaggggcacgcgcacgcgcgtcgggccgccagccgctgagagccgcccagcacccggcgtgcgcccctcctccctctctccctccctccctccctccctgcttctcggctccgttgctcccgcggcgcgaggcgctctcgctctcctcctcctccgccgtcgcccctccccccgcgcagcccccgccgccaccgccgcgagacccccgcacgccgctctccccccaccctctcctgccccgcgcgccctccggcccctgcggcccccgaagagaacgagagggcgagcgagcgcggcgttcccgggccggcccggccccctcccttcaccatcgccggccctccgccgccttcctccgcttccacctcctctccccccccccaagttgaggccccctccgggggggggaggcccgggaccgggacccgtagcgaattctcctaactccctcgacctctcctctcgcccggcccgagtgtgaggagaagggcccggcccggcctgcgtcgtgtgtgaggaggaccccgggcgggcccacgggccgtgtggggcctggtctggcccgccgggtgtgtgaagaccggggcccggtgctgcccggccggagggcgagcggaggggaggggcctggtccggcccggccggtgcgtgaggactggggcccgggcccggcgccgccgccgccgccgccgccgcgatggcccagcagcagatgaccagctcgcagaaggccctgatgctcgagctgaaatccctgcaggaggaaccggtggagggcttccggatcaccctggtggacgagtccgacctctacaactgggaggtggccatcttcggaccccccaacaccctctacgaaggcggctacttcaaggtaccctcaccctcctcccggaccctgcttccgcggccgaggcctccggctccccgccgctttctgcagttcctgggaccaggagtatgagcacgggcgagtggagggggcttctcacccgtgcagccccctcccccatccctggaggcaggaaggccttgctcgccgagtgccttttctttgtcatgggggcgggggctcgggcgggggcgggagggcaggctgcaccgggaaatcggagagcctctctggttagggtagtgtctacgggcggaggaggccgcctttgtttcccccgctgagggtgggtggaaagagcggtggtctatctgtgctttttcgttctccggtcggaacccctccctgcgcaggctggaactgccccagagggcagggtgacctgcaccgactggattggacttttcttttttggggggtgggggtgggggtggggtgggggaggggcaccagcttgtcatttcagaagctgccgagtgccctgacattttgaggatttgttgggcatcttgggtagtggtagtgccaactttgcattccaatgggtggtggtgaagaatgggaccctaggggtggtaaaaaaaaaaaaaaaaaaaaaaagggtgcccgcgtcgtcttgtcattatccatttgggggaactttaaccctctttccgttcacattctctgcttacctcagtcactggttctttcaaaatgccctttgtcctcaccatgccaccaagtttgccaacctttttttctacaggtagaagtatccacaaagggtggaacgagtcatgtagggagactgatagcttcctactttcagagacaaaattgaaacctgctcaagtggttaactctagctaaaggggtggtctcacagatgacaagtatcatctgaggcgagatcgtttctctgggtgggatgtatggttccttagcgaccacagacattgtttctgttgttttatatggtcttagaacagtggttatcattccagaatctaatgatttttttttaactccaaggtagttaacttggagataatgagtgtttgttttgttttgtttttacttgagtgtttttgcagggaggaatcacagattgaaagtctgaatattttaaatgatgggggcagagagaggaaatgagtgcttaggaatccatttagttttatttttttattttcaaaattaagtaaaataggccagtgagtcaattttagtttggaagggaggggttatcttggcacaagttttaaatgagtatcttagtcatgtagttgtgatgtgtatttttaggactacccaattacttaactcttgttttctacccttctaaaggtggaaacctcagttttatgcttgaaattaggtcaactttgtaggaaatgggattgatacaggaatgtttaatattcactactgtatatagtcactgagtacctaggaaaagcacgtttttagaatattatgtaagtgcggtacccctaccaactgttaggcttcatcttttgtggtcagcctaccctatacttttcagatggaggtatttaaaattactaagaaaaca

SEQ ID NO: 52018 - DNA, 516 bp, Homo sapiens
cctcctccctcctctccatctcactaccattcactccgcaacccaccacaatctggctgactcctaccactgaaagccatgctcacggctccacgacccactgagccacacctcaataaccataatctagggctactctttggcatatgaggaaaattaaagctggcgcgccgactccagccctcctgcctggcttctcggcagtgcatgtttgcttccactcctgccctccaccatctagactcccttctccaacattgaccttcttgcaatctctgcgtctgagtcaggaaagaaggcacgaggaaagatcaaacagcaaattcctgggagcaaggtcaccacctgacactcctgccaatgacagataaggtctggagcaatgattcttcccaggcgctacaaacttagaaagcaagatgtccccagatggtgcccaggaaatcagaagctcgaaccagatcatgccatcaagacatttcagccaagcaactctagattatcagacactaaaaa

SEQ ID NO: 52019 - DNA, 454 bp, Homo sapiens
tcaaaaataaagaaagaaacaaacaaacactatcaacaaaaactgtcaacttctgttcacaaaccatcaactcctcaataaaatgcaaactgtttattccttccaatccctacacttggtcaaaccagccttggtattctcctaaatcgtccctgcctttttgccttcacgttccacaggcatgtttactcaaggacatactgcacattctctctttttttttttgagtgggggaaatcgcttgagcccaggtaggttaaggctgcagtgagcctgatcgcatcactgcattcctgagtgacagagtaagaccctgtctcaaacaaaatagaacaaagcaaaataacagcaaattctaataaaactaaactctgaatacaacatttaaagtgttttaacaatttaattgtaacttcaggaatttgatacttttttctttttttttttttgagac

SEQ ID NO: 52020 - DNA, 2333 bp, Homo sapiens
gacctgaaaaaaccctcaactagctgagcaccgtggtgcacactgtaatcccagatactcaggaggctgaggtgaaagaatcgcttaaacccaggagctggaggccagcctgggcaacatatggagaccatatctctaaaattaatagtaattttttaaaatctctcaactgttaggatacactggtgctgtagaaagacaataagcctaaatactggcaaaccatataccttccttgaatgtgaggtaaaaacaatatccaatagaagtggtagtaaatgactggattacatcaaacaggaaataacagtaataatgatgggatcaacccctaaagcgagcaagcattagagaccagagtggtgacagttgagatgcgtgggcaactaattagactaaaaactcaggggaaaatgtggaaaagccgagtgggaaagtgattcagaggcaaacaactgagttgtaatgcaccaatgaaagaataacattttgagtatgtattattaacagagagagctttgccgtttacaaagcgctcaaaaacctacattaaataatgaactgtgatataaccagactacaggaacggcgggtgtggaggaaaactgagtcccaattgagaccaatgccctacagaattgaaaagaagtagaactgaactgtgactccgggtaagccaggaaaggttagagagcgcataagttggggctataacagggccagtcccaagactagctacgggcgtgaaagcggaaaggtgatgagatgggaccgacagcgtggcggggaagctccagtctactggcaggcaccgaggtgggagagaaaaccacaccctccagggcagaaacccgaaaggggggaggggaggcacccctggggctgggtggggcccagccgacctggacgggggaaagtaggaagaagcacagggcaacgtgaggggaagaggaaggagggagcccgggcctggacgtagagggaccgtggacctggcgagtgaagctcggcccggtcctcacgggtgggcgccggggcagtctgcaggcggtggggtttcagacgagctgaacccagaattagaaagcacacgctgcagcgctcagggccctggaagagggaaggagagggagaggatggcaattaccgctgctgctctcggaggacccaagacccgctgccgccgccgccgctcgttacctgccaatgtgcctcttacaaagcggcggcggcggcacaggctgcccaacccgtcacgtgacctcgcgtcacgggcgaaggaggagccacaacacgtcgctcgtgcgcggcttcagagtcagcctaggcggcgcgcggcctcttccagccaccacctccaccccaaccccgcgaagccaaccgcgtggaggtggggaccacagaaaggaacaaataagggagacttgataatatgtattgtactcggagtcatcaggagagtattacccaccgcatacaaggtgcccacaactgcagctcgtcgtcgcgccgtgatgacctcacaaagcaccacaggttactcccctgtggccgccctgtgctcatcacgtgatgtggtccaaccactcagggcaagcctggcctcccaaatgttgcacgaggggaccacgactcccaacatgctgcacagccaaggcgacccctaccgcagcctttctccagcgggcttctagacgaaccccctagagaccttagagccgagggaaggccgggacggaaagcggactaagctggcttgaaggactaataccattggatgccgcccgccatgtggcggagcgtggtgcctgctgggaggtgtagtcctggcggggggtggggttccgctcccacgttcctgggctcgctctgcgccctgccccctgcgcgggaaaacgccaacggctagcagcgagagcctcggcaaggcggaaggtgcgcccacttttagtctttttcagtgcggttttacttttgccctcccaagccccttctgggtgaaaagactagaatctactgaacgcctactccaagtcagccgtttatttctgttatatcatataatcaactccttgagtccaggattttccctatttaaggatttaaaaaaagaaccttagagttgtttgttgaccgaagagacccaggttttctgtctttagaaaattaatgacctcctctcaataggatctgacctgttgtcaactccaagaattacgaataaataagatgatggtttataattgtagcatggtgttttaaagtattttccatttactggcctgtttggatgtgagggcgttctggctatcttgtcaccccatagatcgcca

SEQ ID NO: 52021 - DNA, 1297 bp, Homo sapiens
gagcgagactctgcctcaaaaaattaaaaaaaaaaaaaacaaggaagagagaagctggagtcttgggacctatgagcagatagtttagtggaagcctgggaggccctctcctccttctgtggagcaaaaagtcacctctccagggacctctttgacttgacagatccctttggctgtatcctgtctcctgctctccctacctctagaatcacctccctaccctaaagccaaaggagtctgaggcagagtcaagactctcagaagcaagttaaaccagttcctgcaggccctgacatgccctgctgaatagcccctgcagaaaattcctgtcctcagctgtagccacagctggctactgatggtaagaaagagacctgaggaggggagagatctcaaggaaaacacaagtcgacaccttccttcaaatacagatagagccaaactggacttttaggagctgagaccgtgcctgtggggcaaagctaacactcaagtcacctctttcttggtcagcatagtggctacttctgcctgaaaggacatctccaaagagcaccaatgcctgtttcttggggcctccatccaactgtgtcagctcagatcctagcagagctcccggtgttctctgagaagctgcctcccagcaatatctgagagcccaggtttcagtttcttcctccaggttgctcaggtcccctgagtcccggggaaaggccacacatggcttattcctcatgcaggcaatatggctgggtgtcttgcctcactgtggttatatagggtaggctacaaccagggggagtacagaggttaatggttcaggattgggtaaaggcctggctggaggcttgagggcttggagcttggtgtaaaagttacctccccctgtttctggtgcttcagagtcaaaattatttggcctgactttaagtgagggagttctgccatctctcctggactgtaagagctcagccgatgactcagggagccctaagaatgctttacagctgtgctctgtaaacaccgtcacgttttatgttgcagaagttcacagtcagccaagagatttagttacctgcctgcagtcaaaagctggttaatgattagaaacaggatttaactgggagcttcaacctcagatccagtgctctttctctaagctgcctcctacctaactcctccaatgctctatttatttatttcagataggatctggctctgtcatccaggctgaagtgcagtggtgcaatcatagctaactacagccccaaacttcttgtgctcaagcgatcctccc

SEQ ID NO: 52022 - DNA, 2220 bp, Homo sapiens
atctcaatccagaaagtcgtttaactcttccaacattaaaaagatgttgctcacagtcaaacttaccaatgtgaattacaagggctgaaagtcaagggaatgaatgcagaatagaacagactaaaaggtttactagacattttaggagtgaaagattgaaggaaatgagaggtagagtgattcccataccgacatgggctgcatctctacccagcccccttctccctctcagtctgtactcccactggagcacggaagatacagtccaaggagccagacctggctcccaggtcttccagggatgcatcatcaatgaccgttcctctgtcatcatgcccgcgctccaggcagttgcagaattcgaaaaatcaaccgccaacggggtagtaggcccccgggaaatcagaggccatatctatgtccaagaaggccttcccctccaaagggggcggcatagagatgatacctgggaactgttgtttcttttggggtccaaacgccgaaaggcccagctcagggttgggtatacatatagggagactacttccttcttccaggagggacgcaatcatcccagcttcctagggcccatggaaggtagagttcactctaccagagtttgtttccgattcccttaacttcggtttccccttcctccaaagccaagattctggtttcttttcaagccctatccacgaatgcaggcctcccgcggattatgtcccattcctgagttcccctttggctcctcaccgccctggcctatctgccctccagttaacgagggtccagtcctgaccctataggccctgaacccattcctgttttgcctctgactgcagaccctggaccccgattcccgtcgcaggatctgcggaccctaagcccatcttggttcctcagcctcaccacccaggtgccggcctctcaaccctcacctgcgggccctgagcgtcgctcccagctcccggcgaggcgggcgctttccgcttcctgctaactactttccgggccatagtgggcagcgccgccgcggccccgcagccacatggggcgggggaagcgaaggatagcaggacggcgggtcatatactgggccccggggccgcgcaccttagtgcgcccggcccggaaaatggcccggacccggagcggcagcagaaaaaagataggcggaaagaaaggaaagagagaggaaggacttgagccgggaaagggaaggggaagcgagaatgagcggctttccgacggcagagcctgcaaggacggcgagcggctagaaccaaaacaccccctcccccttgctcgcgcgccgtcacccttgcgcagccgcacttcggatagcgtcgccacggaaacaccgccggaacgagatgggcgggatctaggggttggaagatagttctctggtgtttcccggccgccgccaggccattttcaacggttgtttggctactgctggatggaagtggacgagctggggccaagggaatctggcttctggccgccgacctccgaccccagcccgcctatccgcaggcacccggaagtgaggaccaccagtgctgctgggggaaggaatcctccctagtgcaggccttaacccggttacctcccatctggcaccaaacgtttccctgaatctgtcacaaaccgtgccctggctccaagggctggacaggggggtgggggggtggggggcaggaaccgctcccaccctcgaggtgaagtccagtcaggaagtcagggcagtgtggccagactttcccaccactgagaacctgcccagcacaaccaacccaggccgccctacgagtctctggctaccctcttcccaccgctgggtagccctgaggctccattctccgctctgtctcctcctgatcctttctcctgtccgaaatgcttcagcccctcagtcagtttcagctcctcagtcaccttccccttacggtgcaacttcaccattccctttagatttccatgacctgccatctaaaccacatggtcttttgtgctttatgaagtagtcatcacgctgtaaacttatctgtagctgcctgcctcactcttggattcaggttgcgtctccattagggcaggtcgggaattctgaactacaggaaagagagtggtcatttttggcttgccagtccagttagagctggcattggcctccaaacaagggggcttcatcaggatcacccttgccaacatttt

SEQ ID NO: 52023 - DNA, 2989 bp, Homo sapiens
ccagcctgggcaacatggtgagaccccgtctctccatatatatatataaaataataaaaattatccgggcgtgttggcatgtggctatagtccaagctactcagaaggctgaggtgggaggatcacttgagcccgacaggtggaggttgcagggttgcagtgcgccaacatcgcgccactgcactccagcctaggcgacagagcgagaccctgtctcaaaaaaacaaaaaacaccccaaacagaaacaacaacaacaacaaaaacccccacagaaggcagtgaaggcttgggataggattacctggtttaaacccatagaatgtcagaattgaaggaagacttagaggtcacctttgtttttttttcttttgatacagagtcgcgttccgttgcccacctggagtgcagtggcgcgatcacggctaccgcagcctcgacctcccgggctcaagcgaccctcctgcctcggcctctcaaagtgctggagttacaggcgtgagccactgcgcccggcctagaagtcacctttcaacttagtcctctatacatgggaaaagtgaggtccagaaagggtatgagttgtaccaggtcgctgaccctgaacagaagctagatgtcttaattcccaaataggactcgctgctaactctttgggcataccttcgcgattcaaggctcttgggtttcccgctttggccgcctcgccaaacccaagtcttacactcttagtgaccccctcctttcctccttcccccttaggtcagcagggtttactcattccaattgcaatgctccatgttgccggagtagctcctcgctagaagagagattagttatgtcaccgtcggctcctcccattggtccgggcgtgtggagcgcggcgccatgacgtcagacgcccaaatgagtggggcggtgaggggaaggaggagggaagtaggacttcaacatggcggctgcggcactggcggtggctacggtgacggcctggcccggagcgggcagagttggaggtggtggcgttcgctctccctaggggctgtcgggagctcagcggggaccgagcctgggaggccggccggtgccagcacctttcggcttctgagacggcggcagcagcggcattcaggtgaggggggcctccctctgggggagggggaagaggggcggagttgggggaggggggctggtactgggagactgggaaacgggatggggggccgagcgaggtgaagggcgccggagctaggaggtgggagggaaaagtggccggagatccgcgattcggggaggattctgggagaagggtcggagtgaggggaccggagttgaaggggcggaggggaagtgggatgcggaaaaatgagttcggattaaggagactaataccctactggaagacaggcatagtagacatctatcgggctggactgagaactcggtgggaactagaggatgtcagggagggggacccagattttagtaaagaaggtgagtggtggggagttgagggtgagctggggacgtgcggtgtagatttagttctccctgaggcaatgagattggggagaaaaggtggagactagaccagaggtgagtgatctttggggatatctttggccttgtctggtcttctccaggtatgtttatccgccttttttgtttcttgggtggaggcttacctatacagtccacctgggcctcaggaaccgccccagtctttcttgtggaacgtcaggttcatttatttgagctatatcagtgatctttgacctttgttgccaaatgtaattgtttccagactagcgtcttaaaagtatggttgggcataaaaatacgttttatgttaaactgaaaaaaaaattgttacttttagtcaccatgcagtgttgcgaaaccagatttggtaatttagttaagtattacgtatattctgttctaactttactcgttagtgctttgtctcttcagttattagcatttgagaatttgaatagatatgatggatgttttcctttttaattttgtcagatttgatggtgggaaaaacaagatacttagtctttagtgatatatagttctttctagttaatgtcccaacctaaactaaaagtttccgtattggccgggcgctgtggctcacgtctgaaatcccagcactttgggaggccgaggcgggcggatcacgaggtcaagagttcaagaccagcctgaccaacatgttgaaaccctttctctactaaaaagccagccgggcgtggtggcaggcgcctgtaatcccagctactcgggtggccgaggcaggagaatggcttgaacctgggaggcggaggtagcagtgagcctagatcgctgcattgcactccagcctgggcaacagagcgagactccgactcaaaaaaaaaaaaaaagtttacgtattatggcaaagaatgtgaaatgtgtcaagtcttaaaagaattacattgtccgcattaacttactataagtgaaattttattaaatttttgtttctagttctattaattcatggtgtttattaaatagctactgtgtgttgcaataataagagtcattataattacagaaatgctaaacttaatgtttctttagtgagtgaccatcgctgtcattgcacagcagataactttactaacctgctagaacctcattggaaaaaaaacttttttttttttttgtttctttttatttttttccagagggagtctcggtctgttgcccaggctggagtgcagtggcgcgatcttggcttgctgcaacctccgcctcctgggttcaagtgactgtcctgcctcagcctcccgagtagctgagattatagacacccaccactacggctggctaatttttgtattttagtagagacggggtttcaccatgttggtcaggctggtctcgaacttctgacctcaaataatcctccggccttggtctccgaaagtgctgggattacaggcgtgagccacc

SEQ ID NO: 52024 - DNA, 2106 bp, Homo sapiens
cctccctagtagctgggattacaggcgcctgccaccacgcctgctaatttttgtatttttagtagagatggtgtttcaccttattcaccaggctggtctcgaacttcggacctcaggtgatctgcctgcctcggcctcccaaagtgctgggattacaggcatgagccactgcactcggccctgttaaaacactttacataatctcagttcttggccagacacagtggctcatgcctgtagtcccagcagtttgggaatcccaggcgggcggattgcttgagcccagaagttcaagaccagcctggacaacacagtgagacctgtctctacagaagtcacagaaaaattagctgggattggtggttcatgcctgtagtcccaggtacacgagaggctgaggtaggaggatcacctgagctcaggaagtcgaggctgcagtgagctgagatcatgcccctgcactccagcctgggcaacagagcaagatcctacctcaaaagaaataatctcgggcgggtgctgtgggtcatgcctgtaatcctggcacttggggaggcccaggcaggtggatcacctgaggtcaggatttcaagaccagtctggccaacacggtgaaaccccgtctctactaaaaagacaaaaattagctgggcgtggtggcaggtgcctgtaatcccagctactcaggaggctgaggcaggagaattgcttgaacctgggaggcggtggtggcagtaagcctagatcatgccactgcactccagcctggctgacagaacgcatctctgtctcaaaaaaagaaaaacaaacaaacaaacacattcagttctcacacttgaattaggtaggtaggttgtgttatgcgtgctttttatgtattgaggaaacaggatcacagaggttgtgtaacttaactaaggttacaactaggtagactgaatttgaactgaaatctgtccaacctcaatgcctatgctgcattcttttatgccattttgcccctcttaggtggtcacaggaccattccaattcctataaggtataagcactagttttaaagtaataccattgtgaactgcttgttctcattgaaataatagtgtaactggaatgataaatagttcattaaaattttagtcacattatgtcatcagaattctaggaggaaatgaatacctgattattttgtacttcacaaaataaactggataaactggataaatgactgaaagtttcttttttatattgctgagtcagattggatccggttcattaagggccaaaatttgtatttggcagtaatcctcatgtgttctcagaatgcttgattggtcattatcagttgcttaatgcttaccaaacacttccagtgttttgagtcactgaattggctcatggtaattgttaatcttgtggttactgagtcaagagccagcagtgtgtgttttggctgcttcacttcctcctcaacacttgatattgtcagattttaaattaattttttttttctaatctggtgggtttgaaattgtatctatagtgttttttatcagcatttcctgaagctgggcatcttttcatgtattttcgttggtcatttgtgcttctgcgaagtgtatattcaatttcgttgcctatttttttggtcttttctctttttctgatttatttttaagagttctttatatattctggatactaattatttgttaatttataggttgcaaatatcctttcccaatttgtgacttgtcttttcatctcttcatagtcttctggtgagaaaagctcctaattgtaatgaactgaatttttcagtctttcatggtttgtgttttgtgtttttttttattttttattttttattttttgagatggagtttcgctcttgttgcccatgcgggagtgcaatggcgtgatcttggctcactgcagcctccgcctcctgggttcaagcaattctcctgtctcagcctcccgagtagctgggattacaggtgcctgccaccacgcccagctaatttctgtatttttagtagagacagggtttcatcatattggtcaggctggtcttgaactcctgacctcaggtgatccacccgcctg

SEQ ID NO: 52025 - DNA, 859 bp, Homo sapiens
cccgtttcttgtttttttttttttttttgagatggagtcccgctctgtcgcccatgctggagtgcagtggtgccatctctgctcactgcaacctctgcctcctcaagcaattgctcaagcaattctcctgtctcagccccctgagtagctgggattataggtgcgcaccaccatgcctggctaatttttgtatttttagtagagacagggtttcgccatgttggccaggctggttttgaactcttgacctcaggtgatccacctgcgtctgcgtcccaaagttctgggattacaggcatgagccaccgcgcctggccttgtttctacaaaaaattaaaaattagccaggtgtggtggagcttctctatagtcctagctgctcaggagcctgggacaggaggattgcttaagcctgggagttcaaggttatagtgagctatgatcacatatgcattaggttgtttggtattgttccagatatctcttaacactgttcaattttttttttccctttttctctctttgtatttcagtttggctaatttcttttgacctaacttcaagtcccaagtctttcttatgctgattattgtcttcggattagcatagcctggtttatgaaccatcaaaatttttcttttctgataatgcatttttcacttgtggcatttccatttgtctctttatatttccatctctctgctgaagttcccatctgctcacacatgtttagtttttccattagaccctttaacatatttattattgttattttaaagctccctgtctgatgtttacaatatcttggctctccctgaatttgggtctgatgactggttcctctcttaattctggatca

SEQ ID NO: 52026 - DNA, 1191 bp, Homo sapiens
cccaaagcccgcaacctaacagtcccgtcaacccgggagccaccggcggcggccaggccgcatctccatggcaacgccgccaagcgccagttcgaacgcccgcgctgtggcccgcgcgtcgccagtcccgcaccgcccaccaatgggcatccaaggaatcggttgacgttcgttgacttctcctctggaagaccaatcagaggtctgaagaaaccgtgggcgtaactctcaatttccgaccttcagccaatcgttccgcttgagggaagatctcgcgacgtttcagtgtgagacgcgcacctttgaggcgggtcgaagatccttctgccgaattctattgatgggcccaagcgtaaccaggctcttctgattggccggtgtacttcagtttccgtccaaggtccgcctcctacctccttctgcttcgggtgagtacccttaagggcccacttgattttagttctcagtggaggaaatgagccttggagcgatgggaatctgcctctggcaaacctctggtcgctgcagggcccgagagggatgcgccctcctctaagttggcagtgaggtgtgggcaggccaggtcccatccgctctcaggacctcagttttcctgtctgcaccgggagaagggaggttccctgactctgagccttgcttgtccccgtcggagtggggatagggtgggtcgtccaaatcccagaggcgggagaggtccaggtttagggcccagaggcccaggcgccgaaccttcccctccctgggcctcagtttcacttgttgctacccattaaaccccgcctgctttccaaaagagattttatgttttctaattgcttcagttattgaatggataatatcgtggcagttatagcagaagtaaagaaagtcgaacaagagccccaccgccttaaacaaacaaacaaaaaagggacagcgtaaacaatgcaggccgggtgcggtggctcacgcctgtaatcccagcattttgggaggccaaggcgggcggatcacgaggtcaggagatcgagaccatcctggctaacacggtgaaaccccgtctctactaaacaaaatacaaaagttagccaggcgtcgtggcgggcacgtatagtccctgctactcgggaggctgaggcaggagaatggcatgaacccaggaggcggagcttgcagtgagcggaggtcgcg

SEQ ID NO: 52027 - DNA, 1011 bp, Homo sapiens
aatccagctttgggaactttggaagatttcctcctccttttcttcctcttttctcctaactaggccatgtggaaccaggagaggatgacttggaaacagccctgagggagacccaagaggaagcaggcatagaagcaggccagctgaccattattgaggggttcaaaagggaactcaattatgtggccaggaacaagcctaaaacagtcatttactggctggcggaggtgaaggactatgacgtggagatccgcctctcccatgagcaccaagcctaccgctggctggggctggaggaggcctgccagttggctcagttcaaggagatgaaggcagcgctccaagaaggacaccagtttctttgctccatagaggcctgagctgactggagcagagtcatttgcttcagcaggatccttgtgggccttctaagatgaagccaccctcaggtccagggaaggttgtgctggtatttggctcatgacagccaagagcagatttgtgaaatcggctcaactcccaggtgagagcaagcaaaaatcttggctgggtggaaaggaaggcaaaagagtaaaaattaaaaaggccaggcccagtaagtgtaccttgtactttataaataaacctcaagcagctcaaggttgtccttctaacctgttgtgtttatttcttggactcttggcattggtggagagaagaaagctgaagtgaatcagagttctgaccttaaccagagggaactctgtgtccatacagtatccccagagaacttaagagctagggatccaaatggaagagacccagcactggcaggatggctctctcgcctctggaatgccaagcacacccaccccacccccaccaggggccctgagactttgtgacccatagtcaggatttccaagtgagtgggactggagtgcaggaattgggtctgtcctactcactaatatatctttcaccagcagcaggcacatatgttgtaagtactcagtaaatattaccttaaat

SEQ ID NO: 52028 - DNA, 602 bp, Homo sapiens
aatataaaaattagccgggtgtggtggtgggcacctgtaatcccagctactcaggaggctgaggcaggagaattgcttgaacccaggaggtggatgttgcagtgagccgagattgcgccactgcactccaatctgggtgataagagcgaactctgtctcaaaaaaaaaaaaaaaggaaaagaaaaagagactttggtccctctatggaaaaaaataaaacaaacactgatttgacatgggcagaaaatgtttaaaggctagccaagtgctttgtgagccaatgtaatttttaacagagcttatgcttcataagactgggagataggaaaggcagtggggggggcggggtgggggctggcaaagagaaagtaaaatctgtccccagtttgaagaggacattcaggtcacagttattccttacagctagaaccagaattctctgtttctatgttcattctggcaggctttaaaaaaatgaaatatattggccgggcgcagtggctcatgcctgaaatctgagcactttgggaggccgaggcagatggatcacgaggacaggagttcgagatcagcctgaccaacaggtgaaaccccgtctctac

SEQ ID NO: 52029 - DNA, 2832 bp, Homo sapiens
gtcaaggctgcagtgagccaagattgtgccactgcactccagcctaggtgacaaagtgagaccctatctcaaaaaaaaaaaaaaaatacagatatgactacagggaaacacaggctcaggggaagaggtgtgtcctactctgccactcaaggccactgaccgttcctgtcccaggcttcagagcagagtccaacaaagaaatagcaccacccaggtgcacacacgggcatacacacagccagccagttggttgcccaactgctccagctcgggggaagaagagaaggagactagcaaacagtaattagcctcctcccagatgccagtgtctgtctctaagtccccagggacttccaaggagatgccggaaatactcaggtttttcacctcccccatgcaagaatgcaaggtgtggagcagaatttgatcctaaatgtcaatacacagctcctcccataggcacttcccacacggtgctagctcagggcctcattctcagtgccctctgcccccagctgcctaagcttgtcagccctagctggtctggaacagactcttattccctttctctcagtctacaatgacttagctttcctccccattcctatatagatacagcttagaaaacacctcctggaaaatgcagccagtggcctttaggtgatgccctcaagctgagcagaacccaaagaaggctttaggtggctcagatcacacctgtgagtttatattcattcattcaagataaccaaagccctattctgggcaccaaggaaataaggagagagagggtcagtatctgaagaggagagagacttcctcatcctcaaaactttcatatgaagtcagcctatctcatgagccctggaggcaggaagaggccaccaaggtggattcaaaagccctttccgacagttatgttttgagaatcttaattttctgggatctgaagttctttgatgaaagacagaagcccacaggcctgggcacccacccaccccaggcaccatgatagtgtcccaaatgtcaccacagcatccagttctatcaacaatgtggaacagcagacatagctgcagtgtccattttacaggtgaggaaacgtggcccaaacagaaaaaggaacttgtctgaagttagccaggtatcaaggctgcctggatctaaaatcccagcccagctctccacagtgtaagttttaggagatgggagataatgatctgacctggctgcctgaatgcagtagcagaaaggagccctggggctgagctggtgggaccagcttccatcagatggacatggcatggtgaggcctgtctttccaagggctggtgctgctgcttgctccacgcggaccacgaagaccacgagggcagcaaagagggcaattttaatggcatctggtaccggggctttgggggaggaagtctgtggttccggtgttaacagtggtgccagagacctctgtaatctgccgcctccgccaggtggagtctgggctctgcccctgctgagcctctccccaccggacactcaacctcagccttggctgccacagctagtctggtctgagggggagggccccgcccgactcaactgaggggaggccattccaagtagaatcgttagttggacacagttcccggggggatggaaatgtcaaaggcaactcgatccggcccatctccctctcctgccaggcgacggtatccgcggggatcgagtgactgcctacatagcctggaatactccacagccgccctccctaccccgccctgaaggctatactgtccgaaggggccgaccgaggtcaagggacctgtcgccccgcgggaatcgcggccgtgggatgggcccaggtgttcaggctcgctccacccattcatcggtgggagcgaaagttcaggaatcgtgctccttcagcagccccccgccccccacagccctcccgctgggctcacccattgcagttacagcccggcagaagcgggggtgaaagagcttcccgccgatcccctgcgcttgaaccagagtgaagctgccgccgcgccgcgcggggctctgtctggcagggcacagcccctcctcgggtcccgccctggggttcctcggccacgccccagtcatccagtctcgtctcgggcctcagagtccagccctgcccttgacgttcgacccctcctcccaggttatcaggcggatctgtggccccgcccctcagccccaccttcctcccaccgctctgtgctctgcccctggcatttcaggcttgctcagtcctgcgccccgcggctccgactcccgccggcgggcccgcccctcctgggccactgctaacccgcaagcgggcggggctcggccccaggcctgctgggacatgtagttctgcagaaaggagcagctgcggaaggttggggttcttgcacctctaggctaggtttggaatgaggatgagagggagagagctgcagggtaaaggagcagagctggccattggaattccttccttcccggtttggacaggtggaggccatatcggtataacgctctcacaagccctcagctttccatacggaaaagtggtggcggaattccgcgagtatctcagctcccaatgcaggtgcttccaatcgagggccccacggagggagctgtagttccaacccgccgcgagtccaagctgtcggttcccaccggaccaaaccagcggtgtccgaggtcagggactgagaagaccggtttctgctcggtgttttgcaacgtcacccgcctcccagaccgctacccccagactagttatttatagggtccagcccctcctcctaagttaca

SEQ ID NO: 52030 - DNA, 790 bp, Homo sapiens
ccagagccattctggtaaagtggtcaccatttcccggctcacgtagcccccaggaatgaccgcacccactaccgacggtgacgggggaccagcaagagaggacatttttctgagaacgcagggcactccacaggctagaacctgcgtctctagggccaggagtccaggaaagggggcagggccaaggagatgggggaagaggatgcgactgatgtgcggggtttcttcctcaaaaaccctctgacgggacctccagagcatatagagaggccaggttgaccttgagcccagtttgagagggacaggggtcggggacttggagtaaccttcgtgctggttctcccgcctcagttgttagttcaggccttggagcccgagggcgggacacggcagggcctcgagagcgtgcagcgcggggctagagcaggctgggggcctgcacggaagctggccgggctggaagggggcggggttctggggcggggcttgtgtggggtggagcccggctgaggcgggcggagccctgcgaaccttacagtcggttgctcccggcaccaaggccgcaggcggcggtcggtgcagggcgccccgctggcgtagtagtccatcccgcgcagacagtagtggcggcccgagcaagcactttcgtaaccatggaagggcaggcggccgggcagcgggtccacgcacccgcatcggggcgtgatccgcggcagctgctggttccgcgacagtgagttcagcatgttcaccatcacttcgcgctctgctcccgcgggtccccagcgca

SEQ ID NO: 52031 - DNA, 825 bp, Homo sapiens
agaagccactgaaggttatggtgtgggaggtgcaggatggggctacaaagtaaggggcagaaggctgggggagcccatttggctacgctgcctgagtggtgctcctgactcctttgccaaggtctgagttctccaaggttccaaagcctaccagcttcatggagctggccatcaggtgacccagtccactgcctggtatgtgacaactgttaccagaagtagcttcctgggtcttggaggagtcccatctactcttccctactcatctcaagtaaaggccagatctaggaaaaggaactgttaggtggagagggacactagggaaaatgactcataaaatagccaaatgctccagagggtaaggatgggaaggacctttacagctactgtgactcacttggaaatttcccctgacctcatgtctctgaatctctgtcttctactctttgaccctctttctttgccagtgctcagctgattccagctttttcccagcttctttccagcaggtggcagctgccattaccactccaggcctctagggggtgcaatttgccttaaagttcctggtggtactaggtgcaactgggacaatgctgtgaattttcatgaggagctttgatggtaatgtaatggggagaaaaaaagatgttattttaaaagcatgctgaaattgtttgaaatagtgggaaaaaagcaaacaataaactggcaaaaccaaactaaagactactatacaaccatttaaaagaatgaagtcacaatatgatgacattggaaggagctccaagatttaggtggtggaagagggaaggccaagtttca

SEQ ID NO: 52032 - DNA, 1286 bp, Homo sapiens
gcaaggacttcaggcacgtaggcctaagatgatgggggctcttcccaaccagtgcgcacaggcagctccagcgcgaccccacttcctctcccgtcggttcccgagcactctcatctgcaccccgattccccatctggtcgccgcgcactctccttcccggtttagatgcccccagcctggtctgcctgcgctccccaccggagaacggaattcccaggttctgcaccaaccaccttcccccactgggtccctcgccccggcccagcgttcctgtccgtatatccagcggacaggcgggcaagcccctcctcttctaaaagctgattcccaatctctcttagcctgacggctcccccgccctaagcatcacaggcctctaggactaaacgcctccccacctcccatcccagacccctgggcctgccgccggcggtgccccatggcagttccctcgccagtccctgctatgggcctccactagcggtgtgcacctttgtgccccctccgttccatccgacggtgccctgcttccaccgacggtgccctccgcccttacaggtccctttgctctcatccagcatattctcccacggttttcttgtcctgcaagtccccgtcccccggcaatacgttttcagggatctctttgccccatccgatggcgcccctccgcacgatccccccggcctgattccctccctccccctcaagcgacgccccctccggccttggcctgcccgccgcccgccccctcaccagcggctgcatctccgagtgcgcggtgggcacctggaaccggtcgatctcctccatcatggtgccggcgggcgagcgggccaggggccgggcgcggccgcggacgccgacaggaccgcgcggggcggcggccccaggagcccggcgggtggtgcagactaggcctccccggaccactcgggcgggcaggggccgggcggatgcaggggtgggcgggggcgagaggttcgcagactggctgaggccggcgtgactccgtgggcttgcctagcactaccgcggctgtggccgggccgagccgcaggtcttgcctcgcctcctactccgctgccgcctcctgtcagcagctcagccactgcggtgactcggcaactccacttccgggtccgggacaccgcccggatcttgcattattcatgaggaggcggtgcctggggaccccagccccacccacatgcgggagttccgaatgcgcgcggccgcccagctgtgattcctgagggggcggggcttagtggagactcgctcgc

SEQ ID NO: 52033 - DNA, 884 bp, Homo sapiens
taactttcgactcccctgacattactaatagcccactgttgacgagaagccttattaataacataaacaattgatttgcacatattttttatgttatatatattatatactgtattcttaaagctagagaaaagaaaatattaagaaaatgataaggaagaaataatttattaatatttactattcattaagtggaagtggatcatcataaaggtcttcatcctcgtcttcatgttgaggaggctgaggaggaggaggaaaaggaggggttggtcttgctgcctcaggggtggcagaggcagaagagggagaggaaggcaggagaggcaggcactcttggtgtaacttttattgattttacttaatctgtgaataagtggacctgcacagttcaaactcgtgttgttcaaaggtcaactgtatttacagtgttttgcaacgaaaattcccacagtgtcatcttcgctgaaattgaattaaggttaattcctacgtggaattaatgtccccaccagttctttaccatgaatttcccttcctcagctcctgaccttgactaatctcttggctgaatggattttgtcttttctggaaaggttcatgagtacaccatcccccaaatttatgattgagatcacccactctgttggttacggtttagggtgacactttttcccctcagaactctgtagatattgcttcattgtcttcacttgtcaaatgctaccttggagaaatctgagaccagactgaatatccccccttgtaaataaatgacttgcttcttctgtctaggtgccttaagtattcttactttagccccaaagtttggtaactaaaccaatgtatcttttttcttttttagacggaagggtctcactatg

SEQ ID NO: 52034 - DNA, 1037 bp, Homo sapiens
acctccatgcttctggatcccatttgcttttacctgctcaggaacctcatgctgtgagttatccacaatctcctgcatccttcatctctttccctactggcttcttcgtctgtcagcctataaacatgctcaagtctctgctagtatattaaaaactacaacaacaacaacaacaaaaacaaaatccaacactctctgtactccacattcctctcctgctatctatcacccctttctacccattcacaatccaatttcttgaaagagctgtctctacttccttaccttttgtgccaagacgtgaccttatggtggcagaagccacattgcagtgaattaaggagaaagtggacagaactagacacaactcttgtgctctcttgtaaagctggtcagcctttctgactccaaagggctcatgcctctggtcccctccctgccattcctcctgtaggccccagctgggccccgtagagaccaaagatggagagaaaatgcccctcctgggactccagagctcgcaatgccaccttcagcacagatcaccataattattatatgtgatccctccaccctggccatcagcagatgggatgagatcatcagccaaaggtcaatagtctgcaaggtggcctggcctcaaagctctggagttccaatgatactcagagaactgctgatggcagaagacacacaagtgaagatgttcagagaaaaagcggtatgcagaagctgagagggaacaaaattcctgaattagctgcaaggagaatgggggaagtcagtcagttgctggcagcaagacacctgagtcactgccactgcagccataattgcctttaggagtgttttagatgcttcacgaccctgtgcatttgagagacctgctcggcagccactgaggttttctctcctaatctcctctgaatccccatcacctacccctcccccagggtcctccacatcactcagagctaacctatctttgaaagcaaaggatgcagtatttacagttttgaaaactgcctgctggccct

SEQ ID NO: 52035 - DNA, 2238 bp, Homo sapiens
cccgccgcttgacaatctcagcgcagctgacagcctttcctgcagccctgccagaacctgagaacactacatgccgagcactgccgccctccaaccgacccagagccaaccccagcaggttgcgaattttgctgccatctcggacccgcatctcaagggtatcaggaggtagctggggcattggggaaggcgctgggagctctacagagccagctttccggtagtgctccatcctgcttgctgtcttgtctgtgactctcgctgcccactgcagggaagcatcaggtaagtgctaagcaatgtgccccaagtcactgtccaccatcccctatctccatccaggatatggccctgctccccgttccagacttcccagaaacaggatcatgtccccttgtccttagcatctcgtgacaaggtccatgcctgccgcagtctgggaaagggctgtaccccatacaccccgttcctctacaagggccataacacccccacctccaatcctggagtccaagaggcaggatcacattccccaaacactgagctctttgggaaagtgccaggccccctcatcctaaactctccaggactggggcttagccccccttatcctgggctccttggaacagggcctggaaccctcaccccagactaataccaatagagagcgctcctcacttggggctctacaaggacagggacaaggcccttcgccccaggccccccgggaaacagccaagaacccttatccagtgctgcccccaaacagaacggatcccctctcccagagattaccaaggtcaatctatatcaacccaggtcactcagaaactcgggggcagaggctcgactcggagggctgctcaggacattccaagacagccttggccgtttccatagccacggtctcttccagggtcttgccggccgctgcagccaagccacaggcgtcccccaaccctacgagcgcccctctgcccgcccggttccggctctcaccgaagccgcctcacgcacgatccggagccaagatggcgcgcgggcccggagcgcactaaggccgcggggccgcgcacgccccgagggggcggggcgtgaggggcggggcgtgagggacgggccccgaggcatctccgccgcggaaacaacccgctggccagagcgccccggaccagtcccagcggggatgggaacacgagcgcagcctccgctgttacgccccggagggaggcaggacagttccctgcggtagaaaggagcggccgtcggggaagtcctgcgtctgaaggagggggatctggcccttagaagatgggagggctggcgttagctgttgagcaaacggggagctgtgggtttcaccgtgggtgcgaacaaaggcttcagtttgtagtggctgctgttgcatgggcgagagccttagttaccgacttctgagcttcgacctcatcctgtgggcgctggcggaccacgggggttttccgggttttccaggggccagtcgaaccagatcttgtgcagggagccgaggagggagtggtggggaaatcgggccacagcccctgacgacacctgccgcggagtctgggggctgagggggcgggggtgcccacggagcctagtatggtgcctggcgtatgaccggcgctcaatatttgttaaatgatttgttacattaatgaaccagagaaatcgcggtgggaatggaaaaaagattaagttgggagatactagtaggttcagtgacgagttggccactgtttggacggagaagtaggaaattccgatctagggtgactcccaggtttcagatcggtttggacacgctgaatttgaggtgccggagaggtcgcaaaggcggggcggccaatgggccgttggaaaaagggtctggagccagagcactccctgagaccacaagggggcagcaaacatttggtggactacggtgccaatctgtttctcaacatgcttgccccagcgcccctacttcccaacttcccctccccaggaccaaaacttcctgcatccaaacctcttaggctgcccttctcggctcgtggcagcaggtaggctcccaagagagaaatttaaaggcctttgcacatgctgctcccttggctctgaaagtccctggatatcacttaccaggtcccttcagtcccttttttcttctgtgtccacctgataggactgcccttttcctttactgtctatcctgctagcccgtgcagggca

SEQ ID NO: 52036 - DNA, 1275 bp, Homo sapiens
gcctgtattatgaaaattttgaaacatagacaagtgaatagtataatgaacctctggtactcatcataggtttgtttcaacagtgaccggcacttcgcccatgttcacacacattctccacctatgtgtgcctgactgccacatctgtatctccagaccccctcagcccactgctttgcgccctccccctaactattcccaagacgctgaaatgctgttccttatttgggggttctgagtggcaggcctctcagaatttctgctctgaacagcctggaccccactcctcccgggaatcctcatacttcctatttcttcctgtgcccaaggggaccacttaccaaacagagggacactgtgaggtgatgccaagtgtgtaagtgaacagcaggtgtctgtaggggtgacacttggcataggtatgaaactgtggcaccagagactgtcttctgacctcacacccccagaaggcaggaatccaaacacgacctttgtctcctccctcctcccttgtcctctcccaatcagtccactcctctcagcctcagcttgctctggctcaaaccaccggctcttctgaccatggtgggtctgaccatggtgggtgcctcctccctgctctccctgcctccagccgccacccttctctgcacccttctgtgcccagcttctactgcagcactaagtcctggttctctatggcccattcctggccacgctgaggctcaccccattcattcctttggctgccccagtgtcctccacctcagatttcagacctctgagcccatcagaaccccccagcctccagaagctccagtgatccaatcactgtcggtactgatgcctcctcccccatggctttgtttggtgtgagtatcctggggcagagccaagcctcctcctctgcccaaccctccctgatgctgggaggggagaatcagtgaatgtgccaggcagacagacatgccctggaagtctactggaagactggagagcagagggtagcaatccacagaacccttgtgccctgcttgctcccttttccccaccacagcttcccctggctgctcagaggaggtccatggacaaaggtaggtggccagagtcttcctagaaaggtaggaattggcttggggaaattccagttctgagtgtttggagatcgctttgtagggtttgggttgaatggtaaggggctgggcagtcactcccccagctcccaaatcaatcaagcaaagttaatccacttttggggtctgggccaggagggct

SEQ ID NO: 52037 - DNA, 2212 bp, Homo sapiens
agtgagccgagatcgcgccactgcacgccagcctgggcgactgagcaagactccatctcaaaaaacaaacaaataaaaagataactgtctgtcttgtcttttggggtattgagagcatttctgattacccattgtctccccaacagttgttggaatactgtctgggcaaaattgtgcctgggcagataaaaatcagacatgtttaataggaagttgttatgttttgtttccccttgacagaggaaagcaagagtccctcagctctgccccaaccaatcacctgtggcttatgggagggtggaggaagggaaccatgaggagggcccccccaacacactccttttccatgccatgctccccgcaattgtgggcaccccccgcgtgaagggacccacttctctgacagagccttcttacccacctgggtagaagacctcacttttggtggtgccctctctccactggtggaaggtgccagagatgatggtatccgagatctcagcccagtagcgccctgagtgacaatcgcacatgacactatcagggtattcgcgccattgcatggcccagccaaacatcagaaaggagggcatgggcccctttacaaccccagcctcccagtctggcccgccgctagcactgacccgagtggccgcgggagcccaaggcggtgccgaagagcagcacatactcggacagcgaggcgtgcagaaggcacatggcgcccatccagccacccgcattcacgaacacccactgcagctcctcgtcgggcagcacgtggcctgggtgcagccgccgcagctccacgatcagacgagagaaggccagctcgtggtccagccctggcggaggcagaggggcggcggagtcagggctggcaccggtcctaggtccggggatggcgccttcggaaccctaggctccgctcccaggccggccgctcccctccctgccctctgcccgctcaccagcgtactgccgcgccaactgcgctatctcttcgcgctggaagacgaagctctgcgtacccagccagagccagacgacctgggtcagcaccgctgcgacagccaggagcagcgcggcccacgcccaccgccggcccacggcccactgcatcccggcgggcggcctggcacggcgcagctcaggagggagccggggcctgaggctttgcgctcacggcctcggagcccgccggctgcccacgaagcgctcccccgccaccgccgtggtacggctcgccctgaccaatcggagcggcccgggcaccttggcaccgcccttcggttgaaccatttcctcggggggagcacggaggagtggggcggtgccgcgcaagggaggcaagggggcggggccaagtcgcccagcggcagatgtcagggtcttcaggcgaggtctgacctagctagcgccactctacatacggataggtgtggggatagtgagacccagaatggacgggctcgcccgagctcactggctggtgaagcagacgagcccggaagtgaagccttctgggactcaacgattgttaaggcccgcctttaccaggactgaagcggagaggaggcagttcaagctgggagccccagggtgggcattccagaggcggtgacacctgagcagtgtctttaagagctcgcagaaggggcatgccagcccacagggaccagcccctagagcaaaggcctccgaggagagacagcttggggtcttcaggggcctacaattccttctctgttctgcggcacaaaatgtgagaggaggccttgtaaaccagctgagggttatcagcaagggaggaaggggattagattttgccaccgagtggcacaggactgtcgagtggaggggagcaagatgagtcagggagaccatgactgtgggccaggtaagagggaaggtctgtgtcagtggagatggaagaaagaaatgagcttaacaactctggaaatggagttggcagggcttgatctcttcttcctggaatactctttccccctttatcctatccccactttccccttatttggctaacatcctttgcatgtctagtgggcagttgagtgtccaggtctcgaagctcagctccagtctggagatagagctgggagttgtcattcattcagatactttgttggcacttgtatgtgccaagttctgtggtggccattagggatatggctagaaacaatggtcctac

SEQ ID NO: 52038 - DNA, 641 bp, Homo sapiens
caccgcgcccggcctatttttattttttgagaccggatcttgctctgttacctaggctggagttcagtggcacgatcacagctcattgcagccttgacctcttgggctcaagggatcatcctgccttggcctcccaaagtgctggaattacaggtatgaaccatcatgcccagccacaagcaagtttttaaaggcaaaagaggacaaggagtgggctgacacaaaattgtttaacaggaattctcattggcttacagaaacaacattgattagtgattggctataccttgttgaactatagggtatgagttatggtgtctagactatggcattttatggctatgtggtatcaatttagagcccacatagcaagtggcttcaaggggtaattatttggctccatgggggtgggggaaggtgagatatgactgctgttacatgctgtcacttttttttttttttttttttgagactgagtcatactctgtcgcccaggctggagtgcagtggcgcaatctcggctcactgcaacctccgcctcccgggttgaagcgattctcctgcctccgccacccaagtagctggaattacaggcacctgccactatgctcagctttttgtatttttagtagtgacagggt

SEQ ID NO: 52039 - DNA, 962 bp, Homo sapiens
tgtctatggagtggccatttttttattccttcactttcctgataaacttgctttcacttcacactatggactcaccttgaattctttcttgtgtgagatccaagaatcctctcttggggtctggattgggatctctttactgtaacaacacctctgggatctggcagggagggagctggttaggcccatcttagtcattctcctcttcctccaaaaaatgaccttggggagtcatagaggagaattatggagatgttcctgaagagatgttcctgatgggggtcaggatttaattagcatgattcagggggcggcactgaagcactggtgttcttgggaaaatggagctgtctacaagctctagtcactcaaacaaatataaatgagagaatggaaaagcagatctcctgttcctgtctcacctctttgggtaatatgaacagccagtgggacaggtaaaacccctgtttctcagtcctcagctccctgccccctacctctgaaggtagcctcttcctattccagtctgaggaccctagggcagagatcaagtaaatgacccatgacctagtttttgcagctcaattgcaaaacacctggcttggcttggtcttgattgggggaagggatgtccctgctatggctcaacttctaactcactgggtctctgtcctgcattccactgaagcctcagaggcatctcacagcactgggaaaagccttggaaacttgcattcaaatctcagcttggccactaattctctgggtgaccttgagtcctctgggctccaatgtgaaatggggaagaggtttagacaatatttagatggctctttaaaagtactgggggccagctgtttgggaggctgaggcaggaggatcacttgaagtcaggagttcaagaccagcctggccaacatgtgaaaccccgtctctactaaaaatacataaattagcccagt

SEQ ID NO: 52040 - DNA, 2294 bp, Homo sapiens
gagagagagagaggaaggagagcaagagtgagagaaaaagagaatatggttacttagccctttttcccaaatctgtttttgcttttggggataggatatggttatggtgaagtactccacacagaccccaccaagtttgcctctcctgcgctacagccactgagcaggtgactgaggcgctgttgatccagggtcatatccttactcgccctagaatgtaagctcaggcagggcagaggccatgcctgacatgtgcatcccaatgctttacacagcctaggtgcctagcacatgctagatgcttggtaaatatttgctgaatgaaagatcaaatgaatgattgcagcaagcaagtcctgtaggcatcctggagcccaaggattctgcagtaggcagctttcacagaggttcttccagtgtagtggctctagctctgggtgaagtaggatcatcaatgtcggcccccagggttcacagctgttctgagccccgcccccaggtggcagggcagcccagtcagtcagtcacgtgctggcggctggccaatcatcgggggcggcgcggggaggggtggtgtggacggagaaagtgaaaggtgaggcacggccctgcagattttccagcggatcccccggtggcctcatgtcgcgcagtggaaccgatcctcagcaacgccagcaggcgtcagaggcggacgccgcagcagcaaccttccgggcaaacggtaactgcaccgcggcagggactcgctggggcgcggagccgagccctccccttccttaggaagctttcgtcccctccgaaggttggaacgctcatcccgagccagaccgacaaggcgtacagtctgcaggcctgtacgagcagcaggccaattggcgctgggaaagtccaatcctgggcctctagctcctgagcgggacagggccgagagggcgctcccgagcttgggcctgctggtgggtgagacccaggagagagggagctagagagctctgaggactgatcttgactgtctgcccccagaccatcagcatatccgctacaacccgctgcaggatgagtgggtgctggtgtcagctcaccgcatgaagcggccctggcagggtcaagtggagccccagcttctgaagacagtgccccgccatgaccctctcaaccctctgtgtcctggggccatccgagccaacggagaggtaagcctgtagagccctgcatctgcaggctgggccacggggagtagttccctcttagaactgtcctccacccacagggatagtgaacctccttctgggtcatatcccaccaagctttttggtcccctagggtgggccttccctactcccttgtagcctgtccagtctttgaagcccaccaggtaactggtggtatggggcagtgagtgcttctagcctatccttgtcggtaggtgaatccccagtacgatagcaccttcctgtttgacaacgacttcccagctctgcagcctgatgcccccagtccaggtaacctggctccaactgctgctggggaggagggtggctagacctcttgagggacttctgctgcagagagtgatactcctttacctcaggacccagtgatcatccccttttccaagcaaagtctgctcgaggagtctggtaactatggatttcccctcttacaactttcaaaccagagttggagactcagcattggggttcggccctgcccgtagcacagccaagccctacctctcggttatcttttctcccgtcaccacccagtaaggtcatgtgcttccacccctggtcggatgtaacgctgccactcatgtcggtccctgagatccgggctgttgttgatgcatgggcctcagtcacagaggagctgggtgcccagtacccttgggtgcaggtttgtgaggtcgccccttcccctggatgggcagggagggggtgatgaagctttggttctggggagtaacatttctgtttccacagggtgtggtcaggagggagttgacttggtgtcttttggctaacagagctccgtatccctatctgatagatctttgaaaacaaaggtgccatgatgggctgttctaacccccacccccactgccaggtaagggtgtcaggggctccagtgggtttcttggctgagtctgagccagcactgtggacatgggaacaggattaatggatgggacagaggaaatatgccaatgatgtggaggcttggaggtaaaggacctgcctgttcttctctgcttttgccccttgacaggtatgggccagcagtttcctgcc

SEQ ID NO: 52041 - DNA, 1675 bp, Homo sapiens
caagcctgggcctgagggtttgatggggagcgggtgagctggatcctgatcccagtggtcagtggccagatcctgggctgctggccagaaccctggctttgtgagtggctgcagcttggctctgctccagcccacaggggctaaaggggcgggtagggagtgtgtagggagcgtgtacgtggctttgtgtccttggctcctccagactctcacatgtgcgggcaccatatacttctgctgcccttgtgccccaatcattgcacaaacagaaacagctctgacagagaagggactgctagagttaggaaccctagggcctggaaggaaggtatggctctcagagtgacctggggtctattcagtcccctctggacctgtttccctggcaacgctgtgggaacaacagtctatgcaacacaggagacctgatgccactggtgtcctccaaattttaaggcgaaggcaggcattgtgaatgatgcagggatggccagaatggtttttgccttcgttctttccccaggggaaccaagcctgtgggtggggaaatcacactaaggctggacagtgactgaatctggcccaggagaaacttggctgcctgccttccagaccagggtttttcttccctgagatcctggaggggaagtacctggaacttgggagtgttgccctggtctggaagatctgatagacatagtatgcacacatttccctcgagcttcccatgactggggagtagatgagaaccctgagtgggtggctggtttcttgaggcatacatatacccgacacaccttacacctctgatttggctgcattttggaatcatctgggaagttttaaacaatactggtgcctaggtccaacctccagagactctgatttaattggtatggggtggggttttgcagttttcaaaccacaatatccagcaaagtttgagaaccactgccctacacagccctccttcttctttatcttatctggagtcaggggcaccttcagcttctccaatcacctggccagtggctcttgtttccagtcctgctgttccagggtggataggccttcaggcggagacccaggaatccagctccagactctgtcccaagcagcctcttcagtccgggacgggacaggaagtgtccggcggaggtgggggtggaggtgattggcagttggagtctccaatgggccaggagcccccctatttcactcctctccttccattggcgcctgggcggagccacccccgctgcgggggcccagggcgggagggagtagaggccggggcagagggcgagggcgagggcagagggcgctggcggcagcggccgcggaaggtgaggcctggtgtagacgccaaagtcttgtcaggagtgggcggggcagggtgatgtatgatctgaaaggccgggagtgactaacgactgtcagtgtgtatgtgcctgtgaggctgtgtctgtgtgacagtatcattgtgtgcgattctgagtgtcacttggtgcagctgtcagctaatgtgactgcgtgtgtcagtgtgcatggagctggaggtgcatgtggctgtgcaagtgtgggattatgtgtgtatctgtcaatgcacatttttggtgggactgggttgtgtgtttgtgtgagagggactgtgaccacatgagggaatgtgttt

SEQ ID NO: 52042 - DNA, 717 bp, Homo sapiens
catcagataataactaatatttacttagtgctgcctgcctgtggggtacctggctacactttttgcatacattgttttgtttaggtagattcacctctattttacaaatgaagaaactgagtcacagagaggcccaaagggtcattcaatatgtggttcaccaaagatttgaacccaggctgcctgatgccacagcctctctaagtaatcactactgccgtcttacaaacactaggtgtagactcagctccaccagacacccaacatgagacctagacagctccactaggctttaggatgagactgggagcaaggggtgctctttgtagatggtggctgggaaggccctgcacttacaagctgggtaacagtgagtcatgtttacccccaggtggagccagctggactggaggaggtgatcacagatgctgtggctgggctgccccatgctgtacgagtcagtgcccgggactttctagatgctggcacctggagcacctggagcccggaggcctggggaactccgagcactggtgagagacaaagccaaagaaaagggcagaggccccatcccaaagcatctatcagctgaaccagttccaaaagacaggcaggtggcacatgccctgcccacacaggcacggcaattgctgtcccagacttcagacttgtttgcctacagccctgtcttagcttaagtcctgccccttggcctcc

SEQ ID NO: 52043 - DNA, 2497 bp, Homo sapiens
gggcttgtcggtccagaagtcttcggaaggcagaaaacaaatgcttttgggtgtgcacccatctctcccctttaagaccaagtcttctccccagccacaatctgctgtagctttggccccagccagaaactgggccatctctttctttaacttaatcttgtggtgccctttctggtgctgggtccagtccctaactgaaggcaggcccacatagcagtccctgattctcaccacttgaggagttagtgggtcccaggctgattgggtgacagaagggggcggcaaagagcagtggcccttggactctcctagggagggagcaagaacttctaggtaggctgatgccaaggatctctaaacttgggatcagactggaggagccaaaagttggggtatgaactgtaggaaaggtcgccaacccaagtcgctcctctgtggcaggcagcttctaggaatctccccctcttaccatttacagcctgcatcctacacctctgcttaaaatgttttagatatactcccagcagagaagattcttcagacagctggcaaagtcctcgctccgaggaagggagtaacaggcaggattatttagttctcttcatataggcgactcacagtatgggtttttgggggttgggattgggggagacagccattgatagtaacaggaggcctgacactgatgaggggctttgacgtggaagggcacccttccagggagggacgccctgtcagtacggaacagagcccgtgtggggaggggcgctcggctcgaatggcgacagcggcggcagagtcaggaggtcagtacggtgggcttcggtttaaatctttaatgcactggctggctgggcagcggcggtggggctgcggcgggggaagccacgacccgagcgctggggagtaggacccaggccgctggacagacagctcatcaggcctcgcagaggctccagcttctgctccccggggtgcgccgagctgtggggcgacccgacactggcatgaggcggggcgggagctaccggattccccccgatgggtcctcagagactgagtcccgtccatgcccggggcgggtccgcggtatcgcagcctcctcacctccgctccctccgccacatgcgaagccaggggaaaaagtagaaacagccccagtagatcctgcagagagagggcagagccgggcggggcggggcggggcggggaggagctgaccctacagactccgccccgcggtgcctcgccgtcgaggaaggctccgccccgcctctaaaagcggctcccttcgcgcccacgcccctgggaggctcgccctgcccacccctcgcccccgcagaactccaccctcccccaccccggagccgcctggttcctcctccgcagaacccgcctccactcactcctcctccgcctccagcgccacctcgtatctcctcattcccgacatgtcctgggctccgaacgtctcctggggagcggcatgattgaatcagggattccctagccccaggtccccttctccgtcattctcaggacgaggctgcccagttctcaggtaatctgaggctgatgcccccgagaagcctcagttgccaccacgggacagggtgggcttggagatttgggaggcactggaagttaaggggtgaggaggccggtcatctccggggcctggggcatttagggggccagggcgagaggtttggcggtcatggggctgggagatttggggccctgggtgaggattttcaggggctggggtcacctggagggggggctgagaggggtcagcgcagcctaaactcccgccctccctggctccaccccggaaacggaccgttactattacgtcacagggatgccgttgcgcactaggtttgcctgtcccccggaaggggtggggtgttcatgtctcccagaggaggcggagtcgaaacgtcatcttacggggtgaggccaggggcggggtcggttgattaagatgcgggcaaaggaccctcttttataggtgtcaggtcaggttttggagctacaccttggggggccgaggcttccgcagcaggcagcaagaaaagagagttgggactaagtccagtactgttttcttaatccccacgtctcctctacccctccctgggcttctgccctgccgagtgcctctcttgcctgccttcctccccttgtatgaccctgggccgaggaggaataggtcctcagatagagtccagtctagaaaaggccaggctacggaaatacctagttgagtggcctcggctaagtcactgaatggccggagggtcattgcccttcctctctggtctgagacctatcttcttgtgattttttttttttttttttgctacattcattcaatcaacaaatatttgctgaatgaccacctgtgtgtcaggcactgtgctgggcatggggatgtagtagtaaagaagacaggtggccgggcacggtggctcacgcctttaatcccagcact

SEQ ID NO: 52044 - DNA, 607 bp, Homo sapiens
tggtctcagtgttgcctttgagccctggagcccatgtagactgtaggggtggtggtagggctcctctatgtggaatctcctgtgcttccctggctactccttcttccaccccgtgggcctctctcctgtctctgacctctgactcccaggtctgtctgtcggtgtccctgagaggcatggccccaggattgcaaagatggggctggaccttgctcagtttggctgagagaggaaggctggcctggaggtcagattctgtatggacagaatgaacagatggaccctcagccctggctgctgagcctttcctcacatatttattcattctctaaacaaatatttattgagggactgccttgtgccaagcagcatgctggacaccacaaaaacagtggaacccaaaatagatgtgatcccagtccaagaacatggacaaatttggacaaaccagcaactataagtcagggtgatgaatgctgtgaggggccactgcaggaggctacctaacccagcctggggtcagggaaggcttcctggaggaagaggcgtctggacccagatgggaagccaggtgggcagaggagagagaagagtgtgccagaccaag

SEQ ID NO: 52045 - DNA, 1536 bp, Homo sapiens
ccagcctagcctcatccttttttcaaggagcctgcccaactttcgtgctccaggtctggccaaatccccgccccaggggtaggagatcctgaatgcgcgcgtactagccattggggcaggggagtcaaccaagttcgtggtgggggtcggggtgggtgaatgactgtagggagaggacccggactagatggttagtgtatgtcgcatgcatgaatgtgcgtatcccgaactgtgtctgtggggctctgggcgaccggggcatgtgtgcggatgtgtgtccgcgcccgtgagcgtgcccatgcatctcccttcctgggcctgcagggggcgccccgagcctgggaagggaggctctggagtggggcgcggctgcggcagaggggtgggcgcatgcggctgtgaccctgcgagctcctcagagaggctgcggtgagcgggcgtccgaagtccctgggcctggaacagcctctggcgccctcccggctccctggccccgccgtccctggggtccccgcgcgcgggccgggcgtatggaggggaggctcgggctgtgggtggtgcccgcgcatccgatgacctgggccgacagttaccccgggccaggacaccgccgtccggccaaacccctgccacccaggcccccgagcctcgggggtcctctgcggggccggcccagcccggtggccgggggaaggcccgtgtttgtcggcgaatatgaagcatttatctttccctcccacgccccaaatagtcccgatttacccagagcccaaggtgcccaatgttgaagtcttgaaataattactgtttggcttaaaggctgaaggagggttcacatcacctctggcacttcgctcgcacccgatagatatcttacaccactcattacggggccaacgctaagaaaggtttccttattccaaggaaatatattaggcgcgaggctggggctggaggatgaagggctatagcctgacatgggcggaaaaggaacttgtcttgcccataagtggacacagggaaacgcgcaacctttggcctagaatgagacacatgtgagaacaaatcgtgaaaataattgaaaacaaattggtcctagaaagatgaaggaaatgagaatggaaaattcaacccccactcctgttttcctgtagcagacagaggactgctgcctcctggtggccgagcggggcagtgagcgcctcccagcaggcggaggctcacacagcgcaggggatactccgagcagaagctggcgctggctgcttaggccttcacaagtggtgttcagttattctcttaatattggattgaaatttattattaccacaacccatgattctaaagcaaaagtctcaaagaatatggtaacagactttctctggggtgttttagtttgctgcctactgagaaatggttgtcttgaagaaaacagagctttcagcttcttgacatagcaatagacgtaggtcaccaaggtcacaaggtcatacaattccccttaaagtaggcactactagaagaattacaaatata

SEQ ID NO: 52046 - DNA, 927 bp, Homo sapiens
ctgatgcagggtgttcatgggtccatgtgagtttgtcttccttgacgtgtttgtccttactctgaactagtttctgagtggcacggttgacttttgtctttttctgtatgtacctgtgtggtgggatgtctgtgtccatgtgtctttgactgtgtgtatttgattcttccctggccccttactgtatcttccacctcccctgacataccccagctgctggtactatttaccgcaaggagggcttcccttcccgccgtctggattcccatgggtcagtctgcctgcccagggacctgcccctgtggcctttgtagcaggcctgaccttggaagtgacacattctggaaatcccctaatatgctacttgcctagccactagctgagtgtttatagtggaggagagggacaaggcagaaaaggggggcagttggcagcactcacccctccttctggaaactgaatctcactggccccttcccaggcccccctctccctccccatgctctctcagggtcctggcctcactgtttctgggcctgagaatgcacagacctctgcaagactggtcagccctgtgaggcatctggtcctttgtgtccccaagcactttacatgcctgctttgtgcttacctctcatattcccacctgagctcaaggaagtcctttcttctcttctgtccctgcagaggacacaggggctattctggcccttccatctatggtaggcctggcctagaccatgggctccagaggccaggtagagtattcagccctggttagctggttaagcagcagaggcccagccacctcccacatggtgcaggaagcagtgtctccatggagtctattcctgtgttcatcctgtgtgccttgccttccctgcctgggctgcagtgagcaggtacagaagtgaagcagccatggtc

SEQ ID NO: 52047 - DNA, 523 bp, Homo sapiens
cagtgccctgccaaaattacttttgcccatatactctgagtgtaaactgaccacatttttgccttccttatgatagtaatgacagaaccttttatttagatagcatgttacagtttatgaagcccttttagatatatgttggctgtttggttttgagaaatgcttcatcttactggggtcctctcactgaagcagagctgtgtgggctaattggctctctctctttttgtatgtttgtttttttgaggcttaggagtctcccagagggaaagccccagtgattcactacagtcaccacctacgagctcttaggttgcgaaggagtttcctgttgggtcctaaggccaaacaatgcactcactggtcagcgctggaacttatcagggcagtccctcttcctggcctcagcaaatccaattctctgggattttcttcctccttgaaactcaaatacatattctaacaaatattttaagcatactatctcaaaccagttctttgggctgatgctaattcttatgtg

SEQ ID NO: 52048 - DNA, 2698 bp, Homo sapiens
ccccgccttgctctgctcttggcccaggtactcaagctgcagtttctagcaagacctcatgggtgtccaaactctgtctctggaaaataggaaagaaagaagtaaaggggagcttccggcctgacccttctatcatcatcaaccccccagcactcccctcccccacttcacccccaaattactccctccccacccccgctccctcgagcacagatgggcctgggagacagtgacgtgggcgccaggcaccgtgtctgctggagtggcggcttccgctggcgaccgcctccgcagccccgcctgctccctgcatcggggacactggggctgagatctaatgacttaatggggggtgggggagactagagattctgagggtgttaaggaaggggatcttggggagtgagatgaaagatgaaaggggagagctaggataggagatcggggtgtaaagaaagaaccaagaataagacaaaagggatcactgcgggaaggaagacaggagatcatctagggccaagaaggaaagggctaaaacacaggcactccagggggaagcaggatgagagactgattagaagagggactgaaatggagaccgcggggtcgctgaagaggggcgcgaggatgaggggctgtacagagggtgggcgggggagattcctggaggcaccggcctgggcagagccatccgtttccctcgggggagaggtccggggggctctgaaacccggcatccgtggggtctgttagagattccgttaggtcacatcaggccaccgcggggtcaggataaggtaaagctaaatgaggtcagcttgaggtggttacaccgttggctgaaaggcgagtaagaagtgctgaccttttggccccggtccagggactacacctcccagagtgcactgttctctccctcttgccccccaatgaagaaaggaaagaatgcacggccgcacggccaactggtgggtacagttttcctttaaggctgcctttgacgtcgcaagggttccagaaggttctcctgggattcgagcagtggccagtacgtcccaccttctcaacccggagattggactaatatagtttgcccccgggctcgggtctgagtctcaggcacgaaccaataaaatcaaagggcgagcgaggttgccgccctctgtctttttcaccaatggcacgacaagatggcaaagaggcgtggttgagtgatcccagagggcgccaatcagatccacaccaatcactgcctggaatgtgtgcgcgtgtggccgggtgacaggggcggaggatgggcggctatcaccaagccgcttgttgaaaactgcccaatcacagtggaggctgagctgagtgacaggaagacggttcaatgggcggcgcggaggcggagccgtgggggcgggctcccggtcccgctatcggcggccggcgggcaggcgactcctgtcccgggtggaggcggcggagccggagccgggggagggggcagcggctgtctcacggaccacggcggcgcccgcagctcctcaccggtgagggcgccaagccaggactcgggggtcccgggagcggggcgtcgtgaagccagggctcctggtgttggggggttgggacactgagggcccgtaggctctgctgccttggggatgcggggccccggggtctgcagggtgctcggagtcctagaccagggcttggctgtcacagggggcagccagcgtctgagtcggggaggggaggggaggggagggtcgagtcggaccggaccagattgggttctgtggggcggaggcatctgtgagcagaccagccagccagcgcgggtgacatcaccgaccaccctcccccgcccgagccccctcccctcctctcctcgccgcgccttttgtcccggccgagctccgctctgccccgcccatctgcgagggaggagactcccgtcagtgacttcattgagtaggttcttggggattggggtcgggtcctccccagtgagaggcgacaggagctcactgcctctcgggccctcacaatcacacctgtcacaggtatacacgctgccactcacaaacacacgcttgcactcccagcctcactgacacgctgccatacagccgctcacagccagccagacactgctgcacctgagagcaggtggccgcgggtcttctcccttcactctccacatttggggatcaggtccggcacctgctgcgccagacaggccttgctgggcacgcgcctctgagagtccaaggaggtggcttccagagctgcagcacttcaggccggctccggtggagcgatcagaggtgaggggcttggctgggcatgtttaagcgcacagtgctctcctgcccacccccagcagcacccccactgcaggcccgaggagctttccggagcttcccacactcctggggagaagacttcttagccagcttgatgtttaaaattcagctggagcccttaaaacttcgagcgtggacgctgaatgggtttgtaaagtttcggtaagtccctccggagaagggcactcacacccatacccagtcaaaccctccacgcggccatcccctccattgccttcctgcttcctccaactcatcctcatcccctctgtgacatacaggaacccccctccggcctcacccacatatttgaatgaattgcaccccttatcattcctttt

SEQ ID NO: 52049 - DNA, 4568 bp, Homo sapiens
gttgaggcagaaatggcagaccacccccccccgctccctctcagacggcttttgctgccatttccgaaaacggttgcccccccccccaacgaggtgctctttcttctctgcctctcccaaccccaccccccaccccatctcccccacagacgtgacatgctggtggggggcaatgggggagtacccgcctttgtggagccttttcttcgtcagagaaaggtgactcccagaaccatgagtcaacccagccacctgcagcagggcctgtgggggcagcagtgagggccattgtccctgcccacctagggccttgggcgcctcccccttacccggttacaggcctcactcctggaaggacaccctgtacacctccctgctgtgaagcagtcagaggcagaaaggcaggtctcagctgtggctgccagcctaggacattgctagaaagactctggttctcctggctttggcaggggttggccaagtctcagaagggctgagaatggcttctggccatcccccagagagctctagctacaggaaagtcccccttcccctgatatccaccacagacacaccgatagagggagactggaatggaagaattcgggttgtacgtttctcttataacaaatgctcctgcacccaccttaaaagggactcagaggaatatgggtctgatgatgggccggatcctaaaccacagggtggactgggggcgtagggtgaggctaggagaggtattaaggaaatggtggttggttagtgcccaattgtctcctaacagctggggttgaaaaagtcctgtccccaggatgcttttgttcactcacactggtgcttaggcggcacagccctcacagttttgtgtgtagacgctggcaaatgagtaaagggaactgttgccctggttgggggaaggatagtgtcgccccccctgctaatgagggagttggaaacagcagtttccaaaggctgtgagtcaccctgtgatctgagtcacacgtgaggcttagcatcgtcagaggggtgggggcggggaggcctggggtctccgatggcagacaggactccagacacccattccctgactcagtctggctggccaggacagctggcggaagacccaggcctgttcccggtcctgggccactgccccagctgccctcagcctgggcaccatgcctgaggcgtggcgtaggagaccacgatgctcaggtgacctcacccgttacactgaccttcgccagctcctgtgtgtgggtcgctcagtccatggtgccacctcgctcagcagggcctctcaggggtcctcagtctggcccaaggaccagggcctcagcctagccccaagagtgggccacaaccttcagcttcctgctgggaaaacccaggaggtgaggacggaatcacagaattctagaatgtcagagccagaagagatcatctagtccaaacctttcattttacagatggggggacgcaggcccacagaacaggcatgacctgctgaaggttacccagggagtcatttagggattgcaagatcatcaggaacagggctggggcagaagagaaggcatcaagtcttggccctgggtttctttcagaaacaaggagaccagtgctggtccagtggctgtgatgggaaaagattattacaagattcttgggatcccatcgggggccaacgaggatgagatcaagaaagcctaccggaagatggccttgaagtaccacccagacaagaataaagaacccaacgctgaggagaagtttaaggagattgcagaggcctatgatgtgctaagtgaccccaagaaacggggcctgtatgaccagtatggggaggaaggtaagagggcagcactccagcccaatcccggacccctccgcttggtaggggtcccaggtgcaccagtttgtgtagcggggaactggaggctgtggagggggtgagggcagcaagggtttccagcactgtcacccagagaagagagaagcccacccactacccagctcagctcaccctagttctccccgcctctctctgccccctccctcctcgggttcaggccttagagaggtctgaagcaagagccagaggccttccccgcccttctttccttcccagccttattagtcctgcctgaagtctccgctgcttcattggctgatgaggaaggttggggagagggagtgtgtggctctctgaggacagagcatttacattcatcagcataaaagtctggcccttaagcagcctgggaattaactaccagagctctgagcagaaatggttttccccttctctcccccggccctgcctgcttctggccagcagaacagaggtggagctttgcctcccagaggaagtggcagggatccaagggtggacggggaactgctgctggcatcttcccccttccctggggtagctggtggccatggggtgggaggcaggaaaggcccaaataaagcctctgagagggaggcccctcccagcacatcccacggccatgatgtagctgctaattctgggcctgcccctcagggctgcctgccacccgccagccacaggcacctgtcaggctatattaagagacattgtcacgctgaggactctccttcctgggaagaactgtccttcctccccaacagaatccacctttctttcacattctcctcctcttcaccctcccctttctatcctcaaaactaaatgggctaatcatatgtagataagaaggttattttcttcccctcctcctggccttgtgttccatgcccctctgtgaaccctcatcctcccaactcccttttcctattctccatgctgccggttccttccattcttcctgcctacctcctagacgtgccaactcccagattcaccagataccggctggaacccccagtattctttcagctaagacatttttctctctggcatggagggatgggagggataggagtggaaaagagggaagcagtgcagacaccatgccaccatgtgacctgtcttggaattgcacccattcctccattcagcctcacctttgtttagaaagaaggcaggagctgggagagctcccttgagatacttcaccccttctgcctaagtgaaggggtccagacaccaggttctgatgcagaaccccatcccaggaaggcccctgaggatgcggcatggccttaaggggacctccatggcctggggagggagaagcagcttagaaatgttggttatatttctgtccaccctgcccaatccccagcagccatttattatagagcagttatacacacagactctgtgtgcagctccagctagggacaagttgctcccagcttgaaaagggggtggtagtggaagaatagaaatccctatagagagaattaccccttcccatcatcatcagtccagcctccctccctctctcactgagctctgccaggctgcttgaactcgcttgataatcagcccctcgatagaaggaaaggagagatcctaggtcttgggggaggggtgaagaggcagctgccacaagtccctgaaccgtctgccacttggcctctctagtgaaactcaaatctgcccttgtggtcccaggaaataagaggctaatttaggctcagatctccatgatcagttgaaattctagataaatggcctcaaagagaagggtctctttcctagcctggaccccacccatagtctctgtattccggagcagttctcagtgtgaaccgtctccccacatcccccactactgccagcaccccctcctgtgcatgaaggctgcctccaggaatctgagccccttagacaggacctgacagagagagcagctaaggtcaccactgccatgtgccagcccattcatgcattttggttgctcaacattaggtgtggggtatggcgtttgctgttgtataactccagggagctccattcccattgtagtctatgtctgtacaatgtgtgaatgacactccctaaagttgtgtaacaccgagcagagtgtgggaacaaagcatttaaaaactttttctagaaaaatagctcttcatctccaagctaatgagctttcccactttttaaggcttcctgatttcccgtttgagcaggggccagggaaagaggaaacactgctagaagcagagtgaaagtggtcttcctcccgggttggatccctagcctatttgcgactgttcacttaccagccccctctgtggtcacatcctgtctgatggccccttgtcctatatgtctttggagataagcaaagatttgggaaccaagtatcacttgtaatgtgacaccaggctagtcattcaaggctttttgagacatctttggaccatgagtatgtggaaaagattacaggactggaagtcacatcctctaagtcctctagtcctggcttttccacctattgggtaagcaagcctctttgaatctcaagttgtgcatcgttattaaatatataattaggaatggaagataatcttgccagaagcctttcttactctattagcctggccctctctgtgggatttaaaggttg

SEQ ID NO: 52050 - DNA, 1572 bp, Homo sapiens
ttctttgccagcagccgctccactcggcccttcagtggctttgacccagatgacatggatgtggatgaagatgaggacccatttggcgctttcggccgttttggcttcaatgggctgagtaggggtccaaggcgagccccagaaccactgtaccctcggcgcaaggtgcaggaccccccagtggtgcacgagctgcgggtgtccctggaggagatctaccatggctccaccaagcgcatgaagatcacaaggcgtcgcctcaaccctgatgggcgaactgtgcgcaccgaggacaagatcctgcacatagtcatcaagcgtggctggaaggaaggcaccaagatcaccttccccaaagaaggcgacgccacacctgacaacatccctgctgacatcgtctttgtgctcaaagacaagccccatgcacacttccgccgagatggcaccaacgtgctctacagtgccctgatcagcctcaaggaggtggggcctagtcaggctgtgtgtgtgtgctggggagatggtggggacattccctctcttcccgccagctggcacattctttccccacctcagtctatttccttccttcccactcaccttaccccaccttttcctcactttctgcttcgtctttcccaggcgctgtgtggctgcactgtgaacattcccactatcgacggccgagtgatccctttgccctgcaatgatgtcatcaagccaggcaccgtgaagagactccgtggggagggccttcccttccccaaagtgccaactcagcgaggagacctcattgttgagttcaaagttcgcttcccagacagattaacaccacagacaagacagatccttaagcagcacctaccctgttcctaggctctgccccagccagtccagagcctaccacagcaatacccccaacactcactccactcaatgtgcacccagcttgatgtccactggacactggcaactttttctaaaatgcaaaaaaaagccactggttttcaggaaaatgttcctgtccctgaccccttttagagctgggctgcctggggggagtgggagggaggtggggagagctagcccaggccaggggtcaatgttcatgtcactagctttcaatccagtttccactgcagtggctggagagtgacctgagtgctacttgaagatatgtagagattccttatccatgcctgtacatagcatgtcctcctcccctcagctttgctaataccagtcccctcccttccctttggcttcctgctgttgggggtggaaaagactagaaaggacattgctttctcagccccacccccaggtccacagtgtccaaggtaatggcacacatattcatgcacaagaagcactcacctagagctgtctgtgcctctctgggagaaaggagagaggataagaagggaaagttcacaacctgtgaacagggacttgagcacgagacacttttcatctggagcaggggggtgagctcctcagcagcctccgtaacagctgccctgcctacacctgcagagctggaggttctgtcctccctgctgctctcaggag

SEQ ID NO: 52051 - DNA, 432 bp, Homo sapiens
gcccatctaccagccttcatcaggaagggaaagggctttggggtcaggtggcagctattccccaccaagagattcagggtcacaggtttttccccacacctctgaactcagggcctagccacccccaaacttccaaatcccacttttgtgatatgtgaagctactcatttcttacccttggaggctgtgtggggaatttccagcccttttatgcctgtgtgatcccaccccacccccatagttgtataaaggtcatagtgaagaagctgggggaagactgcttcagccagatcctggggtggggtctttaggttttctcactttgacaacccccgaatgtttttatagtagtttttttgtatttttttgtaatgacagtattatgtaaaaaataaagtattttaaaaatatggcatctgagcaggagcaaca

SEQ ID NO: 52052 - DNA, 1956 bp, Homo sapiens
atgcctgtaatttcagctactcgggaggctgaggcaagagaatcacttgaacccaggaggcagaggttgcagtgagccaagatcatgccactgcactccagcctgggtgacagaaactctgtctcaaaagacaaaacaaaacaaaaaatttaccaagacagttgtaggtaaagaaaggcatatttattagagaaagtattaaaatatgtttcaaaaaagcaatgggcagaattatcagaggtgtgtgaatcagagcaactccatcttgaataggggctgggtaaaatgaagctgagacctactgggctgcattcccagatgatgaaggcattagtcacaggatgagataggaggtcagcacaagatacaggtcataaagaccttgctgataaaacagtttgcgtaaagaagccaaagccggccaaaacccaccaaaaccaagatggacacgagagtgacctctggtcgtcctcactgctatactaccaccagggccatggcagtttaaaaatgccatggcaacatcaagaagttaccctatatggtctaaaaaggggaggcatgaataatccaccccttttttagcatataatcaagaaataaacataaaaatgggcaatcagcagccctcagggctgctctgcctgtggagtagccattctttcttcctttactttgctaataaacttgctttcactttatggactccccctgaattctttcttgcgtgagatccaataaccgtctcttggggtttggattgggacccctttccagtaacagaatcagcaagagaggaagtgactgcaagaaaacaaaggcttgctggagattttataagctggttcttgggctgcagagtgctacatgtagtactgataatgacaaggttgcagaggagctaacttgcaacatttctgtcagccaaggtgtttgatgataaatggaaccatctgataagcaggaagagtgtgagttgtacattatctgcacagataatgtttgtgtcctgggccacaaagaaaggcagacctattatagcttatctgctttatctctttgctttcccctgatctcgccagcttgtccccttttccctaattaggactccacaaagtgagacagaaacaacaaaaacagaaacaaaaaaacaaaacaaaaaacagttaagcaaaacaaacaaatgatcacacaatttatacaattactgagcactctaattataaggagaaattaagactagctggttgttaatcttaactttagccaagacaaaaacccaattcagctacttaccaaggaatggggctcaaactgaagactgctctctaccatcctagaagcgggaaaaagctcaaactcaccctccctcttggaagagggctgaaactccagaagggggttacctgcccaccatcagcatggaagcaggaaaacttgccttccttgttggaagcaagtaaaactccagaaaagttgtacagcaaaataaacattagatctcaaacaaatttgggtagagaccagggattctctggagggaagggagctcccaggcatcagcaaattgttctattggtttgagtcataaggatagctcaagctagtaccaagcaccaaaaggagatttgtcaaagatcaggggcacttccactcagaatcccttcgtggttaccaaactgtgaacccaaaatatctgagtcaggtctcaatcaatttttctagtttattttgccaaagttaaggacacacccataacacagcctcagaaagacttgatgacatgtacccaaggcagttggggtacagcttgattttatacattttagggagacacgagacatcaatcaatatgtgtaagatgtacattggttcagtctggaaagccaggacaacttgaagttgggggagcaggggcttccaggtcataggtagataagaaacaaaagatttcat

SEQ ID NO: 52053 - DNA, 1832 bp, Homo sapiens
gcctgggcaatatagagagatcctgtctctacaaaaataaaaaatataaaaattagctgggcacggtggcacatgcctgtggtcccagctactcaggaggctgaggcaggaggagcacttcagcccaggaggttgaggctgcagtgagtcgtgatcacaccactgcactccagcctgggtgacacagtgagattctgtctcaaaataataacaataaatatctataaaataaagataatgatatctttattttatagataagaaaaatgaggcactgaaaaaattaagtagtttgagttttcacaggtaggaaaatgacagagctatgatttgaataaggcagttcggtgctagaatccatgtacttaaccacaatgcctgaagcataattctgaactgggcaatcaaaaggggatcacccacatttcactgtgtgaagcatgaattgcctgatagaggaaattttttttggttctaaattcagggagaaggctgttaagcccaggcctctgtgggggatgggagttctttgttctgtgatgcaatgatgacctcagggtaaactgccagaaggctaagggaaatggaatggctgctggaggacctgcttggggctaagggggatatggggcttctctggggccaactgacccatgccctagcctgcagacactgcggcagcagctgcttccagagtccaggaaatctggtgacactattcttattcgtggtttggcagattcagagatggtggcagcttgggaggttgcgacagcttcatccctggtgctctgggaatatggtgcaaggcaaggtgggtgacctgtgactgtacagctggatgaatgactgctgacaccacatgtgaggtcattggtatgaatgtgggcccaggtgagtgactataagccctagatgtgaggctgggtgagtaaccactgacactagatttgaagccaggtgagtgaccatggattctagatgtagaatgagggaatactgatctccaaatgaggactgggtaatgaccattaacactagatgaggagctgtgtaggtgactggccacacacgtgggattaggtgagtaactgtccactctggatatggagcagactgagtgcctcatagcaaaccttgtgtatctgaaaaggcttcatgcctgagaatatctttatctacttcccaggaactaccacttctgcaccgtgtggccttccttgatcacctgtgtaagcagaaatcagaagtggaggaagaaggggaagaagaggaagagggggaagacgaggcatctctggatccactgaagccatgttctcctaccaaagaagctcccactggagagcaagccactccagccccaccccagccatcctgtggttctgagggcctcctcaaggctatagggataccagagcaaacagtcatgcagcccgtgagcccttccagatccttccccatcttccagattctgaccagctttcctgtgaggcacaagatagcatcagggaaccgccagcagcagagaaaaagccagctcttctggggtctcccctctctgcacagcgagtccttggaggccatcttcctgagctcaggtggcccctctcctctgaagtggtctgtttgttcttctgtcttcttcaacaagcttgccttcctacctaggtccaacctgttgcttccccagtatcactcctcagcccagttttctacccatggggcccatactatggaagatctagaagggatggcccccgatcctcagctgcttccacctccatcttctccttctgtctcatcactactcctccatctgaggcccttcc

SEQ ID NO: 52054 - DNA, 2543 bp, Homo sapiens
tcaatagtttgtattttaatctcaaagctgtatcctaggaaaacctccattctgcctaccatcccggactctggctctggagatgagtggtatgcccttttcttaaggtaaagcctctaattccccatctacctactgagatcagatgtggtaatctctaaaagactgaatttggcctgaccatgggccaacagcagttctggacactctttggggcaatcctccattgtcttctgtataagtcaatccctttccagaactgcacaggggactccacgggacttggaagggtttcagctaagagtcatcaaggtgaccaagaggttagaaacagctgatgatgccaggttccaagaattttagatttttacttttgaaaataagaggctgactgcatataaaccaaaagaatactttcagaataagtgactcttttaaataagcaactgagtaatactttatccgaattcagaaacttgagaaaaaggaacacacctcaaaaaactaatctcttcaaggaaggaaggtaatttgcatagagtttccttgggctggctgtgtttttttttttttttttttttttttttttgcctctaaaagctctctattctaaattgaatgggctgaggtagccaagttttatctaacgctttcctaaggatggaggtggggtcagaaagccccagagcccgggtaatttctcaatatagctggttggggaaaggagtgcgcgcacgtttgtgtttttgaagagttagtgcaactctaaactgcacaccacgaaacctggaaatctggaaaggcgcacaaaacacgaactgagattccaactttagcaagaacctaaaatgttaaagaaaaattcctttctccccacccacgagtcataacattaaggaaaactggctcaaactttctagtatgaacaacaggcctaaagtaagaagaccagaagcgaaaggtagggctcgccctctccctaacagtccttcacgactcaggtcacacacagaggatgcccacctccggccccgccgacccggctccaaaaaggcggctgtgagcttccctgagctcggcgggccttccccgaccccgggctccgcctcggtggcagagctcctgaggccttcacatggcgcaaagtccacgcccaccgggcccggctggggcctcgggctcgcggggcctgctctctccggggaccaaaggctttcggcgggtggtaggccggacggcagactggcgccccaaagccccggggcgccgcgccggcggagtgggccggaagacctggccaggcccagacgtccgttctaagggagccaatcgggcgggccggggcctgcatgacacagcacgatccggcccaggctccgacccggacccaacgcaagccccgcctagggggcgcgcgggtgcgcagctggccccagccgggcctgccgggtccacggcccctcactcgccccctagcttcccttccctctttcctggtctccacctctctgacgcgcccacggccaggccccgccgggcctaccctgcgcggctggtcccggtgcgcgccgccgcagcaagcgaacggcgcgcgcacactcactcggctccagaagccatggcgcgcgcctctcccggccggcggctgtggcggcccgcgggtaacggctacgagcggtggcaagcgaccgactgggccggggctcggctcttccaggcggtgggcgagcagcggcgacaaacccgcaagcggcttccctctcgcttcctcccaccggcagcgaggcgtcgggcgaacaacgctggctcctgatccgcgaggtggcagtggcagtggcagcggcagcggcagcgacgactcaaacgacggtcgcagacgcttcgctgagactgagccgagaagagccgaatcatcggaagggaagctgctcccacctcagccaatcagcgcctgccctgcggactctcgcccgcctctccgcgcctctccccagcaacccgcagatcacagccaatcaggaaattcgcttgcggcctggctcccgcctcagtgatgcgacacgcctagtaacgccacgtcaattggccgcaacgctacgcttcctcgacggattggaattctcagccaatcaacgaaaggaatagggcgagatcgattagtgaaaggagaccctttaatcccttagaggcggactctcccacttggctccagttcattggctccggagtttatcctcctggaagaacgtggcacaatagactgaacccttgtattagtctagtcctattgtggtaacccatacacccatcttctcccaaaacctggagatcttctaagacgccatcaccaccctgacacttcttgctccttctcaacgctgcctccaaccacccctactctgaactttctgactagcaccccactcctaccccattgtcactgcaccctctggtaaccccaatcccacagcctttgcagtttctcagcgcttgtgcctttcttcctcccgtcattaatattaataccttataataaggcactc

SEQ ID NO: 52055 - DNA, 910 bp, Homo sapiens
cctcttgaagagttagttcccgcgggaaactcggggaggaaacgagtcagcaaccccaaacaggcttaggcgggctagaagccggggtcgtgtctgactggggcagtcgcacggccggcggtgcggcccgctcggctctcgcggaggccacagcctcgagaaagggtgggcgggagcgagtttcggccccacagtccgtggctcggcccttcctcgctgccacacccccaggtcctcctgggttcccgcttccaccgagggccgactgcgaggtgcatgctgggagtcgtagtaccgcaccggggcggaacagctccgccccggcggatggtgtttccagaaagcggtaactggagacgagggcgctccgtaatcgtccatcctttctctgctcactgtcgagcaccaacacgctcaccaaggtcggctttctaccgcgtgtagtctgctggcagtgccgctctgtacttgcactgctcaaaagtacctgcccaatcatttcaaattaaatggagctaggagaattgaatatccatatgcaaaaaaaaaaaaaaaaaaagacaggaaagaaaagaacgcgaccatacatacgtacataaaatcaactcaatggatcacaaactaaatataagagccaaaaatataaaacttctaaaagaaaacgtaaagcagcctaactaacatggtgaaaccttctctacaaaaatacaaaaattagcagggcgtggtgtcgtgcgcctgtaatcccagctaccccggaggctgaggcggaagaatcgcttgaacccgggtggcggaggttgcagtgagccgacatcgtgccattgcactccagcctgggtgacagagtgagactccgtctcaaaaaaaaaaaaaaaagaaaacgtaagagaacagctttatgaccttg

SEQ ID NO: 52056 - DNA, 1428 bp, Homo sapiens
aattcattactgtggggcaaagaaccagtggatattctggtccctgaatacaagcccagctagaatcacttcctcccggaaaccttcctggagataaaccatttcacagccaacccctcgcaatattactctcctcctatttccaggctgggcatggtggctcacgcctgtaatcccagcactttgggaggccgaggcgggcggatcacctgaggtgaggagttcgagaccagcctggccaaaatggcgaaaccccgtccctactaaaaatacaaaaatgggtggcgggcacctgtagtctcagctactggggaggctgacgcaggagaatcgcttgaatcggggaggcggaggttgcagtgagccgagattgaaccactgcactagagtctggacaacagagggagacgccgtttcatgaggtcccaccccagatctactgaatcaggatcttcgaggggtagagcataggaacgttcacatgtacaggcaggaaatgctaatgctgcctgtacatgtgaacagtcaggagggaaacttattccaattggtagtcaggctctcttacacgccgtttctgcgcctctcccctcgccaatctcaatacccagtggaaagggatcgaagccgcaggggaatccgggcccagccgacggcgccgcctggcgggcaccgaggggacgaaggggaggagtcactctccgcttccgggcggccaggttcgccaggagacctgaggcacgaccttcgccacgcaaggaggctggggcccgggtcgagagtcgactgggcctccgctgggacccaggcgtgcgaccggctctgcctcctccggtaactacccagcctcccgctgggcaccctagccgcggtactgagcaccttggttaggagctgaggggaagagggagactcccttacttcagggtgaggggaataccggggggtgaggttctcgggagaccctggctcacctgcaatggcacccggaagtgcggcggcggcggcgcctgcgacctggcagcacagagatgcgtgcgccagacagagtggcccgtcggtggctccatcgccatctgccggcacctcggtggaagtttggccaggagcgtggggctggccccagtttgatgggatatttagtaattgaaaattggggacaggggaccaagctggaggaagagttcagggaaccactgtccattcatggttacgactaagagcacggctgctggagtcaaacttgacttgaatcctagcttggccgcacatattgtcatcattaggcattacctcatctgtaaaatggagataatacttattttcccttttttgcttagctgagtccaactgagatttcattactcctcctttcaaagcctgtaactaaatcttacgactgaataattaagcaaataatccttcgga

SEQ ID NO: 52057 - DNA, 1909 bp, Homo sapiens
gcttgggcacaagattttagtgaagagggcaactcaaaaggctggataaagtaggggacaggtaccttgtaagggtccatgatgcgcaggtaaaggactccatcgatttgcagagttacattgtctgtagaaccaggagagaaaacggggaaagtcaggcctctaggtcccaaccagttctttctactaagctctggatctacagcaaccacatcctaatagcctcagagcacccatgtcaccctgaacccctcaccgagagtcacagccgactgctcaggcacgttgatgacaatttccttgagactctgcacatatcggatccggtctaacacagggatgaggatgttcaaaccctggaaagaggagtcatgggtcctcagaaggctgggaactattgggttgggacctaagctagtcctggagtatgtagggagtcaacacatggaacatgcccagaaaagcagcagctcctaccaagaaataagtcctcagaaggctgaggtgtcactggtaagaaaacccaagagaacaggaatgcaagactaggcccctgaatggaggggagagtcatgagaatcggagccagcagaatagccatctctatgcagactgagaggtagggctgagagtgggcaggggagattcccaagaatggggcctgtgagatgcataggaaaaggtggtaacatggggatgatggtcagcagcctgggccctgtcaggtctggcctacagagtcgggagctaacagtgcgggcaggcccaaaggaagtcctcccgacattgcatgtcgtgagggattggtcatctggctggcccagggtgggcagaagaggtttctcacaggctccaggatccggtggaatcggcccattcgctccaccacccaggcctcctgctgcggcacgaacagtaccacggtgtttcggggcaatccagaggaggcgcggcgcggagcgcggccagaagccagtagagagccctgaaggaaagaagagggtgagcagagatcccatctggccagacacgccgcccctcggtcctgaaggcatctccataaaccacgaccctcaggatcctcggagaatcacatggggaccatgacctctgaccccagtcctctccaaaagttggaatttcgctcttttccagcggagaacccaggtaatctctgtcctgaccctctggaaaggttgcctcgctctcaccctcagcaaaagggccccagtgccccgcgccgcgcgcgccagcatttcccaccgccgcagcgacctccggaaccaacgagacgagcggagcggtcgctcccagaagcctacccgagcctttcctcttgcagttccgctcccccggatgtacttccggcagctccctcccccgcttcaacactcacccaatcagcgttacttggtcgaacggcgcgtcaagttgttccctgggaaacgcagaccttctagagaagggcgaaggctgtggttgttctgggtttagctgttcacgccgaagatccccggcctgatggccaaaatggaggctatttttcgcgggcattatcactcagacaccacgcactgaattattcgtcctcacccgagactcagtttgcccaccagagcgtagtatcgcccccatctgtcaccatagcgactagtggattggagctgactcgttgccatggttgccatagtgatattctctggtagtcccgctgtgttgtgcccaggactcccactggggactgaccccaatcccgttgccatggaaactgggcctaatattgcctggcgattgggccgagattttcccctcccctctttcctcaaagacactgcagctccttccctgtcttcccaagcaaggtttgttatgcccggtcttaaatacagtccagcaaacagcctcaacg

SEQ ID NO: 52058 - DNA, 3229 bp, Homo sapiens
gtggggagcaggcagaaaggagagatttgtacccagggactgaaaagctctcctacaccaagttcccatcattgtaccccactatcccatttcaccaaattctcctaagaattgggatccctaagaaaatcctggttccctgtggtgggcgggatggctggaaagggcagaacaccaatcgcaacctgcactatcctacctgcaaccaaccttgtcagaaggtacaacctgcactaatttctacccttctttcctccacccaagccatacagattcaggaggggccttttccctagcaccaccacttccaggtcatcccagttgccctcttgaccccttgccctggggaagccaggggatgacatgatgccctacttgaccccagcatacctggcatctgcttattaaccccagagccctctcagttcccaccctgtcaacaagacgctctatattcactcccctgccacccagccagtctggctctagaccatggcttcaagctgactcatggggcaggactgcaggggaggggggcagggcagagtaggccaagcctcactcttcgttcagggggtgggcagcagctggcatcaaacagctgtgccaggctgtggctggcaaggactacagctcccaacatgctgagggagcaaggccagcaaaaacaacaagtcccagaatacgtctgtacctttagacacttttgaggcctgggaggtgggtgaggtgggtattggtataggtatcagcttcaaggctcattctccccttcccttcagtattaaagatttccatttctaccatgatcaaggagagtgacaggatgaattcctatccatgtgctttccaccctcatcctatgcaaagagaactgctgccagctgctctctattttgtccctacatacatccacacaagctaggggggctgttcccacggaccaccactgtgggtaggaaggtcgacttcttctctcttaccaacccctcggcccccagcctagagccctctatcttcagaggggagagagcagaccttagcagactctctaaactaagccaggcagactcacctgactcctggactccttcttctggacgatcccttaccccctgcccagcctcccaggtcccttctcactcctctcctccccacagcctgggacaggccccatactatactggagcttcggagatttgctctttccctctagcacactcaccccgctcccaaattggctccgcggaggtggccgctgctccgggcccttccgtcccgtcccgtcccggtccctccccttggttccccggtcctccctgccacgggcccccaacccagacaaagggtggctcaggctgagccctgctctgctaggctcttcgctgttcagcttcgtgtgcaacactagcgggccctggcgcccgcagccccccagccgctgccgcgcccctccctgcgacggtccctccccggggccgccccggctccgcgccgccgactccactgcccctctgactcacaggccatttcctaccagctgatggggccgcccgccccgcccagtgccccaccacccgcgccgcggcggccacggccgccacgcccccctcaggctacgccctccctggaaagcgaccatgctcattggtccataggaagccagcctccccgcgacctcaagtgcgaggcacgccccctccaagaggcacacgcctattggtccataagggggtaggcttacccaaggtcgctccgcccttctccttaacccgacagctgccggagtccaaagcaacaccctgccctgccatttaaccctttcaaaggcgtaggccttccacatcttacccctccgccctactcccccgcccttcctccttccaggacggttaataggaagcccgagggctttaaagatacggtttgacaaccctcaaagtctgcctgctgtctataccagaccccagaccccaaatacctcactcccatttgtctttccccaccttccaaaccaaagcttcagagctggagaactagtgaagcccaggaagcttcctccatgccagagaagaaaaaggcctgaggtgggaccctatctccttccatgttaagaagtggtacttttccctctgttactcttaaattgatgttcttttgccttctttagaggagccccacgggttcctaagatagggatacattttaatctcagggaccagcattattctttgtgcctctgaactccctttctgagatcagcctgccagcactctttctactcacaggcccatgttcaaggagacagagcatacagggaagtgggataggagagcttctgcccagaatgggggaaatgagcccaactcttgtgatggagctcaaccccatgactcacagctccctcaaaactatccaccctcccactgagtcactgggccccagcccagttcagacccagtcaaatcaaatggcagcagaaccggcatccctaacccttgtcctcctattctttaaatgaccaggatggaaacctttgcaaggattgagcattcaaagacactttctagagggtactctagaggtaaactaagaaaagcaatagtcctgtctaccctgccctctgcacttgtcagcaagtcggataatttgggacttaggaggctttttctcccggtccttcacagaagcaggaggcaaacaccagagccaaagagggaaagtccattcttctacagttcagaggccacagagagcccaaggtccttgtttctgccttgcctgtgctgtggaccccccagggccctgaggttatatcactagatagtaaaaagaggctccttcctcttccccctagtccctcagtcctagacttgggagacacaagcaagtaacagtccctctaagctcccttctccttacctcaccctagaccacccttttcaagaggaaaactctgaataagaacccagttcccttgggctgacttccttgccggttccctagtgtaaggaacagggttaaggaaattttcaatgcccttgtcaaaattacagtgtatcaatgtaagagcctacttgccttaataaaaacttactaggaaaacagagacgtagaacactgtaggaaaaaaataatcccttagcaaccccaccttattctatctttctgccactaccataggccaggccttggttacctacaaaggtcagaggacaatagttcaggg

SEQ ID NO: 52059 - DNA, 2171 bp, Homo sapiens
ccaccctaccccagggctttgtctgtcctcagcagacccacccccctccccagccagtctctcagctcctgggtggttgtgtgaggaggctggcttggggccccttttagcaacactgtcacactcatttagccactgtgtggaactcaagcctttcccaccctctcccagccagcccaggggcaaaaagaactctagcactccatcaaatcccctcagggaagcagaggagccctcaagagaactaggtcctagcctgttctgatagtgcttccaagcctggagtgtggggagccactccctcttcctcccctagctgtggctggaacctcacaacccttactgggttcagcttacagtcgtggcccacctctcaaaacagacagaagaccctcaatactcctcaccacttcccccctcccacagaagccctagcgttccctacccagaaggataagggtggggaaaatctgtttgtggcaagtggttaaatgtggctaccagtcacttggggatctatgcgagagacctgggtggtagtggtgggggtggggtctgagccctgccgctggttaccagggtctctggtcattgataacaaagtaccgggcagggcacagctcctagatgggcaagggccaggccaggccctggggcaaggaaggaagtgggaaatgagcacacccagagcataagggcagggcgggggaggggggagacagagaccaaggccggctctgggaggaacaggaactaggatggggggttgacaggaacccagcgggggaagggtcccccgggacctcagcttagggaagaaaccccagtctcagctggacagatccaaaatagactgaggagacattcacacaagccctagtgacaagcagggtctgactcctctctgagtgcccaggccagaaggcggagttaaaagctgagcagacaggagtgcaatagattggcctcttcaccccactaaccccaacacccttgctcttagaacccagaacacaagtgtcttcctgtagttactacaatgccctaaactgttactttgtcaaagtactgggggttctgttctcctgcctcaagttgggcctacaaccccttcccctagatagtgcccgcagaccctccgacaccgctacactccttctccattaaacagccccccttccttcaaagcacctccatgtcccctgcccctcatgtacctcctccaaccccccacatcagacagagacagccccctcacaatgtacctcgcaacccccccacaacaaagcgctcccgcccttcccccatagaggcctctggagaatgcaccttgttgcccacacattgagtccccaactgctcccgcgacttcgtatcttccctcaacacacagcagtctccagatcgtctgcaaagcgcacccccatccgcgtcccttcttccacgctcaccctgccccacacctgtagttccgtgggtcccgttgcacttggggacgtggtagtggttggggcagttactgagcagccctagctgtagcctccgcctgcaaacctcgccccttcagtctgagccccgcccccgcaacgcccgggcccaccctctcccttgtcccaccttccaccttctgtggacttgtccctttcctcgtttaatttctcgagctcctcccctgtagcccgggccccgcccccttctgacctcgcacctccttcgcgttttctttgcatttccccaggatcctcagcttttcccaggccccacccccgatccccgcctcctctcggtctctccgcctttcaccaggacccgccccctcggattccagcctggcagaagtcgcgccaagacccttccaccacgatccccctcccatctcagagcccctcctccttccgccccttctccctcacgcctcacccgggcggtcgcactccaaccaggatccgctggctctgattggcggtggcggccccaaaggaggaaggaggagacaaagtgatggtcgcaggtcgcctgaggtcccaccccggccacgtgcggcttctgtgatgacaagtctagaggggcggggcctcggccggcaggctgctagcctgagcggagcggatcagggcagaggtggggagatggagccagggccaaagccaccagcctgagggctctgagcc

SEQ ID NO: 52060 - DNA, 1705 bp, Homo sapiens
tagttgctaaacaaaacttaactttgctgtgcggtgcgacttcgttaacttaaaattacaggctgtcagctatgaccgctagactctaagaaagtccagtggaaatccttcaatgaaaagaatctgttcttgggtggaagccccgctcatgcaggaggaacagagggcttccattctcgcgtcacacaactgagggtcaaccccttgctccctgcagtaagcctgattagtgggcggagcttccttcaggatcgcaagaaagaaaggaggaaggggaccccgcctcctacgtgctcgcgggggggggcggggtcggtggactgggcgtgagttaattggctggggggcggggcaccacgggttggctccgcccaggcgctcgcgcggatcccgggtggaatgacgggagggagtcccggcagctcctacctcccagcgatggcgtcgctgtgccgcgcccagtccccagcctgccggccggtactcaccgctacccggagttcgctcagacggtgagatttggggcgggtccgaggcagcggcgggacgctacctgcgaccgggaccatgaggagctgccagacccgtggggccggtaacgagagcagtcgcggcacctgctgagaggaaagagggagcggtccggcgcggctggggcgcggcagaggcttgcccgatcctcggccatgtcactgctctgcgtgcgcggtgagtgcgcggactgaggcggggaggcggggtgtcggcgtagaggtccccgcacccttccagtggacgtccggtgaccgtctcacccaaactttacatcccgtccgtgctttgggggtctattattttggcaatcacttaacaatcacttgagttctttccactttcttgttttcccccaagctcctgcaagggacgattagctctccattctggtagccatgtgacaatgttgttggactgcaggctcagatcctattaaacagtgactggggttctctagtgagagtggacgagttagaagaccgcggatggttggtgcctgtgaatggtgggcagcctctcattcttttcctcctcctcgcaccgtaacgctacagtatgcttagtagcaggttctttttatcacactttgaatgcgttagtggtacagctgtcacatcccttctattgcttgtcttgtcccctgccacttccctgaacactaaccggtagtataggctaagattattcttctgttccacttgggaggatgtggtgactgcttttgaggataagaggtatgatttatttttatttttattttagcttgcctcacagtaactcaaggtgaagggccattattgcttttcccctgaggacacttgacccatctaagaagatatcttaaagcaagagctttggggtttaagatgaggcatggtacgcgaactaagttctatgtgggtagagactgtttcttattagtttttgtattcctggtgtctgacgtagtagaagcttaatgctggttttgaatgaatgcaagtactgtgacttcagagagattatctgatcaggaaaacacagggtttggattagccattgaatttgatctcgggaaattcaggttacagcctatcatatctgatgtgtcttgattatgaatgagagagcatttatcaactagagcctttacctgatatcttttactggagagttcatatttcttttggct

SEQ ID NO: 52061 - DNA, 948 bp, Homo sapiens
tgtctctgctggctctttttttctgagaatctgctctgttgtttctctcccagctggttttctatgcttacccatcttgtacccataatagctgcctcagtggaatttataccccttccttttagcttcagcaccaaccaccaattgtcaatatttatctttttaccctatttaaaatcttttgagagggaatcaggtttgtttcagcttttggccagctcatggattggctgctcttgggttatttactcttggtctggtcagctatgtgtgattggatgttggggtggagtacaaaataatgtaatataaaacatagctcagtggcctactgcactactactactactggatatggatggagattccccttgtatgggcttttatcctcatatatctttaatataattataaattttccatgttgataagtataaaaccacaccattttaaatgatatttaaaagaaagacttaccttcagctgaaagtgtatgacgggttccattttctcatatcttctgtaacattaggtaatcatgttaagcaatgtttgccaatttgatgagtcaaagtgatagtttgctattttttcattgtataacattaggattaatttcttacatagaaaagcaaaccctcaattcagtgcccctaatcatggctgatgtggatgtagtgaggtgagtgccaaatgtgctgtaataagaattaggtgagacacctgagtttgaagtttcaggccaccacctttgtttagtaatcaacttgtttagtactcaactctcaggttagagaatttccttttctcaactctgtgataatatttctttttttggctgggcctggtggctcatgcttgtaatcccagcacttttggaggccaagatgggtagatcacttgaggtcaggcatttgagaccgcctggccaacgtggtgaaaccccat

SEQ ID NO: 52062 - DNA, 1615 bp, Homo sapiens
catattctattgcttataaagtatattttatatacaaaaagtgttttgtattttggatcccaaccatttgaaatgctcttcaccactgatactcataagagtgttacgtacaacaccatcaacttttgtctggattattgcaataattatttaccctcatgttccctacagttcatctcatacagcagccagattgatcttttaaaagtataatcaaatcataattctctcatgcttaaaaccctaaagggcttctaagtacactagaaaagttcgaattcttaccatgatttacaaattctgttttgccagtgcctagaacaaggccttgcacgtagtggatactcaatcaatatttgttgagttaataagtaactcattcattggcagttttagagaagcattgacttgcctcagatctcatagcttatgaataagtgaccacgtcaggatgagaactccaaatctcatgtttgcaagttgcctggctgagttacatttttctaattatccaatggaccctgaaccagactattctcactgtcttccagactctgtgtacccctgttaatttgtttgtgcctttctctttctgttttgccttctaaatcgggcccatcctcaagatttggacataattcttttccttttatggaacattgtcttatgtcttcagtaccgtgtacttgtttttgtggtggttgtggtgggtgggatggcggaggttacagtgctagtgggagaggaactcttataaataccagatattgcaccacatgcttaggtaagcagttccacttatttcccatgtgaccttatgagcaaagaagcactattacttaaaaatgagaaaacagccccagacaggttttcacttgcatcacctgaatggggaaatcttctatacattagccccaggaaaactcagagggctgtgaaatattctaaggattctaaggccaaaccttctccagctgcctggcagagctaggtgggtgcccaggtgcccttggtcaggacagttcttcattatcctgctttatttagcctgtctcacttggccagggccataaccaatagtctggcctatatgtcaacatcacacagagaaaataggagcaggatgttctgtttctgttcaataaaaattttgtttccaaacactaaacctttttataggtagttgtgatttttttccctgtctttacttgggcttctgattgtatttatttatttattttctcctttctgcttctagtattctagtcaagaagaaagccagaggaagccattgcccactgctgccgcccagtgttgtaagtgagaaacttgtctatgaatctcttttaattgtagctttctgtcgcttctctgaacatgggttattctgagctggggagggtggagatgtcatgtgtgtaagcagaagatattcctgaagcacatctgttcaggcgcctttctctgatggctgtctatctattagctttagggagacgtttttcggttttgtatggggggagtagggctcatctttttttctacatttgttagcttctacccctggaggaatgatttaaccccctctatccctgtttacctgttattattcttt

SEQ ID NO: 52063 - DNA, 1443 bp, Homo sapiens
tatcagtaatgagtcaatgatgaggacctgagcacctccttcctcacctcaaaggaaaaaatccccatctgtcagtgcagctgtctcagacagggattactaataatcactcttataataaagcagactaacacacattaagtatgaatgatgataagaaggagaccccttaaaagtcttcactgttttaaaatgaacatgcttgttagccataaagaatctataatggacgctatttggagcagaagaggagtatgacagaggcaatagggaaaacttatataaaatgagaagaggttgttgtgggaggagacacaccacaggcaggctggctctgcctggaaatttatcagagggtcagcccataaactattcctgattttcatagcttctttccttcttctgaaataaactctgagtgtgtcaaggttctctgtcttccccatgtgacaggagcaataatcctccaattgggccaacacagccttttataagttaactgttactctatcacaccttgcattactgcagaaattccaaaattgtaacttttcctggatacattatggaaaaaaaaaaaaagaataaaagccaggtatgactcaaaaaagttaatcaagtatatctgggtccaggtggtaaagccttgggtgataatggccaaagtcagcattacaatgggttggctggtgggaagggtccttcagaagggtagaatcccaaggaagacactctgattttcagatgcttagccctgctaagaaagaaaccaggatgatatatttgcttgtcctgttctgacgcagaaccattctttttctgctttctccttagtgttgaaataataagattgggcaacagtttatatatcaactgggatcggaagatgttttatgcaccaaggaacacaccagcacaggctcgtactaccacccttactgaggagctcggccaagtcaaatatgtgttctctgacaaaacagggactctgactcagaacattatgattttcaacaaatgttctattaatgggaagctctatgatatgcatgtcttcctgctttccccaagtcctgggaaatttttactttgcaaattgttttcaagactaatctagctctaaatctgtaagcctctggaattcacatttatctcctattctcacaactgtctctattctctaagcaaagaccacccagcccaaacagttctaaccaaaaagcatttatttagcatcttataggtacaatctattgtgttgggcattgagaataccgagatgtgcaagacttagtctctgtcctcaaggagtccccaatgtctatgtactcagttcactcccactttaaatcagatggatgttggtcaaagggtacaaagtttcagttaggcaggaggaataagtcttcaagatccattgcacagcatgttgatcctagttaa

SEQ ID NO: 52064 - DNA, 4653 bp, Homo sapiens
gcagccaagcagaggctgaagtgaagttacaaaggtcgcacacctgtgcaaacatctgattggttgcaagaagcaaccaatcagaggctagggtgaagttacaaagttatacttctatgcaaagttagactcggctgcagtcagtctaattggttgcagatagccaatttcccatctgctgggcagaaaagttgggtggggggtttgttacttaggtgtggaaagttagggttttcctttcaatttagttccaggaagttggcatgaaccagtcttaggttccctgcctccagtccctattctcctgcctcagaaccatcacccaacatccctagtgggtagcaggggagaaccctctcctgccccgctcatgcctaactacctgtaacagtttggctgtgtccccacccaaaatctcatcttgaattgtaattcccataatccccctgtgtcaagggcgggaacaggtggaggtaattggatgatggggctggtttcccctgcgcccttctcgtgacagtgagtgagtcccacaagatctgatgattttataagcgtctggcatttcccttgcctgcactcactctgtcctgccaccctgcgaaaaggatggctacttctttgccttttgccatgattataagcttcctgaggcctcgccaacaatgcggaactgtgagtcagacctctttccttcatagtatttcttcatagcagtgtcagaacggactaatacagtgggtttcccataacatttgcaggactgcctgccccatccccctctggctgtaaacagcaggagtcacacacaggcatcttccatgtcccccacacatccggccctgaagggcagggggcgcatgggttctacgtttcatcaggggttccgaaccctggctatgcactggaggccaaccccacctcaccccaccccactccaccccagtggttctgagtcggtccagtgtgaggtcagccctccttctgttgtttggttagtttccacactaggttctactgggaagccagcgttgagaaccgccgcctcaggcgaagctgggactcacacccaccggccctggaggcccgcggaaggtttccctgggttccagcacccgggagccgcgcgtcgccaggcaccaccccgcgggggcgggcgcgggccgcagaagattgggccacggcggaagcctctccgctcccttagcgggaaagctctgcgcgtgactcggctgcgcccatcgctgcgggagccggggagggggcgagcaccttaggccgggcggaccgaaccaacgcgccgcccggaggggcggcctgagggcaacccagatcggaccatcgcgccacgccgacaggggccggcctttccaacccgcccggagggaggggccgccggcgcctctagcctgcaacgcgacccctggagggcgagacacgccgccgccgccgccgccgccggcgcggaaggacgaggctgaggcgagaaacgaggtaggaacgcctctccggaggcgggcagggtcccacagacccactgccccgcgttccaaggtctcccttaggggagggcctgtcttcccacctatgtgccttcagcgcctgcccttcccttcagcccttccccctcggctgcacccgccctctgcgtccgccccgaccccctgggcagacctcgtccccagcccttctgacccttggccttctcctgacccttcagctctgcgtccaccggaccttcaaacacccagcacccaccgtccctttgggcgccaccccagatgcatccccaaccgtctcctcaaactgcccccttggggacaccctccccccacaaaacgactcgcgcccagtagtcaccttggtaccccaagtccctgtgacggctttggggaagcgtggccgcccggcacccaggccggcgactgcagcgggggcctccctactgccagttcccggccgggtcctctgctccctccacccttttagcccctgcctccctttattatccgcccggcgccggcgttgcttcagtctctgtctctctgtcatccagttttacctggagaaaacctttggcttggcagtaaccgtcccctactactgcactcacttgccgcgaagggcacggtgatcctgttgcccacagttggctgtggccctccaggccggccctgcggacacggggaactgtcctgggggcaaggacggtacactactcatctttgtatccccggtccccagcacggtgcctggcacatggtagtgttgctggtggagggtcttcactaccagttgtcctttgcgttttgaacaagtaattgagcagcggaggaatgaaacgcaggaacaagtagatctgagtcaggcaaggattaccactatgtgaacagtgtccgtgataaagaacacaggccttaaaaaaaaaaaaaaggcggaatttacaaaggacaaagggcctgaaacctgtttttatttattcctaggtgggtgacctgagcagatttagtttcctgggggtttgggttccacgcggaagcaggtggtatcgctgagggatgaaacaatggctggaaagctgtaggagttgataaggtagaaagtagttacctaattagtagtggcattattgtaactggggctcaaagtattagcaaataaaagtagtgactggattttcttagccggctccttagatattaagcagtggtggatggcttaatggaaggaagagcagatccaaacagtatacctggtattctgttagttatgcccgtcctgctgtatggccagccactgtttctcttctgttttgagccaggttaggatccctctgatttctgtgctggtatttaagattcctttttgaagccacagttgccttaactggaggctggacatgttctcattcatccattgctagttttgatgtatccttttccgctttctgtctcccaccctcttacatgtctttataaagtcttggatcaggccaggcacagtggctcagcctgtaatcccggcactttgggaggcccaggtgggcggatcactagaggtcagaagttcaagatcagcctggccaacatggtgaaaccccatctctactaaaaatacaaaaattaccgggcatggtggtgtgcacatgtagtcccagcaactcaggaggctgaagtcccagcaactcaggaggctgaggcaggagaaccccttgaacctgggaggcagatgttgcagtgagctgagatcatgccactgcactccagcctgggtgacagagcaatgctctgtctcaaaataaagccttggatcatagaaacccagtgtggggaggggctcctgatctggatggattaagcaatacaatttttttttaacagtatctttttaatggccttttctactttttcctgtctaggcttcctgttaagacctcagttaccccagaacaccctgggttatttttctcctcacctccaatacttcagtgttgccagataaaacgcagagtgcccagttaaatttgaatttcaaataaacaacagggagtcctgtatttttacttgctaaatctggcaagttcatgggagggcttatgtgttctatttttctctctgggcttatctgcaaatttaggataataactcacccttttcttcctgttactcatacacaatgactatgcaccctgctaaaagtcacttgactgaagagatggttcacttcatgttagggtaagggcaggctatctagaaatggtcttgattgatcagtgttgaagttacccaggaaaaaaaaaaaacacccattcagacattggcatttaatataatttttgtcaaatgagtccgtcatacgaaacgagagcatcattttgagtagccagatgtcaacattgctctgatagagctaggtgatggggtagaagggaatcctaacaacaacaaaataactcagcagaacctgtgctgtaccatatttactctttatggtggtaatatatatatatataacatagaatttaccattgtaataattcttaagtggcattaaatatattcacattattgtacaaccattactgataacaatctccagaactttttttcatcttcccagactgaaactctgtaccagtaagatgctaactccccatttctccctactccgccccaggcaaccaccattctactttctatctttgaatttgactactgggggtacctcatataagtggaatcatgcactatttgtctctttgtgactggtttatttcggttagcataatgcctttttttgttttttgggtttttttttaacttttattttaggttcaggggtacatatgagggtttgttatatagataaactcatttcacaggggtttgttgtacagattatttcatcacccaggtattaaacctggtacccaatagttatcttttctgctcctctccctccttctaccctcaagaagaccctggtgtctgctgtttgtttctttgtgtttatacattcccatcatttagctctcacttataagtgagaacatgcagtatttggttttctgtttctgttagtttgctaaggataatagcctccagctccatctatgtttctgcaaaagacatgatctcattcttttttatggct

SEQ ID NO: 52065 - DNA, 3951 bp, Homo sapiens
ctaaagcagaagctgtggaacttagggagggtcacatggtgtacatgtctggaaataattagatcttttaaggagaatcttgtcagcccatgagtttacatggaagacttgcttctactgtgttctggtgacagtgagcaattcaagtagacctgtacctacccgtgttcattgggcaggaaattcttgatttacagttaacataaattcactctaacctcctttctatatattttcccgagatgttgcctaggttagagctgctttactttacaacttacagggggacaaagaacaaagccgtgaagaaaagttaaagaatttgaggtagtattcctattgaaaagaaaacactggctatgaccatgacatggttccctgttgtaaactggtaaattgaacggtagtacagtctcaaaaaggcaataggagggattcaggttaaagaaaagaggagattcctgattcacatttattatagttgtcatttattgagccctgcctaaataccagtccctgtcctagatgtcttatatatcttctctgtaactcctaccaccaccctgtaggaaggtattatccccattttaaaatgaaacagaggctgaggggaatcaaataacttgccagctgctacagaattagtcctgaagagcagagttctatacctaccttttcttagctctttacattgaccagaaagaaacaaaaatgaatggcctgatgctgaaaagagcaaatcagggttctatttctccagtgtaatggacagtagtttgttaattgaagtgagttcctatgccttaaataaaaatatgtaatataaaaataggtactgaattcccacaaaatgaatgggaataaaagtggagcttaaccaagagtatgttattgatagattccggtgacttttcaagagttttcaattcaggcataagtaattggctgggcatatggtggctcacacctgtaattccagaactttgggaggccgaggtgggaggattgcttgagcccgggagttcaagaccagctttgccaacatagtgagaccccgtctctacaataaaaatttttaaagagaaaacagataattttaattgccaatacagtgtaaactggaccctgattaataaatatgctaattggcctccctggatggagctggctttcatgatttaactatctttcctttgaatgcagcacattccaaaggcctacttaatcgagtatacagtcatagttatttatttgtttagtctccctgggtgaactataaactccatgaaggcaggcatcaggtttttttctttcacacactacagtgtctggcactttggaggtactcagttaagatttattgagtaattcctttagtccttgggtgagactttggcatttaaggttctcagggccgcagattccttcaaacgtttgcccaaagcagagaaggaaactcttctagagcactgttgtgtattactgggttgggctgttagatttcccaggtcctgcctcctttgggtgggcccctagggcttgatgccagatgggctgtgtttttggcaaagggcttgttcttattctgagattttgactataaatggactatgctatttgctgtccccactgaacccagtggggaagcagccgacaatgggagcacagagttactactttttctgctggaacctcccaacatctacccagagatagctccagtataggttggccaagcaggaaattccaaacacttttcctgaaactccaaacagcttgaggagtctcttcagatggagttggaaaagctcccagcgagcagagctgggtcttatgtaactttatagactgccctttttagtgtaactttatagcactgccctcagctagtgctggacttttgaaacatatcctgcattctttcctagctactcagcagtccctattggaagcagctaataggacagagttgaagactgtgaggttaaagggggagaaaaggagggcaggatgtctgtcattctgtctggaacctgctgttcttggtcccctgctgtggctcccactggcagtagagggagcgcattgccagatatgaaggaaactcatacttgagtatgagtatggtatgaagagaggagctgtcgcaaggatactccccctgcatattccagaagcccatcactggattccctagatccatttcagtaccccacatcccaaaaaggaggactagaactaagtatgtgtaaatatgtccacatctgtaatgagccaaattctgctctgaagaaatgtttccagtttatttggtgaagatttcagttcctcgaacttagttcaactcagtaaacattttaatcatctaccccatgccagactttaggctaggttcagtgactacaaagatgaagatagcctctgtccttagcatgcaatcaagaaggaaatagaaagtgtatataaatggttataatatactttcttgctttataatccttagtgctttttgtaattcttctatttttaactctcctaaaagatatatatcaggtttatgttatctacctgtaaactaatgtgctaattcaagataaaaatataggaaaatctcggccgggcgcggtggctcacgcctgtaatcttagcactttgggaggccgaggcaggcggatcatgaggtcaggagattgagaccatcctggctaacaaggtgaaaccccgtctctactaaaaaatacaaaagattagctgggcgtggtggctggcgcctgtagtcccagctactcgggaggatgaggcaggagaatggcatgaacccgggaggcggaggttgcagtgagccaagatcgcgccactgcactccagcctgggcgacagaacgagacttccatctcaaaaaaagaaaaaaaaaataggaaaatctcttcaggtataactcttcttttacaagtttctcatgaaaggggcaagcacaagtttcaagaatattttcatctaattttttgtttttattttcataattttctcaagctaatataaggcattttagaactttgaatataatttgaatcttttaaaacaacatttagctttctcaatgaattataatttgccctatgcatgcctgtagcttttatttcttctctgaattaaggtattaggcatttagtgggcactcattagatacctgttctcccagtacaggtagctgttctctttgaggctgtaagtgggtagtccctcatgtctcctgtgctgatgtttcatgaggtccaggctttcaggcctgtgaggatcccagatggcccaaaagagtcccatcatcccacttattgccagaaaatacagatgatcaaaaagaagatgtgtatgcattttttttaaataaaaatgggatcataccatgagttatactttgttttctgttttgttttgtttttccttcctcctcccgtccctcttttatacatcaagcaaaagagcacagttactgtggtaccaaacacacctgggtatgaaactcagctcagccactccccaattataaaaacatggacaatttttgtaaaacctctgggcccctgggaaataataacattaagtttaaccttatgaaatgggcatttttgcaggttaaaaaaaatgcatattgaccatttcacatcaccctaacagttccctccttgtatagttttgtcagcattaaatgagatgatgcacatgcagttataatgtctggcagtgaggtactcactaatgactataaatattaattgctactactactaggatgacgatgatgatgactgctaagaagcagaagcacaaatcaaagggaactgaaagagcagccattcttaggttttcaaccatggattttggacttgagaattatactttgttttgttgttgttgttgttgttgttgttgttgttgttgttgttgctt

SEQ ID NO: 52066 - DNA, 12923 bp, Homo sapiens
attggcaactaataatctgggacctggaaaagtggggaactaatttaattcagctaaattgtttacaaaataacagctcacacaaagatacacatataccactgttgaaaagagacttatttggctacgaggcaaagatttaacattaaaaatcccgttttcttgtaaagagtaaacaagtgttagctcatgtatgtctccagctttggtaggaatacagctgtatgcatttgacctgaatcactaccatgtaaaagtgtcatacttgtgatttttagtaccttgtcattcattaatattcagagtatagaaaaaggcagaccaacagattgctgctattttttttttcaagcccacagctaacatcatcgattgctgctatttgaaacaaagtcaaacaagacccaaattaagggatttgcttattgtttttctctatcaaggatattagctgtatattatagtagaaagagcaagggctttagattgagtcagacaaaaattgcaagcccaacttctctactttctgggtctgtgatcttagataaagtttatctctgcaagatcctcagtttcctcaactgtaaaatagagataataatatctactttgcacggttatcatgaggattagaaatgcacttatgggccagacacagtggttcacacctataattccgacactttgggaggctgaggtgggaggatcacttgaggccaggaagttgggaacagcctggccaacatggggaaactccatctctactaaaaattcaaaaattagctgggcatggtggcgcgcacctctaatctcagctacttgggtagctgaggcacaagaatcacttgaacctgggaggcagaggttgtagtgagccgagattgcgccaccacattccagcctgagcgacacagcgagattcttgtctcaaaaaaaaaaaaaaaaaaaaaaaagagaaatgcgcttatgacaaacatctagcatggtgagtaacatagtagataataaataattgctaataatattagaagaattactctttagcaataagtcatttgtttcctctagcttctggtgtgtggggaggtataactacaaagattcctaaccatttctatatcattcttaggatgcttctatagcagtttgccacctgtttacagaacctgtaactatttgtgatggtgcccagattaaagtcagccctaaatttttgctcacccctacccccatgcctctcatccatatttactgtgtccaaatccatctgtctattgatagtttccttgctatccacagccataccacatatagaatggggagtgagttcaggcctgagccaattcaagtgtggatttggaacttgggggaaagaaaaaaaaaggccttgtaggggtatgggatagtattaagcagaaacagaaagataaagatggtttatggttcattctacactccagaatgataatgcaataagctaaattctatagatggttttgaagtgttttatgtgagggaaattagccagtctgtcagctccaatacaaataacctcaggattcttccttcacattcctcagtgactcctcagaggggagttgcctctgagaaccgtgtcagccctgtggaaagaggatctctaggcaggcccaccagggtcagaattctaagatacagaccttgcatagagaggcctttaaggtctagagtaggagtcaatcagcaaattatggtccctgccagggtgttttcattcataagctgagaatggcttttacatttttaaagagttgttgtttgtttttttaaaagggaattgctaagaaagtaaatttcaaatattctcaccaaaagaaggtaagtatttgaggcaatggatatgttaattagcttaatttaattattccacatgatattcataaatcatagtatcacttcgtgatccatagatacatacaattataaattgtaaatttacaagaaaaaaattttaaaaagatgtggcagtactatatggcccacaaagctgaaatatttacagaaagagtttgctgatccctgattttgaggcctcttctctgaaaggaagtgggtctcaccagaggctgcaggaggtttgaacatctgttttgaatcccagggtagagacttacagaaaaagtaggtgtcaccatcaacaaagaatagatttctagttctcttcgggagttccagagacctggcaaactaacccaatactcagggatcgctgggctagaaagactgaaggcttgtgttaggtttagaatacagtatcgcctttgttctgactgagcagtagaatacatccctcattaatgttgctctctcaggccttttaggctatgttccagtgagtcctgctgctgaatgccacatcagtgggatacaggccccagatcagtgtcctgggcccacaaacaggggagaattagctttgtggctgctagatagacaagggagtaagtgaaattgtttcttttgcttatgtatttctaaattccttattataagttagtggaaattaataccttatgtctaggtaagcatattcctatttcgtctgttcctcaaaccagaggtggggattataggcctgaaagaagggcactgcatctctgggcacagactgggcctatttcctaatgtggccactgtgaccctagaagagggaggacacaggagaaggccagggcgctctgcctgcatgcgtggatgaccatgatatttctgaaatactttagtctaaagactacagcatttacatttcccttattctttttatttttcaaatattttttcctaccacacaccagaagatggatacagttagtccttttactagatggtaaatatggagctttgagagaacaggtactctgccccagatgacccagcaagttggaggaaaacccaagaatgaaagcagtgttcctgtctttgggcatcctgccactatcctaggcatgggtagtttccagatggagctaagatcaaactcctttatcactagtgatcaaatctggttgtttctaaggctgcactgttgttctgatgaccaagtggatcatccttgaatgacagggaaaaaatgtattaaatgagtccctcaccagcctgtcttcttgccagcaccctgacttcttaaggtattaacatgtcgtgtcactgatgatgacctaggattgcaggaagatgacagagtcactgttcctgtgtgcttggctgctcggctgttttgtttgcacttcagcattcctacctggtgtgtggtacatttttgtcattccacagcagtctgctgtgctcctggctccagagtaagctagtctacatctatttacatcagctttccagctgtcagcctcctcatgctcctgtctgcctgatggggcaagtagacactctggcaggagctgcctttcagggaggttagcaggatatccacagagttccagatactgtagtcaaagtataaagtccctaggaccccagtctctaggtcttgcagggatgaagaagctttcaggagattatctaggcacagctcctggcccaacaagatttctatcctagtgtgtcatgtctaggaaaaaatctctggtggcagattttcaaggaatttgatgtacgtgctaaaaactatacagatcggttgaggactggcctaacccatcctctgtctcaaattcctataaaaccctcccaaacaggctttttctttttctttacaatgtcagcactcagtgccctagtctgggacttatgactgataaggctgagcttctgggtagttgagtggcagtctttctttgtttttattcagatgatttcaatgcagccaatttgtgtgtgtgtatgtgtgtaccctgtccagaacaacagggcctacctgactcaagagagtactataagcaacagctttcaacttgaggtccatctggtcccagaggtttggcactagacagctggacatatgaaagctctgtttgttccccttcgtcttccctgtcctgtttaatgctgaactgttttcaacaagacttgcttcccgtagaatccaacttagtaacctggagaagcctgaggccactcctggagcaggaagctgccctagatttgggcagtaaccagtagaacttgatactgacgccagagcgtaaaaataaacacctcctacagttctgtcttaatccattggcatcagagttgctattattaacccataggcctcacaggcagctgtgatggtcagacaacagcctggacaaaacctatcctgccaacttgggatcacactctctccccttcacctactggaatatgatctggggccccaggagaagcaccatcagtctaggagcatgccctacaacaggtaacactggcggtggattagtatctttggttttggagagccttgaggctcccagggccagcctaccagcctagagtatgatggccacagacaggatgactgattcagtcctagtgtgggggaggaaaaaaaggaatgtgacccttccatttcctttggctcttttaaagagattttgcctgccacttccctgacctgaagactttagattttctgggaaattgggacaggagagaggaaagagctccactggtcatctgccaaagatataataataataatgacttattactaagcacctaccatgtgttgggtactttatgtacaatatcttacttatttttacttcaagcttttcagggaaaatatgacagttttacaaatgaggaagctgaagttttagtgaggttgagtgaccacccagaattccacagctggcaagtaatgtgtcagagttggacccagacttgtcttaacaccaaaatccatgttgtgaatcattatagaacctaggctgctgaatactcaggacccaggccaggcttcagctacctgctttttaaatgtgggggcttaagtaaacaaaaatatataagttactctcactttagtcttacaactaaagcaatagttactggtacacagaaatggtttttgctgccacctgcgagtgagccagtcccagtgctcttactgtccatggtgagctggactccagagactagcagggcaagcctcctggaagatgagatgcctcccagagaaaggctttgactctgcctgaggagtctcagaccatgactcctctgtagagaacatggccagattggaacctggttccccaggggaacaaggctttgatggttctggcagtcatgctgagggaggggtgtacttgaataaaaagattccttgaaggacaactaggcttcccccacccctctctttttccaacctcctccaccctggccccacaactggcttctgtaattcaatctagattcttctcatagcctactttactgtgcgtatgtggccttttatttacagctttgggcattctgattggatagcagcttcctagtctgtgtgcttcagtccactgcctgtggggtgggggagcagagtacactttgatttttgcttcctgaagcccaggagctaaaaggaatagccagagggctgcccacacagccaaaggactgaccacactgagcagtcaaagagcagcataggggccttttttgttccagctaactttctcctgcaaatacacacttgagggccatcctccaagcaaagcagtctgtgctggggctttcagcatccacccctcgtacactgtctctggtcttggtggcttcctgctcccttgctgctcacctacacctagcattgagagactttagcctgtgggccttactcactgctgctctctccatcacctcatctgaagaactcggtctgtcaaggtaggaaccaaatctttccttattccctatagtcttcctctctccccctaatacatcctcaaaagaaatagggtttacaacaaattcccagtctctagagacttacagctagcagttagaagccaggcacctgggagtataggtgtgtttatgtgtatttgtattcatgttggaatgcaggaggtcattttttttaacacactgcataggaaccttcccttgggctccaggttttaatttggcttaggttataattagacctgaaaaggaccttaagaggtcatctgattgagcccgctgcttccaaacaggtgctacaagttgagctaaggagggaatcaaatggttggcctaatggagaaaggtgtatacttttgctggctggatcagcagaagaaaataattttttgttttctagattgaatcccttttgagcatagagaccctaggggcaaagctaggtttattatcatcagattttaatggaataaagaaaagcaactctttcagctcagtgaggttcaatggctctagcttattcttttcctgggtatactttcccaatgctgcagtctccatttactgaattggagccttgggcgcctggggtcttttaccttttaggctgctaagcccattctacttcagagccaagcctcttctggaatgtttgtctttgacttttgggggtggacgtttagctgaacttttctacaacatatgtgagaagccaaaagcaaaccaagttctgtgcttcgaaagaggactctatattaaggaagcctaataaggcagcaactggtgtgtctgggacagcccttcaggctaggccctttcaacacactcccagcatgccgtctggcctcacttggagtccaaaataacatgatacgagttagaaacagtggcctcctcagctagcagcagctacactctacttggaggaaagacagatgacctcctgggcattggctgctattccatttatggaatcagactcctgatgccatagccaggtgctctcagcatctaagaacttgtttattctctctttacagttcagtcctagacacccacaggaatcactgttaccaccagttctgaaatctccaaattctttgagcctctctcacacatttcacagagaagtacttgtcctataggaaactcagagcctccatctaatctcatggcaagggtggagggtagctgactttccaaattcgtgtacaaagtttatttctgttctgggaagttaggtttgctattggtgaagttaatcaacatctgtttacaaacatttgatttgggaggcatgaaaaaagagagatgtttctgtcagttaattatttcactccccatatctctaactcccaacaaactatggtcagttctgcctttgcctagggttccctggaggtgcctctggggccccccacagtaaggagagggaattggagtgcatggggcattaggcctcctctgcttcaaccagggtagctgttttatgtattggggctgaaaaattaaaagcattgctctaacccttacaccctgaaactttctttttgctgttctggcctccagaggcatattggcaattattttaacaaaattatgagcccctcaaattgggctattacccctgaacatccagcatagctccttatacacaggaagaatacagtagatgcttgtggcttgattgcttgcttgattaattggctcacaagatgatattaattgatagcctcaggataattctagatcagagaatagagtacagtatgtaataatttattttgatttgttatggtttgagcatttctgacctttgctactggaatcaatcatgcagtctgaggtgaaaacttagccaaaaggaattaccttaactgaggttgtcgctgttggagaggatacccagtaagtcagcacaaacaaaagtaccttctgttgatttccaaagatttgtatgatttcaatccacctctgtccctggtgtactgaggtgaaaggtcagcagagtgattattgggaagaccaggcatagaggtatactaaaatcatatagtcctgtctattgattagtactgcttacttttgctaaaaattaccttcttggacagttcccaaaactactcattgtcttgattgtgggaaatgcaaaacttttctctgctaagctatacttattaacaacatctaaactgtttatctgcagcctgcattatacatctgcatatcttttgtgagggtggctttgtttttaattagcttatatgttttataaaattataatgttttttataaagctaaataacaggacataagtgaaaaaagcagccacattcaaataaagtctgccagttcagttaattgtaatgtactcaatgttaattgctttgttttaacaaatgtaccttgattacgtaagatggtaacattagggaaactggttaaaagaggtacaggaactctgaactatctttgcaactttttataactgtaaattattccaaaataagtagttagcttttaaaaattcatacacagcaataaaggtcttcacaatgaaaaaaaaagccaaatagtggctgggcgtggtggctcatgcctataatcctgtcactttgggaggctgaggtggctggatccttgagcccaggagtttgagaccagcctgggcaacatggtgaaaccttgtctctacaaaaaatacaaaaattagccaggcatggtggtgcatgcctgtagtcccagctactcaggaggctgaggtggaaggatggcttgagtccaggaagtggaggttgcagtgagccaagatagggccactgcattccagcctgggcaacagagggagactccatctcaaaaaattaaaaaaaaaaaataaaaatttaagccaaatagtgccaaatctggggcagtctgaacatcaaaatcagtaatggattatgacccactgactttttaaaatccaggggtccatatttatcctaaatcaataaattaagaaaggaaggaaaagggaaatctttattatgttagaatgccaactaatcaatgtagaaggaataatagaaaattgtcattttttggccaggcgcagtggctcatgcctgtaatcccagcactttgggaggctgaggtgggtggatcacttgaggccaggagtttgagaccagcttggccaacatggtgaaacctgtctctgctaaaaatacaaaaaattagctaggcatggggcacatgcctgtaatcccagcacctcaggaggctgtgggagacggaggttgcagtgagccaagatagggccactgcactccagcctgggcaacagggtgtgactctgcctcaaaaacacaaaacaaaacaaacctgtcatttttcaaccatcatagtaaataactgattcagatgaaactcatcaatggatgctaaaatgattggatgaaagtttgatgggaacaggttatttatctaatctaaaagtaatctctccatagattgcttattaattagaggagaaaatgataactttacaatggagaaacctgacagacactatcttaacgaaggactagttcaaaattagcatcatcaataaagtgataaaatgacctcatgtgttgggttttgtcttgttttgttctgcattatgtgtttctcccagactcctattttatgtttttgttgtactctttgttttctgttggaggctgccctcaaaagtctggtgatcccaggccgggtgcagtggctcacgcctgtaatcccagcactttgggaggccgagacgggtggatcacaaggtcaggagatcgagaccatcctgggtaacacggtgaaaccccgtctctactaaaaatacaaaaaattagccgggcgtggtggcgggcacctgtagtcccagctactcgggaggctgaggcaggagaatggcgtgaacccgggaggtggagcttgcagtaagccaagatcgcaccactgcactccagcctgggggacagagcgagactccatctcaaaaaaaaaaaaaaactctggtaatcccttggctactgatataaaaatgagccatttaaaaacactggaggttctgtgagagtggaaagatatatcaactggcaaacttgtctggtgggcaggtggaacaggctggcctttttttgtgtggggaaacccccagagaatttgacattcttttctctgaggtagttcagtttctgcagagaaataatctaccaggggtagggtgggataaataagtctggctgttggtattatcctgaaatagaaggaagaagtctagcaattctttggagattttcacctaacccctcagttttcagattggcctctcatcctgctttcttccatgccttgttttccagagtcgaatgcagttccactcaaagttctccagaaataaatctccagtaatcctgaggagcaggagaccagtggtctcctgacagtgtagggttgttggtggggactgggtgtctaattacttcttctacaaactttaaccaacatccctatttttttttttcctttaaaaagaatttttggtcgagcacggtggctcatgcctgtaatcccagcactgtgggaggccgaggcaggcggatcacctgaggccaggagttcgagatcagctggcctacacggcaaaaccccgtctctactaaaaatacaaaaattagcctggcgtggaggcacactcctgcagtcgcagctactcgggaggttgaggcaggagaattgcttgaacccaggaggtggaggttgcagtgagccgagatcgcaccactgcactccagcaagcctcagccacctttaaacatattttttaggccaggtgtggtggcttctgcctgtaaccccagcattttgtgaggcctaggtgggcgaattgcttgagctcaggagtttgagaccagcctgggcaacatgaaaccctatctaccaaaaaaaagaaaagaaatacaaaaattagctgggcgtgatggcacgtgcctgtagtcccaactgcttgggtggtggccatgcagagtgagttcctagcattttaacagtgctttatatttctataaaatggtcagtttacagagcactttcatgtactgttttgaatagaccactgttcagatctatagtagggggcatatgtttcccctaagccttcaactccccataaagtagcctggtccaggcacaggaagactcagtaaccaatgtttatattcatgcctgctttattttgagcaccctggatctctctattgcttatgaaagctgcccagaccactactgagttctggaagatgctgggattgaggagtggggaaaggtatccatatccagtcttttcatgtttctccaaggttaccgtcctattttggtcagaattgtgtaatctcctttgtgggggttttggatattaaccaacatcttatcacttgataatagtatcacacttactgggtatttactgtatgtcaggcacaatttaagtgcttgatagtattaattcacttaatgttggtggtattttcatcaccattctacaggaaatgggggcagggaaaggcaagataactggcctaggattacacaacactcaaacagatattacctcatcttgttaactattaaatgtattgcattcagattttacttggtgtggggtacagtggctcatgcctgtaattccagagctttaggaagctaaggcaggaagatcacttgagcccaggagttcaaggttgcagtgagctgggatggtgccactgcagcctgggcaaaagagagagaccctgtctcaaaacaaaataaaagccacacaaaaaatttttgctgatgtacagtttagatacttgttactgatattctttatcctgagatagttttacttcctgaatccatggattcttgttttctaataacttctgaaatattatctgtcattatctcttcaaatattacctctccttgattctctaccaaagattctgattataagtatattaaacattttcattctatcttatctcttaacttctcattcacttttctgttcctttgtttttttgtgctgtttctatgtgatttcttcagatcgatcttccagttcactaatttctcacttcaactttgtcttttctgctgttaaatttgtcctttcgttgttttttttttcttttttgagacaaggtctcactgtgtcacccaggctggagtgcagtagtgctttcatggctcactttagcctcaatctcccaggctcaagcagtcctctaacttcagccttctaagtagctgggactacaggtgtgcaccaccacattctgcttgcttgcttgcttgcttgcatatgtatgtacatgtgtatgtatctagtgacagagtcttgctatggtgcccaggctcttaccaaattcctggcctcaagcaatcctcctgcctcagcctcccaaagtgctgggattacaggtgtaagtcactgcacctggctgagtttttattttaataattatgtttctaacttctgaacatatttcgttctttttcagatctgcctggttatttctaataattcattgccactcgcttacctttgagatttatcttttattttaaaacatttcacacatagctgatttatattctgtaactgacatttttggtatctgaagttcttgcaatctaaatacattatttattgttttctctgttatttgctcatggcatctttgtgatcattaattataaactaatttttcttgatctttaattttgagaattttgttgacttagattgggaaatattttcccccagagaagattcatatctgcttctaccaaaagctgtggaacaccacctaccatggatcatgatgaacttccttcaggcttccctgtttctgcttaatgcagaactctcaggtttagctccctcaccttcccagtggctcaagtatggtcatcttggctgcagtgatgctctgggaattggctgacaaggaaccctggttctccccctt

SEQ ID NO: 52067 - DNA, 630 bp, Homo sapiens
tgaaccagtgaagctgccatgaggagtgctgggaacacggcaaactgaaggtcacgtgctcatctaatgaagggaaccacttctcagctccagctgattgttagtcatgtaggaatgagggcctagtgtagccagttcttttggttttttttcaagcaaaacaagctggaaatctagatttttttctagaaatccccaaaatgtttatggtggcatttttactatgcaaagcacataaaacctattgacatactagatgtgacagtcagtctgtcactttgcagcctttgctaatgtttatgatggcatttttactgtgcaagccacgtaaacctattgacacactagatgtgacagtcaggctggcactttgcaacctttacagcctttgctccagggtcatgactggatataaatgggagggaatgtactgactgaagacatatctgctcagtcatgtttccatcctcagaatgagcatggtgtgtaatgaagggtttaagatcttggcattaaagatttatttattaagcactttactaaggctcagctttcagtttttcttcttccttaccttcttcttcttcatcaaatatgctgttctcagaagagactgaccttctcaaagcc

SEQ ID NO: 52068 - DNA, 2906 bp, Homo sapiens
ctcatcctttcctgattgaaccacagtcacagcctccttcctaatcagtctcccggcctccatacaaccaccgcaatcatcttacaaaaaataggcacctggctctttggcttggcattaccatcaccaactactacagtaattctcaaacgtgataaagggccagaacccagtgtcggttaaaagatctatgatattaaacaaaatgaggcataaattcctagtgtttacagatgtcatacaataaaaagcaaattcacaaattagttgtagatgttaacattaatgtgatgaatgagcgtgtgctgaagaccaaacgcctccagaaaaaagaacaggatgcacgtgccccgtgcaattctgtgaggttggcctgcctccaccggctgtggaaggattgcgaatgtctcccattcctctcgctccaaacttgtgcaataccttcccttgtacagcgcaccaagacagcatctggccttctcttgactctaaggcatcatgtatcatttatgaccgtctttattcttttctcagtagccctcgacaagcgagtagtatttcttggctccaagtctcataaacgtgtaaccagactccattggaagacggtaaccccacgcgatacggactgtgcttgtattaattctcttttaagcttactacagaaatatcaatacagtacttgagaattcctgcaggactcagcctcgcttcctcgaggagctctcagcctgcctccgcactcgagacggcagctttctctccctccgcccaccgttccgccgctaggtggcaggcggctcaacgacgcccttttaaaccgtttgccccggagtggaccgccgggatcgcgtgtcaccacccaaccctagcgatgattggctatttcgccgaggccggaggaggaaccagcggcagaaccggaagcgtctggtacggcgagtgcacggagtcctgagactgcgtgcgcacccaggcaccgcgccgacttaaagaggccagttgcagcccctcctccggccttagggggcagaccgtgttcctacgtggagggcggaaccctcacactgaggagggctgggtcacactgaggggaggagtcaccttgagaggaggggtcacaatgactagtggatttcctcggaggtggggtctcactgcgtgggaggaacacagagcaagggggtgcagcactgaggggttctgacacactgacggtggcagtgccacactggggaaaagtgcccccgaaagggaggtgtctcactgaggaagggaggggtctccgagggacagcgttctttgaggggggtgggatcttgcggaaggacgggcttccctgcaggtggaggcttctctcttagagtcttttgggcaaagtagtaagagggaggtcccggctgggtggtcacagggcggaggacctggactctcttctttattgggaggcggcaggatgaagtgaggaggagtcggggctaagctgggtatgggccggccaaaggcttcctatagccccggggtatcacaacctcccgtgaaggtagaaggtgttagggaggccagaggttcaaggtgtcggagtcgaagagacctgggaaatgggcaggctgggccggggcgcaggccaggaaggtggacaggttgctaggctacctctgattgcggctgggcctgaggggcctacctttctgccccgttggtccctggagcccaggaatccggcaggtttctgagcccgaccctcaacggacagtaacccagggaggagaggggactccctgggcagctaagcttcgcatgcgcaccatcagcccttaattccctcccgttattcaagctcaggccggagcttatttgacccgggcggcccagggcatcgcggccggaaagcggggaggcgggggtgcgcacctgagggggcgtggccgctgccgggaggccgggctggaaggagttaagcggaggcccggcccagccccgcccccggcaggccgcggagcctgatccccggcggctaagcggagcagccgccgcccgcccgcccgcccgcctccgcccgcggcaagccagcccgccggcgccccggagcgctgccgccaccgtcaccgccaccgcccggtccaggcccaagcccaggccctgcgcggagcggagcggcgcggcgtccacccgggcccagccagccggcgcggcgggggcgggtccaggatcttcggcggatcttccattctcagggcgggagccggagtccgggcgcccgggatcgggctgggcccgcgcccatggcaagcgcggcctgcccgggccctggggaccctgccatgtgaggcaggcccgggctgggggcccggccatggccggggaacggcccccactgcggggccctgggcccgggcctggagaggtgccgggggaggggcccccggggccggggggcacgggcggaggcccgggccggggccgcccctcctcctaccgggctctccgcagcgccgtgtctagcctggcgcgtgtggacgattttcactgcgcggagaagatcggggccggcttcttctctgaggtctacaaggtaggaccggccgagagggcagaggggcgggaccgagccttcaaccagaggctgaaactagggggccgggagtgcggggaagagggtccagactccggcgacccgcccgacctgcccggccctcgccggctgctcctgcccccaggttcggcaccgacagtcagggcaagtcatggtgctgaagatgaacaagctccccagtaaccggggcaacacactacgggaagtgcagctgatgaaccggctcaggcaccccaacatcctaaggtgagcggccccagtctctgggcagcttgctgggcgggagagaaagggaaagatcccgcgggaa

SEQ ID NO: 52069 - DNA, 1517 bp, Homo sapiens
ttgcagtgagccgagatcgtgccattgcactccagcctgggcgacaggagcaagacttcgcctcaaaaaaaaagaaaaaaaaaaagaacttcctgctgttgaacctttgactgtcccggagaccctccctcttccgttttcaatgtgtccctatcctcctagctaggctttaagaaagaggagggacagctggggccctaggagctccccctgagggtctgtccctgggaacggggcgctaggacgggcactccttctggctggaatgctacgccggtgagggaaaggagtccactagggaagtacctggaggtggagacggggagagaaatcacaggtatttgtgagtcgatcagctagagggtgtggcaagggggggcccctcggaagatgtcttaagttccaggttcaggaatcaatagggaaactgcccagtccttgtgttcagggctgagggcctcggtgacggagacgaggtaagaaaacggaacggctgtacaggagaagacagagaatccgggctgggggacggaaaacaaagttcaaatcataccccgctacagtcacatatgaaaaataaaattgttttacagaaactcagtttacaaacgactgcttgggagcagtcatgtcacccagtccagagggagccggtcagctgcgttccgcgaacttgggaggcgactgctggggtagcggcggggccctcactgcgcgtcgtcagggaccagaccctggggtggccccgaagcgtcgagactacaactcccgggatgccgcgggccaggctgcatcccgcctgcgcagaagtggtggcaactccgcccctcgccaggcggcggcgctgcggactcagtcctaagcgggcgaaggcggcgagcgccgtgggtctgggcgggccaggagaaccgggtgcttcgaggagatctgcgggctgggttgggggcgtttgaccccttggcttgtcccagtgggtaggcgggactccaacccccgcctcctccagggtaaagctctcacgtccacctggcgcgacgctgagccatcttcagaagcaccgcagccctcagaaccccacatcccgctgccggtggttccccgcatccggtgtccgcccccgaagcctccctccctccctcctccgcatccccagctacctgcccttaaccgcgacctgggcctctcctggggaggcccagggtggggtcctcagaggtccagggacccaggggcatttgtggggtctgtaggggggtgggcttaagggaagggtggtccctttcaaattgggaccaccaggcaggaatcaggcgcacgggttcctcctctgtggcttcctgtggcactccaagtgggaagaagagaagcttggaagtgaaagcctcagcttctcctttcttcagcccctcaagcctcagaaagatctgtcaagcgcggcccgcctctacagaggccctggggagatggtctagaccttgaaatatcctagaagaggtttgacaggttggagcttttgc

SEQ ID NO: 52070 - DNA, 2523 bp, Homo sapiens
cccagtatgcagaaagggaatgcagcggcatgtcagggagagtcagtgtaatttcaactgtctggcttacagtagtagctgctcaagttaaaaaatcactagagtccgtcggggtggcacgtgcctgtaatgtcaactacccgggaggctgaagcgggaggatcccaggagtttaagaccagcctgggcaagagagcgacccgccgttccaaaaaaaaaaaaatcactaataagtaggcacggttctaacttgagtgatcccatttaatcatcatagctcttgaagtaagtgcttatcttcattcctcagagtggaaaggaaggcacggagagagaactaagtttcacaaggtcaccgctcttgagtacaggaggcaggattctagcccaagcagagtccatatgttgtgtaccagctacacagtgaatggtggctactatggcgtttgccaaagggagagggaggtagaagaggaggctgtttcaggaatgctccatatttggagtaatgagcacaaggacttcatagcaaggccaagaacagcgtaaagctgcccgcgcatgaaaagcagccgcgttgaccgggcgcggtgtcacgcctgtaatcccagcactttgggagggcgaggtggactgatcgcttgacaccaggcgttcgagaccagcctgggcaacaggtgaaaatccgtctctacaaaaaatacaaaaattagccaggcatgatggcgtgcgcctgcggtcccaactacttgggagcctgaggtgaggcatcgcgtgagcccggggaggtcgaggctgcagtgagccgtggtctcgggaacaaaaaacagccgcgctgagaatgagccccgtgtggttggtgcgcggacacgcactgcctgcgtaactagagggagctgacggatgacgcccccgcgccacgccgctcagcgggatacgcttcttggcggactttggagtgggaagcggggaatgtctacgtgcgtatgcacgtggcactctctgcccgaggtccggggactttcccctaggcggaaaggggaggaacagagtcctcagtgtgtagcctaggatacaggccttcagcacgaaccacgtcctcagcttcacagagtagtattttatagccctaaagaaattgtgttttatgattagggtgagaaagttggtggcgtgagattaaaaaaaccgttttcgggcataactttctaagactataggctttcagaggcattgtggctagcagaatagctaatagacacgaaatgaacaaatacaggaaagctagaatgacactatcttatgcaaatatggtctggccccgccctacggggagtgggcgtggcctccccggagccggccggcctgctcgcgtgcgcgtgcgcgttggggcggccggccaatgccggaccgcttcggcaccgcccgcccgatccctccacccgtgggccggcaatggcgggcgcagtttcgctcttgggtgtggtggggctgctgcttgtgtctgcgctgtccggggtcctaggagaccgcgccaatcccgacctccgggcacacccaggtaccagctagggctgctggaggagggctgggactgcgcacgggtcccaggccccagctcggctgactcgcctgtatcctccctccgcagggaacgcagcccaccccggctctggagccacggaaccccggcggcgaccaccgctcaaggatcaacgcgagcggacccgggccgggtcgctgcctctgggggcgctgtacaccgcggccgtcgcggcttttgtgctgtacaagtgtttgcaggtacggggcggccgggggtaggggtgcccctgcaggtgcgggaccgccgggcgtggggatcccctgagcccgaatctcccatgggggtgccagggtaccaagaacaagacacagcttccctgtctgtaaaataaagacagtagtccgttggccttccaatattatgaggttattttgaggatccagggaggtaacggatgtgaagagcgtgtggtgaactgtaaataatgactatcacatttagttctcctacaatccagtgaggagtagtcacttgctcgaggtcacccagcgctggcaactgctggagctgggatttgaacccagctagcagtgtccatgctacaagagtggggccagccttggcacaggaggttgattgctgcagccagtgtttctagagttccagatatgaagtggtctcatgttctccttgggaggaggccctgaaatgtaagttgacagtacattttgaaaaacagtaccttccagggctgtgtctttagccgtgaccctattacgtacttgcattataaaatagaaccgatggaaccagtttagatatatgaaactagaagagatagctaataatgaccccaggtagatgtgacaggctaggatgaatgactgaatttaatgatgaactttgagaaggatagactagtaaattctgttcttggacctgagtacagtctgggagaaacataatgtagcaggagg

SEQ ID NO: 52071 - DNA, 1153 bp, Homo sapiens
gacaagtgtctcagtgagagacacccagtggagacacaggggcaagagaaggccatgtgaagttggagtaatgcagctacaagtcaaggaatgcctggagccgccagaagctagaagaggcaaggaaggattcttccccagagccttcagagagagtccagtcctgtcaaaaccttgatttcagactctggcctccagaactgtgaaaaaatccatttctgttgttttaagctacccacttggtggtaatttgttacagcagcccttggaaatgaatatagatggggaggtagccagaactacaagtcagcctcaaggttctacaaggaatttgatcagtctttgcccccaagctatggcttgggagagggagcattttcccttctaccccaccagtgaatagtttcctcctctgccatgctgggataggcagagacatgttttagtaacatgacccctcagtgtttgaaaacacaaaccctcatgagcaaacacttggcctataataaccacagagaggtcctgatccaggtgtggggtgccctggtcagtcagtcctgagtatactctgtcccaacccggggagactcaggaaacaataactcaaacctgtttgagggtttggcagactcccagcatgatccagggtcagagtccacattctccactcagaccagagacgagagagacagagaaacagagccatagggaatcgcatttgaaaaatgagtgagctgtaacagagagctggattagtcgttaccacattctgtcttgtataggcccatccaattcagatattaccatgtacttccatatgtcaggggccaagcaagttccaagctaatgacagagctgaccaagacaatcagctggccatccagagtgtaccctggaccacactgccatggagagctctgaatttggctccagaaatggcaccctagaatcttaggctgactacatctgaggttgaccatttggaggacagctgttattcagtcatatatattttgttgtacaatatgacagtcatccgacaacacagatgatttggagtgccacaaaaatgtggtgttgggccaggcatggtggctcacgcctataatcccaactcttttggaggctgaggttggaggatcacttgaggtca

SEQ ID NO: 52072 - DNA, 638 bp, Homo sapiens
ggcctggcatggtctccaggctgacagcttaatgagggtaaatgaggagccattagaacctgagctggggccccagggcacagcagggctgctgaagccagaggtcaaggccagggaatttctaatggccccttagggttgtaactcaagtggggtctcatctctggatccctctccctcctcctgcaggctagtacctcacatccacatccccccatccccaaacggctgcagtctcctctccaatttcagctggaggattaattgaggtagatggtaaattcttataccttccacccccacaatgactcattgcttgatcactgtacattctaaaagctggaaccaaacagaattacagggctaagtcctctgggggaagtggtaggtggttttgatttatccactgtcttggattacttgtgtaagtttaccctagccctggttactgagatgaaaccatttctctcctggcgctggggacataaggggataaggtgccccaatcctcttattcccatacccggggggccccttcccagagccctaactcctcccattgtcccccaagtccacactcacatcagtggccttcttctcggcctgctccagtttctcctgggcctccttcacggatt

SEQ ID NO: 52073 - DNA, 1312 bp, Homo sapiens
agggaccggcgtgccccccctcagctgcagcagccgctacccttaatttagaagtttcctgcaaatccccccggattaaatgtctctcgggaggcggagctcctcggcagtttgagtgcctcagtttaccctgagtccctctaggtttgcgttatcgacgtggtggtagtagcggagtctcatcgggagcttggggaaactgaagcaggaagcgagcccagagccccggtcgcggtggggagtgtggccgggcttgctgcccccaggaccggcctgacctctcatcccctcgcctcccctcccagcccctgcccctggagccaggcccttcctgcgagcacccggcggctcaggacccagctccccgccccgccccccacgtgccccgcatattttccacgcggctgcggccaggctggtcaccgcgcgttccccgcccccgctcccacccggacgcgtcccgagcccctccgctccccgcccctggctccgcctggccccactcccctccgcgcgccttccctcttctcccccgctccccgcggacgctcctctctttcccagtgggccaactttatgctgaaatttcttttctgcccttttttgggatgtttccccattgggaggcggagccgggctgcggcggggaaggcggagggcgaggggaagagtcactgagctgcggggcatagggggtccggggcgaggtgccttctcccacccaggccgccaaaccagcgccggagccgggtcgtggggtctgggagtcggaggcgcgaggcgcgagggtgtttgttttcgtttttccctggggtggggtggggggaaaggaagtggagagccgccgggaggagggggaaggggaggagagaacaagcggaggaagccgggagggagctgctagcctcgcccccaccctccagtcatagaggggcgggaggcctggattttgcagtgggctggggaccgtgggaacccgaggccgctggccggggcggtggggaggtggcgtggaaatgcattcagatctgtttagctgcctgctagccacacggagagcaaccctggcctgacctcgcagtgttcctctaactccgtggaagacgcctcatccaccagtagcctatgctagaccactgggtatcccctgcccttcgcgtctcacaaccacctaatcctggagaggctgccttctaccaaggaggttcctcctcgggtcggtctgggctggcctctggccgcgccttatgttttcttcagtctgttttgtagtcttacttctagttcctcaactcattcattcatttgactg

SEQ ID NO: 52074 - DNA, 2036 bp, Homo sapiens
ggcaaactacaagcctcaaatggggaaaagcagggtgagaggggaaggctggaaagcagagatgggggtgttaggatacagaaggcatttgaaagccagggaagttaagaaggggtagagggtaaagaagttaggagagatgggatgaggagaattgaaaatctaagtagaaacaagagacaggaggcaggtatgaaaatggtctagatcagcggtctggtaccaagtggcagatagaccatttctgaccttacaagcagtccagagtctcaaaagagaagaaccacagctctctgtctttactccccaataagagaggaccctcccagtctccccagttccagctctctgccccctccccactcctggggcactttgcccaaccttattactatccgcttgtgtcccagctggacagacctggctatggggttgctgaccatgaaagaatgagggctgggctggtggatccgagaagctggaggagtctgtggagccaagaagcaggactgaaaggacccttcacactaagctgaaactgcatgtctccccccatttcctctggacacttagacacccccttcctcctcaagcacggaagcctctggtgagaccccgataagggagctgagtcatgcctacccttactccccagctggtccagagtggatattcacacagctacaagagggtgtgtggacgcgaagaactgatcagtgaattgtgggtggtggtggcaaagaacaaggctgctacaagtatgagtagaagctagctcattcctcctttggcctgagaactttgctcccttttccattgtgtttgatggaacagcaactccccactgccgtgtccccctcccagggaactcctcctccctcaatacattcctgcgatgcattccaaagaagttgggcaattggagggggggaatggaggacaggaggtcaaatcccagcaaggaatggaatgtaagagtattggagctaagaaagttggggtacttggagaatatagtcagagcagatacccacaaggggaattgcagaaagatagggagttacagacaggaacaaaaggaaagagcttaagacagtcagaatataagagggatgggggagtaacactcagtctgttaccaaatttggcctctgagtccgcaaccgctggcagtgggggagggctgtgggtgagactgacatatccggcctcaggctgctggagactcatttagagctggactgggcagctagctgaagggctgcacagaacttcccccggtacagcccctccatactcaaatgcacactcattctccccagatgcaccccagcctaggcagagctctttcccacaaagctaccttactctctctatacacacattatctcaatcacacagcccccacacagatcccatcacgactgcattatcttctcctagggagcccatcctatgcacacagcttttgcacagataacctccataacaagcacacccggcacccagtgtctctcctcccattatgtagacattctccattcacccagcaagcattccttgagggccagctgtggggaagaccctgggccaaactttcagtggctggggaccaagatcagtaagacctagcctttgagttcaaagggctcccagtccacgagatgagtgaataagccaagtacagaatcacaacggagggcaggatgtggtaagagccaaaaggtgtgtgctcagagagatccctttaggtcagggaaggggaaccaaaaagtctccatgataagtatcatttgaagctagaattttaaaaaatagagataataaaaaacaatagtgatctgccatttattgactatgtcacttgcattgtatacataatttcatttaatccttacagtaggtgtcattatttccatttttacagatcagaaaacagactcaaagatgttaaatacttgttcaaatacttctccaaataataagttgtgaagccaggatccgaacccaggtttctgactgcaaagcccaagctt

SEQ ID NO: 52075 - DNA, 2862 bp, Homo sapiens
taaattcaggtaggatgtgcggattaaaggttggtgagggaggtagaactaaggatgggaacggatgataagatgagcatgggagagttaaaggcaagggaagtattttgtaaggggataggcaggatgggtgtgaaatgcagagtcagggatgagagttggagaggagggcttaataccaagagaacaagtgaagtgggagaagcagggctaaactttcaggggattcagttattcccttctcccatggcaacagtgattccttggttagcttcccccatagtcatcagctccttcttccctaggcagtccccaacttgtgactaggccttgtacatcctgggtccctatttcccacctatgttgtctgtaaacaacacagtccagaatctctgtcccctaactgtggtggccacagcaagggccttgggcttagagaatggaataaagaagctggaatcccagatgcctgcaattctagctaaagccagaacgctagcctgaaattagtttatctctctgggtaaaaagaagcccctgtaactacataggaataaaggatttccctacaaaagaagggcatttacctactgccaacctcttaaattttatctgctcaaggtcaactatgctagcctcaaaccacaacccctaaagctgccccaaattcctaacattaaccccacctctaatttgtttcctgattcccagtaccggcttggacattcatccctttcctagcacagactcatatccaatccctgatccctgaaactgatctaagttttgcctttagcaccaaatcccctgatgttaaccctaaatgttgacccctaagcctaaagttcatttataatttgattcctaactcacgctttcactgtttatccttaacaccgaccatgccaacattctttaatccctcaaacaagctctaacctgattcctgttgtttgttgacccttaacctgaccctgaactcaaattatgacgtatgatggccatcccagcaaacaagataatgaccgtaatctaaaccttacctatctaaaacggacctgactcacactaactcttaagttttaaccccagcttttaactcctatagcgacccttgattcctaaacggaccccacctaatccccaactcacccaaagctttcctacccacatgcccgctatcagctaacaccaaagcccgtccccgccctgcgccccgctgccacccgactcctcacgctccccaaagcctatcccagacataggactgctcccaggaaaggcctgtcttccccaagacggcctacttcacgccgagctcaagccgagatgcgctggacgctgacctctccaactaataggacccgaaccggacacgcaagagaggcagggcccgcccgccccggggccaggccccgcggccccaccctaaggcccccgcccggcccggtctggcctacctgcgctgcctggctctgcgccccgcccgccggcccgccgccccgccgcttctcgggtcgccctcgggctccggcctcgccctcccttcgacactctctcggccacttccgtcctgggaacgtcccccacccgcgggcggcgccctgggcccgcgctctatggtcgcggggggcaggcaggaagctgctctggccccgttctcgatgctcgggagccgccaaagcccggcagcccctccctggcaggaagcgagggtgcggcgcaatccggagaggacgccaggacgacgcccgagttccctttcaggctagaactcttcctttttctagcttggggtagaaggcggagccggagccccggaacccccgccctcggggtgcgaggcggcagcagggccgtcccctacatttgcatagcccctgggacgtggcgctgcacccaagcctcttctcagttggagggaactccaagtcccacagtgccacggggtggggtgcgtcactttcgctgcgttggaggctgaggagaattgagcctgggaggcgggtccggagagggctatggaaagccgccggcggggaatcccggccgtagagggacagtggataggtgcccgaggcctacagctggcctggggctcgtgtctgggcttcggacgttggggcccggtggcccaccctttccgtagttgtcccaaatggagctggaattggatgctggtgaccaagacctgctggccttcctgctagaggaaagtggagatttggggacggcacccgatgaggccgtgagggccccactggactgggcgctgccgctttctgaggtaggttggggttctgactggggaaagcgtgggatgtccatgaagtcaggtgatggtgataaggtcaaggcctgttcattggaaccctgcgcaggtaccgagcgactgggaagtagatgatttgctgtgctccctgctgagtcccccagcgtcgttgaacattctcagctcctccaacccctgccttgtccaccatgaccacacctactccctcccacgggaaactgtctctatggatctaggtgagtctgaaataagtttgcggggaggacagggttcatgggcctggctattcatactttcccttttgcagagagtgagagctgtagaaaagaggggacccagatgactccacagcatatggaggagctggcagagcaggtacttgacttgattttcaggagattactctcacattccccaggtgggggcaggattccccattcctctctgacatccccatgcaactgccgtccactttcttgttaccctaggagattgctaggctagtactgacagatgaggagaagagtctattggagaaggaggggcttattctgcctgagacacttcct

SEQ ID NO: 52076 - DNA, 926 bp, Homo sapiens
gaggccgaggtgggcggatcacgtgaggtcaggagttcaagaccagcctggccaatgtggtgaaaccccgtctctactaaaaatacaaaaacattagccagctgtggtggcaggcacctgcaatcccagctactcaggaggctgaggcaggagaatcgcttgaacccaggagacggaggttgcactgagctgagattgcaccattgtactccagcctgggtgacaagagcaagactgtctcaaaaaaaaaataataataaaataaaaagggacagcacattctaggggtggaaagaagagggaagacaaaggatgggatgacaggaaggcagagaatcctctctgccagcttagagaaaaccggactttgaaactagagaccagaaaggactggtagagggagggtgtggccgaggattagggcaaccagggagagtaactgcaatctatgaggacagacagaacaaaggactatctggcatggaacaagcactcaataaatatttattgaatgagtggactctggctggaagggagaacaattgaaattgagttcttacgaaggtaagacccagagaattctgtcttgctagagctcctggtcagagtgcccacagttcagctccatcttaggagctctcttactcccttaatatggtagctggccattcctgacctatttggccttctccacaatttcaacctcaactcaagagttatcacttagaattcttgtctcacctgtgctttctcctcataggaactcatcctattccaaaagccttgtatcagtaccccccactctatcctggaatggggagccagggtccagggggttgagcacagcttcaggcctctatgactcagttcatatttaagggctaagaggctaggatgcccatcttttcttgatctcattgttccta

SEQ ID NO: 52077 - DNA, 2912 bp, Homo sapiens
atgaggtacagagaatgccccagctgcttgtgggaaataaggggttgagacccccccacccccaaataaaacaacattgtgttagtatcacagcagccagattatcctttcctaccttgccacaaagtatagctaatcccaaagggaagtcattggaaaccagtatgtgagaagagcctgaatgggaaaggctgattgcatgaccaaatgttcctaccctttccttctgaaaagacaaaacactgggagggaagggtgttgcaaagagatgtgacctggtctcacggtccaaaaccacaggcctaaaatatgccagggatagggaccgcttcactcagacaagaagcccaactgctttcttgccctttcccacctctgctagaagttttgagctggaacaaagtgaagccaaaggcattctaggcaatggggtctactcacctcaagcccatgcctatatgctttatcatgttgcttagggagacgttgttagcttgaaagggtttcctcttctctgtaaactcatgagccagacagatgcgccagccaaagggaggcacctggtagcccatagctttaccctcataggaaaccatcagctgcccagagtcctccggattgcagcagtccgtctcttttgggggtcggctgtcttcgggactcttacagtctgtaacctgcacatccttggtgccgccagtctcttcagggcaataaacttgtggatcctctttggcacagcttatctgctccgaggctgggacgccggttcccatgttccctggatcctgggtccccatgacctcgatggcgccaagtcccgagccctcggatactaagtatctcgccagcctattccagatgcgggcgccggtcgttgttaggtatcgtcccggagggccgggcgttggggaaagcttaaatgagctggtgtttcagtggagccggggagctcttgcttcagtgggggcggcgacagcaaagaagccgccttgggctctccttcggttgtctctgtaggtcctggacgggaagggtcgggcctcgtcgtcattgagccgacgattagctcgcccggccaaagggcgactgggcccgcagagaggggaggagccgcggggccagcccaccaggcaccgccccgggacgggcccgcaaggcaccgcccccgggacctcggcccggcccctgggccacggcaccgggtcccccaggattgggcgccaggtcccgccggccggctccggggcagcgcccgcgcccaggtgccagcccgtgggaaggtgaccctgggcgccgggatgacccgagccctttccggtctggcctgccgggcgcttccggccggaagggactccgcggagggtgggggaccgaagggaagtcccgcctctaccgcccagcggacgccgccgccgccgccgccgccgcgtacctagccaggtccctgaggggcgggcagatgaggcctaggggtgccgatccctagtgtcgactatgcgaggtgactagcggcggtgatcttgggctgggacgtggaactttgaggaaagggggagcggaggccagtttgggaactccgcgggggtgcccagggagaagaacccgtcgcacaggggctggggtctagggcccagagcgatgtcctccccctgggcagtactgagtcttcagtcgcctccctcccacccgcctacccctcctatatccaggagctccctcgggcaccacggtgctgaccacccctgtcctcagccctcagccctaggtgctcaccgcaacgcccctccctgtcaaggtgctgacctccgccccgccttgtttccttctagatctgattccggagctgccatgattgaagtggtagcagagctcagccggggtcctgtatttttggctggggaggcgctggagtgtgtagtgaccgtcaccaacccccttccgcccacggccacttctgcatccaggtggggatgctggcactgaaggtggtggcccttctgggaagaagccagattatctctggggctgaggcagagctcaggttgtcctgtagcgacaccacctcctcttgctcactgtgctgtcattgtaggagagggctctttaacagaagatgtggatgacatagctgtacgctttccttcccctcccccgttcccctttttacgcacagtctgctactctttatttaatggtttctctttgggattgtggatttcctgatcactaggacagccatctaaccttgttggttaagatggtgtgatagggagcttgggaaagcatttgtgaggtcaggaactacctctgatgcctccttttccttttcccacagtgaggccctggcctgggccagtgcccaaatccactgccagttccatgccagtgagagtcgagtagcactgcctcctcctgactctagtcagccagatgtccagcccgacagccagactgtctttctgccacaccgaggttagagaggggcatttgcctgggagagggggggtgcggagggtgtgtgtggaggcattgtcacccatgggtgaagttgttaattgttcttgttcttatagtccctgtcatgctggggatgttggggagcatgactattgctttaggggtagaagactattcccatttcacagcagggacggagggcctggcagcctttcactatctccacttgccgtgctagtcttgttcagtactggacaatgggtcattaaattagtcatttttacctttttcaggtgagaggggccagtgtatcctttctactccaccgaaaattctattctgtgacctgaggcttgatcctggagagtccaaatcatgtgagtgattgtccccatccctgaattgccttctaagtctcctggagggaggactcctctggtgcctctggctgt

SEQ ID NO: 52078 - DNA, 1871 bp, Homo sapiens
tcccatttactccaagactcactccctgccacctagtgcatcagatacagctacttctggctgacttttcaagggggaccaccctacctgtcatctcttcactgttcagaaatgactgtgtcagtgcacctcaaactcccttgctgtccttttccaaggagacagctaaggtggatggagatgcagaatggacctcacgttcgccctagtcaggactgataccctttccgtttcagaggattgccaagaaaaaactcacagttgaggcagggtgctctgaggtcggctgcggtgtgggaggcacggcctgggcctgctctctgggctggagcaggtggattcgaaggcctgtctagcacgagggcccaaaggtcttgtcagtggccagtagctctgccgcctttcccagagagggggtccaggggacatcctggaaggctgggccctgggccaccttctgctcttgcaagctagagccagcccaatagggggcggatgtgagtggggagctggggcgcatgaaggtgggggtgatgccgaaggggaagggatcgccagtggggattggtgcgtgtgcggaaacggggacagaagtgaaggttcatcgcctataacgaagatgaggtaggcatataggggcttctggaaagctagaggctgggctgagccaggagtcctctcccagaagttggggggcggtgcagaggtgtgggtcgagcccgcatgcgtgcctgctggggagggggtgagtggtgaggaccaggcccgctgggtcctgggggcgcggtggctggcgcgcaggtcccggagggggcggctggcgcgcactacacgcttgggaacaaggaaaacatccgccggaggcccggccgggcggcgctccagcctcggggcaggtgcgcggagaggaagtgagagcattccggcccccccaccccaaccccggccgctggccctctggtgagtcacagccgacccccgccgccggagggagaggggagctgcgggccagagccccggagggtctggaggagccaggagggtttctgggagcagagggtcacttagtgggcttctgtcgtggtgtcgctacgggcgcgaaacggacactgaacacagtctgactgtatggaggcaggtggggagggatcccctgggagaacttggcgggccgagagcagaccccagggcaaggaggggcccccgagggggaaaccgggagtcgggcaggtggcgtaacccagaaagggaaggagagccggattgattggggtgagagaggaaggaagcacgccaagttaggcctgggagaactgagggacctgaggagggaggagggagaccaacacagggtgggaaggcggaaatggccaaaccccaggcatcaggtctgtccagaggctgacgtagacagtgaagggtgaagggtaggttttaggagtagggggagttatgattatttggttacattttgggattatttggtctcacaggtagaagggagcctgctggtctctgtgtaacggatggcttaaaagcaaggttgtctgcgtcttggattactgtctgccattcagcctttgccaaaaaatttggcactgatctgcacatttttatagtcatttaaaattgtatgactctgtcaaatgatttaagtaattttggtggatttttaaaaataaaaaaataaaaatagaaaagttgcacaatctaattcaatatttgacttaaaaccaaaagtgaggctctcagattggtaatatggtattcagcctttttcttgtttggcttttgtgccatttgcccctcactgacttgattgaattctttgtggctgatgcctcagtttttctggatcagtagtgctgcac

SEQ ID NO: 52079 - DNA, 10083 bp, Homo sapiens
ccttggccagataggacaaaattccttttcactgcagtattgggagcctggaactagagttaccaacccctctgcgttaaagaaggagctgtcctgaggcttccatctctactgggcttgaggcaagaacattgttagggacggcctgctcttggcctctgtgccccagggattgcaaatgcatgttcctcaaaggtaagggctgtatcattcggctttctttgtattcacaggtacagcttgtgctaggcagccggtgttcaataaatatcgtgcctaaggataaagtggcattgtccttaatttcccccaccaaaccactaggtgtcgccttcatctcagggaaaccatgcccgtcctcgccctatacactcccaccccactccagggctccaggagcgctcttagcttgtgatttctggagaaatagcttgaaggggggagagaaaccgtggctcttagcgcgggcagagaatgggcttatgtgcatgtcctttatgacagttggagaaaaatccccaaggtcccatagcagtccctctcagccaccatgagatcatccctcacaagctgttcttggggtcagattggcactccagatatgagggccctagggagagcttcctaagggaagctgggagcaaggtggaaccccaggagagcgtggatgggcttccactgcggggagtgtcccgccggtccgttacaggctttccccaggcgccagcctgcgctgtgcaggagacaaaagaaaatcgaggccctgactgagcagatggtgcggaggaagccgggcgggctgcggtgggcctctgaggacacgaggagggcagggggcatggagacagcggggggccgagagttgagtcccaagcaagaaggagcctcgtggactttctaaggactggtgggaagtgtacagcaggggcccctggctgctggaggggcccgtccagggagcgggcatggtccgcggtggagtaagccgcactgccgtcgggagggcgctatggtttgctaggtgagggggctggtgaggataccacacgtctggggatcctcgactgcttcctggagactggaaccactgagggactcagggagttcagaggggagacccaagaagaacgggctgagcgagggggagaggacaaaccctggggtcgctggcgtgtgtgagatggaaatggaaggaggggcggcagggggaccaggggcgtgggggagaccagggtaggccctgagagtgagggagcgcccgggaaccctgctggccggcgaggccttggtgcggagcccccaagtgctcaccggggtgggtttgggacctggcggtcccgagcgcccgggtggggggtgggggaaggcagccggcgccggagggtggggccgggagggaggaggagaggcagcgggggaggggcgggggcgggcggcctgcccgggggagtcgcactcggccgccggcgcagcgagcggagacgggccgggccgaggcgacctgacccggacgagcggcgcgcgcggggcccaggcggggggcgggaggaagcgccgggcagcgccggccgccagggcccaggagaagcggagcagagaggagcggggacacgggcggggccgccgtagctccggatgggaccagcgcccgggcccgttagtccaagcaggagctccgggagaatccttcacagggagatttacccctgccttcccctgccctccggcccaggcctcgcttcgctccccgcctgcccatgatcccagtccttccgcggcgcgggcaccctcccaccttacccccttggtcctatgtggcgcagcgccctcctgccctcccggccctttcagctgtgaggttcccccaggccgtttctttgtaccacccgccccccacccccaccccatcccagtcccagatccccttttccttctcagctttagatttatcaggcttcttcacctcgcactgtccccatcctggccgcaggccccctcggtccctccctccccctgccaccccgttctcagtcctcagtccttgccctaggctggtagcccactccttgcccgccccccgccttcctcccatctccccctcctctccccggcccccagcaccttctgcatcccagcctacctagcctactcctcctcttcctggccctcttccccaggctccaggctggggggtgctcgcgtctcccctgtaggccagagcagccccaagttctgggggcggtggggctgctgctttatccccatggcgctgccatcacttctgctgttggtggcagccctggcaggtggggtgcgtcctcccggggcgcggaacctgacgctggcggtggtgctgccagaacacaacctgagctatgcctgggcctggccacgggtgggacccgctgtggcactagctgtggaggctctgggccgggcactgcccgtggacctgcggtttgtcagctccgaactggaaggcgcctgctctgagtacctggcaccgctgagcgctgtggacctcaagctgtaccatgaccccgacctgctgttaggtcccggttgcgtgtaccctgctgcctctgtggcccgctttgcctcccactggcgccttcccctgctgactgcgggtgctgtggcctctggtttttcggctaagaatgaccattatcgtaccctggttcgcactggcccctctgctcccaagctgggtgagtttgtggtgacactacacgggcacttcaattggactgcccgtgctgccttgctgtacctggatgctcgcacagatgaccggcctcactacttcaccatcgagggcgtctttgaggccctgcagggcagcaacctcagtgtgcagcaccaggtgtatgcccgagagccagggggccccgagcaggccacccacttcatccgggccaacgggcgcagtgagtgtggcctgggctattttagggtcatgggaggagggtcgctgtgtccctaaagctcagcactggggaactgtagatggagataggcattgagcagctgtatgtggtggttgggatcaagaagcacacgtggacagagcacctgtgagagggccaaggcttcatcatgggagcttgtgaacaccctaggcagatgcaaacaaggaagaagagagcatgaggggtgaagccttgtatcaaggtggaatgtgaaaatgaggggatattaagtttcgggagcaatgtttgtgccctagagtagtgaatgtgattgatagccactctgaaatgtgccctgtctgtgatcagagctaccacccagactgggcgccaagaccccttggtggtgtaaaaataatgagggctccatgaacggactcagggctcagcagatttgggaaagacagataaagctcatactgagaaatctgtgctgtctgtgcctttgagcccagggaagggcagggaagagtcagggagcaggccggttgggtggggagcagcaagggaggctctgggaaagggaggggcttgagagtgacagctcccttcctctggggtctggacaggctctgacttctgccagatggtccatatggccccagggtacttatggtggactccaagaggggtgggctggggagcatctgctttggggttgataggttagggcactctctttcttgctgaagagggacatcccagtgattcagagagggggctgtgtgggggacctggataccttctcagggtgctcctctgtcatgtacctgctcccagttgtgtatatctgcggccctctggagatgctgcatgagatcctgcttcaggcccagagggagaatctgaccaatggggattatgtcttcttttacctggatgtctttggggagagtctccgtgcaggccccacacgtgctacaggccggccctggcaggacaatcgcacccgggaacaggcccaggccctcagagaggcctttcaggtatcatttgagccaaatctgaaggaggagggggaagaggtgcttcgctggaaattctctctcacaagaccctaaagaaaccctaggaaccaggcaggaattgtgagccacaggagtaaaatgaacagaggcattctgagtctagtgtcaccctttcttacttctctacttttgtgactcttagtgtgcttgctgccaagactgactttggctgcctccaaaatcctaaaacactgactttcctaagtgccagtagtaggctatattgtgggggagaaaagttcaggaagagatctgatcctagcccttgggtgggcttccaccctttatggagaggtgaggcatcgttctggtacagtcagacaaagtttgagaaaggatatgattatgtgtcctggaacagacactaagaactttagtggctcagaggaggaagagtcagtgtgggctgtgtttagggaaggcttttacacaggaagtgagaccgtattgtgactttaatgatagatgtcatattcatagtcagagtgggagaggagatccaagcatcctgagcaaagagaaaaagataggaatgggcgtgtttgagagaccaagaagatactgacccgacaagaatgaggggttcacttaaaggagatacaggaaataaagttgcaaaggtagaatcagattaaggagagctctaagtcttaaggcactaggacttgaatttggggtccttgactttttgtgtgtgtgtgtgtgtgtgtggagataattatacagtagtgacagaattcaggattagaagagggggagacctggggcagtgagaccaactgtaacagattagaagggggtgaggtgatatagcttgaactagtgtgatgatagcaggaatggaaagaaacgcatttcagatttcagaaaatttgtggggaatgttggcatgactctgttcatttcactcctgctcaaaactttcagtgacttgtgttctagagaataaaatcctgactccttattgtgacatttaagaccttctgcagtctgttctcaaaccactttttcagtcttacctcctggtaccctcatgctgagaactgcagcctaccaggcctctgagttcccccaaccccagggccttcctgcccctgtgcctttatgttctttttccttttgtctggaatgctcttccttccctcatcccaaatatctgcctctcaaaatcatacccatgaatcttcccgattcccccgccacttttttactaaccgtgcatataagtgtttcccgtgtatttatccatatccctccttttttccaagaaggattggaggtggcttatgggataaccttaaagtcctttaaactctgggattatttggttcgaagtagctgtgtataagggctggacctgggtggccattcttctccaataaggttttatgtggctgtgattatatatttggttgcgactgacgagtgtgtgtctgactgagaatgacatagctgtttgcatgcctgagaatgagtctgtgactgtcacacttgaatatgggcagtggcagggcaggttttgtttatgccataatgttttcctaaaacaatcttctcacctttgtctgggtaatgcttccatattctttaagactcataccagttattttcctttctaggaaatgatcccagaatccctaagtgggactgaatttcctactcttttgcttaactccatctaccatagaactaaccatattattcagtctgtgtttgatttatttgaaggctgactcatttcattagtatttactgagcacctatcatgtccagtcactgtgctaggtactggtatacaagggagagcataacagactttgttcctgcctttttggagtttacatttggtaggatgggcaggcaataaataagtaagcaaataaatacaaatgtaggaacatattgtgatgtgttactaaaacataaagaggaaaggaatagagtgttatgaaaagagaagaacaaggggattgtacttcagctggtgtggactgcagaagatctgtgaccctctcagatgggagcactccataaccttcctggttatatcctttttctttttgagacagctctgttgcccaagttggagagcagtggtgtgatcacagctgctcactgcagtcttgacctcccaggctgaagcaatcctcccacttcagcctcccgagttgctgggactacaggcatatgacaccatgcccagataattttttattttttatagagatggggtcttatcatgttgcccaggctggtctcgaactcctgggctcaaatgatcttcttgccttggcctctcaaagtgctgggattacaggcatgagccactgcgccttgctggctgtattctatttgtggaagaaaagcctcactttcttctgtgagcattattgcccagccaagagtccccagcattaagggtagctagaggagggatctagtcatccaataatcagttatatcaattaactctcagttctccccctcactgtgggcattattcagacagagaaataaagagggaatctttgctgcaacacaagagaagggaactaggcaccaggaatatgctgatgggaaggtcaaggctttgggtaggtggggctgaggggtgataaggtgccccgccccccaccttccaatggggaagcaggggagagtctgagggaagttgggcagttagctacagccaagcaaggatgaaagagcacagagcctttctcccagagacactggccctctgaggtcccagaccaggccagcctggaaaaggtggcaatagaggaaaggaggccttgacacagatgcccacagcttttccaggagggtatcatgctcaaggaaaggccttagctcatgccgtatcgatactggctactagggagagagctctgaaatcaagtatgttgatatgatttttctctcccatttagccactagctgctccagggcagggatcatgctcatcttcatattccatatgtctagcatgtagtaggtgtttaacacatatttgctgaattgaattaggggtgtgttggggagagggggataggatgaggaattcacctagacaggagtagagctggcaagtaatgtaaactaggtgatcaaccaggatagggaagaaaagattgagtggaactaaataagcaatgaccaggctctgaggatccagaagcccaggctggtcaatggaggactacagggttagaaacccaggcagaggtcacaacctacatgaccagcatgagattgggttacacacagggagcaccagcggcaagaatggaagaaagcactaaaccaagggcttggagatcacttgtctcattaggccactgttgaccactctccagttggccagggcaagtctcagtgggcgggtccacagatagaggcaggtgcctcctgagggtgcacatttcctaggtgtgctcctggcacccacccaccactgcacccatttgtggcggactttgcttgttttttccacctggggtccactgtgaaatgggacacaattatcctccttcactttctctcaaacccctgagcaagcacagaaactgtttgaggttgggtttttttttttggtttggtttttcatttttgttttttggtactacaactacaactagtaaccacagcaaaaacagttctagcatagcagtttagggggaccatggggtcaaaactatttaaaaataatacaaagatcttatctgctttgtcacgcttgttcttttgtgattgtgtagggaagttttccagaggttacatggcatgatgatgtcatcacttggacagctatggaaggtgtgcttgtgtgttcttgcgttttcaaaatttatcagttttaatttctaagatggtcaatattgatagatatagtccacataaacaaactttatttggggtccttaataatttttaagagtataaagcgattgtgagaccaaaagtttgataactgctagcctaacaaactagccaaacttagtgttgagaattagtgtttaaaatgtgttaaaaacctatcatcagcctttattgaaatataaattgtgttgaacctgatcttttctcgcccttttcctgactttttacattgcttgtcaacaatattctacctctttattttattcttggaacaggtgctactgaatgaactatttcaaccctttcctcaattcccttctctttttaaaaaaattttacctgagactgggagaatgttagaagtgtgtaatcaggcagctaaatgctctagtaagaataatgatatcttgaggcaagctgcagtctaatataatataatgaatgcatattagaaatcgactttattatttcctatctctaatgaattgatacataataggccatatgtgatgtgtctagtgcagcgtatctctatggtccacatgtactttctatgacaagaataaacaaaactgggagaaatgaccggattttaaattatcatttcacaaagtcatgtttcataaaatatattgaactgaagtctttccttgaagttgtgatgccagtttcctgttggagcagaagttggtctcagtgactatgtggcctgaggcagggcctgagactgggaggtccagcagctcaggaaggggaaatgtgtgagactaatgggagccaagcaggcactttggtgagagacagagatgctgactcatgcgccagtgagatgtgtgcatgtctgagatcacatgtgtcatttgcttacctgtgaaatgtgtgtgggcatgtgactgtgtgtttgtccctgtgacacatctattactcagtaagcaggacagtgctgtttgtggtaggtgttccacacattaaatggatgagcacacagcttttcacaggtggaatcactgtctcaaagtatttccctcagttgtcatagggcctgaaatctctctaattcactgggcggagacactgtgttcaagtggccgaaatgacaatgttagtattttactgatgacattaacagtgattaacatctcagagaggagctgttagtgggtgttgtccttgatcataagcagatacccagaaagcatgggacagaggagccgtgtgagctgtggtggcctggcaggaacctggatgctggaagggagctctggaagatgttgggctgggctttggggatggggttgactattatttgccagtttccaccttcccagaaccagtcctatctacctttcaggaggagtgccactccctcttcccagatgtatgcaacacaacacacacacacacacacacacacacacgcacacacacacgcagagagagagaggttagtagccctttcaaagccttcagactcacctgtgtatattttatatcatgtatattttaccaagtttccctgtcctgcatcttctcttcccataatgcctatcttgaatcctgttcactcttccccatatgctgctggtacagactgtattggtgatcacgtaccgagaacccccaaatcctgagtatcaggaattccagaatcgtctgctgataagagcccgggaagactttggtgtggagctgggcccttccctggtaagtagatctctcccttcctgagagtcaggtcaagctttggggaagggcttctctcccaaactcagcatcaagtcttggctgtggagcaagcccaactttggggggtctccgcttctgtccaggatttttccttctgccctatggagtagttaggaagggatggcactttaggaataagagggaagaaagcaaaccagaagagagaataggtagaagggagaccccagagagaggggaaggggccttgcaggacatttggagagtactgctgaagttgccacccccagatgaacctcatcgctggctgcttctatgatgggatcctgctatatgctgaagtcctgaatgagacaatacaggaaggaggcacccgggaggatggacttcgaattgtggaaaagatgcagggacgaagatatcacggtaatgaagaggggtcaatgggggtctgagggctgatgtcaggaatagagtgggctgaagaagaaacagat

SEQ ID NO: 52080 - DNA, 635 bp, Homo sapiens
ttttccggtgagttctgggtttcttgctgacctactccctgcccccattgccacacaacctctggctgaagccaggtggtccctataatgtgggatagggtagtaggtttcttaatttgctggttgtctcttagatccaacagcgtcttcctctctagcctttctctttagttgtcgcttagcctaggtgtttgttccacttttggtcctagactggatatactaactagtgtttttcagtggggttaagatcaaaggtgaattttccattggtcttcttttaggaaagaactttcacccccagtctctgtgtttgttagtgagcatagggcatgtgccagatatgccgagaatgcagccttatcttccagccctgtctctcaggtgtaacagttgcagcttcaggagctgcagggaagcccctgcaaccctgctgttggcttgggggtggcaggattcggcttgccagtcaactgaggtgtgcagtccttacagaaagctgatgctggagaaggagctggctagcatgttgtggcgtattcgctgggaagaactgcagtttggcaactcagagcgttatcacaaaggtgcaggcagtcgcctcacactgtcgctggtgagcccttgtctcagct

SEQ ID NO: 52081 - DNA, 638 bp, Homo sapiens
tgggactgtcatctgaagaaggaaacggttccgaagtgggccccagtccttcggagctgggctgtatgtctaaagatctgaaagaaagcaaacacgacatggctgtcaaaagcgcagcagaggaagtcagctgaccttcctcgtccccttatgcctgcagccagagctgcggctctcaccgcgaccgcgaccgcgatccctccgtagactcgttggtctccatcttcagactccagctactgggttgccatagagacagcaaacaactcctggagcctgcgcagaagtacagctgggcggacttgcaggtggcggtggaggcaagtcctctgcggggcggaagtcttcagcctagtgctgttagggaggtccgctttccggtcccggcggcattccgcctcagacggggttttagggttccgctggcttaagacctcgccctccacgtccaaacagtctttgcgtgcggttttctaagatgatgctttatggggatatgttggaaacaggcacagggttgtggcattagattacagcctacttggtgtttgctgagaggcaagtagcttccccttagtttgcttagttcattctcaaaagtgagtggggtctttaacaaatgttaaggatgaaaataa

SEQ ID NO: 52082 - DNA, 2288 bp, Homo sapiens
gggacataggtggcttcattcatagggagcaagacctctagctgggtccaggggctcctcccagccaaaccctggccctgttcttcccacctgctggtcttcttcttcagcctggctaatccgaggaatgggcttcttaggaatgaccaggaagtgcacaggagcctgaggggccacatcacggaacacaagacactgggggaagtgacaggccagaggccacgttacttcaacaggttggatggtatctacaacattcctaaggggataggtcctaagagcaccccacctgctggtcctcatagagaatgtcagctgggaggctcttgtccaggatccgggagaagatggttggggctgctcccccaggagttgcctgctgggccttggccacttcattcccatcagtcacacctgcagctcctcggacctgaaggtggatcgaccatattcaaaggagggagctggcagaagctgggctctgatagttgttaatttcgtccttctaataacctattcatcgttcccacccaggaggaaagttcctgaatttcagagcaccagcagcaaagggtagggccagaaggtgctggacctggttagataacaggcggtattattatcaggattcagcagtgcaattgattcctgctcatgtgtccacgaaatatagcactgtttagggaaaggatctagaatgagagactggggattttggtctcagttcctaccttaccataccactgaattacctcagataaattccttctctcagcttctaatataaaataaagggatggtttccataatctcttgcgatggcttgaatctctttccactctcaccttgttagtacatttccacttatttccgttacttgttttctgatctttaagccttgtcgcctgttttatttaagttttaatgcaatcgccctgtttgacactagttgacccctcatctgggtgtcacatgtgactctgtgaattttaactcttgtcccttgaatgagtggaggtaagagttcagctaagtgacctctgctcccctagccccagggaacttcgggtaagggattcagagaaggctgatgtcattgcatcacgttgggggagaacgggacggaatgaattctctgacctccgagccgcttctggcaagtgcagaagagaggttaacactagtgctcattaggaggccagaagcctgaggagggcagagcactggctccaagaagagaaagctcatttcctgcagggggcatcgggccagctgggctgcaggcagtggaaagaaggcggcagccgctgcactgaccctgtcccgacctcggcgccccggcctgcgcagggcgggaatcagcaccagctcgttctccggagccaccagttcgacctcaccacacagccccggagcttgtgcctcggaggggcagaggccacaggcaggagctctgcgcggctctgcgcgccttcgggaccccctggccccggatggcttcggagcccgcaggaccccctactcgctcccgcgccacttctcacctgccccccgcgcacccccgtggccgccacggctctgcgcgccgcgcgcaacccagcagccagcaccacggctgccgccatcttccctgagccgcgggaacctctcacccgggtcagcactcggctccgcggccggccgtgggtggggactccgggcgcggggaagcggggtagtggcggccgggcgagccctgctaccccattggagcgcgcctctgagcacgattcaccccattgcctctgcagccactttggaggcgggctcttttcatctcattggctgcttctaccaacgcgaggacaattttccattccattggtttcgtcttctagtccgtgtgaacgttcttttcccattggatccccttactagtttctctgtgagagaaacttccactccattggaaggattaatggagcctggaggtgggattttctcctagttgaatctgatacacaactctggcttctaggttgcggctcccgagtgggtggttcttttcgttcttggttcgtcctcttcaggtctggttcctattggtgcgcggggagaagggggcggggctccgccacctgctgcagaaagggctgttttagaccctctcaccgctttggccaggaggagggcggggctctgagggcatccggcgcttattggctccaagaaccacccggggtggggctaaaggtgaacggggatgaggtgtgtttttttgtgtttgtttgtttgttttaactggcggg

SEQ ID NO: 52083 - DNA, 1757 bp, Homo sapiens
ttggcttggttgttacaagtccttaggtcaagaccttgacttaggatggcagggggaggtgttgatcctcagggaggaaaggctcttggttgtggatgtgcctcagctgcaggtgctgagtgttgaaatgccttgcctgaaagtctgctatctgggaaggggacttggatatctgcagaacttcgcaaaggagctctggcatgacctggggaagtgggtagggacaaggggtctagggccaatgagggagggtcttgactgaagcctccggaacccgggccaggagagtaggcgccggtcaccagggcaaccggaacgcctagtagtctccgtggcaacggcggtctggtcacctccccggtgggtaaggtctcctgaggggcttgcattgggcctcgagggggcgagcccagagggtttacttctgaaaagtggggtgtgtgttgcgggatctctgtgagcgagtgtttgggtaggatctgcggagatctgtgcgtacgtccgggggagtctgggattgtgaggatagggttcctttgagacatctgtggggcggtcgttgggggctgtgaggatctgaggggacctcgggctctgtgcttggggtgagaaaggcagggtctcgggtagctgaggcgggggcggagtctgtgtgtcctcgaagcccagcaggactaagttggggaccaatagagtagggcgggggcgggctttactgacagggaccaatcgagccggccggggggcggggcgtcacgccgacgtcaagtcgaggccgccgccgcggggcctggttatcgccggttcagcgcagcccggagtcgcccaggcctgaactcctacccaggtccccggcccccgccccgggcccgcgaggacaccggaggccaccccccgggggtggggagcggagccgcgggccagctctgcgagcgccccgcgctggcctgtccggccccgcccccgccccgggccatggcccagcccttgtcccggcccctcgtcctatcccaatccccgccttggcccccagccccgccctcgccccgcttcccacatcggccccagcccctgcctgggtccccatccaggacccccttccagtctctgcccctggcctggcccccatcccggcctcggccctcgttccaccccctgtcacaaatcccagcccaggccctgtcccagccccattcccagtgtttgcttaaggccctggctcaaccccgtcccttgctgcagtccccatcacagcccttccttccatcccactccctgcccttgttcaagccccagtgtccagcccagcccaacccattatctcagcctttgccctcatctctgtgtttacccaagtctctccctctagtcccccctatctctcatactctgcccctctcccagcctagactcaagtctgggtttcagctgccgccagccctattgctgctgttgctgttctctgtccttggcccaggggctggtgagtgcagaagcagggaagattgaggcaggaatggggttccggcagggaggggtgggctggagagattcaggagaggtgggacctggggaactagatcattggggagcaagtgggagaaatagagagtagagaggtcttacacaacagggattggcagggtcaaaagagtggtaattaattgggtttgaggctcagcaggtggcttacagtttctagcacagagactccaagattttttctggtgtctgtcctgaccccactttgactcttg

SEQ ID NO: 52084 - DNA, 2541 bp, Homo sapiens
gcaggcccctggcagccgtaccacactttcccctcccctctcctgccctgagccagtatacaggcagcgcttgtgaggctgctgagggtttttactgctcctaaccacaggggaacagaaaggggaagaaaatcaacaaggaagttacacagttccatgctgactcccaagccccacaggtggagtttcagcctgctcagtggcttaagacgccatgccaaaatacacacacacacacacacacacacacacacacacacacaccttccacacatctgttttttttaggtttggtaagtggagaaaatggctcctaagtgaggaggcagctgtgaagtcaaagggtcttagttttggatttagagagagctaggtttgcatcctcagtttggtctaggtttgagcctcagtttccttatctgtaaaaggagggtttttttgtttttgtttttgtttttttttaaataagattaacgtaaggattaaaccagatgatggctaggtttcagatctgcagcctgaaacccagttcctggctcagaggagagcatttgtggagttgatgctattggtgaggaagactggcatgcctgttgcttaatggaaatgccctctgtcctgccctgctcctttctctctctcctgcttcccaggaggccttttcctgactgattactccacctgctcaccccgcaagctgagtcctttccgctcctttgccagcaccgagctcttccacttccatgttcctgaggacacattcctggctgtttggaacctcatcatcttcaaggagcaagggggaacttttggggaccactgcccagaccaaagtgtgactgtgtgagtgtctgagttaatttcccaaccccacttccaatccctgaccactttccagactaaagtgtgactttaactgacctcccgaccctgaccccaacccgcgtccagattgaagtgtgactgagtgagggccatgacctctgtcacatgaccacttccggactactgtatgactgtgcaagtgcttgagctgatctctcacctgtggcccctgacctggaaccactttgttgaatgtgtcagtatagggaatctatttgttttatcggtgaagagtgacagttcttttctttctttctttcatttcctgcctcccaccccattgtctgctttcctcctctcctaattctggtcccccaggtatttccggtccggggcaccccctgtcatcaatcccctgcatacacacttcccaggggacacagctgtgcctggggttttctcactgaccctcagctggacactgcccaaccgcacctcaggcatctttaacgtcagcagccccttacctggggactggttcttggctgcccaccttccccaggcccacggccacatctctgtcaaggtgggttgatgttgcccaggctcgggggtccagaactgcccttccatctctgctgaattccccccacaggctctctggcacaccagccttgtgtcagggtgggcagcagcacaagggtggctggggcggggcatggctaaaggccagcaggtcacccagtgggtcagaggccatgatctggaggaggcaacttggcagccccaggaggacatgctgggtccaggtaagctgaagggaaagttgagaatctggagtcagaggctctggcacaggggagtagtgccgcctcctagtggaaggcacaaatgttaatcaaggtgaacagaagccagctatgggctggtccaatctgctgcacacacccaggactggttttattttacatcttgattgacaatagccctgaagactctcttaggccacggcccagtatttagtccatctgggagaatgtattcctcttgcatcataatttcagacagcttcctacacctttcagaagaccacaagagaagctctttcctgctaaaaggaggctttgggcagctagtgtccatcctggcctttgcctcacttttctccaaatatcagccaccccaagcacttatttcacagaggttgttaaagactgaagggcaggttcaaaggtcagatgtctctctggtttggagtggaaggaaatgctgcaatgttttcctgccactctcatggattaggccagacaggtctcctattcctgttcactggaggagaagcagggggtgtgctgagctggctgttgtcagagtgggatggccacgtgcatggggcctgtggtgagggtgaagaaacgagcaagaacagagtgaggatttaaagaagaggactcttagcactcagaaatggggtgaatagtgcctttgaatgagctgagactcacataaggacaagggtgctggcactgctattgtcagagatgggaagtagggctgaggtagtgtctctaggcctcagtgacagggccgtttttcctgagagtgatgtggatgtgcaagagaactccctatcaaggcctgtgagcctgctgaaggacagcatgttgggagctagcttggaaagggccctaggttctaggtaggccttgactctca

SEQ ID NO: 52085 - DNA, 4173 bp, Homo sapiens
cggtgcctcccaggaggaacagaggggatttgggcctggcgggtgggcttggagggacagtcagtactgctcagatcctgccgctctgtaaatgctccactaggcaggaatggcactcatcactgctgggcagggagggtgtgacagagcaaggagcatgccatttatggccagttgagactgttgaactgggaaccaggaggctgggctgtgcctgccctctctgagctcagtggcctccttcttgcctcccagcaagcttgggaggacacccagaccctcctgcctcccagaacaggccggatggaggacctccctggatggcaaaatctgcctgtggtgcctccctgagcttctcaagctcattgagctcgggatggctcatctgacagagcctgactcagccccggagggctctgcaggctgcaggacagggaatcacagactctcagatgtcagtgtctcctgagccatggagtccattgcagtaatatcagttgcaaacatgacgggagctggtgttgctgctttacgcatctcaactcctttagtcctcggaacaccctactgaggaaggaaccgttatcagccattttacagaagaggaaacaggacagagaggttaagtaacttgtgcacaatctcagagcaagtgagtggcgtggctccaaagcccgtgttgttcatctctgttctacacagtctctacgagaggagactgaagtgcggagagggaaggtcactgagccaggcagcaggagggtttctttcctctagactcagggctcctccctcaaccagatccagcctgacagctcctctgtctccacctggcctccctgccaggcctcctcagagttaacagcggcctggcctcacccttggccagcagttgcaagtccaaacaggcttcgcccacattccctggctgctctccagcccgcagcagagacaacaaagttcagtgactgagagggctgagcggaggctgctgaaggggagaaaggagtgaggagctgctgggcagagagggactgtccggctcccagatgctgggcctcctggggagcacagccctcgtgggatggatcacaggtgctgctgtggcggtcctgctgctgctgctgctgctggccacctgccttttccacggacggcaggactgtgacgtggagaggaaccgtacagctgcagggggaaaccgagtccgccgggcccagccttggcccttccggcggcggggccacctgggaatctttcaccatcaccgtcatcctggccacgtatctcatgtgccgaatgtgggcctccaccaccaccaccacccccgccacacccctcaccacctccaccaccaccaccacccccaccgccaccatccccgccacgctcgctgaggctgctgtcgccggtgcctgtggacagcagctgcccctgccctcccatctgttcccaggacaagtggaccccatgtttccatgtggaaggatgcatctctggggtgaacgaggggaacaatagactggggcttgctccagctgcatttgcatggcatgccccagtgtactatggcagcagagaatggaggaacactgggtctgcagtgctgaagggtttggggagtggagagcaagggtgctctttcggggctggacagcccgtcttgtgacagtgactcccagtgagccccagaaatgacaagcgtgtcttggcagagccagcacacaagtggatgtgaagtgcccgtcttgacctcctcatcaggctgctgcaggcctctggcgggcagggcactgggagaggccctgagaatgtccttttggtttggagaaggcagtgtgaggctgcacagtcaattcatcggtgccttagtccaagaaaataaaaaccactaagaagcttttgtgaagaggctcttgattgcagcatagtgggagggagggagctgcctggcctgtgtcctcattgccctgggacctccctctctgatgggaagcgtgtggctggagcaggcggcttctgtctggttcttaggggctggttgtggagtgggaagaattgggtgggctctgtctgagctctgagggaggattcagggtttgcacaaaaccctgcccacagcaggtcctgtgtgcaccagcagggctctggccttccgcgggacagtcctcggggagaggaaggttggagccgctgcgagcctggctccccagggctctgcccctgtacttttttcagcccatgtccagggcagactgagctctgaaactcgaggaagccccatccacaggctgccttgaatccagtttccttggtaattggatcagggtttcttctccaagccttgcgttttcagccatcctgccccagctggtgcctgtgtgtggtgggagggctgggaggcagcgagtggagttctttaaagtggaggctgtggtgctggggtgcagggtgttggatggccttgggagaatgctggggtctcactttcctcttctctgcaatggggtggataacagagatgcccacgtgccgaagcctggaggctcgttggaatatgctctgtgaacagctagtgggatccacagcgaggaaggaagcctggctctgaggccttcagcctgtgcctgtgagctgaggtgggaattgggggaagacaaggactgggggccaggagaggcagtggggaggggctggagagcaggccagagactcagggacctggtgactcactggaatagaatgtcctctttcctttctatttcccagtggattctctgtgagggctgcaggaggagggagtgagagagagagggaggcaaattcacactgatttctcccacctgaggtttctgggttgggaaagttgaccctaggctgccgtgcagtgtcgattttctctgcagtgtccttcaaatccacccccttctccattcccatgccctgcctagcccagccccctccatccccctcctggattcctgccagcctgctccctgcagccctgcccctttcccaggcatctccaggctgatttcacagatgaatcaaagatggggaggaggttccccgaaagcaggaaacggaaaaggaagcctatgcagggcaggagagaacccgctgagcaattgccctttattccagttcaaaaatgcggaaccactcagacaatctgcaggcggcctatggctgcgtgtacacaggaagaataggcgatgagaaatcaaaggaacaaatgttaaagcttgaggcatagtctcctggtgccctctatcaccccagttaaggaggtgatgttggtaactcaacctgaaaccacaggccctgcagatcagcccgtcgtctccttcctcctggtcatcccagttaatacaaacaatccaaggaattggcttcctgtcatggcccacagcctgctccatgtggaggaggagcccagggcccagatggtctcatcatctcagaaaagggacagattgagaatatgacaggctatcgtttgctctgaaaagttgctctcccattctgtgcaaagtgccagtttcctaatgctgatactaaagaaagttcccttgggccttggagaaactgaaaaggacccaggctatgtgaacttgggccagccctctgccctttctggcactttgcacccagatcattaaaaccgcagaatcagatggtcgctctgtggtcccatggtaactggaaagtgcactgagctaggagtggagggagggcggtccctcctcggccattgctcgtgcctgttaacatggctaattcagaatggggggcaggtcatttaacttctatgaccataggatctttttctataaaatggaggctatatcgctatgcagggttgctggggaggttatatgagatcatgtctggtgaggtcccatgcctggagttattgttctcactactctgtttcccagaatatggacaaagtggggctaatagcccagtctcctttctggaagtggtgggggtctcaggaggtgctgggtgtgaaagggctctcacctggcagactaactcagttgcctgggcctagcttattcccctgacctcctggcagggaggagggtggaaaaggcctggggtgcgcatggcgggacgggataactgctgagcgggggttggagggctgcagtgtgggtcctgggc

SEQ ID NO: 52086 - DNA, 851 bp, Homo sapiens
aggaagcttctctcttcacggggcctgttcgccatgcccagccagtgccaagtgcccaggacttctggaccttcatgtgacgcccgagtccccaggatttgctgtgctgatgggtcagactcacccgctcctcagcaagccttccctggccttcccctcctcccagggccttctccctgtccttcccctccagtaacctgtgaacttcccgtctcctcccattccagccttctgtgccctccagcctcagggatccttgttattgggacagcccagctggggttgacccacaggatggggcttaggagagctctgaggagtgagtgaacagacagcgccggagtgcacggtgggccggctctgctgatctacaccaggaactgaaatatcactggaatttattgtaaacggtgtgcctatgatgctggttctgttgccacctgggcacgcagcaccctcaagtggacatttctagaaaccgcttcttacttgctcctaattgattacttttgcacattgcacagaacccaacctcgaggcctgctccctgccagttgcctgaaatcagccctgaaattctgaaaccaaagagctgcttcctgagaacaagttatttaccttagaattgaaaatgtatatccttttatgggcctttccaaatctgattagaaaaaccacaaaaggaaacagaagagaaaataagagccacagaaagtacaatatgttttattaacaggaaagccagaaataagatattttaaacatatttttaatgagactttattgctatattccaacaggtcactcctattcttagagaatgtgaatgacttgtgtcacttcggagtgac

SEQ ID NO: 52087 - DNA, 2759 bp, Homo sapiens
atcaagaccatcctggccagcatggtgaaaccccatctgtactaaaaatataaaaattagctgggcgtggtggtgcgcgcctgtagtcccagctactcgggaggctgaggcaggagaatcacttgaacccgggagatggaggttgcagtgagccgagattgtgccactgcactccagcctgggcaacagagggagactccatctcaaacaaagcaaaacaaaacacaacacaaatccaggaaacccaagtaaaacctatttgcttgactgatcgtgatcctactggatacattctcctgggtcccaattttggccaccgctcattttcattgatctcattttaaggggtttgaggtatggagtccttaggatttggtgttaagtttggtgatttttcagagaggccgcaccagagctgcatcggtgatcatttgactttatgtctgaccctgtgcacaggggtctacttgtctcctaacctcagttttcctctttttccttattagaaaaacaacaataacatcaacacagtccctcttggaactaggaatggccagtagaagtggtgtgtgacttctgggaaatgtccttaaatagaggcggaatactcttctttgttttttctcctttatctggccagaatgtagatataatggctggagctacagaagtcagattggaccagagtggccttgggagtagaagccccatttgggggaacaataagataaaaggggcctgggttcctgatactgtgggagcccatatcagtcctatactgccttcttccaggcttttataccaaagcaaaacagtcttatttaaaccactattgatatgtggttttctatcactcataactgaaacaaattaaacagcacaccagtgcattgtattctgttacatagtttatgggaggccattgttttggactagcctcctacactggccctagcagagcagatcaaaccagagcagagtcacctgtgctaactgccaagtcatcaaaccggactttgaaatgaggcagttttccaaaaacgcaggagcttccagtcaccctgaatcagcacaataaaaagtgccctctgctttaaccctataaggaaagcaactttgaaatgaccaatctgctttttgttccctgtttctgctttcttcagccctcttttatccataaagccaaacttctctgcccacttcactggaatactcattctatttcgtagaatgaggtgttgcctgattctagaatcacaaataaaagccaatttgatcattacaaataatttgttgtaattttgcctttgggaagttcctagtgaaagcaaaagctactagcaagaatccttgaaaggtttgtaatggaggtgaaaatgaaagactgtagcattacccagtgactcagagagtgtgggggaggcagctgcatctagtgataatggatgatacatttggaatagaagaggctgtggtttcatgcatgcctgtcttcccatctgccaagaaggctgatgaataagcttttatactcctctaagttggtaaaagaagttttcagatttttaatactcaaaggtcttttcacaaatgactatgaccttttcttttcttttcgagacagggtttcactcccgtcgcccaggctggaatgcagtggtgaaatctcggctcactgcaacctctgcctcctgggctcaaatgatcctctcgcctcagcctcctgagtagctgggactacaggcatgcagcactgcgcccagctaagttttgtattttttctagagacggaattttgccgtgttgcctaggctgctctggaactcctgagctcaagtgatccacctgccttggcctcctgaagtgctgggattacaggtcggagccactgcgcctggcctctatgcctgtggtctttagtttgtaggaaccagaccactcaaaggctggaacgtaccttattgctctgccagtgaatggtttaggaactggctgaaggagctggggattcagtctaggaagaacttacaggagttgggattgggtttgagagctgctttcacacatctaagtaaaaaagatttagccttcctcacagagggctctaggccaaaaccagaacccaaaggtggaggctgccaactttaccctaaattaaagagaaacctcctacccatcagaactggatggaggtagctttttgatagcaactctccactgctgggaatatttaatcaaaggatgcagaaggagtcattaactgagcagcagttcccatataccagcctatgtattggtacctacctgtctataacattttccaggtctcagccaggcacggtggctcatgcttgtaatcccagcactttgggaggctgaggtggaaggatctcttgagcccgggagttaccagcccgggcgacacagggagaccctgtctctacaaataatttaaaaattagccaggcatgatggtgcacacgtgtgtggtcccagctacttggaaggctgaggaggagaatcaattgagcccaggaggtcgaggctgcagtgagctgtgattgtgctactgcactccagcctgggtaacaaagcaagaccctgtctcaaaaaaaaaaaaaaaaaaaaaaagagagagagagagaaaaaaaggcaatgtagtacattttaaaaataaaactaaatatttgcaatttgaagtacattctctttattccaagattatgttctttctatttcaggaggtgttataatgtctt

SEQ ID NO: 52088 - DNA, 683 bp, Homo sapiens
aatgacttcaaaatgtttagagctattaaccacaggggatggaattccttcttatatttttgtccaatcttcctatcatgggcatgtattatttagtattctgaaaaaaatccagcatttggattgaaggcaatgaaaaagaaacaggaaaatagaactagatttggcctgggatttgggactgtggtcctggtttgccttccctcccactttgagcagagggaatgccatgctttctctaagcccaagatttctcacctgcaaaatgtggacaagcatcctgccctgtctcccgcttggggctggtgaaaagattcagtggttatgccagccaaagggctgatcacagacacagttcaaagtttggaatgtgaagtgtccgccccaaagttccaggatgtcctgcttcctgaagagcacagttagtccaggaaagaaactgaaggggagcaaagttcacagcccctttgggcatcgtgtccagggtcccctaggaggtgggtcttccagcgtccacgacatgtgagcccagtcccgactccttcgtgccttagggttggtagttagatgggagagacctcagcgatcacctgataataatacttgttttatagttatatttagtgaaaattcacaagtgtcaggattgatgccttttactcattttgttcaccattttgttc

SEQ ID NO: 52089 - DNA, 1239 bp, Homo sapiens
gagccactgcacccagcatgattttcttaatattttcttttctctagcttactttattatgagaatacagtataataatacatttaacatacaaaatatgtgtttatctactgtttatgttatcgattaggcattcagtctaacaataggctattagtagttgttttggggattttcaactgcaatggggatcggcgccctaatccccgcgctgttcgagggtcaactgtatttttttcatgtgcctctttctcgccactagagggtgcactcccagaaggcagggaccctgggttactctgcacatttctgccttttgccgctagaggatgcactcccagagggcatggaccctgggttactctacacatttctgccttttatggagcatacgctcaataattgtttgctgaataaaggaatgtccccattctctagactcatccctgtcctgggtcacattctgtccatgactcgtaagaggtctgggagcacgtgcacagatgacaggaagctgaaaggacagtgacttgggtgcccagtgaggattgaggcagaacacagcaggttgcttcaaggtgtttaatccaatgagatgaacatttagagggagagtaaaggtctttcagtcagatgccccaagccactgcgtaagcacagactgggggtgacggggctcggctgcagcacaggagaaagcacctgggctttgaatgaatcctggaatcactaacccacagattgttggaccctgttaatgagattatgatgttcagaaagaaagaaaggggacaaggaaagaaggaagggaaagaggaagggagagaagaagggggagaagaagcagacagctgacttcctccagtgctgccaacataatttgttcttggggatgttatcccagaaggatagaaagtttctaaactgagtacaactcactttccaaaccttaaatgacttcagggtctacaatggtcccaaagaataaactgcaatttaaattatcttctaagggtgatggccagtcctttggagattgtgccccaagcacatgaggcaggagaagcagaaaggacccttcacctgtcacatgtcctgagccctcaccctggcgttcagacccagtgtcactgtttctgacatgtagcctctttccaaaccttggaaaatcgatcattcttgctcatgatgtttttttataaaagtaagggcaagttttggtgaaaggaattccacaat

SEQ ID NO: 52090 - DNA, 1515 bp, Homo sapiens
acccttgtcagggggccgtgtctgcgggaggccgaaggatcccgggtgacatgctttctttgggtgcgaggcagcgtctcggcagaaagaatattgcgagtattactgagggtacatgaaggagagaagcccctttggttcggccttggactaagcccttgttctcaggtgaacttgcagtgtgatcttgagtaaggtcagtctcctctctcacctcagtggcccgaaacctcaggaggtggcagaggttttctaatgactctcccagctctgacatcctctgacttcactctgggagaacgtgggctggtggactcctggcagaagccgacacacagttgggccataacaaagagccctggtacggggcacgttcccgcccccgggaggttttggaaacactgtgaggcagggggcggggcttgagcgggccgcagccagtcaccaaagggccgggcgctgggggcggggcctcgcgcgagcggcggcggtagcggcggcagcggctgcggccaagctgggtccgagcatcccgcggctctggagccgcccggcccggacatggcgaccgtccgggcctctctgcgaggtgcgctgctccttctgctggccgtggcgggggtcgcggaggtggcagggggcctggctccgggcagtgcgggtgagtaacctccagagcaacggttcgaagctgtcgggagcggccgccacagcgctccaagatggcgcggggcagggggcgggggtgcgcgcgacccccagaccctgcccacgtccggcgaccccgggaccccaggtctcagcgctccagaggctggtgccgaggcggggcgagtgaggaactctctccgccccaagatcttctgggcggtgactcgggtttgaggccttggtctgtcacccaccgacacgggccccctcttcggcactgaccccttcgcttgcctctgctgcttgtcagaaaagggtgcgatgcccccgcccaggatcgtcgcgaggtttagatgggatttcggatacgcagccgccctaccgcggccctagttagttattgttacttgttacttgacccgcacttggttcataacgaccttggtggcggtgagcactgacggtccccacagcccgcgtggtgggtcctggactcgggcaggagacattaaaaatcagtaaaccctgtcccccgggggctggcaggcttgaggagagaaattcttgctctacaagaactaaaccaaggatggataggaaactgttaagtgcttattgattgcttcccgcttgctggccttttgagtgcacgccgactccttccgtccaaaagctctctcggtaggagatggggtacagcaggagattgaagtaactcgaattcaaggcagaaatgtccagaggaaatgaagggccatgtatgagtgcacagagggagagaggacatcgacctaggatgagtggaaagtggagtgattccccctagctgtactagacattgaaagatggctaggacgtgtgcat

SEQ ID NO: 52091 - DNA, 2202 bp, Homo sapiens
caaaacaaaaaagaaagaaagttaaggactagaaaaaagaaagcttccagatcgaggtacctgatgtaacttgatcacagcttccttattcccataatgtgtaagcctcactgatagcagggaccttgtctgttttattcaccattgtatttccagtgctttcaacaggccctcacacaaaatagacactcaataaacattggtggggtgaatgaacaaatgtaaaagtaaagatatctttgtcataggggtaaatatgacagtcaaaatataaggtgaatgaaaatttttacttataattttgtatatttcaataatatgaaaattttattgtaaacatgtattttataaataaaatgaatatcatgtgtgagagcactttagaaatggtataaatgttttagctatatacacatacttaagttgctttgtaatcattgagtactaaaaataagaagattgtgtattacaatagtacatagaggctttggaatatcttagggaatagaaatggctttagtatagtttttcagggagaaactaatgtaccctaagtctatcatgcttcttaaaagaagtcagaggaccatgtcctagttttaccgtctgtgactgaacataaatataagggaatatatctttgcagaggcaaaaccatgtactttaagtaaaagtaaaaaagaaatcagaaagatatagggggaaataattgtgccaggaactaaggatgcacaaatactgtaattgaacattaaatttggcactgagatttctagcaaccttgacaaaaagagaaaaggtaggtgataaaagaagcctgttttccatggaaaacaatcaactttttctggctctagtttctaggaaatagtcatttggtttttttactttttttctcacatacgttccaaagtatatagttcatagagttttagttttatgcaaatcaaatatttacttggttggctcatgtcggcttctgcatttgtgctcttgtttcagggaactctgcactaaactttacagcatgagctggggcaatacacagagttggcaagagtttgatcgcttttgtgaatataatccagtggaagtgtccatgttgacctgtttagcggatgtccgggaaccttgccagttgggctgtagaaaccttacttactgtactaattttaacaacaggtaagacaaattattatacatggaatggaaatattttatcattaattataaataagtgaaataccactttattctgattttattcctgttgggttaaaagaaagtcttctttatgatttaatctttaaatgcagtattccatctggtaagccacctctgggaaaggaaacactattacaaagtcccttccaatctagagatacctcaagcttctggaattcaaagaatctcttctgccgtcagtcccctctcccttctactgtaccaccagtggaagtaattcattgtagaataaattattgtgaactatttggtcatccaaatgtccacttttaaacagtttactttaaaggaccttgagactggttgaggtttcttctctgtgagtcccctgtttcatacaaaaatatttctttacaaaagcaattcaaatagatgttttcccagggtatcaagtatcattagaaaaataaggaggcaagaactgagccttggagcatatcaacagttaatggttgaagaaaccaaagaaaacagaagagggcaccggaagcacgaaatgagagaactccatacagaagcaagagagagagagttactaaagaagaggtggctgatttataagttacaacccagaaataaagagggcaaaagggaagagaatcattcaattgggccagaaggaagttctagatatttttgtcagatggtgtttacttcaagctaacacacatcttattttttttaaagtactcagagtattacttaagagtgagaaaattgagatatctttaaaactggtgatagagtattagccagtaaagacctgatttagagattgagtacatctgaaatgtttgaaagttagactttggcacatagttctggtctggcttctggtaattgtggagtagcttgtatgagaataacagtcctaccaataccaattatgaactccgcacaaaatataaaagaacaattgttttgaaggtattggagactgatcaaaagcaggagggt

SEQ ID NO: 52092 - DNA, 916 bp, Homo sapiens
gaaggtgaacatagactatagcagttagcatttgctgggcagacgatttagaattcagattatgccaagttagaagggcctagtaaaccccataagggccaaaccttgggagtacatacgacatccaagagctaagagtaaagctgaaaaaccttaacaaaacctgaaactgcctccagaggaaggaggtatttgtcagtaatttaactgcctgctggtgtgaaaacaacattcctccaaagaaggtaacaaaatcctaaatcccacaaagtatcatgcataatgtccattatacaatcaaaaattactagaaatgagaaaaataggaaatatgacccatagttaagagaaaaaacaatcatacccattggtgacccaactattggaattagcagataaagaatctaattatgataaatatattgaaagatctacaggtaaagatagatataggtgagatatggaagctctaaaaaaaaccacatggaaactctaaaactgagaaatgcaatatctaaaataaatttattgtagggaatggaaaatagacacagcagaagaaaaaggtcagtgacctcggagattgctcaatagaaactatctaaaccaaagcacagagaataagtgatacaacatctgtggtagtaacccagaaggaaaggaaagaaaggagcagaaaaatatttgattaaaccttggctgaaatttttccaaatgtgatcaaatacattaacccattttttgggaaaccttagtaaacgctaagtcagataaatacaaagagagacacacctagcacattatagtcaaactgttgaaaaccagaggcaaagagaaatagttaaaacaaccaaagggagaaaaaaagacactttacatatgatggaataacaataaaaatgacaagtgacttcct

SEQ ID NO: 52093 - DNA, 2333 bp, Homo sapiens
atccagcccctaagctgttggtatgtggctcagtgctgctggataccttaataatttcaaccttaaacagagtccagtctattctctgacatggcttcgggataacctgatggggaaatactgaggtataacaattaggtgacaagcaagaggcaacaagaggggaatatgtagactcttagcacagaaaacttgtaggagtcaaatccctattgaagaccaagaacattttaaagtagtggactttctagttgttataggccagatgctaatgttgataactaaaaagagacttagataaggaagggaaggcaaaagaggcaagcaagcaaacaagccagcataaggtcctagaagtgaggatatatgatttttgcagagagtaaatcagactagcttcatttaatttcctttcaaagatactgaaaagccacattgctggtagtaacagtacgaagaagtgtacaatttgagtaagggctttggtctcagacaacagaaagttaggggtgctttcaatttattattcaacctgagctctcctgtgactcttgttctcttttgaaacatgttaagttatgaaagcttactttctggaaagcttcagaaacaagtgatgttgactggacaacatgaggaggttcctcaagctctaaacttacgtgcatttttttttcaagatcagattgtgtggagattcttaaaaaatgtggagaccagaacaaattccctgaagaccacacagctgaaagtatttgtgagcttctgtcacctacagatgatctgaagaattgtatacctttggatacatacctcagtaagtacttttttgtatgtgtgtttttagatttcaaatacttctctcttccaactatttgttttactatttgttttggatgagcatttatctgttgagaacatgggattcaatgataccatctcaatcacagactcttgtttgcttggcctttttggcccaggaaagaattgttgttttaaaatatgtaagcagaagtgattctatcagtctgaggaggtaccaactgtggtcagtcaggaattctaagcagtgactcagggggccagcattctcagataaccagctccatatcattgctgtcttcttaccataataatgactagaaagtggaatttacccccagagactatcagccttttgtcatcagagtgtcagtggatgagagccaggaattggcttggacttactcacccaacagggtataaaaaaatgatagtctaggccaggcgtggtgactcaagcctgtaatcccagcactctgagaagctgaggcaggcggatcacgaggtcaggggatcgagaccatcctggctgacatggtgagaccccgtctctactaaaaatacaaaaaaatcagccaggcgtggtggcgggcgcctgtagtcccagctactccggaggccgaggcaggagaatggcgtgaacctgggaggcagagcttgcagtgagccaagattacaccaatgtactccaggctgggcaacagagcaagactctgtctaaaaaaaaaaaaaaaaattatagtctagcttaatatgtaaaaatggaacttatctcactgcttcagtttttctctgccaaatactcccgccaaaagctagaagagcgtgttgctatctcattgagggatcctggagctggagctcagcttcttggcagtgagacccatacatggtggaaaccaggggatgacaagtagaactcctacacacccagtagttaagggaagtgttcaggctgccaccagggggcatctgtgccatgatctggctacaaaggtagacagtgaagtcagcctttgttttcctgtgttaggtaggattaacaaaaaacagaacaaatagaagtaaagaaagcccagaaacaaatagtctagggcttcatcatcaggaatccaggctccttttatctttccccaccatccttagcatttagcttcagtcatcaagattacttaatgtactttgtcatcacaacatggctattggagttctaaccaccataatctagttccagaaggtaaaaaggaagggacagagcaaacaacttctccctagtcacactgtccatccctagttgtaaggaaaactgagaaaggttattttttaagctctgggcccattgcggccctaagtaaaattggagatcttttagtaatcagggagagaaaagtatgtgctggatttgtagctggtagatttgtagctggtagatttgtagctggtagtattcgccatattttctcaaggccaacaaactgtgtcccttaacctttgtgaccaatatagcaaaa

SEQ ID NO: 52094 - DNA, 756 bp, Homo sapiens
cagttccacagacgccccacaggactccgggagccccacgccagccaggaatctgtccgagtctgcgggcaccctcctctctccccgcaaaggactcgcaggggtcaggaaacccccccagctgttactgggagtcggagacagtcttctggcctctggagggcgcgcctccgttgggggctcagcgtccccatctgtaaagtggggacaggtgtgtgtctggggaaatctaaggagtcctgcaaggctgagagcccccgatcctgccgtttgaattccagggtcgcggcggacggcacggcgctgccgcctttgcacggtggcgcgtggaggcaaagcgaaaaaggggacgccccgcgcctcttttccatcctggagaggggttggggtggtgcccggcgcagaggcggtgcgctcgggggcggggacgaccctccagcgccaccgcgtggctggactgggttcgggcggcgggcccagaagagacgcgaggtagccacagcctcctcagctaccgcgaaaccagaaccacgatgaccacaagtttttatgaagggagcagccacgaacgccggcgctgggcgaactggtgtaatatgagtaagaaaacggcagctagcattgattgagctttatgacaagcccactactctccagtccttttctcatttaaactctaataataggccgggcacggtggttcacgcctataatcccaaccctttgagaggccgaggcgggcggatcacctgaggt

SEQ ID NO: 52095 - DNA, 2300 bp, Homo sapiens
atgtgcgttttttataaaaacactttcttgtcccctgctgactacctctggaagcttcttgttgacctctggttttttggtttctttttttggcttttcatttcttagggtggtggtggtggtagtgaaggagaggggtcttctggtggcccctgcataagcactccccctcaacatgagcatgattaactggaaccactgttatttctgtggtgtagacaaaatgagccatgtagctattaacatctccctgatttaaaaagaaacacggaactttctttttcctgctgtccttagggaggaaaggtgtaaatataagagactgtagctagtatcttggaagtccccaggagacaggcgtttcctcttggtcactgactctctgggtcactgacgctccttgaacagcagggccaccgtgtctccctttgaagcaagtgatccttaaggaattttccaggtttagtaacttctgtctagctccgaaaagacgtaatggctgcaaaagtgcttcgttgaagaagataagatatattcatttttaaataaaaatacttatgggcgagaaaaatcggagtggactgaatcaattacagtaaatctatgggctctaagggagcaaataatccaggctggctgaaagaattaaatattttaaatttataaagccagggaccctcaaatccataaaaggattcaatcttcttcttctttttttttaggattcaatcttctaataatcccgggagggggcgcaagagcaggattcttgtttctattttacgaatgaggaaactgaggttcagaaagcctaagtggcatgcctcttcagtaatcggccaatcgtcgctgccctaacttcacctcacctcccagtgcagcactagagtcccctcaggggtggccgtccctggtcagtccagctccagcagacggggtgggtaggacgctccctatcaggcagcacttccgcctcccggggcccgcgcagctcacctccctcacctcccgccctaccccagtcacgagttgttttagggggaccgcccctccacttgctgattgggtagctcctgaaccattgttgtcctctgattggttgttcccttttcggctctgcaacaccgcctagaccgaccggatacacgggtagggcttccgctttacccgtctccctcctggcgcttgtcctcctctcccagtcggcaccacagcggtggctgccgggcgtggtgtcggtgggtcggttggtttttgtctcaccgttggtgtccgtgccgttcagttgcccgccatggctgagctggatccgttcggcgcccctgccggcgcccctggcggtcccgcgctggggaacggagtggccggcgccggcgaagaagacccggctgcggccttcttggcgcagcaagagagcgagattgcgggcatcgagaacgacgaggccttcgccatcctggacggcggcgcccccgggccccagccgcacggcgagccgccggggggtccgggtgagagtgcgggcgcgtttggggcgagaggacttgtctggaaactcggtccacagtgggtccgagagcttctgtgtgactcgtgctccttgctgaattaggaggttagggagcagtgcaaacaggaaacgagaccctggcccggtctttcagaaacctaggctcgagaagcctgttcggttctcagcatgtttgagtgcttctgggcgcgggcggagcgagaaagcaagtgtagggtggcaggctccggagccggaagaagcccgttcaattcagcaacttttcattaagcatttgctgtgcctttagtccggtctctgaagcaaccgcattggcgcagtttttccagacttataagcttataagtctgagccgagcacagaactcgttattagaaaaggagggcggaaaaaaataagaatggaaatatcgtttttgagagatacaaacaaaagtagcaatgcagttcagcatttaagcacttaaggtgtacagagtgttggattacgaggaggaaggagggagtagggaactcgaaagatgatctaggtctggagaaagaactgccaagcgcggtaggagtttgctatcgttgagcgattgatttacagctaggacttctggagctcttcctctgggaacagctttggtaggcaatattgcctaagcagaacccaagattagcctaaaccaatcagggagggatgaagaggtgaatagagaatgttctcagccaaactcaagtaaaaatggggcaggtaggatggcagtttgacctttggatgcctt

SEQ ID NO: 52096 - DNA, 1701 bp, Homo sapiens
cgagactcagtctcaaaaaaaaaaaaaaaaaaaaaaaaaaaaaaaaaaattggggtgagggcggggaattaacgtttctcaaatatacaaggaagcccagactcagaatgtagactcagagcagggaggggaccttttagcccagccttttcacgccaggacagctcgcctgccaggcagttctccaccctctctcgccccgccccgctcctaacgggacagtcagcatcccccctgattggacagcactgttccaggggacaagtcaacctgggcctccctctacatcccctcccctgctcatcagggcccaccccgagccacacggcggagccctgaattgggccaaagaggtgccctatggtgaggcctgcaggacattgggcgagagccgggtccagtgtgggcctcggggcgcggtggggtggaaagcggccggggaggggaggcctggggcaggaggccgggggaggcggccctgggggtgggcaggatgctctcccggagtcccacgccgccgcgcggctctcaccagacgccgtcagaggctccctcccacgccgccaccgcgctcctcgggcgagggacgaaccaagcgccacgaagcaggcagagcgcgagcctgcccctcggtttccgcgctcgggcgcgcgggtagacgactcgtcgctcgaccttgtccccactcctcgctcgcccagccacgcccacccggagtgccgaatccgcgatcgcgccctgacgccacccgagagagctcgcgtgattggctgctcccgtccccgtcccccaccttcccggcggtattttgaggcgcaggcagggtgctgaccagcggaccatcttccatggcctctgccgcgctggagctgctgcggggctgtcctgccagcttgtgctcccgccccgaagcgtcctcctccactggcgacacacgcactgaagcccgagtcttcccgctgggtagttgttttggtcttgcacccaaggagggatttcttgcgcctcttgttccctcagttatttcataaaccaggaccgcaactatactgtcgtgtagcgcggccaccccacagcggtccctgacgttaacccttgccgtgactgctagaagacactggtggagtgtgaattgatgaccaaggcatggcagagcctctctcatctttataatcagttcagcggcggcctccactacagggaactcccagccagtcccgaggcctagggacatccagggagaaacgtggcggtggtaaagggcttgcgcagctcctgaagataaataagactttgggttgctgttgtttttgagacaagggtctcactatgttgtccaggcagcactcgagctcctggcctcaagccatcttttctggcttcagccttctgagtagctgggactacaggaccatgccaccgaatcaggctttaagactttttaatgaccctttcaaatttctgagtcactcccagcattttaggaagccaagtgagaaggctagcttgaggccaggagttcgagaccaacctgggcaacagattcctgagtcaccattgacaagaaactttgaatgaagttgatgatacaaaatattaacatctttttttttttacaaccattaaaaatttaccacaggtgaaactaagtctaacagttcattgagatttcttgctgtacagcaaatttcaaatctcatc

SEQ ID NO: 52097 - DNA, 1629 bp, Homo sapiens
tagcggctactgggaagcctgggtcccagccctgttgctaagctgctgcttgacctggagtagctcccttttcccagcgtgcctcagtttcctcatgggaaagctcactaccagctgaaggtgagtggactggggatggagaggaggggacagagctggggtgcaggccggcagacgggtggagtgtgggagaggctgagatggggagagtccggggagcaatggggttccaaggagggggctgagtcctggcctggggaagtcaggttcaaggcgctggcgtcccagctgatccctggacctgaacagggacctgttccctgtcctgcttggaagtcccatcctgggtgtgggcagccagagaaaggaagcgttctcccagtgctgccatgggctgcagccctaccctgctgggctgagttctgtgtttaatggagggaggaggaggagaggggtgaagagctgggccttctggtagctttttataattatttctaaaatgctatatttggatattattttctgcttctacaaataaaacatgcatattgtaaaaaaattcaaacataacaaaaatctgaaattgctggaaatgctttcccagggctgctccctagaacaaactattaattattaggtgctcattgtacatgcttttttactcctttattttcctttttttttggtaacatatgaacatgtttatgttggacaatatagaagtatttgaatccaaatatcagagttcctcttccactcctttcaacctcctggtatggcaggccaggcctcaggaacgcgggcctccgtaacaactatttcagtactgactggtgaagttaaatattaaaagctggtagagccagtgtccttacacaaaagctggaatgtaacaaaaccccacccagagtttcgcctaggcctttcctgggccttaaagcatgacaaaataacgaaggcattcttaacaaaacctgtttaggattaaacaaacaagttttattggggggtctgaagaaactccccaggcctccacgaacaagtttattggaggttggaaggaactccccaaacctctgtgatttagtaggagacaagataagggtaatcactgcagcacctggacccatttagattaagtcaatttactgaggctccagaggaaggtcttcaggactcagaccttagttatagattagaagttaatcacttatgtctttagataaatgcacacttacacgtacacatagagcttagaaggtatataagctctggaatactttgaaattttgagttggtctggcgataatttccaggccttctccctgcacctggttacagaaatagaaattctcttctttcccagtttatctgcatcttgatatggggccacgagaataagcagctcgtccctcggtgtggtccgggagcactggcactaagcactgggcagtgggagggcagcttctgggcagtgccccccagcctgctccctcctgccactccacctcccaggcaggtcctcccacctccccaggggtgtggtggggagggctggggaggcctcagcactccactgactcatcaacccttctgtcctttgatgggtaggatggggtgaacgctaat

SEQ ID NO: 52098 - DNA, 1187 bp, Homo sapiens
gaaacaaatctggctattttttgagaggggttttcgctcttgttgcccaggctggagtgcaatggcacaatcttggtcatcacaacctccacctcccgggctcaagtgattctcctacctcagcctcccgagtagctgggattacaggcatgtgccacgatgcctgactaattttgtatttttagtagagatgggatttctccatgttggtcaggctggtctcaaactcccaacctcaggtgatctgcttgcctcggcctcccaaaatgctgggatttcagggatgagccaccgtacccggcctgaattgggcttttctttcaagtatccctacagccgatcttattgctgacatctatgtagaggcatgggaacttccacccagctgaagaagatacacacgtgggaggtggccatgtgaagacagaagcagagattggagttatgtctacaagccaagataagccaagggttgctagcagccatcagaaactaggaaaggcatggaatgaattctcccccagagccatcacagaaaaccaactctgccaacatcttgacttttaacttgtggcctcaactatgagagaataactttgctttaagccatcacatttgtggtaacttgttatggcagcactaagaaatgaatacactaaagacctgatttcaaagctgcctggcataagctggtgctcaataaaagctcgcggagctgagttaggttgtgaatattccttagcaaggacctggacctctctttgtgtgtgttgaacaagaataactgaacgtgagctctttttcctgatttgtttccctaactaaaatttagtagcttggatcagagagatggtcccagtttcctgtagatcttctggaattagagtaaatgtgacctattttcctctttaatggcatcaaggctggggcattctgagtgtgaatcaccatggatagtgacacattttttattggcaaggggaccggccttattttggtagatgagttgttattttcctctgattcagcttaagtttagtactgatgtccaaaagcagaaaaggagaaaaagagccaattaggatgtctggataccatactgcttacactgactacagaaatgtctatcatactagggttaagtttgaactatcagaaatctgcctcagcacacatttggagaattt

SEQ ID NO: 52099 - DNA, 2045 bp, Homo sapiens
cttccattagacggtgttccctgaagataggaacaattttacttcgattccaactgtccctataaaagggaattttttttaaagcctacatacaaggtttgtttgctattgaaaaaaatttacggtaaattttcaagtataacaacactcgcaatcaaggccaaacagaatacagcagacttgcaactctaaggtaacaactgtattatgagctttgtatacatttaagttttcatacgttaagtccaccgcttaagaaaaaagaaatggcaattcatataatggtggcaataattacatgtgtgtgtttctacttacggtagaattagcatacccaacttttactgaataatagcatatatcatttttgcaacacaaagaaaaatactttaccttacaagccatacagacgtaaacaaaaactttatttctttttggacctcaataacctgaaacactcccgtttcaaaaaccaacctctctcacgcttcaaccctgaaaggaagaacttgcatcccctgagaacaaaacgcagcctatccagaaacccacggaagcagaaggacgccagagaggaccctttcgaccgggttccgcgttctcctgggtgacatcatttcacctgcgtctcggcaaaaagggagggagcgagagagcgaggccatctgccgggcagcgggccggcggctccgcgagctgagaccgcgcctcctcgccaccgcgggaacaaagagcgccgggcggccgaggcaaaccttagcccaagactcgggcgcggccccgcaggctctcaacggcccgcagcccgtcccgccctcgcgctgcagccaacggccgcggcggccagtacctgcgaggggaggctccgccctgccgggcagctcccgcggatcctcgctgggccgccgcctcctattgtgactgctcgcccagcccgcggccagctcgccagatccgccgtccgcgggcctcctcacccccggaaccccggctccaacttaggcactgtcactgcgcttccttcctcccggcaccatcacacgggccgcgccaggaaacgacggctgcacgcccagagatgacagagtcgcctaacgcctcggaggctccatcctctccgcccccacgccccaaccgaccgggcctcggccccgtcccgcaacaccgcactaggggcccggcccggccacgcccctccccgccccgccgcgccccgccgcaccccgcctcaccccgcctcggcgatcacagacccgggctccctatgcgccggcgcactggcctccgctgcgcgcgcaggcgactcccctcgccgctaggccgcgacacgcgcggtcctcccacttcttgggtccgggtcgcccgtcccaccccgtcccctcgccagcacaaacctagcgagcccagcgcgccagaccaccggagcgctcctcccttttcccccaggctccgcaccgcgcgccgaaccccctttgtttccaccccgagggggaagggggcggggcggggcggggcggggctgcgcgcggcccggcgcacgactcggaccagttccggcaacagagctccgcgcgcagcaccactgcgcagccccgccccagcccgccccccgctgccctgcggaccgcagggccctgttccaattcctatagattttctcttagtaaattgttgctactgttccgtgcctcctacctacaaaactccgcaatcaaacagtaactgacctcacgtagttcttacagcataaatgcattcacgtggcccgaaaagtaagaatttttattgcagtacacaaaggtgtctctcaatgcagcaagccaacaggttcgaacccaacttgtccgaggcttccttaagtgtgacagttgctcagatgtcgcttggggaggggaaataagaacaaagattgaagccggcttggctcctgtcctgataatcacgatacaagagagaaaataaaaatttccacaaaagcacaatccatacaaggaaaaaatagtaaagtggtatcagacttaaggagagagggcagtcaagaggac

SEQ ID NO: 52100 - DNA, 561 bp, Homo sapiens
acagaaaactcgggttttcaagttctagttcttttggcattacttaaaccagtctctctttccctctctgggcctcagctgcaaccagtagaaaatgggggaaatcagagtaaatgttgtttcaggaccttctggaccttggacattctctttatgaacaacactatatggtaattatttatgtacacttgtctcccatatcagactgagcacccagactctgttgggactgtgtaaactaaacccaaggcccaagtctagtgccagaaacacaagagaaggtgtttagcaactgctgaatcaaagttccagcaataacatcataggttttggaattccaggacaaacaaagagaagctggaaagaggtattaggtccctatgaacatatccaccccaaacccatactcgaattatgtaacccagttaaccagctggctggctctctcccaaagcagccagtttggagatgatcacatctaaacttgttttttttgtttgtttgtttcacttcaaggtaaagtgccaaccatacctttaagtttatccaatgtatcctatt

SEQ ID NO: 52101 - DNA, 1008 bp, Homo sapiens
tcctcctggcaatgtatcaagaactctgaaaaaatatataattgaggctacaagttaattcacctcaactgagagaatagtcttatcaaattcttcaatattttatctcattctcaggtcagacctagttccccagctcaagcttgttgtcactgtgaaaatgtgactattttcaaactgacattagctgagttaatttcagtatctaagtgaaacatgactacaggtggcacggcatctgtattcccagctacttgggaaggctgaggtgggagaatcccttgaaggtgggggcagaggtcgcagtgagcagaaattgcgccactgcaccccagcctgggtaacaaagtgcgaccctgtcacaaacaaacaaacaaaaaactcgcacagaattctgaacctgacacagggtagggatgacttggcaaggagcctggaataacaaatagtcatgaatcagaataaaggcctgggggcaagaaaaaaaactaccgagaaggactggtgccaatggttcagttccactgtgactctctgaggccttctccacttgcagatatgtttctccaagcatgtcacagttgaatgggtgaagttaaaataggaataggtttcttcaaacagcagagtacagacttgagcaaggcagcttgggatggaatcccagtgtactgctgtgtgatcttgggtaaatatttaatctgtgcctcagattcctcactgataaaactggaataaagcagtccctacttcaaagggtgttgtgactacctggttaaaaggacaaccttcggccgggcacggtggctcacgcctgtaatcctagcactttgggaggccgaggcgggtgggtcacgaggtcaggagatcgagaccatcctggctaacacagtgaaaccccctctctactacaaatacaaaaaattagccaggcgtggtgacaggcacctgtagtcccagctactagggaggctgaggcaggagaatggagtgaacccaggaggcaga

SEQ ID NO: 52102 - DNA, 2474 bp, Homo sapiens
ctcggggagttctccaagtgtggtaggtccaaaccacctggaaaaaactcacatggccttctgtgccgtaaacgtctttaccaaggccatgtatgcatttctggtttcggcatgaacgaaattcgggccatttactgaaaaaagacaccttacgggcgcctccacaaaagcgggcaggcctccctcccagtaattccagctgaattggtttagtcagtgcagtggtggggaaggtggcctggcagagaccaaacggtccccacgataagaagtttccgaagctctgccccactcactcaagaaagccctctccccgagagcacaccccgcacagaagtctttcccgctgcggctccccagggcaccaccaagctcccaagtcggccccctgctcttccgtcccaccccgtaagagatcattactcccaaaccagcccaaaaagggctgggtgggtgtgccagggtccagggcctgaccccctcccccgagatctgtctccctcggctcctgggggccgggggatcgacctcttcccagccccctctgctcggggcccgcgccggcccagggtggccctgggtcccagccaagctacggctctcattggctatgtgaccttgggcaagtcacttccccctctaagcctcggtttcctcctccgccgagcagagacctagagaggtcctgccctgcacaccctgggggagggggctacccaccgggtgggaaaacgctttgtgagcgctcggcgcggctgaggcgcagggctcgcaggggctccggggccggacaaagctgacccggacaacgctcctccccgtcggcggggccgggcgcctggaccacacgcctccggcccccacccgcgggaccgacccacgcccctccctgcctggcccgctccgggaccccgtacctgctcccggcgctcggccgcaggcgccgccaccctgggctcccgcccggagaggcccgtggcccggagggctgaggcggtccgtggcggcgggctccggccggggcggcggcggtggggggcgcgggcggcgcgggggcccaagctcggcggggcccggcctgggagacgacgactgaggctgaaagtgcgcggcggcggcggctgctgaggcggcggcggcagcgaccgcggcggccgcgcttccgctcatggcggggccgcgagcagcggctccggctgcgactcgactccggcgcggcaggcgctggctgggccccggccggcagcagcggtggcggcgacggaggcggctcccgaagggggaggaggcggagccgggaagcggcggcggcggcggagggggcggggacgtggagggggcggggacgccgagccgcggccgccaatgggcgcggggctcctcagccgcggctccgggggcgggagggcggcgccgaggggtatcctcagtctccgccgctccctgagaaggggaggcagagcgcgggccacccgccgggagagccctgctgcaggggctgccccgccccaggcccgcccctgaggcgcggccgcgggcctctggggccaggcctcgcgcgacccaggctggggctgcgcttgggctccgctgcgcaggggttcgcgcccgcgagggggccggaactcggcccagatagctactgctcgcagcccgcctgccagactccctcctccgcttccccgcactggagacgcagcctcctctcccctcctctgcctctcttggctgtttcctcaaagtttttccctttcagacacttaggaaagaaactctcccttctgttcttaggctgcgtttcagtgataaattagtccccgcggacccagagagaacagcagaggcagaaacgaaagagatggaaacgagctgcagtccctgagtccccgagaccatcttgaatgctgagcaggaaccagccaggctcagccctggcccctcgcccctttctctgactttctcactttacatgcccttgttgttagaagacttagatagaaacatccagcccagctgggcctagtctcaaaagatggggagggtgtgaggtaaggaaaggcttttgacctgtcccaacggctttcctgtgaggggaagaattctgcgagttggtgaccccctttgggccctcctccacttggatgtgatgttggtcactgaaaccgtttcctcctcatgtttgtctggctctcatttcaaagccgtagaggagcaaaataaacaaccatgtgttaggggtacctctaaagtgcaggcacgtgggtgggccagggtgcagctaaactgctgagtggatcatttcaataaaaccttatcctcagccattctccactgagcagagagagaaagagctctatttgaatctttgacaacagacatttcaaattccatgctgacacttaataggtgcctgatctttcattcgtgctggtctttctgtcatcagcaatgctagacactgggaatacaagaat

SEQ ID NO: 52103 - DNA, 880 bp, Homo sapiens
tgtttgtgtttatttaaaatatgtagtattgggctggacatggtggctgacgcctgtaatcccagcactttgggaggccaaggcaggcagatcacttgaggtcaagactttgagaccagcctggctaacatggtgaaaccccgtctctgctaaaaatacaaaaattagctgggcgtggtggtgcacgcctgtaattccagctacccaggaggctgagacaccaaaatcccttgaacccggcaggtggaggttgcagtgagctgagattgcaccattgcactccagcctgggtgacgtaatgacactctttcaaaacaaaaccaaaaccaaaacctcccaacaaagagatttttcaaaaaaaaaaaaatagtagtaggataaaatatgtactattttcttagatgtgtgtatttttttcttttgtaaataacattgtaagacacatttttttttcttatttttcttttttgctgcagcatgtttttaagatctggcccattgcttctatctactgcatattactccacccatcacattttgcctaaggtcttcttcattagggacacccaaattgcctacaaccaaaaacatcactgccataactgtctttatacataccccttatagaacctgtgtgagaattttaggagggttgtatatatagtatcagaattggaattttatatttttttctctgttatatagtttttgctttcatatttttattattggtaaggataaatgtgtgtgtgtggtgtgtgtgtgtgtgtgtgtgtgtgtgtttcttcaaccacagtattctaggaattttctgatcacatccttagccctatcctctatggcttctttaaagactaattgagtctgtaattgattgtaa

SEQ ID NO: 52104 - DNA, 1311 bp, Homo sapiens
aatagtcagaggttgagttgcaaccaatccagctgtttccatacttgactgcaatttctgtaagtcattttcctttttctgtccataaatgttatttgaacatatggcagcccgaatcactctgaacctattttggttccagggattactggattttggactcattctttggtcaattcaactctgtaaagtttaatttgtctaaagattttctgggccggatacagtggctcacgcctgtaatcccagcactttgggaggctgaggcgggaggatcgcttgagcccaggagttcgagaccagcctggccaacatagcgagatcccgtctctacccacaaataatttagccaggcgtggtggcgcgtgcctgtagtctcagctactggggttcttattcctcgtggcaacacattttggagagggggaggtattcctgtctttgctgggtgggagaacggccagtgggcaagggaggacgaaaatgagaactgtgactgccagagggcacgtcaattttaggaagagaacgtaagaaagttgggttctgtggagacttggcatatccacgccacctggaaaatcatcacgtgccctccggggcaagaccaaggcctcaagtcacccctcgcagcccagtggacctcccggccatccctttcacggctccacagcgaccgcgagccgttgccccggtgagaaccccccggcactgtgcgcgcccccgcctgccgtgcgcgtccgcttccctgggatccggcgccgcgcgcgcccccgccgcgtccccgccccttccggcccgggagatttgattcccttggcgggcggaagcggccacaacccggcgatcgaaaagattcttaggaacgccgtaccagccgcgtctctcaggacagcaggcccctgtccttctgtcgggcgccgctcagccgtgccctccgcccctcaggtcagttctcccgcctgcccgccgcagtcgcagttgatggctggggtctgggctgtgcggggcgcagcggcccaaacccagtttgctcctggctctcgggagactggaggatttcatcggagccccgcgctttaccagccctgttccctggataagatatttgacctttccgacccgcggttttcttctccgtaagtggggataatgaccgtgtctacttaacagggttattgaagaggtgttcaggctaagcgtttgccacctaggaggctgcgatagacgtgaattcccatttcccgtttccagtttccgtgactcttccccgcgaaaaaagttgacagaagggtttcgagttttttctgt

SEQ ID NO: 52105 - DNA, 1751 bp, Homo sapiens
taacttgaagtgatgctcccagtttgcattcttgagacttggcccaaataaattctctatttatattaactttgcctccgtttttcctttaggttgacagttatttctaaagttgtacagaagggtttaccttgagtattaaaataaggtgtgagaaaggcaactgaagccagaggctcccatcacagccttgtggccttcggaggcttccaaaggatcagcattaactgcaatatttaggaggagtgcagctcttcaagattcataaagtgttaaatctgttgcctggaattccagaaagagggggaggaagagcacagtgtgaactgtgttcaacttcaacctaaaggtaaaagcgatcagcctaagatcaggagcgcaagggagaagcttgaagccatgcgttctcacggaggcgtttcccgctccagggctgcccaggcccgcgggccaagcagctagccgtgcgggccgtcgtcacgcccgcgatcagatcagctccccgccacgtggcactgggaaggcgtccaccaagctccagggagaaggaggcggagcccggcctcaatctcacccgtgtcctcatgggagttgtagttttccttgcgggcgtagagggcacgaactcccggcttttgcccgataaatagcatctcttttgtacgagtcattcaaataatagacgcaatctaggtaacttcaagagaagatgggaaggggaaggggcaaagcatggaaggcaaatctaaagattatgggcggggcagagaaaggttcgcacttagtacgcatgcgcataccaggcgcgacaggtgggcggacacagaaggcgacgcctagggctgtgttgtcccggaagtgccttctctcctcccgggtctgcgcggacgcggcctccttacctcatttgtcctcgcccctccccgtccctctacgcgttttggtccctgtttggtgctttctgtttgcagctacggcagtgagtatgtatgtgacggaccccgagtcacccgcggcctgggacccctgcctaccctccgtctcgccagccgagctgtggaactagcgcgtgccccctcgccgacctcggcgtctccggtccgcccctcacttgtggtggggcgcagctcctggtccctcagctgcgcgccgccccacgcggccgggctgcgggtctagggggtccgcatctccctggctttccaagggctaaggtcgtgattctagggcggctgggcgtccagggcctcggtgggggtggcgtgtctgccctttttatctccccgcaaggcccccagtcttctagggaagccagtcagtgaagcgcggaggtccgggcgcgccgagagagagtccagtctttgaggaccgagtagtcctgggccacctcccgcctctgctgtcagaagcagcagctgccgccgtggaatccaaaatttcgggagctgtgaccctttcctcatgtaaaacgagtagtcttggacggtgagcggacagttgccttcaacttttgggaagagctgccggttcggtggaaaagctgtggctgggaatcaggaggcctgggttctagccgtggctcccccacggactcgctggcgattccagaaagctcttattgaggctgaatttaagattatatcagattacacagttgaattaggggctccattagtagggcccttttagctcagtgaataagtttctccaactataaaacgagagcgttcaatttgatgacttttcaggtc

SEQ ID NO: 52106 - DNA, 1637 bp, Homo sapiens
ttatttctaaagttctacagatgggtttaccttgtattaaaataaggtgtgagaagggcaaatgaagccagaggctcccagcacaatcttgcaaccttcagagacttccaaaggatcagcattaactccaatatttagcaggagtgcagctcttcgagattcacaaagtgttaatctgttgcctagaattccagagagttggaggcgcccagtgtgaactgtgttccgcctaaaagaaaaagcgaccagcctaagatcatgagcgcaagggagaagcttgaagccatgcgctctcaagtacgcgtttcccgctgcccaggtctgcgggccaagcagccagccacgctggccctcgtcatgcacgcgatcagctaggctcccgcgccacgtggcactgagaaggcgtccaccgagcgccagggagaaggaggcggagcccggcctcaacctcgcccgtgtcctcatgggggttgtagttttcctcgcgggggtagagggcacgaactccccggcttttgcccggtaaatagcatctccttcgtacgagtcattcaaataatagatgcagcctaggtagcttcaagagaagttgggaaggggaagggggaaagcaaggaaggcaaacctaataattatgggcggggcagagaacggttcgcacccactacgcatgcgcacatcaggcgcggcaggtgggcggggacggaaaggcggtgactagagctgtgttgtccccggaagtgccttccctcccgggtctgcgcggacgcggcctccttacctcatttgtcctcgcccctccccgtccctctacgcgttttggttcccggttggtgcttcctgttcgcagctgcggcagtgagtatgtgtgtgacggacccccgccgcccgcggctcgggacccctgcctaccctccttcttgcccgccgggctgtggaactagcgcgtgccccctcgccggcctcgacgtctcccgtccgcccctcactcgtggcagggcgcagctcctggtccgtcacctgcgcgccgccccacgcggccgggctgcgggtctagggggtccgcgtctccctggctttccaagggctaatgccgtgattctagagcggctgggcgtctagggcctcggtgagggtggcgtgtctgccctttttatttccccgcaaggcccccagtcttctagggaagccagtcagtgaagcgcggaggtcccggcgcgccgagagagagtccagtctttgaggaccgagtagtcctgggccacctcccgcctctgctgtcagaagcagcagctgcagcagtagaatccaaaatttcgggagctgtgaccctttcctcatgtaaaacgagtagacttggactgtgtttactaaggcgccctttatccctcccatcctgtgagcggacagttgccttcaacttttgggaagagctgctggttcggtggaaaagctgtggctgggaatcaggaggcctgggttctagccgtggctcccccacggattcgctggcgattccagaaagctcttattgaagctgaatttaagattatttcagattgcacagttgaattacgggctgcattagtagggcctttttagctcagtgaataagtttctctgagctcctttctcca

SEQ ID NO: 52107 - DNA, 1120 bp, Homo sapiens
aggcagggccccctcagagaggagacagtcagtcagatgatctctattcaaacccagttctgctccttaccagctgtgtgaccgtgggcaagtccctccactgacctgagcctcagtttcttcgtctgtaacttggggttcctaaaatcaacttcactggcctttgtggggattaaacaaactcttgtgtgtggagtgcctggcacggatcactcactctcagcgcaagttcccttccgttggggccgctctccgcctccttacaccctgatctaacctcaccttccactgcccatctcagctgctgctgcttctcctccctttggcgatgccgacgcgctccagcctccaggcctttgctcaccgtttgttctgccagaaatgccttttctccctctcgcattcctaccattccaaagcatattgtcttcattgctcagctcaaatgctgccttctccaggaaggctctccgaggagctctgtgcaagcagacaaaaacacggatacaggggcaccagaaggggcatctctctgcccacatctctctactttcggcctggatcaggctcaaacatggacatttttctcccccacctcgcagtacacaaaagtgcccactaggtggtgaaagaatgacgaagtccccgtggggatgggcgataagggaggccaaccaggcaccgcctgcatcactcattcgtttatttaacgaatattgactgagcacctgcatggtgccagactgtggggcaacccagcaacaaggcccgactctcaaggagcttgtgttctagctgggggaggctggactggcgggagacacaaaaaacaaggaaataaataaagcaggaaaaacatgggacagagatgaaggttacacagaaaatgctggcccaggatcacttgaggccaggagttcgagaccagcctggccaacatggtgaaaccccgtctctacaaaaaatacagaaattagccaggtgtggttgcgtgcgctggtaatcccagctatttgggaggctgaggtgggaggatcccttgagactgagaggcagaggttgcagtgagctgagatttcaccacagcactccagcctgggtgacagagtgagacccctgt

SEQ ID NO: 52108 - DNA, 2658 bp, Homo sapiens
ggcctgaagagactgaaagcccccactttttctgtctcttgggttggcccagggttgaaacccaggttccaggctgtgaggaagtccaggacacactgagaggtcatgtgtaggtgttcaggccaacagcacagccaggggctcagctgacagccagcatcaatgaccagatgtatgggtgaggaggtcttcggatgactccaggccaactcctatctgactacagctacaactgcacaaaagagcccgaacgagaaacactggctgagcccagtcaaccctggaaccagaagagatgataatgccatccagccctgagatttgtttggagggtgacgcggccaaggatgacacccactgccccagaggctgggggactggcaggtatatcttagggtttgggggtgggagtgaaggtcatcctgaggagagtcctttttgagtgtgttaaggtgtctgtgtccatgtggacgggctgtcagaatgggctgggggatgcggtcagggaccactcccattcccagggcctgggtgtcctgaccatccatgctaggtctgttccacgttggccacactgttccaggcaagcgcctttggtcacacggactggtctctgagactggtctgatgtgtgtactctcaggagcctggacaggggcagtctcaatccagaaatgacctcttcaatacttggtgtagttccctgtatgaaacgcccaatattatgagccacccaggcctgggtcacctgctgactggctggaggaagtgcatgggaccatgtgaggtcacggcagccccagggtttgcaggtcgtctgcatcctggctcccccgcttacaagctgtttgaccttggtgaggttagatcatcttcctaagcttcagtttcttcagccacacaatgggtataacacttacccttgagggttactgcgattgtcacacaaggcagcatttgcatgggccctgggccatgctagacattcatcaggcactgaagctatgggggagagaagtgaggggcccaggctctggagccagtgggtttaaactccactctaccactaacaagacattattaaaaacttctgtgcgcctccatttcctcatctgtaacatggggataataatagcacctgcctcctggcttgttgagaggatatatgtagtgcttacaacagcacaacacacatatatgggtacttcacaaatacaaatccattcaaggaaaccaaccctggtgccctgggatggccgttggtcagagacacagaagccgaagccagcttaggacaagcggaggggcccaggcctgcccctcggttccgggggcctcacttctgttccagggctgttcagttacctgctcctaggcctgggaggcccagtggacaacagagtgacctcttctccactgatttgatctgaatacattctgccccatgagggcccaaatgagggaactggtatgatattcacagagaggtgacatcacccgctgaagatcacacagcaagtccctgggccacctggatcccggccacagctccaccctgctacctccctctcttaagtaacacattaataagtgtcttaccctcaggccattatctgtgttcccaggccagggaacatttctgaaacacatcaaacattgacaaaaagaggtgtttttctgtccccaggccaggcccttcggcctctgttaaccagtgagtgttctctgttaatcctgagcccagctcctcctacacacaagtacaaacaagggcattgggcatgggagaaacctgtccaccagggccaggaggggacacggaaggttaatgggtcccctcccccaaagcaatgcacacagctggggctcaataagtgctactgggtggtaggaacagagccagctgagggcacaggaagagggatctgctaagcagaggaggcctgacctgggcttcattgggtaaaaccagtcatcataataagtagctggcatttcgggagctcttagttagttccagacactgccctgagcactggacatggtcactcactaacgtttccatgtttcagtatctgtggggtgcatatgttgctctccccagtctacagacaggaagctgcaggcaagaaagatgaagtcatttgcttaagtcacaccattaccaagaggccgagcttggattcacacccagcaccctggctccagacccaagctctcaaccacaatacaagcctgtggagtgggaggggtgaaatacatgagtgaggggtgacttctaggtattggcttggggtggctgtccctttgatggatatgtgggaggagcgcaggtgtcaggtgaggtattggggagaaggtggatgaattgggtttggcaggtgttgagttccagatacctgaggatgctcaggtggaggaggcaggagagaggcggcttatggctctgaagctgggtgatgggggctggagctgctcactccagagtcatcagcgtagaagcgcagcctgggagacacctgagcgatgaaggggcaaggccacagctaaggcaggggaattgatatttagtgtgcaaggattcaaaatgacagcaagaaaagaagtgttttagagactattactattattattattgagacagagtcttactctgtt

SEQ ID NO: 52109 - DNA, 1664 bp, Homo sapiens
cccatacaagccctaaccaggcttagtttccaagatcagatgcattcaggatggtacggttaatttttcaatggagaattagttgtactcttatggcttctggctttcgcacacatagcgtatcacttatttattgctgcataaagaattactccaaaattgaacggcttagagcaacagcagtcagtgcattatcatctcttatggttccggggttgactgggctcagccagtgattctcctaaaggctctttcttgcagttttagctgtagtcaggtgggagttggcctggagtcacccgaaggcttcctcactcatacctctggtcattgacggtggctgtgagccgggcccctggctgtgctgttggcctgaacacctacacgtgacctctctgtgtgtcctggacttcctcacagcctggaacctgggtttctaccctgggccaacccaagagacagaaaaagtgggggctttcagtctcttaaggcctgagcctgtggaaacaggaccctgagcgtgtagaaaaagcagggctcccatgaggccttggacgggatactgccccctctcccccggggccctgattccccagtggcacgaggcgcacccccccacacacacacaaggacactgtgtagggtcactgttactgtcactccccgagcacgcacagtcaccgctcagccgcaacccggcgctccctctcgcgaagccacaccccctgcgcacgccgcgcgcgacgtctctcccgcccactccagcctggccccgccccggcccagctacattcccgggccagcttctgtactgccaggtccgggtcggcggctgcactgcggatgagaccggtgcgactcatgaaggtgttcgtcacccgcaggatacccgccgagggtagggtcgcgctcgcccgggcggcagagtaagagcctcgcgcgccgtggaggagggagcagggcggtcccagggaccggagagccgggcggggcgtttgggccttgtggccggctggggcaggcttggagttttggggagtctcggagaaagttctctggggcccagttctcctcttaagacgacgctgggacctgcagttccggctttggagaggggagattgcccctgaggcaaggtccaggctaattctccacgctcccacaggacatgtggggtcagggacatggcggtcactgaccaggcccttggacgtttggcagggggctttgatgactcttcttctttatatttacttatctttttttttttttttttgagacagtctcactctgctgcacaggctggagtgcagtggctcgatcgatcgtggcttactgcagcctcgacttcttgggcccaatcagttctcccacctgagcctcccgagtagctgggactacaggcgcaaacaatcactaccggctaattttctgattttttttttgtagagatgggggtctcactctgttgctcaggctggtctcaaattcctgggctcaagcaatcctcttgcctcagcctcccaaagtgttgggattacaggtgttagtcaccatgactggcctgaggaccctttaatttttaagacagggtctcactctcatccaggctggagtgcagtggcaccattatacctcactgcagcctcaacctcctggactca

SEQ ID NO: 52110 - DNA, 1060 bp, Homo sapiens
acgttctgagcctgaaaatccaactgtacaaatctgtctcagcagcagcttacatgaaaattgtaagtttggggtgagctggcagtttggcagtgccaccaaaaagtcaaatggggtctgagactgcattcacagaagcagagggtccaggacaaaggaggggactgcttgaccaggtgtctcccttgtgaaaacctctccagttctcagaggttaggaaaaacctgagtggctttccagatggcttggaccatgtgaggacagcatcagccagtcacagcctcaggggagctgaggtgctgtctccagatccctggggcagtgtgggctggctgggggctagttacagtggggcagccagccccccacccgctttggaggagacaggagcaggcaactcgggctgtgctgatgaaaagggtctgccctgagggccgctgttccagaaatgctgggtggtgtccctaccctttgcgggactgggaacgagacatggactctccttgctctaggccaggccattgctcggcgtctgaaaccattcggtgtccagagatttctgtacacagggcgccagcccaggcctgaggaagcagcagaattccaggcagagtttggtaagtgaagccttgatttccacaggagcctatctgtgcccagttgagaggctgtattttctctcaatggtggcattttcaggcagagggcaggagctccaggcatgtccaggggctgctgtctggtagatgtttaatctacctgcccctggacactggcccactcagggagcacagggacttacccaggtcctctccgagccagcagagcagtccagggctcccgtctttcagagtcctttgttaccattccccattgtgggcggagcagcggggatggtggtgggtgtgaggaagggctgggcactttcactgtcttttccttcataaactggcaagcactaccctagcctttgtgtgcgccccttagtccaggcggatccagcacctggcgggtccacagcctggtgagcagatggcaggctggatctcaagcattcccc

SEQ ID NO: 52111 - DNA, 771 bp, Homo sapiens
ccaaacaaccaactcagaaattcgtgggaatacacgagacctccgtacagggaagaagagccgtcagagtgggcctggcctgtctgcttctcagcagtggcccccacccggcggggcctggcacacagcagcgtggcttcagggagtgttcccagggagcctctgcaggcccattatcctccaccacaaagggctggacttgaggatctgaagggccctctggaggccgcctcccacactgctgagcctggctttgtctggctgtggttcagtgatactttgaaccttatgctcctgggcggacagaccctaaaactcacgtggtcgtagctcctcacactgtccctaggggtgccttcaggccactgggcatgtatggaggtcagaccttccttctctgccactccaagcccttcctagctggtgccccttgagcctgtttacatcagtttaggggaagggggattgggtgaggtcatcctgaggactcgtccaccccaaaggtacctgtaattaccaacatttagctacaaaacaggtgacctgggaatggaagagtgaaacatgcaggaccacagggctcgcactgctggctggcagcagtcacagctgccgtgtactgggtgcctgcatgtacccaggacagcccaggaccgtgtattactcattagtgcacaagtattacttagtgcacaatatacagtctctagaagatgacttcttgccttcagtcgccgctccctttgatggctgtggttaggggtgtgctcg

SEQ ID NO: 52112 - DNA, 3083 bp, Homo sapiens
agccttttacatctaagcacaacagcccatactaggacaacaaattaccaatgacttaatgactaaggcacagcattctcttcaacctctaaagaaaagcccgtaatgtcctctacttaatacaagtgaaaaatatgagaacatgttttggaatatttttgcttcaatttttgaaggtgaagagttccttctattaattcaagttaactagagtcagaagatactacttagtaatcaactttactgtgctttcacctaaaatttttcctccaaattatttaggatttgccttctgttcagaaaattagtttccacaatatccttcactatgccagaatgctgactgacttaaaaaaaaatgaccattatgaaaggaaaaaactaaccttcaacaccccttaattcactgccttttattatttacatacaaatctgtcctccaaacaggagaagatgggacggcagtgtcttaccaccgcatcccccacagctcctcgcacgaagcctgggagtagtgggcattcaataaatgcctattaaacacttcagtcctctcataacaagttggggcattccgaaacactggctccacccctccagggtcggccgctggctcccgatggcagtctgcctatggccttgctctggtgaaatgaaacctcgtcgctcaagacccaggatgggggcaagggagccgtccgaccacatcccgcagggcagcagatcctctcttcatcccgccaggccgctggtcctgaggcctttcccaccccattcgggaacctacgtcgccagccggggatccacaggagtaccagcccccgccccaccccgcagacagcctggcgtcgggacaccggggacgcctgcgcagaagaacccgcctggccccttggctccaacggtaacaatgctcccctccgaaagacagccagagtagtccgggggcaccagtacacgtctgcgcgctccccgacgccttggcgcgcccctggtgctcaaccttccccacgtgagcgcgcccgccatcacgatactcgctgacggggtctcctcacctgagtcgggctccgcccccctcctcctcgctgaaggaggcggtgacccctctccgatcggactcggcagtgtcagaggaggtgggaacgtcctgaccagcgtctccgttacgggacttcctcccccttccacccgcccccctcccaccccgcctctagtcccctagctcctccagccagttcgccgcagcactctgagaacacggcggcggcgcccgaggataagcggaagtgacgtaatgcaagagcgcctactccgccccattccgcctctcccagttgggctgcaaccaatcagcaatgggaagggcggggccggggtaggagtgcagccagccggcgcgcggaacctggaggaatttacttagcccccggaaaaactgaccaatccacggtccctgaagtctggttgtgtttactaccgactgaatccgtgagctctctgaccaatcaccctttgccttacaacatgtaaaacggttatcaaatgccttttagggcgggatttatcactaaactgctccaggtttggactatagaaatgcggctgttcgctgcaaccaatcaaaaccctctgtggtttaggctagcgggctttccgcctaaatccgccaatcacaacaacgactgcgtgatgtctgagggcgccggagaggcgggccctcagggcaggccgtaccgccattggctggttctgaaggatttttccaccctcgtggtgcccggcgctttagtgacccagggctcttctccggggtgaattcccttcgctgaacacacacacacacacacacgtagagggctggagattgagttcccacttcatagacgttgggaaagataagattccaaaaagctctttaggtttaactaagccaaagtccagggtgaaaaccgcgaataaaaaacgctgtccatcggatggcagttaggtcggaccccgcccctcgtccagtccgggtggctgcgcgtctggaaacggtggcgccccaggagcccggcgcttggccccgcactcggctgcaggtcaaataagcctgtagtctgcatgcccagatttataatcacctgcactccccccacaaaaaaataggaagcgctaagctctcccactcctgtcccaaacgtggaagggtcgcggacttgtatgggacgcggtctgaaaaaagcgagccccggggcgacgctcgggtttccaggtgcaccctcggagggagaacccgatccctgagcatcggacactggggccagggaagaaaccccctttcctagggtgaggacggcagaagaaagctgccttctccggcgcagcgtgtctgggagcgctgcgtggctctggagacaaaggcaggcccgcgaactcagctgggttcttctgggggtgggggtaagggtcttggaggagctcccagaaaaatggaactcccagccgggcgcgatggctcacgcctataatcgcagcaattgggaaggctgaggcgggcagatcgcccgagatcaggagttcgagaccagcctggccaacatggtgaaaccctgtctctactaaaagtacaaaaattagccgggcgtggtggtgggcgcccgtaatcccaggcaactactcgggaggctgaggcaggagaatcgcttgaacccgggaggcggaggttgcagtgagctgagatcgtgccgctgcactccagcctaggcaacagagtgagatttcgtctggggggaaaaaaaaggaactccccgctttaagaatggaacacaccgaatacccctacagcagattccatcccttcagttactggtcggaagtgttgatttcaaaaagcaacctgtttgcgtggatttctttaagggctcggtggagtctgatgtttaattcttttccttaagattcgctgacactatagccatcacacatattttactgacagattgatcggtaaaataaggaaaatatggaatgatgacagtaagccaggcaataggagagattcttttgcgtatctgtctctcaacggtaaatgccatgac

SEQ ID NO: 52113 - DNA, 1525 bp, Homo sapiens
gcattatttgtattaaaaaacaatccaaaacaaacaattcatcagtgaggactaactaaataaattagagtacatccatacaattgaatctatgaagttgttaaacaaaatattgagggaggctgggcgcagtggctcatgcctgtaattccagcacttttggaggccaaggcagaaggatcactggagtccaagtgttcaagaccaccctgggcaacatagggaggccccatctctgcaaaaaatacagaaattagccaggtttggtggcgtgcacctgtagtccaagctacttgggagcctgggtgcaaggatcacttgagcctgggacatcaagggtgcagtgagccatgatcatgccactgcactcgcagtgagccatgatcatgccactgcactccagcctgggcgacaaagtgagatcctgtctcaaaaagaaaaaaaaaaaattgaggaaagaaaaaaaaaaaaagaatgaggagactttcacttttgctataacagagtaactaactgctcccgtacttgtcctccgtgagtaaacacctagaaaactagaaaaaaaaaaggtgaaataatgtttttagacattggacagtaggcagcacaaaacagtgattcctgagagaggggggaacaaaagcaagggagccttacaattgctccagttttcttcccggagacactttctggacaacgaaacaggaaggagagttcaaacagagcatggtagtctcccactgatttgaggagagagattggaattccaagagagtgagtcagcaggaatttgcagggtaaattactggagaagaggcacctaggcataaaaagccttccagaaattcttcctaggaatcttccacagtctgttagtgattaccaaactgtgtatgagtaagatgaaactctaaaataggccaggcaaagaacaattctgaaaaatcacacagagatgggaaacattcaaattctgactaaagctgaataataaaaataagattttgtttgtttttcaatttctttaaaagaaaggcttttggccgggcacggtgactcacgcctgtaatcccagccctttgggaggctgaggtgggcggatcacaaggtcaggagttcgagaccagcctggtgaatgtggcgaaaccccgtctctactaaaaatacaaaaaaattagccaggagtggtggcaggcacctgtagtcccagctactcaggaagctgaggcaggagaatcacttgaacctgggaggcagaggctgtgtgagccgagattgtgccactgcaccccagtctgggcaacagggcgagactccgtctcaaaaacaaaaaaaaaaagaaaggcttttacattgtatgtgaaatggtgtaatattatctctatgtacacggatattttaaagatgcattttttttcttttttttttttttgagatggagtttcactcttgttgcccaggctggagtgcaatggctcaatctcggctcactgcacctccgcctcccaggttcaagcgattctcc

SEQ ID NO: 52114 - DNA, 2600 bp, Homo sapiens
ttcagggcaaaaacatttcttgcagtgtttctttacgtttgagattgggtaattagaaaagcgtgacaagtgctcaggcaaaggggcatgcaggctttagggttattcctaggatcctgggtgttggaggcgggtgttgagggtgtgtggaaggaaaagagtcttgaaagaaggtgatttggaagacagaggggagtcaaccggagttcttgcccttcaatagtacgcatctttgggcaaagggggcctcggccagcgtccatgcttaaaggccctgctttcgccttctttctgctctgaaaactccccgtgcagaagaagggttgaatccgcagtgaaaaagggacatgtccatcagctcggactccctcttctattccagtccagaatctcctgcccaaaggctccggggttggctgggcttctgttccatcacctcagtgttgattgggccacaggtgtgcacgccacagcccatggcggggagctgtttgtcggactgtggacaaagtttgtacctagagctggatgtccacgtgggtgggtgggaagccctagagaggggcggctattcgccagcggccacatttagttggggctcaagcagttcctgtcagagaattctaaatttgaacttggtccttcaggtcttgggaagatgagtttgtcacggtaggagagagagacgacactctctttagaaggtgctgagccggaagaaggctcatagcaagcttaggctgaagcctttggcgcctcgggctctggacctacaaaacccagagtgcacgcgagcgctgagccaatcaggtgctgcgcctcggccagtcaagcgggtgtgtggcaccttgtgggcggagaccacgcctctctacgcggggggcggggacacgcggctcgcgcgctgtgggcggtgcccggcggggccacgccttttccggcccgcagcgcggcctgggctcccgcgtgtttaaaagtgcgcttgtggctgctgctgtcttaactcctgtgcttggcggacagacaggcgagatggcggcggaggtgttgccgagtgcgaggtggcagtattgtggggcgcccgacgggagccagagagctgtactgggtaaagactgcggagctggagcagtgctcctctaaccctctccccttccgtctcggtacctcagctgtcctctcgccctccgttgggcttctccccagcggggccgggacccctctagtctccaccactcccctgggctctgtcagggctcccctgtccgtctttctgtcactacctcccagccagattgggacatcccactcacccgctccccagagctgtgtccaggaccctgctgaccccctcacccaccaggtctcccgcctcccccatttccctctcttcactgggcaggggttccttctgtcactttaggtatgtaccaggcctctgctgtcagcctccttccgcgagacattccctcctgtcacagcccctccccagggttctcccacctccctacctcctcttctcagctggccccggatctcctccagttccctttgggtcaggacccgagcttccttgccatccccattctgacactccctcccagtgacagtctagtcccaccgtacattgtgtggtacattgtgtggccttctgctctcatctcattcttgggctgcactcttacagtccagttctccaacgggaagctacagagtccaggcaacatgcgctttaccttgtatgagaacaaagattccaccaaccccaggaagaggaatcaacggatcctggtaagtgaagcagttgccagctgtctccactctgcagggctcagaaggcccctgggagtgggtggatgtgggagggagtgaggggagaaaaaggggagtagtagcaaatggagctttgaagaactctgatgcccagcagcctgggatgtggggacaggctccatctttcattcatttgttctttcaacaagcatttatggaacctgcccctctgcatccctgtgctgcaagcttctaggaaaacagccaaatcaggcctagccccactcagagttcatactctagagcagggtttctcaacctcaggactattgactttttgggccaataattctttgctgtgggggcagcatccctagtctctactcattagatgccagtagcaccagagtggatttccctggattgagaacctctgctctagagagatgagaactggctgtgagggacacttttacacaaagctctgaggccacgtggggaagagtacagggcagagtgagctcagtgggaggagaggtctctgccagaatgccttccttggtgaggtcatgttggagctgagccttgaaggctggaatgagggtttggcagtcaacgtttggtgtttcgagtgaaaaggatagtgaggacaaatgcagagaagcaggaaagcttgcttatgattggggagtgaatcagccatggtcctgagagtatacaaagaacaggccaaagagagattgcttacagaatcactttgttgcatacctttaagtgccagaagcccagggcctctctctcaagtcttgtggcagaattcccccaag

SEQ ID NO: 52115 - DNA, 1754 bp, Homo sapiens
aggaggccatgctaggtttgacttcatttaaaaagcacactacacagctgacgggctcaggagctccatgaagggcaccctgcagaggtctggagggtagtgagaaggtaccaatggggcgagcatgcctgtgtcgggaggctgatccgggtaggaataagcccagcatgccccacatgagcccaccatgaggaagcatttggagagaaagcttgctctgtgttgtcagaagggagattgaagaaggtgggcccaggggtgctgttgacagtataggctcatgtgctgttccaaggctcatctctggctcttgcctggtctggccataccatgtccacatccgctgtacttaggacttcctctgggcaccagggcagtggcctcaccaagacctggaggcctagatgatgaaatcatactggtgtttgctgtgcttgtacattcccatcagcagacatccgtgtttgggcctgactggccaacagggaagtccagggaggacacagtataagctgcttgggtagaggtcagctggaacctcttgtgaactctgcaccagagtgaagccttcacccatggcagtattcctgtgggtgggagggaagctactgcagactgaaagcaaatgattccaaggaaacacagtactttagagaattctctttagatccgtgagtgctgcccatggagctgggccattcctcctgagatacaggacaggacgcctcaactctgcttctttgggctctcccagacctacccaggccactggagtgagtctagagaaatgaccagggtggtgaagagacaccctgcaaactggcacatacgagaggaacccaggagggcagcagaccccagggggatgagggtgctgcctgcaaatctctgaagagttgtcacagaacagagtgaagagatgtcctttgggggccccaggaggtagagattctgggaatgaggttgggtttgtttcctcatttgtctgcctgtctgtccgccatccatccaacacttagtgagctttgctctgtgctgggcatagagaatcaacagtgaacaagatgggcaaagtccctgccctcaaccaacagactgaaaagagaggattcagtgccatctgcaggtggcatgtggctgagtgggcacaggagcatggagaaggcgcagttaactgttatttgtagagacaggggaaggtgttccatagaagtagtgactaaggagcttctgaaggaggggtagaatttagcgagggagagagactttggctcaattaagtaaaaagttagatgggctcagttttcttgggcaagtctggcctgttgtgcaaagcacccgcactccctgactcttccccaaacacaagagctaaggtgggtgttctgttcctcccacttctgcctccaaatgacctggagggaatttgtgtcccagctgttcccttccctgccacctttgctccaggtaatagccctcctcacacctctccacatctgatagggaactttcccctgccggatctcaggagcatcagcactcccagcctccaaaatggggacaatgagctcaccaagtcaatgtttaatacattattgacagaacttacgatgattttaggtggctcagggatgtagtaaagtacttgtgttctgctggttaggctaagctgaagtgacaaatggccctcaaatgtctggtttcaacaaaagttcatttgcttttgttgaatgtctggcacatgtctgtcagcc

SEQ ID NO: 52116 - DNA, 1417 bp, Homo sapiens
gccagtaagtggcagaactgtgatctgaaccagagctaactgactccagagttctggctcctcaaatgactttcccctctgttcttcactgtagtcctaagagcgaggcaggacaggggttatcactttttgtttaaagatgaaaaaaccgtctgagaggcttgagatttgcataaaatacacagtgggtgcccagccccatatttgccccttgagatttgcataaaatacacagtgggtgcccagccccatatttgcccctgcgttcctaggtgaaggctcttcccatcccaagagtcagcttcttcttcttcgactttacttacacactcgaaaaatctcagggctggaggcaccgcggagatacatgctccgcgtccggtagttttacgggagggtaaaccaaggcatagctctccgtcggcgcgcctgagcctccggatgccgggggaccgcggagccgcgggcggcctgagggtacgcctcatggtcctgccagacccctgatgcccgaagcccgaccagacgctcagcctcggccaggactgagcggcgcctcctgggtcggtcgcctggggaagcgccccgggtcccctcccccggccgcccaagttcgcccgcagcctctgcgcaccggccgcttacctcacagggcgctcgcccaccgcggagtccgggccgcggccgccggtgccctggaagccacccgccgcccccgctggagccgcagcagccggtaggattgcggcgtgcggccagccccgcccgggggcggacagctgcctggggatcgtgcggagccgccgccgtcatgtgacgcgcaaggcggcgaaggatgccgggagcagctggctggccggggctgggcttcccgaccaccgcgcataaaagctgtatctgcaggaggggcaccgggaggcgggaggaaggcagacgaggagggggcgcgtggggcttcgggtactgcaaaggcgagcttgcggaaggacgattcaggctcgtgttgcgtggccccagaaggggcagaaatagaaccagtgggtggaaactgcagggaggcatgctaaggccaatacagtgtaaataagattcctgcgagcaccagttatctaacagtataaggagcagtttcctggggtgctaggcaccctgtagatgagcatgtagggtctgggttcattcactgaacaaactgaccattggctacctgccagacaatgtactaggagtacatattaaattagttgtatgtatggcgcttagcataatgcctgccacaaagtaaatgctgtatgtttgttgctgctggtgccgttactattatgggcacaaaagtgaacaaagcagatatggttcctcttctcctgaagttaattctgtagtggagaaggtagacggtaatcaagtgtcatttaaa

SEQ ID NO: 52117 - DNA, 1545 bp, Homo sapiens
gaaggaacccggccgctggttcacgcctgtaatcccagcactttgggaggctgaggcaggtggatcacctgaggtcaggagttcgagaccggcctggccaacatggttaaacacccatctctactaaaaatacaaaaattagccgggcgtggtggcgcgcgcctgtaatctcagctacttgggaggctgaggtgggagaatggcttgaactcgggaggcagaggttgcagtgagccaagactgcgccactgcactccagcctgggcaacagggcgtgactgtgtatcgaggaaaaaaaaaaaaaagaaaagaaaagaaagggaaggaacctggtactgagttaagagttctggattttaggtcaagatcattcactgaatcgctgagtgacctttggccagccttcccaagaaggctgtttcttccttctagaactatggttctgtttctctgtttctctgtctgcaaaaacgagggagttcctctagggataattacttgagctctttcagctcaaacattcttttttttgagatggagtcttgctctgtcactcaagctggagtgcagtgtcgcgatctcggctcactgcaacctccgcctcctggattcaagcaatcctcccaccttagcctcccgaggagctgggattacaggcgcccgccaccacgaactcctgaccccaaatgatccgcccgcctcggcttcacaaagtgctgggtgggattacaggtgtgagccaacgcgcccggcagctcaaacattcttcaagctgggagaaccaggatgattaaacacgcgcgccggccaccacgtgcacttcagtgcccggaccctgacccgcagacctcaaaccgcgcatatgcccgtcgccttcaacgcgcaccctccttgctccccgctaccgttcagctcagttcgaaggccccgatgaccccttagagttaaggggtgcccgtcggtgagctccccgctggtctcacagtcacagcccgggagacactcactgactcgcaggagggccacgtagatgagaaagttccgtatggaggagatcacatcctcgcgcatcttccgtttcatctcctccgggtccagcttcggcgcgaggccctcaatccggaacatcgcggctctgacttagcagcttccagccgccgcgctctgctctccacggtggccgcctcgcgcccggaactcggcctatcctcacttcctgttcccgccctctcgttgccacactcgacgatggatgcctgcacgggacaatccacgtcctgacccagctgatctgaagtgcggtgtgaagcgggcggccgcaagctcagcaacgcaggctctggtttctccacgctgtctttaataacatctgtcatacaaaaatcagcccggctcggtggcgcgtgcttacaatcccagctactcgggaggctgaggcaggaaaatcgcttgaacccaggagggggatgttgcagttagccgagatcgcgccactgcgctccagcctgggcgacagagcgagcgagactccgtctcaaaataata

SEQ ID NO: 52118 - DNA, 708 bp, Homo sapiens
tgccaacacagtgcctagcaaatgagaactgtttggttatctcctaagtaaatgtttatcgtaaataagtttattttagggggcactaccaaagctcttattacagggtaacctgaaattatagcaaaaaagaacctaacagtctcagatattagaaatgacttgtaagctctgtttgctcctcagcatggaggacttggcagacctgtagtgatggatatacttgaacatcccgtgcatccccacacacagtgtttctgtttccgggagagccacgtgatccttgttcctctgaaggtaaagagtcccaggccagctgagctgggttagttcactccaggtgagcctcacaggctgctgccaaatcccaggagggtgtggactgtgtgcgagtgcaggaaagccaactagggcaaagggcaaaagaaccagttggaagaagaatgacaccacagggagatgaatctccagttaagcaattctagtcccagctcttgcattaatgagctgcgtgaccctggccaagtgtctatctcttagtaggcgccagagtccatatctgtaaaatgagggcttggattggctggtctctacagtctcttccaggattgatgctgggatttggtgatcagtgtgaagactgtggacactggtggaaggaaggaggtaagtgtgtgttaggagcatacggcaactgaaccattggtt

SEQ ID NO: 52119 - DNA, 1437 bp, Homo sapiens
tataatatcagtgcatgtccaaccgccccgctccactcccgcttcctgtaatggccataactagtttttaaggtttccttcggcagagagggaggtccattcagtcgggtgcgggccttagaatttttttgcttcacacaccccagtttcgcaatgtccagcccttgacaaccaacagagcacctgtaggagccctgtgaagttggtaaagggttggggttgtaatagctgtccagcagacggggagacaggggttcagagaaggtgggcaaccaccacagcaggacgcagctccctaccgccagggctgggagtagaagccgcagcctccgctccggctcggccccacgagcaccctgcaggtgaaaaactacaatttccagaatgccattcggagcggagttacgaagcggaagcgaggccgggggcgggggggatccgatgcgcgccgctgccgctgcgtgggggtgaggggatcaggtacgctgtccgctggttaagggggctggctgggggctgcggggtctgtcctgggacgtccgcctccctcgcgggtggggcggacgttgagaaagcagcgtttagcagtcatgtggcctgtggtactccaccttcctgatactttcccttcctgcttccactcgcacgctcagcctgtgggccgggagagacccgcaggcggggtgctctcaggctgaattcgatgtgccatcacttagcggcagtgtaggtacccatcaggtgggagttaggctagcaaaggtctgaggcctctgccaacctagggtgggggtgcggagtggaggatttatgaactcagcaagtatttattaagcatctataagcaaacaacacttgcctacattgaagggatggaggaggttccgacaacaagtaaaataggttatgttggatagtaatatgaatgaggagaggaaggtagtctgtgagtgtcttagggaagagcattgagggtaaagagaacggcgaatgtaaaggccttgaagggtatgtttgaggaacagcaaatagaccccggagtgcagaggaaacgagaaaggtagaccttagtgatctgcataggtcattgtatggatttgggctatttactgtcagtgaaatggagagtactgcagggttctaagcagaagagtggtgatcatcaaatacttaggatgctcacagggctcgggtactgagggtgtacaggtgaattcttccaattcttccctgggtttataatctagtggggaaacaggtagacagctgtcatgcaaggcagggtcagataattggagccccatgaaagcagaacgaatgtcatccccaagtccccaggatgtactattatgtcaggtgcttagtagctttgttgaacgaaagtaatgaatattcagcatcggacccataattggaggctcagaaaagatgtttaat

SEQ ID NO: 52120 - DNA, 1599 bp, Homo sapiens
accttcagcaagtcctttgtggttactttattgtcattaaagagaaatctgatcaaatgccactttcggtaaaagaaaatcacttcataaagtgccgggtgtgcagcttctggtagtctgttaattgagtccaaactccattatctcttaggcaccccaaccagtaagtctctagctttgtggcataagtccagtggcaaaggaatccttacaaccaaggaagcccattccatagacaattttttctatatgaaattcttacctgttctaggagaaattaactccctatgacatccactcattgagcctagtcctgccctctgagactccaaacggcaggcctgctgtggggttttgaagactataatcatgactcacggtctccaaacgtttttctctcctggtcgcccttctcaggctatgttcctattgttcacggtccctctaaaggacatgcagaagtgggcacaagactacggtggctctaggtttgcctgaacaaaagagggcctcagggtccctctcttcttttgggaggtcttctcaaagcagggctaccactctcactgccgcaccacccctccggagtcccagctcacccgcttctgctgagagtccacccagtaaacaccgccgccgctgccactgccgggctccttgtgacggaggcggccgcacttggtgaccagcaggcggtccccacagcgccgaaggcccggaccgcatacaacgcgcacccgcgagcacgctctagcattcaggctcaacggtcgctccactgcacccccagggccttccgcgtcctcctgttccggcaggagcagctcctcacccgggagcaccacctgacctagtactgtgcgtgcagcgcgcgccctgctgcccgcgagagattcagccgcgacagacgcaggttcggccatcgcgggctccaccaaacaccgtttccggtacccgccttccgcttccgctccgcttccaacacccgcccttgaggactttccgtttccggcagtagcggtccgttggattcggaccagtttatgaagcttgatggccgtcagctcacgggtccctgtccaaggtggcagtgattgtggccggccacctatctgacagcctggccgcgggtcggtatgaaaaccgcgcagcttggtccatcgaaaagcctccacttccagtgtctcgggtcgcgtgttttgtgaccggtcgcatcgtggggatacgagatacttccacttaagagtttcttgggatctctggaagctgagcagaggggctttgaaaattggacgctggggccgggcgcggtggctcacgcctgtaatcccagaagtttgggaggccgaggcgggtggatcatttgaggtcaggagttcaagaccagcctggccaccatggtgaaaccctgtctctactaaaaatacaaaaattagccgggcgtggtggcacgcacgtgtaatcccagctactcggaaggctgagacaggagaatcacttgaacctaggaggcggaggttacagtgagcctagatggtgccactgcactccagtctggaggacagagtgagaccctgtcaaaaaaaaaaaaaaaaggga

SEQ ID NO: 52121 - DNA, 2034 bp, Homo sapiens
agctgcctgtggtcaccctgaacttgttgtgcctttaagagttgggcatgctggccaggcgcggtggctcatgcctgtaatcccagcacttcgggaggccgaggcgggtggatcacgaggttcaagaccagccaggccaagatggtgaaaccctatctctactaaaaaatacaaaaaattagccgggcgtggtggtgggcgcctgtaatcccagctgctcgggaggctggggcagagaattgcttgaacccgggagacggaggttgcagtgagccgagatcgcgccactgcactccagcctgggcgacagcgcgagactccatctcggaaaaaaaaaaaaaaaaaaagagtggcatgtcacctattgtgtgtggcctgcacgtaatgcactaattcttaatccctcgctgatcccagtgtaaagtggagacaccagtacatactcagcctcacaggactgactggtcaggccactcatccccaggcacgcggccaccggtcactgacaactacagaccgactctgccacccagatcaggtgcccagatgctcagtcgctcacacaggtaactactcgctccctacctccgttcccgggactgcggcgccccaaacccggcggtgtctcagctttcccggtccccggcggacggtggccgaggggcggcgcgggtttccagccggtggggttaggccgctgcacgccggaagtggcagctgaacaggggcactgaggtgtcggccggcggggcagtggcccggagcggggggcgggggcgttgatcatgtttccctttgggccccatagccctggaggggacggatcggccggagccggggctgaggagccgacgccccacgaggggcaggcagcagccaccgggccgccctcgccactacatcccggggctgatgcgacccatccccctccacccgcccgaagccctcgccgccccggcgccccatcgctgtccccggccccgcgctccggagagctagggctgcctggagctccggagtcctcaactgcctccgccccgggagagccgtcacctccctcccctccgtgccggcggcccgggccagactgcagggccaagagccggggccgacacggcctcggcgcgggcctgggcggccctggcgctaggctgttcgggtggctgaaagagcgcagcctgggccgcgggctgttcgtggacccggcgcgggacaattttcgcaccatgactagcctctacggttccatccaccccgcggactcggtgtacctcagcacccgcacccacggcgccgtcttcaacctcgagtactcgcccgacgggtaagcgcggcccctcggagggcgggcgcccgcctccgcccggctctgctgccagcggacggccgtcctgggctcgctccccgcgcccgggccgaggttagcgaggccgtttggggccgctggccttcgtgcctcctggcactttctgaagcgcattctcgcccttggaatccccagcccagctttttgaggcaggcaggcggggccccacttgctcgccttcaggacttgggctctgtgaaggagaaatgcccgaagctacacagcggacctgtcagagccagcccacaactagggctttctggtacacagtaggtgctcagtaaatacattttgaataaatgcccgctttctccccatcatcctaggctcgcgttttcctacctaaacctgtgtcggggtaggaaagctgtagattccttgcactctgtacctgaacttgccatgatggggcaagtgcgttcctttgctcaaggaagatacagtactaagacactgtagagacgtggctctcatgatttgggtcatttgtgaagtccccaggctagactacagcctttttcttggctgattaaatatttattgtatggctttgctttaaagggaactttccaaaatcgtatctatttaaaactttgtcttgtcagtacacaagtccgccatcaaaagaaaaaatgtgcacagttccaccatgaggtgacatagttaat

SEQ ID NO: 52122 - DNA, 2496 bp, Homo sapiens
aaaatttatttaccataactttacgcttgtttgctacgtaaaactatctcatcataagggagcagttaatgaacttgattttcaagcaactacaagtgtcaagcttctgtgactaagaaaacagtgtaaagtctaaaaccttattataatttacagcctacatggatcagcatgatacagatatgatcctagcacaaaggtctctgcaaaaactggggagagggtgactccaattctcaaaggatgtgaatttccactagtcagcaggtctgagtcagcattcagaacaagatcagcctgggtctagtcctagttacgacactagcttgccaatataaagacaaagcaatatctgattttaaaatccactgatctgagtttgctttcatttaccaaacgagagatcagatgagtcaactcctagcttgttttcccctgagatgcgctaagggtgattccagttccaaagcggtaacctgtgctctaaaccactatgggacctcaagagtcctagcaccttttgatcctatggaatcctttcaaagcacgggcagaggcggctcaaaatggcaaggtcactatacatttcaagggcttctgtttcagagattacaagtagagaaaaacagaaggtgggaattaagatcagctaggtagagctgtgagatgcaaaacaaaggttttgcaggaagttgaggtgctgacatactccatctagctaaactgaacaccaaataatggatggagactaacaccaccaacaccatcgtccccgaaaatccttgtacaagtgagcttcctacaacgcgatgcaatatgctgtcgcagaacaagcactgccaggctatgtagctgaacttaccgttctccaggcgtccatttccccaacctgtgaaaggcggggagggggttggacaagatcactaagtcctcttccgtttctgacacttcacagtcaggggtcccgaggtgaggccgaaatcccagtctcccgggacgcagaggcccttgcgcggtgccatccccgctgtcccccgggcgcaggcagctcccggctcctccccgcccctgcggttcctgtgcaccagggaggtgcctccccagcccagggcgcgcccgaatgaagggacagcgccttcgcgggaaaggtcgcccagcagccggacaaacacccgcggcaggcgggggagcccggagccgaggaggctcagaactgattccgcccgcgccgcctgggtggggcccgcagggaccgggccagggcagccggagcgcgcagaagacagggatgggcccccagggcggcagcctgccccagcgggcccttcagcgcgtttcccctccctccaacctcatgcgaagaaagcccggtgcttccccacgctcgtcccacactcacccatcagcgccggcgtcccgcaggacggctagcgagccggggcccgcgcaggcgcagactgtgaccgaccccgaggttggggcgcagcgcgacgcgctgggcgctgttggggtcacgtgagggagacaccgccccgccccgcctcccctccctcggcccgcggcccgccagatgtcgccagcctacttctcctggccgcaggccgccgcggcggggcaggtagagggccacgccagcacacctgtcaggatgcgggctccgctagccaccatgcttcacccttgatgccgtacggtggcctcagcgtgccagaaacagccaacgcgttctctagcgcgctgcctgcagggggcgtctgggcattgtcggttttaggggccttgtcggttctgcggggcgagcgccttcgcggaaaactccaaagtaccctctgtggagccttgttgagtatcttcaaaccttcagagggaccttttatcagcgacccatgccgcagtttacagaagaacgctttgtgcgtgctttgggacgtatggatcacttttaaactttttcctttgaagctcagacagcttgcggggggcttgggaggagcgctgcccggggagttagaaggcttgggtcaaagtcatagccctcatacttcttgagagtgaccttgggtgagtcgctggaccctgagccccaaatctccgtctgaaaagtaacccatgccttgtatgcgtcctcgggctgttgcaggagtctttggaaatgatggttctgactctgagttggaaactggaacgcacacaacagatgggaggcgttgaaggaaacagaaaggtcggcctgaggggagaggcgtttcaggaggcttgcggatgtgtgaagtgtgcgcactgtgcttggggcgagcccaagcagtaaccccacccgagtgaagcgttcttggggggatcggctccgggtgggcgacgttccccgcgtgcccccttcccccgagagcactttgtagacactgactccaaaagcgggtctggtctctgcccagccccactttggctggcgtgcttaggtgcctctcgggaagctggagaccaccctcccccattcca

SEQ ID NO: 52123 - DNA, 1867 bp, Homo sapiens
gctgcagtgagctgtgatcataccactgcactccagcctgggagacagagttagaccctaactcaaaaaaacccaacatatatatatatatatatgatatatatacacacacacacacatatgatatatacacacacatatatgatagatatatacacacatgatatatacacacatatgatatatatacacacatgatgtatacacacatacgatatatacacaaatatgatatatatgatatatatatataatcagttccaagacagactaaattagaatccccaggagagaggccagttggcctgtgtatatttaacgctagccctggctgattcttctcaggcaattttgggaaattatagctttaaattgacatcctgacccattatagtgacctgtggtttgaaacacagggtcctacagggctcaggaatgtgtaagtgaatgagcctgtagctcagaggggaaacagtcctaaggaaaattatcagcattgcttgagagccgcacataccaagtgctctgagtgttgataggagagggaagttgtaccagctgcaatcagggaaggctacttgggaaaggtgatctgtaaaggaaagctaggattcaaataaggtgggttccagaaaaaacatgggatgagaaaaagcgtataagaaggaagacaccaggtggctttttccctatcatcatttcggtaccccggctttttctcccagcacaccagcaggcaaagtttatgccccctgataagtcccagagctcagaaagattggtgacctctgggtaaggtcagggacaccttacttgttgtctgagtgacacatacttgtgaaatacaaatacatttttacctaccaagggccaagtcaatgaaacaagaagcagttgcacaatactgtgtgggtttcccaagcagccacacgatatgtcatttcctcagattttcacatactttgtgtcctcaaagaagtcccatgacctatctgagctatgtacccagtaagaggtgaggctgggactctgccactcctattgttttgggggatggagctagccacaaatgcgcagtgtgatagttgatgctttcctttttcctggcacttgttcaaaggcccagatggatggtgagctgcagggcggtgggcagcctggccttgaccccaggggagtatctcctgagctccctcatcataagacacccatggggaacttgtgaaaaatatcggcttccagggctgacccaagacctcctgaataaaaatctccaagcagaggtcctaggaatttgtatttttataagaaccatgtgtaaaccttaggtgaggctagttgggaaacactgaactcaatgtagcatgctgcaaggtcagaatacttgggtttgcatccttgatccaccacttcctagtgatgtcactggatagccccacaccagcctcaatatctccatctacaggatgagggtccttcctggtgaccatgttccaagaccctgagggaggttccccatgatggcagatccagtgcgatggaagctcatcctccttccggtatagagggggcagtggtgctcagggacacaaaatgccacccttctctcttgtccttggggcagaagggaccatgcaatttctctctagatcccattcacctctgggctatgacctccccctgggcctccaccactgaatccaacttctgcttttcctagcatcgcttcacctttctgaacctcagtttttcttttctgatatattttgtttacttcttttgtttattttttatttttattttattttttgagacggagtctcgctctgttgcccaggctggagtacagtggcgaaatccctgccca

SEQ ID NO: 52124 - DNA, 1325 bp, Homo sapiens
ccttctgattcggcctgacctcccttcccagtgggcatgaatgggcttgactttagagtacactgcagtgggaaaagcttggatcgggagtcagagggagcctcccagctcttgctgaagttgtttcctttgcctaggatgcccgtactccctgcgtgttgaggcctggctcagatgccacttctactgtctcttctgctggagcacccatcattcatcactccgcactgcctgccgtttatctgtttacatgccttcctcttccttctctgggcctgcagaagttctccttctgtaactgacagggtgacttggaggtggcatttctgctccctgggactggctgcaatactaaagaaaaccacacgagggcactagagccacactggtggcttcctgccatcctggtcagatcacagcttaggaaactgtcccccaagccagagatgacaccagtcactacaggcctgggatgctcccacttgggggagccaatgaggaaagaaatggctcatcaactctgagaagaatcccccagccctaccctagtcttcccagagctgcactggccaaggcgacccttggagctggtcgccctcaagcaccccaaggcatgtggagagggacttgctgtgtggccttgagcatgcctctgtccctgtctgggcctccatttctggcccgccttgctggctctctgtgcagggatgaaggcatctggcgacccaccgcttcctgtggactctgatgaggaaggggtttcttgtgctcagtctcctgctcctggtcaccagcttgccctgtctgtttcatgctcaatgtgtgttaaattgaactgaaagagaaatacccgccaccaccgccacccaccaccacgcagaacacattctagaggtgacctttcctccctcccttcaggaaattcccggtggcagagcactggcattgcctgtggccccttggtcctgaccaagctcaggaatgttttctgtcaccaggaccctgtgccagggctttgccctccccgagcacaggcgttccccgggtgtgtgtgtgtgcacgtgcatgtgtatgctggggcatgggggtgttggtgtcaatgctctgagggagcctgacagttggaggtgtggattctgggacactgggatgtatcggggaggtgggggagaggggaagaggtgaaccaaagccctggagtcctggagagtcggggaggaagggggccagctggggagacagacagccacattcttgaaaaggagaagggagggaggagtggcaactaagttcctgcggaggcgggggcgggggttgggggggtc

SEQ ID NO: 52125 - DNA, 1298 bp, Homo sapiens
ggtgccagggacactcagcagggaggagggtatgaccctgggcacatcattcccctctgcgtgcatgcactgagtggccttacgtttttggggtgctggaccagcaggctttgtgattctcacagatctatacctgggggacagagtggaggaggtgtcaggcagagggtcacagccgctggcgggaactgagtctgccagtgtgcaggtatgaagctgcaggggaacaagccagtttcattttcaaggttaggagagtaactcacatgggtgaaggcaacatttcatatgaatttgttctacggcatctggcaagggaagtggacagtgatagcagcaatggctctgacagagtccgaagcagaagctaagctcctctgttcccaggttaggggcttagaatggccaccaagtactaaaagccacacaatgtcctctgtaccttggctgccgacagatagcgaggtggggcagctgccaggctgaagagagtctagacgtccccgggaagtccctcctgcctgtctgagcctgctgtttatcacccccaacacactcctatctcgcctgtgtaagcacccacgagtttaccaccctgagccaggctgtgccgatggggcagactggtcatgaagctcagagaccaaggcagagctgggaccagcacttgggctccatgaacctctagtctgtggcctgaccattctcaggcagagggagaaaggcgcgttcacatgctgaccctcctgggctcaagcactgcaccccgtgggttccctggccctcaggctatccttgtgccttgctgggctctgtcccttctcctgctgcatccacagggaggctgactagatgaccctggggggtacttccagccctagatcctggattccacatgtgcaaaacataatctgctgcctacccgctgagggcttcctgcaggaaggggtctgcaagcagcctcacaccttccctccaccgctgccctcatccccagtcctgctttcactggggcattggccaggattgccttcagggacaatccttcctgtaggccaggctctatgtcctgaagcaccgaggtgcagaaaggggaggtgtctggcccaaagtcacacagtgattatcagcagcagatgcccagagtcagtgctcctgacctcagcactccccagacctgagagagggcctcatgtaaccctcagtgttccatgtgaagccaggcagagggggcggatgagaggcgtcagactctgagcaaacatcccctccacgctgatcttccgcctccacagcgc

SEQ ID NO: 52126 - DNA, 4155 bp, Homo sapiens
aaatcaactttaaagtcaaggactggagagtaaatgtgagtgtccttgtccagtgggaatgtggccaagtggtggacagtccaggcagtggccaccaagctggacatccggaggggagactttccaggggagaaggcaggaagagcatgcagaccacagacccctttctttctaaaggtacagagaaatatgtaaagaggaatgtgaagttggggtatgcatgggttgccacaattaaaacaccacaagtaaaacatttcctgagacatgaaggtccatgttatgctttagaaaggctacatggctgtaatcaggagaaacaaagacagcattgacttcggaagtaagagttaacaggtttgggaaggctgtcctctgggagatttcactgtgtaacacaccctcagtgagctgacaaaaacattttactaggaaaacaagtcccagccatttgaagctgagccgtcctcagggaaaggcctagaagtggtctctggggaagtgctgcctgccatccaccctccctgagctcaggagcaagctctgctctgagatgggggcatggcctctggattcttgttaaggggaatcccaggtggttaacaggataagctaccagtcccttccccaactgctccacacagagtcaagggcaggggacaaggggctgaggaacaaaggagagaaggagcagagggtgctggatctgggggccgggccggcactggccagcctgtcagcaggaggctggagactaggagtcaggctgggctgggcggtcctgtggggggctacagccaactgttgggcccacgtaggccttgcttcacctggaaagagaatccaggcaggaggtcatctcagggatgggctggacctcgtggggttggccagtcaggtcagaaccagggggattagggagactcaactatcgtccttcaccccagccaatacccatgagctcatccagtatttactcaccactcactatatccttgatctcacggggctgatgaagggagaggaagagtcaacagagagatacaggaaacaattccagatagtgacaagggttatgcaggcatcctggggttatgataaggcagtgactggggctgtatgagatgcccgcttagaaatgaatgggcaggggaggcccctgaggagatgacatgtggcctgagaacatgagaaggagccaatcgtgaagagccaaagaaaacatctctgcaaaacaggcagcaagtgcaaaggtcctgaggtaggaatgcgcttgcagtgctcacagagcagaaaggcggcaagaatgacccaggcactgtgagcagcgggcaggaggtaggcccagttcttgtgcccaggaggagaagtttgatttcatccacagcaataagagttttaagagatgttacttgccctgggaaatcttacagacagtcagtcaggttggcgtgaggaggggccagaggagacaagtcaggatgctagtgaagtagttcacacggcaggtggccgcagagatggaggaataatggattctggtggtacttaggagggagcactggcagaatttggtaaagcaacagatgctggtgtccggcaaaaaaaggaatcaagatgatgacgggtttgtggcttgaaccataactagttagatgtgacaccgtttatggaggtgcggaagctgggggaggggcaagtttcgaggagaagatcaggagcccagttttgaacacattaagtttgagatgcccacttgtcagccaaatggagatgccaggaagcaactggacgtaggagtcaggagctctgggagaggtgtgggctgatgctacatgtctgtgagtcaccactaggatcctgggagagacaacccagggagagcacgtagttggagactgagccctggaaagtcagaccttcaggtcaagcagaggcaaggagccagcagaggagatggaagagtggccagggaggcaggaggagcaccaggcccagaggcccagaaggagagtggtcaactgtggtgactgccacggaggacagagggggtcgtctggggaccggggcagaaaaaggaggctggctgtggtgggtgagagagaaggggaggtgacagagaggggagaagtgctggcagctctttggagactgttcattcacgcaacagctatttattcagcacctgttacctgctgggcactgttctaggcacaggggatgcagtggtgacctagacaagttcctgccctcatggagtttctgttctcagcaggggcagttgagaggaatgttgagtcaaggttttttttttttacttatgttggcaaagtttgttactgggacacgttcatatactgatggtaatgatggaggaaggaagaggggtgcaggtggggctgcctccaggaggcagtggggacagaccctgagcactggagcacctttctgctgtcccaggagggaaggcaggtggtaggagcacctaggcagatgtgtgcctgcccatccatggccaccccgtgtgacctggggcacaccccagtgcctcggtctcccctcctacctccctctgtgctagggtggaggagaggttcagactggaaggcgcctcctgaactctagaacagcatcagttcaggtgggggactaggtgatcctctttactggggtcatcaggctctaaccgaaatgggattttaccttaagcaaacccctcgggtgatgagtcaggacttctgactcatcttggggagttaatcgtggggagatgagacgatgggggaggaaaagccagtcatgcctctggacttggctgggggccccatcaagtgggaatgggaaaggaaagagagcccaaccctcccaccttgagatgaaggctgagtctgggggtgggagtgggcaggctgggcccagactgacccaggcagacctggccactgctggtcaggacgcacgccgaacatctgtgagtcacagtttgttgattaaaagtgcacagtttgatcagaaataagcaaaacctgtcagacgatctgcatggctgtgagaaatgattcacagcaccggctgggagcactcacaaaggtggcagaagcctccagaggtgacagcacttgcttaaaagggcagcatatgatgtcattcggaaaaccctgcatcctgctcaccgagtgagaatttcctgtgagggtatgccctgccggccatgccaagaccagaatccccaagacaaatacagtacgtgacacacaccagggaaggctcacgaaccatgtgtggttgtcagtgagtcttgtggcctcatgtgtgcctactccataccaggcaaagggtgggaatgagcaaagagtaagtggaggagaggggaggggagagggtggggtctgggtcatgaggttgggggcactctgagccgtgagtccttgccaaggctctgcaccactctgggccctgatgttctcatctaggcaatgggctgacaaccctttattgcacatttgcttgtttaagcagacaagacacctgaggacaccagcacaagtcctgcacctgctttgtcaagttcctggagaagctcattctagtccagttatgagacacggttagaaactgaaaacatagtttgcagacaattcacagaatgaatggcaggctagggaggtgggactttatcctggaggtaatgtggagccactgaaggtttcagagcagagcaggaccctgcacccagggatgatttggcagagcagggagatgataaccatggccaaggggaggggcaataaagggcccggccctgcacagtgctggggggcagcaagaacggaaagggatgtgggaccttgggggcagcatggatgggacttggccactgactggaggtgggaaatctctgggcaaaggggctgggaaaacccgcatcaagagtggaaaggcctcgcccaactctaacagtatcaagcagacatggagcaagaacacgactgtagctagaaaataaatctaatttacacatagttttacacttaggggaaaggatttagtttatatttagtttttccaaggacttatttgctgcatgatgaaatgagaaactaggatgtaaaaaggaggagtgcaccctgtagactcttttgcagttcctcctgc

SEQ ID NO: 52127 - DNA, 1063 bp, Homo sapiens
tcatctgaccctcaccaacacacagcaaaacaagtattagaattcccaaacaagtatgagaattaccattttatagatgacacaaccgaggcccagagaggtgaggccccttcttccctctagttcaagagtgagttttgctcacccacctaccccacctgcccagtgagtgtaggttcctttcaggtacctgtaggacaagtggcttagcaaatgtttgatttgtatttccaggatcaccaacaagaggcctctgtgttcgcctggaagacacacacaggcctcagggcattgtgctgccactcatgatgggaggtgcctgagaacagaggtcctcattgtgaggggaggcggccagcgactcaccacaaagcaggcaagcgggaaggctgtgaagcaggtgccaggacgctgcctgggttccaggaacgccgtacacacatgtccaaacctgggatggggacggcgggcctggcagaaggggcatgcctttcttctcttatttgtgacatccccagaggaaaaatgaatgctattactgggagcaaagaccccaccctaagatctgatgcttgactacaggaaatctaaagataaagcccgatgaagatgatgaaataacccgaacgcagaggcctctacggctgccaaagcaagccatatttattgtcataactcattatgcagatgggaaatggagggctggaaaaaggactgactcacccagagtcaacagttagacgtgaacttggacttgagtccaggtctcctgagtcctggaggcccctaacaagttcagcataaaccctgtgtgagtgcaatacagtctcaaaaacaaccatagtaaccacagtgatacatctatgagcactcactgtgcccccaactctcagtgcatagtaccgcccccactgtacagatgaagaaacagagacaacttggcccaggtcatcccgccaacaagtgacagcacaggactttaaatccagatacccctggccccagcacctgagctccttcctgagttccgggccaggcccatctgtaaaacatacctgggacc

SEQ ID NO: 52128 - DNA, 3872 bp, Homo sapiens
ggaggaatatttctatcaatgtaattagcagatgaaacaaagctattaaacattggtgtttttttcctctcctttttttaagattactaaatgaatttattcatacgtcaaatagaaaaaccaactggaaaaacctgtccctcagtaatacattagccaaaggaaacaagtgatccccgttctctcactgaaacccccctttcctgggcagacctgctgttcacaggtgttaaacattaattacaactgttactcattacatagcaaaaagcatttggtaccaacacaattgttaatttcctcacaggctcaaggcattctgggaagctatacaggggacaggaagcatcatgggagcctaaggggagccagtttggaagagacagcattctcctggctaggacaggtggtggtggtggccgggtttaaggttctccaagggaccctctgcagatgccggggccctgtttattctgagcacgtgaagatgagtcacatagcttggtgggaatagcaagtgtggagcagtgccctacacacacaatggtggtgttaaaccagcttcagagcgactgtgtttgagggggacggtgacaagtcacgagggcaacatggtatgggtgcaactgcttctgccttgtaccggtgtgcaagggaattccagcctgaccccagccacacacaggatatcaaggcagcagtggagagaacaagtgctgtgcagtcagactggcccaagttcacagctgtgtgactgtgggcaagctgctcaccctctctgagcttcactactgtcatctgagtgacgacaatgaagtgaaccctaccttgcaaggctctgtagggttaacctatgccaggtttataattattgctcaataaatgttaatttcctgtccctggttcctccccatccttccttaccttaatgggattattttaaattagctagttgagctggctctgagatgattcatagttgtttaggaaatagacatacctggggccttactttcccttttagcctcatttgatgaggctttgaaggtgtcaaaactcaagagggaggctggctaaggggtgataccatagcataagcaccccacacgctgacagtgtctagtgcgtatctagctatttccgaataaaccaatgtactccagtacagggtgtagtagaagcacagaggggaaggaaccggttgtgtcagggaaagcttcctggaggaggtgacttcccctccctaactctatcccaaccccacacctaatacaaagcatgtactctgtaccctctatgttctcaaagtggggtcgccagatggcagcatcagcatcacctgggaacctgttggaaatgcaaactcccatgcctcaccccggatctaccgaatcaggaaccctgggggtggaaccccagcaatctgtataacacttcctccaggtgattctgatgccttcaagtttaagacttactgctccaggcaaaaaagaaatccacagacatgtcagacctagaatagggaaggcgcggatcggaggaaggccctggggaccctctcccacccaggggaccagtggcccaatcctcgggagggactgagtaaagaatggaagaaccaggggactcgttagaactgttgctggaattgggatatggggtttcctgaagaagtggtgctttccacaccatccgtgcttcccattgccaggcataactgggaatgagctttggaaacaggtcctctgtggccactaagtacttctttatgcaacatggtttttatgttaaattgaattttatgtaatacagcaagccccctctgaacaccaaaaccaattctgaaaaccaaaacaccaaatgatcctttagggcttaccatgtcttttcattcagatcttttgtttttatttaatcaacacagagatccagtgtgagaagttgtgaccatccccattttacagataagtaaactaaggctcagggagactgaacagtctgtctcaggtcccgaagtggtgaagggtggagccggcatgtgaacttgggactgtctgactcatcccattgccccatgggtcccaacatgcaagacactgtcctaaacttctagggcagagaaatctgccaaggagctagtggggaagacagataagtacccaaaataagtatgctgagcagtatttgagtcatgtgtcttttatctttgctatgaggcagacctggctgagccaaggacactgcctgaagagtaactttcacggagacaaagcttcagatggtgaatcgaaatgagatgacttagtttctcaagaaggtctggggggtgcccttcacacaccctcctgtcatctggctcctctatcaagctcaagagctgcagttacttacttctcagatacaagtgcaaattattaaagacatagccgtttactcactgggttaaaaggaaatgctggtcattcctctatgtatggcctgactggctctgccatgaggtctccagctgttcccttctccactctgagccttagtttccccagaaggacagggagtgggactctatggtatgtgggactctatggtatacgggcccctctctgtgctgagtggtggtaggagaagaccaacccatgggatggcgctggtccccctccaatgaaagcacgaacctccagaacccagtcccccacagaaaccctgactggatccatttcaggtgggaagccaccacccagttacatatcctggtgtagatgtcgcagaaattagtgcaagtgagatgaagaaattagtgcaagtgagatgaagggcatgcgatacctcttgagggctgtggggggatgagagctccaatcatatttcctgcagcatcttggatagcaccagagaggccagacatttgactgggttagggcaggggctctggagttggagctgacaggttcaaagtccggctctgctgctgaccagccatgggctgggcccccagccaagttatttcttctcatgggaccttagcttccttatctgtaaaaggaggaaactaacctcccagagggtgattatgaggattgaatgagagaatgcacacagaaagtgctcagtaaatgctagcaacaatgccagtactttcctgatgtgatacccatcaaatctcaccaagacccttctgaagtgggaactactggtcttacttcccaggtggagaaactgagactcccaggacatgttcatgcccagtcctcacactggtccttcagaggtgtgaagacaccgatttggtgtctttgccacctccaccgaggtctgcttctacaggctatccaccccggctccttggtccctgcctgtgggcccctccctacgtggccactttctgctcaggttccatttgtccatcttgcaatctgtgccacacagcctggcaaccaggtagacctgccacaccaacctgcaccacccccagacaccatgacatcatccaaggctccttgtccccttcccaacattgggcagggggtgccacataggcctcgtgtgggcccaagctgcacctggcgggggtgggttggggacagagcaagaaggccatttctagacccaactgctggccttgctggttgctgtaaagactcctggggtgattcaaagtgggccaggaacagagtctagcctgctctggaaggctggtgtctctgccgggtgggaagggggctgacagcttgatggaagccacatcacttccctgtggaggcagagctgcagtccactccctgcagccagcagcccgtggtggaacctgactgggcattgtcctggggattgggatccgacaagtgggagtgggggtctggtgaggccacagtcag

SEQ ID NO: 52129 - DNA, 2894 bp, Homo sapiens
tggtcagaacgcccacccaactcccaccctgacgccaaggcagcctccctgcccacctagcaagtggctaaactcagactttccagatctggcattctttggaggaggataggaggtccctgggctcctgaggggcacccaggactctgtggaccagcccaggtcccaggagtgaattaatgcactcattcattcaaccagtgtttactgacaacctactttgtaccaggtacttcaggttctaacagggaacaaaacctatatctctgcccttgtgaaggccacatctcagcagtgagacagacaacaaacaagggaaatgtaaaaaaagtatgtaatatgctaaataatgacaagtgttaaggaacaacatcagagaggtgggggaggggtggaaatgtaagataagtggccagaaggcctccctgaggaggtcattttgagtcaggacctcaagcttggctttgctgggatgctgccctctttgtgcagcacactttggtcccagaggctgtaccactccttcttctgtgttctccaagaccagatttctctctccagtgtaatttttcttagtttgttttatactacagacatcaagtgttctctgggcccctgtccaccttccccatgtgacaggagcacctggagggcaaggaccctcagcccacagcgggggtgctatcaatgactgtctgctctccttggcctattccaggcctgctgcaactttcctgaaaacctgaacgtgctcagtgtcaggggtcaaagacaagaggggagccggggtgagagaataggaagtggctcctagagtgggcccgctggtcgccatggaaacccaggcttcccacttctctccccgcccacagctctgcgggtgagcaccactgggctgggtgtgtgagccctgctgtttcttaagaataggaaagtcatcaggtgactaatatgaaatctatttacacttgatgatctccttcctgtccggtaggtaagtcattctggcaaatgacagaccagccagggaactctgcacagtctacgaccaagcctgctacctgccaggcaggaggattgacaacagatttcacaacatttcaaaataaggcccaggagctccaggatggaagtcaggagacttgccctgtggcttgctgctgtgtaaacttggctagtgcacaaccctctctgggcctcgggcaggaagcctatatggggccagaagcactgctcctcaaggacagttccatcctgccatgatccagctgggggagagctgtgaccaccaggacaggctgaagcctgtggtgtcttggtggggagggcaggccagggaggagcttgaggcctggagagggtgagaggcagcaggacagaaggaagtgagggggctcagggtacaggctttggggagcagagctgtgcagggaggcaagtgtgtggacatcctgggagcagagtccacggcactacagagctggggctgggaatggcctggactcaggacccagacagaaggccctttgctttcccagctcaggggaacagtgctgcctggaaccaggggtcagggctgacggcaaatatgagaggaaggctgaagtctcaggcagggtggccagaggcagcttctctgacacccaagcaagactcacaggctcctttttctgagaagcatttgccggtctccgggagagttcattccagaatgagagaacaggagccctaggaagggcctctagagctggctgtccagaatggtgtcctgtctgtcctgagagcagagacagcagcatgcatgcttttgggaggggctgaggctgatgccacatggaggtggctgggggtggggcaggaccctcaggactgttagaaccaggcctgacaagggcagctggagaagcccagtgtgaccgcagaggcgggtaaccaaaggatttatgaagtcactccagacccatgacctctaagaatcctcttgacacccagtgaaggaggcagaatctgattttagagatgagggaactgaagcccagagaagagaagcaacctgcccaagggcagagccaggggcagagccaaggctagaacctgtacttcctgcctcctttctcctgaaacacagaggccacaattggaacatcgtctttaacatgataaaccccatgattctcccagagagcatgttgccactagaagaggccacaccagaggatgagaaaatacaaaaaaaatcccctcttgcctttaaaatcagtgactggcttcatctggacggtgcctactagcacacagttaaaaagggcagaaggccagttgtaagcaaggaaaacagccacgtcaaagcaggggggctctgtgtgaaatgactttaatttcctcttattaggctataaagttgatttaataataaaaacatgctaaggactttttaatgtgtaattgcttacatattaaaaattatgtgaaaatgctttcaattaatgcttaaagattcatcctgtgagatgacactttgaacagttttataaaggatgccagaggaagggttagtaacatctaaaaaggcggcctaagtaactaaattttccaattattcctcagactctggggaacacaggacagatgagagagtgttttagttgtaagcgagggctccagaaggtgcatcttggttctgtttctgctgcttatttaatctgaggctcagtattctcctctgtaaaatggggatgatgaacatccctatacctcataggcgaggattaagtgagctaatctctggaaagtacttggagcagtgcctggcacacagggaagccctttgcaaaagctaatgactgtcatccatgccaccataactccttggttacctctgagaattcctaggg

SEQ ID NO: 52130 - DNA, 4942 bp, Homo sapiens
gaggtatctgtatcccaagtgtccagatacacagggtaccaatttgataggcctccaaagcccaggcagccccaaacttgctcccagccactctcctgcaccctgcagcacaatgtgctgatgtgcccctgcccatggcactgcctgtgtggggtcacaggggcagcctacacagctgctcttcagtgtctggcctgccctcttgaaccaggagaagccacaacaggggtttcccttttgcttgtgacctccccctaatcctgcctacaagatgactgatgtctgctaacccttcacttcttaaagatgctccaagtcttgtattatcctggctaaaataggcccccaggatgctgcatacccagccacattcttcttgactccacacaattgctttgacaaggttttgtcatcaagggccaacaggaaaacagccactgggggaatgtctccatgcttcctgtaaacctgtcatgtagaccagggttatttatgctgcttccagctccaaaacaaagatttctcgggatgcggccagaaataattttgtctctactagtaatctggccagctctcttctactaagcaacgaaagccaggtgacccagcctgcttccctttttgccctgcctactacgaagctctaagtaaagttttatgtctcaaatgctatctttcttcactcagaaatttctgatagaactactttttctccctcctctccccacttacttcttggcccctacctttggttaactgcacgtgatatccttgtatttggactctcatggtgcccggccagtttttttcctaatataggtgaaacataagcaggtaaactgtggggaagacttaatacagcattgctcccacctaccaacttgaaagcacacaccatgcccccagtgaggctggttggggaccacccggcagtgccctcactccctttctacccctacaaccccagctgtgagcccctgcgcttcagctccacttacctgtcatgatcctctgtgcctcatagggctccatgtagccagcactctccccctttcctgctttgctcttgagatcattcttggcatcaaagggatctgagtagtcatcggctatggtcacctgcagggaggaagatggcaggtgtgagtccacctttggcttttttgtttcacatctcttcacagctaggctttgggcctcagctagatgagcaaggagaggcaggggaggcaggaactaaagccggcgcccggactcagggagctccacatctcacaggggtaacgaatgggacccatactggcagggctccactgcgatgaagagccctctgagctcgtgcatgcctggctggctccaggcacagtgaggtgagaacagaagggcatctggtgaaggtaacaatgcacactaagcatggaggcgagaacctggagggcatcctcagggaatgtgagttgctcggtttaatggaatggaagtggaggaaaagttggaaacgagatcacagaaagcctagaaatgctgacatgctcctggtgctggctgaggcacagaagagtttgtctagagataattagctcggcgttccatttccccagacctggaacataaccacgccttgggtcatcagacaacaatttggtgagatcaactacatacaaagatcactgtggccccagacagaccaaataaaaacacaaaagcagctcaaggatcgacagacagccagggccagtaaggacctgaaagcaacaaacccaaagacccctcgacaacacatgggtaaactgaggtccagtgtgagcagaggcttggccagatcttctgcctcccagggccctgcctgagctccccacttgtctgtagtccagaacacagcccctgcctcttctccccagagaaaaattctccaactcacagacaaagagtgagtcacctgggggtggggggcactcccatgagaacctgagtatctgggattctaacacttcagagaccaccgttccacgttttccctggagaagagtaaaaattctcgattgcaggctccaattaaacatggcaagtgttcctccctctttttacttcctaacctttaggagaggcacagaacccaccgaatccacgcccctcctgcttagccccgcttcatcataaacttgtcctgggacttccctcttgccctttttggtcacatttctggcaaagaccaagccctcagctcctcagccagtgccacccggctgcttctcttgggagggggcaggttagcgttcctctcaacccttggggttacatgaattgttatttaaattgtgggtttaattagaaaccacaggagcctgttctctcagctcctggaatgtaaggcatttgaggggcctgcaaactcaggggaagggaaaatccccctttgtctgcctggtaaatggcagcttgtggcagccgtcctggcagggtgagcaagtgaccgccagctgccaggaatgtgatgcccggaaagggacagcaggcggcagctctgtccctggcaagtggctggaggccaacgggaggtttagcacacagcggtcactgctccccaaacaagagaagctcatcagtgaagaccgaagcccagagtgcccagcactggagcatctatggctcccgctgccgctactccaccactttctccgtggctgtggctcaggctctgagtcccagtggggacccagtaggggtggcttccagatgctgacattgtaatggcagcctttcttgagactcactgagctcaaatgacaccaggccagggaaagaaggggtgggagagagctaggccttgcaatgtctttcatttgctatttctactctaccatttgcagaatacattagggagaaaattatacacataaactgctgtcaaacggaacagttcagatgctggtcaggtgcagggttttgtgtctcagagttcaaggggccagacatccaaatggagaaaatgagttgctgctgtggatgacatctaatcttatttctcttgtcccagatttcctcactgtctctcttcaacatgaacatgctccatctattttgcaataaggaagggaaaaaatgtctcccctggaaaacaaaatcatttggggggatttgctggcggggtgggagaggcagttgggttgcagtctccatagtaatctagaaatcgccattccagctctcagaagtgctctgtaatttgcaaacacagaggtttgcaggatataaaccaaatctttgtttgccctgggacaggagttctggaaggactgtgattcagcaagtgctacctatattttctaattaaaatgagatctgagctcaggctgtcatggagctgcggctgcctgctccacttacttccgtttcagtaagaatgtacaaatcctaaaaccaggaaaagcccctggtctctgctgacatatggttccagttatacctgctgacagttgaaaatccttccattgaaaaaaaaaaaaaagtctagaattctgttagtttaagaagcaaattggaaagttcctaaaatgtatatttaatcaatttgcttttgaacttcaaagtgaggttggtggagggaaagaaatttgaggtttgagcaacctgaaactttgcaaacactacactgaactgtctgatcttttgcaaaatgatgtcctagttttgggaataaaaattcaaccaggtgttaggagagttgagcaggcagtcaaccagagtgccctgtgaagtaccatgggccccagccatcaggactgggcagtgtgaccactgtccaagctgcctggggctcaccgccagtccagatggccatgcagaaggtttgtgtgaagcgtgctgcttttttgagctaaaagaaagagaatgagttttctccagatgtgagattggatttctgacgggattgcttttgctttgctttaaaacttcccagttagtggacaactcctgtatatctaattgaacaattcaaccaaaagggagccagccgggactcctctgcaggccaggccacctgggtccacaagaagctttccttttagtctcagattggcagagacctggcagccacagaggcagagctgagcagtagcagaaaaaaaggctgtagagtgcggctgcttagtcagtgagccacgtcatcttttgtttgctcggcctcttgggatgagtgctaaaccccaggcaagcacctttcttgctttcagacaaaactacagaccccaggtcagcccaaagcccctacagggcttccacaggtttgtcctcctggagacctgctctgacctccccttgttttccacagggcccactgcagggcgttgtcagtcacctagcaaaccagcagtggcctggggatggcctctccatgcctcctctctggaacgcacactgctggggcccctgtgtttttatcttagaaacttcactttgtgataggaagtagtctgcagctgttcatcccaaaggaaaggactagaggaaggtgggtgttgccccttggccacacttccctatggactggtcagagttttagttgcttttgtgggacagctgcacttgtgagcagaattgggtcctctccacatgctttcagtggaaatgcacttgggtggagacacttacaagggtaactttgggcagaatccattaaaatccccaaatgcgccaagtttgacccagcaattttacttctcagtatttattcccaaatgtgcataagggtccatgggaaggatgctgcctgaagtaatcatgagaaaccacccgaaactactgcatccatcaatagaggaatcgctaaataaactgtgctagttccatacgatgtaacattatgcagcaggctgaaaaaaaaaatttaaaaaaagcagttgctctgtgtgagctggcacagcactccatgacatagctc

SEQ ID NO: 52131 - DNA, 1186 bp, Homo sapiens
ttcaggcagggtctctgcccacgagaagatgaaaatctggtagggaagacaggacaaagacgtgaaaagaaacccccgccaaggccccggtgattaccagggaaaatgggtacaattatgcatgacaacagctgtcctatttctcaaacacaaaaaggaaaatgtttgtgaatgcccttttttcccccctttcctgctttgggtaagattcatgccctagttggggcacctggcaaagtggtggagaacctctcataactctcgaggcacttccgcctgtgtgctgggagacagaagtgtgacttgcctatggccagcatccagggccctgaggggtccacagcaccaggctgttacaccactcagggatatgggacacccatgcaggtacacacacaagcgccccctactcgcctcttcctgtcctcagctttgactatcatcatagaccaactctccttataggcacgccaataaatcactgctgacatggtaaggaaattaatttagggaagattaattagctacattcatgcactcagctgcaactgctggaaatcagacggtggggaggttggttttccactccatttaggattggtttgctttctaccttctaagatctggcttgcctcaaagttcaaagccccctcttgcatcatgaaggcccctgccaagtactccgcccacatgccttcaggggcagggagctcatgatgtggcaacacagtcctctgggacggccatcaccactaaagtgtcttccctacactgagctgaaatctgtctcccagcagccactatccgtttttctactgacctaaggtgttctgtcctaaatgctcctttacagacctgacagtgacctgccccacatgtcaggaggctgggagtgtggggggttaaagtggtcaccactggtctttccagtcctgcccctcccacggccacagctgcttgcctagacacctgcaggctccgacttgttaggaaaaacacattccaaattccagcctctgtcagctcctctcaagcctgcttgctcagcctctctctctccgtcacacacacacacagcccactgtcttccagcttcaccccctcagagtgagctgtgggtcctgggtaggaggctgctgggaacagagcctggctccaccctctgtttaccccagaacctcaagtg

SEQ ID NO: 52132 - DNA, 1784 bp, Homo sapiens
gggcctgaggcgacacttaccagggacagggaaaatgggcctgagaagggtatcaggaaagctggttactaagccagctctcagaccagccctggtcgcgaagagtaagagcaagattttcttctcctttctccttcggagctgaaggctggaagggtaaggggaaggtactagttaagctcagggtcacaggtgccggatggttccacaaatcatttagccctctgctctcaccctcctcatctgtgaaatgaggatggggcaaggcctacctgagccaacgcacatggtgtattcggaacagggtggtgcacagcaagtgctcagtgtcaggtgtgatcaccatcagctcaacacaccatccagcctgcagagtctgggtcttgcccagggtcacctggacatcagaaatccagactatccccctccccatgttgatgaggagccaccagaggctccaagtaacaaatgacacagcagaacactcctgagcgggtgacagaactagactcccatcaaatcccaaccaggagaggacctatgtcatctgttgaactacatatttacagagtgcctcccaaactggttttagacagcttaattcgaggcatttttctgcttctgataggcacagcctgttggtcccccacccccttcccaaggaaggatcaggaatgcccgtgaggctttctcacggtaacgtaaggctctgtacagtaagaataacttccagtgtgctcacaggaaaagtatgtaaaagcaaaacagcagcgcctgtgagccaaaggcctttcctgtgcaatgtggtacctttcaaagccaggcctctgtgccccagccaaggcccgggagtcaccaagtgcaccctctctctcgtgtgtgcttcctgtgctagaagccaaggttaaaggggagaaagagctcaggcctggaggagcacgagatcgggccagcacagtgccttttaatgatcagctgcagaggcgcgggaacccgcactaagtgaaggatcatttctccccgaacgggacccattaggatgactcatgcacatttcccacaggggagctaaaaggctgggccaggcccctttaaggcacaagcagcactaaacagctgctctccccaagagtcactctctctttattgaggataggcagcatcagccacaattaccagccccatgtttgagggctcccaattacattccgcttaacaccaggtgctccataaatgctgattcactttttaaaataatgctgtatcctccagcaaccaagccttgatgaactctttctcctgtgccgtcatctaggctgggaaaccctgaacctcacaggcctgtttctcacatgtactcggcgctttctaatgtacaggaaacttagggtggctagggctttgcgatgtcaagcaggtctgtgatggtgtttatcgctgttcagtccgatcacctcgtgcctccacgtgccaggcaatgggctctgtgctggggatacagaggagaggaaaggcaggcctcctccccctgctcttgcattgcttccaggtccccaggggagatgggcattattcagttcacctccccaaggcaggctggcatgtgccaggcagggtgagtaaatgcctgggtgaagggcccttcccaccctgccctgaattgcagctatgtgtaggcctgtctgcttccgctccaccaggaaggcaggttctggagctctgtttcctttttattacaatatagcacctggtgcacagcagggtcccagcaaggtgtgctgggc

SEQ ID NO: 52133 - DNA, 1637 bp, Homo sapiens
tttctagggaagcattaccccaggtgagtgtttcagtccttttagtattactttagaaaccaagccttcctatgatgtcaatggtctggtgtgcatgttattgcttaagagcactgacttttccagaccctcttcccaccctgtgtcccttccgctttaaggggacatctgagaccatcacgggagctggtttccatgaaacaccaacacagcacttgacaacggctgtatgaatcgggcccagaatggcccttatttattaatgcacattgtaaaatctccttccaaatgcaaagtcataaatcacctgccactggaaacattctatcctgaaagggaggcaaaggtatcttgaactgaatcccagacttacccatttcaaaagagcaaactttgatccactgctgatgagtaaatcaaggggaggcaggccccttgctgataacttggctatcacaagacacctcaacctaccacccagctttctctcttcacccacttctctgtgaagacctgggaccgggcaggactcatgggggctgagtcccagagcctgggatcctccagtgccagggcccgagaacctcggaccagaccctccaagcgcctgagtgttctagaggactagaacaggcaggaggctaagggacgatgcttacagagggggcaccgcctagagagcaccttctctacaagccaggctcttggctctgtgctttcacgtacatcatcgtatttcatccttcctaatcacctcattttcagatgagaaaaccgaagctcagaaatgtctaggaaccctgccaaggcctcagagcacagaaggctacgcaggtttcaacccaggccagcgtcaccccaaagctctggctctcctgggctacctacagcctgttgtatgagtttctaagtccaggctccttctgggcaacaggaagagatctctgaagggaagtttgacaggaagaagcagcagctttgccagcttggctcagttgcgccaaccgtgagcaaaggccacctgacaactcccttaagtcagctgagtgctggaagtctcccttccccttcctcagctgccctgtgactccggcacacctgcaacctgccctgcccgggccacacctggggaagcagtgcttccgcctgcagcctttgaagcctggcttccagctctcctctccctccaccctgtaccagccgtatccctcctgcctgggggatcctacttccccacataccaaagccagtgcagcgtggcacagtccttgtcttcaagttacacagaatgagcaccagcgttgttttgaagttgtccccatggagaggccccggaccccaacaccaaacctctgcacatggaagcatacccgtgccaggcagaggagggaatgacagccagaaggaaaacctgcttctctagaaagagtgagccctggtactgggcccagtatgcactaagtactaagtgctaaaatatgctggctgttgttattttcaaacatgactgtaaagaaaacctgatttttctcatcagaaccagcaagaaaatggaattttatggtagaagtggttccattttcatctggttagggtgagaccagctgaattagaaaaccaagcatccacaatgcagt

SEQ ID NO: 52134 - DNA, 2598 bp, Homo sapiens
gtgttctgtgggatcagagaacagaatgagaaccaaccagtagaagttctcaaaaagatttcaactcaatttcaggaagaatgatcagacagagctattcaaagtataacagagtatttggggaggtagtgagctccctgtcacaggggacctccaagcagaagcgggttgagcacttggcaaggaggacctagactgagatcctttgccactagaaactctatagtcctcctgagatttttatggtaccctgaagcataggactggggataggggagccagtgttgaaggggttgctccaaccttataaaactgcatccctccctctcactttcacaggctgctcagtgagagaggttctccacctctttccccagtggcatgtgaaaggttgggtgccatgggagaagcacagaatcacatcctgaagttcagcaatgcccacggtggggtaggtcttggggacagaaggacaaagctcagtcagtgtctaccttccatgagtggataatctagggagaggtcagcaaccctctcctgtaaattaccatatagaaaatattttaggttcctgagggtcatacagtactcctggtttagtccagtgattctcaacatagctgcacatcagaaaaactcctggggagcttttacaatgcaccatgcctaagtttggcccccagaaattctgatttaagtggcccaaggtggggcctgggattagtatttctaaaagctcccctaggagcttggatacaatccatccaagactgagaatcactctctggtctccagcagaaacaggcgcgtgcaaaacctcagcattatccccagtgatttcccaaacccagcgaggggaagtgactcgctcaaggtcatacagtgagtcaagaggcaaagaatctgagcccaagatcttctccctgcagcacccaggcacagacaggcccaaactcctgttccagagcttgggataccaggccttcttgctcaagccctgctgccccataaggtgaagaccccagagaaacaccagccacattcgccccgacccactctaacgcatggggcactgccctctctccagaccaaacctcaacgaggtagaactaacaggggaatgaatttctaaaacagccacattttaaccaaaattgctaacagtttattagcatctgggaggaacaaaagttagggctgtaaaaactgtatttcttcagtcctaacaagcgcagccacagcaaactctttaccaatgacaccactaaagacttgccaaaacgtgccgcctgcctagagctctgcccacgcaggacttgggcacaaggaacccccagagcccttgggaatgttgcaagagcttggctgaggctgggtggccactggcggcgatgatctcaacgtctacagagcaaatgagctccgaaagacagggcagacccaggcatcccccgcctagcaggagctctgctagtggagataactggagagtctctgagccccagactctctggggttctctccattgagccacaggacagtgagggacttgagagagcaaggatgggagaagctgaataataatacaagaaatactgagagcagctaccagggactatgctcagttcttttaatacaacatccctatggatttgattctcatattgtccccattttacagatgaaaaaaaccaaggcatggggtggctggataacatgtccaaggtcaccaaagcagttaagttgcagagccctgactcaaactcgggtgctgtctcttaatcttatgctcaacagacttagaagtgactctactatgaaactcctccctgcagagacagcaaaatagacccagagagagcaagggactggtgcaggaccccgcagcacgggagctggggtaaaagcagttctgtgtactgccctgtagacagcctggctttgggccctactaggctgacacaactccctcttttcccggagaagaatcctgcgatctccttatgacacaacagtgggctcaaacaagagaactggagaaagagatggcacacagggctcttgtctgtagtctgtgtaaagtaccaattgctggagtactccgtgtcatttggaaacttcctatcttacctccatataggcccatggtcaacagggctgtgagcttgtttccgacacctgcccccaccactgcccgctccagtcacacgcagagtcaccagcccccaacttccccagggggtcttcactcatactgtgcccttctctcttctctgatcactgcatgttcaaattctatctaacctccaatgctcggcacatgagaacatgagctctagagtgaaatgtgggttgaaatccacactgtgtcaccttgagaagtttgctcaacctctctgggcctcagtttcttcactataaagtggggatagtaacagaacccacctcagtgcttggcaacaggaggggctcaactgtgtgtcattatcatcgattcagcccccatgtaccattctgagaaccccacctccgctagaagtgagcctctctcctctgagccctgaagttctgtctgctcctccattcagcctccctggg

SEQ ID NO: 52135 - DNA, 3815 bp, Homo sapiens
aaaagacgtatgttttttgacatgagaacgtgggcaacttctgtgcaatgtaaagattgattaaagatcttctagcgtgtctaggccagagacagcttgaaagaaaccaagagggagtggggtcaaaacaatcaggtcaaaatgggtatgtataaaacacagagattacaagttaacatgggtcatgattatgaaaagaggcaccaggcacaggtggctcacgcctgtaatcctagcactttgggaggcagaggagggcggatcacctgaggtcaggagttcaagaccagcctggccaacatgatgaaaccctgtgtctactaaaaatacgaaaattagccaggcgtggtggtgtgtgcctgtaatcccagctattcaggaggctgaggtgggagaatcgctcaaaaccgggaggcggaagttgcagtgagccgagataagaaaaaaaaagaaaagaggcacctaatgttttcagccagggttgggcaaagcttcacttctgtaagtaaagcattgctgaacgtggccaggcctgctcatttatatattgtctgtggctccctgaagaagtgaacagaggcaacagaaaccgtgttgctgcaaagcctgaaatactatttggccctttacagaaaaagtttgtgacctctgtgttagacacataagaattgaatacaggcaaacaagaacaagcagttgccctgagggcaatatactgatgctcgaagcccccccgggtcctccttctccgagtagggccctcaggagacaccacattcctctgaacatcttgggtggtcaatcttccatactctggagtggatttaatttctagaaactgcccacggcttttccaaaccaatttaggtgaaaaggtgggtgatcacgccaagcaatgaaacatacaaacttgccaggggcaggacgcaagcctctaacacggaaggaattgaaatcgcaatgagatgtggcttcattgtaaagttgcacaacttggtttcttgtgtctcattaattggggacaacagtcatataatgtttgggcctcggcctgacaggcctgacagtaaaaatcccttcgtcgcttgtggcttatgactacctcttacaagacaaaccacattccacaggaacctgcggtctggagagggctgttaagggctgtcctgggaagtttttggaaaagatggggcctggtgagagaaaagaacacctggcctttttacaaatgcagacactgtggcccagggaggggaggggccttgccaacatcacctagccatggcacctcaaggttcaacgtacccaaagtggccagtgtttcaggttcagtgccagctgtgggggatgagtgaaaaatgagttcatgttctccaagagtccagtccctggtatccagataacacaggaatgtcaataaaaacagagaagtttggcaggccttgggtatgtcccctgacctctccaagtctgcttacttgtatgaaaaatagtatcttccttacacaattcctgtgaggactccaatgagagatgtacctgaagcacccagcagagtatagcatacagtaagtgctcaactgaaagcagctaatcacttcaggcacaaggctgagctattttctagttgcagcggtccaatcttcttacccacaagtgtgtacacacacctccccttcggtgcagaaaactggagactgcaaggcttcactgagcacctgtcctgtgtgaggaatggccctgcctgcctccaacagggaagttaacagaggggaaaactgcaatctggctctggaactgcaacattcctacccctcttggctaatgccttcagcaggaccacaattataaacacagaactaacaggaactgagaaacagcagcagatcaaaaagcaggttgctcttgcttttggaggatgtgagacagatttcttccaaagaggcaagggaaaatcccccatctttacaggtcaggaatagcgccagtaaatccctccactttgtcctttctcctttcatggaatagcccaatgcgccagtgggtgttaagcaaacaagggtgtgagttgcagcttcctgtgcctgactatgcagttcccgcacaggtccttgcccgagctaacgctgtggccccggacacagacagataaagtcccgatcgaacactaagggccaaagctggcaccaatgagcaagcctggtgagcttatataacaaagggcttgtcaccacttcctgtgatcctcatcgccagcattccaacacaatgagacactcagcggctttgaagttcaacaactcattcagatggccccagcaaaaactctgctgggaggtggagagcctgtgctcccttacctcaccttctcatccccctcctcacgttgtgcttgcaatgttaccacttcaaaaaaatttccaatagtaattaaatgatttgcatttgtttttaaaaactgtaaaatattccaaccttccagcgataaccagtgtatacattttggtcgatttccttccagtcttttttctacatatgtcggtgggaatgcagtaattggaaaagaatacaaatattcatcattttttatatcctgcgtttaaaaaagtattacttctggccagttgcagcagctcatgccagtaatcctagcactttgggaactgaggtgggaggatcacttgagtttgagatcagcctgggcagcacagtgagagcctgactctacataaaatttttaaattagctgggcatggtggtgagtgcctgtagtcccagctacgtgggaggctgagtctggaggatctcttcagcccttgaggtggaggttgctgtgagctatgatggcactgttgcactctagcctgggtgacatagcaaggccctgcctcaaaataataatgataaatacacatacaaaaaatgaaaaagtattacattgttgagtgttttccatcttaacgatattgcagtggagttactcaactcagcttttgttggctgtattccctctcactttaggccacacgttagccacttcccatggctggatatttaggtaatttccagtttttggttttgccaaatgttttaggtgcttttccctaggagggcaccactgggttcccagggtaacaacttttaagcctctccatgttgctctctcactgtttccagtcactctttttgacctaaaaccaagtctacaacatttttagggcaacaatacagtctattcacaggcaccttctcagctcatctcaagacagaaacgaacatcctttttatttatttttgagacagagtctcgctctgtcacctagactggagtgcagtagcgccatctcggctcactgcagccgtaacctcccagacttaagtgatcctgctacctcagcctcccaattaactgagaccacagatgcatgccaccacacttggctaatttttaaatttattttgtagagatgcggtctccctatgttgcccaagctgggctcaagcgatcctcctgcctcggcctcccaaagtgctgggattacaggtgtgagagcccagccaatatcctcactgaaaacaggctcagatgggtgtggtggctcatgcctgtaatcccagcactttgggaggctgaggtgggcagatcccctgaggtcaggagtttgaaaccagcctagccaacatggcaaaagcccatctctactaaaagaatgcaaaaattggctgggtgcggtgaggcgcgcctgtaatcccagctacttgggaggctgagacagaagaatcgcttgaacccaggaggcagaggttgcagtgag

SEQ ID NO: 52136 - DNA, 3096 bp, Homo sapiens
tggtttctttgaattacggaattagggttggtttctgagttttgcttacttattattttctataccaaacttgtcttaattttgttataaggggtaaaaggttagtcaaaagataaatgtggaactacagctcaaaatgcaagctggtccctttctgaggaaccggctcagagcacagccaacttgcaagggccccacacagggcaggtaggcaccatgccattccgcaaatgccatgcagtccccgatcacatgtgtggctttggaatgcaccagagggattaccgggctgtctggctttctgggagtgcacatccaacaagatggtaaagtttcactgttaagaactttctgatgattttcatttttagaatttagccgtggcctggagaaacctgcagactctcattcctcctagttctgtttgcattctccccatagcccatgtaccagtgaacccacaatataagggaccacttcctatcagaagcagccagcaatgaaatgttctgctgagcaaaacagtggctgctccagccctgtccctggagacttaatcgctgcactgtctccaccgccctgtggtgcccagctcagccatgcaacatagcaggtggcctcttttgaattaggagtactggggcaatttcagactagtggcaggcagggcctggccctttgccaccttcctctatccctggcaaatataccatggcatgccccaagctctggccacccctgactgcacacagcagagttccccttccaatctcagccactgtagatgggatcccctctgtcttggatgccccatccacaccttcctctggacccatctcccatgaggcctcctcttcctgacggttttccccatttcctcccacagacccagacagagggccatccatttcttccctgggatctcaggcacctcctgaccccagagggcagagagtgtcccactctggacccctaggcctcagctgctgaatctactgcatcagtggctgctcggggccaaaaccctgcagccatcctggctcttctccctcatctctgccaggaaatcctgaggcccaatttcaccacacgctggaatctgcccctcttctcatcacctgctgtcaaagccctgctttcagtggtctgcctgctggtgccctctctgctctagaatctccagagccaccctttaaaaacccaagtcagatgcgtggctggcttctctgctcagaaccctctgctgcccccatctcatgcagggttagcgaggaaggcctcttcaatgcttgtgagttccgacatcctctgccccacacctctcagccctcagctgccttcatacctcctcctcacctgctccgctcagtcatatagatctctgcattgctccctgaaccaccgaggcatgctactgcctcaggcttctgcactgttcttcttccctctgcctggaatgccgtccttggagagcggggtggttcatgccatcacaactcttagcaaggccctctctgagcacccacataaaaagcatcccaccccaaattcacgtttgccatcgcctctttattcctctttactttcctccacagtccccacccctgacgtaactgtatttacttgactcctgtcatgagagagcaagctcaggggagcatagactcttatctgctttgttcatggctctattcccagcacctaaacagaacaatccccaacacacagcaggctctcaacagtgtctactgaatgaatgaatgaatgaatgagaagaaaggacttggcatgggctctcacagccccctgggaactctgggtccagcctgtaagtcaaggcccggcagtgggccagggaattcgcttcccccacccacccacccacctgtcgagtcactctcccctcctcggccgtgggaagcccctttctgaccaggagtattacgtgttgcttggaaaacactgggcctgagtcactcagtggggctctaattctctctccatcccctggacccacctccaagatccttcctttacagcataatgggaaatccagagacagctccccttggagaaactggaaaggaactgaatgatttagaggaaaattcagttcttcctgcctcgggagttaggaaagctcaaactctcaggaagttagtgccgctgaaagtgaaacattaatagaaatattactggaaaataccaaacaggaagagaaggaaaattccattgtggaagcaaggtcctctgtcgatgctccttaatggtctcagcaaagtgtttcagaatcaaaacacgggaagaagcggaaatcaatcaggctgtcacccttcctgtagactccagattcggccacgccacctccacaccaccccggcacaaagggcactggcctcaacacaaggtcaacacacacagcaggtactggccaccagctctgcctctgctgtgaggcagggaagaatgcactcctccccatgagcctctgtttctccatctgcaaaggggagattacagcccattcctcgcagagtggctctgagaagcaaacaaattaccggtgtgaaagtgccctttaagctgtggaatacttacataaatgttggaatcagtcacttctaccatgccaacagaggggacattttacaaagagtaagtctagccacaaataaggcagagatgataaagcaaattcaggcatgggattgtgcagcttgaggtagtatggcacagtggttacaaacagatgctagatctggcttcacatctcatctctgccacttactggctgtctgactttattattattattattattttttgagatagtgtctcgctttggtgcccaggctggagtgcagtggcctgatctcggctcactacaacctctgcctcccgggttcaagcaattctcccacctcagcctcccaagtagctgggattacagacatgtgccaacacgccgagctaatttttgtatttttaatagagacagtgtttcaccatgttggccaggctggtctccaactcccgaccttaggtgatccaccttggcctcccaatgtgctgggattacaggaagtgctgggatta

SEQ ID NO: 52137 - DNA, 1441 bp, Homo sapiens
ataaggtagatgatggcatcgaaggccctaattaatggcttgcctgtatccctgccctttgccatgggacactgcagctcctcctctctccttgaattgtggctggccttatgatttgctttagtcaacagaatgcagcagaagggtcaccatgccagtttccaacctcaagagaccttatgcgctcctgctttttcttggaaccctgctgccgtcatatgaacatgtgctggaggaggagagaccacacggaacagagctgaattgttgcagcccaaggccatcctaaaccagcccaccaaacacgtaagaaagcctagccaggatcagcagggctgcatacccaccccacccccagtgactgcaaaggcatgagtgagcccaactgagactagaaaaatgactcagatatgcaggctcttggctataataaaaccttatcgtttaaagcaggggttggaagctagagcgcacaggccagctgcctgtttttgtaaataaagttttattgggatacagctgttcccattaatttccatattgtctatggctgctttcaagctacagtggcagagctgaagagctacaatagagacagcatggcccacaatcaaaccacgggcggttttggggtgatttgttatgtagcaacagctaatacagtactcaagcctctcccagtgggacagtgaggattaaatgaccgattaagtggttactatgaagcctggggaatgtatttcccttctggggaatcaaccaggaaaaactggatttgatacgcagcatttctctcacactgctttcaggggatgggacttcaaaggggaaagtgtcccaagccaaaccacagctatcaagtgcaaccctgacctttgccattagtgatattttaagaactggagagtgtggctgttcatcaaatgggaatgactgacaactcatgtttgaccccggcttcaatcaagccctacatcaatgattttatgtgaaacaggacaaatgataattcacaactccgcagcaaggcacatgggactttcttccctttgtgggctccaacctccttctgcagtctcccaccacacctgccctgctgcccccagccatcctctccagcctccaggccatggcacaggctgctttattccttctgcatgaaaagccctcttccccactcccctgccttgggaattcccactcagccttctacactcagctcaagagtggccttctgctgaaggccctctttggcttcccagccaagttcaggccctcccaaccctgtgcacacacttctggcattcctcgggttgtgatattgtctctctggttgtatctgtctccctgactagaccgggagaagctggtattcaactgcaaactgagaagcttcctttttggaaagttagccaccacttacttctctctgaattccctc

SEQ ID NO: 52138 - DNA, 4731 bp, Homo sapiens
gagtggttttcaaaccatggtcccaggaccctcagccatttcccctcaacctgggaaatgatggaatgcaaacactcaggtcccccaccaggcatgctcaatcagacgctgcaggatgggccccagcaatctgttgtaaccagccctataggtgcactaaagtttgaggatcgctgcactataacgtcctgctgagcctccctggctgcctcctccctcctgggtagaaagaacatctggacaacttctcaaaagatcaaaggtctcgcagtcacaacctagtaggtgaaaagtaacccagagagatcttctaaaaaaccatatctgatcacaacactctcgcagctaaatcccttcacaggccccctctgtgcttagcctacaaggtcctccctgactcaggccctgcccaactcttaacctctcaatttcagccacaagggacttcacctgcagttccctgaagcacagggttcttctccagccaaccatggtgaccacccctccctcacaataatggccctgcctccaaggtgcactcctcgatgccacaccccccaacctctcccttgcccttcatccctcctgtaaccctgtaacacgaggtctcatcatagcactcatcaccatcacgccactatggcctctgtcatagcattcgctgcagagggtccctgctccagcacccagcaggggaggacacagagaagacccgtaagaaatatctggtgatgaaaagagtcaagtcttaaatatcttgacatcctggctataaaacaaatcattccttagtgtttgaaacagtcttaactgtaactgggaaaaaatgtttactgaagttttgaaccactagcagtggaagagaaaggagatctgcccacctggggtgtggctgcagggtaacaaggaggatgcataaagtccagtgcagttagccgtgaccctctcgtgccttttatatacaagacctccaggtttccccagtgcctgcaccaagccaagcttcagccatgcataagactgcacggagcctatctggtgtttccctcactgaccaaacacaggcccagggtcctggtggctcccagggaaatctgccccctctcccaaagcagctcctaggtagccacctggctcccagctagtcgtcatctaggtgtggcatcctaggtgctttagaaacccagagtccaagcttccgaggggtgccccaaactgcctccagggagaggtgggatcttccacggactgcccatgcagatcaaacaggggaggggatattctggggacctcggggaggggaggccaggcagaaaaactagagggacattcccttcctcctctctcctggcaaacaaaaaagatccctttccaagcaccagatggcaggtaagagcctgtctccctcctgtctggacatccagtcctaaaaggaactcagactcttaatcagtctcccccagcccaggcctgggcaaaggtttacctttgggggaagaaggtggggagaacaacagccacgcaccagggcgctgagaaggaaggagctctcccaccgggcctcagatttaatcaaaacactgccttccaccagaagacagaacaagtattattttatgggggaagggagggcttcacaggagtgtgaagggggaggaggggacctagtctggctgtaattaactcgtctgcttcaaagggaggaatctaggtggcctaatgcgttaggaagggggctgtcacaaagtccccccgtgttcctgggaccttatggggtaggggtgaggtcaggaaggaagcaggtgaggataggaggggtggggtctccttccagccgggcctgataggctgaccccctcccgcgcgcagcgggaggaactgacgggttcgatgaggagcgctcttgcaggcagcgcatttcaaccggaaaagcacgcgtggaggttcccggagcagctccggtaccaggcagcccggatttggaaacctagagctgggggtggggcagggcagggccgggcagggcagccgcgagagatttacatatacacgctggagacagccggtccggatctgccaccaagaaagctgtgtaatattgggcgagtcccttccttgctctggacctcagtttcccacctacagcgtgagcggagggtggaggctgggataaggggtgtcaggagtcaaagctcttcgaagtcctagacagctctgactctgactttactccttggcagccagaaggactgactgggtccgtcttcctggggcaaggctgggccgggcgctctcgctcagaggggacgttctggaagcagcggcgaaagaggtggggtcaggaggccgccggtcccaggaaaagggcgcgggaggaggcagaagcgggaagcagcacgccagccccgacccagggtcctaggccgaagctgaagtagagactcaacaccagagcggcgggtgcctcggtttccccgtgcgcaccgtggctctggaacctcgggaagaggccaaggggcaccttaccttgtccttcttgccggccccgctctcctccgcggctgaggcggcgcacttgttgagcagtttcttgcctccgcaggccgtcgggctccaggtgcggccgcccgcgcaggcgccccccagggggtccccggccccaccgcccgcggcgctctccactttgatgaggcggtgcttgggggagatgtagcgcacctcggccggcgtggcgggccgccgctcgctgctgctgcggtagagatgcggagagccggaggacgaggacgaggacgcggcggcccccgcgcccgaggaggcgcagcaacagcccgcggcgcccgacgcggacgaggccgagaaggcgcgctggaccccgcctggctccccgctgccgccgcagtagtccaggcggcacatggcgcgcagtttgcgcagcgacgagccaggcccgttgtaggggtcctcgaagtctcgctccttctgcgcgcggtaggcgcggatgaggtcgctggtgctgccgctgtcgtcgggcagcgagcccgaagaggctgagaagcaggaggcggtggccggaccgcaggacgccgaggcggcggaggaggcctgcggcacggcctgggggggctgcgaaggccgctcgcctcggcgccgctgctcgcggtagtctggccgcggcggctgcggggggctcttggtcttgctgttgcccaagctgaagtacttgtttagccacttggccatggcgagaggccgcctagggccgcggcgcgggagcccggtccgccgccgcggccattcggggggcagcgctgcggcgcaggtccctcggcgccccggccccggcggggggcgtccggggcgcccgctcccgacgccaagttcaagttcttgccgccgccgcctcctgccggcagctctctggctccggcggctgcaacacctccctccgcctagcgccgcccaagctaggaatctcgcgcccctcgtgggcgcgtctcatggggtcccggcccacgcccgggggagagcggaaggtccgagcgctccacgccgcggaccctttggccgtacgcccctcgccgtggatcgcgctcctgccccgtcggagccgcagcctccgccttggccgggatccgcggctgccgcgggaacttctcggcgtcctcggctcccttcttccttcctgcgagcgctggggagagctcggccccgcagcggaggagaatgcggccgggagagacagcgagcgacggaggaaggcagccggcgcccgccggagcccgcgcgcccgtgcccgtcccggcggcgcctgtcgctgccactgccgccgcctcccgagccgccgcgtgtgtgacactcaggccgccagagcccgccccgcgccgccgccccgcccccccggagcccgctcgcgcgccccgccccccgcccgctcccgcagacccagcaccgcccatccccgcgagcctggccccgggccgcggcccaagccccgcccccctcgcgcccggggccggggtgggcgcacctctccgctcctgcacacgccacctcccgcggctgccctggcgccagcaccagggtcttgccccagggcgctggggtcccgccgcgcagccggctccacctagcttgcagctcgccgccgcctcgggcgagaggttgcctggcggagcctgctacgcgcagaggccaaacctttccgcagtcccccgggaccccgcgcgttgttcactccagggatccccctgtcggggttgaggagggagagtggattaacacggaacctgtctagtttacagcgtggcccgtgtggaggaaatgcagtgcctagtgcccttagggacagagtggctgtccctcttccttaaagggacagactccggttcagccccgtgcgccaggtcttcggaggaatctttatgctaatgagtgtattagcagtccagatgacggatgtggtcgggataggcggtgggagccgggcccagcaccaatccgagagcaaggctaggggaggtcggaatgtttgcttaccttttcacctctgaggaagtcgaggctttagccctgttcgctgccagccggcggggagcaagttgtgggaacatttaatgccttatgttgtaggagctggcaaggatccatttaatacaggacctcggccgggtgcggtgtctcacgcctgtaatcccagcactttgggaggccgaggcgggtggatcacga

SEQ ID NO: 52139 - DNA, 1991 bp, Homo sapiens
tatcattttatttcatgttaacacatagtcttgctcaactaggtaatacttttttttttttttttttttgagataatctcactctgtcgcccaggctggagtgcagtggtgtgatctcggctcactgcaactgccgcctcctgggttcaagcgattctcctgcctcagcctcctgagtagctgggattacaggcgcccgccaccacacccagctaatttgtgtatttttagtagagacggggtttcaccatgttggccaggctggtctgaactcctgacctcaggcgatccgcccacctcggcctcccagagttctgagattacaggcgtgagccaccgcgcccggcccaatgagataatatctgtaaaacattcagaacaaaggacactgagtatccactggatttggcagttagcagtgcatcagagagatgtggagagagctgctttagaggaagcagaagccaaagtgcagggatggggaagtgagtgactggaagggatgagaaaggggagtggagacagccccctgagagctattgggcgcaacaagagagagggtagtttgatggagagggcgttattgacaggaaggtgccagtaggatgggagtgactgcagatacaggagagacgaaggagaacagagtaagggggcgggggctggactgcctgcatccaggtgcaaggggaggtgaggggggggtcggcagggagggagggggctcgttcatacctgctgccggggtgctctgtatcctcaagtggagcaaactcatctgtggagggagagaagagtggcgaatggagcgggggggggggggggctccgggagggcgggggaagtgtgaagtagctcttaagtggagtgggggagggttagaaaagacggtgacaggcggtgctaagcagagaccagaatctggaagggtgccaggttgtgggtgtgggggagggggctgttccgccgcagctgcagctacagccaggaggtgagggtgaggaagctggagggaggcatgacttttggagtgggcgggctcaccgggaggatgaccaactagatggtccagattgcctggaaatggaaagtccctcatcccaggaatgcctgaggccaaacaaaccagtagagttggtcacctactgcagagtgatgaaaccctggcccccacgggggtgagcgtgctggctttgtgatcggcgctaggatgcaggctgggggtggtgtgggggtgtaagggtagcctggacactcaggaaataggactggggggttgggagggaggttaaggacctaagggtgtcactcacctgtcttcctggttcctgaatagtgcctggccttccaccaggcactaaatatttttccagagactgtgaaaccagacattcttactacttttaatttttgccatagtcacatagcttctgcgttaacgtaatattctttaaaatcagctctttaacaagtatgtctaaaaggaaacaccctttaccctatatggacaaaaagaaaccacacagagccccaccaccaagcatatattggcggctaactggatctgctgcttgacaagggaactgcggtgcccagggctgctgtctgtctgttaccctgggagatgagtcggcttgagagaggcatggacgatgtgctcgcacccaacggagccctttctccttgagctgctgagaagaatggggcttgaaagagggacagctttgctgtgtgactgaattccatgttcctttactacctgcgatcatcttgcttccctcacttcggaaaatgctgtgataaagtgattgagactataggttctcttagtgttcttaagagtcaataacagctgtgcatttattattttattttttcaggctgagtcttgctctgttgtccaagctggggtacagtggtgtgattttgcagtgagctgcagcctcaacctctggggctcaagcgatcttcccacctcagcctcctgagta

SEQ ID NO: 52140 - DNA, 3124 bp, Homo sapiens
ttactgtgactcacgactgactccctgtggatgtgcagtggtccttttccctcttgggtctcagtatccccacctgtacctggatcatctttcagtgcctcctgctatatcccctcttatgaatagaaagattcagtagatcacttactcagtgaccttttcaggtgcactaaaaccaagcatttcacaccttagggagacacaaggcaggatctaatcagaactctgcatccctcgggcttggtttagggattctagtgccacattcaaagcacagaacaggcgcctgggccaatgtcaccttggtaagtgtctgcctcccagcgtgccttaaggttgcaggaaattgcctatttacacgtattctgctctgacaggcacaccagaattttaaaatcctccttcaggtttctcacagataagatggggaactttgtttactatggattccagggcttcctgaagaggaggcctttgagttttcgaaaataattgcttttcctctcctgtgctctccaggggtggtctttggccggaggaagaaatggctttgttgctcaggagagctttgggaatggaactcaggggcttccaaagagcagcaatcaggaaaacaagcagggaggatccaggttttgcaaggcctgaagcctgcacactagggagccccatgctctgtgaaggagagaacagtgataagaagaagataatgattcagcagctttgcaaacattgtttggtgaataaacagccccgttcagtgcaccggtttcttcctcccatcatgggacaggtggaatgtgatctgagatgccagccttggtcagctggagggttgttcagctgcctcgtgactcctcctcggtaagagtgaaagagcctttcattccctaaataaacatgtctattagaggcattgatctgtccccagcaggcagtaattgcacctcaaatgccacagatgcacagcctggggttctactccaccccgccctgccctgccctgccagtctccctgcctggcctgggacggaccctgaccctccttggggttcaggctcttcttctgtacagagtcacaaggctgttaattcatattcttcccatcacagggatgaacccctctggctcagtcataaatgataatataagactcgttttccatggaaaagccctagtacagccatacgggtactttaatacaaaatgctcacctaccagtttgtaagcagcccctctctgagcccctaggtgccacctccactctgtcctcacggcccttggcctgggaccccctgaacttccgcatgactcaccatggccaaccagatcacaagggttagggttagggtgagcacagaattacagccaggctttgtgcccatgctccattcctcagtatatcaaatctcacccctgggcctgggctggggcccctgcacaggctccagcccttcttagcctagagagaggcttcttgaggagattctcccatcctttaacagcagaatccagcctgcctggattcactgaacaggagtgcagctgggagtggagccatttctgagccggtgagccctgatctgtctgcttctaccttcatttctaacaggtatttctggcccaagaagttgggcctgggaggacagacccagcccaaccatcctcctgtgaaggacccttcgtgacggggtggaggccacactctctggctcctgctcctgatcactttccttcccgttcctcatgaacatgtccaggcatcagcccaggggcagatctaggaaagcctggagccaccgggccccttggagcttcctcaggggccaccagagggtgggggcccggtaagcagctcccttgcacctggcttagtctgtaatctagtgcaatcccttcaccgtgaggataattgggcccagagggctcatggtgagtcagacagcctggggtccagtccccagctgggggctttgcccacagcaccttgtgccctctctcctttgtgggtctatcctcgtcctcacacacgttgtctctctgttccagggaaggagtattccatggcccataatccgtgtgaacagatagacaacgggaagcatctttgttattccaacactggggcaatttctttcaccaacccgtagcagaggccttaatgaggcttcagtctagctgaaaaggttgtccaaaccccacacgtagcaccaggtgagccataactaagactggactatatgtgggctctcactttggaccctatccagaccttcccactcactccctgtgggatctacagaagtctttcccttctctggaccttagtctcctcatctatacaatggtgatgttggaccagaaattctaaggaccccctttctcctgatctgttcctgattctataaggccaggggtgggaacaaccatcctggaatcctctcaggaaaaagctgctcaggcagggtgcagtggctcacgcactttgggaggctgaggcgggcagatcatttgaggtcaggagtttgaaaccagcctggccaacatggcgaaaccccgtctctactaaaaatacaaaaattagctgggcatggtggcatgcatgtgtaatcccagctacttgggaggctgaggcacgagaacacttgaacccaggaggcggaggccacagtgaaccgagatggtgccacttcactccagcctgggtgacagagcaacactctgtctcaaaaataaaaaagaaagggctgctcttccttgatgactcactgaggtacacctatggtgggacctttagaatcagatttggagaggggagacagtgcaaagtcagtcacctccactagcttgcctagtgcttttaagagtgtggcattccaatccatcacattcctggaaaatagtcaaccctctgcaaaaataatttgtgcattttaccttcagctactgcacgttggttcttctctccaaaccataaatgtcaagcactgtggaaggttttctttttattactttttatttttgagggggtaaataccttgcaacaggaccactttggtgagttctgatgccagtcacagcttagaaagtgtcaaggtagtcatgctggatagaatctagacac

SEQ ID NO: 52141 - DNA, 1523 bp, Homo sapiens
gtctccatgtctgtctgcctccccagtctgtgagttgccagaggacaggtatgatgtcttatttgtctccacacggcagggcctggcataggtgggtcagcagtaacaggagctgagtgaaagaaggaatgatgagtggcagatgcttgctgatgtggacactgctgggcctgacaagggactgtgctggggaaactgtctttgaaccagaaagaactagctagagacagagaggcaaagtggaaagcaagggtaatcagcgctcactgcagctcccatactctggtcacctaggcatcagccctgtggatccaaaaagcctttgcgccctccttggcagatctgccctgctgtcatggatggtagggcagcatttcaggctcgctccatcagcaagtgtatgaagatacactgggtccctgccaatactttgtacttcaaccattgccttatagtggcccataaccagccataacaggatgggaaagtcaattgactgggtttaacaaatagcatgcatttaggctccaacatttgtggcccaaggactctgctgccaatgaacaaatgaacactatgtaacagctttactacaactttctggggcttcagtctcctagaggcccttgtgtccttctcctcctatacccctctttttacagtggcgatgactgaggcccagagggaggtaggtggtggctcaaggtcacacagaaaggctggaaccagcacccaggctctgatagcctgccagtgccctttgcaccaactctactaggtttggtgagggctattcaataattaaccgtggattctgagaaagacatggacccctcgggcccaatcatgaggtcataaaagaacagattcattacacagtgtttgagcccagaggacacttgctattgacttggtaacataatcttttttttttttttaactttttattaccagaaattttaaatatacacaaaaatagacattataatgaacccctttgtgccagcagctgccagcgtaagtaattatgaacacctgctgttcttggtaacataacttggaatcttatttcctccttggaaactggaggagacacacactataaaacactataaccagaatgatcatttcaaattgcaaactggattgtgtcaaccgcccttccttctccctcaagaccctttaatagaatcctctggtcctgggatgaagatggagcagagctcctaccccagacctggacagctgtctctagacttcttttaagtgagagaaaagtacacttctcttgtttaagccacttttattttgggttttctctgatgtcagtagttctcaaaactggctacacaatggaatcaatggaagagcttaaacacaaaacaaaacaacaacaaaaccagataacccagaacaacacccagggactcctagcaatgtggagtgttgctcaggtgtttccaaagactctcccaggtggtgctgatccacaggcatagttgagaaccactgtttcatcatat

SEQ ID NO: 52142 - DNA, 1865 bp, Homo sapiens
aagggggcagctactacgtgcatctctagttgagccactgttccatatccacgtgcaggcctgatagtactaagtcttccaatgtttcaagaacaaatagaaaagtacattttaatgtcaaatatctcaatgtttaagcattagaaagcataaaacggggaaaaaaaaccccacaactctgctggggccaaatagaacatgtatgctggcttgagacttgggctaccagtttgtggtgtctagtctggagcttcttcctcactaggacagttaaggcagcattactttattttgtgctgcttgtcaccttgtcagtgggagaagagacaggcaggtgtgaagcccaggctctctctcaggccccagggtggtgttggtatttcccttccatttaccacccacgttcctcccttgacctctgtccaaactcctcctcatctctccaaaagaaggagctcccaaggttgcacgtggctctgccttcaattactgtttatttcatttgcatgtggcttttctccttgaccttaacatgaggaggggagccacagccagggcagcgtagtaaaagctgagccttttgctctgctagggtgaactctaactgtgctttacaggtgctattgccacacgtaagcactgcaacagtcttctctccctgccccaccggaccccaacctcctcctcctctcagttgggtcttccttagtctcaatgatgctgtcagttaaggtgtggtcaagaaaatggaagccactctaggtgttttgagtaggaagagattaatattaacacaagtgttgggaggctgggaagtgaagggcactaagctattgtcaagaaatctggaagtgctaggattatagggaggctactaccagtgttctctgcagtccacagtcatgaacggagcactccttaggggggccttcaaagccttgggtagaaatccacctctgcagatgcccacgcaccagctgcatgttttgcttccaggccagtgttatttgtgtgattgtgcaagagcttggcttctagtctgcacttggatactaatcccctaatcccttccaaagggaccttgggcaagtcccttttcctttttgggtctcagtttcttcaaccataaaaatgaggtgaaggggaaggaagacagagagggaggagaacagagtttgtggcaaatactcaggggttagttatgttcaacaacattcagacttgctcatgttcacagagagtaagcttcacttagaggatcacttaggaaaaaagaaaaaagtatatattggtttgatttttaaatgtatctttatttttaaatttccatttcctgcaaatgcctcagtgtcttgacctagtcttgcctcttccgttcaaatacagaaaatgattatgctcagtgtagaagaaacactcagtgcagctttcagtccttttgtttggaatctagctgatctgtacgtcattctcagagctggattcttcttcagtaacttcttagacatataaggctctacaacgctgaaggatagaaattgcttctcttctcccaccagcccagtgtaaacacatccctggacgacactgacctgactgtggcttgtgttatctcaccctttccccttcaatccacacaggctccaggtccaatatccttacaaagggcctggatctttttttgttaattaaaaagctgaatccatcacattcctggaaaatagtcaaccctctgcaaaaataatttgtgcattttaccttcagctactgcacattcattcttctctccaaaccataaatgtcaagcactgtggaagttttttttttttttttttgaggaggggtaaataccttgcaacaggacc

SEQ ID NO: 52143 - DNA, 1905 bp, Homo sapiens
tgattttatttttattaaaataattttgaaagatgcagaggaaacaatactagcaggacgaacaccgtaataatggctaccgtaggtgaagagattacaggtgatatttttcttcttttttcatcctttcctgtgttttccaagctttctacactgtgcatacattctttttgtccttaggacaaaaatgtactttgaaaaatgcccaaatataaaatcttcttgaaggaactgaagaaaggagcagtgaaagtggaggacagaaattagtgaatcctggacaaaaaaagtgagggagaggcgaggcagagaaggggttaaggggagtctcaaggatggcagtcgattaagcagcgtcttgcagcggggagaaatgcaaagtgtagttggggttcggtctccgaaaactttgctgtgtgacctggggaagcccctgcccctctctgggtatctctgtttccgctcccaaaccagtgccttaggagcctagatctgagcaacgtggacactgggcttgcggagacccgagggagggagcgctgaagcggtgcgggctgccgggggtagaggggcggggaccgggaaagaccgggcggggcgagggaggagcggccttggccggcgacaggacgtaggcagcgccccaggcgcaggcggagcctcattggccgctgagccccgggctgcgcggaggcgggacctgcggccagccctgggcggccatgtggacagagctgggagggccggaaccagaacccaagcgtgatcctgaaccggagcccgagcctgctgcaggtaactaacgctggtctcccctcggctccctcgggaagccgcagctcctggctccgcgtgggggctttcctctctgggccgcggcgtccgcatctgggggctggcctttccgccgttgcactgtaggactctctccacgtcccctaatcccatcccccgcctctgggtgacgctacaggagccccgaggacacagacgcccccagaccttaccacgttagctcgacctcaacactcctgcccactcggcccacttcaacagagggcccctgaccatagcccagaggcttggacaagcccaaaggttgcgccctttcccccgcagaaggggtgaggtgggcgccgctgcagttcccgcggatagagaaggtccggtccttcccgctgtgggtgaactgtaaaaaattgcctgtattcaggaggatatgcaaagctaggtttgtggaagtctggggtgaggctcctatactttcttgctgtgtgtcctcggtgagtccctgaacctctctgatgcccagccttcttccagaatgggggtcatcatcaaccctgaccacccagggactgcagagaggcttggcaaatttcccgtgagaagacagcctgcaaactgtaaagcatgatgctctgtgagctgtgatcttcctatcagcaagtggaggccccagcaagaaccccatataggccccaagagtaggaacggccttggtgtggctgcaaaggtttgccagccttggcctatgaccacctctcctgactgcttcacccctccaatccttaccccatgggttggtgactcccctttcccctacctccttttggtctcctcaccctcagagccaggcctgttggtggcaagggggctgtgtcccagcatatggcaaagtcctgagctaaatggaaccctgggcacccctggcagatctgctgactcagcttccccctgtgggatatgatgaggtttctcttcaaataatctgatcaatcttttattctttaattcttagtatccccccctttttttttttcatttttctcctttttgcctttgttagatgcccaggcatgccacagtaccaagcgttatcagtaccagctcacattcctttgc

SEQ ID NO: 52144 - DNA, 457 bp, Homo sapiens
aagaaattgcactaggtcttctagatatctgagtttttttgtttctaaagttagtaattaaaccatatctctagagaataactagaagctggcctgtgataagcttacaacactcaggaaacaagcacaacctttgtgatacactgttgaatttccttctgtgacatcacccaggctgtgaaccctgctacatacagggccccagtacagtaactcttcctaacctgggtctggtgcagtcagtaatctctttcctcactctctgccaactgcagcaccattgcattaactcctggaaaaaagtcggtagtggagtgctatagggctctgttctcgtcaatgtttttatcggtaacctagatgaactcagagtattcaaatgcccccaaagaaattaatatacgttggataggaaaagcaatattcaaaaaggcttgcatagcttagcatggtgaag

SEQ ID NO: 52145 - DNA, 2027 bp, Homo sapiens
agaagatacttcatgcagattctgcttgaggcaggatttaatgaacaagagtgatgccgatcagtagaggtgggaggagccactccaggcaggagtgaagaggtcagggttggcaaacacaaatggcctgggtttgtcagttatggtgtctatttactgcctccatgactgtctcctactccgccatggctgattcaatcaggggtgttatggactgaactgtatctccctcccgaattcctgtgttgaagccctaactctcagtaccttagaatgtaactgtatttggagataggacatttaaagaggtaattacatcaaaatgaagctttatccttaaaataaaggatggaccatgtggtgcttgcaagtcctctacattctgtgctgtgtctgctatggtaacaccagctgctaaaacaaataagccccactcttcacccgcttattacaatagaactttgcttcttgctcatgcactagtctgtgagaggacagcctgtgtagaggacagttttgtctgcagggtgattcatggacccagatgccttccatcctgtgattctatatccttcagagccttagagtccaaccaacagatggggaaggagaaggtgggaaagacacgcttgttccttggccatcttggcctagaagtgacacacatcactttggctcacactccatgggtgagacctagtccatgtctgtccctagatgctggggtggctgggaagtatggcctgggatgaaaagatccttactttatagaaagggagcaggaacacctggtggacagctagcgtgtcctgccatgtggttggaattcagttctgaacttgtctccggcctgttctcctcgcgaatgggctgctttgtttccaagagaatctggaagcccgtggtcctagtgtgttgccttaaggcagagtcctagtttatttccggtaataatttttacagctaaccaaaggggccatggctgctgggcgaagctctgacagctcagggggatggtgcccacagcaggagcttgaaagggtccacaagagcccaggagagaggaaataggagtgtaagtcctacatttgcagcatgagaaggggaggaagagctgaatagtcagcagtgttctggaatgaggaagtgggctgcctgcttgctttcatttcttaggtaaatatttgctggaagtttgccttttctctgagtttttcagtgctgtgacgagaactgggcagaacatcagctcatcagaagcagtgacatccaagagcccagaggagcctgaagaacaattgagagaagcctcctttgccaacgcgttgcccaccagggctgcacgtggtacccttgctccaagatgcttcccaaaaacaccaggtaagctttaagaggcagatctgagacaagtcatgctggatagcggcatgttcctagcaactgtcttctttgatgctggtgtttaatgaaaaccaggagaaaggcatgttttagctaatttgtagacaggctggcatggaggaaatgacatagataggttacttggtcagcgaatagatttcctttcatcttcagttcagagacagagtggagtgggcagagcccagatgtgttgttagggggcctgggttcaaatcctggagtttcctcatctctgaatcaggggtgataccccctgccttacctaaaccacagctttgtgaagatcatatgagaacaagaatgtgaaaggattcgagatctgtaaagtcttgccccgatggcaggaattaagaattcttattctaaccttcaaatgttttagatccaagaactgaaagcctactccaaaatataacaaaaaatccaaccatcacttctggcgtcacaatatctgttttgaactgtgggggatcaaagagggaaatgagccaagaaaacaccaacaggggtgggactgtaaactagttcaaccattgtggaagtcagtgtggcgattcctcagggatctagaactagaaataccatttgacccagccatccca

SEQ ID NO: 52146 - DNA, 2003 bp, Homo sapiens
gggccaggcatgggcagccgctctggctcctggttaaccaggtggggactgcaattcactgcacggtcaggggcccaaaggtagtggagtccttggcactttcagccctagcagaaggccagggatgccagctcggctgagcacagccatgcatggcactggactggggctgggggatggaaggcagagcctgtggggaatgggagaggtcgccactgtttaccagatgctctggggacagaggagcagacagggtccaggctccgagggggtagaaacgcaaccactggcagtcccctttcagttctgtgaaaggaaaaacacctttcttttgtcagagctgtccaaaagcggggaaaagattgagaaaagaagcactgctctttgggcatgaggccaggcactcgactctcatagtatctcatccacacagagccctggaagggggacactggatccattttcaggatgagaagagtaagacccagagaggggcacagcttgcccacagtcacacagctggcgcgtggtggagctgggactcactctcatggtcttcctggctccaaagcccacgcttttccactgagcctggctcacttagcaagatggcagggtcggcctgggaggtacagggttcctacccctgacagtgcccaaatggagcttcagggctgccctgtggggagggagagtgacagagagtgcagaggcattcacacttcccgtgggtgggtgctagtctgtgattccactacttcgagtggatgaggggccaggagacagctcagccatatgcaggccaagtacacacagtgcagagtgtatgtctccctggcacctgcccttcctgcattctctccttccttccttccttccttccttcactcactcattcattcagcaagcacttacttggatttattatgtaccttgtctgaagtccagaagctcagggtaggggttgggtaagggacggctggaattcacagttgaataaaacgtgtttctagcttttgaaaacctcacaactggaaagcgagagatgagatgtgaaaggcgtccctatagcatgaagaagatgtgatgagtgctagagaggaccctcagccaagttcagtggggctgggagaggagaagtgggagggaggagggaatgactttgggtcagggaggagcgaggaggagggcccagagaggcgataaggtctgagctaaagtttccacctgacctcatttgctgtttacacatctgagcaggtcgcgggtgttcaggatcctgcagtgtgaagacacatatttgcagaatgcgtcagaggccttcatggacagacggccccctagcatcatctgatagtcaagtttgtttgtgttttctttttccaaacacttggttgcaacccatttgtgggttgtaaaatcaatttagtgtttatgaccagcattgtacaaaatgagtgggacagagtacaaatgacttgaaccaaattaggactaccaaagggcactgagcatgataagggtattgttttgtgaaaagtcattaaacatgcatgcacagaaatttgttaaacatgcatgtgtgcacacacgcatctcaactgggtcataattgtaactatgagtcgtgtgttatatatgtaacacatacaattgtgactggtagttaaaaaattttgtctggtccaatgtcctcattttacaaagtagggaaaaaggatttgtgcaatgcagagcatagagagaagagcatagggtggggcactggctttctcttgagttcttttatttacccttgttgtctttcctctaaagcatagttaatgttgaccttggtcctagaaactctgacatcttcattattttaggaaatgccagagccgaggtcacttgtgcccagtggtatgctgggaaatgtatcagaactggctcttgaaaaagtatgcatatgtatatataagcttattataaattatactgatataatacattttacataattg

SEQ ID NO: 52147 - DNA, 1747 bp, Homo sapiens
ctacctaggtggattcggatgtaaaaccgacacagggttttatctgagaactcttcgcctactgaaaaaggctcatggtatttttgacaggggaatgagttctcattaggcacctccctatcatgtatatggccccatgttttaaacgtggatatgcctaactttgtgagttaaatcactcaaattttccaccaagcgcgacggacggggaattgccagcgacggaaagcagctgaggctccatttggctccgctgctccgagggtgcccggcgccctccaaggtccccgccccaggggctgccgggctgcagggaagccgggcctgcggccccctcccaccgcgggctgagtccccgagctacctgtcttttctgtcgcgggcgtccaagtcccggaacctgcgcgtcaggcagcgctccacctccgcggcgtcgcccttgatggcagccctgtggatcttccgcagttcccagtcccgaatgtcgtaacccggacccgcatactcttggtccatggagctcaggagcgcctggcccaggcgtctcccgaagctgaagagcttcctcatggtggcgacttctcagacgcccaccacccgctcctgagccgcggcggctcctcgtggcctttccacccccactccgccccaaatccgcgatctcccccgcaacccgcgatcccccccgcaacccgcgatccacccccaaatccaagatccacccccaaacccgcaatgtagctcagaatccgcgatccagcccggtccaccacagccttcagcagcgacactcgcagactccgacctctcagaccgagtgagcccagctaagccgttaggcgcgcgcctgaacctcagcgctccgaactctcagaccgagtgagtccccgcgatgccagttaggcgcgcgcctacaactcagcgccagccgggactccggaagccgctcccaagccctcgtggccggcagggggcacctgcagcacgggcgcacgcgtcgctggcttgcgggttctcctgggctcccgcgggacgtcccggaatcccaggagtgcatcccttcccgcctgagggcctgcctggccctgactcccgacccgctcctcctccgaagagagatcggggccgctgacaggggccctccgcagccaccggggatgggactggggggtcggttcctgtcccggtgcagccgccgccgggtagaccgcctggcttggccgcagccagggcgacatgtagccccggttctgccaggctgggagcgccagccatcttgggagttgccaggcagctgtcgccagcaggtagagggcgcctgcagcttgggcgcccaggtggtggagcacggcctaggcggcctctggatcgcgagtgcacctggcctgagagcccgccaggccctgcccctgctcggctcctcgtctgctgaagctcgggacctctagccagtggccctctgcagccacggggaatggggctgagagccggttcccgctgcagggcagaccacctagctcagccgcagccacagggacatctggccccggttctgagatgtggggagtgctggcgggctcgggggttgcctggaggctgctgcctgcacacagaaggcggatgcagcttgggtgcccaggcgggctggaggtgcatggcctggtcggcctcgggatcgccagcgcgcccagcctgagggcccccaggccgtgcctcccgcccattcctccaccggagggggatcggg

SEQ ID NO: 52148 - DNA, 1047 bp, Homo sapiens
aaagaaacttgttaatctgtgaaggtcaaccaagatgatcttgatatgtcctcaaggaaacacaacacgatatatgtaaggttgcatagaaacaaatatgataagcctatctaaggacaacattctgttttgaaaatgaaggtaagtcgtgcatgcagagtattggaaaagggctccaaagtgagaatgtgtggtgttctgcaatgctccaattccacactcaccaagcaccattctcttatacatttgctctgcttgttggctttgctgcagatggaagaaggcattaacaggctggtacaaggattctgaattgcctaatcaaaatattcctgactataaattgctacattgtaatttagatttatacaaactccttaggttagtgctggtcaggtaggtattctccaaactgcttggatctttcccatgagcccacagcctatggggtggcaggaagcgtcacacttgccaattaacagcattttactttaaatagaacattctgaatttgagcatttgttctatttagagctccgtttcgtatcagggctggcttaaatactctcttacatatggctcttagacgaaagctgtctttgggatggcaggatcctatttttctctttctggacatggtgtcccagagtataaggcttgttggatcataaagaatctgactagccattgtccttatttcctgggaggcagactttaaatccctggaatttcctgagtcatttgactgtcttagtttacctaacaagatgactcagaatgcggctggtcatcataaagaccagacatgtgattacagggttggggctttaagccagcctggcccccaaggaggggaggagagctgaaggctgaggtcacacacatggccaatgtttcaatgataccttcacagagaaactccgataaaacctggacattgaagctcagtggcactttgtggtttgtgaacacattgatgtattggagggtgatgcgcctccaatataataaacctcctgcaccttcctttataataaaactgctatt

SEQ ID NO: 52149 - DNA, 734 bp, Homo sapiens
tctctactaaaaatacaaaagattagctgggcatggtggcgagcgcctgtagtcccagctattcgggaggctgaggcaggagaatggcgtgaacctgggagggagagcttgcagtgagccgagatcacgccactgcactccagcctgggctacagagtgagactccgtttcaaacaaaaaaaaaaaaaaaaaaaaaaaagaactagatttcatcatctgttcaagaactagatttcaaaatgctgtaaaggtcagtattgaatcaatggacaaaactggaacacggacaattacaggattgcatcagtgttatggagttcccaaagttgatgagtgtgctgtaattatgtaagaagatgactgtgttcttgggaggtagccactgaagcatttagaggggaaagattatgatgcgtcaacttctctcatgtgatttagaaaagatatagattgacaaggcaaatgataagcaaggtaaatggtgatgataggtgcatctggctgatgctatagaggaattctttgaattattttttctgtaattttgaaattactgccaaatgaatgttaaaaagtaagcactacttttatctcctttcaagagaaaaattgctatttactttgtttctcttccatttattgccctccccctcacaacttcttatgcagagccccaatctctgtaaataaaccctgaacacattttgtagtgtcacaaagtaacagaggcttaa

SEQ ID NO: 52150 - DNA, 707 bp, Homo sapiens
agacttctgtgcagaggctgaagccagctcaggacgagtatgtgacctggagcagcaccagggcggggaggaacagaagtgtaggcgaagtaaacactccctgacagcgtaggtctgtccagaacccacctccgtcttcacccaaatgctgaatggctgagatttccacttccgggtttctcccggggcggggggggggcggagctacggcggctgcagagggccgaaaggtgtccgcacgcatctgctccctggcaccctctcgaggagcccctgaggattcgtgcctcccagaggtggggaaagcccgcccgaggcttcggtgctgacggtggcggggctgccgggcacgctgtggaaccgcctcccgctagagctgtgggctggtgacggtcccgcgggggcgggaagcggctcaggctgccctcctggcctgcggcagtgcgtctgggagcgcgggccactcgtgcgcgggtcactcggggctgtgcctcgcgcgactgtgtgtgcaggaaacaagcaggaaataccctaaaatggaatgaagcgccatgttgagggccgcggacgtcgcgagtgctgtgggaatgtgggccaaggtggagagttatggtggcgcgtgttacagggtcaggagtcaggaagaagcctaatcatggagccggcatctgaggagggtcttgaacgctgggcaggcttttgcccaa

SEQ ID NO: 52151 - DNA, 332 bp, Homo sapiens
agattaaagcaggggcctaaaagtccagagctacgtacgtgaggaatgatattcctggcctcaccaactctgactcactctgactccgggctattttttcctcaacattcttttccctatttgcacagggcaagtggctgtgatatttgcttatttttatttaccctccgcactggactgagaccaggccattagacaagtgtcacaacaatcctatacacacaagagtctctccctgaggcagtccacaaaagcagtgctttttttttttcttttcccaaggcttcctttgaagctgaaagtctccatcagcctactcttagaaggtcatg

SEQ ID NO: 52152 - DNA, 539 bp, Homo sapiens
tgtttaaaataaaaaacaaaattagctttaaaaataaatataaggaaacctaaaaatgttttgatttttttccttataatgctattctaatttctaaaatattaaatatcaacttcttaccaaaatatcttttgttttggtgccagttttaccatgtctaaagcacatgcttaaccagctattggttaacccagtgatgtttatatccacaaatcaccaagtcttgctggatcttgtttactcagcctgaaaaaggagcatgaatgaatttgcagcggtcacacaagtccagaggtcactggtcatcacttctcttgccagatggatgggtttgacaagctgtgtccagcacaatctgcctttcccagcagcctttttgttctagcccagatgcacagcacaaccacatttccgtgcctttcaggagaaagctacccaggtctcatgaactggtggtgattcaggttttctttgaagtggtgtccttccttggtgtacagtaaataatttgctttgcttatataataaacaagagtgta

SEQ ID NO: 52153 - DNA, 559 bp, Homo sapiens
ctcaggtggccctcacggcagaagttctcttctagtttgcttctgctactcaactctgccactcagctttgctcaatgtggaagtccttgctaacttctttagaatctgatacacccttaaggaatgtgttccaaaagctatgatgtctgttccttctgttgtcaacatcaccttacgcaactgcaatctgattgtactctctctggctggatatatagggcctgttgcacacaaacagaaatgcaggcaagctttcccccactgggtgtgtcactgaccctcttgctgacacagagagatgttgcctctgatttgagtggctttctcactccaagagctgggaacaccccaacattcttaatctctttttattttatcttttatcaaaaagataacatgaactttattttatgggcaaataaacttaagctagaagggttgttgactatctaccaaaggtcagcttattgggactggtatgctggtccactcacctgtagcctacttttctattaatagcaagtcaggcttctgtcttcaatgatgatgataatggta

SEQ ID NO: 52154 - DNA, 739 bp, Homo sapiens
gagagctctttgacttggccaataggggcctatcttaatgcacttgtttggacacatttctgatcttatttgtaaaggctgcaaaaggagaggatgaaatgctgtaaaagtaggaaatgaagtggaagctggaagaaaatgtaattggtggtacagctatgggccagatggtggaggggagggtggggacccctgccggcaagcagagtgtcacagctggctttcctcacttgggaaaagggtactgccggtctagcagcctcctctgtactcagccaggacacccagcgcgtgggacctgtttgtgtctgttttgcttccttgggaacggcacagtcactcaccctgccatttgcggaaatgacctggtgcactttgactgttaagcaatgcgttattgctgtagtcaaggttagtgcaagcaaggaaacattcccagtaaggtatttgtttccattttctgtctgtgcttctgtcagaaacttgctaggacatttagtggccaataaaaaagaaattcctaatttcaaccttatccaaggattgtgggtttttacttatttgtttgtctcaccagttgagaaactccagtactggtcacctatcctgataaatctgcctttcagaaaacctgcaagggctgtttttcactattatggcaagagacatgtattaaatggaacagaaaaggtaagttactcaaaactgcctttgggagtcagcagaaactgaaatggca

SEQ ID NO: 52155 - DNA, 1994 bp, Homo sapiens
atcaaggttttatattaattacatgagccaagaattgtggtttcatttttaaaatgtgaggacctactggtttaatccttcatacttcacacatatgcttgtgctggaactatgactgtaaatcaatagcaataccatcctctgttttggcttcttcccctaacctaaatagttctcagatttacttttctctccatctccactgccacactgtcaccttagtgcaaatgaccatcctctctggccttttttctgtaaggttttaatctcccaatatgtattctccagactgcaggccagtgagcttttcagttgctgttacacccatgcttgaaaaccctttaagttttcattgttctcaagataaagaccagaatgtggtctggtccaccacctcacgtcaggccagccctcactctccactccaggccacactttctcctcccctcctggttcccgcctgccaactggctgggtagccgttgcttcccgcttcctgcaaagttctacatcgcacccatttcgcccacttcttcagatttcaggagattgttccttcctcgaggaagccctccctgattaggccaagcgccactccacgtcatacagccccacatcaccatgggcctctctttcagggctttgttttatgagtatgcaatccagaatatgacaatcttattgacatgcgtcaacgcgagcttgcgctcaatagctatttgccgaaggaatatacggactagcggcccgaccactcctcgcccctcccctaccactgccgcgcacatattacgcattaagcaggcgccgcgagtacggacatcgcgagcgcctgcgcgaagggctacgcatgcgcagaggggccagcccgctgacagattctcggtggcggcggcagcggcggcggccctggactgcggggaatgggaatcctaggtccctgactgagcacctcccccgcctccctgcccccgacatggctcaggagaagatggagctagacctggagctgcctccgggtacgggcgggagcccggcggagggcggtggcagcggcggcggcgggggcctcaggaggtctaacagcgcccccctgatccacggcctcagtgacacttcgccggtgttccaggccgaggcgccgagcgccaggcggaacagcacaacgttcccgagccgccacggcctgctgctgccggcctcccctgtccgcatgcacagcagccgcttgcaccagatcaaacaagaagagggcatggacttgatcaaccgagagacggtccacgaacgggaggtgcagaccgcaatgcagataagccactcctgggaggaaagtttcagcctgagtgacaacgacgtggagaaatccgcctcccccaagcgcatcgatttcattcctgtgtcaccagcaccgtcacccactcggggaattgggaagcagtgtttttcgccatccttgcaaagttttgtaagtagcaacggattgcctccaagccctattcccagcccaacgacccgatttaccacccggagaagccagagccccatcaattgcattagaccaagtgttcttggaccattgaaaagaaaatgtgaaatggaaactgaatatcagccaaagagatttttccagggcatcaccaacatgctttcttctgacgttgcacagctgtcagatcctggtgtgtgtgtatcttcggatacccttgatggaaacagcagcagtgccggatcttcttgtaactcaccagcgaaagtcagcactaccaccgactctcctgtgtcacctgcccaagcggcttctccatttattccactagatgaactttcgtctaagtgattcactcatcctgagactttctttttgcagtggagagagagaataatctagttggggcaaacactgaactttgtcaattaatttgaggctatttcctatttgaccccttttcttttttgaaattccctgaaatgatgttattctagagaacttc

SEQ ID NO: 52156 - DNA, 2155 bp, Homo sapiens
attagccaggcatggtggcgggcgcctgtagtcccagttactcgggaggctgaggcaggagaatggcgtgaaaccgggaggcagagcttgcagtgagccgagatcgcaccactgccctccagcctgggcgacagagcgagactccgtctcaatcaatcaatcaatcaataaaatctattaacaatatttattgtgcacttaacaggaacatgccctgtccaaaaaaaactttacagggcttaactcattttatccttaccacaatcctatgaagtaggaacttttataaaacgcattttataaacaaggcacagagaggttaattaacttgccctctggtcacacagctaggaagtgggcagagtacagatttacacaaggcatccgtctcctggccccacatacccaactgctgtaaacccataccggcggccaagcagcctcaatttgtgcatgcacccacttcccagcaagacagcagctcccaagttcctcctgtttagaattttagaagcggcgggccaccaggctgcagtctcccttgggtcaggggtcctggttgcactccgtgctttgcacaaagcaggctctccatttttgttaaatgcacgaatagtgctaagctgggaagttcttcctgaggtctaacctctagctgctcccccacagaagagtgcctgcggccagtggccaccaggggtcgccgcagcacccagcgctggagggcggagcgggcggcagacccggagcagcatgtggactctcgggcgccgcgcagtagccggcctcctggcgtcacccagcccagcccaggcccagaccctcacccgggtcccgcggccggcagagttggccccactctgcggccgccgtggcctgcgcaccgacatcgatgcgacctgcacgccccgccgcgcagtaagtatccgcgccgggaacagccgcgggccgcacgccgcgggccgcacgccgcacgcctgcgcagggaggcgccgcgcacgccggggtcgctccgggtacgcgcgctggactagctcaccccgctccttctcagggcggcccggcggaagcggccttgcaactcccttctctggttctcccggttgcatttacactggcttctgctttccgaaggaaaaggggacattttgtcctgcggtgcgactgcgggtcaaggcacgggcgaaggcagggcaggctggtggaggggaccggttccgaggggtgtgcggctgtctccatgcttgtcacttctctgcgataacttgtttcagtaatattaatagatggtatctgctagtatatacatacacataatgtgtgtgtctgtgtgtatctgtatatagcgtgtgtgttgtgtgtgtgtgtttgcgcgcacgggcgcgcgcacacctaatattttcaaggctggatttttttgaacgaaatgctttcctggaacgaggtgaaactttcagagctgcagaatagctagagcagcaggggccctggcttttggaaactgacccgacctttattccagattctgccccactccgcagagctgtgtgaccttgggggattcccctaacctctctgagacgtggctttgttttctgtagggagaagataaaggtgacgcccattttgcggacctggtgtgaggattaaatgggaataacatagataaagtcttcagaacttcaaattagttcccctttcttcctttggggggtacaaagaaatatctgacccagttacgccacggcttgaaaggaggaaacccaaagaatggctgtggggatgaggaagattcctcaaggggaggacatggtatttaatgagggtcttgaagatgccaaggaagtggtagagggtgtttcacgaggagggaaccgtctgggcaaaggccaggaaggcggaaggggatcccttcagagtggctggtacgccgcatgtattaggggagatgaaagaggcaggccacgtccaagccatatttgtgttgctctccggagtttgtactttaggcttgaacttcccacacgtgttatttggcccacattgtgtttgaagaaactttgggattggttgccagtgcttaaaagttaggacttagaaaatggatttcctggcaggacgcggtggctcatgcccataatctcagcactttggg

SEQ ID NO: 52157 - DNA, 722 bp, Homo sapiens
cttatatccaccttcctccttttctctcagcccatcatctagctacacagtctccagggtaagctttcagaaaggcaatctcttgtctgtaaaacctaagcaggaccaaggccaagtttcttagcctgaaaaatgtgcttttctgactgaactgttcaggcactgactctacatataattatgcttttctaccccctcacactcaacactttgactccagcaatcccaaatccccagatccctaagtgtgctgtgctattttcacgtggctctcagacttggccagtgctgtttccattttggtctttattccccacatctctgcctggggggtagattctaccctgaaaaatgttcttggcacagccttgcaaactcctcctccactcagcctctgcctggatgcccttgattgttccatgtcctcagcataccatgtttgtctttcccagcactgacctaccatgtgtcacccctgcttggctgtaccttccatgaggctaggactatgtgtctcctttgttgactgctgttgccctagcatcttgcacagttccttgcacacaattagagctctataaatgtcaaataaatgtgttataattatatgtttaagatagttgttcaaataaactctaaataaccccaactccaagagtgttagcaagaaatataaattttacagaagaatggttggaggtggggagggtgtccacggagtg

SEQ ID NO: 52158 - DNA, 662 bp, Homo sapiens
ctgcactccagcctgggtgacagagtcagactccgtctcaaaagcaaaacaaaacaaaatgttattcataatgctcgggttgtaactatagtacttatctagcaaaagcttgcttttttttttttggctttgactaattgaaactgcaagagcttactggcagagtggtgtactggtcaatatttaaccaattctccaaaggggaaaaaccctgatttgtatgtaggatttgtcagtttccatggtataaatagtcttcccacagctggtagggtgaccaacttgttctggtttgccaggggctttcccatttttaggcctgaaagtcctgaatcccagaaaattcctcattccccaggaaatagcttgattggtcaccctaatggctggttgcaagctcccgatatgacagaactggacgagaagttgggcagagatgtgcacatggtaccagcctatgccaggagcagcggcctccagcaccccactgtcagggagtccttggcccagtagaggatggttagcagggcccggctgttgttcatattagctctcaaatttaccaccaaccctgtattagtttcctggagctgctgtaacaaagttccacaaacgggggtcttaaacacagaaatctattatctcacagttctggagggcag

SEQ ID NO: 52159 - DNA, 2959 bp, Homo sapiens
cgggacaatcgcttgaactcaggcgaaggttgcagtgggccgagatcgcccgtgccactgcactgcagtctgggcgacaagagcgaaactcggtctcaaacaaaacaaaacaaaaaaacccgaaaaccaaccaaacaaaatctgatccccgaatgctcgaagaaactgatttgagtaataataaaactccggtctcccgcacagctggctctgcgtgaattactctttcgccattggaattcccctgtcttgacaaatcggctgtctacgcagccggcaaggtggacccactgggcggttacagcattattaggtatattaacactgttgtgcaaacacccccactctcggtctccagaactttttgtcatcccacattgaaactctaccgattaagcactaagttcccattcccttcccagggtttttaacaaggccacgttaaacagaaggggcacctgcttgccaggtggaggcctgggcactggcagggttctgccctcccgactgagcaggggctcccgaggtgactaagcaggctctctgggtagtgctcccgccctcacctattgtccgggtggaggaaccggtatttccggatgggggcctcagacccagtgatcccggctaagggtgaggctggcgggggaggggaacggaagcgggtcgtaaaagttaactttacactaaaatcattaacttttctcacaccccccaataaaagcagtcacctcccccccccaagagccccccacgcacccacagtggcccacaaccatgcttcccgggggctttgaagggtagaggagctgacatcctccttgcccagaccctggaaaggattaggaagcggacctgggcacgaatagagaaagaagcccagcaaattcctcttgcaccagctctgggaggaagctcagctgcagttctacgtagaagaaaagaggcggcaaagtaggcgcgcgggctccagtgacaaaggtctcccaggcagccgcggcccctgccccaccgctgagtggcgtgcgtgcaggcccaccctctccgcctttcccgacaccccaaagtagcgctgcgagcagctgcgtctccctcccggggctcgcgcgcccagaaccctccggtctcaaggaagcaggtgacagccgccgcccacccccttcccctccccgccgctgctctctggctcgccaccgcccaactccccctgcccccaccctggattttttttccccttctctcaaacctctaaacaggaaatagcccgaatcacaataatatacgggagcagccgcggaggccgctggcgccctcccattcccggggagcttcccgcactccggcttgggtgaagtgcagccagcgacgcgcgcagggagcgcagggggacaccagcccagcagctagcgccgcgccgcccagcgccccggagagccgccttcgccctcgcccagcgcccgacaccgccggccgcggcggcggccgccaccggctctaggcaagtaccctcctctctctccctccccggcccaggtgctgcctgccgcacgccccgggagagccgccgaggcgcggcagcctgtgcccaggcgtcgccgggatgccttccctcctgtcccgactttggccagggaatgatttggtgggcgcgaattcgcgctggtgccctgggtcgtttgtgcaggcggggtgaggggcagcgcgagtaaacgggttgacatcccctaggtttctctgcagagtgcgctgtgtacttcatcgggcatttactttttcactgcttcctcatcgcccccggggcggcagcgcctcacagggtctctctgggggaatcatcaacaggtgtgcctgaacacgcacctgcggcagccacaggtgtctgggagccaccttttttcttctccctggcctggcaccctttcactcaagggatggaaactgtttcactttctgctgagcttctcttttacccgattaaaagggcctttgaatttctgttggcgcagccaactgcatcgggtgggggcaggagccggtgccttggagtgacgcgggcggagcgcggcgctggttattggaagctggtggggctgcttgagtgcccgctgagcctccgccgcggggcttgaaaactccgcactccagaaagcttgaccgtacagccctgggggtgctcgccctgcccgcgtggtccgcaaaacggggatctcctccgcctaacgcggcagagacttagaaaacatttaaacaacaaaaaaattttcactttctgacccatttgtaagggaggggccgagcttgtcagcatatacagggcgttgtaagtttcccagggctgcattgcaaggttcttctatagggagctctcagtcaaaaccgagttggagatctttatgttggaaaaaggccactgaattccaggcattcttcgagcttgagaagggcattttcaagactattttgaagtttgcacgagggctttctgcgcaactgagtatctcaactatccttattgtctgtggctacttcccagtcccagaggtgggcgagttccgtagggaggcctccgcaggcaggtcttctgtccaggtttctgaacgcatttccacaaacgtggtcggtaggtaagttaagcccttaaccaatccacttgagagatactacctatcctcttcgtttcctggtgaggaacctgttattctagttgctgatagggtgacattctgggtactttcaagtgttcacgtgtcttgccactttaaggtcacgggtgcattacctgtcgaccttttgaaatgcaggatctcaggccccacccagatctgctgaatcaggatcacccaagggatccgtttgcacattaacgtctgagaagtactggcctaggtatgttggagtgaagttttctgtccagtgtcaaggagtgctttacatttccatccggttatgtatttgaatc

SEQ ID NO: 52160 - DNA, 1041 bp, Homo sapiens
gttctcctaaaatctttagatttctagataggatctgttgattattcaaataaattggaggggtactatagagtatggcaaagagagattggagctagcattgtctgttggaggaaaggctctttctgactctagccagcccctcctgataaatacctcccttgttctggttccctgtacctgcactatgaactgcatgcctttccaacatcaatttgattgcctaagtcagtgccttactccagagttctttcatgtgtaaacacttaagcttggctttctgggacgaatcagccttgggtgagcttgagtgatgtggatttttttcccaggcatctcacgtcgccctagtttcagatccagcaaacactcattaagggccttttatgtgccaagcaaggggcaaggtgctttcacccatatggttcctcctcacaacaaccctaagaggaaagtattaactagctcccatttgtaaataaagaacttgagattcaaagattttaaatgattcctttgtggttgcacagcccctgacttccaagttcagtgagatttgtatttctatactaattctacagagcttgaagacttaactccttaactcagacgagtaaaaaggtttctctctaaggccagtttggatcaattgctaggtggctgcctggagttaaggatttgcaagtgccgctcaagtttgttgagcaagaatgttgtgatcgattggcaatgtccggcgtgggtggagcaggtgtctgccaaaccgctctggacctgaggtttctaatcatcagcctctactcattctgctctcctctgccattctggagtctctcctctgatgagcactgtttgcctgaggctggatttttgcaactttaaggggctttgattatcacctttctgacttggcaggatcatctttgccttcagaaataatgctaaggctttgggaggctgaggcgggaggatcgcttaagcccaggagttcaagagcacctgggcgacatagaccgaccctgtctccattaaaaaaaaaaa

SEQ ID NO: 52161 - DNA, 679 bp, Homo sapiens
aaagaagtgagttgaaggtgaaagctcgaaacttttacttctgtgcacctgggagcccctctatagcttctttccctcttccctaggggctcctcggtttacaggaattctcagggaaatcactccagcagccaaacttccatactgggatggacagacccagagcagtggcacatcggtatcgcctggagggcgtgttaaaacacggattcctgggccccacccccagggtttctgcttcaggcagtctggggtaagtcccaggaatttgcatgtctggtttccactactttgacaaccactaacctggagagtacttgtaatggctggtttagagcatgggcttgtttacagatggtgtgtgtggccagtttctctatctgtggggaagggattctgtcctcaaatatttaatgagcatctcgcactgtgctgctgagggaaatgtagaggaatattaagcttgtccctggtagactttggagcctaatttggaatcagtaaattgcattgctgtgtgtaaagtactgccctcacccccttaagaggatgtggcagaaggcctgaagcagtgactaagtcaggggaggattcctgcggcaggtgatatttgaaaggaaacctgaggctaaaaagttattggctatgtgcacttatgggggaagagaaactcggagca

SEQ ID NO: 52162 - DNA, 536 bp, Homo sapiens
taatatataataactaaaagtgaaagcataagggggaagcagaacgttagatgccgctctcctggaggtaatcacaggggccattgagtggggtgattattgtgggaggaagcctgcaggtgaaccgggtggttattgttaactggtgtttggactgaggaagatgggtggagccaggagaggagatgaggctacctggaagtgggggcggggacgggggaggacacaaggcctttactgaaaaaacatcaggtccttctggcggagttttagctgctgcctcagcactttagtcatctctgtagttgagcaattctcctaacgtgtcacaatgtgtttacatatcgttgtcttcaacacactgtgagcaggctcccttttataaattgtcattatcttctgtatagctaccccagggtatatggtaggcattcaagaaaggtttgttaaaggagagttacgattccagtctactttacagtgtacacgttaactaaattgtttggtgaacctgtaaacttttctctttttttttt

SEQ ID NO: 52163 - DNA, 8579 bp, Homo sapiens
ttttcagggagagagcccagcatctgcatctcctctgggacagaccacaccttttaccttctacttgtgagcctaggacgagttttgctttccaattaagggaagagcagggcaggcaaaactattctcttacaagatggttttttaagatttcaaacccaaggttatatttttaatcggtacctgtttggattctccaaattaatttatatgctcttaaaataaagacacttaacgtcactgcacaattctttgcacatggaggacttcgaaaggaataagcacactgaattgcattagatgaatcctgtcagataagcacttgtgacctactggcaaccttttataagctgatgatgggagaggagtttcaatctctttattggagttgttggaaatgtgccaaagagataacctggaatatattgtcctgaaaagtcctgttttaatatttaatacgaacatcttataaccctcggaattcgggtaggcagttgttgggctgagaaatgtggggtacaaggccgtgtatgtgttggttagccgggcaggcctctagacaggacctaaaactttgaggttttcccagttcgactcttcgtaggagaactgaagctgcctgtgtgaggccctgcgaacctcgccaaaaagtcttcctacaggatgcccccgcgacctcaccggggaaacaccgcggacagtcgggccagcagcgcccggagctcactccaggtctccaaacttgcagcacttcccagagcgcgcgcgctcggagcgggacctgcttgctccagtgcacgccgcggagcgaaccatcgggctggcgggggtggaggggtgcaggcgtgggggctgcgggccgctcgggccttgggcttctcctgccgccgccgccgcctcccgcccccggccaggagtcgcgcgtgacgcggttcgccgcaggagcctcgaaggcgcggcgccggcgagcccttccccggcaggcgcgtgggtggtagcggccaatttgacagtttcccgggccgggcggccagcgcggaggcgccacgctcgggtcgggggcgggctgacgccgccgccgccgcgggaggagggacaaaggggtgggtccccgcgggtcggcaccccggcggttgggctgcgggtcagagcactgtccggtggtgcccaggaggagtaggagcaggagcagaagcagaagcggggtccggagctgcgcgcctacgcgggacctgtgtccgaaatgccggtgcgaggagaccgcgggtttccaccccggcgggagctgtcaggttggctccgcgtaagtgcctccttgtgccgcgcggttgggaggagggtcgtgagcgtgagcgtgggagcgctgggggctctgctcgcgtgctgctctgaagttgttccccgatgcgccgtaggaagctgggattctcccatccggacgtgggacgcaggggaggggtaggtttcaccgtccgggctgatgactcgtggcctccggggctcctggaacctttactctgaagtcacttgggctggagattaaggcgcgagtaggggacactgtcttgaacccggtgtcctggatttctgctggcttggaggcatctcgtgtctgttgtgtcgcttgcatgtctttgtgttttccttctctatttcaaaccacactcggtattgatgcaaagttacaggcttgtgtacgtgagagaaactgaaaactcatcacagagcagaatcccttttccctttcaatcagctgcgtctgtaatagaagtaaaagttgtttttttttttttttttttccagtagggaatggggatggaggtttggaaggacccacaaaagaggagtgtgatgaatgctttgtattctagtactagcctacctgtcaccagttctttttatgtcttcatttgtcaagtttctgcttttacacggtagtttaagttataaataatcagggatttctaccacagggttttaacattcttgaaatgtggacaaacttgggagtgagtgctcccgcgcttagtaatggaatacagcctcccacctctatttcagcttcagttcttaggctaggctgcttttctggcagctgtctggcctgagtaatgatggttgtggtttccctgaagttcccagcggagagtcatcccatgatagaaactgccttgcgcttctcactcacgctctcagcccggggaatcccagcggggaggagggagggaggtcgttttcttcagctccccaggtggtctgtgctgggtgtgctgacggtccttttgggaaaacaggtccacctttgccagcgtaattcagaaagagatgtaattttctgagagcacacacctgggcaggagatcgcttgaagtgagaaattcgtagtggtaaatgtatttgtagcaaagtaccactgcatatcctgcttgagaggatgaaatttgattatttagtaagttttcatgaacaactccacttcagtgtggggattacgcagatgagcaagagcgtggctctgtcacacagtcccgttgggaaagcctgcaactcattaagaatccgatgagtgccatttagaaatgtggacagggtactggagcttcctcattgtggggagatggcagaagcggaggtgctttactaaagcaccggtggcttttgaggtgtttcttgtgtttttttcagaactacttctgcagtggggccactttatttcttttcagagctacttatgcagattgatgaaggggaactttcccctctgaaatgctgctgtaactttttcagtaccatccagatattataatactgaatgagcccctactcctgccagtcactgtgggggatacaaagatgaacaagattcaatttctgcatttaggggtctagtggacctgaaactgttagactttactctgcaatctgtgtcgggattcctgagactgagggagggaatgtatgatgccgatgcacactctgcaatacagaaatttagcaaagagtgggattggtcctatatgcattcccttcaggggattcttgctgggaataaagggcatttgaacagttacctcacccgagcaagccactatagaaaatggggccagtaatgcgcccacctcaccgggctgagtgaggtctgaatgaaatgacagagagtacaaggcatgtggtggatgctacgtaaatggtggtagctagtaataggaacaaaacgggtgctgaaaactcttaagtgttgggtcctgggttgataagggaggtgagatctaaagatacaagtaggaggtgccaggtaggtgtccaggaaaaaactgaaagagttgttgttcacactctgttaaaaggccttgaaggccataacgaagctttgggtggggggaagtcagaaatccctcatgtattaaatgacttgactttccctacaaaagaagcgaaccagtttcccagtaaacatcccaccccataactatttttgaggcattcataggcttaagaccaatgaatttttacatcacccccgggggaattgcatttgcaatgacttctgcctacatttaacttttgatctagttctttgtacactgacaaaagttcacagccaaccatttctcttcaggacaagtgtgagaactttctgcatactgctgaaggcaagggagattttgagtttagcaaggttttctctccttaagaaggttatctttttacgagacacaagttattgaaactaggcggggccactttagtcctgtgtacaataatatgtgtagtaatataaatagtaatttaaaaagtcatgcagacttggttggggagaggcatgaagtttgggtgtggtgggggcggggtgaagcggtagaagggttcgcaatcactgctgaaactttcaacatattctaccaacaatatgagccaccagggaattccttgcctcatctctagaacgaatcccattaagcagttgtggctacagatgaatttatctaggttgagagctgattcccaataacatgcctcattgatttgactctaagcagtaatcaggggcccaacagttgttggaccaaccagccttgattttccagagaaggtgatttggtatatggtagtgtctgagggtgagattgccccagatgggagtggagggaagcagaacagttttctctggtgttttactgagtttttgtcttgatcctaaatccaagggttagggtcagaaacacagactcagaggttagatttaacacccatttagtgggttaaacacatcaatggttatgtgaactttgttaaggtttaaaaagctatttagggcctgtttctccctcataggaatttttgcaatcagcctttttagtagatgcccatatagaaagtgaatttgggagggtctaaggtggtattactattaaactttttgaaaaggctgtgtgatagcaatggaaaaaaaaattcaggcatggaaatccaatatgcagtattgcagtagctagttttaattttatttttgtttttttggttttttttttggagatggagtcttgctctgttgcccaggctgaagtgtggtggtgcggtcttggctcactgcaacctctgcctcccgggttcaagcggttctcttgcttcagccttcaaagtagctgggattacagaagtgagccaccgtgcccggccactagttttaattttggatggtacctaggaaagcagttgagctagtatgctgcatacattgtagtgtgagaggcagagttccgagttggagagtgtctgcttccactttttccatttgattaggaaaagcacttcttagaactgggtgactgacagctagagccccagaagacctgcacaagctggggcaatggctacccataacagtgacggctccattctgttttttaaagggattggtgtctctatcatccagctggccattaaacaaccaaagcttcatcatcctagataacctgtgagctctcagaggagacagagtaaggactatcatacccccaaaatacctaatcatttaataaagcattttctctaccttttatgctatcccaaaacagtgctttccaaagtctggtatacagacagacttacaggtggtgcagagagatacatattctatttttcaattatgatgcatgaatattatatgttaggaataaaaacagaaaaccagctaccacatccatttatttcatggctagattgcttagaatgaggcaaaaataaatattaagtaaagcagtgagtttgctttaagaaaaattatcaactctgggaatgagtaatatgaggctaaggcaaaaatggtaaagctagcccttgacatctgaggtgtgcataatactgcttaaaatatgagtgtggtgcttacttatagagagcctggtataccttgaccacgccttcaagaaagtcaaacacagaatggcccagaatagccaggaaagttgaatttgatggactttctgtcttaagcgtgtgcatcctgctcttatccactcagatctcttagatgtggttgcagacagtgtatttgtagagctagctgtttgttttaacgtctggcccaattctcattcctttctctgcttccacaagccattctgcagtttttaaaggtctgttggtatgatatttttgatatgatagagtgataggggaggaagtattttgacactgatgaaggacatcactgtattatcaagtgactcttgctcatgattcattgccgaagaatgtggacagccaaacagcctcacctgtaaatgcatttaatttctcaaagtctttcagaagaatgccaactggatgagtttttttttcttattttttttttaatatgaagcttgtattggtctgtaaaataggctttaacaaggattttcgtaggaacaggaagccttgaggtagaaaacaagtatccctgctttgacctagagagatgcatgctcatggcaggcgaatgaatcaaggagaagagaaaatactgtttcagtagactctctagtgatgtgtgtgttcacaccatttatgagaaatcctaagctttcaattagtaacttgtactttagtcatttaaaatcagcacagatgtttgtttagtgcctctgccagatggttaaagttaaatcaggttttttaacctgaaaaacgtaatgtagctttccttaaccatttacacaccattgtatattgcagaccatagtcagatacattttgttataatgaatgtttattttaccttttagctcaattagaatatcagtggttatggtttctattttgttttcctacagttactgtatgggggtgcagtaacagcggtggtggtgaaagtaagttacttttttctttttctttctttttttttttttttgagacggagtctccctctgtcgcccaggctggaatgcagtggtgcgatctcggctcactgcaagctccacctcccgggttcacgccattcagcctccccagtagctgggactacaggcgcccgccaccacgcccggctaattttttgtatttttagtagagacggggtttcaccatgttagccaggatggtcttgatctcctgacctcgtgatccacccgcctcggcctcccaaagtgctgggattagaggtgtgagccaccgcgcccggctgaaagtgaatctcttaatggatcttccatgaatcaaatatttgtgttttagtaagttaggctgaccaaaagatttcgaatcatacctttaatcatggcaaggatcttatgtcacattcttgagtacacatgttcactaaattttacctatatgtgtatgtgaacatggacttcagaattaattagtgtggtaattattatttctattgtagactttaatcagccatattaaatatatgcattatgttcacagagaaaacatggtatcatctttggaaactttacagtatgctctatattatagataccctatataactatggtactaaacacacgagttagtgacaagtcaggcatttggagggaatgtttgtaacccattgtgggagagagttattagaatagttattcttactggtaggtaacagttatggctgtaatgaatagaatgtgactaaaatccagttatgcctttgccatcgtattaaaagctttggtggagacgtgagaacattgcagatactttggattttgtcacttgagttgaaggtaaacagagaaaacagtactttctagtcatcagtaggaattaactcttccaggacatgtagcttcaaggaccttctaggttcttctgagggggaaataatgttccacttggggccatttttttccatttgttgagagtcatttgttttcagagtattaaaggaagtgttccgagttctaggttgtgtttctttgatgcctactaaagctgagcacacctgagaccctgggtggagctctacaatgggaataggagtaagtaatgtaggcttcgagagacaatcattctgctctcagtccttggaagactgttcctaggtatatatggcaaagcagatgaaattatttgagggaattaattagcaaaactaaacatttctgtttttgaaaggaatgaatcatttggaaggaacttcctggtgagctcagttttagcagcctggtttctgcgttacccttctgcagtctggctgaatcaattgtgttcttgcctgtgattggtgaggatgcacatgctagtatttattctagcccttatcacttcccatcagccctgagcccctccctggtctgagtcatcttggtaaccccagaagctaacagagcaccaacacatccactaaacgttggactgacttgatttggggcaggcttgttgtataagctagtaggaataagagactaattgagaaattaggacagtggattcctgacatttatatagtgagtagatgatcgtttgttagaattgcgaatttcatccagagaattttgtccaaaaaaaattatagaatttcatctagaccatttttgtaatggcatggaagcagcattagctgcaccactgattagctgggtggcttttgctgtcttgtgactctagtttgcaatttcttttttttttttttttttttttttttgaggtggagtctagccctatcgctgaggctggagtgcaatggcccgatctcagctcactgcaacgtctgcctcctaggttcaagcgattctcctgcctcagcctcccaagtagctgggattacaggcacacgccaccacaccctgctaattttttgtatctttggtagagacggggcttcaccatgttggccaggctggtctcgaactcctgagctcgtgatccgcctgccttggcctcccgaagtgctgggattataggcatgagccacctcgcctggcctagttctcagtttctttatcagaaaatgagtagttacagttgatcatctcaaagtcttttgtgcttaagattctgaaggttttgaagtttgagtataaagcctagagaacattctaaattatttccattggttcttctcatcttaaaatgtttttgtgctc

SEQ ID NO: 52164 - DNA, 713 bp, Homo sapiens
tgaagcaccttagctcttgtttaataagcaacaactataataagccaaaggtattaaacaaacagatgatcccagttgaagagaaatacaaaattagccttcatcagggaattggataaaaattgtgccctgacttaaggaacattagctcagtgagtgacaaaatcaactggtgaaccctgaggtatggctttttgagagtccacttctgccggttttctttagatatttgttttgggtttcattttggtggggaggaagaatctccaaggaaagagagaactgttccaagctaccagctctgggttgtgtgggatgtggaaatggcctgctttccatggcttctgcatttttggtagctgagtcacccccaaactttctgagccaggacttagcttggggaaagccccactcaaggagccaggactgtaccaacagaagcgtttggaatggcctttgctattttgagatgtgtgtttagtggagagaagtcctatttacactctggctgggccagctccttcagtgtcctcgtcgtgtgcatggggcagcacagccaattgctcttgaaatagaattagtggccacaaattaagcagtgtgctgtgctggtgggaggctgtgggagggaggaggctgggaattgctatccctggggaaatcagcctcagaagagaagctcactgctctcctggaaggaatgtttctcgaca

SEQ ID NO: 52165 - DNA, 387 bp, Homo sapiens
gataaatgcttaagtaactagatggctgtctttttagaaaagctttttacagcaattcctattacttgcccccccccattcatatctcttcctccatttaatccataatggaagaaacaaatttatagatcagaaaaataggatatctgtttcagaatgtctggattcctgtaatggcttctgacctcaattgtgcaagacagataatgtgacctcaaagccacagtcccatgctgtcaatcttgttcacttacaggttataatgttcttggcctgtgcccacacatagacagattccaaggaaaatcaaattttctgttctattttaccagccttttaagtcaaacctgttttaaatattttaattgggggcacctgtttctaacc

SEQ ID NO: 52166 - DNA, 2128 bp, Homo sapiens
tatagtgttatggaaacataatcattattgccaaccagatatgaagaagaacgatctcatctgggatatgaacttttaaaagtcttccatctattttttaaaaatcaatgttaaaagaaaacaaaaattaactaccttctctacgggacttctaacatcatatattctctgatttggcgctattcactgagaaggtccctttttgactacagtaagtgtgggtatggggatatgtttaaaagcaatccaaattatatttaaatgactgtagaaatgccaagcatccaagacacacaaatatcagacctaaacaccttttgagatatggtcttatgtcatttatcctttcaggaaattgaatataattgaatatcactgtcatcgcatcacacccagaaaaataaaagccccaatttcataagttcactttgagctcagggatagtatattcttacaaagttaaaaaaaattaaacccttaatgatcctatgtcagagaattgcaggttttcttttggcctttcggaacatggtttccctttagtgctgccttcggattgctctgtggatgagggagcacacatgtgacatcctcatactcaggctaatgctgagcctgaaaaatccctaggcctgggggatgaatatgaagacgggagctttcaaacttcagaaaacttcccagaatgctctcacagaatttcagggcctcacaaaaatgatgcaaataatttacgatgattcaagagagaaacctaagtaactaaaccaaaactgtgagcttgtcctgggctttgagcccaagggttcatgaaggtttatgagccctggtaaccctttcccaggcagtggaacacaatgactgtttacgcacaggatccaaagtccagacacaccctcagagagatgtctgggcgttctctggcctccagaaaagcctccttcaaggaaatggcgatgcacccaggtggaccctcagcatcacctctagccagagagtgagtgcctctttgtgaatgagaaatgatgcctgatttggtgccccatttggatggtacagtctccagctggagtgcagagcttggcggaactttggccccacctggccttagagtaggtgcccttgtgcagtgagtaacctgcacaaccatgtgtggcagccccacaaagacaccggtttccagagagaagtatggtgccagcctgccaattcatagcctgggtctgcactgccaactgtgggatcttgggcaagttaccctcttgatgcctcagttgtctcattataacatggggataataataaaactcacttcacaggattgaagtgaggattcaattagttattacatgggaggtgcttagaacagaacctggcagagtaagcatgcagtaactgttactattactagctcatccacgtaatagatgaaaattgctgggaaggtttttcttattaaaaaagaccaaaatttctgccttagttaatgttcattcccacttgaatttttctttttgaatgtatgaagtgcacagagacagaataaggagacttgggttttggatccagtgtgaccactgctaagctgcatgacactgggtaaagcccacagcttcgactccaatttcagagtcctcatccacataatgagcaaagacgtgaggaggatttctgagaggctcccagctatcattctttgagtctaagatcctaagactgctaacattgtgaataagtgactttgtggcctttcttcccttccattgtcttatatctcagtgcttcatatgccccaatgctaaaagattcatgaatgactcagtgctcagtattttcttttcagctcttaccttcaacgtaggttgggaatgaagccaagctttttcttgactgtaataaagacaaagaggtttcaaaaagagcaaagcataatgaaatatgaattaacacaatcatccatgcaacatgaaaaataaatacataatcagtggcagttaccaattattgatcatttttagttagagaaagtaaagtgcagataaacatgcatttattagtaaaggttacctaaaacccagaatagtccattcatattttagataatctagaaatcttacatttcacaatc

SEQ ID NO: 52167 - DNA, 1361 bp, Homo sapiens
aaataaaatacaatttacagcattgttgtatttacagaatacaattcacaaaattgttgactttgaacatcttaagattttgattttacattgccaaagtgtagggtgtgatatctttagattctagtcccagtcttttgtatttactgctgcggtactctaaatgaacccactaaatagctagtattcatgtcttcccctgcaaaacggtattcttgcgaagagcttcagcagtttctgacaatttccaagctgcagcgcctgggtccctggtgatgcacacatattactcttggaggggcctctgctggggtcctgtggaaaaggaagactcagctccatttccttggcattctgcctgcagaggccagacagctggctgtgaaatgggagttcctgaaactcagcatgatgacttagaaacagcactttgatatcattacattcctgttcagtgatatttcctctcctttaaccccagttatgacaccttctttgaaactttgccttattaggtaatacgaaattggtgatacacaaacatttttgtcctacaaaaatagtaatttatttatgtttgtatatgtgtgtgtacttatatacatatttatgtatcttcagataaatgtctaattaataaaacaagtcccctagatatatttaagacagacaggaaacttttacatgaagatggtgaacttcaaaacatggtgcatccccctggccttgcataggaatcacctgggtccataccgccctgacgagcaggcacagggatctgtattttgaaaaagttcccagaatagttctgagcatgcccaagtttgtgaactattacgacagagcctcattttgtcctatctctaatgcagtgattgcttctccaaccagtttcccctccttctgtggacctttcttcgcaaacaactttacttgcttcactccaggctgaaaattttggtcagcagaatagacttggattaataaattcacattaaaaaaaatcctctctatatatgcatagcctgccccataaagcaaatgaatgtactgatctctttttggaactctggagaaagagatcctgtgaggtttctagggaacaaatgtttaaacagcataagggtcctcctaattttttgtagttggtgtgctggttttgctcttattttaggtaatataaaaagcattcacaaaaactttacaagtagttttttgaaacatggatccatttattttctttcatagaaagtgaaaaagcagcaaaacaagcaaaaatactgcttcgtgataaataataagccaaaaagactatttgcaatattatggatagtggtcacctctggagacaggagggaagc

SEQ ID NO: 52168 - DNA, 1635 bp, Homo sapiens
agatctaatttgattcttgctcattttatcccatttgtcaaaagtcacttagccacaggagtggtttttatagctgtgcacacacctaactgtatcagtcagcctttgacccagagatgcggttatctgtagccccatatggatattttcctacttccttaaaaaaaatgtagctacatctggctgtggatacagttctcaaaatgcaagttctaatttaacaacagatgtttactgggcagcaaagacagccaagaacatgtgaggagatgggaagctgtggtctgtgtccttgaggaaatcattttaaatacctggatggcccactggtgctgttttgcttgccaaacgttattgattggttgcagctgccagaagccttctatcgaggattcggagcctgaatctgggcttaatgggtgagtgctgttgtccatgagcagtgtctgccaagggcacagaggatgggtggtttcagggttaacactgagtgggtatttaaatattaattcctttacttcagatcaagccctagcaaccttcatattgagcagagcttcactgcaccagcttttcctcaccctgcctgaactcaggacagaggacagacactgagaaaggaagatggactttgcctgaagggtaaaaatcaatattccaatggtcatgaccaaccctcctggcccgtgtcaacaaatcctattagcagtgattagtaccctattattctggcaaagccctaaatatctcctcatggtggtatgacattatctgattggctaggactcttagtgaagttcaaccacagcacagttattttttgctgtaggaaacttgctgacaggcttcctttgaaaaaccaaaagcgtgaaatgcttttcactccactgaacggtgttccacatgacacatactgattgagcctacagaatcctgtggctatataaagtaccttcagctccccactacataaacttcgcatatccctctccatgtcaccttggcagcttgacagggttgttctcaagcagctaaaatgaagacccattaggagctaaagagctatccctaaactgaatagctgaattgcttttgaaggcccctgatgggtattctgacctggatccatctttgccatgcctctgtgagcctctgatatcttatatcatttatagccagtcatttcctgagcagcaggggacacagatcaaagatggccccaatcagagataccatggatacaccccacaaacggcgtcatctccagacacccttttctggcattgtaatttactggtacatctgacctaaatcaaattcaggctcaatataggccacttaaatggtatcagtcaaagcaagggtgtcaaaatgcattttcccctcaccctgccctgcaatttcttcaccttgggattatatgtttgcatggccactactattatttctgttgcaagtgaaaagtaagagcagcccctgagattcactgataaaacatccttgacatttaccttagtgtattcagaaatattagctcactacatttctctgaaggtagaaaaaaaaagaagttctgcctcctttggaaaagtcacatagtacaaggggataaattattttgtgagggaaatatac

SEQ ID NO: 52169 - DNA, 543 bp, Homo sapiens
actacccttggggttctcacttcacacccattcagtgatttggaatcagatacatgaagtcacttgttcatacttatcattttgctgtatagaacaatccatattttaaaggaaatagatgtttttgggtattttctttccatttgcctctctggatctactgcctctcaattctgtgatccaaacgaatgatattctgtatcattgggcttcctcgtcctttcacttctggttgggttaagccaatgggacacattggcaggagataggagagaggcaggaaagtgaggtcagagtatcgattcctctagctccccccctgctgggtcatgatggtcatcagcctctcctacaggccacagctcctgccaggctgccctccctaacagctatagctactctgtgcagggtttgagaatcttccctccttttttttttttccaccagtaactgtgtcttttattttattttattttatttttatttttttattatttttttaaatctcttggccccttcaggcctacatagggttaaagctcc

SEQ ID NO: 52170 - DNA, 2195 bp, Homo sapiens
tataccctacagaaatcagtgtatatgtaaaccaaaataaacatataataatattcacagtaaaacaaccctaatgtccttcaacaaaagaattgataaactcagtatattcacacaatggattaaacagcaaaaaaggaatgaatcatgaattaatctctacaatattaaacaagaagtcagatgcaaaaggctacatactatatgattccacgcagatgaagttaagaacaggcaaaactgctctatggtgacagaggtcagagtagtggttacctttctgaaagtggttgatattgactgactgagaaggcatatgagggagcctcccaggggccagaaaatgttctatgtcttgattcaagtgctagttatatagtttttcagatatgtgaaaatttagcaagctctacgcttgatatttctgtttcttcactattcaagttacatcgcaatttaaaaacatcaaatattagatgagaatttgagttatttattatcacattggatgtattatgtgactagtagtcaaacttttcaccacttaagaataaccgggagatctttttttttttttttttgagacggagtctcgctctgtcgcccaggccggactgcggactgcagtggcgctgtcttggctcactgcaagctccgcttcccgggttcacgccattctcctgcctcagcctcccgagtagctgggactacaggcgcccgccaccgcgcccggctaattttttgtatttttagtagagacggggtttcaccgtgttagccaggatggtctcgatctcctgacctcatgatccacccgcctcggcctcccaaggtgctgggattacaggcgtgagccaccgcgcccggcctaaccgggagatctaagagacctgcctaaaattttattcccatggggaagagaagacaagtctgttaagtgggtagaaagaagctgtaagagaagaacaagagatgatggctatttgcatcccattgagtccagcccattcaataaatgtgttatatatagaaggcagtggattttgcttgagattccttgaacaacaaatagtgttttctgagcctgccagttattacttaggtttctgtttactattcagttccaaagattaactctgatgtgatgacatgggaaccatggttcacactgacatcagcagtttattgacctgtgtctagtgttaatatccaaaaacattgtgaaagacagaagtccccctgcttagcccaatgagatcaacattagccactggctgacattatccaactaatgattacaacagactgtaactattcattctgactaacatagcactttgctagataatacttagattggctaattaccaactattaagcctattttttatgaagttataggaatatacttacatatatatgcatatgtgtgtatacatatatatttaaacattttactactttagctttactttagattctactctagcttttattttgggtgactcctggtttaacgtgacaaatttaccaccttaataccatcaattatatatttttaatcttttcctcttcttttcctcttaaagagtataaaggtatacatcaggtataaatccacagagaatggaagagagaatattcacaaacaaaagattacaacacatttttctttgagatgactgaactgtagaaccccagggatgcaggcctaccaaaggatggggtggagaaggctctggaaacaggaggttcactgatccagaacagcaggatccccagccctctgctccacaccacacacatgtatcactaggagccagcagctacttctcaggaaaaagactggaatgtggagattcccagtggaacaacctaatagctcccttggttaccctgtagagaggcctgctgatggacaatgttgtcctactcaagtcctttctctctttctttctttctttctttctttctttctttctttctttctttctttctttctttctttctctctctctttctctctctctctttctttctttctttctttctttctttctttctttctttctttctttctttctgtgtttctctgtctctctttctctctttctttctctctttccctctctctttctttctttctttcctttttgagacagagacttgctttgtcacccaggctgccacgatct

SEQ ID NO: 52171 - DNA, 2813 bp, Homo sapiens
ctattgtgacagctgggagagtggatgtcaccagcagtagaaataaagtatcctgtttcctgaggaaaacgccctggctgtgtgatgctgaccaagtgggcaccaaacatttctccgtgtgatatttttcttctttttaaaagaccgccccccgccccaccgcatctctctatacgtatacacctccagagttcattctaaaagaaccaacacaaagaccatccatcctctagccataaggttttcagtgcttaaatgtggaaggagaaggtctagctagcattgaaagttgtggggacaggaagaggaatctgatcattcaacatccttctccttctggtcagacaagagaaaaacaatagaaactgcacagtcagggagtacaagacccttatggaacaggtgctaaggagagaagtagtatcacaggatggaaggccccttcaaaaccaggtacattagcaagcccagaatgtgtaacggttatcctatttccctgccatgtgcctcaaagcaacatgctcacttccacatccccatgtcatgaggccagaggaaggggaagcgagaatccctacactgggccatccacacgcaggagcagaacagacactgtgctcagagttgcagggtcaaaataacaaacactgtcccacagtcttagccggtgacatcaagtaagggcagcggcagatctctggatttggggcgcagtttggggaacgtggatgcaaccacacgcgtacacacacatatacaggattttacaaaccggcccctatcccactgcctccctccacacttcacacaccaagtgcatcctgcccacctcaccgtttccatcatcacattctttctccaggagagtcagccgagagatgagggggtcctagcggggattcctggaaatgtcaccccccaacacctccgtccgccaccccatcccctctgctgtaccttttacacacacactctcacacactcactcctgccatgactgtcatcaggcccgcctgctgcgcccgaagcccggcatctcagcgggcaccggaccccaggcgtctcgctcgcaacgccgccttcccccgcctcgctagctgatggttccaggcactgcctcctggatgtcgcctgctgcctccgctcctccgcactattgttccaggcagcccctctcgcgtccgggggcgccctttggcgaggacccgggctccgtcgggggccgcatcagcgccgggcaccccttctcacccacccctccctggctgtggtaccttgcctgacagctgggtccgcgggcccgcgggagcaggcggcgctagtgacagcgctggtgccaagcctgggaataaagctccgctccagccgctgctgcctccagcgccaccatcttctcccgccgcagctgccgccgccgccgccgccgccgggaccgcagccgccctcgcccagctccggctccgcagccgctgctcggacccctccggtctcgcggccccaccccctttccccaccctccctcccgccctccagctagctcgctggcccctcgtgacgcgcgctggggccgggcgggcctgcgagggagggcgcgggggagcgcgcgcgcgcacgccgcctgctagtagcgcccctgcctccctcgcccactcgcgtgcgcgcgcggcccgcgagcccgcggcggcggcggcggcaccgctgatgtcctccgtgggccgccggctgcagcgcccctgccccggcgccggtgggcgtgcggcacacccgcgcctctcgccttccctcgcgtccgggttccgaagggcccgccctgcctttcggaatgggttccacagccccatcctctggctcccggccggacgcaaggaggggaaaatgcagctgcatccccgaggggactgacgggggcctccaccctcctcggtggcaacccaggtggtccccagtttcctagccagcagctgtggccaacctctgcgcgaagcaacgggccacgctgcaggaccacgaagccaggcagccgcgtcgactcctgcagggtgttctctccggagtgactcccgagctttcccgcttcccaggccccttagatatcgcctgcgcttcaaattcggagattgacggcgtctccggaatgcgtcgcagtcctgcgagttctccgccagggggagagccgcgcgggcttgggcctgagcgaagacagccgggctgcagccctccaggggaactgccgagtcccgccggggacagcggagagcctgcggattgtgaagccgaggaaggctcggcttggttttcctacccgctcctcagttctggttgatcggaacttaagtgtctttgagcctagcacaggccatccgccctagatatggctcctaactcgagaggccaccctttgcggcagggaccaggtggcaagtgctgtgcattaatgaaaagctgtgggctagacaggccccgggaggcctgggctctggcgccagccccacctgtaattggcaatgcaatagctaaatcattccccctcttagaaacacagatttttccataataatgttataatgcacaaagccttgtagtttgcaaagccctctccgcacatgtattctccagtaaaatgaagataagcgctggttatccagatcccttgggaaatggatcttttaccacaccgtgtttccatattattttaagcacgtctctagagaagtctgggggtgtagcctaaagcattctgaaagtcttgttttagctttaaaattcatatgaattttgcattgtactttgtaatttttttttgctttaataaa

SEQ ID NO: 52172 - DNA, 1806 bp, Homo sapiens
ttatccaactaataaaaagcaatttttaagacattatacaagccacaccaaaatgtatctagattagcttcagcctgtgtgctaagaatctgcaacctctgatgctgaatataaactggaggaaaaactggggacagactgtgaaggcccttgaataccatgctaaggagtttcgactctacgttgaccctgtgggtatcatgaaataagatgagcatataatgtatttcagaaaagcgtggtcaaactgtttttaagaaatgctgttcaagcgtgtctgaaatgactggctactggcataatggacatgggtcacaaaagagcctggaaaaggggtagactggttatgaggtaataacatttgtctggatgagaaataatgaaggcctggtcagccaaagaaatggagagcagaagacagcttttaaagagagagctcagatatagactaagtgggggctgtgaaaaagagagaggagcaagaaaagatggcaggagggcactcctgaagagttgcaccagagagctctgtccagaaagaactccaatgctgtggtcttccctcctgcttcttatatctgttatggatttctcaaacatcagaattacagaatcagtcctctcccaaaccgaatgtattactatcacagacttaaaaaaaaaaaaatcaatctctaactaactaactaaacagggataattcctaaacatctaaggaattcagcaggttaatgaaaacaagaattcagtttggttaggaagaaaaaatctatcccaggagtaaaggtcaccttcagttacagaatacatttttaggtggatgcctaggattcttgcatgatcgatcacacagacagacattcagaaactgtcacttaaattgtcatctttcttcacttgggtcttcttataaatatatattctctataacaaataattttaaaggtgtagcattttcatgaaataactgctttttcctaacatttttgacatgtttttcttagcaagattcacctctgtgctctaattgcttcagttcttaggtttggcagaatactcttttattttcagatatctttttctgtcaaacccaaaattcactttcttatatttactgataatacaatatataacctgagtagtatgtgacaccatactaaattatgctatccacccccctcaaaatagtcaaattaaaaactgcttccatggggatgtaggttaggatcaaatcaaaagctgcttttgtacacatgcacggttgcagctgaattcaaagtttagatgccagctattcatgtgagtgagcttaaccatttaatattccgcaaggttccttatgagcctactaaaactaaaactatgtggtaagaagacacagcaaagcctgcaatagtgtccagaaggacaaaaacagagaaatggagaggacttggaagaccacagaaagggtaggttgagctaacatacataaatgggcaactatagcctctcactttttaaaattcagtttcttttctataagataatcattctatcccctaactaaagttagttatacattggttcgattatgcatttctgtgcaccagaatataaacagtacagctttgtttggcaaaaaataacttgatggagtcatatggtgttactttttacctcagtgttactgaaaactacagcacggtgatggaatgcagaattaaagagggtctaacaacagataaacttgcttacctttaagtttatccctaaacccatgccttaaagtgtatgccataaatttgggctatggctaaacttagg

SEQ ID NO: 52173 - DNA, 2477 bp, Homo sapiens
gaaaatacactcttcatttgtccaactttttttttttttgaggtcgtctcttacttgcactaaggctcccattctcaaaaagaaatcgaaagactgatatacagcaaggcatcaaagcattctttagaaggctcagcaaccactatggatactgccaggaaatcattccaaacactctcattttgaaaaaggcagcagtcataagggggagggaagtggatgctgtcagaggtggcaggtgtgttttgaggccagcagtgttttgtttttaatgtggcacagttgcacgtctccaattgtgtgccacaagggagcaaaacatccaacggcttcttaactgttttacaatcatcaccttagaggaaaagaacactttggtaagatacacgtttggcaacttttttaggcagaaaagctgaaccggttagaatacttaaaaaaaaaaatcatgagctccagtctaaagaataaaataaaaataaattaaataataataaaaaataataaactaaaaaaaaaaaaaataaactccaaaaacaactagctaaaatgaaagtaatgcagaactggatgccatgtttcttttctttgaggaggaagaggtatgggaaaggaggtacattgttgcttcttccctacacctttgtataatgtagatctctctctctctctcaatagctttcttttcacttgttacataaaagcaaagtgttacaaaaagtagactcttgcggtatcttcccacagtacttcaagtaaaatggaagagatacatatgtcagttctgcagtgtcccgttaaagagggcagcagtgttgggataaaaatgagttaacatgctccttgtaactatgaatccgcttatgctaaaaagtatcaaggtttcatttgctttatcccagactccacactgcgcccacagaagcttctcttgagaatgttctgttcacctttcaaaacacaatgtattatcggagtcactttacaattttgtggcaagtaaggctaaagtcaaaagcagcctcaaaccacctttagttagtaaactgaggggtttgaggctcattaaaagtaagaggatcggttaccccctcttgccaacgtccgggatgaatctcaagagttgtgtttacaaggcatacacggacccacatcgttgtgtgcgcccgagtaccttaaacacaggaaggatgtcgacctacgggggacgtctctggagtttcgtgaactcctatgaaaaggtggggagggacagagaaagtagttccgttttgattttttgaggtcacttctagggactcgaccgcgagcgcgtcccggtagcggaaagccgggccagcggcggccgacaacggtcccgcccgacacggctctgcctcctccctagaagggctcgtgggccaggacccgctgtccgcccgccgcccgaggtcgggtggacgcttggccccgcccccgcccgctcccgacgaccctcggaggcggcggaggcgcgcgactcacatgtgtgggttcctcctgaaggcgttagtgatgtccttcacaacccgctgcaccagcaccgccacctcctcgctggtctcggccatgttggcggcggccgcgacagttcgggcgcgcctccgcgtgagccgggccgccggcgggagttccgcggagaacgagcgcgcgcgcgcgcgcgcgggtgcttcggctaggccgcgtccccgccgccgcggccgccgccgagcacttccgggtcagccagttggcggcctgggcgtggcgttagctagggttggtggccttccagtgagtggagaagttcgcctccgcgcgggtaacggactttctaagcgtcagagaagatgctggacatttgtttgcaaagttctctcaggcctccgattttcttattttaagttttaggcgaaacctcaagacacactcccagagagtcagacaccttcctgaacccccccagcaaggtccccgggcattcctgaaggaatgttcaactgaggatgcagggcctcttaacagttagtcccgggcgtttttcagagcttgtctgctttattttcccagcctgagagatgaagaggtccagaggcattgcggcggagcgagtccctatttgaccgtgttggtgacctcctttctaactgtgccaatttttgtctctgaacttgaaagcagcctttttaaaaaacattaattaaaattcttaaatttattaaaggaagagaaaggaaagtgaaggaaaagttatttgccatctgtatgtaggaagtagaagtgaaatcgtttttagatttttcgacttcattttgtactgcatttggtagcctttgcgtcaattttggaatttaaaaaaaaggatcaaggctctgacagggtttgttcataatagcaaaaataaatttttgtaggaaaaacgagctttctagtttatttaggattttgaaatgccataactaaaatttttgtgtatcagg

SEQ ID NO: 52174 - DNA, 487 bp, Homo sapiens
tttgaaagtttacacattacactctaacaagttttctaaaaaaatgttatcttgttttagggtcaccggattgcctgccacaggttttggagctgtctttcctagacatccaccggattggagcaaaatgttagtagtccctaaactgctacaactgtacaaaatgtttcttgattcagaaggtttgtttgcaggggcaaaggtatgacagggtgagccaaggtcaacaaaatgccctttacatgacatcttcgacttgcctttaaccaaatgttttctcctttcacatgcacaacattaataaccgtaataataaaacagtaaatcctcactatttgcagatcctgtatttgtaaatttttcttctctgtaaaatttacctatttgtatcccacaagtcaatactcgtggttctgtcatggtcatttgtggacatatgcagaatggtaaaaaagggaaggcaccagatgtgtacaatcccaactga

SEQ ID NO: 52175 - DNA, 870 bp, Homo sapiens
atggaggtggggttttaatttatcataagagaataatttttcccctactgtgaactcaagcagagagaaactttcttgcaagtttctctggattgatagctgaggtttctctggtttcttttatatggaggtataacctttacagattcttggctgcagttggagttcagctctctgcctcctgtgaatctaaggccaagtctcttactctagatgtgtgggtcaaattccacatcagtttatgatttcccattataatgactatcctcttcagttctagcacctcagggtttcccttttgggcttggctatacttgtagactttgggggatgagtgtggatgtatttcatccagcatttctgtgtgtttaatggggtggaggttgggaatgttatgtaatctcagtctatctggctgtcctccactattcttcagcggtcacctggcaaagaatgtgggtcaaaaagttcatagaggcaggaagttggtggtaaagagaatccttggaatgcagagctcctgagctcagggacttgagcctgggctttcacacatatcattagtacaggagagtagtaggtggtgctaaattggaagtacagtagtctccccttattcatagttttgttttccacagtttcagttacatgaggtcaactgcagtccgaaaatattaaacagaaaatttcagaaatgaacaatttgtaagttttaacttgcaggtggctctgagtagtgccacaaaatcttgtgtcatctggcttcatccagttcaggacatgaatcctccctttgtccagtgtctccacactgtctactgtccctggctgttagtcactgagtagccttcttcattattagattgtcat

SEQ ID NO: 52176 - DNA, 1786 bp, Homo sapiens
agaaccacatttcctaggccccagcttcaaccttaggatctgctggtttttgctcatataactccatagaacttccatggactaccgagttgattgggagacaatagaatttgccttattgaataaaatatacagttgctggtagatgagtagaaggaaggaaggaatgaagcaaggaagcaaggaaacaaggaaaggagggaggacagaagaaataaagggaggaagagaggaatgaagtaacacttattgtctaccatgttccaggcactggcttagttatcttacatgtattagctcacttaatcctcacaactgccccagaatatcaacctattggaattacatactgaggaatctgtgtcccagagagtttaagtatgagtaataacacaccatgtaagtgttcaaagtgaacttgggtctgattccaagtgccatatttgtagctactttgcaaaacacgactcaaaacttatatactccaacctttgtaggccttgatctcactttaagactagagttagatggacagacacagtggatcacacctgtattcccagtactttggaaggctgaggtgggcagttcatttgagcttaggagttccaggccagcctggtcaacatggtgaaacaccatctctactaaacatacaaaagattagttgggcctggtggcagtgagcctagattgcaccactgcattccaacctgggtgacagagtgagactctatctcaaaaaaaaagaaaaaaaaaaaaagactagggttagacagtgtgatggttaattttctgtgttaacttaactaggttatttgccctgtagtttagtcaaatacttctctagatgttgttgtggaggtcttttgtaaatgtgattaacatttacaatcagttaacttttagtaaagattattccaaataatgtaagtggggctcattgaatcagtttatagccttaagtgcaaaaaactaaggttttctggaaaaaaaggaattcagtctcaagattgtaacatagaaatccttcctgagttacttgctggcctccacaatcatgtgagccaattccttaaaatcagtctctctctctctctctctctctctctctctctctgtgtgtgtgtgtgtgtgtgtgtgtgtattctattggttctgtttctctggagatctttgactgatacagacacagtgatctttccaagctctctggctctcagattctactatttgatttgatttgattctgtctcaatgatcttttcccattgaaatagtaatttatttatgaccaagtatcctttcggattaaagaccttggtagacatttaattcaaacttagttgaaaattaaatgttaattatacttaattataaattaattattttaacttcctgctcatcttgtgtatcaccaacagtagagaaattgtggggtcttaattctcaggaaacggattgttttttagagttgtattcttttagtagagagataccctatttctccagaaacttaacttttgccttatgttgcctctgaagttatttattaacttttttgagacagagtcttgctctgtcactcagactggagtgcagtggaatgatctcggctcactgcaatctctacctcccaggctcaagtgatcctcctgcctcagcctctgaaagtgctgggattacaggcgtgagctgctgcgcctggcctggtctaacatttgtttctaagttaggccatgaagctaagttctgcttcagagaacttggaattatgagatatttt

SEQ ID NO: 52177 - DNA, 1723 bp, Homo sapiens
ctttggctgtttatttccctcgtggtggatggaaagagtaagtatagcaatgtttcagttgctatggataccaagtctttgagataatagaatccttttaacataatccagttctattagattggcttttctcttgaatgttacatctaccaagcatactttcttttctcagtacaaaaatttatatccctttctctcaatatcgggaagtgttattttaatttttcctccaattttgccctgcagtttatctttttcctatgtctcctctttcctacatcagaaaagatgacatggaaaagtaaaccatatatctgtctttccctctagctaagcggaaaactgatttagtttcacacaattatatgcaagtactgcaacataatttgtccaggtgtgatgtttaaatctttttaactcaaaccacaaaaatggggttaattataaaaggcatataaacatctcctcaacattccattggttcattgagtcagatgtcttcaaaatagaatctctttgggatgtataattttgagtacagcattaagtaaatgactgttgcagaggaaaaaaaaagtcaagtgttcaaaagaaaactcaaaaagtggcagctcatagttcatggatataagaaaattctactcccatgtgtgaagtagtcagactccttgctaaaaacatacattttaaaaagtctaaaatgttagttaaatcataattcatcttttttttgagaaatcattttagtaaatttataacaacactaattttttgaactcttgcttcggtctctcattcctaattctatcttgtatttatctttacagagggattcagttcattatatacatttgaaattctgtgcaataaatatttttttgcactgtcatgctagaatctgtcatgctgaagaagaaatggccagtgtatgtgtcatgaggctggattttagtcccagctcttcctgtgcttgtgtggcctcaaatgagtcatttaacctcttgggtcttaatttcatcatcaaaaattcgaggtcagactacattattttccagagccccttgacatcccaaaatgtctacattgctttgaaatctatccacatctccaactgatttccagcatcaaggttagaaactgttttaaataggcttactgagttcaaaaccaaatagaaaagagaaagtcttagaagtacaagcctgccagcaaccttatttccatcctgcactgtactgacaagaattttaaatttacagtggaaaacaggaattagaccatatttaggtagctagtttcaaaacctttattgttggtgatattttctccagatggaaagtaggtatgtaaaagtaatcttggctacagctaatatttattgttcctgtagtaaattccagacactttgctgagtgctttgtgtggttcagcccatcaagcctcgcagcaacactatgaggcaggtattataatgttcattttatacatgaaaatgaacacaataaggaatgaaaatctaagtcgtttgtcctaagtggctcaactagtaattggcagccccaggatttaaattcatgctgtctgactctgtctagagtatataaatactataatgcacagatttttttttttttggtgcatgtgtggcttatacagttgttccttgaacaacacgggtttgaattgtgcaggtccacttatatttttttccatcaactgcaga

SEQ ID NO: 52178 - DNA, 2605 bp, Homo sapiens
aacaccaccacctctctaagaggccttccgtacctcccacccatcaggttcattttgttttcttcctaacacctgtcacagtctgacattatgctaatcatttgttgtgtcagccttaagtagtgaaattcagaaaatatcattaagtatagagtttattctaacgcaaagcttgaggacagccacctggaaacaccaactccaaacaaatagggtcaatgttccaaagtgaagttaaggtttcatttacacaggcagaaacagagaaggttcagcaggagtacattttcaatacaagagcagtgcataaattacagcgattagattagttatagatagctacattccaaggaagataactatattaatttatgaagggggtagtgatctgagggggtcttacctctgtctctgtttggtcttcctgattataggaaaaaacaaggcagacattgcagctgtatgccatgggactcaggccccatcgccacattcttcgcaaggctcagaataatttaaagttccaacagctttaagtttgaattatttaatttcacagttgattcacttgttcttttcctgtctcccacaatagaaaataagctcccagggatgcaaccttggcaggctcctaaactgccacggctccagtttcttgtagattagatattcactgttggttaaatgaaagaagttctagacaggcctcggtgtgctgcctcctctttaacgagagggcttactagatgaatgtgagcagacggaagcagaacaccctcttaatgaaggcagcgcattccagctcagggatttctagaaacctcgggggcggaagtttaaccagagaattaggaggcaaggggaagagtagcaatgaggttaacctgtgcagtgtagtcatttcacgagtttgagaacgcctagcacgatgccttaacggagcgtcgggcacagagtcatttgggaggatttctttttcggatttttgagacaggaacctgatttgaagcaacagggaagaacaccaagaggacgaagagccaacgacgggcgtgcccgggagctctcacctggaaggggtgggagcaagcagggcctgacgtcctcccgccttggcggccgtggacgccccaggtgccacccacagcagcctcccaccacacatgactgaggctcgggaagcaataaagtggctttcaaaatactaaacgcaattgagattttttcctgagttaaaacaaaaaaaaaaaggaactgaatgccgaaatatacggagaagaaactccagttgccacgtccccgaacgtctccacccagtcctgcctgctgtttcgccctcagtctgggcctcgcacagcgcggcggagcgcgggaggggcggggcgggcctgctgacgtcgccggacctgaactgcgcaggcgcggcgcgagatcgcgggagcgagcgcgcggtaacagttcgcggcagttcgcgcgggagcggggcgcctgggtggatgggcgcttgggcgcctgggctgccggacggtgggaacggaagtcgctgtgggacgctgaggaagccaggatggcgactccgagcaagaagacgtcaactccaagcccccagccttccaagagagctctcccgagagacccttcgtcggaggtcccgagcaagaggaagaattcggccccgcagctgccgctgttgcagtcgtccgggcctttcgtggaaggctctatcgtccgcatctcgatggagaacttcctgtaagttgcccggaggccgcgccgcgggtgtggaggtgtgctggccagcaggccccggggctccggcagcgcgcgggcgtgggcgtgtgggtgtgtacctggcttgtgggtctggccttgaattcgtgccggggttcccttgaggattttcctacgtaggctgtggagattgacgtgtatgatgtaggagatgtgtgccttgggtgatgtggtttttaaatttagtcagccaaggttttccaaaggtgtcatgtagcaggtagtggttgtaggagggagtaggtctctgcccgctgggagtcgcgatccatagcggccctggtctggaattcacagaagtattgtccccgggaacttaagaggaggcaacagttaattcggcgtgatagtgatgctgtggcggattcttagggtaggcatttgccagagaggagtagataagacggtaaaggttgttcgggaatggaggttacaggtacaaaaaaattaaacacttactggcaattgttggacctccctacaaacccttgaccccactaaacccagttttcttccctggttcctccctctccccttcagacaactagttaccgctttagaatttagtaagttttaaatatatcatgtatttgcctagcaccttccagttcatttgttccaggtctttttttttttttttttcctctttttttttgagacggagttgcgctcctgtagcccacgctggatggagtgctgtgccgcgatctcggcccactgcaacttccgcctctcggtttcaagcgattcttctgggtcagcctcccgagtagctgggactacaggcgcgcgccaccacgcccggctagttttt

SEQ ID NO: 52179 - DNA, 830 bp, Homo sapiens
tgggcttgctggagaaacattaggaaaaggtgggagggtcggatgtgggggaggattctagcagtggaggaaggaatggcatgctacaagctttttctccaagcctgagaacagccaaagggaaagagagagagagagagaaaaaaaaaaaaagaacacggaagatttggaagtcaagactaacaaatgcgacaaagctttttttttttttaatgaagaatgctaatgatcataaggcattcagaaatcaaactgatgggatagaaagcaggctccaactagagcatgtcagattgttttaggggcttctgaaagagtgaagactgggaaatcatccgcccacttttcttctcaatgaacttactaaggaaaaccattgtcagccattttcccaatatgtcatatgatgtttctccctgggaagttcaatctgggaatttcccacagatgttgcagaatgactagtccttgggataagcgtcaacaattgagacaggaatgtaaatctgaccctcatgttcagaatccaagaattcatttccctgaatccaagaattcatttccctcagcttacatctttgtgtctgaaggtaatggggtgtcaccatccaagtggcactgtatttactctggtacctccctctctcacccaggaacccacttatacccctcccctctctcttctcaccacgcacagaagatgtgagaggaaaatcaagggaaacagtgtgcgtactctgtaatttgactccacttatgttttctatcgtgaaactgtaatcttgccagcagaagattctcagaggccccccgactgtctttgctagggc

SEQ ID NO: 52180 - DNA, 5722 bp, Homo sapiens
tgacgttctgtacattatacacaaaccacaggacccagcatttctcaaggggttactgtgtgtggaaccctaccaagtgctttatagatgttatctttgcacaagaacctgtgacttgaggatagtagccctaccttgtggattaagaaagtgaggcttaaacaaagcagaggttgcaaacttaaatgccaaaagagatcctgtaaatgattaaaatacgaggtactgccccatatcatgatcagttcaagccaattgttgctaggcaagaattcaggcccagttttgccagatcttttgatttttccagacaagccagaaatctggattcatgctataatcctctgatttttagatgttggtaactaattaaatttttataaaccctgtgttggccaagccaaacaaatctgcaaagcaaattcagcagcaagcctccagtttgcaaactctgaattaaagtaacttccttatggtctcaaatgagaaaacaataggacaaatcagaacccagcttagctggcctcaactgtgtcgttcctcccagcacactacagaagtagcagcactgaattagaagaaaatctgtttgaatgattcaacttctaaagctggtgtagaagtggtctatgaagtggcagctgtatgtgtctctataaggaagtgagcaagctggagggtttcttgagggaatgttagcagcactaagcaagggggtgtggcagggagtttagctcctaaaatcttcacagaatgcagacattccaaatgccatctctgcccaccttcttgatttaacaccagcagaaagaaaattagaaaagctccttaccctaccctaaagtcaatttaaattgaagttgtatctgaaacttccaaatgcatgagacctccaagtctcttatttaaagtaaccttaacacatacctcctctagcaggaatacacttccgacaatattaacccaggctgaggttttgttcaaccatgcactaagattagagatccccaaaacataggcacctgcaatcaccacatccctaggttcaaagcactgactgtagcacttaaagctgaatgaacatctcacttcgttttccactcctgactgggaaaaaggttctcctgaaacagctgagccgaatgacttgccttatggagaattaaggagcagcacgcatgcacgcacacagaagcagccatttctataaatgcctgagaaaaatcactcagccgaatggcccagaacgctggaaaccctattcctgagtcggacagactctggcagctcacagaggaactgcaggcctccctggctgcacgactgggcagctccctgaaggagaaaatgcctttgctcaaggtggcagtgggtgtcgatgggaacaactgaactccgggaacatggctgacacagccaggcccgcccaacagctgttggtgagtaacaccctccagttaatatacccctacttcacccccagagccacactaaaggtcacatcccccaacacaggcacatgcctttcagcaaccttacagatacaagccttaaaatgtgctgttttatggcaacctaaatgatgaccccaaacagaacctgattttgcattaaccatggaggaaattcagtctgattccggtgccagcagccacctccacaagaacaagtttccaaaggaaatggaatgagaagcagttacgtggcctttcttttaaaaaggaaagcaaaacaaaacaaaaaaccccaatcaagtatcatttttttccatgtatcatttttaaaccacaggcccaagacctcatcttaaaagtatcgaggtattacaccaaaaaatgacaacacttttccaactaactccaacaataccctctcaaacacggtgtcacaagacagaggcaaaaggcttatctgagaggaccaagccccgctacctctgaatggcgcttgtaaaagaaccattccgaagatggtcaagacagcatgtccaaatgtgaatgctttccaacttttaccgttcatgttaaacacaaccaacagaattggatgacccaggtccctggaagtctccaaagcccattttaaaaggcagatagatgtctttctggccacattcatttgtacggccatgcctctcaccctccctgggaggaactattccctgaggcctccagaaccgcccaacattcattaccaagccttgacctccggcaaggaccacacctccctgcaaaccgcgattcaggggtggagggtgcgacctaagtcacatggccaaaaaaaaaaaaaaaaaaaaaaaaaaaagtcagctctgaaacctggctcatcaggaggactcatgagtgaagttaaccaccattacttgatcagactcctatgctgcctgaagccgggttattttaaacctctcgggggactcccagccaaatttaaaaccaccttggcaagcccaaaaaagtagcaggcatccagttaaatgagtccttagtcatccctaaaaggctcgaagtaaagtgcgccgcgtcccccctcggtttcaaccacttctctgcaacccgacaagagaattaaataaaagatacgccatctgacttccccgctgccagcgtctcccaggtggggtggccccaccgtcgcggggtgcgggagagtcccgggggcggggcgggacaggggaggggcggacaccactccccgcgaagccacgcaccgcactcgctctgcccgccagtttaaggctctccgtggctcccggaggccggggacaattaaggagagagtgagctttccgccaatgcacatttaaattatttaaagagttaaaccgcatcttatccaacatgtttgcaccctttcggccgagtgcagtgtcccgaacgcccaggaacgctgcctggccaaaggttaactaaccccagagctccgggggagagggcgacgccgctaacctgtatgcactctgtaatgggctttgagatgggaggattttccatagactttcccacagccactgtaggggcacttgtgcctcttttcggaggcgtgtttccccttcgcagccactccaggatggaggagggagagcgggctgggcgcgctgccaggatcctgtctctcctccgggctgtgggaaggactcgacccagattcggtggtcacgtcgctgtcggatcccatatcctcatctggactttccagactgtcgctgcacacggagggggtctggatgggtcggtacttgttcaggtccaacaagctcttggcgatggtgaccagtgtgcagtaatccttccaggtgtcccccgggtcaccgtgctccttggtcacctcgcgctcaggtagtcgcagccgctcggcgtccggagcgaccccatgctccggcaccgcagcgcggttcgaaatggaaaccagacactgggcagccacgaagtccatgtaggcggccgcggacatggtgcgggcgacggcagcccaggcggcgcggacaaacttggcggtggctgcggaggttcggctcgccctgccctggcctcggacgacgagcgcggcgcggcgcggcacggcgcggcggccaagggggcgggggcgcggggcgcttccgactcgcaggagcgccgaggcgacctcagcccctcatctttacgtaaccggcagcgcctccgcacgcagcatccacggccccgggctccgccgcgccgccgcctctagccgccgcccctgccccgcgccggccgcgatcccccgacgggcgcgccggcccctctgagccggctcccttggaaagatgccacacgtggcggtcgcaagtttattcgactgaaaacgcccccgaggcgctgggagaggaaactgcaagagaggtgcacgccctcggccgcctcgccgtcgagccaaagccccaggacattcacccgatcaccccgacgcgggtggcgagggtcccgccgagcgccaggtctaagagacactttttcccgagtccactgacggcttctgaacccctgctccggccggtccgcaccgttccggcattctcttgctcagtaacaatttcgcagaatcccatcacgtcacaaaccaaaccccctccaattggccagtggggagggtgattcaactctgtttactttctccccctgccagtcagaacggccttcggtggagaggtgcgtctagaactgaggcgtgcggccaatccgactgttccgtttcgctgcctcgtgctacccctacagcctcgaacactgacatttaaaagggtaacagctgggaggcagggaaggggcagccgcacactttcggagtgcctcgcggtcccgtggccggtccgggcctcctggctcacgttccagcttgcggagctttgggacacatctttcctagtcagttgcgctcgttcctatggcaaaagagaacttcagcttcggttttccagctcccaaacagttaagtgacttcctgcaaacgctacagtcccagcaaccagccttccaatcaaaagtaagttggttgatgtcactggcattggctcggccaatcacaagggcgttccgaaagcaagcgctcgacacttgtaaacgcgaagagctgtagtgaaactggacacatctttgtattttgtgttgctggtagtaaatttgagttatggatgagaggacaggggtgatgaataaatgcagtgtgaatctataattaaaaaaaccccattatgtcaggataagtccaagaataaacacaaatgagtaagaattcgttttgttatatattttttggatgcagcatactttggggcagatgtttaaaaattcttccatccaatacattaactatgaccaattcatcttaaaaatgcagtgctaacaaaagttctggttttacagcatagcctttttactgcctgagattcttccattgaaacatcccatctttgcttgtcatatctcttaattcctctacttctctggtgcaatttagtctaaataaattcttttagctttatttggaggctatttttaacccactttcagaaaaacggagacaaaaaccattcatttgtgtaacttttataaaaaacccaccattcttagctctttttctttccagagcccctgcatggtttttaggacatgtttctcttccctcacttcacaaatgtggaaactgagttacagagaagtgacttatttatcttattagacagataatgatagaactcaatagaaaccacaagtctcctgatttctagctctttgtgcttgcaactaagcccttttggttttgtgaaatattaactgtgcagaacagatttttagggactggaacaagctggaaatccttagccatggaatactgtggcattacttggtcaacaattagtatgggtcttggagtctgattaacttggtttacccctccgtctgaattaacgatgtggttgttttccatcttgatagctagaaaagaatctagggctagttctttttgcaagaggcatactgtcagcacaattcattaaaaataattcactttcgtgaatgtgagaggtacctgattctatgtgatgcagattcggtgagttccaaccctgaccccccactggctattaacctttgttaagagaaagttacaccaggttctggtctccgaggcaagggtctcaaattgactctaccaatgtgagatctacagtagtttcttttgactttgtttttaaagtggtaca

SEQ ID NO: 52181 - DNA, 4290 bp, Homo sapiens
aaattgtattattttatttatttatttatttttgagacagtctcgctctgtcgcccaggctggagtgcaatggcacgatctcggttcactgcaacaacccccgcctccagggttcaagcgattctcctgcctcagcctccccagtagctgggattacaggcatgcgccacaatgcccggctaatttttgtatttttagtaaagacgggatttcgccatgttggccaggctggtctcgaactcctgacctcaggtgatccgcccacctctgccttccaaagcgctgggattaacaggcgtgagccaccgcgcctggcccaaggtaaatttttcaccctagcggggagtaaggtacttcctggcatatgcagcacagattcccaggcccctcccctggagatttttattcaaactgtgccccaaggcagggtttccccaccttgcagggtggagctaatcacctggcgctcgatttaaaatacagattgccgggtgtcacccctgctcaaggaccagggaagttcaggctaaaatcacactctgtaggtattgggttctgccagttctggcttttctcactctttcctgctgggaggggtggaccgtgccgggcagaactgccagcctccaggcgggaaggaaggaggagaacagatggcccactgggggtagaggatcacgtgttggacctcattctgggctgcatccagacctctccctttcagggcccagcccctccagctccagcgaccccacctaggcacacggaacatatgtggaggaaaccagtgttcattttgttgaaagcaggggaattagagaaggaggcgagcttgaggaggggagaggctaaagggataaagcttccaacaatggcgatgttcctggattttgaaatacaatcaggtaaagcccgatctggtggaacgcccgtggccataatgacagctaacacccaggggctggagggggaagggcgctcaggcaagcgcgaaaacttgcacgccgccctactttgctcccgccccacttagcagccttccgcaaaactccagccctctcctctgcagcgcagaaaggccgcccgttcatgcatatgcaggaggataagtttagctcgcagccccccgcgctccgaccggcccagcgcggcactcggtgaatcacccgcgctcgggggcgggcgctcggctccggccgcggactggcgggcgactcagccactcgtggaccgcgcgccccggcctggcatcgcccttttaaaaagtcttccgcaggcggccgccgccgcagcagcctgaggaggcgagttcatctgaggacagtcccagttctcagaaatcccttccctgctggaacatcaagctccctttactgcagttgaacaaactgccctagattgggggaccaggaacccgccccaaactcgtgcaaggagctccgggcgcccacgcccacgtgagctaaccttgaaattagcccctgcacccgggagcgcgggggtgggagtgggcggggaccgggggggagccccgcgcggcccaggcccttgctttgcgctctccgcgtgcacgtaccgcccccgccaccctgtttcataactctggcggtgttgcatttttttttcttttaatctcccgggtagatgggtgtggggttcctgtgttggggagagggcagggcaccttggccaccttccatcccccacgcccgcgaggaagaggaaaacctgccctgcggtcctcctaggaacactgcagagtagggtgtcgagatgacatcagcttctaaacatagcaagcaccgcaccccaactccatgggctgcgggggtggggagggagtgggggaggcgggtgctgctgtccccgggcggggcgtggcgggcaggccggccaggctgtgcgggaggagatgactttgcaggaattgcgctcccagagtttgccggcagatctctcccgcgatggcccggccaaggggttaggaaacattcctgccattccgtgctctcccctaccccacaagaaccacacgcacgcacacacgcactcttggatcgaatgtgcctttatttataaatcaatccagccccagcccaggttcggtccggtcccgggagcacctgcgccccgcgtctgccttcaggctaagcctgcgaggggttcggtgtggccctcccagtgagtcagaatgggctgtgtttcctgtggttgttgtggaacagtttgtcctttttactctccgccccccccgccccgtctccacccccttggtaaatatagcgctcacgtttcatcatctctttgtccaacgagtgccagacaccccggcccgcggcccccgccgcctccctcctcctctccgctcggttacctcgcataacctcgcgcgggcaggcaccgggcagcagctctccccgcggccgcgcccgcccggcacccagcgcttcccgccgcagcacacccccaacccattctcccctccccttcttccagttcccccttctgtacggcccccatgctcttgtcccaccccctctactcggcgtccgggtactgggtcgagacgtgtgtaggtgtagggaggtggatagcccttttccgagccgtaggcgtcacccctacgcccaggcccaggcccagtgctggatcctgcactttcccaacctccccctcccaagttccaaggttgccctctgttcccctcccaagcgcaggtgacaagctgctgagacagtgtctgattcaccgacagctgaaccagctactggtacttggaggtgggcgtttgctgaactgttttcctcccacctcccccaaccccctaccccggtggggagcgggctggagggtcggaagaggcaaggtggatgacagccgagaagtgcgtgcccgctcttccctctctccctcctcctcccagtttcatttccacacatacagccacccaccggggaccggaggcggctagtgttctctgaacgccgggaactggctctctctgtggtctcctgtttacttccctcctcctcttttcccctcccttctccccgcccccatctcccggcgccgcttcccgcccagagcagctgggaaacctgcagctgaacactgcagtcatgggacttccctggccccgagctgtgccccaggtttgccctgtcctgtcctgccttgccctgtgtccgctttttggggggcacttatttgtcctgaaaagggtcttaaggctccctatccaggaacgtggaagaggtgactgcttccctcccccttcctctcctcctgactcccctgccagctaccttcctgtgggggccctgcctggctgtcttttttggccaggattctgggccacccccacgagtggccacctgtccagggagaagtggtgagacagctaacggtgtgtaagaactctgcatccaggatgctgcagagctggcttctttgccatcacagactgtcctgttcgtaacagggtgcccaaaattctctgccgaccaaggttttcaggcagaaccccaaaacctgctcctagggacacaccctctccttatggagtctggcaaaacctttcctttcaaagcttgcttcacagcggggaagaatgcaggctctctccctaagtaagctgaatgaacaaaggactccaaggaggccgtgggggttccagctctgggtgccgcctgcctgaagttcaccccatttaaaaaccacctcttcaccaccaccctctgctccactgccatggttaccagctccctgtccttcccagcacaatgttgcacagaggcagaaacaaacaaggacatttaaaatgttcttttaaatacccaaaacactgccttggtattttggtagcagagaagagggaataaaagtcctgactgtttgctggtttccttctgaccccacgaccctgaaaaaatccttaccctggatggcctctcagctgccaaaagagggaaggaagcttggtgagatactagagagtggaattcagaacaaacccttggcaggagaattattcaccaagatagactcttctttcttccccctccaccccagctgctttgaagtacctgccatcagactataccacctccgctttgtggctgtcatctgcaggctctcctgcactccccctcattccccgaagattctagcacctgactcacagtcccccacctccacccaactcctattaacatttttggtgaatttagcatcccaatagattaatgacctatctgaaaccctggtacctgaacagcaatcatttttttc

SEQ ID NO: 52182 - DNA, 2038 bp, Homo sapiens
tttttttaaattttagtagagatggggtttcaccctgttggccagggtggtcttgaactcctgacctcaagtgatccacccacctcggcctcccaaagtgctgggattacagatgtaagccaccgtgcctggcctgtttgttttttgccttgttttgagaacagggtcttattctgttattcttaggctgtgtgcattggcaccatcatagctcactgcagcctcgaactcctgggctcaagtgatcctcctgccccagctgctggaaccacaggcacacaccacacgcccagcttgttattgatgtttctgataatctaggcagctaaaatttgtatcacccttaagaacttacagacaggactgtaagatgtgagaaggtattaatatggtcacttacagaggctctgagagtctaggccttttgacctggcctgttgactccaatctcagtgttattccacagccccagagtttcaagatagcaagaagcttctcctcccttccctccatcctcataagtcatctgccttggaggacctaaagccttggattttccagactattccacagcttcttggagataagctcatgagaattgccttgaaacacacacacggtgatttttgtgctagatacttactttttggtatttcctgctggagctgggcttgggtggagttccctttagaagcgccagagttttcctgtttgtgcagttaattatcaaaaccttaaataaactctgttatgtgttcagaataataacaactcaacaactattcattaagcacctactatgagcctggcactgttctagcagctggggatacaacagtgacctcagccgaccctgctttcagagagctctcagtctggtctgggacacagattagtaaacaggcatttgccttccacgtggtaaatgccatgaaggacaaagtccagggtgttggggacgggaggtgtggtacaaatagcaggcagccaacccaatctcagaagtgacagggcttgaaggggggagaggggtgtgtggtgtgccaggagagacttcccagagccagagacagctaaactgcatgctagatataagaaactatttcttgtagaatctgttctcaattatctgcaagtagattattccggtaacttgcaagaaaacttttttcaagtctctttacagtggcttgagcatctcaacttcctctatttatgctgcacgttaacgcagaggcatccaatctaatgtaggtggaggcacaaactggagagcctccttgcaggaaggtttgggattaggcgaatcactgcatttcctgcttggaaaaaggagatggaagaagtgaagttaggcaagataagcaaagtgcttcctggatacaagtaattcaggtctttataggaaactttattatttcattcgaagtgtctttttgggatgtcaagcaggtacatctctgttcaaattacataaagcaacaaaacacattccagggccaccagatgtaaatgacttgtgcattattctctttttagattttccttgccattgtttccctccactagtacacatgataaagaccaacttcttgccaaaagaaaaaacggggtggggttggggaacaacacaaaggcttctgtgtgtctggtctttgctgtttcttatggttagtcttggatctacttttgacctcttggtcaggcaataaaatgcctatttgtttaattttaaaatcaactttattgaggtataatttacatacaataagtgcacccatttcaagcatatagttctatgaatgttgaacaagtatacaccactgtaaacaactccataaccaagacatttattatctttttctttcttccttccttccttcttttctttctttctttctttctttcttttctttccttccttccttcttccttccttccttcctctttctttcttttcttttctttctttctttctttctttctttctttctttctttctttctttctttctttctttctttctttctttctttct

SEQ ID NO: 52183 - DNA, 7802 bp, Homo sapiens
ccctctctccttgccctcctgaattgctgagattacaggcataagccaggaaacccagctactccgcttatgttctcagattcttccttgtttccctttatcttggtgctagatttacaatgatctgggtgattatcccatcaatgaccatctcccctactagagtgctggctctgggaagccaggatccatgtcttttgctcttagctgtatctctaggaccctggcatagtttctagaacatagtaattgcttagtaaatattgactgactgaatgaatgatctgaagtttctccagtttcctcacaggcgctcactggtctcctggataaatacttttcagcctttgctgagaaatgggctgggaatgcataatataaaacccctgagagggacacaaggtctccctcctactgccagtcttctgggggtgtttagagagatgcaatgtccagggcaatgtgacagtattttactccagaggaccaaaatttagcaactagaagctgattctagagggtgggccttgaaagttatgtagaatttgaatggatgattaggaggaaatatgaaaaacattttaatgaaatactatgtcatttaaatacacacacattctgaattaaatacacattcttggatccctgttcttctcaacaaaagtacactgagtctccagttctcattaggaagctgataaatatctatttccttctattcctgccacagtaactccccagctatataaaatttacaaactgctttggaagcatttgtggaaaaaagtgccagagctctgtatgtgattattgaaataaatgctgattgagagatttcccaggtggatacttaaaacagacatgggcacatatgtacactcacaccccacacacaggatactttaggctgtgatcaatggagataaattttcccacctgacagttgactgtaaatcaatcagtggttttaatagtcaccagatttctgctcctgtttgctgctgtctcaggcaatcattcacccgctgggacacaggacctcaaggatcttggctttttgtcatcactgcacatggagacatggtgcttagcagcaaggtaaatattgtcatactgcgtatgtgagaggcaagaataagtaagtcaggacatccttagaaaagtttatctctggatccccactttccttaccaatagactaataggaagtcatgaatttcccaggtttttaccaaatcaaaagattttcatgacactgtataagctggaaagtagttgagggtcagtaaatatcgaatgaatagtttcgaaggtgaacatgcactcctgatttttgggttagattcttgaacttgcccctcctgactttattatcctgtccatcaaggtttgcttggagttacttgaacaagccaggctgttccacaccccagtacctttgcatatgctgctcttggtgcctggattggaatgctttccattaatccaagtgggctgaggacatctgatctttcgacacctggcaccaggattgtctttcatctcctttatgaagtttttattgactgactctcccacacccagaatgagccactctatcctgtccaaatttgattgcacatatctatttaataagatgtgactgggacctttgggaagtccctgctcacaccctgtacccacgtggaagccataatcaatgcttcactgcagcccacttgcccccttgctacctctcaagccaccccgaaagcatttcagctatgtggatttgactgaaatgctcacaagggagaaaagtggagggcttacactgaacaccatatggccaaactttatacaaatccccgttaaaaatcttccttcattcccaaagccttttctcccactgccagctgccttatctcccctatcctttccaatcctcctctctccactctcctccggctgcactggctccagcctccttccacccctggattcttcaccactacctcaatcccatttagcaatttagtgcactcaccctttctccttcattatctggcatgcttgaagctttaggttatgttcatcagatctctttgagatcaatccctcttaaaagacaagggtattgtaaataggcaacacatatattctcctcctgctagagactggagcaacttgagggcaagaatcaagcctcatatacctttgcatctctaatgcaaaatatttaaaatgtttgtgaaatgaagaaagaaataaaagaatgtagccacctattagaatccataaagttctactctaatcatggttttctcccgtttgaacattttctacgtcttctcaattaatgccttggcctcaactgccatttctccttgactccagcactctgctcagcaatgatggaccttctttcccttaagcccacactgcatattctttccttcaggtgttcctttgggttgtcccttcatgcctggagtaatctatgtcatttatgagggtgattggtggtgggttaccatcaccctattgaaattgaaggtggatgtaactcgtctggtcttgcaggtccagccaaatccttcccactcttcaagactcaacataggccttacccctcaggatacttcattgaggtctctagcccaggcatgaatctctgttgagtccttgggatatatataagccttgaaagcacccactctaagggcacttagttatttggcttgctctgttgtggaatgtgggggatgaggctttgaagccattcctcttctcagactatggtcattattagggctattcaccaaatttttcaaggtttcctccacttccagacttgtggtaggtttgtatataacttggcattgtgtgtggccgatttgctttggccaatgaaatatgagcagaattggcatgagtccctttggaaaagaagcttacaggggaagaagtgttaagagctggtgagcgatcgaccacactttccttcccctggcatggtgattagcaatgtttgagatatgtggcagattgcccattagactgggtcctcgggtgaggacccagctgattcacaatgggcatctggtgaaggcagtaaacatacctttttttcgttaggccattcagatacagaggttatttgttactgcagcacaacctatcctattcagacagactataatttccttgagggcaggagacatgcttaactcacctttctatcccctatagaacatagtagaagatcttgtggatgttcaataactattgctgattatgtatactgagatagggtaaactacatgagactggagagtgggacttggtctcagaacttcaacttgagatctcagtctctaaaaaatcaagataaatatacaagatgattctacctgtattctaataagagtctctggagcacaattctgaaaaacattttcttttgaaaaaacttttttaaaaatgaaagaagattcttgcatacagggaggcagaatagtgtaatcaaaggaatctgggctttcaaccttggatagacttgggtttaagtgccagctctgccatgtccatggctgcatgatctcggacaagttatttaagctctttgagtcttggtttcttatctataacagggatgatatcaacacctactctacaggattactgtggggttgaaatgagagaatgtatgtaaagtacttgatacattatgtgtgatcaacaaatgtcattctgttaggtctttgctcccaccaggtgtgtgtgggttggtgcaaactcttgcttaattctctgagaactccccttcatttactccttctgagatcttggttacatgcccagtccctggatttatttagcttggtccaggtcagatccttaaggttttgcatttactgccccaggcacactctggcctgagaaattccatctacgactggctggagttggcactagcccttggcaaataacttcaattgggagagaagtgtttttgagacaggctctttgctgccaaaattttaaatagggccttctgtgagggaggtctggtcagggaagtgaagggaggtgatctccccagggaagaaaaaacttaaggccaggcatggtggctcaggcctgtaatcccagcactttgggaggccaaggtagaaagagcccaggaactcctcaagaccaggagtttgcttgagctcaggagttcgaggctagcctgggtaacgtggcaaaacccccgtctctacaaaaaactaaaaaattagctgagcatagtggcgtgcacctgtggttctagctacttgggaggctgaggtgggaggattgcttgagcccaggaggttgaggctgcagcaagtcatgatcactccactgccctccagcctgggtgacagagtgagaccctgtctggaaaaaaaaaaaaaaaaagaatttaagatatcccagtgaccagttccaagaaagccccacctgggcctgagcactggctctaatgacaggcgattgattactctttgaactctgggatctgtcagtgatggtggcaggggagtctgcgaaattatcctcagtgactgactccttgggccacaggctggggcatggtgtggtggtccaagggcttgtgttctactggactcttggacctgtgaacttgtgtttaggggtggaagtattgtccctgactaagtccttgaggccagctccctcctcctctcccatgtagctacagctgtggtgtggcatggccaacctccccaaaggtgcttgtgtaacttgtttttcaaagtcttggcaggagctctggtcctgaagtgagaaagggaaagggtgtttacattctggaagaacagttctgagaagtgtctcacatcagggctgtccctgaacaatccttgttccccagtatctctggaagcttcttttcctatgggatggctggtcacaatcatagagatgatcttggacctagaggaaacaagcttgaacatgacagaaggtaggcagtgaggaagcgctggtctgccacccagggtttgctgccctgtgtaaactgccctccctggaaaggtgaggaagctctccaggacaagactgttgttgccccagtgcctcctgccgtgcctggaatagagcacagggctacaaacaggtgctccatagacattcactaagtaaataaattgtgaaaatacgtgggcaagaaaacatttcagaggtcacattggtgcaaattcttaattgacaccaggttaacagctttctctgaatagtacttacattaataataacaatggttactatttattaaatacctagtgtctgccaagcaaagggagatattatttccttaaatcccacaatagttctactaataggtagactctccccagttaatagctgacagcgcagagactcatgggcacaaatctgagaaacttgcctgaggttcacccaacaaattaggattcaaagccactgcctaggaggccctgattatcctctttctgtttctctgtgaggcccctctgtgccctgctcacctcctgctggtctctgctcctgccacagcagcggggaaacaggaacctttaaagaaggctgaggtgcagttccatccctcctggggcgggcagttgtgcattcttgccatttttttcctcttgcaaataggcttgaagtcaacgtagaaagggcaatgcaaaagcagccccgttccagatgtctgctttgtcatactttaaaacacccacccatattcaggcctgtccatccttcattctggcagccctcccctcccgccttgccacctgtctccatacacagctttcccttttcctgtccttcctcttctgatgggtgtgagggccagatttcacttcactagaacaaccttgctactagtattattctagggacaggccctggcacaaaataaacactcgataagtatgtgttgaattgcactttaaattctagacaaaggaggaaaaagctttggatccagaagaaaatagaaaagctgggagtgggggttagggtaacaatgaacttgatcctctatcccctctttcctccctcactgcctccctccctaagcccgggcagcaatgtacttagtattactgctgtcatctgattacagtaacatccaaacagattgaaaagccccaatcaatgccagagctgaagtgcacacgcagggggttgttcccttggaaatgttgcagctgtaattactctccaaagagaaaaatctaaacaactttcttgaccctctggggagaggaagtaacaattgaactacaaggggcagaaagtcatttctgacgtaccgtgtgcgtgtgtgtgtgtgtatgtgtgggtccccaccttcgcagtgtactgtccagagatcgtctttgacagccctgcattcaaacgccgggctgtgggtcggcggcgtggtgcctgctgctgccgccgcggcagctgagatcatgctgttgatcttgttttacacagagcagcccagcctgttgtgccagtacagaatgttctcttctgtgaactgagtttgaacttttccaacccactttgtttgaggaaccacacagacaaagagggaaaagacagggaagataacccccaaatcgttgaaatcgtggtgatctctcggattttggcctagaccatttgctttttcgctactcaaaattgaccatcccaagcattacacttcctgaaagagcaaagcgcctgtgatgtccgttttctaagacaggacttggcatcaactttggaaattaacgagtctgtcactgtctctcttcaatttctttttttcttcttaggtgttcagggagtaacggtaataaaagttattttcctttaaaggaaaggtaaggccccttgtgctggtgacttctctctcagttgttcaagctattacaatattccaaatagtgttcccagtttgctgttataactggaaataattgattgtaaggattttgggtcactggcctccatataaatgaccaatgagaaaagctgttaatgcttggtaaagtaaggtggttggaaataccttttcaaaaaccatcctcatatagcaagaccccatctcaagcaacaacaaacaaacaaaacccacaactttcaagttagatgaggtccacaggaaaaaacaaccaaaaaaaccaaagccatcttcacctagtcatagggttgagtctccagttgtttagggggttgcttggacgatctgagtgggagacctttatagcatagacagaatggtgcaatgcagtgattttccaatgtactattattagtttttaatgatagtggattcctttctttggagtaaaattcaccaaacactcactggtgaagcaggaagagcacaactttgaagtgtgagctgtggatctgaagtgtgaggtgtgggtttgagtctccttctacttaggggtgctcctgtgatacagggaaagtcacatcttccgagcttgattggtgaaaggagcataaggcttgtcttgtatacttgcagagtcatccgtaagtgtccagtgttatgctgttgcaccaatgagagatttttctcctaaattctcagttctaccacctgcttcatagtttggggctgctgtcttatggtttttgctgactgctggtaataaggaaatctctagaaaggagtccttactctgagatggggctagttcccagagattccctgtgacttttttctttttctttttttttttttgggatggagtctcactctgtcgcccaggctggagtgcagtggcacg

SEQ ID NO: 52184 - DNA, 2653 bp, Homo sapiens
ccaaaccgtatctgcccaaatctcatgtcgaaatgtaatccccagtgttggaggtgggtcctggtgggaggcaattggatcatggggtcggatttctcaggaatggtttagtacgatcctcttggtacggtcttcacaataatgagtgagtcctcacgagatctggtcatttaaaagtgtgtggcacctcttccctctctctggcacccgctctggccgtgtgatgtgcctgcttcccttttgccttccaccatgattgtttaagcttcctgaggctttcccagaagccgagcagatgccagcatcatgtttcctgtacagcctgaagaactgtgagccagttaaaccttttatctttataaattgcccagtctcaggtatttctttatagcagtgcaagaacagcctaatacagtgactgctaggagagaggagccaagagaaggaatacaggaccagggtcttttacttctctttttataaagggaaaataatgagttgggtttcagacaggttgaatttgaggggtctatgggacatccatggggagaattctagccatcatttggaaatacatatctggagttaaaagccaaagaggtagttcaggattcagtcacacagaggaaccaatggaagccttgggagtaaatgctatcacctaggatgagagccacacagggcatttataggcctgaaaaaggacagccaggttagaccttgagaggtgcctaatgaacaccagaggaagagaatctgaaaacaattcctaacaatgtggagtgtcgttagttaaatccagacctctacttctgtgtctgattcttctttaacatagagcaatgactcacctcaatgtggcctgttggtgtttgagaatgaacaacacaggtagctttctcctgtacatcatttatgggagtgtttctcaagatctcctgatagttgaccatgactcacagtgagaaatatactttattttgggaccaacaacatacatgtctatataattatttaaagcaaagggcttcatgaaacaatatctacctgtatcttctgaaattaatgcagatatgttctgttttattttattaaaaaaatgctagtcgggtcccactaagttggtatcacaaccactaatgtgtttcaaacccgtagtttgaaagacactgggttgagggactgtggtttctggaagtccactctccctctagtggtcgatatctttcaggacagactcagctcagcctgaggatcagtggagaggacttaaccccatctccaaaggcctcccttatgtgttgggatttttagctttgggaggaagtttaggtgagtcctaccaacaggtttacttgtgatgttcccagatgcaaataataataatagacttttattgagtcaggcccattatatacattattaacacaattagttttaatactaagcctctgagggaagttcaattatactttctttttgcggatgagaaatagcaaggctaagagaaagaacttgcccacgatcacacagccagtaaacggtgatgctgacattcaaactcaatcagttggtttgcagaatccagtgcttaatgctattcagaaaacgttctgaagagttggacagtgagctgtatcttccttggttcacccatgcttctgtgccatgccttgctaagagacttctgtgtcatttagcaaggcgtagtctttgcaccgtatgctttagaccctctctatgtgtagcttcctcaagtttgaagtttcttggataatcaaatatctgacatgctatcatgtcaggagccaggacaggcaggagagagaaagagtaatgggcaggcaggggctgctgaaagggcctctgaagctgggctggaaaaggcagtctgaagggatggagtttagaccctcattatctccacctggcagcagcttccccactgacaccctgcctccgtgctcacccctaagagtccagccccctccgtgtctccgccaggcttatctgtgcaaagcagcactgtcatcatcactctcctacttcatgcttcctgctgacactgcagcctcatcttgtcccaaactgaactcttctctcttccttcagtgccagcttttcctttctgccccctcccagcatctacaggatacagttctgggtcctcagatggccaccccagactcatggtgggccctcctaccttcctccactcctctcccattatttgcccacgtgaagcccagcctggcaagttttctctctgtccctggattcatggtacttgtctgatctcagtgctatgcccacattgtgacttttcatggaacgcattcccctccccttttctccccatccttcaagacccagttcaggccttacctcttccctatggcatcccctcattccttcctttatttttgcatctttgcttttatagtttacattgatcatatcaccaaatactgtggaatatttaaatagttcatgttttatgctctcaactagattcattcattgattcattttaaaactatttattcaattgcctattaagttttgggcacaggaaatttaaggagagtgagggtaagaataggtgtcataactccaggatccacaaagtgggccagcaccgtcaaggcagtgg

SEQ ID NO: 52185 - DNA, 803 bp, Homo sapiens
ctcggtttctaccatatttttgcgctaagctaaaatttgacatgttaacactaatacgtaagccttatagtcctgatatgatttgtgaatgttaagtactttaataaccattctctagctgactaatacaaggtagaaagttcaggtgctatactcaccttacccccaacaaccatctaagaactcttattttcaagaagtaatttctacaaggttacacagatttcaagatgaaggagaaagaaaaggagaaggagaagatgatgatcgctgaacctaagccagaagccagctttcattctgcgctctttccactgaaccgtacacaattgccatttcataacgtgaattgcatgaacatggatatgcacggactcacttgagtcagtcaagagttttggctttcacattctccagtacttggctaacatgtatagccctacctgcccctttccagcagatggtgctgtttttccaacatttaaatgctacacagcaaatgataacttttgattgatttgagccaggttgcttaagggcgttcaacgaagtctactttgcacattggtattattaaaattgctcaaacataaaaccaatctttgctcagtattgatggaaacaatgtgtgttcgagagtactgataacaaataaataatgaatcaccaccctaccgcaatgatgtattacactagacttttttcctggagacatagaagtaaatgttttagggaggctgtgggagtcagaggtgggtcttaaacaaggtagatataaaagattatgagtcatcatacaaatt

SEQ ID NO: 52186 - DNA, 663 bp, Homo sapiens
tcaccaaaatagatggcatttacatgaagaacggaatgtatcttgtatttgtttccttcctatgttaagcacatagtgggtgttcgataaatgtcccataagtggcaggaacacgctaagctccctacaccatctcttttcttcttacaacattctttagtagttctccttgaatttccatgcctccaatttcctatgtccaagctaatatttacatgtaaaagaagtgacctttggatgttctgaagttgacttctaatcagcagtagaagtttctgccctctgacagcatttgattacatttgggtaactcttcattctctttttacccaggtaagagtcaatttttcaaacagcagagtccttaaaaggttttgaataagaaaggaaaaacgtaatttaaataagcattctatacctggcagttgggaagaatgaaagggccataaacagttcatcagaaagcaccatggtgtgttaaagtataggtaataaaatcacagtatcatttaagaaagcactatagagactttgaaatgactttgctaaactgcaagagttgcattaattcctgtttcttgcgattacacatgagcatgactgcatttggaggaaagcagtcacactatttctgccaagtccttgcagatttatgtgaaaatt

SEQ ID NO: 52187 - DNA, 369 bp, Homo sapiens
tactatgtaacattagttctgatgaaaatgttcaggttctaacccataaaattggggattcaatagccaaataattttggaaaattaggcaaacaaaaataaataggattatttattgtaacacctcctagacctttccatttgctaatgtttgactttccaggagtgtctacagccagtggtattgcctacactttttttttttttgagatggagcctcactctgtcacccaggctggagtgcagtggcgcaatcttggctcacgatcttggcttgaatccacctcccagattcaagcaattctctgcctcagcctcccgagtagctgcaattacaagcgccccacgcccggctaattttttgtattt

SEQ ID NO: 52188 - DNA, 1039 bp, Homo sapiens
acttccacccagaattgaaacagcatagactgtgagtccctcttatttcaatcaattttgatatctagttgcctttaaaaaaaaaaactactaaaaattgctgaaactacccttctaggacctgaaggaacaaggtaatcatgtccatggttaaatttttaattgaaagtcattagaataatgtgattctgaaaatcagagacaaaacaaagaccacatactatgttgcctctgggtgctatggagctcttccagaggcttagagagaaaatgagacccagtcggtgacaagcttagaggacttcccaaatgactgttggaacccccatcctgtgagcgcatgcacacacacacacacacacacacacacacactctctctctctctctctctctctctctctctctccccctctccctcaaataaaatgttgaaggaggtacaaggtacaagaacctagcatggcactggcagattttatttacctggggtgttgcaatcattatctgtaaacaaacagtccttcataattaaacattaacttccacatccacttaacagtggtggtcaagtaaatttatgtttctgaagcttctgtgagtgaatgggaacagactatttggcactatttgcaagaacataaaaattcagaattcaaaaataatcagaatttacctctagaacagctgctggagtctatctgatcatcccatggcagtcatttcattgatcacatgtatcaccctggctcaaaattgctggtgcttcagagaagaaggtgggggaagaaaccaattcctgtgacctatttggccagcgcccaggcaacactagcggtttcctatgtccttcccgactctggcagctttcatggtttgctgtcagaaagactctaggatgggttgctttataatgtttgtttgttcctttttataaaaatgctctatgcttattaaaaaaagagaaaactcagaaaatatataaaacaatagaaatggtttgtaactctgtcttgtagtgatattcagaacacttagga

SEQ ID NO: 52189 - DNA, 941 bp, Homo sapiens
ccaacgaccatttatgctcatttctttcttcagtcgaattgctgaagaataccccatagtggaaatgaaaggaatttgatttctttaacagatgggcctttactacaaatatttcctttggcccagctactgagcccaaaatgcgtacacagacagaggagggcaaccccttcctgtgaaaatatcaacagttgcagccagatccactgggtagaaaatatactatgaaaaaaaaatctccaaatacggatagttacacaacggagctcaaaggtgtgttggcttactgacgttctccagggcaatagagggtgtagttaaatatttgtccatctggcagttttgaaaaacaaagtatttttaaaagaaactgaaatctagacttaaaaggaaaactttataggagcaaaaaaatgaaactgtatgtttttaccatgcacatgtgtttgtggcaagcgtcttggaaagacacgaagccatttagtaagcctggcataacatggagggctgttagggactctatgacagcctagaaagaaccctggtgtgaacacttggaagtgttggttcccccagcccccaagcaggctcagaggacaacctctaaggaaggaagagcctgggggagaggactcagcgtagacagggagagatgattcaggagcaatgctgactgatgttttttcaaaggtaccaatacccagcattgacggaaattatcccggccgggcgcggtggctcatgcctgtaatcccagcactttgggaggccgaggcaggcggatcacctgaggtcaggagttcgagaccagcctgaccaacatggtgaaaccccatctctactaaaaaatacaaaaattagccaggtgtggtggcacatgactgtcatcccagctacgcaggaggctgagccagtagaattgctggaacccagagtcagag

SEQ ID NO: 52190 - DNA, 2039 bp, Homo sapiens
cacaagggtcactgtggtcaacttagaattctacctaccacacctcctttctccaagtgtatcaaaagtcacaaagagatgcctgatgagggcaaggccccagacctcatcagacacatccagactgtctcacttgaggttcttcagtattaatcaatatttttatatgttcatgcattctttctcatggaaaaaattatttacagaagttgtattgcaagcctggcactgtgttaagtgctggagacacacgatgacaagaggtatgacccttgcccttgttcagtggtgcaaagttaatcaaataaacatattatgtaaaattatatctttgattagtacaaaggatatgaggtacatggtgatataagatcctataaggggaatatttgactttatcagaataaaagaacagaagcagaggctgctgactgcccaccaaaacccattctcaacttccattagagaagaaggcacagggctgcccatctgcactgcgcttcccaacttcttttgactttgggagtggctatgtaaagaaatcccctccaatgaatagaagtcaatagtgccacttccaggcctgggccattaaactcattgtcactcctatgagtgacaaaggcattgcccacagcaaccacgagtcacatgttaaggatggcagagcttcagtcaacttaagtccttcaatgactctatggagcagaatcctcagccaccgccagactaccagtgctctcaccaccaaaaccactctggactgtgatgtgagaaggaatgaaactcctttttcatttaagacattactttttaggtctgtttcagcaatttaggcttccccaagtaacacagaactacatgctggcaggcaaaaaaaaaaaaaaaaaaagctttcttatattatgtttatgtaatgtgtctctgaaagactttcacatctactgggagatggaattctctcaataaccccgtgagacagatagcaggccatctattataggacccatgcgcccatgcagatgaggctcagaagaattcagtgactcagggagggccctacagctcagtagtcattctggaatctccatcactgactcaccatttggatttacacaggtcacctctctctttcatcattgataggatatggtcatccctgtctttctacctaagagagaaaaattctatgggggctggtctgtgaatcccttagtaaaaatgacacagatgtgatattcagttccataagttacacaggtaggagagatttagctatattatttggcaatgccttcttaattgtttactcttcaatatcttagctccattggaaacagactgataggcaaaaccaaacataggctgctaagctactattggtcttagatctcttaaattgtaacatctgatgtaatatcatttttgatctcattcttgatgtagttcttttgactctgtttacttacctgtgtatgttatcagaaaatgtaccatttcaaaattttttattcactcatgtgttcaccaaaagttatgagcatttactctgtttaaagtcattgtgctagaccctgggtatccagtagtaaacaatgtgggcatagtccctgccctcaagaagattatagtctgatcagaaaagcggacaataaacaagaaaatatgcaatcttatttaattacaaatagtgattgatggaaagaaagaatgaagaaatgaagatgatgagaactaggacacactttttatatctctctctagttaaatcttctaaaattcattctgcagaattagaattactcacaaatgtattatttccaacttgctaatatagcctattttctacccttggactgcttaagtagttttgcttcacttctaggaaatgcagagctacatttggtacttagcaatagaaatgtctgaacttaggttcctaactcagctatctttctacttcttccaaattgtttctgctttattttctttttcaggtgagaaaaatacatattttaatctcagtctttcatttcaat

SEQ ID NO: 52191 - DNA, 1006 bp, Homo sapiens
catatatttgagttaaatgcattttgcacctactacatgacaacataggcataatccctgccttaatggagcacacaaaatggtgaacatgatcaataattaaacaagcaattacaatgcatcatatatgtggtgtgttagaggaagcccagcatgatgtgagagcacaagcaggcacctcagatgaacttggaaactcaggcaaagctttctggccaggcacagtggctcacacctgtaattccagcactgtgggaggctgaggtgggcggatcactggagatcaggagttcaacaccatcctggctaacatagtgaaaccccgtctctactaaaaatacaaaaactagctgagccaggtggtgggtgcctgtaatcccagctactcaggaggctgaggcagaagaatcatttgaacccaggaggtagaggttgcagtgagccgagattacaccattgcattccagactgggcgacaaagtgaggctctgtctcaaaaaaaaaaaaaaacctttctggaggaggctgaagtcagaacaataaacagacttttcaagataaaacagaggaatgttaggaatgttcccagttttaaagaagattatgctggtgagagtaggtgtttagttgtggcttattattattcattcaccaattccataaatattcattcaatttacactatgtttcagatatatagtaaaataaattccctttttagttttattgtattaatactaaaagtaatagtatcaaaaataacattagtaaggtaagcaccatatgtttattaattttgtctttcattcaacaaacactggactggaatgcctaagaaaatagttgacattcatcaaattattactcaagttgcagacataaaagaagtcaaaatcaggcaaagcctgtgcccataactcatgtcaattccattggttagacaattattcatttgtatttcaatcttttgtgctatggaaaacattctaatttgaaaaaacataga

SEQ ID NO: 52192 - DNA, 562 bp, Homo sapiens
tcatactacaaaaaatacaaaaattagccaggcttggtggcatgcacctgtagtcccagctgctcaggagcctgaggcaggaggattgcttgagcctcagtaaaagagtgataccctgtctcaaaagaaaaagaaaagaaagaaaggaaaaagaaaagaaaagacaacattcatgaacatggtttaattacatgtaaaggctgctacaaatggaagaaagcacagtgtcgactcagatttgagattcttttcacactgtggtggcaggaagcaaaagctggggatttcataaagcagactttgcactggaagagctttaaaaatagctcagcaaatcctgctacacacactgaacttttataacaccatcatttaaaagggtggtcattctgggtttttgcaaagttactagacaaaaaaaagtcactaaagtcatttttaaaagtcacttaaaaatcctctataaatagataagtaggttatcttccatacaatttcacattttgggggaaacttttcaaaaatgtcatcatctggattattttacttgtaaatagacctt

SEQ ID NO: 52193 - DNA, 5247 bp, Homo sapiens
tagcaccaaataaaaagagcctcttgtgttaggtagcaacaataaaaatactaaattcttaatttagaatctgactctccaaaatatccaacacttacacttgttatcgactttaaatccaattattttagataatattacagtaaattatgactgaaatcaacaaattgactcatttcaaggaatgtgaaacaacagccagaaaatttagattatcaatataatctatataataaaatataatcaataattatattgattataaaatatattgattataaaataaaatataatcaatataataaaatcacaccttcccctcacaaaaataattttatgttggtaactgaccctcttcctggggtcagttcctggaaaaaactgcacaggaagcccctaatcctcatgattcctaatcctgtttatgtatcatctatccacttgcatctttccttaacttttctggcatatgttttcaatatagagctgcaacaaaggaaagctataattaacaaatctcttcctcttagctattaaaacaggtgacttatagaaatgcaagacattacaaaaagaaagaattttccagtgctcacagagcacagcttccaggaagatgttaggataaacatgctttcttgtggccaggaccctgggcctggaatctgagtagattatatgtttcagagccaggtactgtttctcatctagtatctgtgttctgagaacattgcttaagctggaggaaaatcacagtataatccatgaccttccggaaggtaatcagaagggattctactcaagtacaaatactcatatcctgtagatgtactgacttcactacccagtgactagttctccagggtgtgaattttccagatctgtaacttcctctacacacagacgaaatcagtctcatatggaggtcgatatgctgctggagggcaaaagtcctctaaaagccaacaaatcagatatgtcaacaaaaattccagatacacattacttttagaactataaggtgctgtgggcagatatttaaaatcacattgtctcccaagagacaatttgttttagacataaggactgacctgattttgaaatactttagcaagggctgaggatcctgagggttagaagaaaacatgtgagcagcagtggagcatgagttacgaaacagttctgggaatgtggtcttccagtataacaagggccacaggagtggaacttgggcagttgggagggggcagaggtgtgactaagcagaaatggggcacagaaacacgggaaggtttgttgtcaaaggcactcattttccaagtccttcaactcagctcagcttgttatatgaaccttagctctaaaccatttcactacatgttagcattttttcctacttgataggaaggaaaagtgaaattgtgtgtggttaaaaaactgagagatagtgggctgggtgcggtggctcacgcctgtaatcccagcactttgagaggccgaggtgggcagattacctaaggtcaggagttcaagaccagcctggccaactagaaaccccgtctccagtaaaaatacaaaaattagccgggcgtgtagcacatacctgtaatcccagctactcaggaggctgaggcagaagagttacttgagcctgagagacagaggttgcagtgagccgagatcgtgccactgcactccagcctagccgacagagcgagactctgtctcaaaaaaaaaaaaaaaacctgagagatagttagaaatgagatgcttctgatccctgttagtttatggtacagaggggttagaatagacaaattattaactgaactaaagtttcctctcacaagaatgaagagctaaaaactatacatactagcagcagaacagggtaaagccacatgttttccacgtttgtttgttttccacatttcatagctccagtctgtacacagctgatttgttgagttatggtgctagggcaactaagagcatgaatgcaaacctcgtgatgttcaaaccaagtcagtaaatgggtattgcctggcctgaggtctcattttctagatacaagtaacagcaacagagtgtgtcgaaactagggcagggtttgcatcaggtatcctcagtggttcccaaaactggcataatcttagaagtttgttttttaaaaatccacattccctaatccttaaccctcaagacaacaacaacaaaaacactactaaattagaattcacaggagtctagaaatctaattttttagaaaacaaaccatcacgtgtttctgatgaccagccatgttcaggagccacagctgttctcatttaatcccccctgtaatttcacaaaagttactaatggatccactttatagatgagaaacctgaggctcaggaggaagctgctcctaggaccaccgctaagtagagagccttagcggaatcaaacctagattggtcagcaaaacaaccatacctacagcaagtaactgtatcagacactttaccctgactccacttcacttcctctaagaactattttacttaaaaaacaactgactgcatgcactcttgaaagagtcaacaagttttgtcatctttctctcccatcggaattctctcattctcctacccatagtgggagctaaggatgtttcttgcctcctaagacttggaagtcttgcgttctcccacatcagaaacctacctgacccaggcgctcctccctcaggaactggatgttgacaatcaacatgggctgatgggagaaggtgaacctcccacacccaccctcttccctggcaagggtcaatctcattatccactactcagccacctcctgcagccctccataaagttcatgcattaaaaggtttttgcttacaaagcaaactgcttgtatgaaatgattcattctacctcacaaaaaaatacatctgaaattatcaatcagagcttcaataaatgtaaaattagtaaaaagggtggatagtttcatcaaaaagcaaataaacttatgtttttgttagtctgtgcagcctaattgtggccaaatgtacattttccttcaaaatccttaaaataataaaacaaacttgcagaaaataaagaatggctgggatttcagagtaggaataactgtagccaaaggaatcattgtagtggtatttcaggcatcatggcgggaggacttaatcacgggctccaaacctttgccccagtaacagccacatactctgcccaatatgaaatctgccctagtcagaaaaagttctagggaagactgtgtagatagaatcattaaggttaaaaaaaatcaattttgttcagatgtgttctctgttgaagggaaagagggaaaggaagaacagcctcactacatgctatgagatggtcaaactttagtgttcacaagaaacatctggaaagcttgttataacataatattcccagcttcacaactcctggaaacgccagttctcctgtctgagctggggcttgggatcctgcattttcatcaagcacctcaggcgattctgatgcaggtttcttccttaagttgctatttaaaaaattctgacaatgtggtaaggttccaagaacaggacaatgaacgctggtctacactacactgagatcaaaggttggtaaactttttcagtaaagggcctaacagtacatatttttggactgacagtctctgtagcaactactcatttctacccctgcagcaggaattgcccacagttaataagtatacaagaatgagcttggctgtgttccaataagatttgatttatggacactgaaatttaaatgtcatagaattttcaccacataaaatattactcttctttttctttcttttgttatatttaaaaacataaaaatgattcctagctcagaattgcaggcagaggtttgccaactcggatttttcaattgtgatcatgaagccagcttttctatggatgaactttaaaacttaatttttcatatttagactaattattttgtccctcttaggaaaattacaaaaacacatctataaagatgttttctggtccaccctttgctgtattttcagatataacatgttcacagcttgctatggctgataattttggatgtcctgtggggcacagttcctcatttagaaatcacagttcagtcagtcattctctaaatttaccacataaaaataaaaagtgtgcgtgcccttatccacaacaccagggcctactgaagcatccttttattagtttttttctcaaattgaagataaataagggaaaaacaaaaaaaccttttctcttccaaatgactcaaatggtctagcaagtctgtgaacagcattttgccatttgtgagcaaggaaccaggaatggagttcctttattttttttccctccatgaccttttgttgaaaactagcttaaatagtgtctgctcacatttccagcacactgggttataacagtaataatgtaatcataactaacagtaatgatacaaatctgctgccctattaaaggtctttacctccaggggaatttctcaggttattaaacattgtttaataagtatctggaaaccaaataagaattccagaagtaagctccaactctgcatgatgaaattaacaaacattgtcatcattgaatctatgtattgtgtttatctactaggaacaacagaaaaaaacacttgaactaactaagctcattccttcttactgaaatgcttctcaaccagacacatccaaacatgacctcatctcttaaggaatgaaaacctactgtagttatctaaagcactcaagcctcgatctgtcacttcattaccttcccctcctcaagacaaagtaacccactttaatggcatgaggatgtgttgtctcttgatgaagttagagaacagaggagtcataaatcctctcttcccatccccgagtctaaacatcagcttagaggctgctttgcagtcatagtccatgagatggtgcgtctgcctttcatcttcttgccagcactctcttccagcctctgaagataatatatggcatgctgactcaggtggagaggcaggaatcacagcaaagacttaaaccctagtctgtggatacatgagagccctctgtgttgctcgtcagctggctgatttgtggacgaccacatttttggagctcaaccaactgcctcacctgatggaaaatgcttatgaacttataaatcacctttgaata

SEQ ID NO: 52194 - DNA, 545 bp, Homo sapiens
tatgacttttctagagtcccaggcacccagtgtgtaacaacagagtcaaacaatgttttcagactctggggcatagcctgcctgatatttttttttttttttttttttggcaaaacgctctccccatctctctctctctctctctctaccccccatctctctctctctctctctctctctctctattacctagtaaactactagaacagtgagactcagcacccacctgcttccctcatgcaactcccaccagttaccatgctaacaggctgggatcaggttcctcatgcagctgactgcattcagatgctgagctagcaaatttcatgccaataaaattacatcacgggtgtattacaaaatgcaggactgctaaaggaggggaacaagcataaacacagacttgaagaaactttaacctggtgtggtggctcacacctgtaatcccagcactttggaaggccaaggcaggaagatcacttgagcccaggagttcaagactagcctgagcaacacagtgggactccatctctataaaaaatatt

SEQ ID NO: 52195 - DNA, 905 bp, Homo sapiens
ataattgattgctctagtctcaagcaataacactgagaatgaggagaacaaacttgtcctgaatataagaattaaatgacaagcatatttaacatgacaactagaatgactattatctgtagaaaaacatacagaacaaaaagtttagttcttaaagaactaaacttgctaaattagagcagcttctaagaaagcaaatattagttttttaattttctccctacttttactcccttcctcttttttcccctactttttaaaaactttagtctaaatcgcaagtgttttcttctaagcagaaattatccttctgtgaaattccagctatattaacctagtactttgctatgaattcaattaatccagaaaaaaaaaaatgtatttttggccctctagtggcatcaggaagaggttgctaattttttttatgttaaaaaaaataataaaacattcctgtgtattatcagaaaaaaaaatcaagggttattttaaagctttaaaataagtaagtatttttaagcaattacaaacctggcaaaggtcagtcctattccattatctgcaaatctgtaaaagaagagagaatgaagaacattttaatttaccatattatgtaaaaagaggtaattctctcaatatttaattatcatgaaatccaaaaggtcccaatatttactctctacatgaccacacaaaaatttgatttcacaataactaggagcacagaatctgcagtgagggcacccagttcaaatccgggctttgtcaattattagctgtgtgacttttggcaacctactcaacctctatctctcacttttcccatctgtaagttgaaatgaaaatataaccttcctcataggattcttgagagtattaaacatactaaataatttctagtgttg

SEQ ID NO: 52196 - DNA, 1215 bp, Homo sapiens
attattgcaggttcagaattgacaataaaaagttgtacacacgtctcaaagtggttatatcatgtatttttttaaaaaagcaaatttaattttgcttgcaggattggacaaaagagaaataattggctggtataaaaattcactttcaaaacttttccatcattatctacgttaaaagttatgcagaattaaaaccaaatcggctttccatgtaaccaagacagcacagatgttaagcaatatggtttttatctgtttacctccaaacctgttcaatagatgagtcatgcctattaaacaactgtccaccagcacgcagagatcactgacttctttcaaacaagtctaatgcccttcctgtcctgaggcaaatttttgccaaagaaaaaaaaaccaccacacgtatgaatcaggatactgtctcaggctgggccctgtctgttcaatttcagtattactgaccttaataggaacataacagtttaaaattttttgacactcaaaaattagacataaaaatggaaataaatgttaattcccatgacaaatctttattttacaactcaattaaaaatcagcccaatgtgaaggacaacttcactttatggaacttcgattaaatagtttgttaaaacttaatcatacagtgtaaaaggacagcattaattcaaattcagcacacatttatttagtgcccactatatgccaggtatacagtaagactattctcaaataattcatagtctaataagaaagatagagataattaaaatataatatacctaataagtacttactagctgtaacaaatagagtccattgggaggagagatgagagaggaattatggaaaacatatatttatacctacacaccagaatgaatgccatgtgtaacattttccatgataaaagtctacaaatgggtcttaacaaaacaaactactctgaaaaatgtttgctacctcaactcttctgggcacaaaacagacaagttgacgggataagacctggagggtcagaagaaaactccataccataacccataagctgagggcagagtggaccatcctaggatgcaatggagatggagatgggagtgggacggggataaggggagtagcagctgtttcctgttaaaacacagtggtgtcaacacaggtaaaaggagctttgtaaaaggcagtggaaaggtacaatgaaaaaaatggtttgat

SEQ ID NO: 52197 - DNA, 1796 bp, Homo sapiens
aagaattcaacataaatgctaggtctatacatacagctatttatgagaaaacggacatatggttgaaacaattaagtcaactttcattcagagatctgctcgattgtgtattagcatactctcaaagaattgaaaacccttagacctctaaacaggtgtggggccaaggaccttggccacctgaaggttcactgaaaaatcaactcacaaaagccagatcaacaggggaaaagacacaaaactttatctaatgtgttatacacaggagacttcagaatgaaaacccaaccccctggtggggtacagaagtgtgtaaataccttctagaaattggagaaagaatgcaggctcagagcatggccgaaaacaggttacagtagtaaatcaggttttagctgtaagacaggttatgtaaggaggcttggcaagcaaaggtggtcttgttatgtagatgaaccgaacctcacaggtagcacccctgagaggagagacggcaaatgtctctttcagatctgtaaggagtcagacttaattaatccttcctagaaccggacaagagaaagcctggctgcattaatgcatattttctatagatgcaaatttcccccataaaagactgctttgcagggtgacttctgtttgctgctgtttgctgacatctcaaaatatgtcaaagaaatatatttgggggtaaaatattttgatttcctaaaatagaagattttccacaggacatgccttcacactgtcccacaaggcgcattctccattatttctttgcccttgtcacagcgcttttgtctttttccttcaactctcaaaaatcagtatgagtcacaatcacctgcaactgtttggcatgtttccaagaaataagacactctgcacagttagtttacttacacagatctttgtttacttttattaagcagattatagccaggtcaatgttcagaggtagaagggaaatgcaccaactcttaattataaacctctgcctatgaagggaaaggacaagggactgagaacccctaattgtttatatgtccctacctgctttatctatttgatcgatttagacacatataagtgatattcccaagttaagctattgttataataaacatctgtatgcatcagacttctagattcacaccacgtatcactcagattatctccttccttaaagaaaaaaaaaatcttgcctgccccaaaaacctattaaaatataatacagcgaaagtataagaaactgtgggggtcataggcttttggctccctgaaagttcactaaaatccctgccatgaggcagtttgattcacaggagaaaagacatatttaatgtgtaagcatgggagccttcagaaggaaaacccaacttcccaatgaggcacagaagttgtatgatatcctgaggttccagggagaatgagggcttggatcctggtaaaaaaggttatgggaaggagaagaggaggaattctattgagggaataaatgattactagggagaatgattggatggggaaacagaaattgacttctagatagttctttttggaatttaaatgatccgtggaggtagtctttatcttgaatagggctgttcggatgtggttagatttttggtccttcctgcaacggataatgaaataaaagggaaagaagcagggataattgttctccttgttggggggtacggggaggtgggggggggatggcagggggtcagtcctatctttgtagtaggggaaaagtctctccaggaactttttgatctctaaaggcttttaat

SEQ ID NO: 52198 - DNA, 4322 bp, Homo sapiens
tttcctctttctaaaatgtggcttgtctttctcaatttcagaaacttgcccaaagcatgtagctctaagcagtaccctgtcaacttcaagataatggcccacaagactacattaccctccagcttgtcttttcttgatagctgtttgaggacagcattgattaggcctattagaacatgactgaagtgttgccccattctggtttcctgttatgaatctgacatttctgaaaagtcactggttacagactagatcaaggaaggagactactcaaataattaactgtgacacagaatatccagataaacaccatgtaagaatttacagattctatttccctgtccacacacaggagagtcctcagctcactatctcattcacaggttaataagaacaggtgatgactcagaattcgcttctaatcttagttttctgagcctttaagcacacatacatcagaaaaaaacagcgtcaggaggactgaacagaaagccagaagacagatttccagttccgcccaaactgatcctctaatgcaggtacacagaagctgggggaagtcatttcggtgtgaagagaaaagcactctaaagtgctacccaatgtttactaagcagaggacatgcctactacacattcttctgctttgcccagaaatgcaaactaaaaagaaccctttgtataggtaatcagacccacaaccacagtatgatacccagaccaattctgaaaagaacaagcgtccttcaagggtcaaataagcattagtagctccattctagccaaccaaagaaagataaggctaaccattttaaaggtgtttttttaacactgagccatttccaacagatttgcctggctgctctggggagtcaggcctccctcagctcaggtgaagcctctaccctttcccctctctctaaattcttctcactttttaccgggaagagcagcacatctcaatacatgcaactgtgcagcagcgcatcactctgtcacactgaatcaaggggagtgaactcaaggcagtgagtagctcatgtgcacaatgaaagttttaaaaattattaggcagtctatccttaatcccaactgctgataaaaggagatatatatcaaagtctgttttcctaacctgcggagaattcaagtgagctgtttccgctccaggtcgaagtctggtgacactcatcaaccctcagcagagagcatccagggaattcaggaccttggttttatcgctaagggtgtagccactagtgctattaacagcagcactctgggtcctcacagagagggcccccctcctttaccaggatctcccaactctgcagagaaaagctgggaatagggtccagggctaaggctattccccagatttaaaggaagctgtacacgattttaaagcctcaccttacctcagctaacagagaggcagggggcggagggcggaggacccaccaacccaggggaattgtaaggagacaaagatgaccccaaacgcacaagcgcgcgcgcactgaagcccggactgcaaagcacattccatcaacctttcactgtaatcggcttactgtggggtttatcccctcaccccatccctctccagaaagtttaaggctgttcgcaccgactttgaaaggtccattgttcccttccccgtaaacgtaatgaaaagagagagtggagagaaagaaatcaagacaccgttcccgaggaccctttcttaagaagagaggactgactcctggggagtcgggtcagtcccaatccagagatgaaaccgggaaaggaggcgcacgggggaagggcgggaggacgttttccttttcggcagaaatgcccaacgccggagccggccaggccgccgggagcagaaaaggtgggcgagacccgggtctgcgtccccgcagtggcccccgagggcagcaaacgaggtggagcggggtgggggggcgggtgaccgagtcgcttcttaccttcccctaccccgcttagcgtccgttaactcaggtgcctacacagcggtccagggagacggagaggagtccctggcgtcctcgggtccagatctcctctccatggccaggaagccactcgattgccggcgcccgcagctgccgctcgtactcaactggcagccgcagcctctgcctggaggtgaaatactctcctcccgagagtgacgcgcacttccctccgcctccgcctcctcctcctcctcctcctcctgccccgagcctcgggggcaggggcctcggctcgctctctcccggagccgccgctcggctttctccgttccttcccctccgggagaaagaggaggagaatcgtggcccgggcggcgcgggcctgagcgtccccgcgacaacaggggaggaggcggcggcgcggggcagagtggggtcccaggagtcgctcttgtccctggtcggcgggcgccgcggcttgctagggtcgcgctcagcctccgccggccagacaagcagcccggctcggctgggccgggaactgtggattgggcgggcgggcgggcgggcggtggagagcgagggaggcggagggagaggaggagcctgccatcagaggaggcggtggccccgcccggcccctcccgccggccccgctccccgcgagctgcgaaagcggaggctcagcgccactcgctgccgcgcgctggaacagcgcccgagcgcactgccggcggggcagagccccagccagcgccccccgctgcggctgcaggctcctacccttcctgggcgcgcacacccgcctggccgaaccggagcctgtgcctccagcacccccagataaggctggtactgcgcctgtcactccctggctgagcctgacactgcgcccccaaagtcccctggctgagcgtgactgcaccccatcaaccctcggctgcgtcagactttgagccccatcacccgtaaagagatttccacactcccacaaatgttctgagcgtccagtcacagcccctacctggccaggcgcgagcgccaggttctcagcgctgtcagaagaaccagcctgctctgggacacagggcagctcttctggtcccttggagcaaccccagcatcccgctcgcaggccggaataaatatacttaggtcttcccacgccccctacctgcgccactctggagtggcggccgcttgcagaggtggcgccgaaagccacgccccggcccaccccagtgccaaaacgccgctctgaggacaccggcaccggccctgaagcagccctgccgccgccaccctgccccctcgctggagctgctctcacagccttggctctgggtgagggcgcggcccgggctggatcactcagacgcacgaggtcccgagctagtgacagctgcaggactgccaaatccgggccgtcgtcatcctcgatttaattggaattggaagttttccctccaggaaactctttcagtgaataatatacaaggtaggatagtttagttttcagggttgttcattcctcctccctcaacaaactcagtcctgtaaccgcgacacacccggcagtgaaggggaatcccctatttcaagggtattagttcaggactttgtataagaaattactgtttccaaatcttggctgatgataagaatcccctggggcacttagaaaaaattggattgccagacgtcgcgcaatctactgaatcagaggtatcgggaatatgtaagtttgggaaacagggctagaatgcatcctctaattaattaaagccttggaaagatgcctccaaaacagcagcgcgagctagtgctgagatcttacagaaacttcacccagctgcctttgagagccgctgtcccttctgggataggcagggaggaaaggtttttaaaataaggaacatagttttgaataacaagatggaagggacaaaagactgttttcatggtccaaaggtgttttggattgtgcttaataaagatagaaactgtgtcacccgtgtgctaggctgaaaaatgttccctccccagagataacaggttctaagtcctggaacttgtgcatattaccttacatagacagaagcagggccttcgcatatgtgattcaattaagggtcttcttgagttggggagattattctggatgatcaagatgggtcctaactgcagtcacatgtacttttataaggggaaagggggtggttagcacacacagaggagggctggccactgtggaggcagagattgaagcgatgcctccacaaggcaaggaatgccagcacagaggcaaggattctcccctagaaactctgaagtgagcaagatcctgctgac

SEQ ID NO: 52199 - DNA, 853 bp, Homo sapiens
tactcggaaggttgaggcaggagaatcgtttgaactcaggaggcagaggttgcagtgagccaaggggaaaaaaataataataacacatgattatacagacagtaataagggaaataaacaaaattaggagtaataagtgggataaaagttacatcgatggccttccataagccacatttcccaatatttacattctactaaggtcctctcctacattgactctgaacttggccatgtgacttgctttggccactgtaacaacagaagcgtgatgtaagcacaggcttcaaaagcacttgcacacgagttggagcaggattgtgaaaaagcttatttaaggtgacgtggtcaggaaagacgtgtccaagaaagtgatagttaagctaacatctaaagaatgttgaccttgaggacaggaatttaaaaagtgagataagttatgatgatgagaaaagagagactgggcaaggtgcaggctcatccctctaatcctagcattctggtaggcagaggcgggcagatagcttgagcccaggagtttgaaaccagccggggcaacatggtgagatttctacaaaaaatacaaaaaattggccaggcgtggggttacatgcctgtaatcccagctactcaagaggctgaggtaggaggatcacctgatcctcaagaagttgaggctgcaatgaggccatgatcgtaccaccacactctagcctgggtgacagagcaagaccctgtctaaagaaaaaagaaaaggaaggatcagggcaggttaaggcttgaggaccagagaatcaaggcttgaaacattgtggacccagcagatgccaatggcaaactttttgcataattt

SEQ ID NO: 52200 - DNA, 2032 bp, Homo sapiens
aaaaaaaaaaaaagcataaatgttatattttgtcacaagaaataaaggtagatccatgtgggacaaaaaaaaagaaaagagaaaaagaaaaaaagttgtcttttaggagttgtgggaagccatcagaaggctttcagcaagggagtatcatgatctgacttatgttttatgaagagtcactctggtgctatgtgaagagaagaccgtcagaggaggacagtgaaggctgagggacaggaaagaatgcttattttccatttccagatagtaaccagtgatttttggtggctctaggaaaaggacatagatacaaaaattatttggataaaaccgcgttctttagtccagttctttccattcagtatgttacgaacatccagctggtaggtcctggaaaccagtcagcaatcaccccactcaacattagctttttttttttttttttgagacagagttttgctcttgtcacccaggctggagtacaatggcgcaatcttggctcactgcaacctctgcctcctgggttcaagtgattctcctgcctcagcctcccaagtagctgggattacaggcgcccaccaccacgcccagctaatttttgtatttttagtagagatggggtttcaccatgttggtcaggctggtctcgaactcctgacctcaggtgacccacccgtctcggcctcccaaagtgctgagattataggcgtgagccaccacaccagcctagctcttatcttttttgtgcaagtaatttcttgtcttttcctcaatcttcccactgcaaggtagggatagtagctaagatatagccaacaaagccctggacttggattcagaagacctggtctgacaacaaaaacctgtatagattgggtaagtcatttaacctctctggacctcagattcttcataagatgaaaaataatgctaaacttttcacagagaagttatgagaagtaaaattcaaaactgtatttgaaagaactttgagaactgcaaagggctatgcaaacagaaagaatgattactgaagcctgactcagctcctgttaaatcttaacccagctcagacctggcaatcactaaaggaaagaagatggggacaaaaatatttctcccattactctcttgcacttagctctggagatggttggccggagggcaggctaagatttttcaggaaagagaaaaaggaatgggagagacagtgggaacctgagtactggagggaaatgggagagaaaacacaagaaaaaagctgattctggatagtagacagtggtgccactgcccagattgccttttaaggcttgcagtcaatagatagtctctaactaccagctatgtcagggtctgacagtgaagaatgcactggccagggaagaatgcagtgaactgggaagaatgcactggcctgggaagaatgcactgaactgggaagaatgcactggcctgggaagaatgcattggccaggaaagaatgcagtgaacaaggaagaatgcattggcctgggagccctgtcctgagatacagaccacagcggctctgcctgaggcccagaattcaggaaaaggcaaatccagacacagaaaatgtttctattcttgagaatgaactgctggcccttccagaatgaaaggggcccaatgtagtcaacttcttccctagtctctgttgctggcagctgcacgttttgtagtggcagtcttggtaaatgggaatccacaatgcttgttccatgagtgacctcaatctctgctaccacggtcacttgattcgtgtgtctatcatgccaacactggggtggccaatgacagagatgtctgtcagtcaactggctaggacattttggctacttggtttttagtgactcttttgagggtgctctctggtggatgttcacattttatgcactttatgctcattcccgtatgtctatccacatccctctcccctagacctccaatctttttccctccaagtcccaaatcagctgaccagaccatttgccattgctcatgagtttgt

SEQ ID NO: 52201 - DNA, 2575 bp, Homo sapiens
aagcccaaccatctaaagaaaaagaaccctacgacagccccaccggaatacacaaatcgccaagccccgtgcagattcaatctaaaatcgcgcccgacagagatataaggacattcaggagaaagcttttaggcacccgcgaatctctcagtgcgccagtgaggggaatgggaacctgaccccatcttttcatccactgagagaaaagcaaaggaaatgaaatggaacccttctcttcaccgaggaggaccaaagaccttcttagagtgtcggtcggtcctccctcccccaccccctgactccggccgctccacggaccgcagggactgtcctaccgctccccttcacgcaaccatcagagaatcctctcaaaaacacagacccgatgaggagtggcttccccgcctttcccctgtgccgagaagggatcccggtcgccaacaacaaagacgcttcccgctcccctccccccgccggcccgggctcgtccctcccgcgctgcggctcccggcctagcgccccctccccgagccgggctgcggcgtccccaaaccccgaggccgcacgcacctgcacctgagcggcccgggccgaagcgccgggcagaaggggtcgagagagaaccgcagccgacgcgctgtcctccacaaggcgagatccgcgctccgggcgccgtccgactctctccgcctgcagactggcccgacagaggagcggggaccagggctacagcccccggcgccggggcgaagaaggacggcggcgccccaggggccccgctcacgctcccgagtctcgcctcgcgccggccctgctcctccacaagagctcgcgttctgctgactaacggccccggtgcggggcgctggagcggccgccgctgcccgtcggttgctctcgggcctcacgtcccgcgcggccgtggtcgcagccgccgccgccaccgcctccctttctggcactgcagacgccacccagacctagccaggtcttccttctctttaatcctgctttctttgctcctcctcagcctgccaagcgcgaggctcgttccggtagcgggaggaagactggaggggaacggaggggacgagcacaatccccactgagccaggagttggccactgactggaggaaggtgccaaagctgaccccggctccagcctactagcgggcggggggagagacggagcccagccttgcctcacttccaccaatcagaggccgcccggcagggtgggaggcgctctgagctcaaggagaggctgagctcgctcagcaggaggcggggattgcggaaaagaagaaccaataggaacaaaggttccccgcccctttgatttgatggactacacattcgggccaatgggggaattctcatttcgaagaaagtgggacttgttctccgggtttgagaaagaggctgcgcggagccggaggggtcgaggctgcgccgcgtggagtggcttggcttaacagcagggagggcagagcgatgctctttgacctcccagaagagtcacgtgggctgacccagagccggggcggaaaggctgcgtttgtttcttccgggtcattgacagaagcgtcaattcctgggagtagttcgttggttttctttcccctcatccttttgcctgctcccggcgaggggtggctttgatttcggcgatgagctcccagaaaggcaacgtggctcgttccagacctcagaagcaccagaatacgtttagcttcaaaaatgacaagttcgataaaagtgtgcagaccaaggtaggaacctgcctgttgcaccgtctttgactccaggaaggaatggctcactggagaggggagagaggaaatgagaggagtcggctggggcgagtgtggaccgcagcccagagttagtcttggctgcagtgcaactctttctaaaatgttattctcacgccctttctttgacctggacatgttgtctcctggtaaatatttgatggtcagcacacttaactaattgcacagagtgaacaggaccctaatgaaatctaaggtgcagatggggcagttacgtcgttcagcgttcccatctggatcacattagcagagggaaacgaggattgtggcatgagtggctttttcaaattttacaccaagtttatgcagctacgatttttttttccaaaaaccccaagcccatagaggaaatgtgaatgattaagctgtcttaggctgtcctcactagtattgtgtgaaatttctgttttgtaacaattgttttgaagataaaaatatttggttaatgtaaaaatacttgttttgctgtttatctttagcaggacttctgtaaagtcctgctaaaaaattcagactgtctagatagccagaggacttgggttgtatataagtactaatttgcaggccgggcgccgtggctcaaagtgctgtaatcccagcactttgggaggccgaagcgggtggatcacctgaggtcaggagttcgagaacgacctggtcaacatggcgaaactccatctgtactaaaaatacaaaaattagccgggcgtggtggcgggcgcttgtaatctcagcactt

SEQ ID NO: 52202 - DNA, 3690 bp, Homo sapiens
acgaggtcagcagatcgagaccatcctggctaacacagtgaaaccccgtctctactaaaaatgcaaaaaattagctgggcatggtggcgggtgcctgtagtcccagctactcgggaggctgaggcaggagaatggcgtgaaccagggaggtggagcttgcagtgagccgagattgcaccactgcactccagcctgggctacagagcgagactctgtctcaacaacaaacaaaaacccaaaaacaaacttattgctatttttttggtaacaaagtcacaggtacttctaatattttcatggcttgctgcttttatgcattatggaaggaaaagctatgtttcagttagaaatgggcgaaaataaaggaatagtatttttttttcccatcaaagttcatggacaacttcccctacattccccaactcccactgttgagaaccatgggaagcgggtgcttgcaaggatctcagggaatattaaccaagcctgtctttgcagacggtggaagggaagggagtgacatttggtccttgcccaaggtcacatggctctttggtggcaaggcatttccctaagtgttcccctgctcctttccattgtcttttcattctccttccagtacatctgtctgcttctctctttctccatggctttttcttcttctatgactcttcctagtcataaaatgaaatggagatctttaaaaccaaagccatgtgtacactcactgctttctcattcttatccacaattccagagtttttttattgggcctcattgttctcatttacatcctgtgacttttcacatgagccctctgcttagatcataaatccgtgtacattcctatatctcaccccaagaacacgctgcactcttggtggtgcactctttttttttttccatgtgtctacattagcgtctctttcacgtgcggtctgagaactacttttagcagaatcacctggccctctgcccagcctcatgactacatgggggtgggtgttgaaaacttgcattttattaagcttcactgactggtctaatggctctgaatgtttgcgaaacacagacctgagtcctgcccttcctgaagggccacactagttccaccgacactagttattctttttttttttttttttgagacagagtctcgctctgtcacccaggctggagtgcagtagcgcgatcttggctcactgcaagctctgcctcccgagttcaccccattctcctgcctcagcctcccaagcagctgggactacaggcacctgccaccacacccagctactttttttgtatttttagtagagacagggtttcaccatgttagccaggatggtctcgatctcctgaccttgtgatccgcacaccttggcctcccaaaatgctgggattacacacatgagccaccgcgcccggccgatatagcctcttctaaccacaagagcctcactccccctggagactcctacttttagtattgctgcttcttgtatcctatcctgttagcatgattcaaacgttaaagccaagaggaagaaggaagagaatgaggtgatgaatactggtcatgtaccggatattctgcaaggctcagtgacgcactgttgaccatgtttcacaagtaagaaaattaaagtttaaaatgttgggtaatgtgttcagggtcacacagttaataaacggtggaattaaactgctagccttggtctttttttttgtttgtgctccagtgcctctgttctcatgacacagactttattcaacatatcctcagggttgaggcatagcatctttgcatttgctgcatctcaaaatatgttcctttttttgcaatcatctggaattgatccttcacagatttctttctcattttctacccactccctttaatgtatgtcctgctaaaagttctgtcgtggtctcttctcttttctcactcttcattctaacctcattttttgcacctatgtgccagatgcctgaatctatctcaagccaggatttccctgttgagcttcaaacccatatgccccaatgcctagtgtcagttccatagggactaaaatccaactagccggactttgttccttggcctcacttccaagcaccttttcttaccaaccacttcagctgcggtagcagattctgtgggaagcctctttcaacatgttctccagcctgtatttggtggacctccccagtgcagaggctcccatgatccttttctattctaccccttaatttctcagggccccagggcttagtcctaatccctctttccttcactcattccttaggtggtctcattgagtttaaaggcgttttcaagcgtagattttactgatggatctcaaatatctctctctccagccagatctctcccctgggcttcaaacttgcatatcctatcacacattagccatcttcataggggcgtctaatcagtgttgcacacttaatatgtccaaagagaatactgaggtccctgctgcctgctgtgctcaccttgcatgtggtgcttgactgaccctcccagccctttcaggtttctgctcatagacgccttgctctgcccacctgtctcaaatagacacccaccatcaccctaacccacttaattttatttccataacatttgctttctgaaattaggtgatttatggtttcttgtctcattcttccactgtaagatctctgagagcaaggacatgttcactgctgccccctggtacctagcagggttcttgtacataggaagcgcaagcagtatttcttactttttgatgctcactgccacttttctagcacaggccattatttctcacctggcttgctgcaaaagtctaaatgctttctttgctccagttccaattattttccaagctgaagcccatgtgatcttttgaaaacacagaactgtttgtctgctgcccttttcagacctttcagggaggttctgtcttagtttggttggaccttctgtctcaagcaacagaaatgcctgagcttgctcaggcaatatgaattttctttttcagctcagcatggtcttggtctctccctgtggtcaccagacatgccacgattctcttgtacctcaaaggccctggcgtacgtggacctctctatttagaagctgtattattcagggttctccagggagataagactgatagatgtgtgtgcatatatagagagagggagagatatttattctaaggacttggctcacatgattgtggaggatgggaagtccaaagtctgcagggtaggcagacaggttggagacgcagagaagcactgcagtttaagtctgaaggcagtcagctggcagaattccttctttctcagggaggcagtcatttttctcttaaggctttcaactgaatgaggtctcccaccttatgatgggtaattggctttactcaaagtctactcatttaaatgttaatctcatctaaaaaatatcttcacagagacatctagaataatgtttgaccagacctggatattgtggcctagtcaagttgacacatcagaaaaccttttccctccaacctccgaactcttctggttaatttctttcagatattggcttagatacctcctttgagagccttttatgacaacatgggggtaggtgtctctttttttttttttttttttttgagatggagtttc

SEQ ID NO: 52203 - DNA, 7120 bp, Homo sapiens
aacaaataaacaaaccaaaacagaaccaaaaggatctgaaagaaaatccttcctgggctgggcgcggtggctcacacctgtaatcccagcactttggaaggcggaggtgggcggatcatgaggtcaagcgattgagacaatcctggccaacatggtgaaaccctgtctctactaaaaagacaaaaattagttaggtgtggtggtgtgcgtctgtagtcccagctactcaggaggctgaggcaggagaatcgcttgaacccaggaggtggaggttgcagtgagccaagatcactccactgcactccagcctgggcgacagagagagactctgtctcaaaaaaaaaaaaaaaagaaagaaaatcagaaaatcttttctgggagaatcaacagtatgtctgtgggtttagttggtctttcctttcaagctagttcttggatattctctgatgttatctgtcttgtcgtgaggatcaaatgaaataatgcatgagactgggcactggctctactcttctatgcaaaaataaggtgttgtcactatgaactgatgacctaggaagttgtttcctccaaaagagattagattgttttccacattcagtttttatgtatctgtttatcttttacttttggccagtttgttctttttcttatctgttggaggctgtaaaccatttattagagaggactttgaagtctaccttaatcacctattttgcttagtggtttcatttgaaccagacttccaggttttcctgtttactggattttgttgttagttatccacgtcctcacagagaaagggcttatgataaatggcaaattatttcatatcaggatgagattaatacaagtggcaaaaaagtaaacattaaattagggttgtgttgctgcttccagacctattactatcatatttataaagctacctccatatcttagtgaaagtggcaagtgtgtttattcgttattctgtgttctcttctatactcacctcatatttcaagtaagtgattcaaataatggagtgatagagtgtggtggggtgggagtgtgttgggcagctttcttatcattcttctgaaaaattttctttacattggcaatatctttgctagttataatagtaataatgataatgattttaaaataactactatcatttttgagcacttgccacatgctaggcattttatagccattacctttgcaataataatggaagatagatactattattcacttcccaatgttgatatatatatgtaacatatatataatatcatgtaataaacatataatgtctgtgtaactagagtgaattatttgtattaagattttgacagctccttcagggagttctttgccagtcttcaagccagcacgaaaccatcacagtagtcctgtgagacaggctggcagccagcatctttatataagcagggcttgagcctgattcacttttctgactagcacctagcttatttttagaatgcaatacgtggtaataaaaataaaatagtgaatagcaatacaatcaaaaatatacaaatacacttctcagattgggtggagtctcactggagttttttttttagggtgtctgaagttatgtccttgcctggcaatgagagatggaataaaattactccaattttttctttcttttctttttttttttgacagagtttcgctgttttgcccaggctgaagtgaagtggcctgatctgggctcactgcaacctctgccccctgggttcaagtgattctcctgcctcagcctcctgaatagctgagattacaggcatgcgccaccacatcccgctaatttttgtatttttagtacagatggggttttgccatgttgactaggctggtcttgaaatcctgacctcaggttatccacctgccttggcctcccaaagtgctaggattacaggcgtgagccactgtgcccagtctctttcttttgattaaaaaaaatattcaaactttcaacagaatagaccagcagcctctctccatgagtaaaccagagaatgagccaggcacggctgcgttctccacgggctgtgcttcactcctcttggcatgttggccatggcatcctgagtttgctcgcctcactccacctccagacccgtggacatcctccaactgtttctacagtccaagttaggactcaatgggtgttgaatcacacataggataaggctggggagtcattcaagaaaaattacttgttgggacccacacagggttcatagtatctattgcagagtactttcacatcccatattctggccttcaatcttatagttccacagatgcagtattgccagggtcccaggatttcccaggtaaagggagaccgatgatgttcactttgctcacaacagattccatggaaagcccaaactgctagggtatttagctgaccacgagaaatgtaactgccccaatgactctctattagtgccatctatatgagaagctaaacattaaccagagggttgcttggtaagcatgaaggaagggcaggggagttaacagaatgagttgtgtatttaaagtcccaggttaggtcagacccgggccaggacactcaatcttgccaacaagatgagataagaccaacctttgagccagagaatttcatcccctggaagtttcccatcctggagatgacttgtgcttgccagacgttgttggatgggcattggaaatatttcccctggcctctgtcacctgcccccagcacaatgcactgagcagtcactgagagaaagttagacaataaacactcatagcctggagacacagaatcccttattctaaccctgcattcacattaggaggtcatcacctttctgaaataagatgccatgtggttttcctttattcatcatgaaggaatacaggtgaaagtaagccaaaaataaaaactaaaaagtgggcctctgttccaaatatctttcaatatcatttagtggcttatttatgtagttaagagctgttttacaaaacagatactaccaggaggtgtaagcccacctaatactcataacttagtgcatgtaaatgaagaagtttttggtgagatctaatgcttggcttacaaaaaagtgaccattaagaacattacataagaagcagctgagtcctactgagtctcaacatcttgctgaagtccacaccactggttagtggaagaggcaaagtctattcttgttctccttaacacttttataatgtattagtggccaaactccacttccacatgtatgtctgaggttgaaaaccactggtgtattgaaatagacatatgtgagcagatgcttagtgtgttgttatatgattgaggtggctaaagagttacaggaataacaaggcaggcaaccaatccagtctaaggcttggaaagggtccatgaagactttagagtgaaattgattcttgtgtgagctgagttgtgaagggtaagtttagagtttaattaggtaaaggatatggggaaaataatccaggcagataagagtccctggacaaacactcaggggtttccaattttttcatctgctatcttcacctcctatccttattcacaattttgccttaacccataacctccttccattggatgtacaccctgggatgtatacccatggaagaggatgcactagcagctgccatgtgtcaggcatttgagaaataagggagcaatagtcatcacaaggacagtgcaattggttggctgtggttaagttccactgatgccctaggaaaaggtagcaaagagctgagattgattaatcagccattaaataaattctaagtgggaaggccagagggcctccctggaaacacaccaagagactctcatctcttaatttggaaggggaaaggggttcaaataggaagatccaggccagaatttaattgtaagagtagctgaagtaggtctgctatgccaaaagcattgggaaaaatgggcacggacacagggaagggcacatctgtgttgacgcccctccctgccaagaatcttgagtctccagattgcccttgcattagaccattcttttgtagctatagagaaataccaaaggcagcgaactgaatgagcaagaacttatcaccaagggaatggtgctgagccatttatgagcatccacccccacgatccagtcacctcccaccaggccccatctccaacactgggaattacatttcaacatgagatttggaagggacaattacccaaattatatcagccctgaaccctctgagcctgcacaaatggcccacttctctttatggagggctagaaacacaccacgtgcacagacacacacacacacaaacacacacacatcaattccaaggcctctctacaagacatcatgtactctcttcagggtgtcacccatcttccctcctcactgctaggtcaataactagggttaagtcataaagtaactgtgtcaagaaaatgctcgactgctatgggaggaaaagaactatacccctttatattagtctgttttcatgctgctgataaagacatacccaagcctggaaagaaaaagatgtttaatggaattacgtttccacatggctgagaaggcttcacaatcatgacggaaggcaagaaggagcaagtcatatcttacatggatggtggcaggcaaagagacagagtttctgcacgggaactgctccttttaaaaccatcagatcttatgagactcattcactatcatgagaacagtgcaggaaatacctgcccctataatttaatcacctcccactgggttcctcctgtgacacatgggaattgtgcaagttacaattcaaaatgagatttgggtgggaacaaagccaaaccatgtctcacccttctaggtccaatttcaggattaactaactgggagaatatgcctgagagtggattctgagggtgcccaaccacggtggggtgcccaaccatggtgagtacaagaaagtttgaatacaaaagaatttaccaatatgagaacactctcccatgtcacaggatataataataccctggcagggacctgagggagggtgagtgcacactgtaggatggctcctaggaccatggaaaaaacaatgcctcataccagtgacaaaattgctgtgacagacagtagtacacagtgaagagagggaagacttgtttggcatgtcttctgtcctgcccaatttgatggtaaatgacaagtgcagatatcttagcctattttttaaatcatgtcatcactctgaagatttccaaatcagtcaagaggatgctgttggtgtcaagacctgtacccccaaaaatgccccataaagcactgctatggttgtccagaaacactgagagactcccagactattgaggttttactggaccctaagtagttatagtttctggagttccctcacctcccactactccaacactaatcagaacaatatccctgtacccgactaagttgtaagatttgtgactctggcttatgagacccccttatgctgggcagtttggatatttgcacttgactatgagatgggttccattaccgccaaggacaaagtgaaaccagggaagaaaaagaggcagttgggtatcccctgtgtaataatcaatttcaggtgaactattattcttctctggtaacaagaaataattttagttggccaggtgcagtggctcacacctataattccagcactttgggaggccgaggtgggtggatcacgaggtcaggagatcaagaccatcccggccaacatcgtgaaactctgtctctactaaaatacaaaaaaattagccagccatggtagtgcatgcctgtagtcccagctacttgggaggctgaggcaggggaatcgcttgaatccaggaggcggaggttgtagtgaaccgagatagcgccactgcactccagccaggtgacaaagcaagactctgtctaaaaaaaaaaaaaaaaaaaaaaataataataataataataataattttagcttaggaagcagtctctgagctttatttttcagtacttaatctatattatctattgatttgcaggttctagcaggtcagctattttattacatgaattcttttccattttaaaaatcagcaatgtgaatggttttgacactacttggacttccttgatctatgtgaactttgttctttgggaatgtcgagctggcaaggctcgattttagatcagcagagtgaccttagcccacatagcaattattccctgatcatttgttgcaaaatgccacagccttccatcattctgatttctcctgggcagagtagatgttcactctggttacaatgtaaggagaattgggaaagccctcttatttcttctcacataaactggcttcttagaaatattctcccaaacaatgctagaaattccactgtcatagaatactgctgtgaccctatgaatggggtcctctgtatgatgcagtgctgctttagtgcaaggttcaagatgtgagctgggagaacccactgtgcggactgaaacctatccccagtcctattatattggaatttgagctatcacaggagtgtgctatcatcaggttccaaggtttagcaatctgatcatctgggttacacattgaactctccctgtgtttctcatgtagtgtgtaagaacctatcagattctctacttcttgtgtaaagagtgaaaatcattggtgggacaaacatcgggaggatcatgaataagtgaattagtggagggagtagggaaagggaaggggcttggcaaatagggatgaacgccagttttgggctgaagtagtttcatcaaataaaagaccaaatagtgccatgaaatgggccttgaactacttgtcaaaggcccaagaaccttagagagctagtgtcatcttaaacatgacatttaatgtttatcacaattccttcatctgtaaaatgcaaggtactatgcctgctctaactagctccctgactgagggtgaaacctaaatttgtatttctgaaaactctccataaaacctactgtgctccaggaaggcctcccccgccaactttttttttttttcttag

SEQ ID NO: 52204 - DNA, 1119 bp, Homo sapiens
cttaactaacagatggggcatgagacccagatcagagtgtcacatgtcaccttgccccggctataatgcttttgttattgttgttagggctgggcatatcagcctattgtggcaaataagatgatgagtttggtttttgtatttttctgaaacttttgggaaaggtcgcttcgctttttcttcacctgaatttgagagtataaagtctagagctgttgtcatcaccttgtgatcatgaggagggagacgtcagagaatggagtctgtgtggaagagagaaggagaagggaagagcgggaaaagaggaggaaagagggcagagagagaagttgggtgctgtagacagtgattgaacctacaacaaagctgcgctgccagaaagagtgtgaccatagatttttcattgttgttgttgttatgcaaaacaatatattcccattcccatttagactgcagagttttagctggtttttgattgattttgtaatcaatcttaggatgacatgaggaatgggtaaaaattatacatattaatgataaaattgatgttgtcatattatgtgttccgggccattaaaatatttctccattgaaataagtatagcaaaatgtcccatatctggaaatgactgtaattaactaaaaggaagtacatacctcacggcaccaaaatgttaaatgccattcttctaagtcatggtgaccacacctctgacctgaatccatgtagtctgtagtctgagatctaagggaagcaaagtctgtaaataaaagtgagaagagtcattccaggccaaacagtagcttacacctgtaatcccagggctttgggaagtcgaggcaggaggatcgcttgaggttttctgtcactttcagccttgtctgaacttacacatgctccaaatcccaatcacatgtttttcatttcatagcatattttggtaatatggacactatggcaattttaatgctccatgggggagaatgagtgattctgaactggagttttattatatataacttagcattaatttgtctaatattaatatttactgattccctattatatgccattccacaaagaattccaaaaacacaaaccacacttctaaaagcaat

SEQ ID NO: 52205 - DNA, 3307 bp, Homo sapiens
tgtgtgtgtgtgtgtgtgtgtgtgtgtgtgtgtgtattggtgagagggaaacaggagtaaactaaaaaacacaaaataaagaagaatggacacaataaatgcaatggcagaaacaagatggattagtggagtagaaactgctgggagtccggtgccacttggtggtcaggaaaggtgactccgaagagcctgacatttgagacaaatcagtggtgagaagagctgccaagtaaagcgccacaagagggattaggggcagaaggaacagcacgttagagggccctgaatggaagccagctgggtttcatggaggaacttagtgaaggaccctgtggtcattgtgtagggtgggaacgctgaccctagttatgacccagtccaagctccattttcataagtggggatgataagcacactgaggcccacgtgtcttgtccacagtctcttgattcccaattcagcacccatggtaccattgctgcctatttgacttgagaacttaattttctccctttgtacaactggaagtaaataaaagagattcattcattttacacgagaaaaattggtattggaattgtttgcggacaaacacaagaaccaaaaacattagcctcaaggtgaagagaggaaccttggcgtccacaatgacacccagtttaggggtccccagagatgttcggtaagacatgcttccagaaccttccaggtgaggaccaatactaattctgcagtctacataaactaaaaatgaaactggtcataaggtaggcagccccagctgacctttcacctgtgcctgaactaatgcaagtacaggacctgagtgctacaggttgaagaagtaagtgatcctaggagttgaagggtcagaggagccaggctgacacaactcatagaaggtggaggaagctgatcttctgagcctcagctgtggttgatcttgataactcaaagagttaacacaaccaaaactaacgcaagggtggagagaaagaccacaccccacgggagcgcggagccaactcgcgggagaaaaatcctattggcattgaggaggtagggagccagcccctgggcgcggcctgcagggtaccggcaaccgcccgggtaagcgggggcaggacaaggccggagcctgtgtccgcccggcagccgcccgcagctgcagagagtcccgctgcgtctccgccgcgtgcgccctcctcgaccagcagacccgcgctgcgctccgccgctgacatgtgtgccgctcagatgccgcccctggcgcacatcttccgagggacgttcgtccactccacctggacctgccccatggaggtgctgcgggatcacctcctcggcgtgagcgacagcggcaaagtaagcaggcgcggggtcgagcgcactccgacgggcgggaggataggtgcaaggaacctggcgcggtgcttcgcgtagcccggggttcgctcggtgcgcagtgagcgccgcggctccggagttgaacttgagtctttggctcttgggcaacgcagagagaaccctggcgctaggttcgtgggctggctggggagttcccagaagtcgggagcagtggcgtgctaacgccacaactggctcgacagcagtccgggctgcggtagagccgggagcaaggatgtcaccccccgctcccccgccccccgttccaatcctaagataccggcaataatcttcaatcttgcttaaatcatctttgtttccaacacctagcactgtgcctggcacaggaggctctccataaatgtggttgaatttattgtgaaagaaataagaggagggggtcatttgattgatgttgtttagcgtgtccagaacatagaataaatagaactgattacattcaccctatcattcaacagagataatatactaacgatgaaggttccacaacttgtaatactagaagggatggtccgaaagaaataattcatccatctcttttccttcctctctctctcttatacacacacgcgtacacacacacacacacacgcacgcacacacacacacacaccatagccatttgcatcaaagcaagcagttccattttaaggttcaaaatgtcttctttgaatgtatcttttacacttccttttccaaaatcaggatttctacaaatgacacaggtaacttgatgtctactatttactgttccatacacacatatagtgactatatcagccatggcctggcaagtttgataagtgaagccattccattttttagaacaaaaaaatgataaaataaatatggagatgggattttttgagctgttttccaactactggtttggttagcaaaagtacacatacttgtgatttgtcaagttgaagatactattcttgactaagatgctaccgagtcggtgacagttttgaatcgtgactcttacatttgggggtaactaaacactgttttctcatggtgctttaaaaaatactctttctatgcacgttcagggagcctgctgttgtgtttccaaggtgataaaactctcagagctctcccagggagattccggtaaaccctgagactgatgaacccatgcttggggacttggtcctcaagtttcagggaactcaggtttggggcaagtcccaggaagcaaaggaacggagattgctaaactggtgtaagattagaggtgttattttaatcacaagaagctgttcaactcttgggtttcttttttaaaaattaatttcccatatccagaattgtaattggtagggtaacaggcaactggttttaccagtggagaggaataagaaaaggaagtaataaaaataccttttctggtgcttgtacagaagaagaataaaagagtttcccaaacacacaattagtagttgagtcagggagtctattcctcactaaaaatcatactgaagttataaatttagaaaacatgcccttcccccacaagacaaaatgacttaggaattgaatacaaaggtgagttagtcagtggctggaatgtatggtacagagctcctgaaccagtggattgctaactgttgctctcctctcctcctaggtgcaaggcagttgatacctggctgtgtttaaagagagagcatgccatacatatttcaaaacttgacatcccccatttcaaaatggagagtatcttacttttagagttgctgggataaatatattatttatttaaacatttcaaggttcaaaaaagaaaataatacgcctttggaatacagaaatatgttgaattattatgatctgtaattttttttttggtttttttttgtttgtttttttt

SEQ ID NO: 52206 - DNA, 3056 bp, Homo sapiens
acatatgtaactaacctgcacattgtgcacatgtaccctaaaacttaaagtataataaaaaaaaaatatagactctaacatgtttaattcatttgcaaatatttaatcttgaggtaatgcatgctcaaatattactaagttgcctgattcttcccacatacatcagggtcaggttgacagtaaagatgcataaacatgccttgggccttttaatgcacacttacccagaaacaagagtgaggaagagattcattttgaggttgtgtcctggggtggcaggagcaagtccaatggaggaatagagacttgggttcaggtcagagtctctaccacttacctgtgctgagaccacaggtgagacctaacctgcctgagcctccgtttcctcatttgtagagtcagatttccttttgctatttattaaatgagataatgtatgaaaatgcctggcacttagtggatacttaacatgtaccatgttcattctattccctttgcctcctagcaaatccttaacctcttgctcactgtgatattttgcatgttttcacatggtgacatgccaagtggtagagaaggaagccacggcctgtgatgaactgtatggggtggtcacagaaccttagctttttattctcactgcttatgtcattgatcccctgggacccaaagatgcaccctggaagaaagatcaagaagcatttggtgctagattcactagcaagctatctttagtatctcttttagacttgacaatgtcattatttccactaacagatgaggaagttgagacttgagaagtcatgcattcagatacggtggtggtgtagctggattttgaattagtatggggcaaaggccatgttctctttactgtcgctgactgcttctctagggcacagtcctggacctcaaagaatctgcactttggcacgggagctaagacttgtagctgtaataaaagtgactcattcctgagccaaacactggggttttcaccggagataaattgatgaacaaagtatgcaaatactgccctgccctcttgaaactgatgatctagtaataaattaacagaatctgccatgacctatcagaacttgaactagttaggggaaggctttccctagcgtgaagtgacatcaaacttgcgatgtgaacaatgagaagttaagtaggtatattagtcaattttcacattggtgacaaaaacaacctgagactgggaagaaaaagaggtttaattggacttacagttccacatgactggggagcctcagaatcatggcaggaggtgaaagacacttcttacatggcggcagcaagagagaatgaggaagatgaaaaagcggaaactcctgataaacccatcagatctcgtgagacttattcactaccatgagaacagtatgggggaaactgcccccatgattcaagttatcgcccactgggttcctcccacaacatgtgggaattaggggagtacaattcaagatgagatttggatggaggcacatccaaaccataccaataggtaaggtggacagcattggaagtaaagaagagccttctaggttgagagaactgcctgtgactgcctgtgcaaaggtcctggggtaggaaggaatgaaacagtcaaggtagtcagagtccaaaggttgaggagaaggctaacacaggataaggcaggacaggtaggcagggctatgttatggagggcatcggggatggtgggattgtgtcatgattatattttgtggttataaaggtctaacttcaggataaatgcattgaagagaagttgagtgcaggcaaggaggtcagataggagcctgttgcagtatttaggtaaaatggaatgtggtttagatgagagaggcagtgtagttatcaactgagatatgaactcctaagagtacctctatcacttattacctatgtgaatttgatcaagttccttaccatttgtatctccaaatttctttatgcataaaataattactatggtctacctaatagggttgttgaaaggataaaatggattagtaagtgtaaaatatatagaataatgcctggcatgtagtacatgtccattagacttcagcggttattgtcagtaatgcagatggagaggtggatagaatcagtagctatttagatcaagttgactggatttgatgatagcttacatatgtaaggttggaaggtaagtgcatcaagagtgatcgcaaaatgtatgtaaatgtgtgtaaatagtacagtggggcacaagttgaccagtgataggaaaagcttcttgaaggaagtagtagctgaattggaccttttaggactggaacatgcaaaagaggattatatagccctggtgaaaagagtgacccaatgttcttcagttctgaagactgctgggaggaggaagagttctttctcacctgaggctactttaccagaagttctctcagtctaaatcacaaatcctagtgattgtgtatcatcctttcctccacttcctgccaagctcagcaactcaaaatatgctgttggtcctgagaaaggaaactgggctaatcccttccttctgaggctgctgaataggagcttggctttcatcagaaagatgctttcactcccaattattacaagatcatcttgcaaattcccattttctagaaggctgattgcttgttcagaatgctcatggcaaacactgttggttacccactcagcagtcatgacctctttttccttattaacacctgaatttgatcagtccatggtagactcagcctgtggatacatcatggtgtaagccagtcatggtaatcctatctccatttatcagatacttattcttccagcttcctggtagctgagggtgactagtgataatattctgacatacaggaagtttgctcagaagcttctaggatgtgggaagagaagccctgccttttttggatactctcatatgaagaaaagatacttggaactgctgctgccaccatgtgagactgtgaggaaaaggttaaggggatttcagagacaccatcccattt

SEQ ID NO: 52207 - DNA, 469 bp, Homo sapiens
gcaaagtttgcatggatttgaatgacacttttccagaatacaaggagaccactgaggaatcgatcaaggaaactgagaggtaaaaggcccatttgtcttgatttgtcttacaggtgaattcctgtgctgcactgatggagttagagatggaaaaaggaaacaggatactgttatcacccagttgggatgtgcacatagtgactcagaatgttctgtttaatgcaatgggtcggttagtctacagtgaatttgatcaaacactcgataatcattaatgatttacaaagagctttcctttgtagtgccacacttgatcctcatagaaatctccatgaagcatctgtctttttatttattttttatttatttttattttttttttttgagacggagtctcactctgtcatccaggctggagtgcaatggcgtggtctcagctcactgcaaccttcagctcactgcaacctct

SEQ ID NO: 52208 - DNA, 2142 bp, Homo sapiens
tgcaacagagagaaattttgtctcaaaaaacaaacaaacaaacaatttgcacagtgcttttaattcacaaaatacttttttcattcataatctcacttgagatgtccaacaatcttgttcctagacaatatttccatcttgcagttgaagaaacaaaggttcagggatagtaagcaacctactcaaaggtgcatagctaatgagaggcattgctcaaattcaacatgcattttctgtatccagatctcaagaccctttccgaaggccacctctttcctgttgctttagaaagtaaacacatcaccagagtctttggtgttccagcttctttttaggcatgcctaaggtcagattgtcaagaaatttgttatagttattaaaaagttatgagcaagtggggcgcggtggctcacgcctgtaatcccagcactttaggaggctgaggcgggcaggtcacctgagattgggagttcgagaccagcctgaccaacatgaagaaaccccgtgtctactaaaaatataaaatttttagtattgtgtttagggtgtggtggcacatgcctgtaatcccagctactcaggaggctgaggcaggagaatcgcttgaacccgggaggcggaggttgcggtgagcggatattgcaccattgcgctccagcctgggcaacagaagcgaaactctgtctcaaaaaaaaaaaaaaaaaaagttatgagcaagttttaaaatatttcctcctttaagtttgagtgagttcctcaatctgagagtctaaaggttaatggaatcaataattaacactgctggtataaactatgccccaggtctacttccttatttaccctcctctccaacccatactgcaaaaatgcatcagtgtaagattaggaaagggaagattaggaaagggaatttcttccaagtactctgtatgaaagctatgtttaagtggaagaacttttaaaactgactctggtttttattttattatttaaagtaagagatattaatagtcagtgaggcaacagatagaggtctaggagcgaggaagagcactgatcatccattaaaatcacatatcgagcaaactgtactccaaggctaggaatggccaactttaggaaaagactcagaaaactaggaaaaaaacaaataggaaaacaactgagctggtttagaatgtgaggcagagctgggcatttaccgaccttggggagtgtgtcgttgggtaattcacatttttgaaattctgagtaactggctgggcgtggtggatcatgcctgttatctcagcaatttgggaggccgaggagggtggatcgcttgagcccaggagttcaagaccagcctgagcaacatggtgaaaccccatctctacaaaaaaatacacacaaaaaaaattttagctggacatggtggtgcatgcctgtagagttactcaggcgactgaggtgggaggatcacctgagcgtgggaagtcgagactgcagtgagctctgatcatgccatggcactccagcctgggcaacagggtgagaccttgttgaatgaaaaagaaaaaaaaaaaaaaggaattctgagtgactgtgagtgatcttcacgcacttactggtgaccacctgaacaatgcccaaggtggacattggatgtgcatggaagaaatcagatagtgaggaagaaaattaaagaaaggaaagaagaaagagaacagaaagacgtaggattagccatgcactcagcgctcaccgctccccatctctgctatggatgtcctagccctggattaagaggagatgggattgagaattttatatccttgtcctttttgcttctgtcagactcttatgtttcctgggcccacagcaaacatttatgggtccagggcaagaatacaaaggggaaccatatatggccaaatatgttatgtctacatatttaaaatttataaatcaagtggacactgacaaatggcatatcttgaaaaatacaccttttaatgagctagcaggtcaggtttgaattgagaattgtcagaattgtcaaagttttacgttacaacatggtgacatagagagagctagccctggccctcactaaggtataatgcttacctccctactcttgaaccctctgtcctgaatcaa

SEQ ID NO: 52209 - DNA, 994 bp, Homo sapiens
ttttcctgattctacttatccttcaatgcctgcctaatgtattcaatcatcaaacatgaagctcctgtgttccaggctcatgcccaccttcttcacgatgccttccttgaccatgctagttcaccatgggctttcccactccctctatggaactcataaggtgtttcatttccactatttatttgcactcagtgccttgtaattttagttctgttttcacatgtatacacatcttcccaataaagctataaggtccttggggaaaaaaaacgctacttcacacacatccttgtatttctcactccacctactaaagtgtatttaccatctatataaaatctgttgactaattgatcgtgactgataaatatcacttactgagtacagcggttaagagcacagcctgttaagatcaaatggaactggtcttaatgctgacagtgccacttgataaccatgcagtcttaggctactgacttaactgtttgctcatctgtaaaatagagatcagaatggtatctccctcatggaattgtttgagaactaaatgacatcatacctaaaagaaatacctggaagagttagcatttggagaatgtttgatgacaatgactctaataataacatcccaggcaaggtgataaaccctttacgtgaacagcagtccctccttatctgcagggcatatgttccaagacccccagtggatgcctgaaatcatggacagtaaaaaactcgattacagtttgaggtgcagcagcaaaactagcatgaatttcttttcccttcacaattttaatgacagaagatttattgttacagtagaacttagcagcttcagcctgcaatttttttctgtctttattaagttgagaactttcaccttttcacttaaaggaagcactttatcactttggtttatccaaattgccagcatcactactcttgttctttaggtccattagtaagtaaaacaaagtaacttgaatgcaag

SEQ ID NO: 52210 - DNA, 706 bp, Homo sapiens
ccaaggtcacagaacaggatttaaacccaggaaatctgacttcaaagcctatttccttaaccagcgcaggatgccaagaaattttaaagagtagtatcaggaactaatgtcattgttcccttcaaggtgcacattgaacaaatatgtcaagagagtacaagggtttatatgcaaaagaatcccacccaccccaaactggaattgggattcagatttgtctgagcatgtgaatgacctaaaagaaggtcatggccagaagtcagaatcaatgaggtttttggctgaacccggagtggggaggaataacatgccctagtccttgatgctgagagataaggggaaggaacagagcatgtcatttggttctacactgtccataccctgtagggaaaggggctgtagacagatgatgaagcagccgttttcacgagggccgcggaggcacagaggtgtaggcagcctggctggaggcccggtgactggatgagacatgttgtagaatgagtggtgttctccccactggaggggcctggctatgctgcagtgcaggctgcaaaagggacatcctaggcactaggcagagcaccctgggctcagacactcaggtgcccactggggtctcaggtacggctggtggtggagaccgatcccaaagtggtttcctggcagatcaagagtggaaaaccttgaaagtcttgagcacctg

SEQ ID NO: 52211 - DNA, 5093 bp, Homo sapiens
ctaccaaaattagaagatgggagaaggggactaaccaattttgacctggccagacccctggtaattattccccaaaacattttatcttcccttttgtaagtaaaagtgcaccatacaaatattaagacaatctagcttgtgtggagtgaccaagatccacaacttacttttaacaacagtattaatttagttgacactgtctctttaaatattaactggaatttagctgactcattttggagcagggtagtgtaaacatttcaacatcacttaggaagtttattaataaacactttcagctgggtttttaaatgagcataataggagcaaaaaatgctttcaaatgataaatatgtatgtatttgcatgcccaccacgcacaaaatatgtgtgaatgtttgccctatgcatgaaagttgggtcactccttaaaaccagtttaagtatgctagcttacattttctacactgaggcccagtctcatgtgacattggctttaaagtttaaggccaagcgatcaacctacctaagtaattttagttaatctgattcttaaaatatttgttttagataaaatggaggatactccatctaaagatttcacacactcagagataacaaagtattccaactttgcttcagagaacatgtctaccttcatttcattataaataactttcaactgcgagacacacaagaggtaccaggacatgagtcttctacatgggttcccatcttttagatttttttcccctagaaagccagcttttaaatgccatcacatgtgcacagcttgctttaatatttctcagaagctcagatcacatgggagggcgcttcagcctgtcacaaggctgcaatgtgacaagctgagctggatggaggctctcacataaagcctagtcaacaggggcctctgaaatcagcttctatttatatctcaaagcctgccaactcctacacaaccccaagaactaaggatgcagcgttcatatatctaacataagaaaacaaaaaaagggctgctagttttttcctaatgtaggaaaaactacagaacaatctcaatctagaagatgaaagcatagtcaaagctaaaatggtcaaggttgttgataaaaaactaagcacagtggagacagtgtaaaaaagaatcctcatttagtgaggatttaggggatgaagtgggggatgtgtgttcccattaggtattgcattccccttgtattttagaaaaaaataccattactatttattgcctttaaagtaattagcaacttgagcatgcacgtgtcagctctatcaggtatagctagaatgcagattttataaagtttatggcttcctctaacttacagcttaaaaaaacacccgagtgtaactgaacaattctccaattccaattctgaacaaagagcttttacacctatggaatacagttctttcaggtgcacatgatgtgatgagatggcatgaattcccactcacctgggaatggagacctgagttcaagtctctagtctgccactaagtcagtgaccttgggcaagtccttactttccagatttcagttccctctttgccaaatggagtagaattgacttttaaaggctccttttcagggcctgggagatagaaaacaggagacaactacaaagaatccttaattttttaggggggtgtggggaaacattttaacaaaaaacttcaaagataaaattgcagtattttcaccaactgagttctgaaagcctactctttaaaaaaaatcctaaaaataaggaataaaatacattcgtttatgtttttagaagtctgtatctaaatcccaggtttaagaacggggatgtgtgacctatatgttcctttatcttggtatctccttagatgctatcccttaggagacactcaatcaataaagataatccgacccttccccgaaaacacacctccacggagtgcgtggaaagcgagcaaaaaatttcacattcatcagcctaaatgcaccaaacaaaggaggtgttccatttcctccatgaaaacggatctcaggataaaaacgcagcgacgtcgagaagcccaaaagacgacgccgagaacccccggccccatgttccaatggattttggaacaagttcgggtcccactgataccccatccccctctaagcaaaggcctcactcaataaagcccaacagggccctctccgaaaaccactgagtcatgcagaacagcagctcagcaggcccggccagcccttcgcctgcaggccccacgcggatccccgacccccgacccccgaccccgaacggctcctcttaggggagagctagggggggctgcaacgggcagggggcgcggccgccgcctcggcctctttgtttctctgggtcgtggtgcccacgccgggcgccgccgcggaggcgagcggcctagaggccggccccgcagaggcggcacgccgtgcattgtttcccgaccgtgctgtggagcgagccagggacgccgggagccaggtctcgggccacgacgacaggatgacgcctccgtctttgtgcttcctgggctggcgggcgggctcccctcccccggacgccgccatccgcggcctgctccggcttcgccattggcccgcggcgccccggtcccttcactcccgcccccggcccggcaacaaggagcccggctcccacccgcagccccgtatcactcaccctgcagggtcccaaatgcgaaagccgggttcgcgcgcgaagccggcacgatgaggccgggccgaggcctccgggaaggctgagccgggcgccctggtgccgccgccgcgggccgggagcgggtcggagcagcaggcggaggtggcgccgccgccgccgcggggtcttcctttgttcctgcagcagcgtcgagcgtggccgggacacgccggagctcgggaagtgggaggagggaagcgagggggggccgaggaggaggtggagggaggaccggcggccgcagcggctaacgctgctcgaggcgctcgcctgtcgtcgcctcacgcctccacaggccgcaggttgggcggacgaggagggcgagcggaccgcgcgccgcgaggcctggggccgtaagggcccgctgatggcgctcttcgccgctcctgccaccgccggggaagctgcgcggctcccgggagcgagcgagcccgcgtaggagatgcacacagctccgcgtcccggccgactaacgcactcgccgcccggcgcccgggctgtgagggaaaagagggggagggggcgggacccgtgcgtcagcgaaaaccccggcggcggcggcggcggcggggagcgcggtgacgtcgcgggcccaaggccacgcccccggtgccctgtcagtaggtccaggaggcggggccgagacgggttgctgtgccttctcgcggagcccagccactggcctggcagtcggcccctagggtggagctgggaagagcgagtcctgtggaggatgcgtttctatttttaacccaattgtccgccctcagcctccctccttcggattttctcattcaaacccgtttttcgccatcctagttctcacgctttgtctccagccctgggcagacattccctcccccaagaatcgtaaggattcacccccagaaaaggaaaagaattgccttatggcttcgaggtcttttctgtttatgaaacctcctcactccccacacccattttgagctccgaagtccagcccgagcgtggccctgacgcagctggcggcgtgcgttcgctcgcccaaggtcacgggtggttgtgcggagtgaggaaacgcgcggccgcccagggctgccaatgccccggcggcgctgttctgaacaaactgttttggccagcctgtgaaatccctggaaattgacgattccagcaaagcgtcgtgaactgggaaagcaccaaatgttctactcaaaagccgcgaagggacaaaacaagctagacccgaggcccagatgaagcgggaggaggaggcttgcgagaggaagttcaaggggggaggtactaggcgggcagttcaggcacgaggcacaggtcccccatgggtgaaaggatgactttacccggaacactgggaaccttttcagagcacaaacaaaaaacattttcaactgaccgctccaagtgaatttcagttcaactcaaaataacaaaattactaagtcggaaaggacttctgaaattttctagtaaacaacggtctaacgaatacatagaaatgatgtttagggtttatattagccacatatagaatggagaagaggtcccttcagtgtttctcaaagttggtaatcagaaaaaaaatcacctggggtgattaaagattcctacgcatctcccctggatatggttttggttgttccggggtgggagcgggggtgggggggggcccatattgcgcttcaggtggtccttatttataatctgtatttgggggaatgctatactgatagcttgagccaccactgccaaatcaaacagttctccgccacagttagcaaagtacctggagcataacaaccttttgttttgttttttaacaaattcgggtttattactgtgatcaattaatgtattagagatttaagtagtttgggtcactggtcccacgaccactgcaatttatttccttaaattagcagatgaattagtaaaaaaaaaaaaaaaatagcagctaccatttacaggccattttcagtgccaactattttccatttagggtctcattttatcctcacagcaattcactgagataggtactattatcatgtccctttctacagataaagaaacaatgactaaaaaggcttgcccagggcactgaagggcagggaggcaatggaggtgattattattgagaacaaaaataacttgaattttaacttgaatttttttctttctctagaattggagttatagtgagtgaaacaagataattcctgaagaagcatactttaaaaaaagtctaagggtaatgaggcaagctcattattgaatagtgtattccataatattatgtcaccttctgataattcatcttctctatcacccatttataat

SEQ ID NO: 52212 - DNA, 1159 bp, Homo sapiens
ttccaactcagtagttctttttcactttctggctaacatagaaaaataaatatgacattgttctgaggaatctgttgtcccaaagcaattaagaagcaaatcaatgaaatattcttgtaaatcaaagcagttatcttcttattttttattgtgtactttgaactcgctttttagggaagcatgttgagacatctgaattcctttgcctttagattttggaactattttggtcttatttcaattgttaactatctctctgcttgtaatgtctcaatacttttgagtgttcacagtaaaaagaataaaggcacccactgcactcatttatgacatggactggacaggagccactcaaatgtccacgctgagttctggcaagtcacattgcctctggtcttgtgttttggtttggtgggcacacttctgtccttgttcacactttcaatccacatttccaaagaacggccattttaatccacctgtgctaaaaacattggttaggtcttctttctctaagaaggttgcatttcaggtatgagatttagaaaataactataggcataaaggtcagccaatctgttttcaaaacagggctgacaagtaagcaggtgcaggcactaagttcaacttacaagtgtaaactctacttcaaaatcagttctgagtcatctgctctgtctgttaggcactcttgtttacagtacatctttagccttctcatgtagcaatactattggtaagtggtatgcataagaaaaaaaacaacttgatcttgacaaaatgtgtaccctatgtgtggtgaagagacgttttggaaggtcttgagcaattttttaaaatgcctgtgtgtgtgtacgtaccctttatgtaatatttaatgactcgtgttctaagagggtgtgtttttctttcttaaagagctggcagctggcctatcctcttagaaatgggaaatttcttaagctaatttgcacaagcaggctatgtgttttgacgacgaagctgtaactctttgtccagacagtattgccaattatctgtgaatatccttattaagtaaagacttcagaaaaaaaaaaaaaagccagatctttttattagcttgttttgcatataagctttcaggatagttgtatattaatgtcacttctaaagaaga

SEQ ID NO: 52213 - DNA, 1819 bp, Homo sapiens
acgcctgtaatcccagcactctaggaggctgaggcggcagatcacctgaggtcaggtgttcgagaccagcctggctaacacagtgaaaccccatctctactaaaaatacaaaaattagccaaatatggtggcacaagcctgtaatctcagctacttgggaggctgagacaggagaatcacttgaacccaggaggtggaggttgcagtgagcctagatcgcaccactgcactccagcctggatgacagtgagactgtatatagctctctttatgtaaaaataataagaataagaataagtataagtcctgcactctctggtcctgtgaccttggttgttccttttgccgggaagtctccgttgcccacagctgcttgcctggcttctgctccctcaccctctcaggtctttgctaaaatctcactttcccacggagggctgccttgaccacgacttacactcccacattctcctatactctgctcctttttctttttatattatatagcttatttattcattgtgtttattttttcttatctgcctttctttgtaatttctttgagggcagggatctttatctattttgttcacttatgcatcccaagtgcttagaacagtatttggcacgtcattaaatattgatttaatgaacgaatgaacaagtgaatgcatttcaggcctggcctgaaaacagttcaagatattctttgccaggggctaagcaaaaccatcaatctctggggatttattgagaagagcaatgatcttgttagactgaaatggctctttgacttcaatcacagtttgaaaatctcccttttccctaagtcccattactttctcaattttatagcctcagattcaggtttactcaggcaaagagaatcagagaactgtggataaggcccagatgatccagataataaacatatctttgcttcaattttgtgacatatgggcaaatagctattaaggagttttccccctttccttcattacttgtctctagtttggtttaatgattacctaatgattcagcagtttatgacctttcattttaactcttgtagtttctgaccctcttatagtgcattcatttttggtattgaagatttattaatttccttccttcccctttttacctaattgcaatttaaatgattcccattttcataggacggaatatatagttctctttatgtataacataataattatacaataatattaattataaaatcatttagatctaatgagcatgtactatctgccaagttctgatttaggagcttcagacatattttcatcaatcttcagttctgccttacagagattttgaactcaggaaatttactttgttcttttcagcaagtatgtgttctattggctggccccaccagaatccccagaagtgtttggtgacagatccctgaatcccaatcccagaaaacctacaaacaatcagcattttaacttacttccaaagtaaagcctataggcactcaagtttgagaaacactggataagaattgaggtagactatatcttagaacacaccgacaagggaatgatacaatgtgccagtagcacattgtagtcattagtaggtagctttttacctattacagttgaagttaactctctttctgaaagccatattctgcttctcctgcccctgtagtatttgacatacatgttatcacctacaaaaacaaacaagattcatcctgaagtttccagccagaagatattggtcaaggagacttttgttctttcacaggccacgttatgtctttaagttattcctttgactctat

SEQ ID NO: 52214 - DNA, 1894 bp, Homo sapiens
ttcctagtggatgctcagtaatggtagctatcaaatttttacttggtctgagaataattactctgattactctgtagctatgaatgaaaactatctttcttatgatgtataaagaaaatatcattactacatcactgtgtcaataaagcttagtgttcatgaatgtcagcccatagcttaagtatgtaagaaatattgccttcctttattccttttttccttcctaccttcccctctatttttttctttctatttaattttgactccaatatagactgttgggagtttcaatctcaatgattcttgggattccccaccttcttcagttttacaccaagggtgcagaatctttaactgaggcactaggcaaatcctgctactcactggtctctgtctacatcaagtcctgctgagatgcctaccatgcctagaactccttccgacgttttccacaattggacaccagggatctttggtcaatctaggaatactaggtctaagtctagtgtcttaggaaaccacatggaaatacggaaggaagaaggacagaaggaagaaagggtggaagaaaggaaggaaagaaaaaagccactggctcagggtcaactgggtttgtttattaggcaatagattaacaggtgaagaaagccatgtagtctaggtagaaatgaaaacctctggaggaaaaaatagagtggaaaagagcagaaggaaaaaggccatggaaaagcctaaagcccaaactattgtagagatttttcatttgcaatttgcaagttttcttctggtagaagagacatgcaatgtataaagggtatttccagttgactcagagaaagagaactcatgggtcatgtgaagcaggaagaacataataaatgacttcatggtttggtcttactctaacttgattacttgacttcatcttgtttcttcacctgtaaaatgtagaagttctaaacacaaactcttaaaaatatatttgaattctaaaattctctaaatcatgtgaattgagaaagataattttataggatgggctttgctatggttttcagagtcatgactatgaaagaaaaatgaagtcagaggcaaaataatctcttcttcttcccaggtgccattcctctttgactgcatctctgttacagcaggtataactttcagttctgatttatggccttttactggcaagtcttatcttcttgtttactaccagtttaaattctttaaggaactaattcagctacccagacctatcttccttctcttttccctccctgctcatacatattctccttgaacctagtaagcacaaacaattttttcataagcaaatggaaatgaccagctttaaaaactcaataatttcctctgaaggttactcgttgacttctcttggaaagttgtttctgtggcttacatcctgacaaactgaaactgcttttgtcctaacatatttattattaaattttcaccactgtgcttaatgctttacagtaattttctcttttaatctcacaacaaccctgaagagcagatctgaatgccattttgaagacaggaaaacaaaggcccacagaggttataggatttgctaaagatcattcagctactaaggagcagaagcaggacatgattccaagtctttcagattccaaagcccacctccatatagtagaggtgcgttctcaattctctaaatacagctaatagtaactacttcacaattggaaaggccaactgatttgtggatatgcatagaataataataacggtaaatttggaaacaaaacgacctctccccaaatcactctgaacagagtctgatttttagcagctattttgtgatataacatacagcattgaagtctagccttgagtttgtaatcat

SEQ ID NO: 52215 - DNA, 842 bp, Homo sapiens
taattttagaaagttcagctcacaaagttccttttcccttactgacagccctgtaaacttgactttagatctgtaacggatgtcactacttcaaagaactgtaatcctgtgtttgatacactcctcctgcccccaggacattatctgtgcgagagaagggaagccaggaacccagaaatggtctgcagggaggtgaactggaatggcaatacatggtacacggaagagctttgcctctgacgatgaccctcagctttcctgctgctctcttcctaggttttgtttctaagtatctgggctttgaagaatgggggtggagggattcaaagaagacttttaggaggagccagtcccactagcagatattgttgctctaactctgcctaaggagcaatttctggccctgagtcatgatcccaaacaggaagtgcttctgagttcctccaaacaaggtatgtggatgagggggtggagtttagtacacaaatacctagctgccagcctttcatgtttaccagggatcaagaataggtcatttaaggtcaaagatatatcctttcttgtcactccaaagaataaatagtgttgtcttacactctaggtgaaatgctgacttgaactccagagatatatttgctttggagtttttctttcttttttttttttgagactgagtctcgctctgtcgcccagggtggagtgcagtggcgcgatctcagctcactgcaagctctgcctccagggttcacacctttctcctgcctcagcctcccgagtagctgggattacaggcacccgccaccacgtccggctaatttttttttgtattattagtagagacg

SEQ ID NO: 52216 - DNA, 1346 bp, Homo sapiens
gggtcctagacacataatgattagagatcatgccaccagttctatatggagccatctcaattcatcctttctcaatttatcctttccaggcatttttcttgaaactgcctaagtactggcgtctccctacgactattatatctgaaaacacattcagttttcaaaccagctgaattttatgcctgactattccttttaacttataccaatgaaaatcctttaataaattcactcacaattgctccactttctcaaacagagcacaaagcatctaacaatatttcttcatgattgatagcatacacactcttgacttcatattcttcaaaatcttggtatttttataagcattagtgccttttttttccccagtcagaagcactgacggatttattctattgggtgttgtcttctgtttggtctttagcttttcttagctgtgatcgtttattgctgaataattaagggcaattctttcccactgaaatacttttcaagttaaacattttttccttaaatttttgccccaggctacttctagatccagcgttgttccagcttactgagcattccagagggctaaggtccaagttagccaaggttttaaaatgttgaccatgtggacctgaattctttccagttacatatttgcatacttttaacaggagtggttatttctcgtcaaaagacagaacgctggaaataccagggcaaaactatgtgtttttttcttggtgatatcttgatcttagcattttactctctcttcctggtttctagcttgacctttgtattttagaggagagtaatagagtaacagtgcactgagaagcaatgggacatgacagaatagtttcagcagtgaaagtcagggaagctggtttcaaccattcattcacaagcttaaaggactttggtatctgactttgtggatgccactttctcatctgtaaaataagggggttggatcgtgtgatttataaggggctttcttactttctaacattccatattctataaagacagttaaagtctccagagagtaaagaatgtagaaaattcctgaaatttactcagctcctttattcctaaatatttttgaattctgaaattattattattattattttttgagatggagtctcactctgctgcccaggccaaagtgcgatggcacaatctcagctcactgcaatctctgctgcccaggttcaagtgattctcctgcctcagtcttctgagtagctgggattacaggcatgtgccaccatgcctggctaacttttgtattttcagtagagaaggggtttcaccatgttggacagggtagtatcaaatttctgacc

SEQ ID NO: 52217 - DNA, 1804 bp, Homo sapiens
ggcggaggttgcagtgagccagatcccgccactgcactctagcctgggagatagagcgagactctgtcttggaaacaaacaaacaaacaaacaaacaaaaaaattggttcttgagcagggcaatttcacctccaaggggacatttgacaatggctggggacatttttggttgtcacatctggggttggggagtgaagtgctattggcatctaatacgtagaggccagggatgctgctgaacatcctgcagtgcacaggacagcccctgacagcattaaacagtccaaaatgtcaattgttttttgaggttgagaaacgctggtctaaaagaaatgacaggacaggtggcttggctcatgcctatcatcccagcactttgggaggctgaggcgagtggatcacctgaggccagtagcttgagaccagcctggccaacatggtgaaacctcttctctactaaaaatacaaacaatagccgggcgtggtggcccacacctgtaatcccagctattcagaaggccaaggcaggagaatcgcttgaacccggggggcaaagattgcagtgagctaagatcatgccactgcactccagcctgggtgacagagtgagactctcaaaaaaacaaacaaacaaaaaaacagaaatgactcaaatgtttacagtgattacttctggatgggattatgataattgtttctctactgttctaaaaaactttctgttctttccaaatgtttaatattgagcacttattttacaatcattaaacaaagaaatgacaacaactgttaaaaaaaaattcttaagaactgaaaggcaaacaccaccaccactaaagccatgtcccccagatctaggttgtgagtcacatgataccgacttcagaggcagcatgtctcaaggcctctccaatgtgtgtcagggacagcagtgggagtagggccctctgagtcagcctctttgacctgggatgctgcaggagatcttagcaaacattcaagattttcactgagtcatttgcctgtggcattgatctgctcactcaagtcttccggtgttttggtgtgagggaggctaaagaggaaaaacagctgtttagtttctcattgatttgtattgtcattgagcaatacctggagcccaagtggatgtcttttattctgtggcctccacagctgggtcagtgtggaaggcttcagaccatgagaaattgttcctgggagtcaattattttaataagtgagatatcagagtatattcacagaaagaggcttccctggcactgtaagggcagccaggaataaaataaaaatgcttcttcagtgaagataattgtccaaattgaagacataggaaatatttctaatttgcctgtgtatttggtgaacatttctctctctctctctctttctctctttctctctctctctctctttctgtctccataaatgaagacatgggaaaatctattaaaaattaaattaaaatgcaacacttttacataaacaaaattcccaatcactctccttactttacctcagcccaaccaaatgtgagttaaatctcttccctttcccatgggacactagcatcttggtggcccagctcagtagctaagcatagagtaatgagtttgttaaataatttcaattacattgtttttgagattccagggtcacagggaaattctgacctgaattatctggatgaactctcacaattgtgcactgccttgttcaaatttgggaagtgctgagaagcactcatccaaggggtagatctggacttcagctcatgcagcat

SEQ ID NO: 52218 - DNA, 2225 bp, Homo sapiens
tgcgccaccacacccagctaatttttttgtatttttagtagagacagggtttcaccatgttggccagggtggtctggatctcctgacctcgtgatccacccgccttggcttcccaaagtgctgggaatacagtcatgagccaccgcgcccggtgccctggactcccaatttctacctcctggaacgtgctttactcaccagccttggtgttattctgcaatatggccaactgggatttttttcaatcttacagaaattattctcggaaatgtttgctatttttttttaatgaagctacagcatacaatttaaggataaataatgtacttactctgcagctattgtttcaagtcaaatccgctgattactcctccaaaattcttttcttaataaaatctctgaccctttcctcttcctgttagaacttctggagctaccattgttcctcctcttgggctgctcataacctaggggagtcacagtgaaattacttgctttaaaattctttaatcactctgcgagttgttaggaaaagctgacacatctgatttggaaactcccactccagtggactgttgtgcctcagcacacagggacgggtggagcaaaggaacaagaagccaaaaactctcagggcacttactatgattgtgtaaaagagagactcatcaattaacacaggtactggcaagtgcacttcataatgcctccatttctagacagatcaaaaacagtgtgccctgtcaataaatgctgagtttctgtagcagcctgattgagatcagctaacctttaggccaaaagcgggattcttccttgctgaagcttttggcaaagcatattgagcttcatgccagggattagattaactcttgcaaaactggttcaccaggaacaatgactcagtgttttttttttagtatccggcatattgtgtggagcagctataaatatatttacaagctggagtttcaagggaggggagtaatagcttgctgaaaaacatgccaactgagttatgggtcttcacgcagccagcatgctgtgttttgggctctgcctcttgtaatttttagaaattaattagtttattctttatttatatttatttatttatttattttcagatgggatcttactctgttgcccaggctggagtgcagtggtgcgatctcggctctctgcaacctccgcctcccaggttcaagtgattctcctgcctcggcctcctgagtagctgggatttcaggtatgcctcaccatgcctggctgatttttgtatttttagtagaggcagggtttcaccatgttggtcaggctggacttgaactcctgacctcaagtgatccacctaagggtactgggattacaggcatgaaccactgcacccggcctgttggttgtaattttattttcctcctcaaggactttgagcacattatcttctctttaataacttgtttccaccctcctttgtgcacgcgcgcacgcgtgtgtgtgtgtgtgtgtgtgtgtgtgtgtgtgtgtgtgtattttctgatctccctacgggggcagagagtctcaagcaggtatgtccatgttattaacatactgtctgcttattaactaactgcaccaatgatgaaagccaactgacaaacaagtgatgctcttatccctccttcgcaagcaatgaatctgaaagccaagagaagttttcctttcaacaggaagtgttttggagtccgaacaactctgcatttagacagtgcagcttttagttacagatcttggcaatggggcaggcagagggagcggcaactacagactttgccgtaggactgttttctatggagtgtgtgtgctctgacgagctagtgacaggagggaggttacaaaagcatttactgaaataaggatttctaatagaggagctttttaaaagtattaaatatgctaatgtgcctagggcatagtcaacaaagagttataatacatgtcatttttcatatttatcaaggaaaccatgtcacccgcagcctttctcaatttctggcattctgagaaacacactgtagtggtgcctgagggtctggggaaagaagaatagaatgaatggggcatctcagaatcgtaaactcccccagttgtagttcctttcgatgttggtcgttggatgaatttccagtttctactattgtggttggattggggagagtagctcaaattgggaattgcttttt

SEQ ID NO: 52219 - DNA, 1053 bp, Homo sapiens
aataaaatggttctaattagtgcttaatttacatagattagagagttctacaggcccacacagtagggcttggggattttatgtcatttgatggagatgccagtttgattcagataaagaaccaattttagggaatactgctgaagtttgcccgacacaaatgaaggagttgtagcttgcatttcttttacccactcttgttcagtggcttgaactagctttctgtctcttccacaagatttaggacaagatggatttctgtgtcagcatgtagtaggagagctttgattttctagttctgtcctgtgtggatctgtatgtagctcagattcccccacaatctaggtcagagaagctgctagccttggtgcaaagttttcaaaaaggcttctattcagagagatgaataaggaaaaactcacaccctacgtgcgaaggttgcttaatgagaggtgtgagatggagctcagttgccacttatctctgtagttgggtaccgttgtgcagtctgtgcactgcccagccatttgcagtgaccccaaagaggatcatctggtcatcttgcggggagagactgtgagttcctgccatgtcacttggtataacatgagaaaactcaaaactctaggcagatctttgcacctgccctacttttctacctgctctcacaatcttcttgagggtgaccagagtccaagtaactaagtgtaattcaatgtggtgaatgatatgattgctacacaggagtatctattaaggctttcaaaatgtaaagaggaagtgactcattcttcctggtggtggtggttgcatcaattggtgtagtctattgcctctctcccatcaacaagggacatttggcaaagtctggagtgtgtcaactgtggggtggtggtactaccggcatctagtggatagaggtcagggatgctgctgaacattttacaatgcccaggacagccctcccacaataaattatctggcccaaaatatcagtagtgctgccattgagaaatctggttatgtaacagataactttttttttttttttga

SEQ ID NO: 52220 - DNA, 2972 bp, Homo sapiens
cacacacacacacacacacacacaccatctgttggcaggatgctgtcccagggccatcagtgtacactgtgatatttctaatattagaaaccctataaataagcagcccttatttgcacattctggaacaatttttcaaagctttcctagtcttcttcttctttaaataatgcagggtttttttgcgggctcactaagacatgcttttcctgcacaaagaacctgagacatgagcttggctcagatatgctaccacaaggtggagctcaaacgtttttcttttttgtcgagttttacatgaagttaatgctgattaatgcaataactgaaactatgattctatgacagcttagtttatctcctgctgagattgcttatgtgctttggttttgttcagaattattagctgtaaaaacaaacagcaaacaaacaccgcacaccctgaaaacataacagcctacccgtctaatttttattttatttttattgtatagatttaggttaatttacattttaccatgacatatgctgaaggcagagttaaaggagtaagaaaaatatagagtttggaactcttgggatcctataggcttacaattcaaattttaaatttaaaatagaaaataaaccgaaaagaaaacataattctctaagacaagaaacatgtttccgtttaggtaaaaggaaaaccgatgatttgtccctatgggctgaggtacttaaagaatctctctctgccttagggcctagtccttccttaggtttccagctttatttcctgccattcacttggaatttccctgaacctcactttccaagtacatgagtccatacaacatgccctgttctgagatgtggctttgccttgtttgtttgttgtttcatttcccagctgcttctgttgtctggaaggtgctttgttggctgcatccagactattggagtttttcctttttgtttctgttttaaaataacaactcttgtttcaaggctcagctgaaatctaaagcccttcaagaagtctttccagttcttctaagtcagcttcaataatctactcttccatgatcatgatagtactgacttaggctttctgggctacaggactgctctgaatacctgacatgcccattctctgagttcccacgaagagcattcttgttttacagctaagacccctgaagagcagagagactgatgcagctgagcctctgcagctggcactggagtgagactcatctcagtcctgagtctgtgctcttatctgctaagctatggcatctccctgaattgttacaccacatgcttcatggtcttatcttgccatttttaactttttattattattattatcatcacagtggcttatttatctatttactccattagagtttgagctgttcaaggccagagggtaagtcttgtcactgtgactcagcagtgccggctctggggctgtccaggcaggaggggaggggttatggttcaatgactctgaaggccaacgtccaagttgacctagctttgccatgtgttagccatggggcctggaaaaaatgcatgtccctgatacttagtgtcctcccctgtaaaatatggaaggtaattgcacttcttccacaaaaaacaaggttttgtgaaaagtggttgagttaaaatctctgaagagcttgagatgcagagtctggctcatagaactccctatgtgctaggaattattatagcagacatttggcactttgaatcgacagtcctggcattcaaactgatctatcacagttttcaaggcaggttttaaagctttaaacacgttgtccagctaacttgttgatgttttactcccaattatttttagaataaaaaaagtttaaggattagttggtgaccagaagtgataaggcaggccttgacttagatgtgtgatctacacttgtaaacctggtaaatactctgctgagtaatacacacaaaacacactgattttgaataactggatcccaattttatacacagtaagatgagcaggcaactttacaatgagaaaataagactattaacttcaatttgtttttcttatatttaaattctaggaggtattcttatgcttctgagtctcctattgacttctgctgagattattctcacgatattgctgaagaaatttgaaatttcccattaaagcagatgcttcactctccaattcattgaagctaaaaaaagacacaatcttttaaaattttacagaggttgtatggatttcaaggttatgataaagaatctaaaattcaatcacaatattttctttatggaaaatttgattggatttgcataattttgacttacaggaaactggccagtcccaagtaaaaggattctctgttcctctgtgaattgcattatccagtaattagtttaacacattgtattagtccttcttgcattgctataaagaaatacctgacactgggtaatttataaagaaaagaggtttaattggttcatggatctgcaggctgtacaagaggcatggttctggcatctgctccatttccggggaggcctcaggaaacatacaataacagtgaaaggtgaaggggaagctggcacatattacatggccagggcagatgccagagagagagagggaggtgctacacacttttaaacaatcagttctcatgaaaactctaccatgagaacagcaccaaaggcagaaatctgtccccatgatccaaccaccttccaccagacccacctccaacattggggattacaattcgacaagaaatttgggcagggactcagatcaacccatatcacacatgttttctgagtgcctgctacataccactcactgttctagtgactggcatgctttcctctttgaaaataacatggctataatacttatattttcttggtgaccaatcaaagtcaagtgaaaagctgaatctttgaaataggtaaattca

SEQ ID NO: 52221 - DNA, 1073 bp, Homo sapiens
atttatgttcatgagagttggacaaagaagcaaaaatgtgatcccaagttgactgtttgacaccaaacctttgtgtttggcttcctgtctgcatttgggcagagatgaatttggggtgactgccagaaattgcagccagccgtcatgctaaatgtattccccccactggacaggagccatctgtaaataatgtactttatagtagcaacaaatgaggtcttcctattgtaatttaggattcttgagttcttgagcatattttgatttcgggagacttacctcttttattaaagatgccacgtggagagcagtgagaggagtttgctctgctggtttgacaaccactgtgtttccacagctcagtgcaggccctatcttccaaatgagcataaccaacgggaaattccactagaaagcaatatgtaacaatagattctttgtattgcaaaaggcatatttgctaatccaacttccatattatacaccccctgtagatgttatgtaataattgcgtagttttgtgaaatcatctggcatattatacttcattgctaaaagcaactagtaaatgctaaaacgctctgaataaaccagatatgagatatgagaaggaaataggagagaacctcaaaatttaatcaagtactgttgagttctttttctaccaggaaaaaaaaaatcactgcatggtttggcttattatggagcacactgtaagttatctaaaaatgtttaaaaaggatgattactctccttctccataagtcatttattgtaattatttacccaataatattatttagtagcttttatttccaggaaaaataccttgctaaagacaaagatgtccagggtccagaggccaagtacttgggttcaaatctcagctcaatcactgaccagccatgtgaactcacacaggttacgtgctctctgtatctgatttcataatctgtgagtgctgataatagtcctctctgcctcagaaggctgtcttgagcattaaccaagaaagagggccaggggctcaacacaatgactggtctagcatagacaagtagtacatatcagct

SEQ ID NO: 52222 - DNA, 1085 bp, Homo sapiens
gatcctctcaccttgaccttccgaagtgctatgattgcaggcatgagccaccgtctgcctaatttttttgtagagatggggttttgccatgttgtcaaagctggtctaaaattcctgggttcaagcaacctggctgcctttgccttccaacgtggtgggattacaggcacacagggattataggtgtgtattgctgcacctagcaagttctaatgtattttaatccttcctttcagttttcactgctctgaacaattttaggccctattatttcatattgtcaatgctgtctcaagttcattctcttctctcctcaaactatcttggctactatcaccaggctaatcttctgcaaataattttatcttatcactttgtctttcaaatgtttacacctgttccctttcatctacaatctcaaggtcaaagtcctccctggttttcaaggcccaggattttcagaccacatctcacctatccaaacttagtgtttacattttttctactctatctgacccaactccttcttacttttgtgtctgtagttctccttgcctagaatattataccagtatactcccttactttctaaatcctatatatactttaagacccagctcaaatatcaatctacctaaaaccttgccagactagtccagcttgatgatggctactagctaagagcctactaagctccaggcactaaggaaagttctttaaagccccatagttactattactattaagtatcatgagccttggtttataaatgaatagactatggctcatggatatgaaatctagcagacagtagaatcaacctttgatcccacatctgactacaaaatctagttcttacatctctgtaaggctgccctaataatgacctcctttgcaacaaatatatactgctatttgttttgtaaactgtaatatttcttacaattctgggtctacaatgggcaataaataaattttgaataatttggttacctgttttataaactcatcatgttgtactgattttatataaggggtgccttacataattaatttaactacattggcatttacataataaatca

SEQ ID NO: 52223 - DNA, 7174 bp, Homo sapiens
tcagatatctctgtttgatgtctgtatttctgtgagatttattttatgctgatttgcaacatatcatcctatagattatccatgccatttcagagtcattacctttactttgggttggtcttcaaatgagttatttttcatattctctaagagtgtttccctcattctggcaagtatgtagtgacaaattcaataggttaaagtccctgttacaaagttatataaagagttgtactgagagcccttatgaaatggggacaataccctctcttaggacatgtgttctttactttagaattgttaattccattttcttacagtcaggcaggtgccagaaaacaaaacaacttgccaagacagcagtcctcagagatgagcattctaaatattagtaaatgattatctcccactattaaaatcaatgattggttctgtcactggtttgtagccatcatcatgtttctgcttagctctggcactttctgaaaggaaagtttctgatgtggctgagtgctagtttctggaagaaactggaagctctattgtgaagtaactggaaggtggttgctgcattgaagttataaggctcactcacctaaaacttttagacccttgctgctggtcaacagacattttggtagcatcagcaaaagctgaaagactgttaagaacacagaatctcagacttcagcctagatctattctttcaaccacagtaaggaatgaatgataaaaatgcagtaataggtgtgaaaacagttgttagagctaattgggaaagggggataataccctcttctcttaggatatgtgttatttacttcagatttttttcttgattaggttttcttgagtgagattctagtactactggttttgatatttaaggaaaaaaggatatcatgtgggaaagcatcagatccaagataaaaagatttagaatccagtttattctacttttgcattttaagagctatgtgaccttaagtcagtcatgatctctgagctcgggctcctcagctttgaaatgggactctgctaacatcttttctagctcctctcagtggttaatgatgcacctcaaatgagagaaatatatgaaatcagttttgagctgtgataagcaatataaatataacttacattgagaacagaatgatcatataattctaggagtcatcttgggaaagagaatcaaggagagaaaggactaagtagttaataagtgccagccacattccacaaattacctcacttaattctcacagccactttccaaggtagtcattctcattcccaattcacagacagaggaactgaagctccaggggatgagaagcttggccaaggtcatataattaaatacatagaatagctggaaattgaagccaggtttagcttgttcagtcactgcaccttgcagccagtcagctatttttttcacctgcttccaagcccaaagcaaacaaaatattgcttcagttggaaggaagttaaaaacatttcccaagtgaaagcagcatcacagcacaatcagctttgcgttgaacataagtcctttcctgttttaagcacctctcagtgatcttcctcaaaatccgccagccgatctggccccagcctgtacttcagtttcatctcatccattctctcccttattcactttactccagccagattagcctttggatagttctttgagcataacatgctcttgtcctcggggtctttgcatgtggtaagacctctggatctttgttcttccctactcttggccaccttattctctacatccctcaggcttacctttaaagcaccttcccaaaaatcctcatcaaaagctcttctactcatatcctctcagctttcagttattttgctttaaacatttatcctaatttctgattaaagcattctcttattttctgccccacactattccacacaccttccaggaacagaggctgcatgagacgtgaatcatattagccctcttatatcatgagaactagcatagggcactcattcaaggccttgttaaataagaggaagggaaatatgggagaaacgaaaagcaaaagggagaaacaagcaaaggggacaaaggaggtatttggaagttcatgtagctgaatttgtttgttgtaagaatttaaagagataatcatgggggaaaagaagcacttcaaatcgtgcctgggacgtattattcaatgattcataactcttctccattgaaaatatctctttaacccagaagggttaaacaaaaccagaaatctaggaaagcaatctcctactctaaccaaaatcgattccataggagttgaagaaatgtagttcacacagacatttcacatccatgtcaaagtcctctgcctcatagcctctcctagcccaaacgtcacattttcagtcaaagcagaaaacctatttcctttcaatttccctattgttctctttttctaagttggctgcaaactttctcttattggcctgggaacagctgagcagcagctggaaagaccatggtaatcagcaatgggcaaatgaaagtcaggatgaagaaggatacaagaggattctggcaagtcagtgtcccagagtagtggaattgaccttagacaagtctcttgctagtgtgttagctcaaactgccagcattggcagtgtagctttgtcacttacttgctgtgtaactttagtaagttacatagccgctctgttcctcagttccctgaactgtgaaacaggaatagtaacctcctcatagggttattatgaggagtaaataaaatcattgtcaagaacttaaacagtcatggcagagtaagcacaataaattttacctataattatttattgtgtgtgtgtgtgtgcgtgtgtgtgtgtgtgtgtgtatgtatgagtaaaatgtcattagctgatgaaggtcttttgtagcatgaacaaaccatggtttaataagtgaagcttactaattaagttaaacattttggcgtttgaattctgtctgagaatgcttgtcttcttgaatttcctatttcccttttataaaaaaaaaaaaagaaaaaagaaaaggtaaaacaacagtattgtgaagagagaatggcaaacaaagttaccgaatcctgtaggagaaaatttttgatccctgaaatcttggaagacccttggaacttcactctgatgcaatctttgtcagatgggacatgactgtacaaaaaagagtgacagaaaagctaggagaagacgtgaggcatacttgtaggaaacaggtctaggaaaggttgggtaaaagggaatattctggaaaaactggaaaggattcagaaaaataggactaggatcactaacgttaaatcatttcccatgtccaggcattatttcaagggctttgtacgcattaagttcgtttaatactttcatcgaccttagaaaatacgtgcctttatcatccccattttaaacataagaaaaccgaggcagagagaagtaatgtagcttgcccaatgatcacataactttcaaagaatctcttcatttaaaggctcaataaaatggaaaatgtggggttcatttagagttggaaagaggagtaatgaggataaggatgggatatgagttcatattagtgaatttatagcgatgtttttgaggttttaaattccaaaagcttttgtataattttagaaagcatttcttaaactctgatctctctttaatctaccccaacaaagaaataatcagactgtactagaaaataagtcataaaaacatatgcatcaataaattcttttgtttgggtgaaaagcagtcccaagcttgagagtatgtagcttttctatcgtagttgtaatatttttttttttactcaaccctgtctgttctctccaacttgtcctaacaaccaatatacttctagctataataataataaaaaaggacattagaatagtaacagaaaaataacacaagactttaggggctggtaatagaagataattcctcagacactataaactccttgcttacttggtttgtaaccagggaactttttatagttaataaccatcatttttttttttaactcctcttgcaagagcaaattcaatccaattcttcactgggacatagtaaacaaaaaatgcgaaggcatttgaaaaagttcacccatttagatttaattacatacataactggcgtcctcccaagtgtgaaaacgctgtaaccaataaattaaacaataaaatgctatctgagcagaacagatttatatagaagatgcacgagaaatcaaaattcactgacttgtttggagtatttttacccagaaaagttcttaaacacagagcaaaacgcctgctctttgagtcttgccttcttttggacacttaggtcagtcactttccctagaggggagttgttgcacagtgacttcgaagtgaataggtttcaatctcaaaatcatctctctgtgttaagggttcattaggtctgtgcttgtatgttagatttttaggaccatctcatttgtctagtaccgcttcttacatgcttagttaatgactactaagtgaagcttaatttagcaggaaggttatttacattagagcttccttgaaatacacacacaaggaagactttgcaaacttctgcaaagccaaaggagtggggagacaggggcatccagactaccaaaatatcttcctaggtagtattattaaaaaaaaaatcccattaataatagtaatacaataatctgagcattgtcgacaattttgagcttcatgaaatgtatttttaaatgtacccactttcaattgaaatttcttgtgaatgacaaacttggaataagaaaatgagggagactggactcttgcaaccttttggacatacctttgccaaatgtaaattgtttgacggtatggatttactgcatttttcatgctaccatttgtagtaaaactaaatggaaaaaatctttcctctttaacaaaacctcgtgataacaataccttaaaatacacttcatagctgctggtcaaccatgttaaaggcacaatctgatctctgctgctactttcctgaggaaaagagccaatcagctgagcaacttcctcatttgttgtgctttatgaaaatgaaaatgcaacagaccttgggatttcaaagccatccatggttacaagtgaggaaataaatatataacagtggggacttttactttatcattaaattataatgccctttgtttttctgttggctaattcagacagcaaaatggctctctcttgatttgcaagagttaatttcttaccatactttctgcatcacaccataaagataacttcaagtaattttggttagattgtgttttattcatttgtttgttttggagttctaggatctgacaggaaagcagtgtgaaacaggcaaagttcagagttactctcagaacgactcaagcaggatccatttcctagttccccccagctgcggattttaaagtctggatctagctcctgctcttgtttctctaaatatttatcagttaacaattacacatctgctccaatggcaacaaacttggctgaagaaataatgcttttcttcctcccaccaaaatatgcaaaataatgcaagtccatctgaagattttcgaatccaattatcagacttaagtccccctattttaacactcattttattaaacatattggaaagttatgttatttcagtatgctctctttctccttgtttgctttctattgttcctactcgtttggttctttccagtaagcttctctagtgagtattttgctctcttatcatacatgccggctatagtgaagttaatagaagtgcttagtaaagtcctctgaatcctggtataagaatcctttcacacagaagagaattcctttcgcttggaaatattttaagaaataaatttatgaaagattgtctgatatgatttagatcatatttgatcaggacactaaactgagacctgcattttgcatgccttttatttttatatttgcaaagggctctttacacaagtttacttaaattgacctttaatgctttacataaatgcagtttttgcaaacccgagtcaaagcagaaaatagaagttttactcaccttagtatattgaatcttcaaatcggtgagtaggacaggtaagtctggcgtgcctgaggatgacatttctgattcggctcctggaacacaggtgactggctcagcaatttggttctgatagagcacttggctttatttgttccttttttatctgcacgggctaaagtttatttgcatactcggatacgattggatgaacaaactcagagcaaaaaaagaaaacgacactacttatttgtaacacctagggcaggaagcctttgactttaaacttaaatccttaagaaaccagtgctccagcatcgaatttgtacctggagacagtgcactatttgcagatgaattaatttacaaagccgaaacctgtgataagtgtatgcagcagctgctctggccactaaggccagttattatttttttgacttctcatgctttttaatgctactatgtaactttctgttctctgacagacttggaatcagagaatttgaggattgaaaagagtctaaaagggcacttgttctcagtagaagctggccaggtgtcttcaggacaaggctttcaggaaatcagtccatctcccagaaaatcaaggtgctgtttggggaagaaaggccctttatctacaccctaccctaagttagttttaaaatatcgtatcagtcttgtgtattttcagtgctgggtaagtagacctactgtgatctcagaagccctaaattatctttattttctatatgtgaacagaaaagccagcaggacttttagggaattcggaacacactgtcacacacaatcaccacaattagaaatatggcaatatcatctattaatactcatttaaaatgaaagtaatcctggttttggaagttgtctgtatttatcaacataggcagtgtacaaagactaaatttaagcagggcttccaaacaattcaagttcttaaattaatatttagctgaaggacaattttttaaacagtgttactcccattttaagtacaatactttattgtattgtagct

SEQ ID NO: 52224 - DNA, 903 bp, Homo sapiens
tacagctctctgcttccgtttttcctgacttttgcttttgatattagtgagaacattttaaactacaagtacagaaactcaaacaatgctaacaaaacaaaattaaaccaacagaacttatcgaaccaaagaattgtagtaagagagttggctgcaaatataactggatacaggggatcagatgatgccatcagggttctctttctccatcctcagctctactttctgacactcttgcttataatcttaatcatactgttttataattatgattatatatcttttctctcctagatttaaggcagaaatcattttgtctactttctctgccaaacactgtactgtaactcctagctaatgcctgaacaaatacatgttgattaactgaatgcatacatgaaataagatcctagatttttgtgttaaaaggttattgaaggcctgatgtttccaaccaaatgaatctagttgctcaaaaagtaatttgtgctgagggacctcatctaataatgtggctcaacagggtggcagaaacatgttggcacagtaatttatttgcaatgctgaagacattctgcggtttggaagcatttccagatagtggagtgaaacattatataacaatccaagagattaaaggcctgaataatgcagtatattaaaagtatttccttctgggacttgaatcccctggctcccaaccagtactctgcatttctaactacttatatgtgaacagttgctttaagcctcacacattttagataagccagggcatagtatgtgttcatgaaatatatgtttgaataaattttaatttcttgtatgtttccatctcatgaatatccacaaaatggttattaaagaacagaagacaaccattttagcaagacttgaactatt

SEQ ID NO: 52225 - DNA, 4128 bp, Homo sapiens
aaaagactggactaatttttaacccccttgctttgctttcttgtttcctagatctggcctctggagaaatggagatcaccatcttaaaaccctcgcccttcagttgcctcctggacaagcaggcaaagccatagtgaggagaggcggatcctattctgctgctcaaggaggctccaggctgttgaacagacagatgacacccagaacgtctccatctccaccaacccatgccctatggtgcaggcagaatagtctttcaaaataccgaaaggatcactccattcctttgcttaaaactcttcaaaaatttactcttacttgtaggctaaagcataaaattcttgacaaggcttacaactattttttaaatggcataaatatatatatatatatatatattttttaatatggcttaaacagtatttttcaactgacaaatcagaaaatcagtcaaattaattgtcaaactaaaatgtaatatcaattcagtaagttgagaccagcatttacaaaaataaaatgcagtggaatatgttagtgtgtactgcatgtagaaggagtcagtattattcatgaactttaaaaaaaatgacgcttatgtgaccatatgtaatataagtatatcctatataaaatatgacatacaaatatcatatcacattgtacattacctcaatatttgctggaaatgatgaaagttcctgaatgtactatttctgagaaatatctgtgtcatggggatagggaacctaagcagatttttgaaagtgaggcagcatgactcattcaaaggaacacagttctaaggaggaatctaggcttcgttatcagcaggacatctgcccagatatcttttcaaatctggccatcatagccaaagttggacaatgatccgttgggtccacaaatcttacagtgagagcactcaatgcagagaattcttatcgggattaaagtttcttaggagtagtcccaagttcggaatctcaaactctcttcaattctttacccccacctgcttcatgatgatggcatagaggacatacctttgtaaatcatcttcctaggctcctctgtggtatttgaaaaatctacagtttgctctatgttttaggagactgtgaaacataaactatttttcgtaagcctattgtaaatcaagccagtctgttaaaaaaatgctttgaaagaaaaaaataaatctaatttagatgtcttctgtggttacaaaatggcttaacagacaacttttgatgaatacatcacaggagttaccagaaatcagataatgtgcctggaaatgttagtcaattattaagaattatcctcaaaactgttccaaaagagtttatttgattttatgtacctactaaggaatacaacgctatgtataaagtttgcctgcattcatgaaatttaagctaaatactggcaatgggaagcaaaaagcggaataactaactaaaatatcccccgtagagaccaatcattgagataagtataaaaataggtgccaaaatacaaagatcatccttttaaatgatttttcacaatctattaacagctccaatttggaaaattctcacaaaaaaattaaaatactggatcaagtggaaaggatcctgattccagtcaagagtcagtgtctcagttccagccatctgaaagtcaacaatgtaggcctggacaaagagaagtgccaggctctgaagacctctgtgttcctaactggaacacagtgctttagagcagatgggcctgcctttcaagctctgtgctacatgattccatgtgcacattctctcaggctgctcattaaggtacttatttgccatggaagataataatctgattcaaattatgtatctagacagaacaaattcaacaataacatgaagttttcctaccttaaaattaaactattttgcatgtaaatatttaaggaacagctgacttaagttttctctattaaatataatataaatagaaaaaatatcctcatccccacatcaggctgcagataaagttgttaatcatcaacttgcactgttaaaagcaattgcggttgaacagctttcagctttccctgcagcaatctgtttcaagtcaagattcagatagcctcttgatttttacatgttggacatgtgggcagtaaatctatagataaatatttttgcagttaggcatcacactgatgacactgcattttgagagaagtggagaggagaactgactacataaatgtagttacatcataacaagaaataattgtttaatggtgaaaacttttgcctatatatcatttaaaaaggccatatccaaagtgctaagtcattctattacaaccggggttaaattagtttgatggtaaagttcatagataagagaaaagttactctttaaaccatcccctcacccgcctgaatgcttggtgataggatgtcatcgttaatgatttgagttccctaaagaaagctctgtagcctttggagaaagctaacgatgtgtaatagaaatttactagaaggattcatggtttttctacacttatactagactgtatagtacaagaggaaattattttagataatacttcatctgatatttattgagcatctgaaacattcctggcattgtgctttacatataagggaaagaaaatgttgaatagattcctaaatattctgccaatcttggcccttctaatgttttctccacagaggcagaccattccttgtgaaacacaaatctagtcgtcatgtcactgctaatgcacaagcctgttcagtggctccctgttgtactctagctgataaaattcaaactccttagtgtgccatgttaaatttccttcatgttgtagtcctagcttaccacctctaacagcctcacctctctacttccttgcccataaattgagcttcctcatgttactttaccaccctgaatagaactccctctttggcttatgggaattagaatatgatattttctctatctctatcttttcctctctctctctctttttttcttcttggccatctttcctctctctctctcttcatttggttaattactatttcaggtctcaaccatgataccttattctaggaaacccttccctggccccttaggagtggggtcagtgtccttccttcatgtgatctaatagatgcttgatccaaagcatctaacgacttccagtcatggaacttatcagactatggtgtctatgaatctgtcatatgcactcagctattacaggactgtgtcttgctagcactgtatccccagaaactaatatagcacatgacttaaagtaagtctgttcaatacataattatcaaatataagagtaacacatatcatggtcctgggggagatgcaggaaaacattttctttgtgtaccaggttcataacagatttttacaaaaattgttctgaagatgaagtacactaaattgttaatcaccatgattccaaagcctaaggtttgttccaagagagctgtgggcagcaaaatatggaattatttagagactctctgtcagtaacattggaattgtgaggagattgtttaatataactacgtagagtaagtgcctgggaggagcatgcctataaaaagtaactgtgcttccatttttaggcatctttgttcagcacggtgccaggtacatgccgtctcctgcttggcagcccagcatagagttacaccctctgcattgcatttaattccctttataatttacataatccttctgcctgtgcctatcattttacagagcaaaaggaatcccatcatgagtacactaagccatatacttggctgcatcacacagatgtttcacctggactatgtctggcagtgcaagaccccaagtgatgataatttcattgtacttaacacaatgtctccctagagacagtgggagccaggggaggggatacctgaggtatagagaaatcaagcctgctaagcataatcacccttgataacttgtctcctttcaacaacttgtgcttttagacatgcattctcatttagggtatttaaaacttacctatttcaataaaatggttccagtgtcagccccctttgaaaactttatactcatgccaaa

SEQ ID NO: 52226 - DNA, 2550 bp, Homo sapiens
tttagtacttcattatgcatagtattttgtgtttcaaattatatcccatacatcatttaatttagtgactgaaacactgtaaattggaatacaattgtgaccagtacctatgacatacaagagaagacagaaggactcactctggtaaagtgaagtgtccagagccacacagcaaatcttgatagacctggcatgatctattgagacagaccatggttttccaatgagtaatctttcttagtgatctttcgtaaagttttttcaactgtttttccaggaaagactacaagaggaaagcattgacattcttttatatgtttcacttcctctcattattcaataaaatgactttaaaaagtactctggctgggtagaatttctttaatgcttcctgaaaaaaaaattcttcgggatgaaatttaactataaatcgagcaccatttttatttggcaaaaaatgtgaagcctgtgcttcataaaactcaaaaccttcaccatataataagccttatttaaaatatgagtgggaaatcttgtccatttttgttatctgggagataattaggttgaaattatctgtttataatttatctcttctctaccttcaatgctttctttgaaacagaattagctcctcctaggaaaatactcttgattcatgaaaacacactaagtcatatggaatgagtttttgtctcatttgtgccagttatttgctaattgactgcctcattcttataactgccttaaacctagactgaatctgaaaagaggcagtcatatgaattagaatgttttagggttcatgggagtactaaataggggcacaatatgttagggtcttgtatttgttttcctggcaaagtcttatttcttcagattccaactcagcatcacctcctctgagcatctatcttacccactttactgggtacactcttctctgctttttgcttatatctgtaatagcattttgtgcagaatttacccaattctttgcttctcttgtaagactagcagtccatagagagtaagaacatgttagtctgtagttccactccaagtgcagtgctagatacagagcagattctcaaagaagtttgttaaatgaatgaatggataacaaatgaatgaaatccaatggaatgtgggaaatatttacccatctatcttgcaggattgttgtgaagctcaaaactgataatgtgtgataagttaaattaaaccttgtaaaccgaagtgccatggacaggttcccttaacttgcataactttagtaaaaggctggggatttgaaataaaccaaactaaaacccaaccatactcagtttgtaaatgctgaccttgtgcagactgaatgttacagcccttgagtgaagtcgtctaccccagcaattcatcctccttggcatggcccttgctgaggttaataggaactgtggatatctcagactgccaaaacataaggagatatgacaggaaaccaaacgggaaactgctggctgccttgggctcactgagatctgtgtctaacaaggcagacttgtcgctgggctctttggaggtgaaatgaagcgatggactaatgctgggcacgggaggcgccaggtcctgacaggctaaggtgtgacctgctgaatcctaaccatcccagacatctttggaagaacagtgagctgggcgatggccaggggcaggcaaggttgcaggggaaggaggtgtatgcagagcccacagagagtagaaaaagaaagggcaagtgagattactggtcatctggtgtcttagatcacacgcaaaacaaacgtcaagcacaacagcaaacacaacctttgagcattactgtctccaaagagtatttaccaagtgctgtctggcttgatctcccagacttggttaaatatgcattctgttaatgttgtgtttctgactttctttcctttccttttttgttattgttattatttctatttttaaaaatgtaagactttacttgctttgacactgaggaagggaaggtgtaagagtgagaagagaggggaaaattccacaaagcattttttaaaaagcttttccaatagaaatataaaatgtaattaggtatgtataattatattcttaaatataatttattattaagcatattattaaatataatatatagatgattctttatattattaaatataacatatacatataattctacaagttattcttcattttaaaataataatatttagaagtgaactaaaaattcatttaacttgtcatttttataagctacctttcttagaaaaaatatcagtagtaacattaaaatacattttacttgatgactgaaggcatacaaatgcatgaaaacatttaaatattttttatattaagtataattgaaaaatgagaatgcataaacgaggtgaacatttttatatacctgcattgtggcaatttcatcactttttttacagttctttgtttacgtgaatattgttccaaatgaatccaagatctagggaaatacaaacgatatcttgctcatcctcgaat

SEQ ID NO: 52227 - DNA, 1093 bp, Homo sapiens
tagtcctgctagctctagaatggtatatatatatacagtattggaattcctagttttcattaagaacatttcctatttggcaagtgttaaatacctaccttcactcaacactatgggcaagctgagtaacaaaaatatatgttatctgttgtgcatgtcagatattcattggtaaattacttgttctgatatcttcttcaatgattgcctccaacaataaatatttcccaaaaagtactggcgccattttagatattgagctcaatttaaaataaagaaattaagaaccggagtagaaattcaagtataagtggttagagggataaaatcaagtgaactaaaataaaaatttatgtttaaagtgaagagggactgtccctttagttgtggtaaatacatgcaggagaaaaaaacacaaagatgtatggaaatcatatgggggagaattaaatgtttgggtaattgctggggaatgaaactatggcgtcattccgcttcctggaaaagaactgctgctcccccttgcggcaagtgtgaaaagctggcatcctgttaaaaaaagtatttcattctaacgcagtgatacaagatctgtttgagttatagtgacacgctgctttgaagcgggaaataaatggcatacgtaggcaactcaagtaatgattctatcccagatataggcttaatgtcaccaaaagaaaaggatagaggatgttaggttgtggctagagagaccacaaaggctgactgtggtcaacacatgtaattggttagtcaacacctacttaacaaatatgtgttaagttaatgtcaacaattttgtaagtttgagaagagtcagtactgagaatagtacaaggtaatatcaaacagtcatttttcaaaagtgtgtcactcagctggaaagataaaatatgaaatagccacaaggagacagttaattacaagtagattccgtaccatactgaatgacttagaacagagagattattattgttagagaagaatcgccagaggagagaggcttttaatgaatcatgtagaaaagcataataagcaggaaaatagtcaatattgttagagttttatctgt

SEQ ID NO: 52228 - DNA, 1641 bp, Homo sapiens
taatttgatagagctacctaatgtttatacattaatccaatgtgcggttaattacattagaggagagacttcatgaaaaaacattaggagtaaaacttttttttttttagcagtagctaagtatgacatgattaaatgtcaattagcataacgtctgccagtgggtcagaaaattcctgtggtttgtcggctcttgtcagatttttttggttgtgtgacttttgaagtctagctatttagaaacccatgatatttttttgaacctgacaccaagtaacacagtaggtcatggcctgaaagttaccatggagggaacatattaggttgagcactccccttgggggctggctttctcccctctgtgagaaagtactgactaccattgattattcttgggcactcttattaaatctgaccttgaaactcagaatatttaggaagccaaaaacttcaatgctaaaaacaaacaaacaaaaaagtctattatgtaataatttgcagacaccctgacaagaaggtggtccaaaaccacaggtcatttacccagttacacagaaaaccttgcattatgtagaaaaactggcatttatccagattgggcaaaaatgccttggcgcagatgggaatatttactcaaaccaaagctaccaatattgcactcagaagttaactgttctagttgtggaaatgcaggtctgtctggttggtgaagactcctgatgaatctaccaaactcatctgagaaagtggacctatgttccctttattttgtgtttcatcgatcctcctgcccctgaacttgctgaccactcagagagctgcacacattttcctggtgccaaagtccagtttggagaaaaggaattcaaaattcacatcacagcaacgtctctgtatcgctcctccctgtttctccttccctgctccttgttatacatctttgtatcctaccttcgtttgttaccagcaattttaaaatgatttcatctttccatctcccttcttctgtcttgctttcttcaaagatcaatttccatcctactccctcttacagaagcctttgctccaaatgccttccctctgactccactcacagtgaaatctccgagcttcccagacccgatcctggccacaaaagcctctctacccctctttcctgctcccagtgcccttgatcaggctccaaactccttcccacacaggtcaaaggtccacccctcctcccctgtcttctaggaaggggtgttctcaccaggcctttccctccaggcaaaattctgcccctgcctgctgctgctgctatggaagagactgtttgtgtttcttaggacacacacagctttgccaaaatccttctctgtcttttggttcctgcaccagattcctcacactgacccacaagatttctgggcacaggtgagccttccaagctgtaactggactgagtgggtttgctgagactgttggatgattatcctgtcaagtagttttcccctaaaaaagtcctcaactggaaatgccccatagtcacattgaaaagcttttgaaaaatgcatccatctctagagattttgatgtaattggtccatgtggatactgctattgtttaacacctcctgagggaagtctaatgtgtgtgtc

SEQ ID NO: 52229 - DNA, 2834 bp, Homo sapiens
tcttattaaatcaaaaaataatttctttaaagatggaaacattgggctgagaccacccagatttgaagacaggaaaattttaccatacacagaagctttcgtaagtgaagtattcagacatgcctcttttcttccatttactattccacattggcaagcatgtaattctcctttaaaacagccactagtggtggggtggaggcattgaagaatcttagacattggaataccttaagttctttaaaatgtacattgtattatggttttaatattactttaaatcttattttatttttaaacactgtaataaaatttttgtggtcagtgaaagcacatttcatgagcatttttcattactaaactatgttgtcattaacttttattttatgtgtactaatcacagggtcagaaagttatggaatgtccaagcaacagataatccaaccgtaatatgtatttggctatgaaaagtcatgcaagcttgcttaatttaagctaaggagccgacttagcttccttcttatatggatttgtttttagtagcctagaattttgctaaacagtaaactaaggaagctaatgttgtcacaatgagattaaacagagtattcatttgcagatacttgaaactttactgaatcttactccagaatctctagcacgcaaatgcatgccagcataaattaggtagatagcttcattaaatgcatctgtggggaaccaaagttctagtagtttgttctgtttttattccacacaattaaaaattattaaaaaaaaaaaaccacctggaattctcagtgttcgttcttccccctccctttaaatagtgaaggagtgggaatatctctcttcccaggaaactgatgtaatcatttagtaattggtgtgacagcatgcagtgtccttaggtaagtgtcccaaagggcaagaccgccagctgagcagaggcaaggccagacagcaagtgacatagttccctgtattttgccctttgtttgctctctttattcacacacagtggctatttttttcacagcgatccattttttttttctagctgctatgtcagatcctctctcagttaaagcaaatttcgttttattgtaagttttaaaaaaattaaaaagttctacctatttaaaagcaactcttctgtcccaataacttttaaaggtgactttgggtgcttcatacgagtattatctacacttttgctaagtacccaggaacagagaggctctgccaagtttataggcatcatttggaacgaaagtgatcatctaattagggccctgtaaactcatctgagggtctaagtgatagggagaaatatgtattaggacatagatattcattgtattattaaaagtaacggaatacattaaaatggaaaattgaaagaactactgcattggctaatgaaagcagcatgatatgaaccaggaattttgtgcacacaaaagagctatcttacttatattatttaggactgatttattctattacacttggaagtttattgtttttcatttaaaatgaaaataaatcaaaaggcacaaaatatgataaaataaatttaaacaaactaaatgaaataaacttaagtaaaagcagcaaaagtttgctattacatataacatatatacacacatataaaacacacaggaaagaccaaaccatatcctaataaatatttattgcatatgcatttcttaaaagttgtgtggaaagccacatatacacatgaaatttaaggaacataaaaggagatagagaaacgttacaattcactcttatattttaataccagtgaaataaaattttacataccaggtttctgtaaaatagaagcatataacttctatgagtagaatctgagcagctgaatccacagaggcagtgtggacagggatgtgttgagaaagtcaagtggctatgcatgagaaaaggtaaccttccaaaaagcgagtctatggcttgttttgttcccctttgttgggttttgagaaactcaataaataacattgatattatttgccaaagctcagtactagccacaaaatagacacaggtaaaatagaaattatattattagctttttaaataatcagagctagttttcaccatgtggcttagagctagatcaagtagacctcgaaattaacatacttctctactcagtctccagctaggttgaacactttcaggtctcctgtggaaagacaaaatctgaccctctaagctcagcctatttctgattgtagataagatgtaccttcattacaaattggctaatctgaagagaaaacccagaagtagtgagacaatgccttctctcaaactaatcaaattgaaatgtttctgcttctcttggggaagtgagtgtgagagtaggttagcgaggtagggagtgccacagggaaacataaaacgattgaatccaatccatgaataattatagaggtataaaggggaaaggcaaacaggtttcaggaaggagtttgagtatcagactagaaaaatagaatatttgctttagaggcaacttacagaccatccaacacaaccaacaccttcgtttcatagctaggaagtggagtcgcagaatagataatttgcccaatatcccactgagggcagcatccaaagttcagatttccttgttccaattccattgttccttctacccagtactaaaaggtgtgacattttgtctttctaatttattaataatagacacaaacacattgagcacacagaagtacttaataattctcttcatcgtttcctgatgtaatttgatctgcctgcttatggtcaactctgtcata

SEQ ID NO: 52230 - DNA, 1450 bp, Homo sapiens
taatatatgcaagaaaaataaattattaatttgacaagaagtggaaattgttttaattaatgaaagaatgaagatgtataaagatatattattacagtaaaaaaagacataaataaaaatagtctgtgagttgctggtgacagtttagagatgggtaatttgaattgacaggaagtgctgtaatgctgttttttgctgtcttagtactacagcagacaccactctgaatggctatttcattcccaggaaaacttgcacctttatcaacatgtatcaagtaaatcatgatgagtaagttaccaaaattaatctttggataaatttgcttgcctgcttggttgtttactgtttattaatctggaaaagatttacagtcttcttagccaaccttcactcctgtttctcttgaaagatattggaaagaagttcagtttctctcctcatctataatgcaaacagtgatatattgacacaaattgaggaaaaatccaatatagggcaaatccaatttcaaaagtgagctcattgggagagatttgggccgaggacttcatgggctcaccctttgcatggccatggctaatacattgaaatggagtctgaaatcccccactggaatgtaagccaccaagcagggatttttttttcttttgttgtttgcttacttgttcctctaccccagcacctggatcactgcctcacacatagttggcacacaataaatatttgttgaataaaataaagttagaagttcacccacatcagctatgaaagaaagggctgagatgagagtacctaatgcagtgaaagtgaggataatgacagtggtggtggtgagaatgatgattacagctaatatttatagactcctactgtgggcaaggcacaaaatcttgcagtatctttcctgagcctcaatagtaacacgattggtgctatcatgatccccatttaacagataaagaaaccttcagccaggttaaacacattgcctaaagtcgcatgttcagaaggtggcagaggtaggactcaaatccaaatgtgtaaattttatgtaatggaaaccatgtgcttcctgtagtggtcagggcttgatgtctccagtgactggcagagactgcattcttatgcactcagcagacagtaaatatgttatacagtcttttctcttcacccaagatctcatctgactgatgtttcaggctgcaagctgtaagagagggaagtgattatcctgtgtacctaatggcagcttcacaatctctgtaaacagaaagatggtagaagactatgcatatgctgtcccactgcaacacttactgtcacagagattgacacttccattctccacacctaggcattttgaaaccactataagaagaaatacagcaagtgtatatttaataacatttattcttacttagtataatcctaagtattctattaataa

SEQ ID NO: 52231 - DNA, 1989 bp, Homo sapiens
ctgtttgcattttagttataaatttttataaatgatttcctctaaggaaaattaacttgctcacttctcctacttattgcttccagctctgtactacacacacacacatctgtgttgggaatctttttattaaaatataacatacatacagaaaagcatacaaaacataactatatagcttgatgaatttttacaagctgagaactaccagcatcccagaaccccctgtcctctgattccccttacagtctctggtttctgtgctccaaagacagccattatcctgacctccaatgcccatagtttagcttgttttttaattgtatataaagggaagtaaacaacacatgctgtttgtgcctgacttcttttgtgccacactgcatttgaagattcgtccatgttgtgtttgcaagacctgtttccatgttgcatagttgcacttcatttattctcattgttgtagagtgttccgttaggtgaatatagcagtttatgagtttgttctgctactagtaatcacttagtttctagtttggttctgttatgaatagtgctgcttgggcattcttgtgcacattttttggtgaacattctttggtacacatttctgttgaccatataaacctaagactggaaccgctgagtcacgaacattcatttgtttaatttttgaactgccagctagtttttcagcgttgttgtaccaatttacactcctaccagtgccataaaagagctctctggttgttccacaccttcttcaacatgtgatattttctgtctttcccattttagccactttgatggaaaacatatccttattaaagacacagatcatgaaaaacatccctgacctgataccttaagtgaactcaattttggcaatgttagctagtttattctttcttaatgacatgcatctgggacagattgagtgcattcatccactgaagtccttcaaaagttaatgatctcccattcttccccacctcctaccaaatacaaatgatattagctcacagttaccatggccccctgagaaagctgttataccagtacttctttttcatagtttctttcagtagagatgctatgggattttctccattaatcagatcaaaccctacatttaaaatacatttcagttattacaatgtctacattttgttcataatttaagagtcatctaagagtagtgacttatgtttatcttgtggcatgccacttttatgttttccagaatcctatttttcattgccatgattggactgaaaaacaggatgtttttttctatcgactcacatttctaaaattccttcttggtcaaaagtgcaagtctgttgaccctttcaacttttgtttgaaagggacatttttgagttcttattaattatttttcattgcctttgtgtttcttttgctctgttttactctgtatcttttcgaatgagtaccattctgctttttatctacttatttttaaaataaagaattggagtgatttttcatgcttttctagaagtatcatttcattagaaagataattctagacaataaaagcttgagtgctaattgtaaaatagttttattgataaaatttgtaatttctctttctgttgcttatacagtttgataatcctatgaattctacagaaggaattcacatgtaatgatcctttaataactagtgcccgagaaaaataaacttattctacaattaatttaattttcaacactttaaatatctttaaatttgtttcttcgttttgtttctggtatcttttgccttgcagaaatatgtaactttaaaagagccaaatatatctagcttttcctttatggtttctgtgatttctgtcatacttgggaatatctttcccatctcaaatttacacaagtaaacttctaaattttctttcaatatttttcttagagcaaggattcatttttcttctacatggataatcaaacatacaagcatcgttt

SEQ ID NO: 52232 - DNA, 689 bp, Homo sapiens
gagagatcaggggaaagtgcctcttttaaaccatctcaccagatcttgtgagaactcccttactatcacaagaagagcagggggaaactgctcccatgatataatcacctcccaccaggtccctccctcaacatgtggggattataattcaagatgagatttgggtggagacgcagggcaaaaacatgtcactccatttcataactaactttctaggtaaaatctgagcactcctcccaagggcttagttttcttcagaaaggagtgggctataccgtctctaaaatttctttcagctctattatctttactgtaattttgccagccttaaaattagatttgggtataattcagcaattatactggctgggattctgcttctttccattttaaaatgaaagaagcaagaattatgggtaactagaacaagaggtatcagaggtcatctagccaacctccattcacagataagcaaacaaaaaaacaaaaaacacacacaaaaaggtgaagtattttctgcccaatgtcctaacactagatgtagcaatattaagagtttagtccagaaaatttggaagaggtggcacacctggattttgtatgctttagtttctccaggatagaaacaaaggagaatgtagtgtggcagtaaaaatatgagtaagtatatacatatcacaaatgacaac

SEQ ID NO: 52233 - DNA, 420 bp, Homo sapiens
atgtgagagactccatatttcctctccttgttttgttttgtttcctcttcactatcagattctaaaccaaatgagtgaaaataaacatgctgtgaaaaacgtaacatatagagattgattttaactgtcttttttctttccttctctttctttattttctctgtttgtaaagtaagtggagccgatgaatcatcatcttctagaaacagcaagagtggtgagtcatttctctggagtatgtggcatttcacccacagaaagcatttaacccatgattatcccctcactgttaatgataacatattttacttgttcttttatttccataaatctactcgacattattattatgcggagaaaaagattctgacagattattcacagcaatatacctacatgattagtggctttctttttgtg

SEQ ID NO: 52234 - DNA, 515 bp, Homo sapiens
ctgcatatctgctgaagacaatttctcttcttaaactagtcattcaaccaatgtatatatgttcccatgttgtttattaacaggctagctagccctttctcttctaaaaacttactggagaagacaccatctctccttctatatatgagtcatcactggctcctcatagaaccttgtgcattccagttacgcaagaaacatttcctgaatatgtaaccctcagtccaactgggaaacctgtacatgcaatgagtcaccctgttcatttatataatatccctcccctcccatatcttttctttcttatgtattttcattttaccctgacaaatgcatgttgtttttttaaaaagtatgcttttgttgttgaaacaaggctcttatccattcccctaggcattttgtcttctaactttgaagatctttctgctttctctactacaaaacacgactcacaaggctttgccttttgccactcccctgagtctctgagctacagcttcacactgtagggg

SEQ ID NO: 52235 - DNA, 527 bp, Homo sapiens
atacaacattttttaacttaatggggtagtacaaaggaaataatgatgtttgcaatttttagtgtgtttatattcaataaattcattgtaaatgtatctaaatatttatagctgtattgttttcgggaaatatattttcccttaaaatttttagaattagacataaacaattacggtcaactttttctcaatcctcaatcttggttactcattagcctcacagggaggatataaaacacacacacacacacacacacacacacacacacacacacacgcacgcacacaaatgttgtaatcccaacctaggaaaataaatcaatctccaaggtggaaatgagtcaatgctattgttttatgcatcttcccctccccaccagattagttttataattcatgccttcttcccttttctcattgctgacatcaaactgtgatgtctttctaggcctgtaagaatatttccagatacccaccctatgcagccttttctttttttttttttctttcttttttctttttttttt

SEQ ID NO: 52236 - DNA, 1500 bp, Homo sapiens
atttttcagtccagcaaataaattttcagttctgagatttctgtttgatttttgaaaattatttcaatctctttgttaaatccttctgataagtttctcaattacttttctgttttatcttggagatcaccaagttttcttacagctgctgttttgaattttgggtcagagagttcataagttagtcacttgttccttgctttgtctgtttgtggaggtcatggttcattgtttgctgatgcttctagtgggtgtgtgtctatgcatttgcattgaaaaattaattacttattccagattttttaattggcttgtttaaatttttatttgaagtgtttgcttaaaaattcttaatttacccattgaatttcttgtattttttccactaggtcactgcctcctttttggcactagatggcatcttaagtccaggtttgcttcagctttagcaaacaattagagcactgccctgctggaatggatgagatcccaaaggggacatcccaatgatacaggatttttctctagctcagctaaaatctgggttcttgtctcatgaccaggaaaaattaagaatacagacacattgaaaggtgaagaaagcagaatttattaaaagaaagctctcagcaaaaaaagagagggtactgccaacaggctcccaactcacagatggaataccaggccaccacacaggagctgaaggggccaggcttctcctcccttcataaggggtaaatttcaggtggctccaccccattctcccagtgtgtaggtgggcctttactctgagtcactcaacattgatttatttactttactgtgcatgagttaagagacagaattttgtaccctgggcatgtttaggcaagccccctgtgcacaatgacctgagtggcatttggctgcctcctgtctctatcaccagcagtgttaaaaggttggctaggggtttgtgcccaggggatttgtggaacataccttctacaccctggtgttagtgaacagccactcttatttggtgtctcctttagcctagttacagagcagtatttcccatgctggggatggtagtcccacctcccaactttgtctctagctgtcttcagggctttctctcccctcgggcatgcttcccgtggttgaggcatgaacagatctcctgccagggaacacaagatggtgagtaatctggttgtccacctttatctcactttttccagtgtagaaatcatgagtcaaggaaattttccgcatgcttggggccaggtagactggcagaaggggtgtcatggatatgaaaatcctattctttgactgtcttcttggagtatttttcactcctctgcagcccagggaactgattcatcctaatatttgagttctgggatatggctggtgataacttcactgatgtgtatttggttttggttttctgtggggtggagtgggtgaagccagcttgcatctacatcaccaatttggatcgctgctaattta

SEQ ID NO: 52237 - DNA, 1311 bp, Homo sapiens
ttacatgttactgacaacttttgtagaatatctctgtaacatattttcagagacaacccagtgaggacttttgcttgctatttgtctttgaaattatgcctgatcaatcaccagttgacctgagatatatcaccaatcaatattaaacatccattttaagtaattgataacaatcagactttttaaaaatggtgaaatatgatcatttaggccagctttaatgggaagagagtaaaaaccggaaggagtttctatctgaaaataaatggaatagagtcttgataattatgtggttacataccccacgaaaaaggctaattcctaattccttaaatatgaagaaacaccaattgcaatgaacttattatgccttctgccttttatatattatgcaacggatgtattgatcaccataagtgcttacctactcaaggttcatgtcttgtcttactgagttcaagtaaatatcatttcaaccgagataacagtctgctggtggatttccagactttaacctctctttatttgcagttcttcctatttaccaccctgttgcaattctgcctattcagattttactgttaaaacatcaggtttatcaagctgtttgccaatgtgaaaatcttcactgagtcactgtaagattaaatgctaactttctatccttctaacaacagtttgcctttgaaatttcaattctgaactcaacatataaacttagccaaatatactggtcatctgtggtctcctagacatgccttgctcttttcttcaaccatagaaatgtgtgtttactgcattcttggccagctgaatcatgctcgctatttgaggctgagttccactttttccttacgaaatacaatgttctattattggggataaatttgtggtttacaaagtaatatcacagatgatctcaattcattttatgctctcatcaagctgatataaatagatattttacagataagcaaacaggctcaaataggccttctcaaactttttgaattcatgtttctctctctaacacctatgacacaattgtgtaatatttattggtgcaaccatttgccaatgttttatttatttattatttatctaaattatttttattaaatattcattcactaaacacctgcttattaagatcttacaatttgccaggcatttttctgggcagagtctctgtacctcaaagtttgttgctagtatttccaactagatgggcaactgctttatgtcagggtttacagttttgtctctttgacaggacccactttaggtgatatgcaatttacgtttaaagaa

SEQ ID NO: 52238 - DNA, 550 bp, Homo sapiens
aaaaaattactcaggaaatattggaatttacaaagcattatctcacatcagcaggatattaagtagtatgtcacatggcaaccaatgaggttgttgctatcaactaatgaagtggtttggggtggaaaaccctgtacattttaatgggcagtaatatctcaattccctaggaaagtttgaggccagcctgggcaacatagtgagacttaatctgtgaatgttttgttgactgagcaagcatggggtaaagtctgtgctacctgcctgcattagtggaccttggctggcccaatttcttgatgactcattgatggaaactttggcccttcctgactttaactttgcatctacccatgattttaggataatagcagggtggaaaaacctctcagcgctgttatattattcaaggctactttaaacatgttgaaatgggttcttcatttttttataacctataaatatgtgtgtcaaaataattttcccatgagaacaatgataaaagagcttattgtttcattttcaggggactctcccaactagctggtta

SEQ ID NO: 52239 - DNA, 375 bp, Homo sapiens
taacatgctgtacaagtttatagcctaggagcaacaggctacatcatacagactaggcatgtggtaggttagaccatctaggtttgtgtaagtacattccatgatgtttgtgccatgatgaaatcacctaatgacacatttctcagaaagtatccccatcattaagcaatgcatgactgtacagagggcaaataaacatatgaaaagatgcctagtagcattagtcactatggaaatacaaatgaaattgtaccatgagataccactacacattcattaatatggctaaaatttaaaagattgagtatactgaattggcgagtgctatgatttgaacgtttgttccttccaaaactcatgttaaaacttaattcc

SEQ ID NO: 52240 - DNA, 1667 bp, Homo sapiens
ccacgccccgcccccaaattaattttcaatgatacttttgcctaggatcagatttaacactatgagttaaaacaaagctttgaccaaggtacggtggtccatccttttctccagaagctgtaccagccggtaggacgttcaattaatcaatggctaccacactggtctccctctagaaaaagaactctatcccgaattctagactaatcatcgttaaacccaggaaggccctctacacctttatctgtcgtttgtctttgggctgaacctatgccctgacggtctgcgttctcgccatgctcacagcccgccacgacccacggtcccgtttcccttttacggagcgcggcgctgacgccgcaaggccacttctatcgctcccgaccacggtctgtttccccctcgcccagcccagtgctttctgcccatcggactctcggggtgtgcttctggcggtcggcgtcctctcccggagcggtgaccccttctttcaaccccctcaggcgtcttaacctacacaagtcatgagtgggaaccggggcgttttgtgtgtgtggggaaaaggcaagccccttcgcccctcagcccacccgcccccagcccctacctggcgcgatgcgaccccccagtctccccgcgggggtcctgcgcgccccgccccgtcgtcgccaccgccccccgggagccgggcgcccgggagctcctcccccggccccggcagtacgggcggcggcggcagcggcggatcgcctgtctccagaccgtggtcctcacgctcctggccgctcggggcgctgttgtccccgctgtcacggcgcttgctgggcgaagccgagggctctgccatggtccctgcgtcgattttgcgctttcggtgctgctctgggacgccgaggagctgcccagcatgcgcgaccccgggcggccggatccagagaggcggtggcggcggctgctcagcgaagtcgcaaagcaggagccgcttccaaggcacgtggaacgtcaccggctcggccgcacgccgcttggccatgggcccagaggctcgggcggagcccgccaggcgcgggagaccgagtgccgatagctgcggggggcgaagagcgaggactgagcgcgtgagagagggacaggccgaagtcgggcgaggaggcgacaggacgctggagggggtagggcggggcagctcgcgcagggcctagggctggggctccggctcggaggcagctcccgcgctcagccctcgccgccgccgagatgcggcccggacgttgagaagcaaccgcgaagcggcggagattcgaacctgcgcacaacgtgcgcgcgcgcactctgtctggccaggcggagccgctggttggtggaggctcgcggggcgcgctcccgagcgccctcgcgaccggaagtgcgcgctcgggggtaggcgggaaggccgcggcgggattaattaaagacccgatcaagcggcccgcagaggggcgtgaccttgtttcctcaggagtgtggcggtggtcttactactatgttcgttatagcgcggtacgttctagacccttctataggaaatttaaaacctttaaaatgtgtatttccttcctccagtcagtgaccacgggggcgtctccatgagattaagacaaagattataatagagttccagactatcc

SEQ ID NO: 52241 - DNA, 1983 bp, Homo sapiens
acaactataatacataagatgaacaatataaaaaaactttgcataaagcacagcaggaacccacctatgggaacaggtttacctgcgtaggaggtcatgtctgtctgattccaactgcagcctcagaacatagtcaccggtggactcatatctcttacgtgaataaaagtgttatcttcacctgaaaatccagttgatttaagtccctttcagctcttggaattataattttgtgattaagctactttaacatctatctagaagaaacgtggaagttagggagctgtttttatgaatgaggagcataaaggtcctaccacagtgcctagcacaccagggagaattagatacagatttgcagaaaaaaagaacgtaaaggcagctcttattgtgacttctctcatctctcctaataattagcaaattttagaatatccggaccacttccgcccttaatcacccaccagttaaagacactgagcagcatcattcaatcgctcacacaaaagtgcaagtgcgttcacagcgccaaagaggggtgggtggaaatcttaaactgctcttacaagcactggtaacagtttgggaaaatacgtcctacagcatcccacgcgtaggtgaacttgggctctccgtgtgttcagtttggaggacatcgaccacacacaccaatcagcccagcagtggacgattgtaccaccatcgtcttctatctgaaattgttacagcgcttctctggtcacccccatcggcctcaaagccaaacctttacgaggacggaggcaggagagctaatctgatcctgaggtcagaagacacgaggctgtgcagcagacggcgcggcggacacgcgggtgtgcagggccgggaggggctggggtggtgcgaggtgactcggggcccggaggtcagctgcagcagccgggtcccgacgcctcggaggcgtggcggcgggacggcgagcgcccccgttccggcgggtccgccgccaccagtgggcgccccgacggtctgggccggggtccgccacgggctccttacccgtagtagcggaaggcattaatgatcttccagaagtgctcacgctcaagcctctcctcctcctcctcggtgctgcgcgtggccgccgccgctgccgccgaaaccgccgcggccgagccccaacgcccggcggaaaactgcacttccacctcctcgctgccaccgcctcctcccccgcagccctcgggcagccgggaggtgggcggcggagggcgacgccgtcgctgcatcgccgccgcggccctcggcctggctcgcttgcgtctctccgcgaccgacagcgtggtggcggctgcttggccttcctctagacggcgcccgccgcggacatgcccccagctcgcggcgcgctccgcccccgccaccctcaggcctccatccgcgctgggctccgccaggtcttcagggctcccagaaccaatgcgcatgcgtgtgccttggtacgcggagggcccgtgcggtctgcgctcatttgctgccgggcttcggagacagcgcgctgacgtcacaaccacgcttccaagggcggggccaaggccccttggtgggaggcggaggaggagctcgtaggtggggtgggactggcactgccgttacctgtgcgcggccgcgtgggtgggacttaaaagccggcgagtgccggattgttgagctggaggctgaacgcggtcccaggcactagcaaagaagggaaaggcaaaaaggaaaagttcggctttgatgattttattcggaatttttatttcagaaagtctagaaggaacgtcttgtatccaccctaatttaagttttaattcacttcctaaatgaattcctatttttaattacttaagggggtcggaagtgggcgccatcatcttttcacttttttttttttccccactctgtcgcccaggctggagtgcagtggtgcgatctcggctcattgcaacctctgcttcc

SEQ ID NO: 52242 - DNA, 2920 bp, Homo sapiens
gcttaattcatttcactactaaacacttgccttttggattctaaactgcagaatggtcagaagtggcatgtgcagaatcagcagattgtacgaactctctaacgcagctctctaacgcaaatgatctgaaagacagctgacaaagctaaatgtgctcttcaaatgtatctacaggacagtctgatattttaaaaagagaaaaatgtttccaggacttcttactctgtattctatccaacagctattttgattctcttcttccaggagatagggcagtcttttcctactattgtttaaactttgctcccttttggtaaacaaatccctcaaggctgggttttttttttttttttaagacagagtctcgctctgttgccaggctggagtgcagtggcgcaatctcggcttactgcaacctccgccttctgggttcaagtgattctcctgccccagcctcccgagtagctgggactacaggcgtctgccaccacgcccggctaattttttgcagttttagtagagatcgggtttcaccaggttggccaagatggtcttgatctcttgacctcgtgatccacccgccttgccctcccaaagtgctgggattacagacgtgaagggctggggtttttgaaaacgcaattcatgcccctcccccattggtttcatttatgtaggttcttaggtaaacagttttttctttccccaaatatacaattaatttacaatattgactgttattttgaacttatgccattggcttccttgtgtgctccagttctttcctcccaccgaagattcaatccgatagatcaggggtaggaaaactttttctgtaaagtgccagacaggaaatgctttgggctttgccagctgctactcaaccctgctgggtaatgcgaaagcggccacagaaaacacagatgcaaatgagcgtgaccgtgttccagtaaaattttacggacactgaaatcgtaatttcatgtaattttcacgtgtcacaaagtattatatttctttttatttcttttcagtcattaaaaaaagtaaaaaaaaaaaaaattcttagcaggccttacagtaacaggcagcaggcgggcagtaggtcatcaccccaacgctagaggaatgagaccatatcgatccgcgaggatcaagtcctgatcctgtccctggcgacttctccaggctgcgcggtctcttggaggcagcgttcccattttcaggattattccggggcgctagagcaccacgccaccatgagtacacgtcctcctcggcaggccacctatcagctctgtgagggtggcaagagtccaggcaaggctttcagggcgcaaccaagtcccgggctccagcacagaaaccctctggaaacacctccaggccccagcaaggcggcgcggcgcggcaggggcgagcaggtacgcactcacctggcgccagttcgagtcctcccaaacacagcggcagaggcgacagccaagcgcgcgcctgtacccagtgcgccgctacccgcagctcgctccccgagaggcccacagcccctttccccacgctcctcctgggttagagggatgccaggtaggggcggtcaccagaggccccttttctctactctcggcgccgggttccagcccccgttggggcggggcggggcggggcggggctccggctagcttggcctcttccgcgcgcccctgcgcagctccggcccttccctatcgggagcgcgcgcggcccgcggcactgcactggcgcacgcccgcttcgccctcgctcggctccggctggttccgccgccgtgcgcgccgcccgcgctcctgctgcggcgaagctgccagcccgggagccaattagcgctcggctaggcggggtccacttcctcgtcggcccggcgcgcgctctggactgctccggcggccgcggggcggggcggagcactcggcggagccgctctgcctgcgtccgctcttcccgcagccaagggtgggcgccggtcctaggaggcgcacggttgtaagccagacaaaaagaactggggtgcccggagtgccaggtggcgggcaagcggtgggcttttcggcggggtctttaggatttgcagctccaggaagcgagatgtcgaagccgccacccaaaccagtcaaaccaggtgagggaggtaaggtaggcgcttgccaggtcctgcgaccgccgcggtgccggcgcctcctctgcagcttggcagggaggacccggcgcgcacccggccccgagcctggcttccgagatcggccccaccgggatgggcgctcttagttttgcgttcgctgttacggaggagggatcgattttgatagcaagaggatttcgaggattaatatatatatatatatttaaaggggagtagccctcacttttgctacgttgtcattcgctgaaactttcagagggtgtgatggcaacgtcccatggaagttttccggaaagacagggccattgatctccctttaaaaaatgtcatgaaatgatctttagccacttcctcttttctcagtgtttgtcactgtcaagttagggttcctgaccggccagagcgaacgggaagtgcaatccctgcagggtggggtgggcgagcgagcctccctcgggacttaagcgtggagcagcgtttgaaattgacctcgggatcttgggaagagcgtttagaaaaaaaccctatactcgcgctcctggtggaaagaatctaggatgcggcagtgatctcagctgttgctatttggaagtgtcattttatcatctcctttgcctttgctctcccaaagacgttggcgtgctaaacctgagagggctgagattactaaattcctcaaagcagttttctgggcggattgtccttgttcatttttgctctgttcttagaatattttctgtgata

SEQ ID NO: 52243 - DNA, 488 bp, Homo sapiens
taaatatatccttaaatgcagataattttctctggctggaaacagagaaatgtggcagaagccagagagattggaagtatgagaaggactcatcactgctgctggattgcaggaggtggggcacatggaaagcatgagagggagtacaggcagcttctaggagcaaagactggctggggctgacagccagtaaggaagccgggacttgggtcctatacctgcaaggaactgaattagaccaacagtctgagtttggaaacatccccagggcctctggaaaggaacacagcccagctgaacaccttgattataaccctgtgaaccagatgattcatgctgattcatgaaccagctgattcatgctgcacccagatatctgacttacagaactatgaaataataaatgggtgttgttttaagccactaaattagtggcaatttgttatagcagcaatagaaacctaatacaatcgtatttttgcttattg

SEQ ID NO: 52244 - DNA, 1532 bp, Homo sapiens
cctgtaggtaagtccacaataaaaccccatgttttgcttgttggctctgggcctcttcagcctcttgagcctggtgccatacccattggagttgatagcatgaccctgaaccccttgaaaccacttgcaaacagcaccctccctctaacgacctccacctggcaaccctcatttaacccaaaactcagggcctcattcccttgtatgtcccatgttccataggttagccgttggatcaggttttccacataggcaaggaatgaatctctgggttggccactcctgaattccctgtcttggaacacacattcagatgcatctgctatagagggtcattctacgggcatgcttaagctactgctatcaggtgtggttaccatacagccagggagcagtctatatgtcatttgctctctagatttacagacctctttgtcctcaactttatttctcaaattctttctctccccatagggccttgggtgttttgggaaaaaaaaaaaaaaagctggcaaaggaattatatgcaggcagcttctgagttctggcctgctgtaaggaacatagctgtgctgcagccaagcaggcatagggcagcaggcataggccaaggtaaacaacctggatgactcagcgggtttgtggcacaggcacacagtcctgtgtcttatatagtcatagccacgtagacataacatagagaagctcactacctggctctcagcctcgattgtttgtgtaaggtataaaagtaacactgaccctgtgagggagctgctgagtaaagccatgtctcacctacctgctgtttctcaagagttcttccagttccctgcctcatgtccacccactccccttagtcctcagctggggctgaaatctaaccctgagcataacacctgcctcacaccatctctaaaggatgcatgccttgacttccaccttccttttttttcatgctcagccaggaggaggagacttctaccttcttaaataggaaggaggaaaatatatgaaaaacgtaattagtatcccaaaaatattattcttgccaaattgtgagcagtcaaatctactagtgtatttggaaggccatgcattcagagaagaaaaaaacttagagatcaccaaatccatgcttctcattttctagtgaagaatcccagggctgaaaggtcaatgctctgatgaatggcacgtggactgttttttttctgtgcatttggttactgttcctgttgactctaaacaaatgctgagtcaatatcattaaggtttttggactaaactccaaggacaacttgaaattgcttgaatttgaccttctatcttgttagataatgtttggaaccaaggccttgttctatacggtgcctaaaactgtggactttcagtgactatcaatcaaaaacagaatattcgtgttttctgattctggggaaataagaaaggcaaatgggcatagatctggttttgatgatatgcttgtctaaccctgtgagtctgcaacttatttgctattgaaaacacag

SEQ ID NO: 52245 - DNA, 829 bp, Homo sapiens
ggagataggaagctctaggtcttggtcttcactgtttgggaacctgaccatcatccttccagccttcacagccggccttctcaaaatggcttttctacctttcataaaggtggctaaaaacacccaggtgttcaagttgttattgatcttcttgtacctggaaagaaatggaaatgtaatttatgatgcttaagaatctcatcaggaaggtattgtggaaacatactgtaaggttctaactgaggtttgaggggagtgggtgcacgagcggcaggcagctgaaagaacacttgaagaattgcagggagttttgacgtggctttattctctctctgggcacaagtgggctgtgggttcaagcaaggtatatgtacagcatcagcagggtagttataccttttacagacaatagtggctccaagccaagcacaagcacacctgagtggttacttaatacacctcatgtggcatggttgcgtcatgtgtggagctgtgtccctgcactccaaacctgctgagtcatactgtaccagaggtcacctctgcctatttctaaagcacagccatttcccttacactctactccctaggctaagggcatcctctggggcagggacacctacccatagggcagagccctgaatctataacccacaatacaaagaataacagctcactactaggatctcagctatgctacttatgactatgagggcccagcatagtccagagcccagagatgcccaccatctctacagggggttgtcagtaatgctcttaaccaccttaatctcctgcgagaccccttgcagggctgctgttatgttct

SEQ ID NO: 52246 - DNA, 960 bp, Homo sapiens
tagtagagatagggtttcaccatgttagccaggatggtctcgatctcctgacctcgtgatccacctgccttggcctcccaaagtgctgggattacaggtgtgagccaccgcacgtggcctcttccatcatttctttgaccatgcctagggaccatcagtaaccctaatgaaaaatgatctttgttcttttctgcttttgcttagtgctggtttttggctcttctaatcaaatgagtcattcctggaatgttcagtttgttttatggttgtggcactccaggaaagcagggcagttcacctgccccattccacagctgactgtagctgagaaagctcccaacatctgtgtctataataaaaagcctgcaaaaggaaaataaatcatgtttccacctccattttttcctgcacattaaaggctgatcactgaaagtcatgatcttggctctgaattgggttgcagcatttgatctgatggcacacaaagcgagatcaatatctgccaccataaaaagtcaatgaaacataaattaggaagagaaaattttctaactctggccccaagcagtgactagttgggtgcaagccatacatttgggcaatgaaaaaagaaagcagctttacttaacagcagggtagactatactaggattatattttgtgctattcctacttctctttattgatctgcatataatgaattgaagcatgatgattctctctccaaagttactcaagagtttactaaaatgttatcagaaagtttctaactgtggctataaaagtatgtgaaaccaatccaggcactggtgactgctgactataagcattttgataatataagatgatattggtcagcccaagacaaggtcttatctgacatctgtaagaatgttttaaagttgtaattcagttggctgttgagaaacaaatgtgtctcctctctgtccttgattttgg

SEQ ID NO: 52247 - DNA, 3063 bp, Homo sapiens
attatttcatacgggataatttttcttgtcacagtaaatcaccctgtgccccacccccgctccaggaaggcagggaggttgtaaaggagaagcgagaagagggttaatttgagctccctcctgcctgctgcagtcacagtgcatgatagagtaatgaaggtgacgccgccacatatctcatctgaacttcctctgtggtctttttcatattaaagtctttcactgttacaggactgtgcttggaaaagttgggaaacttttcccttggtggagaaaaagaagccctcgtcagacgcaatccaacaaatgaatggagttatttccttggcccaacatgtccatccactagcacaccaaatattcatagaaacatctttcctcacttccaaggccggaattgtactctcccgtggcgttgcctagtatcgcagatttcgaaagtgagcaggcaacagacttggctttcgagccaattctaggagtcgatgcgacttactgtcctgtgtggtagcttctcccgggagcagaaagtgtaaaataaacagctgctgaaaagcatgaagaattaacgaagtgaaaatctcgagttatttgttcggcaattgacacgtaagtgacctccttaaatgcctagttatttaaggacgtttagaacgaggatgaatgaatcttcagggcggttaattcgcaccggcgtgtaaatttctttagtctttcgggaagtggcggtaaattcatacaaatccagcagggagggaagagaagggagtaaaaccacgatctcggagcgctcttctcagtcctttggaaagacttgcctttactgcccggaaccctggaggttacagctgggcgaacccggaggcgctaggacctcgtcagcgcctggctgcggccgctttcaagagggcggaggagggagaggaggagggcgatgtgggaaaggaggggtgttaaggggggcgggggaagtcatttatgcagagcaggagctgctgccattgccactcagaatcctcgcgcgctgctcggagccggagggagcgctgggagcgagcaagcgagcgtttggagcccgggccagcagagggggcgcccggtcgctgcctgtaccgctcccgctggtcatctccgccgcgctcgggggccccgggaggagcgagaccgagtcggagagtccgggagccaagccgggcgaaacccaactgcggaggacgcccgccccactcagcctcctcctgcgtccgagccggggagcatcgccgagcgccccacgggccggagagctgggagcacaggtcccggcagccccagggatggtctaggagccggcgtaaggctcgctgctctgctccctgccggggctagccgcctcctgccgatcgcccggggctgcgagctgcggcggcccggggctgctcgccgggcggcgcaggccggagaagttagttgtgcgcgcccttagtgcgcggaaccagccagcgagcgagggagcagcgaggcgccgggaccatgggctgggggagccgctgctgctgcccgggacgtttggacctgctgtgcgtgctggcgctgctcgggggctgcctgctccccgtgtgtcggacgcgcgtctacaccaaccactgggcagtcaaaatcgccgggggcttcccggaggccaaccgtatcgccagcaagtacggattcatcaacataggacaggtaacgaactacaggctagcccagccctcggccctgaagccactgggggcttcttgtcccctctgcgtggaaccccctccccctcttccagatgtgctctagcagctgttgccctaactcttgggcgatgctctgtctcctgcgcgcgcgcgcgtacgcacacacacacacacacacacacacacacacaccccagagttgccgggtccgtgttttgtttacttgtcttttccaagccacgcgggactggtagggtctcgggaaaaatccagagtgcccccgtggtggcttcagagacggctggaccttttgacctgaaaagtcgagtagcactagtaatctgaggcagtctcagagagggtgatcgtggggagagggggaaattaggtcttttgggggatagggggtgagcgcgcctctgatgcctgcggggaagggaaagcctttcctgctcggacctgaatttagcccagaaagaagtttcctcttgggcgagagaacctctggcgctggagactccggaggcgcggggactggagctggaagggaggagaaaggagggggagggaagagggggccggccccggtgtgagtgcagatttaggggagacctctaggctttctcgccttaagcgaggtccgcgtgggggctcccggaagggagttgtagtggggaggtgggaaacttccgaaaccggctggctgggttccgctccgggaaaacgaggagtcttaccccgggacggaaggtgccgggccgggaggttgcgccgtggggcgagagttgggcaggcagcaggggcgcggggtttttgtggggtgccgctctcgggcttttggcagagctctcctgctagggagaaatgcccataaactaaggtgatgctatgaggatgattggaagcgtaacagatttggaagtactccgggttcagtggtcttggctttctggttctcttcccccgacacccctgcgagaaatgggggtagagagggctatgaaagtgggtcccagaaagtacccccctccacatacacaccgcaagcatctttggggttggccggaggggcgggccctggctgggctcaggcgagaatccgctggaatgggaggtgaggatgatggatggcgcctttccagcaggcgcgctttggggactgcccggggtgcacgcaccctgcgtgctctgccagggggaagggagagggaggtgctggctggtgccggcggagtgggagagtacggacagtttctgaggccattgcgttccacgcccaggaacccggggacaccccccgcccctcctccccgccgcctgggggatgcggcacctggagaggaggcagagctgctgtcgc

SEQ ID NO: 52248 - DNA, 1144 bp, Homo sapiens
aagcaaatatccataatgtaaatttagaaagatactgcctactcatcctgtgcctattctagtttcatttaactaatatgtttgtgtgtcagtgggaaccccattcatcaatttcgaagtttctcaaagaaaacaaaattgtaggccacttaggatttattacaggctagcttccagcaagacctttttttctttatttttaactatggggcgtctttcaatttggtgctcacggaccaatttgccaaatgctgcattctttgactcatcacgggatgatgtcattgctcctgggctggttggacaatgctgggaaccagtgaaggaaactcaaagctgaaaacaggtgacttgagtcacccttctagatccagccctgccatgaatttgtcacatatttatgagccagtcacaggtttcctttgtcataaaagattaattctattcattgttttatttaaaaaatagttgttgagggacaccgtgaagaaagtgaaaggacaacccacagaatgggagtaaatatttgcaaatcatatctgaggaagacttgtacccaaaatatgtaatgaattctcactctcaataataaaagaccaatttctcaattaaaaatgggcacaaaatatctgagtagacatttttccaaagcacatatgcaaatgggcaagaagcacatctaaagatgtataacatcattagtcaccagggaaatgtaagtcaaacctcaataagctactggtttacactcactaggatggctataataaaaaagacagatcattacaagtgttgatgagaatgtggagaaattgcaattctccaatttacaatgggaatgtgctaatgggaatgtaaagctgtgagaccactttggaaaactgtctggcagttcctcaaaaggtgaaacatacagctactctatgacccagcagttctctcctaaatgtatacccaacagaaatgaaaacatttgtccacacaaaatcttgtagataagtgttcatgccatcattattcacagtagccaaaaagcagaaacaatccaactgtctatcaacggataaatggatacaatttggtgtattcatattaatattatggaatattttttcacaatggaaatgaagttttgatacatgct

SEQ ID NO: 52249 - DNA, 1584 bp, Homo sapiens
ttttttttttcggtctacagggacttaattattactctgtagcatatagcatagtgtctcactgtgtatacttagtcattaaatattggttgaattctaaagtattttgcagacatggaacgtacgtaaaatgtaaaataatgtgaacactggagaaaaagtacaaaaaattctatatagtcaagaatgaaatcagtagtgcattgtttattctataaaggggtatggtaaaaagcagtgttctaggattgatgagtcatttgtgtgtggattcgaaagtccaggcttcctgggaaatagcctagcccttatcttttagtgtttcagaccttggcatcattagcagggtcattcttctgattttgacttctatgagcatttttggtatgaaagtcagagtacacagtgtgacagcacgcactccgagaggcaagtcccagattatcctaggactattattgcttctctgtggatcttggtgaaccctaaggatccttctggctgtgaccatctccttggggtggcagtgaaagtcttttgtctattggagcagtgggaagaacagcacagagttccctaatgaagaaactggtcagtagtaagaaacaatttccaatcacgggcaaatttcactgtttatgtagaagcaatggaagtagcaaaaacagtcaggtttggtgcgcgtgaaaggtcctaaaagaagggtcctctgtataaaataagctgtacactcttgtgatggtcagaggctcatggcagggcctagccggattggccatttaagtgccaaaacactgaaattaaatccagagagaaggagggattgcagactctagaacaaacagtcataaattaagccctgcaggtcagtccttaaggagtggcttcagaaacatccttggagataggaaacaaactcaggacaaatagaacaagtatttattgggagttaactccctttaatgataaagggaacattctcttggttgggtgacatggccagaagccaatctctcagtagagatgagtctccccatttgacctctcttcttttatcagatccaagctgcaaacctccaggccttcaggcttgggtagatagagggaaaggtgaattgtattttctaggtcagatgaaggagcgatggaaaagctgagctttctcatgggatatatggtttgaaagtagagctattccttcctcacaattgtgatgggcctactgtaggtaaggcctttgtcactcttatgtggattattgtgcaagtcttaccctgtccccactgcctccccctttcctctggtcaaaaagaattgcttcttcctctccctttttcttctctttcctcctcttccttctttaatgttctcaacatcattcaacctaactattttgccattctgtgcacatgaactggcatgtcctgcttttctgcctctactcatgtcattctcactgccgggacatccacatgcccagatctcactatgttctacaaagcctttctcagatgtcatttcctcaaatgaaacttcctatggctaaaacctccttcgtttaaactctcattgaaccttgtatgc

SEQ ID NO: 52250 - DNA, 944 bp, Homo sapiens
gagctcctgaaggaagcactaaacatggaaaggaacaacaggtaccagccactgcaaaaacatgacaaattgtaaagaccatcaaggctaggaagaaactgcatcaactaacgagcaaaatcaccagctaacatcataatgacaggatcaaattcacacataacaatattaactttaaatgtaaatgtgctaaatgctccaattaaaagacacaaacaagggccttttaaatgaatgcatctatttagttgctttctgatcagctgttgtctttcagattgtatgattataggcaaagcaaccattgaaagatttgtagatttgggaaattttgtaagtagtgtagttgtagcactgttccttcacaggagaaagtttccacccggtaggcagaagtcttaaccagtagttagtattaactgatggaaacagggtcaagagtccaaactggcactgaatctgagattgctgaattaccctgagagggcaaaggcttcatatgtagacctaaatgaagataacagaatgagtcaccagtatagacaatgctggtcttttccagtttcgtgactgcacagcttagactttgggggacatttggtttacatcactgggaataaaacttagagacagacagttttccccagtggaccagcatcagcccctgcactgtgagttaatacaggggcagggaattatgaaggcattctgaaacagtcggttttctcttataatcagtggataaatagttcagcctcatgtgtccaattcaagtgtgtagttgagcaaactgtgtaaagaaacatgaacagttctgcagttgtggtatgatttacaaactttgaatctgaataatatgttagatgcttcaaaaggatagacatagaaaaatgataccctgtagcttttcaacagtttatggcatattaactcttacatccttt

SEQ ID NO: 52251 - DNA, 738 bp, Homo sapiens
ttgactttgggaacctgaaaaaatatccttaattgctagaatttcatagtctaaaatgactgtctcatttgaaactttttttctcaaatggacttgggagcatttttctttcctgggcagggcatatgttttacttttccagtctcatctgggaagcaagtatgtgtaatccacccttgtactccaagcaccaagagtaaagatttaatggtgaggaagcaaaagaagtgagattagggaaaagagatagggaggaggggagggcttccagaaagcgtagcaaccaccaataaatattttattgtgttgctatgtggcaatagttacaccaggtcaagttgcttaacagtaagtcaggttgatgcagggtttaaagtgagctgagagactgatgaggggatgaatttcaccatgagattgtccttttgttttggccaggaatctggtaccaaatgtgagaacctgctgccacgtgcctactggaaggaaacatgcttgtttcttcctgcttcttgcattttctgtgaaagcaaaaacaatttggtagttttattggcgtgcatatgtgtgtgtgtctgtgtgtgtgtgtgtgtgtgtttacatgtgcagatttacagtagagttagagacagcaaaatatcgtatttgctttactcatttactcaattattccacagaagtgttttaagcacctatcaaattcccacacttttgaaactgtaagtcagagtaattaga

SEQ ID NO: 52252 - DNA, 431 bp, Homo sapiens
tttttatgtgctatgacccgcaagttttgtcgagtaccacctcactggaagccccgacagtggtttctgaggtgagggaatagcactcaaattgagaaaacattcggtttgcctcaggcaactggatttaggggagaaaatgccaatccctttccctttgcccggggattttggacagcatttttccctgaggccgaaaggcatgcttttcccccaccctgaccaaagtagctgtttgctaaatatttcagagggtgatgatggtgtttaagagctgccacaattccagtgtttttggttgcaaaacacccctgccctttctgccaagtgtaaggttacagttcaggaaaaaggaaaatataatgaaaacaccaagtcagagaccttcccccaaggcagtcccttatcatttctctctgttgtgtgtgggg

SEQ ID NO: 52253 - DNA, 1041 bp, Homo sapiens
taattatgataactgcgatttcattgtcccacatgatggttgtgatggaagtggctatattaagaatgtcaaattaacctgtaagtaactagtcaaagtgcttccagaagaggctaataattaatgatccacttagaaaaatcattttgataacatctatttctgccagtgcaaattattacaaccttttaagaatttgcttgcacaagatacaacttatttcatacaggtaatttatcttcttagctttgctttcaaagagtaaaaaatgtgtgagtagtcttgccctctgggcccctctctgccatgatggtggttctgttaacaaagtttttttttttttttttatcaagatcttagctaagatttttctttaattagtaactcattctcttttggagagcagataggattgacccttgacctatcttaatctgtggttgtcttcctgaacatgttgattcaagttcttttatcaaacagctgctctgatgcctcattgctcatttacttttcactcagtattgggattagttgtagtgatcagggcacatttttctggcttactgtaacctatctctctgccaataactagggttcttttagtaagtgctcaataaatgtctgtggatataaagtgaggggagagccggtcatttagatttcttcatttacaaattcacagaaccgagtttggctacttctgaaaggtgattttgccttcagatgtcctgtgttgagattcaagttctaaaattatctgagacagaagcatctggaatgcttctttttcttaattttggttagcagtgaacttggctaggaaattcatggagtaaaaggaatgatttttagcaatccagtgatgaaatgaattggaaagaagacaaatgcctaaattgtctggggagaaagtattaaccatcttcaaatagaatgcacatgcacatcaatatgatttttccagtttctccaatgtaaggagatccttgataggctgcctcagcctaaggttgagattgtagactggtggtggatagt

SEQ ID NO: 52254 - DNA, 802 bp, Homo sapiens
aggcgggactgcggactgcagtggcgcaatctcggctcactgcaagctccgcttcccgggttcacgccattctcctgcctcagcctcccgagtagctgggactacaggcgcccgccaccgcgcccggctaattttttttgtatttttagtagagacgggggtgcatttcttatagacagcacaaagtctgctggatgaagaagcacagaagctgtatgggatctcccgtttagcaacatatcctgcactctaggcaaacagccagtgtaattaagagttcaggtggcaggctcagcctgctgcgtgagtttctttcactcttgagatatttgtagttgagtaattttggacaaattaatctgtctgtctcaacatgcttatttatacaaagaggacacttagtagcacatagttcatggagtcattacaaaataatgaggaaggcagtaaaaagtgcctagcacagtacccggcccttcagtgcttaggaaagctctaacttttcggggatgcccaacactgtgctgctgattataaatttcagacacctttgcactttgccctttttcctgatcatgattttgtaaactgtctctggatttgtcttttcaaggtagagctaagctgctgtacctgacactttttagcatttagccaagaccctgcttctggctctaacagatctacgcaggttggggtcactctagtggtgctccatctgcctttcccgcagtccataggggatagaactgtacctcctttgtgcaagtcttaatccacatccattctattcctcttgatt

SEQ ID NO: 52255 - DNA, 722 bp, Homo sapiens
atgaaaaaaccaatgcccagggagcttatgtcatttgcctaaagttacacagctagcaagtgttagagccaaattcagacttaggactgtctggctccaaacccacagaccaaccaaatagttgctctttttccaaagtagactgcactcatacactattttcctaaagaacataaatgaaagttgtgcaaaggttggtctgctgcatttgtttcattcttgattacattctctgttccttagttgtgtctcctgacatttcctttgctccttctccaacattcaagctcacattcttagagttatgggggagaagaacatagtggcgaggtatcttaagttcaattctagagcaattagctcatcatcttggctcttcatgctattacgctatttcccccggagccgggtataatcgaagttcctcctacttgttgtgtaactgacctgctaagtcgagctgtgagccaagtctgtctggatcacgtaagcttgcagagagaactgagccaagtacttccaaaacaaacctcgttaaacaaaagcggagtgtggtcgagccggacacacagggtggagggttcagaagaccgtctgccagtctcgaaagcaatgtggggtctgtgacattaaacgtccaagggcagttgagctggagggatggattcacctttacagatgaatctggaaaccagtgagaatgattctgcatgattaggaat

SEQ ID NO: 52256 - DNA, 514 bp, Homo sapiens
agtataaataactgtcacccaagtagtgagagtagtacccaataagtagtttttcaacccttgccccactccttctctccctgctcttgtatttcccagtgtctattgttcccttattttattttattattttattttattttattttattttattttactttattttatttttgcaacagagtcttactctgtcgcccaggctaaagttctgtcacccaggctaaagtgcagtgatgcaatcttggctcaccgcagtttccgcctgccgggttcaagggatattcatgcctcagcctctcaagtaactgaaactagaggtgcatgctaccacccctggcttattttcgtattctttgtttgtttgtttatttgttttttgagacggagtctcactctgtcgcccaggctggagtgcagtggcgcaatcttggtttacggcaagctctgcctcccgggttcacgctattctcctgactcagcctcctgagtagctgggactacaggcgcctgct

SEQ ID NO: 52257 - DNA, 430 bp, Homo sapiens
ctcttcacaaatgaggaagggaggctcagtgatgatactcaaaatgctgtaagtcaaagtgtctgcaaatgatcaaactgggatttgaatctaggactctctgattcatgttttttctgctctaccacttggctgttatgcaaagaattagcccagcctttgtctgtaatctctgaaccctattttgggattagtttgagctgggtggaatttactataatggtgagtcaccacaaggcaatgccaatgaggtcctaaaggaagcctgcagttcaggtgcacaatctcatccagaggcacagagatgaggatcggtaaagaaagaaacaaatttaggtgactgtaaatattaaccctatgtaactatgtttcaacccactaaaaaatattcatgagaggttctaccccataaaagaaaaaatacctgaag

SEQ ID NO: 52258 - DNA, 4016 bp, Homo sapiens
atcccagctacttgggtggctgaggcataagaatcacttgaacctggaaagcggaggttgcagtgagctgagatcatactgctgcattccagcctaggcaaggaagtgagactctgtcttaaaaacaaaaagagataaacctcagtaggtgatgccatgattagatttatcattcctatacagtatttatgtttatatagagggcttggcataacagaaacatcatgagtttgggtgggagccaaagattcctaggatggaatttcagttctgacatttgctgatgtggaatcttgggcaagttactaaacttctgattctctgttacatgtggaaaacttgcattcctgacctcccaaggttgctgtgaggaatgagatcccaccatcaatactcctggtatgcagaaggggttcaataattgttaattttccctcacccctcccatatcattttagtagctgtgtagcttgttaataatcttccttctgtgaatctgttttgacaggatttgtgaagcaagattacataagagagagaaaagtagatttgacttctctataaacttaatctggaaccaaagacacacccactcagctctttttaacaagaccttccttttttcctccaaaaagcaattacactctaatgagtggttttaagtaactagatcattaactggattttctaacttgatttctcagcagacagagaaacaaaaggactgctctttcagaaacccaaagtgatttgcttctgaaccaggagaaaataaaatacattcttgactcaagtcatcaagttttggttaaagggccagaagatctataaatacactggccaagtacttgacctctggtgaaatgtttttatctcccctacagcttttccctctccataaagcaaccatagctgcatcccagcaggatagtctcttgatagaaatcccatttataccttgatcatctaaaagaatgcatgcttctacaatgaacctctcctttctctccaagttgtgaaaaacttgaatgttcgagtttggctgcaatgccacaggtaatcttaggagtatgctgaggacattggaaaaggagggagaacaatgatccagtctttcttctaggtcaattttactttgaatgcatggagaaaaccccttaagatgcaggatttgaagagtgccctgagaaaagagttggaaaagtgagcatatctgcaccacagaggtgaaaagtcatgaaggcatccttctttgtctcattctgtcctcaaatggctgtgagttagggacaaagttgcaatagattgtgttcccgcagggaaattcagccagccagtgccttgccaaaagcagcagcagcctggactttagacttcagatcagaaccgtagttgtgcaactggggcaggcagagtcaagagattaggtcagacaaccaggtggaagcaaatcagaaaccacagactgggtgttgccgggttgtcaaaaggttgtatttggtctggatttgagagtctaggtctcaggccaacaagcttataaaggtggcttaaaccctgttttcagtattgatctgttgctttaaaaaacaaaaagggacacagaaaccaaatcaaactgctaatcaagaagtgatgagtcaaaggcagaatccttgacaaaggagttctcagctggactctatgatgtatatccctgggctgtgagcaaccatgagggatctttgtgactgatgctctaagttgctccaagaacaatgtctctctcttccttggcttgtgattggaatttttattccgcatgatccctttggctaaactccacactgagtcctttattgactttgtaacttcctttgcagcacagctgtgtaacatctggataattttttgtcctgtttttctgctgattttcacttttaaagagatgtttgcctatcaaatcaatttaatctcctatagatgggtttctgattaccttaaatagacttgtctcctgacatttgttcgtgagggttaaagattatgcacatgaaagtctgtcataaactataagttgctacaccaatgtaattatttccttgttcacctgttatctgtcctaggtaggcatgcgccacttatactgcagaaactgggagaaatcaaacaatattctcagaccaaccatctggatttggcttctcagaaaacgaatgaagtcaattggtagtggcaacataatttgtggtgtccagtgtaaaaatattacaaatttcaagatggcagcagcagcacatgggacccatataagcaccaggccctggtcaggcatggtggtgcacacctgtagtcccaacattctgggaggctgaggtgggcggatcccttgagctcaggagttcaagaccagcctgggcaacatggtgaaatcccgtctctacaaaaactacaaaaattaactggatgggatggtgggcacctgtagccccagctatttgtgaggctgaggtgggaggatcctttgagcccaggaggtcaaggctgcagtgagtcgagattgtgccactgcactccagcctaggtgacaaagtgagaccctgtctcaaaaactaaaaataagcatgaggccctgtgttgttgattggccacagggcacacccacagagctgaccctgatattcaatatactcacagcactgatcagcttgcaaaatgcatcagctactgcatctacctccacccacaagtggatcaaagaatttagataccaaactcaccctgcctgacctccctgggctgtggtagctttgaggggaggagaacagctctttaagatctacaaatcatgtaagcactgaggaagatggcttgatatggaaggggaagaatttcagacatgaaaagcttaattaaaagcaagctggtcttcaagtccaggatatcttcattcccatttcagctccacgtgacactggccaactcatttgacataatatatacgggtatgcattgtgcgttataaacgtgtaaacgcacatgacaattaagtgtcaatttttactgttgccctttctaatggtagttcttggcccttttaggagacgcgcccacattctgaccctgggccgcactagtgttgtcactctacagcctacagctctatactctttccaaagcaaggttagggatggctttattgtcccaaatcacaaatcaccctttttttttttccatttcttctctggttcttactccctctgtgctaaaaaaaacaaaaacaaaaacaaaaacaaaaccaccctgtcaattggttaatttcccatgcaacctgcttggaagtctgcaatgctttgaacagcagggtgtgggaggaagtgttggccctactcaccctgcctgacctccctgggctgtgacgtcagagctctgtttacatagctgagggactgggaatgctggagtggaggaaggaggtgatgaatgattcaggaggacacacaacatccctgcttttctttcctgctggcttctcagctgctccaagcagcaaagagagaagaaatcgtaagattctgctctgtcatttggagccatctgtttcctttctttttccttccctagaaacttttttcaataaacagtataaaggagacaccagaggatgtctacaagagcaaattcatctttcttcaaatgtagacttttggaaacctttggcatttacagaaaaagtctccgatgctgctgttctttcctccacatctcaaatgtactagaaaagatgacatgctttggaaggccaaggtgggcagatcacctgaggtcgggagtttgagaccagcctgaccaacgtggagaaaccccgtctctactaaaaatacaaaaaattaggcgggcgtggtggtgtgtgcctgtaatcccagctactcgggaggctgaggcaggagaattgcttgaaccggggagacggaggttgtggtgagctgagatcgcaccattgcactccagcttgggcaacaagagataaactccat

SEQ ID NO: 52259 - DNA, 2113 bp, Homo sapiens
catgttggccaggctgatctcgaactcctgagctcagatgatccgcccgcctcggcctcccaaagtgctgggattacaggcgtgagccaccacgcccggccaaagcttcttatttttcaaatacacaagctcaaggctgacttaacaagtcaagacgcagctctggcatgtatttctaaggatgaattacagtcaggtctcgattattgaaattaatgtagacagaccaagaaggttagctgactctcattcaactacctatgttatcatttggacattacataattacaaattaaaaacaaaaccaccttagacccggcttgcgagttcagccgttctggcccacgttacgtctctaatgggcaagacaagcgcaatgcttgaccaactgtaccttggctggccaaggaggcgtgaacggggaatcctgcgattcatctcgggcttccggccctcaccacccctcaaccccgtccccgcggagctcggagccagaagcagggacaagctccctcaaccgagccaacggtcctccgccacagacaaggggatgcgggaggaggaagggtgtgctctctgcccgcggtccggaggccccacgccccggtcccaagtccccggctgccgtctctccccgctccccacgtgacccggcccgggggactctggccgccctgctctcacctgtggggatgcccagctgcttggagccgcggccgaagccccgcaccacttgaccccggcagaagtaaggcaggtgcctcataatgcagtccgctcggggaatgggctgcggcccggtctgcgcgtcctgcggagccgccgtcgacgcggcgcccagaccccggaccagccgggggacaggagcgtgagctctgcctgccgcgggggcgcaccagtggccggacgacgccgaccacaggccactgcgaatccctgacgccgccgacccaacaaataccgccgggcgcctgaggagctgcgtctccgctggagggcagcggagacagccgaagtaagtgccgggtgtgagcggggtggggggagggggcggcccgaagcgcagagccggcctccgcgccgccggcgtgcgctcccttcctcagccgaacgcctcgagcccgctcggcttccgtagccccgccccatcatggccccgccccgccgctgcctcgcccggctcccgccgcaagctcccgctgcaggctcccgccccaggcgcctaatgtctggatcccgggcttcgtttcagcccctggcgatgggaactaatgtggaaaccccgttttcagcctgagagccgcgaaagcacaattctcgaacaattctggtttttttttctccttcctcctgttcataacaatccggaagccaaagtgagacgctctttagctccttggcaaccgctgggttgaacgtcaggcatcgctcgttccgttcgctctttaagtatttattaaagctccaaaattcagctcaaagatcgcctcttcacagaggcttttcctggccgccctaccagaagcggtcgtcctccaggaccactgaccacgttctggagttattaatatattcgaatgtaagctccaagggagaagtccctgtctgtgacgctgttaaccccagagactagtggaaggttaccgacatgggcggtgactgtcccctccaggctgtcttcttgacaatttcacaagcccgataacaggccgtccctctactgcaatgcagatagaggccttcgtaccctcggaactgtaaatacgcacgctcctagggaagtagctctgggctcactcacaggatatgcagggtgcaaggttataagaaggtgcatcctcttaacgtctcgaagacaaagaagttttttatttatttttttaaatttttaatcaatggaatccagagaagtttaatttttttcttttttgctctatacatttgtataaaattctgtgcagaccgtgtagtctctttctaccttacatgtatgcatctctgataagatttacctgatattaaatttatgttctaggccaggcttggtggctcacgcctgtattcccagtagtttgagaggccgacgcgggaggattgattgagcccaggaggt

SEQ ID NO: 52260 - DNA, 1535 bp, Homo sapiens
taaaccaaattttgtcaacttctacccacatgagacactaaaaatatctctggaaaattagattctaatgtcaggtcaggcctgaaaaccaagagcttacctacaatatcaaatgttttagaaaaaggtattccttccttcatccattcattcactggctgctttaatagggtccactccaaatcaagggtgtgatgattactaatttttaaaaatcgatactccacaaatatttgagtacctactgttccttgtgtatttcctgtatggctttttgatttttgttttttgtttttgcattgagcaaaaattgcttgtattacaggggaaaaactatgcaaatgcaatgttaaattctcaccaccaaaaccaaaagcactacaagaatttcattcctcatgcatccacaagatggcatattaaaattttgctttttactgacatgaacctagaactgcggtgacacatgaaataagaactgcaaatggaaaatgaaagttagggaatgaggttcatcaggccctgtgctagacacgggaggattctgtactcagaaatgtttggcctgctcattgcttcatgtgcttggatctggttctttggtgaagcatggctactgcattctatcttcttcctcaatcacaaaagataaaaagactgtcttaatttagaaagttaatgctttttgatgtttcctttgaatatatgtttcactatagaagaagaaaatggagaaagagaaaaaggaggagaagagcacctagaattataggcagaagaattcagacttctttcccattaaaaaattgtttttaattatacatttggtgcaatgatggtataggagataaagatgctaaaaatttctgagacgaagaagaaggaaaactttctaggacactggactcttttcagaataatgagtaaatatgtctgagattctggagatgaactttgacctctgttcggagtaattccccttctaaggcaggatttactgatagtgaaattaaccattctttagtgtccatgacagccgtctgtcttatgttctctcaaattcatgatacctttggaatgtgaccgtgatggcaaaaatataggtgttaccaacagtaattacatataaaattatttcagtttgtcttcaaaattactggtgtttccctccttttttctcacaatgatgatataaaattttaggaattttttttaattttagaattttttttctgtccaatatataaaataatacagctacttagaaaattggtctaatctgctgatgtgtcagcatgaactatatatttagaagatgaaaaataaaagtgtgtagtggggtggtggtatagattggaaaattattaccagctgaataaaaaatagtaggctaaattaaaaatgctcccaaatatttttcactccttttattgagaggggaagcccatttcctctccccactaaaactgacctggttgtgaaatttgaccaataaaatctggcagaagtgatatcgtgtaacttcaaaggtgtgc

SEQ ID NO: 52261 - DNA, 503 bp, Homo sapiens
tgtgtcagggtggtgcaattttgtttcgttttcctctgttttccaaagctatccttgaggaaactttttcctagtgcaaagcttttcattgggatggtatgtttctttaaatggaaggagactaattttaccatttaaaaagtggtatttatttttaaaaacataaaagaaattccttttcaataataatgagatggggcatcgccgcggagcctcggttggcctcggatagccggtcccccgcctgtccccgccggcgggccgccccgccgtgcgccgggaccggggtccggggcggagtgcccttcctcctgggaaacggggtgcggccggaaaggcggccgccccctcgcccgtcacgcaacgcacgttcgtggggaacctggcgctaaaccattcgtagacgacctgcttctgggtcggggtttcctacttagcagagcagctcgttcgatgcgatctattgaaagtcagccctcgacacaagggtttgttaaaaaaaa

SEQ ID NO: 52262 - DNA, 892 bp, Homo sapiens
acagttaatcaatttcgaaggctataaattccacgtttatgacctccatcacatcaatgtatttctattcatttgaattgcattggcctagttgagatctataattacctcctgcctaaatctccataatggactttcactgctctttaactccgggactttcccaccccactccatcctggtcagtgcttcctacctgtatgttttattttacttgcattaacagataagtaggggagggtaggtgaggcagagtgacagtggctgtccttagaactgcacattgacatgtggtccaggctctggggaagggcttaacagaaatagcaacacacacatggaacacagagcttctagttcagtcaatggttcacaaaggagggaaagaaatcagaggcaggaaatcaagatcatggtcaatatttggaagtccagagaggaagagagttcattctgggaggtctttcacatcctgtctaaatcaatattggctcacaaatggagaggttgggctgaacaaacaaggaggggcagtggtatcagtggattcagttcagagtgagctatctaagcccactgcccctgtgccacagggcaattaagaacaaactctcagcacgccacatgcacagccccacctctccatccttctcctggacctacttcatactgcactgattgacctgttcttgattatccaaacctttgacccttgggctcattacctatttatagactagcagttgctgcctgtcctgacacttaagcagctctctggccctgagcctggcttccctcctcagtcataatttgtatttactccctttgattacatggcttccctctctcagccaaacatctcccttgcacagactcagctgcaggccccaac

SEQ ID NO: 52263 - DNA, 2759 bp, Homo sapiens
gtacactttttcggtcctgcagatgattaattacagttctctaaacctcacatttagcatctctgtgacctcaggcctttgggattacttctaagtaagaccaaacaggtcgaaagatctgtaattgtaatttattttaggtcagtggttcggtggaggcataggggtcaagggtccagcactcccagtatttcttggagggtgttcagcagtttccagaccggctgactccaactcttatctgcagggaagcgtgttactctttggaatgaaagacagctccgtataaatgacttgaccaaaaatgggtgctcatctcagatgcagggcagggactatgtaactccatcctcgactcgcagcaggaagttaactcctcctgagagccaggcggtcggaggaccaggcggggaggttacaggcaccaagacacccaggctggctggaccctcccaccctgtaatgatgaggggagatgctccctgggacagcccccttgaagcttctggcgacggggctgggatccgcccacccttactcaggggcgagccctgtcatacgcgtggaagcggccaccaccttctagggggaggggcgttcccgtcgggcgtaaccgccccgccctggggggccgctggggacgctgatctgcaggagggggcggggtcggaaaaaatccggtagctccagaccggtgtcccgttgccaggcgatggggaggaggcggggccgacaggaaagaggagccgggctcggcgcgaaaagggcaccctccagagccgcggccgcgcagccgcctttcctccctctcagggctgcgcgcccaggtctgcgccgcgctccgcctccagccgcgcgcagacttgcgcacgcgtcgtgagagcgaccgcctccgtctctcgctgggctcgctagggctgcgcgttgggccagcgggggcgccgcagctgaagccgccccggagccggtgaaccgaattacctcgagggaggggcgtggggaaggcggcgggaggaggagcgcacgggccggctgccgtgcccaccacggctgaggaacatggttttcgagtcggtggtcgtggacgtgttgaaccggttcttgggggactatgtggtggacttggacacgtcccagctctctctgggcatctggaaaggtaaggaggccgccgccgccgctccccggcctctcgtgcttcccggccgtctcgctgcccgagcggcgtcctgcgttctcggggcttcgagcaccttgctcgccgggtgcagccacctgccgccgcccgcctgtgggtcaagttacgtaaagccgggcggcagttccctggcctccgccctcgagttgtttatattttgggggaaaggagagggtcatgagtgcgggatgaaaaggtctatattttccgagcggagcggacttgccgtgggctccgtgggtctggcgttcaagtcccggcgaggggccgttctctacccctggccccgcacggtccggctttagccgcgcggggcgaggaggcgagacgacgccttcctgggctgggtcccatccctgtcctttgcccccctgggtttatgacgaaggccccagaaatcccccgcgtgttgcatgctgcctcgcacgtgaaggcagggcgctgtgaccggggacgcccgcttccttgcttccccagcctcaattcctggcttcacccgtggtgctttctgctctcccccttccggccctaggacccggacgccggctctctctcgcctgggttcggcggataacaaaaaggaaactcaagtgcaaagtaactcaaacagttgcttgtgtggttgcagttaacagcctgacctaggaatgtgtaacattttcaagactttaggatatgtgggtcagagtgaattgccgaattttaaagaaaaaccagggcgtgcggtgcaacgtctcagacctgcaaaagaccgggctgaacagggccctacgctgcctaggtggtgaaggaccgagctttccttgtgtccgtttagtgtggtattctgccttagtgagagcctcatttttagtgtttccatctgtttttgcattatgcgcttgtttattttaaacacccgctagaaattagactcctttgtgaaatgaatttcccaggccaaagtgagggttaattttgtgtgtgaagtgtgtgtgtttaaatatatatttaaagtaatttattcttgtctgtgcacacacttccagtcttcttctaaaatacttaccttgactcttctcgtttatgagataatgtaaacaggtagtttagtttgattttaaagaatgttactaccgtggggacctagtatcatgatggagagtgagtggactacaaaagctagggatatagtgatagctgctcagcctgtttgattagtacaagaaacttgcagtctgtttatgctgcttcttagttgcaaagtgaaaataaaatttgtctcccatgtacctcagaaggaagccttaagaatacttgaggtgaactttgatctgtagtggagtcttgcttccacattcagggtggaggtttgtctagagtgtgattaatcaacttatttatttgtttaaaatttacatgcagtaaaattcactcttgtgatacagttctgtcttgacaaatgctaagaggcatgtatgcaccaccacaataatggcacataaaaggttcatcaagcctcccgaattctctcagctgctcctttgcagttgatctcaccccgccaccacgcccggctaat

SEQ ID NO: 52264 - DNA, 1012 bp, Homo sapiens
ctctggggccttccaagcctgttttttgtttgtttgtttgtttgtttccctttcctgtgcataggtcacactttgttatttgtttgcatgacttagagctttcttttgagagctggacactttagataatacatggtagcaactctgtgtactgatccttccctccctcttctccctcccgtctgagtttgttgtttggtcatttgtttgttcgtttagggactctgtgtgactaactctgtgatgtctattttcccgaccacatggagcctctgaagtctctgcttgggtgtttctccccttcacttcctagaggctggcccctgagtcagcataaaccactttttggtcaaaggttgtgcttaagccctctcagccagttagggtttttttgccttttaccactcggtgtgtgtgtgtgtgtgtgtgtgtgtgtgtgtgtgtgtcttggagactgctttcacatttcagggagtttacagttttgctccatgttcagccagggactagtagctcagagttactagttaaagagcgtctctttctgggcactcctgagggggtgcagagtggggcaggtgcccagctgttcagatcaccaggatgagtgtaattttttaaagtccggattcctaggagtcacctctgggtcagagtagcttgctgagctggggttttgctctgaggtcatgcttatgccctttgagtcttctcccaaagtcttccaataaatctacatgttactgatagatctatgtggcttggagaatgctttccagtctaacccatgaccctctctgattgttcctgagtgaatacagccttgtgtacaccacgcttctggagcccttggggtgaacatcatctcaggaagggtattctgggctgtctctttccaatctgccatgttgcatgtggctactagattcatggagctaccagcccccaccccttaattgctcaccaccaacatgtctactgtgaatgaacttaggcaagaaatgcttcatgc

SEQ ID NO: 52265 - DNA, 698 bp, Homo sapiens
ttgataatctttttatatcaataaacatagctttacctcgttctttttaaaaatttaagcatttgaacaaacccccgctaaaaggcatcccatttagaccactctcagaatatactatccagattttatttgatttttactggcactggttcgaaggtcactgtcatgctttgtttcaattagcaaaataaatttgaaataatctctggcttgtttacttctcttcaaggaaaataaaaaaatattttccatgcaactatttcaaatccactcaacagaaggttcttcaatcctcaaactttatccagtgaaagcactaatcctgatatttctctagtttctttgatggcatgaccccttgtgtaaatattgatagagattacactgacagttgtgtaagccagctggatcccagccagggacaaaggaatttataaaaggccaggaatagagaatccaagacagagaatcccccaatcacctcatttagcactttcataatcagatcattaaatgataccctaacactacacaaggccttgaatcacccatcaagaagcatacagaacaatagttagcagctctgcctgggacgtcaggcctcctgggctcagtttcccactctgacatctgctacttgtgtgatcttgggaaagttatttacctccacaaaccttagtgcctgtatctctaaagtc

SEQ ID NO: 52266 - DNA, 591 bp, Homo sapiens
tcagagcggcctctcccaatataaatgaaatataccctccccttgtaaatctcctctcggtgtccaaatcaacaaataagtttgtgcctactcaactttttgagttctcatcaagaggtcttcattatgacatctctctctgaaagagaaaaatttcttttctggcgcacagctgtgaatcaggatgtgcttagagtcattccaatcattctttagtaagcatccattgatcgcctagctgggcactatctaggcttgagtttacactcctgtgggaaaggtcaatcccccagatttcttgcctctaggccaaaagccctttgagccccaaactctccatgactaagaccaaaacatttgggtgagaatttttcaatgtatctcttactggtagccaaaaaaagttccttaaatatctacatttaatttccaaggggcaacctaatgattcatgacgagtaatcacctccagccccactcatcaagatgtctctctatttgtggggagatgtattcaaaaacaggctggattcctctctccaggatgggttaaaatagccaggatgaccatatcttctggttgcccagggc

SEQ ID NO: 52267 - DNA, 2109 bp, Homo sapiens
aagatgcgcgcgccccttggcacaggagccggacagcagtcgggggcgcagacgagttggaacgtcggtgctcgggggagagtaggatctcctgggcctaggggtgtccccaggcgggaggtaggcgcggagtgggttggaggcaaaggacctggctggcctttgcctggaaagttctgaaaacctcagcagtgaccgcagactaagactgagtggaaaggttcccgctagcgtttgtggctctaagtggcaggaggaggcggagcatcttgaacctgcagccctggcgtctgctggacttgcccttctgggcaccccaagccgaaggcgcctggaagtgaaaggggacgagcagggggcgcggagctgggggtgggagctggcacctctaggagcagctcccacacttgcctccctggctggggcgtcccggccaaggtttgctgtaatctgcgcgtctggccgccaggcaccgggttccgacaggtgagtgagtttcgccaactcactcgctcggagaaggcggcagcaggctggaagaggagcggcgccaagcgtctgttgcgggacacaaagccccggacctgaagtggaagcttgcccaccagcttcaccaccacgcacacccggatttcctagactggctccttccgcttcccggacgccccggcccagctcgggcttggccaaagcccttggtcagctcggcaatttgcctgtaaagtgtggctgggcctgagcctgctggctctgagctcggagaaggagccgccgctgggttcagttataagagaactgcaagagcccagggtaaatatcctctcggtctccggacgagggggctggggagaaagggaacggctgattgctttgcattttatgatgggaaagacacctgctttgtagaaagggctgatacgttcctagtagcacctggcaagtttcctgcccagccctgaagcctaacagccgccttgcgattgtgtccgcactgacaccttggcctgtatcctggaccgtcggggtcaagtttgagcagcattaataaaaactttaaaagcacctcttagtacttaagtgacacgataaaatgcatattacaacatctgacttttgtctgtgtagattttgatgcagaaaagggaaggtggggagaggggatcctattggccacagcaatgaacgttctttccttctcaagtcagtataggccatatgctaatggggcgttaggcaattagctagcgcttcctctactaagagcaggcataagtgcctttcatttgagtagcatatattttataaattcaaactgaggagcacattgagtggaatggtacgtgtcattatataaagaagttggtatcgcgatgctatctggctgcatgttcttattattttacagtttaagaaatgtagaggaatcagacattaaaaatgtgcatacatgctttaatgtgtgactattttagttttcttgcaggcataaattgacagtaacagtgacccctacaggaaaactcctggacatttcagatttgatctttggccatttaatagcctgtttcttctctcttagctcttacggattcatttacaatttgagaataagatctcttggcttctcaaagtcatggttgcatcataattgttatcatttaaaaattataaaaaatttttaaatgattaaaactagggcaaatttgaactcttacgttaacgggaattactgatactgacctattaggtttaaagttggcaagatttcaaaaacagttatgaaacatattgattagggcaaatctgtacaactttcctgggctagtcagcttggcagtatatatctgaagccttaaacatgtccgtccccttcggccaaaccagtaatttctcccttaagaaataactagaaagaagcctcatgactgatgcaaaggttttattgccaatacaacaacaaaaactcacaacctaaatacctaacaacagggaagagatcacttaaatcatggtttatccatacaatgagatgttttggagccattaaatatgtggatatgcgagtagtaaacatgtgaataaatttggagaaaatcctcaaaatatatt

SEQ ID NO: 52268 - DNA, 780 bp, Homo sapiens
cctgaacctgttctttttataagctgtctctctttgatatggcatcagttgattattgagagccaacttgtcagaaaaacctgtacctgtatcaagattatttagttgaatctgaaaaaaatagaagaaataaggatcctgctaataaggtcgaacattctagtgcttgcttggtaaaatttggagagcaaagagatcttggtgaatgattacataattaaactaaaagatggcttttcagtgtcagtgatttttgtttctgtttggatgattatttaaaagagtgacgtagtttccctctggccactgtctttattttctttggctttttgctcattttgtgtgtaatgcactgcaatgggaccctgaagtcgctaagtgccttatgaggaactggctccaatgacctgcttgccagtgcaaacaagtctgacaagtttaatgaccccactgagcataaaagcagctgagccggccaggcgggcacaagctcttctccggtggcatgcaaccaagtccaggattatttctggtttcaaatactgagtttggttttaaggctgtcttccaaactaccctggcaactgctgtctatcaatcataccttctttccatctttcacaaatgtttattagaatctgcagctggggtcagagagatgggtaggacttgaactcttttctgatggaacttccagtcctgtcagggagatgggtctatcaatacacttaaaaggacacagcctaatagtgctgtgatgtgccccacaggcttagggat

SEQ ID NO: 52269 - DNA, 1095 bp, Homo sapiens
ataccactggtttacggatgagaatgtgaccggatcaaaaccagagagaagcagtgagacttttactgggggactctagtgagagaggaagattaaccttttctatgggctttaaaactggtaacatgtgaggctgtagcccctggaatccatgtagattctgtgttttgatttatcttaattccatccccatctgtatttgttttctattgctgtgcaacaaattaccacatactagtgctttaagagaacagatttattagctcacggtttctggggatcaggacattgcttaattgggtcttttgcttagagtctttttgtctgtttgtttgagttagagtttccctcttgtcgcccaggctggagtgtaatggagcgacctcggctcactacaacctccgcctcctgagctcatgcaattctcctgctgcagcctcccaagtaactgggattacaggcacatgccatcatgcctggctaattttttatttcagtagacatggggtttcaccacgttggccgggctggtctccaactcctgacctcaggtgatctgcctgccttggccttccaaagtgttgctcagaggcttataaagctgaaaatcaaggatgtcagcaggtctggttctcctctggaggcttgattaggggaaaaaaatctgctttcaagctcattctggaaaaagtttatttccttgaagctatatgactgtgggccctggcttttcacttacttttggatagagcccgctctcagtatctagaatctgctcataattctttgccaggtggcccacaatatgccacttaacttcttcaaaaccagcagaacagtaacataatcctgggagtgacatcccttcactcttgctatattctgttggttagaagcaagccatgggttttatcagcatttaaggtaagggggttctccaaaggtatgcccagttgggggtcaccttaaggtgcatccaccactcctcccaaggttcagggtacacaaaggaatggtagagcaggcagcagctcatgggtgcagagattctctggctctgctcctctcttctcccagcagatcatgccagtgcct

SEQ ID NO: 52270 - DNA, 1398 bp, Homo sapiens
ccaagtcttaagatatcttactctgacttgcatgcggtaagacagagcaagtatttcctggactagattttcttctagtgatagtgacagaaatgatcactaagcaatggctgttgggtaaggcaggagattgggaaacatgggaaaatgtcacttcctctgccctactctgagtatataataaaatcttagccaatatagtcttcattgtgtgccatggcaccattccaagtactttaatatatcaagtcatttagtgctcagaacaaccttatgaggtagtgctattattatgcccattttacagatgaagttactgagggagagagacattaaatagcttgctaaggctgggcatggtggctcacgcctgtaaccccagcaatttgggaggccgaggcaggtggatcacctgaggtcaggagttcgagaccagcctggccaacatgatgaaaccccacctatactaaaaatggaaaaatcagctgggtgtggtggtggggtgcctgtagtcccagctacttgggaggctgaagcaggagaatcatttgaacccaggaggcagaggttgcagtgagccgagatcacgctgtcacactccagcccgggagacaagagcaaaattcagtctctaaataaataaataactggccaagatcgcaatgcctggaatcaaaccaaggcatttgggctgtaaagtccttctgtggtcttatccactatgtcacgttatctcctagaattctatgaaaggagttctttttcagcagtctctaaagtaatgcattgacactccacacagtagcttagactataatgaaaagacattagaagcagcactttatcctgagggtcagtctgttaaatacgtgactgatacatcaggagtccatccctgacactcagaaagaccgtaatcaaaggtggcagctcttttatgcactttgtctgctgaagataggacctgatgtaccactggatcaaaatggtcaggtttgtgcaagagccacctttgccctgggctctaagacaacttcatgcctctgcaattggacagctatgaatcagagcaagtgctctgttcatctcacctctatgccagcgagcagcacttccctgcctgggaaaagacatttgaacaaattcacaactgtggttgcagaaacatagtcactctggggaggccgctgcaacaaaaggagatccttgccctctcctatcagatgggggccactgaagagagcaagcgtaatggtacctttccctaggtatcaaaaatcaaaatgatggctttgagggtaaagatgcccctttatgaattctcttaccctgtgaaggatttaaaaaatctttttgcccagtaatgaagacccactggatttagaccagggtgaaaaa

SEQ ID NO: 52271 - DNA, 1922 bp, Homo sapiens
atctacgtctagtttccaggttccccagtggtctttctgctttccaccccctaattccccagtgctatgtaggggttctctgtctatgctggctggctttctttagaaaacagaggagttaggatgaagaatgaccccttgccatcaccgtaagtatgtcccaggctccttttaccttttccccaaccttcatatgccccctagatagaactcggtttgggaagttgatatttgagtcgcatttgttgaacacatgttcagtgcaaaatttgcaatcataaaaattccaactttctgctcagtaggaagtggagaaatttggaaaaatttagttcactgggctaagatttccctgccaaagagttagattgttggctgtgtgaactaggggaatgactgaggaacaaaatctttaatatttgtattcaggatgactgattccgagagacaatacagggtagaaacaatatgtccacgaaaggaaggtattaattttgatatccacttgagtattattttactggataattgacatcaggaaggttagggttacaagagcagcttgcaggcttagctgaaagcaaggcctgtgtcatggtggggcaggaagccaataggtagaagtcagtgtgcacttggtccatttggtgtttcatcatcactcgactgcactaatgcttaaagaatgtgcttcgcatagtttgctgtccacatcatttattttctcaaaacacatctatttcttggagaactcatgatttcaagtatctgcttttgaaagtcttgagctatttatgaaacacaagtcattctgcagaagattcagactaagggacaattattgctactctgtaggtaacatcttttttttcctctagattctttcaagattttttctttacctttgatttttcacagtttgaatatcatatgtatatgtgtagttgtggggtgttttttggcattcatcctgcttggtgttctctgagcttgttagatctgtggtttggtgtctaacattaatttgcagaaaatggggaagtatcattcattacttcaaaaacttcttctatttctttctctctttattctccttgtggtatccccattatacctattataacttttgtagttgccccacagttctaggatattctgttctttttttcttagtcttttttttttcttttcagtttcagaagtttctattgagatattctcaaactctgcatctttttcctcgtctatgtctagcctactactcaaaggcattctttatttctgttaaagtgttttttatctctatcattttcttttcatgctttcttggaatttcagtctctgtgcctacatttcccatctgttctcacacattctctactgtgtatccactagagcccttagcatattagtcatagttgttttaaatttctactctgaaaattccaacatccctgacatatttgagtctcatcttgcttgctctgtcacttcatactgtgtgtttttttccttctagtatgccttgtaatttttttcttgatatctgttcatgatgcagtagatgaaaggaactgctgcatagaggcctttagtaacatgggggaaaaggaggctttttatgttcctatgattaagtgtcagtcttacagagagtctgtacctctggactctgaactttacacatgcttctcaatcttcttcccgtccttcagcaggacaggatggccagtgtgtgctgcagttaggtatttccctttctccaggttggttagactctggtaaaatctgaatagtttaggctctgataaaaagtttctcttggttgggcgtgatggctcacacctgtaatcccaacactttgggaggctgagttgggtggatcacgaggtcaggagatcgagaccatcctggctaacacg

SEQ ID NO: 52272 - DNA, 3239 bp, Homo sapiens
ataggacagatgacagatgagaagaaattaggaaaggtacagaacttcctttttcctctatcactcattcattcaacaacttttacggaaagtctacagtaagctaggcactaggcttaggctgagcgtgaactacaaagaaaaaaggacacaaatcatgtcctcaaggagattatagtctggcaatgaagaaaaacgtgttataaataaccgtaatacaatgcagatgtaatatgggtcaaaagagagcttccagtgattgcagccaagagcaatgagcaataaataggtcatactgatttaagtgggtctcccatggtcatgtcagttatgtcaccttaatttggatattgcttctgtgagattagaactttcattttgacaaggatgatcaggtctggagagctggtcatgctaacatgagttaacgtaaactaattataaatcaaaattcaattcattattttcaactgaaaagactttaacctgataatgaactcaagaataccagagtcagcaaggcttcttgggaagtggggagtcaaaaaaggtgctgaatgaccttatgggttacataaagacagcaagattctttggctctcctgtgactggaagtgggatggggttgtcttataatcatgtgcatgttctattagccctcttacaaaagactgtcactcctatctctgcttcaattgattgctaaatcctatgaaaccctctcatcagctgcaacatactaccataccataccagacactatgagtcaagctcacatgacacataatccttgcactcagaagccaaatcaactcaatgaacatttctggtcattcatgccatttttatgccagacattctttgtgtggcatttagtggtacgtccaggaaatatgatctagaactttctgttgctcacttcctaccaaacgtttcattgtgcaaagcagtatctctagaggactgctgaaggaatgcaggccattgcttcactcagtactctaaaagatatctctgggttaattcagagcatcagagtcttaaactaggttttatctaaatagcataagcagaatgctactgtgttttaatagttattcttcacctctaagaggggtttgaatttgtgtgtgtgtgagaatgaaaatcagatagtaaatataaatattttaggacttttggaccatatgatctctgttacaactatctgactctcccgttgggtccaaagcagctatacacaatacataaacaaacgaacatggctatgttccaaccaaactttatttataaaaataggcagcaggccaaatttggcctgcaggtttgctaatccctgttctacggtaataggctttagctaggcacatcatcatcctgagtaaagactgtggaaaggcctacaaagaagaggccaaactactcaaagtccaaataaacgtcctgataaaatgtgagcaaacagcaaactgacttgcccacatccaccctgccctttaggcagagtgaaaaaatgataaactggggctaaacccagccctttttcctgttccttctctgtaatgaaggttagagtagagttaagcatacctaagccttatctttttatctttaagagctttctgaaaggggaataataaagaccacatcttagaatcatcagcattcaccgaggaagacaaatgcagggctttttgtttgttgttttaccaaagattggaaaatgtggcccactagataacaaaacaggaagagaattaaatatgtcactcaagtgaaaagaatgacactttgtgttattattgacactctgaagaagagcaaacatatgcaagatcaatgtcctcttctgagctggttaaagatagcatttttagtaatttaatcatgtagagaataatttctctgttcattacatttccaggtaaattttaaggtgccaggttttcatttgactgcataggataatgacttctcagataaagggagtcaactccaacagaatcaaaggacttcagaatttaggaggagaatttaaggattatgtatcacatataatctatgtctgaggaaagtgacgcttagtcaatgcccccgaggtagtgagtagcagagggaattccagctggaccttgacctaatattttcaccatacaacggtcttatctgccttcaaaagcctggagtaggcttaaacttaaaaaaaacaaaacaaaacaaaacaaaacaaaaaaaactatcagaggaaagtgaggatggatacaatggccaaaccaatataccctggagtacaagtatttgactcatcagtcagcaacttcttagcaaggtacttcctcttcaagaaggactggccctaagttagctggatgtgttaccctatctctgaaatgccttttgttaaattcaacatggcacataatatattggtgctagttcatcatcagactcaaaaaatgtaagcatgcgtttagaaagtcaaactccaatgttgacttatgccaaaaagccaatctactcatgttctttacgggctccggatcatgtggaaatttcaagaaggtgtctgatttacccagctccctggaggggaattcggtgaagtaagattagaaattatttggtctcttaaggcaaacacagctacagtagactagccaaagcctgcagatgaggccttttctcactatacgccaatgtgattgagacttgtgtcttctggctaatgtcagggagcttttggtactgtaggcagtgaactcatttgacctgatttctcagtatattaaagcaggtggtgaaatctaggggaaaaaaagtgaacctacaaccatctgttttttgtgctctttaatcattttcagagccttcaggctttttatcaataacgaaaaagttaataaagtaatctacacaactccctaggatcttagaatgctttttattctttcattaaatagaattggaagaattcaccaaattaaggccaattgcaaatgtatccacaactgcttatccattatctggaatttcctacctctgtggttctatcattgctgcctgtcctttgagtcatctgattacttactatgataggcaagttggctaatcaaagtagaagggaagctcaaatcattttatggtgtccttcttactggttccagtaaaaagtgattgtctggattttgggggagaggggttgagagataaagactgtaggttaaaacaaagaaataaca

SEQ ID NO: 52273 - DNA, 644 bp, Homo sapiens
cactgggttgaaaaacagagatcagaatcgagaaaggcttagaatcctagaatgtgcatgacagaatgctggaaaggaaagagctgaacagagagaaagctcttgagatgtgcagaagggtgcccttgaacctgaagctcaataataatgatctacacgtgagtggggtgagaaagaaacatgggaacacatagtctgaacaattcccaaggttcacacaggttcactgcaccacaaagaaggaatcagtgagttttcataagggtatcaacgtaatagtgaagtttaagtaactatgaaagagaggctgctctaaacttaccctaacaaagcctaaaagcaagactacaaattactgaagtgatcccaagtaaatcagctgcatgacagaacaaagtccaccacttttcaaaggaatccaaaatatccagcaatcaacaatgtaagattcacaatgtctggcatcttacccaaaactatcaggcaaataaagaaacaggaaaaggtgacccataactccaagaaagctcaataaatttagacccagaagacaaggatgttttttaaaaagcagtactagttaggttccaccacctcaagaatgtagaggaaaacataaacatgaagaaaagagaaaggaatgt

SEQ ID NO: 52274 - DNA, 693 bp, Homo sapiens
ggctggtctcaaactcctgacctcaggtgatccacccgcttcagcctcccaaagtgctgggattacaggcatgagccaccgcacctggcctaagtatgattttttaaaacagctgtcattcaaatttaaatgaactttgatcttcttgacacaaagacttttttttcctttttctggacagtttgactgtatacggccttaatattcgaagcagtcagaaagataccctaactagaaagtacaatccacctctactgttgcttcttcctagaatgtcctagcattgccatagtttaaagtcccacatcaatatttgtttattctccagccatgcagattatagccaccaccacctttcccttgccacatagctgctgcaagatatctggctcatacctgctgtttacatacagatttcccatccaacagaatcctgttgctctaagcaacactattagcctaacagaaacagccattctaagtaacctttgaatcttactgagcttcacagtattgtgcaccctggtccagattcagatttgacatttgaggctaactgtgactattgctaatgaaaccaaaataatctctataaaagcagcaaccctcaaacctaatcaaagctcaaaccttaagcctcagtttctaagagaggtctaccctggctcctcctaccatcattctttcttgcag

SEQ ID NO: 52275 - DNA, 1363 bp, Homo sapiens
tagagcaagactgtctaaaaaaaaaaaaaagaaaaaaaaaagctggagtccgaactgcaccataaactgcacttgtaacactttgccaaagtagaaagtaccaacaatcaactcactcattgagcaaacaaaaaagcataatatgcactaaatgctattagaacacaagacaaattacatatcctgccttcagggatctgacaggttgctatggaggaacaaatgtgtataaatcatcacaattacaagatggggctgaatttgccctagccacccaaagctgacctccaactacaggtatctgcacctcgctgcctgaggacttttctccaaggtagggatggccacccgagaagccaaaggtggcaggaattgacagcccccaactaatgaccatccaaagttggtatataaatactccagttggctatgactgagccactgaactgcagcctggacgacagagtaagactctgtctcaaaaaaaaaaaaaaaaaattaattaagttaaatgctccagctaccttactcttcaggtgggacaaatttacagcatcaccattctccgaagtggggtctctggacccatgccaacagcatcattatcaccaggtgctcatgagaaattcagactctcaggtctcaccccagacctgagtctgaacctgcattttaacaaggtccccaggagattctcatgaacatgaaagtttgagaagtcctgcgtgacatcatctcccagagcttctccccaagcttgacctccaactgcccattgccattagtggtttaataatgcacctttattggctgccttcccttagctatctcacttctccacttgcataccaatacctcctgcacatatcaaaaaaactcagacataaacaaacataaaacgtcataggagtcaacagaaactttgaccactagagggatcagaaaaggcaatgagaaagaggcaccatttaacatgggttttgaaacacggtaggatttgcacagagagcgatggaggaaaaagcatcctaggggtgggagagaagagaggaaagcaacaaatatctgaggaggggaaggaaaagggttagtgtcctcatttggctaaactgtcaaatacctcaaggcaagcagtaaggaataaggctagaagagggggtgggatcagataaacttgactgacagataaacatatctggcctttatttcacaatgaatgcaatgtaattaatggtttggagagatgacaaaactacaatttttctctttttctgagacaggctcttgctctatcacccaggctggagtgcagtggggcaatcatgactcactgcagccctcacctcacgggctcaagcgatcc

SEQ ID NO: 52276 - DNA, 821 bp, Homo sapiens
ttcacatggcaagaaaataccaaaacaaacccaccacaaaaatgtactcaggctgattgggtataacaaaagtaaaggccactgctattgccatcacccttaactatctgtatggaaatacaatcagaaaaagatgttaaggcttgcaagtcactgagaagagggttttcaaatcattaagtgaggaagatgcctacacatgcctacagcaccttctccccttccagcatacgcactgcatccgattctgaaacccactggtccgtgatagattatccagcactggctcactaactctctgctggtaatcatgaaccaatctcaagtccctgccctctggaaaaggaaggaggattttacattgtgttcagtaacaatttatttttgctttacggaccagagtaagtattgcaaaagaaagttaatcattgcctaaacacacactcacaaattccttcctttgaatgtattaaagcacccaacttcccctctcaccagctcacagccacatgatgtctcacagaagcaccaacttggaagttctctaaatcgtatgcaaatgtgcaagtcagagaatctgaggaacctctttagcatctgtttaagaaagatgtgatgaggaattaaatgggtgggtggtattcacatgaaagggatgggtaggggggctacagaaatcactggtagactgaaaagggactgggtaaatcacagaagcattcctctttagaagcaactagatgcctgcagttaccagtaaatacatggtggtagaagatctcaccaatcaccctgttgcccctacagtaaaagaaaatgta

SEQ ID NO: 52277 - DNA, 3200 bp, Homo sapiens
agactagagggaaatttttcctgtatgcttcccgtttttccttctcgcccagattccaaagacattaaaatgctatctgttttaaacaaaaggtttctatttgttgccaagagagtaactgagagactgcactggttttcggtagtaactattgtgaactgaggcctacatctaggttgcctcattaaacaaaagataccggtcgctgtcaacaaccacacagcacaacgctcccctaccctcatctttatctagaaggaatggtgcagacgagaataacgcctgtcaccatccactggccaactcttctaggctccctcctttcgatggtctggtggctagagaacagcacttgtgtgacacatttgggcttgccctcccgcctcgcccccagtacacagaccctttccttggagggccaaccacttggcttcctcaccatgagtgctccgggaatccagctgcgagtctgcccaccgttcccccattccctcctgaccccatagggcactgataatggatgcacaccggccactccaccgcaggccatcccccaacgtgccccggctccgctcgccacccgctgggccacacacacggctccccacgccaccaccccatggggtgccgcggccacgacactggaagttcaacccctctgcccacctttccacccccgcgcctctggtcggagtgatctgccatttagcagatgcacagcagataaggtacagccctcagggacacgaaaaggaacaagccaaggcaccgggcagggcagccccgacccctgtgctgcgtgtgtgtgtcgctgtgtgtgtgtgtgtgtgtgtgtgtgtgtgtgtctgtgtgtaacgcgcccgcgcgcccgcgcgggtgaaggcagtggccgggggcgcgcccgggagggtaggggcgaaccgcgggcgccggggggcgggggcgccgaaggcagctgccccgcagggccaaggatggtgggctgggggcgcagaggcccggcggggccccggacggtactcaccgagcagcagcagcttgagctcccggcgggcgtcccgcttgtccctgcggagctgccgctcgatctcgtcgttgatccgccgggcttccttggcctcctcgctcaggcagcacgccatgatggactccagagtcattcttccaaagtgcctccgctgcagccccgccggcaccccctgctcacagcgcgcacacacaccctcccgccctcgctcccccgaggcagcggtggccgccgagcccccgccgcccgggcgcgcgtccgggacgagctccgggaaccgccgcgggggcggcggccagggccggggccaccaggtgggccgggggcgcggtgggagcggatagtctgggccgacgggagaagagaggcgggcgcgggaggcgggcgctggctcggggggcgcgtgagagaaggccgccgcgcccggcctcgctcagacgcccgcgcctccttccccgggaacaggcggcccgcctcgccccccgagccgccgccgccgccgccgcctgcgaggctcccctacgccgtgcgcctggcggcgagagctcattcaccggggtgtccccgcagcgagcggccgccgacggctccccgcgcccggcgcgcccgctcctcgccgccgcctgacacggctcccgggcgccctcggccctgtccgcgcccaccgcccggctcgcgcgcagacccggttcccgtcccgcccggcaaccgcgcgctcctccgcctccgcctccgcccccgcccccgccagacgcccaccccctgccccgattgccaggcgcggagcggctgctcagtgcgagccctccccctcgccacacacacacattttcttctttctctgaactggagcacagatccgggagggaggaggcggcggcgaaaggaggaggaggaagaggcggaggggatgggcgcgggaggagggagccgggaggcggtgccgcccggcccctcctggaaggctttcctgggctcgcggccgccgcggcgcgcctcccagtgcggctctcgcctcgcccgcgcggctcccgggctgggccggcccccgcgggctctgcggacgcctactgctcccgcaccctcggcagagtccgcgggcgcagcagtcacggccgcccccggccgaagtcggggccagacccggccgccgacgcgcagcccgagccggcggccgccgttgcgtgccagggccgcagccgacctgcggctgccgtccggccgggcgtggtgagacaggaatatggcggcctctgcctgcctcagcccaccggcccgggagcgcggccgcggcccctgctgaagtcgcgggaggcggccccgcggagccccgcacgcgctccctgcggcgccggcgctggcgtccgccgctcccgggctgtgcctgtctgctccacggggtcgctcctcagccgtttctgtgtttcccgttcctatttctaaaacgccattcggttagaaactctcacgtcacctctgacaccggtgcagtcttagaaaataagctcctctatactgtgtggggctactggggaagggaagggaaggaattggcaccggtgcccagaggtgtagggggagattcacaggcgaagctgttcgcaaagtaacgtgagatagaaatctaaatcctgaacagagaaaggaagctgcccaagtttccaagagcctcccgataggttccaacttttcatgcctttgtttttttggtggttgttggttgtttttgtttttttaagttgtttttgtttttgttttacaagttctcttgtttctgagaaggcacacgatgtttagccgccgagtaatcgaatttactcttctagactgagattgaattatggatgacttatgggaaaatgtaaaataatgtggaataaaaggaaaggaaagaatgaaatagaagagaaactaaggaggccccagcaaaacggcattctagtttttttgatttgcaatatgtgattgaggcagtaaactgtcgtatgcacatttcattgtgatcgtctactgataaatagcacacgaaaataatcttgtttaatcaggcccaggagatgaaactcatattgcttcctgccttaaaggaacctgaggtcttcaaagaaaattgtcttttatgaagagaaccgctttttcacgtttcatgtgttctctgaagtgtccctggtgc

SEQ ID NO: 52278 - DNA, 527 bp, Homo sapiens
tagacttgatagtatggtttgaatatacaggctagaaaactgaactctaagttctaaattgtagtatcttagacctgaaagagtctttaaagacctactattttgaaactctggctttacaaatgagaaagccaaaaccagaaaactcgccaaaggtgacacatttggtttgtggaaggatgactcagacccctggttttctgacctttggtccagtagcttttcacctgcagtctcctgagaaggctgtgacctcccaagaagcaagtcaccacttttcttataaagccaccatggtgccttccttacaggtccctcatagcattcttgtggtatttgacaaagtctaaatttcctagatgtaaaatccagttttctcttcttgtgccctcagtaaagagctttttaatatttaggtctgaaaaatagctcatcttcccaagtcttgcccctgccagtccccataaactcacacagcccttaatacacttatgcctgcaatgctcaaaattctatcttcctatgtt

SEQ ID NO: 52279 - DNA, 659 bp, Homo sapiens
ccctggctggagagtgatctgggtgtcactgtaaagacttcttgcccaagaatgaaaatagaacatcctatttcccttccagctctgccaagactttcatctgcctcccacatcctctgctgctgttttattgactacatactattccataaaatggagataacataatttgtttaaccttttccttattgattaaacactgatttctaaaagaaaatactggaggagaaaatgaagcaaaaaacttccttagatattagtgtgagtatattctctgaggcaaatcaaaagaaggttattttaggatgaagatgtgtggagataagtagagcagtctgcccgatgttaaacctaagagaatgtttcaggaacattctgtctgggtatggatgaacaaaggtctgggagtcaggccaaaatgagcatgaaggttgaacagatgttgcaattacaaatcagtacaaatctttggggaaacttcaggttattttacaatacgtgtatattgtatggtttccagctgttagtttgccatgctgtcctctgatcacaccaagaatatggatgaggaaaatgaaaactaaggccacacaatcagtaggtgataaaaccaggatttgaaccggggtctgactccttgtatttgtctgttttcacac

SEQ ID NO: 52280 - DNA, 1645 bp, Homo sapiens
ccgaggacattatttcaaataagtactagttacaagggagttagccaacatcatcgtcagtacaaaacaaactgattcacagcaaacacaataaagtcctgaattcatgaaacactcttcaatttgccaggaaccgtgtgagatatgcagaaactacagaaattaaggcttatttgtagatattaacacagacataaaagatttaatgaccgcagttcacgttcaatcagccgttcccacatcccttgagtgcagtctctgtgctggctggacactgcaagcacagacacattcctcagatgtttagactttttttaaaagtgcgttgttacatccacatttcactttttattttctttctttttttgagacggagtttcgctcttgtcgcccaggctggagtgcaatggcaagatctcggctcactgcagcctccgcctcccgggttctagcgattttccttcctcagctgggattacaggcgagtagctgggattacaggcgcccgccaccatgcccggctaatgtttgtatttttaattgagacggggtttcgccatgttggccaggctggtctcgaactcctgaccccaggtgatccgctcgcccccgcctcacacagtgctgggattacaggcgtgggccaccgcgcccgaccacacatttcacttttattcggatcgatcagtaaactctttcgcaaaccctcaaactctcccgaccactatctcaggtagcagcgaactcacccgtcctcaggaggcgggacctgcgtgccgacgcacagcgagcacgttgacgtcttggcgcaccgttccacggcaccgcccaccggcttgaatcccggcgcctcagaggactatgaggcgggcgccaactgcttgggccgcagggcgggaggcagcgcgggagtggggcgttgaggggccggcctagcttggggctctggccttgcgtcttccgaccgaatcaccgctcctgagcccggtgcggggctgccgctatcgcctggccgtgggtgccggagcggccgggttgcgactcagcgttcttgggtgggcgcgggcggcgtctccgcggcgggcatcccccgaggccgccctcgggccatgatcgactccgtgaagctgcgccgcgacagcgcggcggacttcttctcccactacgagtacctgtgcgcgctgcagaactcggtgccgctgcccgccgtgcgcgcctgtctccgggagggcgtgctggatttcaacgccgaccgcctccgcggggtggactgggcgcctctgctgagcaccctcaagatcaataaagacctgcccttggtctccatcaagagcttcttccagccctggctgggggacacaggtttgtagttcccgcctccagggcccctcagtcggtgcggcgaagtgggtttttaggtgagtggtgtccattgtcggggtatgtgtgcaatagaaggggtgtgcggcctggacactcacgagctaggtgagtggcttaaggtctctagggcttcagtgtgctcatccgtaacatgggcttaataacgagacccaggttatgtgcgccttcgcaaggattccctgcgctgctgatgcctgcagagctcttagcacagtttgggacatcattaaacatttgacag

SEQ ID NO: 52281 - DNA, 795 bp, Homo sapiens
ggagtcgcctacatggcatagtcaaatgtttttaacttaaccacaacccacagtaaaaatgaagctttctgcaaagttaaaagtagtagtcctggccccaccttccttgtgtgcacgtataattaatggaaaattgcatcaaacaactctgattgtacttctagtgactaattcatgttctgttctattccttgcctttaaagaaaattatgttggcaactcacgaagtatgtttcacaatccactaatgggtaatgtcctactgtttggaaacactggctagagtgtttcaaacatctgctctgtttacccctgacaaaactgctactcgtggggcaatgcaagtctttcccacatttgttttattttatggctaaaagtcatttctgcatttgcaaattacttccaaagcctaccttccttgagctctttaactctctatagtcttctggtaattttctttagatttcccttttcagaacccttttgtgacactgaaaacctgagttttcaaactgatacatctacctgagaattttcacatataatttggtcaaaaagttaaaaaataagaagactttgccctgtgactgaggtgctcagaaggtatggctggctgctcacaaaggcacatagtgagtgataggggctgaaagggctcagagaatgcccgagttctcttagtacagtttgtacattttaaaccactgtgaactgaaaaaaaaaaaaaaggcaaccttggtagtttagaaatagataaggacccacttatagattaaataataattagcttgt

SEQ ID NO: 52282 - DNA, 2823 bp, Homo sapiens
tcattaggaaaagcaaacaaaagccaaagtcctgtccagttacaagccttctctaaacggggcagttggactgtatatattcctggcgcatcaattttactcagacagggaaaatatttttacattaaaagaaactaggttaaattatggtagagaatgcaaaattcacagtttaaaaatgatgaaattccagacttcaaaggaacttctttcttgcagggtagggggagggtattctgtttcagaaccccatgcgggtctccactggagttcttttgagaaggacacttctgtggaaaagtttgagcagctctggccctgcgcctggcctggctaggggccaccttcttctggtttgggctgcagcgccctatgggtatcgcgttcttgttaatatctcctcacgtttctaaactcacagcttgtcagcgcgggcgcaacctgagagctgtcgcaggtttccagctcactcgtttcccaaaggaggaaatggagaatcagcgactttaaaggacttgcctggcgggcatccacgcttcccaggctatcgctcctccctgcgtccttggccacctccgttctttaatcctgcaggaactcaggacccacgtgcaaatacaaagaaccgtatccacccacccccggcccttcttcatcctgcgcttccaaccttgggggggtcctctctctccactggggtatctgacgcccgtggggggtgcttagaaaagtttggtagattagtgactggtggttctggaacaaatacatcacagcccaaactgggggctggtggtggagaggtgggtggatgggggctacaaatctgctcggcaactgccctttcagccaagagagaggagctgaggtcctctggggttggaggactggaaccggccagattgcgggctcaaggggcgaaggcaggttggcaggggcagcctcttcccgccgcccacaatcctcgggcgggcgcgcagccgagccggctcggctggctggcgcaatctcgcgcgctccttgcattgatcaaaaatgggggttgaaacagtaaacgcgaggaggagcaactgcttcgactcggctcagaagcgcgaccaatggggatgtgagctccttcgcgcgaaccaattagcgcagggcctgcgacagcacgggccaatggggcgccgactcggcgcaggaacaaggcgggggttcggggccggctgcagactctcaccgcagcggccaggaacgccagccgttcacgcgttcggtcctccttggctgactcaccgccctggccgccgcaccatggacgcccccaggcaggtggtcaactttgggcctggtcccgccaagctgccgcactcagtaagtccccgcgagcgggcgccgggagtgaggttcaggcgggagcacgcacgcgggtgggtttgcatccctgcgtgtggcagtcggattcccgctccctgccttgagtcccctaggcgctttgcatcagcgtgcacagcgggatcagcagctccggcaagcgggcttcgggaagaatgcagttggtgaggaagctcggcgaggcgtgcccgtgcagctgcccctggccctgactgctggtgcgaggcagtgcacgactcagctggccggggcctgctgtcccgccggtgccacgcacctgcagacgcccgggctgtgccatctcctgggccggtccgggggctggggcggggcgaaaaagaaaaagctctgatctctgccttcgcctcgcgcagctgtgcggcgagcccgggcagtgtggagcggatgcatgaatggacatagtgtgaatgagtgatgaacgggaatgaaccgatgacaggttttgcatatgcagtggatcacgttagctgaaagggattgcaaacttaaaggtccgcgtgtgcgtgcccccctacgccttacaccagtgtttgctttagccagcacttaggaacactgcttttcagaaatgtaaatttgaaaaccttcagtccagctttcccctccttgtcccccatagaacctaccctttcctaaagcctttctccccacccccctcctttttttaacctgcttgtcccctaaaggcgttcgagtattctaactctggtagactttgggctgcttaacccaattccctgttcatttcgttctggagtaaaccgagtgattgaattctctcccgggccacaatcagatcttgctggtggaactcactctctgccttcccaggccccagcccggctcctcccctcccccgccaaacccaccgtccccagccccacccgcagtgaagaaggcaaagtctccgatgtgccttgagcccattgtcaggcggctgccgccgccgttagatttttatttttctaaccaggatagagctgataatatgttggagcagcatgaggcatagccaagtattttacaattatcaattgttgagcagagtagaaatctccctgggacagagcctcctctgtgttgtggtaagaacagagaatccaattttaaaggggaaaggacttcttacttttctaggggcagcgctcacagtagctgagaggacagggcttattttttctcagtggttacagttcattttaggcgagattccctgctccagctgtggagatgtttcctgtagcctcctcctgcaccccccatgttttggagtgttcccaacgtttgttccctatgtatttcgttattaatttattactataattgtaatggcaattgtcatcagtaatacaattatttgttattaatttttctgggaggatttttgcccttggactgcatgtaacctggggggcaggagggtga

SEQ ID NO: 52283 - DNA, 827 bp, Homo sapiens
ataaggaaaagagagaggtaagtgggggtatttctaggaggtgaagacagtctgataaaatttatacagtagtctaaaaatgagtctttcccacaatgcctaaaaagattctttcccttttatctcacctttggccttttatcaattagcaatccattcttattatcgactgtccactttgaaatggagactagctttagaatggctgttagtcattcaaccttggggctcaattagttattagaatgcttccctcctggagatttaataatgaaagggaattttggagaagtgcattggagggcagtgaagttttatgctgttaggtactgtaggagtgtgctggttggctgggcttcagatataaggttgtgacacaagtggaactcaggcacagagccacccaagatgaatcagtttctacgctcagagaagtagaggtgactgaaccctgtggggcatgtggcggcagctcttgacatcttgtttgcacatttcacaagcaatatcctttatctttgtgtactagcattggccaaaccctgcctcactcttggctttcattttccttttgacccattttgattgtactactgggaaattattggccaaagtggggaggatcttagatactgctagggagatatccttgggatttttctgatttctcttgtgcagccactcaaccctggccagatttactccttggggtgagcaaaggagtagagaaggaagagagagccacagaggagaggtcacatgcaaatatccctgtaagagatagcttataagtatgatacctacagaggagaggccgcgtgtaaata

SEQ ID NO: 52284 - DNA, 646 bp, Homo sapiens
ccgccgattctcccagccccacgttactttgattgacagctgaacaaatgttttcccggttcgaacgctcgcgctaaggaacgtcagccaaggcgaagctccgccttgggcgggccatctccgccccgcctccgccaacctcattcctcttcgttaattggtcggagctacaggcgacgcccggcccccacgtgggtttcagctgggttggctcctccccgctggcttgccatttgtcagcagtgaaatgatgggcactaacacagaacggcgattaatgttcagccacctctgattggttggtggagacgcctaccgcaacgggggtgggcggggcgcttggagagctcgccagagcgctcgcatggcgggccggtgattgtagtcaatctggccgtattctcaggcagggtcgcccggggcggactacatctcccgggatgctgcgcggccgccccgcggaagattgtgaatatgtatcagaatgttaatgattagctgctgctaaatttggtcaaagaagtcacctacacagagcgtgttgttagagctgtgctgagcgggtgtttgggttgttggctgctttcttccccctttctcacacacttgtatattattttgaggtggtgttcgcagagtttgaaag

SEQ ID NO: 52285 - DNA, 2160 bp, Homo sapiens
ctcttttatttttataatccccttcaatttggggttaaaaaaaagacaagaaaacaggaaggaagagaaataaggaaatgagatgtggtaaaagaagctaaaaggtgccttttaaaagatcgttgctgtgaagtgaaaaaaatctccagagaaaccaaaaagcaccgccgagacctcttccgaaccaaaggagtttgtgtttgcttttagggaagaagaaagatcattcattcggaggaataacaaccaattaaaagacaaataaaaaaagtttggagtgggacgcagagcgagcgagaggagctgccggcgggcggtggggcgcggagcccgcactttcccggccgggtgagcggcggccgcggcgccgggctcggcgggtgcgcctcggcggagcgaacgtcggagcgttgccttgggagacgcgcgccggacaatgcccgcggcgggccagtgacgcccgcggggaatgcggagcggcccggcagccggcacccagccgccgccgcgcgttcctgccgcccgtgtcacgcgagacccggcgggggccgggaccgcccgagccgcccctcagaccgagccggccgcctccgctgccgcggccgcctcctcttcggggtcattaaagccaatgagccgcgcgcctctgccgagcgcagccaactaaatcggcttggatgattcgcgacctgagcaagatgtacccgcagaccagacacccagtgagtgcgggcggcggggcgcgggctcgccgggtgctgggggattccccgcgtcgccccctgcgcaccgagttgtgtcttttggccggaggggcgtggagagccgcccgaaatcggcgccccgcgccgggagcagcccgcccgccatcacccccaccccccggcgcggtggccctcggagggggtgcggagaggcaattgagttgtagccattttcttattgttgtctttgaagcccctggaagccgcgccgagccgtttgcggtccccgcgccgcgactcctcgagggggggtggcgagcgatgaaggaggcgcgactccgcgcccgggcggggagggcgccctcggcagcggcgctgctgggctggctgcggtttggaagtgcggggcgccggcccctcgcgccgcgggccgccggggcgagcgggcgaacgaacgagccgagagggtggcggccgcctccctcctcccccggcctgaccgcagcccgacgccatggcgcgggtccccccgacgggccagtttcgattccgggtgaggagggagtgggcgcggcgcgcgggtccctgggtgcctgtctttggccggggaggggagacgggactcgaaccctcggggtccggggcgcgggggcctgcgggcgggagtatgcggggccccaggaccacctcgaaaccagcctctgcctgggctgttgggcgcgaggagggttgcgggaggagagttttaatctctctttgcttgcgtgcgcgatgaccctcaccccccgctaacgccgcatagtaggttttctccgtctccctgcttcgcctgtgatgtgggctaattaaatattttattgttgttcttcaggcaccgcatcagcctgctcaaccctttaaatttacaatttccgaatcctgtgatcggattaaggaagagtttcagtttttacaggctcaataccacaggtaacgatattgactttagctgatccttctgtttgcttagctcttgtctccccgacaaatacacacaaacacttaccctcctccttttttgtgggggcgtcacaaaggtattatttttttttctcggtgggcagaaagggcaaatcaaggcctccttccttaggcaggtgtaaataaattaaacatttcttctaccgtaaataaaaagaaggcagaacaatcgaaactggggagacttggaaaacgctgaggccaaactttcgatattgatttattggggccgggagaatgaaaggttgggaagattctggggccttttgacatccttggttctttattactccggacttgattccttctcacttttttctgccattccactgaagagctgagagcccagggaagtcggagtgagcgatttcattacttttatgctaaaaaaaaaaaaaatgttttcatcttatagacgatttttagacttagggtg

SEQ ID NO: 52286 - DNA, 628 bp, Homo sapiens
caagcaggtattcatgtttgctgtgcttttaaagctaaaatatcacccttgttaacggtgactcaaggtgactctacatactctgttcaaactgcatttcttaaggttgggaagctggtgtgtgttgggacctgtctacttctgtgcatgtggcatgctatgaactctagacagccagtaggcaggaaacagtgtagcaataccagctagacactcatcctctggaaccaggtggtctgggttcaaatcatgccttatgctatttaccatccttgtgatttttggcagtcttcttctctatctgtgtaacatgggagtggtaaagttgcccaatatagtaggtccttattggttttttttttgtttgtttttttagtgtacagtatgagtaatttgaaaatgacctggttgtgtttattctttggagggttaatatttaaattaacttgcattccacaaacaaacacaaaactaacagcagaaaggagcaaactagaagtgtgccaggccacagggaaattattgagattaaattttgcctaaaaaaaaatctacaaaatggatcttgtacatgcagatggttgagaattaactttagctgatcctagcacatatttaattccattgg

SEQ ID NO: 52287 - DNA, 536 bp, Homo sapiens
ttaaataattagatatattaataaatctctcatagccatatacatttgtattttcttacagaacaaattgctgaagtctttgcaagtattctgttagtaatcctagtgaattccatgaaatcttttgtgaattttgggtaatttgtgtttagttttggagttctgggcttgagtaaagctttaagtgtgataatgtgggcgcctgtgtaaagttaaacttggctgagatgctccatgaagactaaacgtgccatttgacctcttggtgactctgtggcctcatttgtaaatggaagtttatgttgcaacactcctgggagcacgatgatgtaattggctccagagttctcccgggaaccttccagcgtatgaaagatgtctggtgcccagaacaagctatcagaaaaataatagtgagaaggaaacccttcaaatttgaagaattaaaatagccaatagatccagcaactacctagaacgttaccttaaaatgtaatatctaaaacagtggcccgtctattctgacataggattat

SEQ ID NO: 52288 - DNA, 1075 bp, Homo sapiens
ttactctgttttccaagaagacacgttctacattctcaatgaaagacatgaacagctgttttatctttagaacagtttccattagcctatcccaatcactgaagttaattggaaagtcccagactagtcaaaaaaaaaaaaaaaatcacaggttttcctcccccaaaacacaatgagatcagaagggttgaagagcaagtttcaatatcttaacttactgaaaaatgagtcatacatttcataggtatctatcacttaatccaacataactttaagaccttggataatggaagattgttgtgactcatttacaagtttccaacctatttacattcacctagtttactcattcttaacaaatatgcttaaattgctcattacacagaggtagccattgaagttcagaaaatattacccccagatatatcactgtgatattgattaccaacatgtaagcaaggcaaggcgttctgaattcctcttaactgctgaagacagattctcccaagggactctactgttaccattcctctgaagattaactcacaagaaaggaagtttcatcacaccctgacagaccttgctactaatcatcatctattctcttaaaggcccattcatttttctcaaaaaacaatcacagagcatgagaatattttctttacccattgaccaattgacttatttcagcaaggggggtaacggatccgtgaccatttcctgaatgacctgccagattattgccctaagttattgttacctaggtcatccattgaattcaggtttcagacctaaataccattacctgctgagacaaagaaagtagaaagcccagctaaaacaaaatggtctgaggcaaggcttgttacatagactcaggtctttttgccttccctattgcaaagcctctagtgacttagttattcctgtcttcctggcgtagagaggaagacacctctgtacacgggacttcctccactgacacaagtttccttcattaaagataggtcttaaaataactaaaaataggcagctgcttcccaactcaacctgtgttcttttaactaaattactg

SEQ ID NO: 52289 - DNA, 936 bp, Homo sapiens
tacaaaaaaatacaaaaattagcgtgatggcatgcacctgtagtctcagctactcgggaggctaagaagggagaatcacccaagctgtgggatgtggaggatgcagtaagccacgattgcgccactgcaccccagcctgtgtgaccgagtcagaccctgtcaaaaaaaaaaagaaaagaaaaaacagatggtctaacagcagaagtcaacaaacagtgcccaagcaaaatataaccagcgggccaaatccaccctgatatgttttgtaaataaagttgtatcagaacacagaaatacccatttatttacagatagtctgtggctactctcttacttcaagggtaaagttgaatagttgcaacagagactacatagcctgcaaaagtgaaaatgctcactatctgacccttcatacagagtttgttggcccctggtctacaggaaagcaatcatgccatttctcaatcattccacatagttccctagtaattttacttttgatcttagctacaagtccctataaataattaactctgctttgagtaaatcaaagttaaagaagatttccaaaatgaaaactaatatctaagcaaaaaccatgtgcctcaataagaacaataaacgtactgatcaaatcacaccaaatgtagagccaactgaagcagaatgcagagaaacaggtgctcttcacaccaccaggagaatcaggcagctaatccactacaactttcatcaattttgtgtttgttgcttaaatttaaaagaggttgggtgtggtggctcatgcctgtaatcccagcctttgagaggccgaggagagcagatcacttgaggtcaagagttcaagaccagactggccaacaaggtgaaacccccatctctactgaaatacaaaaattagctgggtgcagtggtaatcccagctactggggaggc

SEQ ID NO: 52290 - DNA, 1090 bp, Homo sapiens
aatctccaacaccactattctcccccaacaaacacagacactcatgttctcagctaataatgttgcctcatagttgattgagaaagtggaaggtactaacaggaaactgcctccatttaccaccaccacagctgctgccatccctatatctgttcgcacagcttctggctttccctccattacaatgaagtgtccttccctatctagccctccaccgggccaaagaccccacctccctccaactttttataatatccattcatttcctggtgtgatggttaatattaggtgtcaacttgactagggtgaggtacgcctagatggctggtgaagcattgtttccgggtgtgtctgtgagggtatagccagaggagactgacatttgagtcagtggactggaagaggaagactcaccctcaatgtgggtgggcaccatctaatcagctgccagcgtggctagaaggaagcaggatgaaaaaagggatacacagcctgcttgtgggggttgggggagtggcattgttttctttcacttctgcccttggacatcagactcatggccaggttcatcggcctttggactctgggacttgcactggcagcctctcaaggactcttgggccattgacctcatactgagggctgcactgtcagcttctctggttgtgaggcttctggactgggactgactcactctagctgcttctctcttttcctagcttgtagacagtctatcgtgggactttgccttgtaattgtgtaagccagttctccctaataaactccctttcatatatacgtatatcctattgtttctgtctctctggagaaccctcactaataacacacatggtgatcaatttctccgtctctactgaatatatatgttctccacatcttcattacgtcccactgacatccatctccattgaccctcactcaatctccattgactccatggtccacttccagtttctggagtatttctctgctccttttcatagaaaaaaaaagtcttgatggcttctttacagtcccagtcttcacttcttgtcataccatctctccttagcccattatctttcctaca

SEQ ID NO: 52291 - DNA, 2283 bp, Homo sapiens
ctacacattgcctctctcacactccagctgaagacaagtgacagtgtagggaattcatttgcaggccagtttgaaatgcaaaaggtacagtaacaggacaagagccttaagcaggtgaagcaattttcacttttccctcctgaaacttcaacttaaacattatgttcactgtaacctcaccgtgtgaattgcctgtctttggccttgggatgctctttaaggattctttgctggagaaccagcctggggaaaggtaggctataaactccacctccatcaccaaccttctgcacctacttattttcaaccacagtgcatgatcactctcctcaataaactttggaaccacttgaaaggaaaaacaaacaaacaaaaaaccctaccatctaaggtcaaatttccttctcttctttcaaagtcaggacatatggagaaaatgaaagacatgtcccattacagctccattcccttttatcctcctagaaacagcaagtttagagatcaggagcacaacggggaagagagtttaaaggaacaggctgagagaggaagagaagcagtcatgccaagaagagatagagaaaagggggagagatggaaggcacaggggaggctagaaggcagacatacaagggaagacctggacagaactgtaaaggaagctgagatggtctgtagttctccattcttctgtatattcttcctgtcactcttagcaagattcagctcccagcaatctcctcttacccacccattcccattgtctggaacaatgccctttgctaccaatgatcccatccacatcagaacattatacacttcctcatccactcactagactggattgttacgctctgtctggcccttctgtgtcccgtagcctccagcatggcaaggacccagcatgtacttaatagatagttacagaatgaaaacataactagacaatgaggactggtggatgactacgtagctttggaatttgaggatttctttacctcatgacccaaatgactaattttcgtggaagaaatcacaggcatttggcaggcctcagagtagacatcatggttgctcgggctttgggaggatcttcaatttacaccaaggcaatgacctactcaccagccctagagggaagaggggaaggcaacaaaagcttgacttgcacaataataggtggtaattctcggctagagctcacaaacacaaacacatgcatatgcacacacatttacagacacacactccctccagttctcccctatcacaatggactgatgtcagaaattgtaaaaccatgttactgaagattttgaataccctggtatggctatcaccttaagccctcaatcatttataccatagtgtgaatgtatggttctggacctgttctcatagagactagaaagagagaatggccagtactatcaatctaactgggagacctagataagagtttaggactcagataagaaaagaaaagcgttcagatgcccttcaggcaagtggactaggtatgttcctctagacagaaacttttggctggttaaagcagacactcacccaaaatctgtgaggctgatactcactcaatcacttagaatggctgtcttcaattcagccttgtgaacaagatgccgttgtgtttctgacaatataggtgacccacataagagggcagctgtggcaaagagctgcctcaccatctgaacccatgttctctagcagcagattttgccaaaagctcatgtcctgaagcctaggcctggcacagtttaagcagaccctgagtggaaggaagtgtaggcaggaagtgagcaaaagtgggagagagtgattgtgcttctcagccagactgattttcctgaacaatacatcactgagatccaagcattcaacagagggaaaacacagacagaaaaagagccagacacacacacacacacacacacacacacacacacacacacacacacacacaccagcagcagcagcagcacaaacccagagaataggaacacctcagaaatcaaaataactgttaagtgaggacagatagccagtaaaaaaaaatcccctgcagcctgagacaggaacacaaagccttctggagatgtgccacaaatgacaagattctgacccctccttgcttgtggaagagtctattgaccagcattggagagagaggccagcacggctgggacatccagtccaggtgctttttcagaaaaatccactccctcggtgccttctttggcatgagtgctgcagggagctggc

SEQ ID NO: 52292 - DNA, 1769 bp, Homo sapiens
gcagggaatcccatggttacacggaaaacatgagaagggagcccagaaagctatgccacgagattaaatccgggtcctagctctgcccctaatgtctagtgcaaacttgagcaagaccctagcctccctaaaggtcagtgtcctaccaggaaaatataacaagaatgcatgggatagcggggcatacactccaaagcagtttacaaactggaggcccagatgctctatcagacccacagatatgttgtgtttggcccatgcagtgctttaaactatataatatcacttaataccagcattgaaaaaagaagcagatttctcatttaaaaagaaaaatctagattcccagcttttttttttttttttttttttcgaaaaaccaaacatttggaaacaccgggcccacactctgcatgacaacattctgtagcttggcattggctggcctcctccaacatgggtttgggtgctccagttctccaccatccccaccaggcaggctgcagtcacttgggaaatctcattgagtcctgttggcaccctcctgtttgactttgctctaaagcattacacaagtgttggctgttactacctgtaaaatgaggtcactggaatggatgacttacttctgctctgagaggctataattccagtccataagatgggttctttggtcacttttcccaaaaaggtataaaatgatcacccaaaatcccagggtggtccatgtcccttgagtgtggtataaaggccataaaatgctctgaaaatcaggcatttgtactgcgagttgcagaaagacttcaataaactacaaatgtagttttccactgggcaacatttagacactgactttaaaagcaaatagaaagtggagatgaggaaagaacaaagttaccaccgacattaagagacagaggcaggactccaagaaaggaggggattggagggaaaataaacattcgccataagagcacgaatcccaagtggctcatccagagaaaggagccaagagtttatagtactttttgggttgttttatttattttcccccccacaagatataaatcaatctatttagatagggatggttgagagaacacattttattgctgtggataatttccccagggagaggatcatttttgtttcactcctaactttatcttttggttttgtgaaaccccagaagtttatgaaaagttgtccagatgaggacacagaaattagcaaactattcccatctttaattcacataaaagtggaaacacatacccctgctcacacacacacagcactagaaaccaggaaaactaattgagtgccaagcactcttgtaccctaaggatatatatatatattttggtagcctgaggctgccagaaactttgcctgctgaatgaattatagaacaggaagcagatgggctgtgtatatgaaacaaccactatctggcatgatgtgctgtgcaatttggctgcaaagattaaattgagctattgaatgtttaatacactatgcataacaaatacagccagagccacaaaacagcataaattacagaattggtattcacacggcctttcccaggaatcaatacactgccaccgctcataagagtctgttgtttaatacacataaagaagagaagaattcttctattaaaatgagttatctgggctatttaccaaaggcagtgatttagcagtggtaaagtctatgtagtgctgttgaatgcagatgataatactccttgtccttgtctgcct

SEQ ID NO: 52293 - DNA, 1044 bp, Homo sapiens
cagatggcattttaaaaaggactgcattctagcaaattcctttttaatttataccagcacaatttaatacaaatcttttttgatttatttacttattcattttatctaattttatttgatacaggttctcactctgtctcctaggctggagtgcagtggcacaatctccactcactgcaacttctacctctcaggctcagccaattttcctgcctcagcctcccaagtagctgggattataggcacgcaccaccatgcctggctagtttttgtattttcagtagagaaaataaaataataataataataataataatttttgtattttcagttttacctatgttagccaatctggtctcgaactcttgacctcaagtgatccacccacctcggcctcccagagtgctgggattacaggcatgagtcaccacacctggcctatttatttatttagagacggagtctcactcttcacccaggctggagagcaaaggagcaatcatagcttgctgcaacctcaatatcctggggtcaagtgatactatggcctcagcctcctgagcagctggaactacagacacactccaccactcctggctaattcttttgacttttagcatagatgaggactcactgtgttgctcaggctgatcttgaacccttgaactcaagcagtcctcacaccttggcctcccaaagtgctgggattacaggtatgagccaccatgtcctgcccgcaacttgaaacaaatcttcagataaactagatatgggctctcctgtaattaaaaaaagaatgactgtcgttcttatccattctgagaacatactccttctctaatgttctaaagaagataaacatatttgtccactataattaggtagtagagtgttaactttgattataattaagccaaagtccatttttggcccacatgtctctgccacaagataaataatgataaacaattcggccccttgggttcactcatctgattaactggaggatattttgtggttaatggaatcctgataaatctatca

SEQ ID NO: 52294 - DNA, 1059 bp, Homo sapiens
gtgaatattatatttggccaccaaaaaaatccactccctgttttgttaactcgtcagctctctttagacatccacatccatacgtaagcacaccctcccagcccatgaagtcaatgtgttttggggaaagccaagctccgcccctagctagtcagccccaaggtaagcagagcattcctctccctgggcagaataattggttcagggatggactcctgattcaattgcaagtcaattaaatatgagaaaaaggtttttttgtttgtcttttggggactttcttttgtcacaatctgggactgaagctttttgaccacagagaaggaagatccagaaggaatcctctctccatatttgaaacaagtagcaatgaagccatctcttaaccacaagagggagccaatccttacgttgaagctgacaccatgacagtagatagagatagaaactacgttctggttgtccaacagaaactactcttcgtacacctttttgatctataaacggatagttttctaattgatctatgaagacattttgaaagccctttcaaatgacttgctttggttcaaaagtacacactgctgcatttcccctggctccatagtccaatatatctgtcaaagaaggaaatgaggttactgtaatgatgacccaaccaattcctcttcttggaactcccggaaataaagctcacagttcaacagtttgcagaatctcccttcctccttttgaaaactggaatggtaggtaaaatggcatttacccatatctgatcttttaacatactccatgtttgctgagattactcaccaatctcatttacaagattttttttaagatgtggaaatatcggccgggtgcggtggctcacgcctgtaatcccagcactttgggaggccgaggcgggcggatcacctgaggtcgggagtttgagaccagcctgaccaacatggagaaaccgcgtctctactaaaaatacaaaattagccaggtgtggtggcgcatgcctgtaatcccagctactcgggaggctgagacaggagaattgcttgaacc

SEQ ID NO: 52295 - DNA, 1420 bp, Homo sapiens
aaagaaataaaaaggggcacggtgatagaaaagaaaaagcaaaagcaagattgaaaagctgagatattcagagtctttccattggttttaagaggatacctgtaaatagccctggtttgaactctgctgaaagagacaggaaagaacgaggcctttgtatgattatttattccagcaaacaacagcacacggcaactcagagccttgctattccctcagctaatatttggaagacattgtatctcaagggcaaattctaagtgttcttcctctctctaaagtaaagaggaaaggggaaaaaattggaggcttccatcatccaaggataaaaaagaaaatactgatgaaattccacattggacattgtatgaggaagataaaaaattaaggaaagagtgtgatgataagctttgcttagcaaatacaaatgaaggctatgtaaacccatgtgattttttttttaaggcagactattgttaaattaactggcagcatttcaacatctccttaacagtaaatgttgctgccaattcttttcatatttttaccccctctatgcaagaccctcttccttaaactgctcctaatagtctcagttctgaacacaaagaggcagtagcctgagaattctctagcttcctctgatctttcccaattccatttccagctgatatttaaatggccccatttctctgcttctcttggaagaagtgactttcttagtgtgactcagcaccatgtgtttgcctggaggccagcttccagggcgttcacttttctacctcattacagccaacctgtagttactagagggaattatttagaatctggattattctccttctccacctctattttcacccagcatttctctacctgccagtggccttaccaaaattttttatctgcctgtaaatttgacaatggtaagagttttcaaaataaaagcttttaggctatgaagcggcagaccatgtaggataaagaccatcatcttgggattcaggagggagggcctgtttgcaaattctggtttctccacttagtatctttgtgacctaccacttaacctctctgcatttcagcttcctcatctataaaaatggagacaacaaaatcaaaggttgtacaagatgtaaatgagacaacctacgagaagtacagagcatgctgccaagaactttgcacacttgttgagtgagtttcccttcccctttcaagcaaatgtatttccatatagcaggcactttttcccccatgacactgaataatagttcggaacataaaatgtcaagttttactcattttaccccgaagtctaaaaaaggcagaggtaaggaacgaagccgttttctctgcatctcccactcagccctaagtggctaagaaactgagtgaggaagtgaagagggaacagtag

SEQ ID NO: 52296 - DNA, 4063 bp, Homo sapiens
actaatttggggttcagcactctagttcggctgtgcctttcaatgtcatcaaatctaggaaaacactccaatgcctgaatgtccctcaatctagtgtctctagtaacaaaaaggattttttgttgacgttctgtttattagacattatgtgacttttttattactgttattccatattcaaagtgtgtgaggcatcagtcagtactgaatcaccttaacatggtatctccatttgcaaagcatttgtcttggcatctgcagatggatttacctataaataataaaacataccttgagttaaagaaaaactccagttgatattgcttagcaggaaaaagaaaacaaagaaccaatagatgagttttcaaatcagggttcttcccagtcattgtgaagctcaatcaaaggatgctgaatacagaagaggaaagaacccagagctagaaatcaggaggcctagacactgtgccagatcactcagcaaataactctgtgtcctcaggcacttgcccatcagcccttgcagtttctttacctctctgagcataacaacagctacctgagctattgacagggtccttatggggagtcagcaacaatggatgcacagcggtgactcagtaattagaatgcaacatgaacaataggtttttttaaaatgttgtattatctactggtctaagtacaagtctgccttgattatttcaaagtaatgcttatgcttccattttaaaatataagaatgtgacatttgaaatatatggaaatgtccttttatctaatgcctccacttcgacatgcagaatctactcctgggaaccagcaaatgcagtcagcttggtgttcctgacctcaggcctgacatggacatgagttagatgtgactcggacatgacgactgacatcaattttccattctcatccacagccccacttcctctcttcctatttcaatcttaagtgtcatgtagatagaaagtaaatcttactttatattatgcaccctgtgctcaaaaaacactaggtattccacaataaatattgatgaacagttttcaagtcaatgagtaaaactgccctaaaaattattcctttttattcactgactatactactgcaacacgaattttctcttcccctcatttttatttaggaatcctcataaaactttaaaaatatgtttataattttagtcctccaatttgatttaagttattgaggtcaggagatttatctttttttatattttctccgtggattttaatgtagcagctcagctgctcaataaacagtggttgcttggctaaatattcagtgcaacaactgacaattcatttttgaaaaagagcgtatatcagttgtgtcatgaattgactgatcaactcttcaatcttttaatacccaaataaactcttcttctcatttttgaggaacagtagtttgaattaaatatgtctatataggacagtaggaaagtcctaatgaatgaatgaaatatgtccatataggacattaggaaaggttgttaattcttaacctttttattcatattttatactattttattacttaccatatatcctgaaagtcttctttattttaatggggaaaaagatagcaaaagaatgtgtaagagacgcttttgggaaaagaagataaatcaaattggaagttttctagtatgaaaatgtttctcttaaaaaaaaaaaaagcaatcacaaaataaaacaagtcagcattctcaatgctggaaaatgacagtgactaaaaaagtctttccgcctgtgtgagcactgtcctctgtcccatccctagtgctgggtaatgcagagatataatttatcatggattcacaaacaaaatggtcaatggttcagcacaaaccaaacatgagcagacacatttctaaatccaaccgtcatgctgcttacacaatctgttgatccattgaacaaatatatgttgaaagattaagcgggagttgactgccattcaggaagataaatgtagagtagactcattttccgcctgacttaatgcttaagaatttgtattagaaggatgttggggagggcaatgtctgcggggggatagggggaatggaaattccagtcacccagatctttagaatgagattatctcgctaaggacctcacacagaggcctttgccagccatctttcacaccctggactgtcctttccccttactcttttattgtgggaaaaaaaaaaaaaattcaagaaaataaactagtgctgcaggagcgcttgccttacctattcaggccttgttgatggaatgataggagacggattgtcttatacagttcagtttgagatttcaacggggagaaaagagtcaggctgtcataaaggcacattgttatccagctgtctcagaaaaggtctgtgagccattaagctatagagagaattgaaagcctgaagctggaaacgcggtgtccctgctggtagggccagtgccatccccaggcagagaacagggccaaccttgattcaactcatcttgttgacaccttcctcaattggggtatgaggccagtcttgtggagttgcgtttgttatcttcgctgggctgaaaaagacagcccttcactgctgttgatcttgttataagtgtttgagcttcacatcagagctttgttagaaagaaatggaagagggcatagaggaggaagaggggaaggaagaaggaaaggaaagaaaggaagggagcaaggaaggaaggaaaaaggaaaagagaacaaaagagaaagaacaaccatttgtacaacataagagggattttcttgatttgtaaacctgggacatggccacaatacaataatgcaaccatgcagcttccttgtttagcaagctgtgaacaatttttagagccatccaacaactctggcctggtcaggaatgcattcaaacagaaaaccactgagcactgcaaaaagagatggatcttgacctaccagagtacgtgcgccaataaatgcactggaaagcaattcactttgattcaacatttattgagcgtccgtatgggtcatgacacaggagcagaaaccacacaaacttacaaaagacatggtttttgcccttgcaaagtacttatgccaacaaagaccatgtggacgtgtacagaatgttgtgtagctgtccaggagagatatgtttccttttgtattgaagagtaagttgaatcttctaagttgggaataattttaggcaagtgctagatttacacagtgctgtgaagaagcgaagagagatgagcatggaaagtttcatatatatggggtagacataaaggccaaagaagaaacagtattcaaagtaagctaagaacatctttatttgccaagcaaagcgatgagtttgtaaatcaagtaggtgttgggtaaaaatgactgatgaaaggtcttgaaattatttttagccagtcatatgagaccttgtttttcacttttaaatgcatctagtgtaagatgaagagtggctaagacatacatggatgcgcataattctctaaatcagatctctttcggttgttctttttaacttttaattttgttttttctcttgaaatttcctaccctgactcatcacagtctccaagttgaagaagttaatgaccaacatattctagccctctgtatcaatttcttgttgtctttttatttcaccggaaaattctgttgagattttaaatgatgccacgcaacagctgggtatgggccacttctttaccataacatccccatcttctcctcaatgccaccattattagctttatccttcacgaacacttgacttccaaataaaactaactatctaatagcataagtctcagtcaagttttaacttttggacctgtgggtctgcagctcattttattccattgtattttaagcaaacatcattgactttctttttttccacaggtttttgggggaacaggtgatgtttggttacatgaataagttaaccaataataataagagttgatttctgagattttggtgcacccatcacctaagcagcatacactgt

SEQ ID NO: 52297 - DNA, 1272 bp, Homo sapiens
atattctattgcctaataaacctctgttgaaagtggaattatgaaaaacaggtgaacgagataaaaaaattaaaaaaaaaaaaaaaaaaaaaaagatgcaagggcttcccagagcacatctgcccttacccaaagcctcaaagaatatattggacatggaaaaaaaaaaaagaggaaatggttggctcatgaaactaagaaatccaagggcaaatttaactctaggtgggcagagccttgggatgcaaacaatattcccggaaccagtctctctcctttgcttggctctgcttttctttgtgttggctttattcccaggcagcctcttcccacaccatggcaaaaggtcacctgccccttcaggtatagtgagcgcaaatctgcaatctatggtagaaagaatctcagatttggaatatgtaaatgagctcacccctggagatggttggaagggtggtatgcaaatgggggaggcatttagcttaactgttgtcatggggactgagaatgcaaaaggagtggatccctacaaaaaaatatctcggcagctaagcagaaggagggaaagaactgctgtggaattctacaaagcacacttcaggtagagaagaaaacgagcaaaagcacaaatgtttactgagcacatactgccctggtgtctgggaggatccaaagatttgattctggcctcaagcaggggaggtaaggcttgtctgaaaaataaacaaccataatccaaggtaggaagtgagtaaagccctaaaagggtcgataaatgccattcattcagagaaggctgagagctctctgagctggaaggattggaaacttttcagaaaaggcgtagcacctgaattggattttgaaggagcttgtagggaaaatagtgttcataaatcgcctgaaaattaaaatatctcaaaaccagccctagccttgggctttgaagctgtagaattatttgagggtctgcagaatcagaacattcagtcatttctcacatcgtcctcatggtcaaagattaaagtggaaacagaggcagataagaaaggtcacgggggtagtttgtggcaagagctacactgcctaggctaaagtccccattttaaatgttaagtaattgtatctccttacatttgttcatttatcaatgtaactagatctccttctttcattgaggtaaaattcacataacataaaattaactattttaaaatgtacaattcagtggcatttagtacatccacactgttgttcaatcatcacctttat

SEQ ID NO: 52298 - DNA, 2602 bp, Homo sapiens
aagtcttttgtaatgtatggcccatgggagacaaataagcctttgcagcaggttattcgagtggtgagaggaaaggctagagagcgacacaaacctcttctcctacctgcctctcatcagagcctgtaaacacaacattttttgaaggagacttaaaggattttcctggtcaatgtgctgcactaagaagttctttcttcaaaggggcagagagggagagagagactgagagacagagagagaatgaatgttggttgtgttccagaatatcttgacgcagttaaccacaaaataagttattagcttattgtaagtgcagccagttttaaagtaatggagtaatccactgtggattgcagcaaggaagtggaacaaagggtgtgaaatgaacagatggatttgattttaaacaaattaggcccatgacaagggatgtaacaagtcattttttagttttccatgctatgggttaactttgcttgtgacctttccagcctgtgagctcattattcctttaccaggaactcagacctttctgggagaacagctttcatgctctgcaattgtaaactactgtctcttgcttctactaaactgatcaaacgaggcactacagagactgccaagacagaatgcatgattacttaatcttcaaactatttgttctcttaatctcgtactcattcttggccacgttgataaatacaagaacaaatgttccggaggtgtcacacctgtaaccctgggttctgagagcacttgacaatcccctactggcatatccattcatgtggctgatacctactccaggcagacttgtgacatgggccatctgtgtcctttccactctttctttaatcccccgtgtgcctccctgtcccaacttcatgtgttcagtcacagaaaaccactggagatagcccttctgcagtgaggcacagccctccgccaagcctgaactccctcacaggatccactgcctcaaaacgtcttactgtcttctcactgcctcagtaaaaccctctctccttactgccaatgccatctagagctttggacagaattgataggtgtatagaaattcacactaaggggtgaatgattggccccttgacctaaattacaaatctcttgactcttccctctccacagaaccactagggtgaacggtctaaaatgatgattccctgtgacccacagaaaatgtgaaagttcccaactttactcctcctggatcctcaccctattcaacccagctctgcccagacatcaaccctgcttctctctcttcttgtcccagaacccagactgacatgattacctttcttctaaatcttcttaatctagaacacacttgctcagtcacaactatttagcaaaatctgaggccaaaatcttagttcaagcattacctcctctagaaacttccctgactcacacccactcaagcaaaggtcgtggcttacttttggtgtcaaaaccttacctagttcatgacagcgactctcagcaacattcacttgatttctgcaaattcagccctacccaaattgttcccttaattacctctaaaatgtgactgacatgacacttttgtacgaacaaaaaaacaaggtaattcagtgtgtgcgtaaatgctatgcaatgagagtgtgtggtagagagacaccaacacaaagaggaggcttgcgatttgttcctgttcccggaatgagggatcctgaagccatatccttcagtcttgtcccccagttagatgccaggagaaaggcctaaagggactgaggtgggggagatgctacaaggatccagagattacatcaaccctgacagccactggatggactggcgaagactgcctgccgtttacttcttgcagatttgccctccagatccctctcctccctacagagaaggctttgtcagcctagctctgagtttgtggtcatgcagaatccagaaaatgtgtggcaggaagagtatgagacaggcaacaggaatgtggaatgataactgcttgcgggattggttctcagtttcttatttctgtgaagagaagtagcagggcagaaagagcaaaacaagaaggtgaatgggtcacagggagtgaggagggggagggaaactgaaaaggtacaggagtcgggtctaagagattctttaagtttagcatgggagaggttttgaggcccttcaggggagaaaaaaactgagcaacagagaaaggggttgttgggaagtgttgctgtggatttcacaaaaacataaaagttgacttcattcaaaatggtggttggccctggggtgtgggtattgactgactgagaaggggcacaaaggagccctctgtggttctggaaatgttctctatcttgatctgggaggtgtaggcgtgccagataaaatacaggatgcccagttaaatatttgggacacattaatacaaaaaattatttgttgtttatctgacatcaaatgtacctggctgtcttgcatttttgtttgttaaatctggcaacctgagggtggtggttacatggtatagaacaggtaaccacctgggggtgattttgcccctgcagacatgatataaaatcaactg

SEQ ID NO: 52299 - DNA, 2129 bp, Homo sapiens
ccagttactcaggaggctgaaggaggagaattgcttgaacccaagaggcagaggttgcagtgagctgagatcataccactgcactccagcctgggagacagagcaagactctgtctctctgtctcaaaaaaaaaaaaaaaaaaaaaaaaaaagcagaactgtagatattttctttaggtttggagtgccatgaaaacatcactgggtaccgtgaacagagaaagtttgggaacctctgcctaagagaactgaatgattgtataaatttagcagtatttatacaatacatagcacactgatttgcagtttttgaaagtaagcgtgtttcctcccccttgaaaaaaggcattgtcttaatcgtctttgtctgtccaaagacagagaatgtttgctgaatggcagttgaatgaaagggggaacattagcagcttgttactcccagaagagcgtggctaacgtgtgatttcaattgacgggataaaatttgaaaacccacaaaacagagaagaaagcaaggaaatttttagacagggagatgtgaggaatggggctttccctgtgtcctgacatgacagagcagacacaatggcctcctctgtccctgggagtggcttggccttcatgtgagcacaaaagacataagataaaattccttgggctgaacattagagcagttgatgtcaccatatctatctcataatcaccagtggaaaacagcccattcgccttgagcaagcatagaatttttcagctgtgttcaaagcattgccacagccatgttcattttgtcacctgcttcttacttggtgaaaagcatgaacatcacggggctcctgtgcctggccctggttcaaatttcctggctttccaaaaggcatgcaggcctctctgcttttgcacaaggcagtaaccccttgaccttttgcagttttccacagttgtgtcatatccagtcactcacgggcaagcacaattagtggtactgccaagtgcgggtggagaaatgccaaggcggtgaggaagtgaatcaaaatgaattgaaattacctgcagagaactgatgaggaggactcagtctgccgcaaaaatcaatgagttacaaaacaaaacaaaaaaaggtctgcctgagaaaatcaatgaaacccaaacggggtgaccatcgagaaaaattctcacatacacacaagtcatacctgacctcagatgtgcccagcaaatccagctcttgcccagcttgctaaagggagcataacccatctaccctctgcagcaggatttctcaagcttccctgtgtatgtgagacacctggggaccttgttaacttgcagaatctgatttagtaggcataaggtgggggtctgagagtctacatttctaacaaggttccaggagacatttctgctgctggtgtgtgaaccacgctgagtggcaggcatctagaggtatgtggtttctcaaagggtagcccttacaccagcatcatcagtacatctgggagcttgttacaaatgcaaattcttagacctccactccagtccaactgaatcagaaactctgggaatagggtccagaaatctgacttttaagctctccaggtgttctgatgcattctaaagtttgagaactgcaaatattctagatctgtgttttcgtgtaggtccatgcccatctctacaataaaaatgttttatgctaaccgaaccctaaggtctcttaccttcctctgaaatcaccatcccttaaatttctattttatgttgttaacttttcaacagtcatatttatctcccaaatagctattgtcttgtcttagaaatgacatcaagagctgcttgagagcaggggccataccttgtgtagctctgtatttccagcttagcacagtgtttgccacatggcatttgctcaacaaatacttctcgataggctgatgggtattatgtggattcatgttgaagtcaaatatgaagtgacatgcaggaattcattttctagttcgagcatccttttcaactgaatataggcatttctgtgaatacctaatgctgcataacaaaccaccaaaaaacttaatggcttaaagtgacaatactcatttattatttctcatggtttctgtggatcagga

SEQ ID NO: 52300 - DNA, 1565 bp, Homo sapiens
tgaatagcaggaggcaaggataactggaggtcagtttggaggctggctgtcgtagtgggtatcttcaggtagccacagacattgcttttgctctcaaggagtttgcattcctgaggaagacaacaaacagtaagcaagtccacaaatagggatttaagacagaaatacatgtataaaaaaaaataaaacaagcaggcaacggggtgggatggggctgtgatttcagataatgaggccagggactctatgtggtcatgatatttgagctgaacgatgcaaaagaacctccatgtggcaaccagacagagggaacagcttgtgcaaaggcactgggcaggaggcacaagcttggcatgcttcagaaacagaaagcaggcaagtgcagctggagagtagtaaagaaacaggagaatgccagtgaggagaagccagaatccagggaggcgggaagggagctggaagggtttggtgtctccaaagccaagaaaagagagcgtttttagaaggacagagtcatccactgttctaaatgctgctgagaggttgaacaagaagaacataaagaattggccaacggatttggcaaggagtgctttgcagaccttgtcaagagcagtttccatggcgtgcttgggattaaaagcctgatgagtgtgttgaattgaagccgggaaacgaagacgtggagacaagcagtgtggaataattctgaaaagaactgatgttgtgagaaaacaaatggggcagtacctggggaggggggaggggggaggggaggggaacgtggagttaagaaaacttagttttgatttggtttttgtttggggctttgggttttaggttttggtttttggttttaaggtgggagataggacagctacatgagctgaaatatgctgaagggaatgaggtaggatgcggaagtctctggaacacagcagtcactcaatacatgaggttcccatcattacccatgtgactaaattgtactttgacccaactagctcgagacagcagatgtggcaatttgggagacttctgtttacttgggaattgtagttcgttaactcttctcatttaacctatgaaattactacttataccttagtgtctaacttgtaaagtttatggaagtagtaaagcaatcttttgtttctaaaatatataactttaaattgccattgatttagacttgtctccttcctctcactcttctgcttattcctactgagtttttttgtggttaaatatgattgagtgcagagacttacccctggctgtgctctgcctagggtgttcccagtgatctcaaggggtattgaatttttcctacattttattgaaactgtcaactttcatttactttaattaaatatataagttatacagaagggcttttttttttaaacaaatatacaaaacatcccattgttgccttgaggcaccctggggaaaccacaagatcccctcagtgatccacagtactggcagcctctgtcttccttgtagtattttatgaatattttccttttttgtaagtgccatgaactgcagaacactgggaa

SEQ ID NO: 52301 - DNA, 2625 bp, Homo sapiens
tatttcaaaagtctgcaaatctagtcagccaccagttcattttttaaaggatgaggaataaaatgggtatcactgaggtatctgtgcatttttttgagctctctggtgcggggtaaataaatgaactttcagaggagctgtgacttttctctactcttagtgacattctgcagatttctcaagttctatttatttaggaatcaaaaaatcatctcctactcctgcattagatggtgagaatatgtgccacagatcaaacactgctgaaggaaaactatacattcttcaatgtacaaatcccttaaacaaactcatatgtaaatataacagagaacacaccttaacctacaggattctaaaaaccactctagttttggggaaggtagggggagggtcgtgaaggaggaggtggtggtcattgtttttaaattagttatctcaaattcagccctgatctgtttgtccagccactaccatcctagggtaaaggagggagggttgtgaggaggaagacacaccccagccacctcccagactccagggcaggcggaagccactcagtcacctgggaggtgaagtcgtgctgctgcagctgccgcccctcgcgcaggtcccaggacctgactgtgttgtccaaaccacccgtccagagcttggtgccatcattagaaatgtcaatacagctggctccgtctgtgtggccctggaattgcctgataaaacaaaccagattgaataatgatttcctgccagagctcaaggtaaacactgttgtgttgttagttttggaccgtgtgtgtgtgtgtgtgtgtgtgtgtgtgtgtgtgtgtgatcccgccagtgtctgctgatgtgcaagatcaaactaaccttcccctgaggaggaggggaaacagcacctgcgattgtctttccctgttttccacgatccaagtgctaaagaaatggaatgccactgcaggtcactacccagaacttaaatatgctactctgacaaaaccgtctggaaggtaaaattctttccaggtctggaaaagtgtttaattgttaaatagaaaataaaagacaaacacacaaaatcccgattgtattccttatgggaagataaaggtctgttctttaatcgtgcaggcctgagtccgtgagagaaagaaatggggacgttacaagcacagggtgtacagaagcattcctgtttccatgagtgaatcaacacagcaatgccctacgtgccaacagagcatgagctcatgtatttactcaaccttgctttctgtgttagaaagagccctgcattaggaaatctggactcccagagacaaagggtcacgcatgccggcctcctgacctcagaggcattgggcagagacacaggtaattgctgaggcagacccacgggcacctcagcaagactctgcctccaagcggagcacaaggttgttctttaaagaaccttgtgcttcattcaaaaatcgccatcagaaacgatcagccaacagggatctgctgagcacagatgctgtgcaaggcaactagcagagctgctgaggggaggtcagtgtaagccccagcagggacggtgactggtggactcagttctgcatgctgagaggaaggtggtgggggaggcagccagaaaaggcgagcaaagtctagacccaccctcagaagcaggcgggatccagtaaagaactgcgtgggaatttcaacactgagaagaaagttaccatgctgcttcttcctccaggatccccacaccttatcattcctgtagagctccaaacttttaacctgagcttggattttaaagagtgcaagggaaggaaaaagcaccactactgccctaaattctaagccaagacgtgaaccatcacttttaaaatcttctctctgcaagccatccccaacttctgcactttaggatccaggttgagtcctctctcctgcggccgtgcagctggacctccaatgtttccgcttgcttcccagacatccccacagaacacccaggcctggagcagtccctgcttcacttggtgaaagtgttgctttccttcccttcaaacagctctggaaatccagtgaccctctgacttcttttgacctttctaactcatgaaacgctgttcctccttgactgaaaacaccttcctctgctgacatacagtacctggcagctgctcccccatccctctgccctctctccgtccatatactatactccagcattactctcaggcacatcctatgactgttcagaacgtgctgggttacagtggatacaaagacattcaataggctttacatggccctattacatgcagcagccactagccacctgtgagtggtccagagaaagatttgtaagacgctaccccattctatccaacaggtatttactccccaggagccggcacggagcaagggttcagagtacagacgagagcagaatgcctgggcctcaacttggctccaccacatctgactgtgtgacctgaagccagtaacttaccctctctgagcctcaggcacttcctctataaaatggggcaaatagcaggacagacgttatgagaactaagtggaggaatatttgaaaagtgcttagaattgatattttgaaag

SEQ ID NO: 52302 - DNA, 651 bp, Homo sapiens
acgcaccccatcacatctgtgtgccttctccatctacacctggtgtcaatcaagccatcaccctgcgctgcactttttgctacggtccaactggtcattcacgtactctgcctaacacttcaactaatgtatttttaacccataaaactaatgagatccccacttgttaacaacatggacaaagttgaaaatctgtccactggcaaccatatcatatctcagaaccctgcctgtgcagccagtctgaagggcacacattgatgtttcacacagtttaaatgcaaactatgggaaagaaccagtgcattcctgcaactcgattttgcaactcatcactgtagaatccaggtgggtgactcagttaggaggactcatggaaagatagctgtgcaggtgacacacagggccggttaatgttgaggcaggacagggtgctaaaaccacgatgccttcgtcaccaccctctcatttgtagctggcccttctaccctcctccaggcaaaacaaaacaaactctggagcagacaataaatacaattatttaaaattaatttttaaataacctcatgacactgccgttccccagctcaggacctaatcacagcaaaaacaaaatctctatgtcaaagcttttttgaaagcatggtttct

SEQ ID NO: 52303 - DNA, 1831 bp, Homo sapiens
cccagaagtaactgcattgaatgtaatgaatgatgcattcactgccgtcttgctactctgcaaatggcggtgggaggagggcattccctaagcaccttctatgctgtctgctaccctcccacctgaggcctcctaaccccctccctgtgaggcaaccactactatcaccatttatagatgggactaggaaggcacaaaaggatgaaaaagccttgcctgtgtagccagaattccactaaagtctgcctttgtacaaaactcatgttcattctaccacccctgatgccgccatggttcccataggcctccgggaatgaacgtgatttttctttttttttccagaaaaagaccaacagtattcttttccaaagcaagcctcacatcttaactcctccttgccttctataatgttgtcattttgagacaaagtgatggatgggtggtcctaactaggatttggtcctgcctctgacaaaattaactagtcaagaacagctagagaagagtaacaaaagaaagaaaccactttatataaaacaaggtgatgtttgtcataattatctctaggcaagttctaaatacaaactcctggtgattttagaagtcaattacagagtgacaacatggtcgctcagattactaactctcaatctgttaactaagtatgtgaccggatgcacccagcctccttgataaaaccatggtgctgtgccatatgacctgaaagacagatgagtggtgcttagactgttctgagttaggaagccctttctgagaatttgatgagttatagtctctccccagaattctgcaaaagagcacggacccacccagtccatccatgaatgccactgcgtaggtctatacaccgtctgctctggagtctcctccagagtctcctcccttttccaaatagtgatcacactagctaggtatttcagtgccttacattcaacaaatgtttaactgtgacataaaatggatcactgcaaaatgatagcaagtatacgcagcacctcaaacagtactcgggcacatagtcagggctcaacaaatatttgtcaaatgactcaaagtatttaaaagcatgccctattataaatttttttaaaccatacaactttttgtcaattatctctttcaagcagataaaaatagcattcccttcagccaaaatttaatgcaatttatccttaaattaattaaaatatctaaagttatttttttattactactgaatgctactaagaaataatggcctttcttaggtcatttcatatttctctgctcaagagctgcacttatataagaaaaaacagaaatcaaaattttaaaacagccaaaataattttttaaaccaaagccaaacctctataaagttgctagctttattgttcatccctttcagaaataagaaactttaaagcagtttccataaaaactttcactcttagaacagccatgtgtcactaaacaacagggatactttgtaagaaagccatgtcaggcaatttcatcattgtgcaaatatcgaatagtgtgtttacacaaacctgggtggtatagcctactacacacctaggctactgctcctaggctacaaacctgtacatgttactgtcctgaatattacaggcagctacaacacaatgtaagtatttgtgtatctaaacacacctaaacatagaaaaggtacagtaaaaatacggtgttatacacttaggggaccaccatcatatatgcaatccactgttgatggaagtgttgttatgcagtgcactgattacacttctatttcctaggcttcacattaaaacagattgcttattta

SEQ ID NO: 52304 - DNA, 1355 bp, Homo sapiens
tccctgaccaccaatgagacaaggttacagacagaccatgccttggacaaaatgtactagaaggggaaatgactggtagagagaggaagcccgtgcatgaccttgctttagccagcgaggcagatatatgcaaaaagggtgcagctgtaccaggtacaaaaacagaactgggtcagccccacccagttcatttgatcacagccacccactcaagctacctcaaggtcatggctctcctcgaaagcatgggcaaggctttcctttgcaacagggttctgcactgtctatttgagtgcatgtaaaggagtagagatgcctttggtaggtatcctacttaggtccttgctcccaactccctacctaccacacattcctgcaacactctgtacattcctcttctcggaaattcacattgaaggtttccagttttaaaaatgatatatgctcactttgaactcatacacatgcacacagatacatatacagaaatataaaagaaagttaaaataaccctgagcccatcatccaaggataagcatgggtaacatattggtgattttaggataccatcattccaggttctcacttatgtgcacagaagcccagagtgagagacacattttaataccaaggggtttccgttacataccctgcctttctataatttgttaatcaaacatgtgtcagggacaccatcccagtcaatacagattaacaagtaccttgaaacattccaccatacaagcatatagatgtctaagtactattgacaccagtgaatatttatgtttcatttaattttgcacaattaacaactctgtcaaatacgcctccacacagatctctaaaaggaatccctagatgtgaaactgctgggtcaaagtgtatgcatattttaagttgcaatgcatgctgccaaactgcccagcagaaaagctgtaccaattattgcgagtttaggagggttcctgctctcccacccagtgtcaatattgagttttgttgaccttcctttaatcttcatccatctaatggattaaaaaatgacctcatttttatttgcattacttgaattcttcctctagttaaacatcttttcatgtatttattgctccactctatgtttcctttctccattcttccattgttgcttaatcatttttgtcctttggtggtgcttccttgaatgggacaaatattaaccctttatcagagtttgctcagcttgccacttgtctttcaaccttgcttaatatgatttttttgctgtatagaactttaagtctttatgtggtcaaatgaaagcattttcttcctatgctcctggcctttaggtaaagattagaacacatcaa

SEQ ID NO: 52305 - DNA, 2581 bp, Homo sapiens
tccaatttaaggctaggaaaacaaaacaggcaacttaatgtaaacattatgtcacttgttttaacatctgcctcacatatttgcacttcaagtaaaaacacagaccaatttggaaaagccataaactatctaggtaaacacccaaaagctttgtccttgcatttaatagggaaaaggaataatgtgaacaatacaaggtgtccattcagctaccattcttcttggtgcctatctggttagatgacaagaatgaaaaaaatctgtcagaacctctaactgattcctcctcatggtcatctgctccctaccttcctgcatcagtttgtttctctgtactccaccaaaatccggcccttgcacaatcttcactcttaggcataggctgtgccatctttgccaactcaaacggtctctaggtttgaaaatcctatctgttaagttactcctacaattgctggtccctttcaaaacctttggtttttaaatccctgccaaaatatgtcaagtagctactgcaataaagtgggttgaagttctccctgctgggtaaacacggtgtgtgcaagtatgcctcaagctgcagagatattatctacaagtagacaaaaggtcaataatgagaaagcccctgacaaagtaagaaaattcacacccaagccacttcgcctcatctgtgtgctttttctcaagcatgacaaaagcaaaaaatgtcaatacagttatttctgagttagaatcaggtaaaacttcataggaacaagggaaagaaactaacctttctgggaagttcactattggcaaagtattttacaaaaatttataagtcctttgaaggtaagtctcattacttgaagaaactaaggctgagatggatataaatgtgactccactctctcatcctacccaaaccaatccgaaatgacgccaaagcaggtgagctttcttctttatactattatacccacctccctcaccatcaccaatgatgggcaatgttataagcatctagccttccttaatggactttgcctcagaaaacccaattttctagtatggcaaacagcgatttcaacatggctttgcttccctgaacccacactccaggactgagacatcgattgaaccaatgtttcagctcagtctgctgaaaaataaatacatgaagtgcaaatattgacgattctcatgcaactcctaaagacatgaaaaaggactccctggaacagtgcaaaccggcaaaagggaaacaatgggaggaggaggagacaagagaagaggcggcccgggaagaaccaggaaagggggtaacttgaatgacaggtcttaactgagactccacacgccaccgcctggacgcaagaactaagtacaggcgccgccgccacccggctgggtgcaaggggcaccgggacgcccgcgaccactcgcatggcgcggccggacacgcacctgtgatactgcgcctgcaggaactggaattcctctttaatccggtccagggactccgggatagtgaacttgaagggctggcctgcagcctggtgcggcgtctgggggcgaccagcgagggggaccgagggacgggaatgcgggcggatgaataaagcagtaagtcagagaaggcaagaacgggtgggacataaacataaagttagaagtggctgaaaacgaggccccaaactcgagtttgcccttcactatggggagggggaaagcggaccctccccgggccccggcttctaaagaggctcggaagctcttcccagtctccagggcggattgcgctaagtgcgcccgggtcaccaggccaaagggaagggggctccccggcggccagggaagaccaggccagattgtcggtgtcgccgccccttcccccacggcggcgataatgaccccggggaccagaggagaaaaacaactcctttacgctccccattcccagagtcgccggggccacctccagacgcaccggaaccggggccgcattgacatgtaaataggcgagaggagaaacaaaggggggggcgccctgcccccactcggggaaggtagaggggatatggctgcaggagagaaaccccagccttccccagcgcccctgtccgctcggtatagacgtcaagtaggaaggagcccaaagggagggagaaaattaagagtttcggcccactccccaccccaggaagagagggccccagacctccccagccttacaccgctgagggcgagaaggtccgccgggcctcagaagccaccagtctccctaccgcccgggagaagcgcctccccaacgatcctggccccccaccaccacccagccgcgcctcaccgggtgccggctctgcgggaacatcgctctggcggcggccggggctctgttccccggcaactcaattctccggtcaatttccaactttaatcccgccgaggaaaattaagccggaaagccaagcagaagcggggagcgcgctggccacgcacgcgcgctccgccgggcgcaccggccactcggcgcccgcagctgctccggctcccgctcccgtcggtgcgggctccggccctcagggccacattagtg

SEQ ID NO: 52306 - DNA, 1506 bp, Homo sapiens
ctgcgggcgagtccagagtagtcacagcggtggggccagcgggggttttggtcgccgcgggacgacggaggtccgggctggtggcgcgggtcccgcccggccgtgcgagggtggggtggcgcagtcggctgcctccgggacgcggggcacagagtacccgccgctgtttctgctgctgctgcttctgcagccgccgctcccaccgccgccgccgcccgcgcctctcgcgccgcttacattaacacgcggtttcacactccggagctaaccagcgccggccccgcccagccccgttcgggcggggggcgcgagcgcggagccggcgggggacgtgagcccgggaggttggggggtggggggggggcagaaggcccgcatcagccaatcgcgtgcgctgcaaccaacgtggggcgctgacgcgctcctccccggagcgtatggcagcgcagcgccggacggggcgttctccctccccccctcctctcgcttccatctccgccgtctcctcggtctcccttcccatcccggcccctcctccgccagccgcgtcctcccgggcttggtgaggaactgttcctggaggagccgcgggacgccaaaaccagccaatgggaagcggcgattcgcggagattggcactgatgatgggaaggtcggtgggaaggagagcggcggggctgggctgtcaatcaaagtaacgtggggctggctagagagcgcgcgggcgcgcgctagcgggagggactggcgagcgtgcagccggggaagctgagggctcgagttagcaaaaatcctgccacttgctcacttttccctttaatgaaaatcctcagatctaagtgaaagtaactcaaagactagctgcggagtttcttattggaggcggaggggggcttttggtaattcgagcaaatgtgtttttcagtgctggaccccttgtttgatgctactctaaaagtgaggccacattcaaaaatttatctgaggtttgtttttccttgagctgcctttttacggatgtacgagagggagtggactgtgcacttagttggaaatgcgtaaatgagcaacgccacggttggcgtaggtacaccagcaaagacgactgtgatgtcctcccaccccacccaccccctttgcacccaaagtggtaggatttgatttttattgcaggatttcaagccacttttcaaaaagatcgtcctgtcccgtttggcgggaaggattcccagggtgctgccagaacaaggcacgcgtgtccgcagatgagacgttttgcccggggcgcgaaatcccaggtcttcgtcttaaaagtcctgacttcgctgtgttgggagaggtggggagcggctgaggtttttaggaacttctcagctacaagactacgagtctgtttccaattcctgggaacaaagagagacaatgtaataaaccagcactgagacctgaaaaacctgtcccgcacaccccacccccacagtctgggtggtactcctgagctgagct

SEQ ID NO: 52307 - DNA, 2119 bp, Homo sapiens
acctataataataaacaaatatgcatgaatatagaggcagcctgaatagtaggtatattttggatctggtgtaactagatacatgggaagaaagccctgatttgtagcatttgccaagctatatggtgcaaatatttctaccatgtttgacttctggctaccacatggcatcacagaatgcgaagttgggaggagatacacccagttggttctgtgagatgtatgagcgagtcctacatcattgtttataattcttggaaagccagttgggtggtaggtacttggataagccttcttataatactataggaaacaagggcaaattttattggcaaggtctgtggcagagtcatgtaatgtgcattgaatctccatttactccctgataattctcatcggccaatggactgggagcagagatggaaacatttaaaagttgtggaacccctcagccctctcttcccttactactgccatcagagaggtcgcattcccaatggtgcagatacaagatggtgtaacccatatcaacctgtttccatgaatgtctgtgtggagcccaatgcccattcacccacactgggtatgtacgatgcttcagtttgctactactgcctaacaagctatcccatacaaaatggtttaaaacaacaatttgttgttacttctccaattttatgagttggctgggctcacctggggagttcttacagtctcgcttagagtctgtcctgtggttgtgttcagatggtgcctgggtctggggtgcttaggaagcttgactgtgattgaactaaagatgcttctttgcttatgtctggcactttggtgctcctctgcatagaggttcattcttcagatattttatattgtgaatggctccaaatgcagtatcaggaagtgcccggatttctaaggcactggggagagccacagtgtcacttctgccacacttatttctgtacacttccttgtttaaaatgagtcatgagatcgtgcagagtcagagtgggaggtaactttccaagggtgcgattgccaggagggaagagtcattgggagccctttttggagactagctaccacataccatgagtaagaaacaaacctttgtcatgttaagccacttagatttcagggttaatttgttcccttggcaaaaacctagcctaatctgattaacccagaaattggtactgtattagtgatgataagctagaaaaaacaaacgcccaaatatctgtggcttaacacatagtcccctggggatctgatgacactccaggactgcggccttctaatggtgactcaggggtccacgctgcttgccttttgttggttcaccatccagaacatgtgacttctagctaactggtgcagaggaaagagatcctggggactcataggtcttcagtacctattaaccagaactagtcatgtgccccctcactccagctacaaacaggctgagaaattgtggggagcatgtgggcatttggtgattagtagatgtcttggtcataatgtgatgtgggattcttggcctctttttttcctcccttccccttatcttatcctctgtaagaaatttaaaagaaagaaagagatagagagaaggaaggagggaaaataggagggagggaagaagaaaggaaggaatgaatgaggcaggaagggagaaaaaatggaaggaagaataccggcaggaatttgctctataggatgtaaaatgcaaccactaaaactactaaaaaaaaatactatcaacagatactgctaaataaaaactattaacaaagaactgtaatagcagaggctttcactgtgtttttaacctgtttcattttcctttttaatcagcaatgataaggaaactaaactggattaagtgctatcatcttggaggtgcaaaggcaaacaaggagaaagaagtgattgaagagcacttcagaaagcttggtacattcaaatcagcagggcttgattactcgcatcccaggacacttaaggaattggcaaatataattgcaagaccaccagcctttattttagaaaatgaaggttggacagaagaaggtcctgacaagtaaaatcagcagatggagtacctgttttttaa

SEQ ID NO: 52308 - DNA, 1240 bp, Homo sapiens
tgtagtgctgcaggcagccaacagcaacaactcagtgtattagttttccagggctgccataacaaaataccatagactgggaggcttaaacaacagagatttatttttcccagctctggaggctggaagtccaagagcaagatgttggcagtttggatttctcctaaggcctctccttggctttttgatggccgccttctggctctgtcttcacacggccatttctctgggctcacatatccctggtgtctctcttcctcgtcttagaaggcacaccagttagattggattagggcccaccctaattgcctcttttacttaaatcatctttttaaaagacctttttttcaaatacagtcacattctcaggtacgaggggttagggctttatcatacaagttttggagtgacacaattcagtccatagcactcagatataatctatttgctatctctgccataagcgaagataacctacttaaaaagaaatagcctgaaaatgtttgccgacctcctgactaaagttcattgctttgagcatgagagttcattgcataatctcatcttcaggcgggctcctgagcttttagggcagtgcaggggggaggtatccagtgtgagcaatactcccctaaaggatacagcaaggaaataggttctcattggaatttgtgtccaggcattgctgccaccagagacaaccaaggccaacagccaagtgtggactgcccctaaacactgagtcagcatcactgcacttgggagggttcctctacctccttaggctggaggaaagccaggactgtaaaaccaaagaatttgagccacaatgattctgttactggaaaatattgcagttacatttgcacacacatgcacatagattagaaaggtatttcacaacaatcttcatctgacattgtcactggagagcaacagtaattccttatcacttaagaccaatacccacaggttgaaagctaggaacactcccaatattctgtatgtaagagccaaggaaatttcacagagaaaagtgaggaagggacatgtaagggttacagatgggcattcagcaaacaaacttttacatatgtttctcaggattggagcagtctctgggattgcgcaacagatactggctgaaaacagtattcctgaaccagagcagtgactatgctctggctaacttattcttacttttttccaggtaatacataatattctttttttccttttt

SEQ ID NO: 52309 - DNA, 950 bp, Homo sapiens
tctgtccctgtctctttgtctctgtctctctttttaatgttccagttgcagcagcctaggaggaaagcagcagagaaagacaacctgtgaccctactgagctgcaggcagaagaatcttctttgtactgctcgaggtcaagaatgtgtttaccccctggcctaatgctctgaacttttgcatctgagtgcaggacttcaggacctctgaaggccaccacgcagtggaatgaagctccctagcagaagcaactggattaaacgtgcaacaagaccagtccacaccagccccccaagtcactgaactcaatgacatcatgcccaggcagagaaagtcaacaggcctctggcccgggtcccctccactcctctcatttcttctgcctctcgctgttcttaacccagggacagtatttagaaagcagagcgggttcaggcagccctctcaattactttggctggaaccttcctgagtacattttgctatctctttgtgatgtaaacaggggcattcacagttggcaggggatgctctttctgttttaattacacatggcataattatagtcccagggtctggaaacagcacaaagttctttggagaacttcatagggatttttctgttatgacatagtttatcaggagaaaaaaaagtaaggcaaaagacatttccaaagaggaacgaacaacactatttatactagcattccattccctaatgagcagatcacaaaattggagtagacattttttctggaggcgggggtggagtttcaaaattttggactcatggacagtggtggcaaaatctagataaatactaatgaatggatgtgggtggagaaggatatatacgtaaattttttttacttaagaaagcaattagaaggcatccagctgtatctgagggaatttgcacgtaccctggaccctgaggatatggaaaaagat

SEQ ID NO: 52310 - DNA, 740 bp, Homo sapiens
caccatgttagccaggctggtctcgaactcctgaccttgtgatacgcccaccttggcctctcaaagtgctgggattacaggcatgtgccaccatgcctggctaatttttgtatttttagtagtggcggggtttcaccatgttggctaggctgctctccaactcctgacctcatgatctgcctgcctcggcctctcaaagtgctgggattacaggcgtgagccaccgcgcccagtcacaggttgtgtttttaaccatgacgctatgttattctgcaagaactaagacattggaagacaactatttctattttgaaagagtgactcattgttctaaattgtttggcatttgagtattaagcttcagggcctgatgactttcttatttaattttctggttggccagccgagtatttcctgcgtctacccagttctcacagaaagtagctgaggctgacttctgggcagggtaaatcagttacaaaataaaggttaggctgagtgcccatagcaaagctagaaaaggctctggagtgatttcccctcaacccagagcagtttagcttggactcagcagcctctgcaggatttgggggctcctgcaagacttgagtccccttcagagtgcaaggagagcaagattcacagggtggagggagttaggggggagaaaaaaagaagacacagtttgttgacaccatcttgtctttttttttttttttttttttttttttgagacggag

SEQ ID NO: 52311 - DNA, 3301 bp, Homo sapiens
ttagccccaagtctgattctttggcagcctgagttaagggggcatagattggtctcctaaaataaacttttaaaggctttcctagtgtgttttccttaccttataaaattatggaatcattctacctaggatacattatatgaattctgatcctcatgtactctttgactactctgtctttttatttttggggacttggaggatataaaaagatgttgaagagtcagaggaggagaagtattaagtactatggctgtctcacatcaccttccattcagttgagaaatgaccacttatttttcttctgattggatataagcatgtctctccaagccaaaggggtagagaatgggtgaaaaagacaattctgtagccttcaactaggccatcttcattttcagagtgatgtattgatcagccattgccttctttgctcatttcagctccattgctttaatagttaaaggaaattccttccagatttagacaatagttagtcagtttttagcattgctgtttttaatctctttttctgggtccgtataggtattttaggataagggagcggcagccagccagatgccatttaaaactagaatctcccataagctaaactaatcttaagggaaatttaaaagtgagtctgagtgaaagcaagttttttcaaaattgaattgaacaattaagttgctaaaataatctcttcatttaaaaatcaatgacatacaaaaataattttattgtttgagtttttaaactttttcaaatctgtgaatcaagctcctcttggtgcttgaataggtgccatctgctgagttgtaactgagccagttcttgcatttgggcctaaatttaatatttaattctgatagatgaaacatgcatctttaaaagcagtgagccatttgtagatttttagtttaatacttgcctaaaacttagatttacttcttagtagtaacttacatagatacatttcttaaatacacagatgcttctcaacttatgatgaggttacatcctgataaacctatcataggctgatttatggtggtttgactcatgatttttaaaatttatgatggtataaaagcaatacacatttagtagaaaccgtacttcaagtacccatacaaccattctgtttttcgctttcagtataatattcaataaattacatgagatattcaataatttattataaaaaaggctttgtgttagatgattttgcccaaatgtaggctaatgtcagtgttctgagcatgtttaagagaggctaggctaagctatgatgtttggtaggttaggtgtattaagtgcatttttgatttacagtattttcagcttatactgggtttattgggatgtaaccccattgtaagttgaggatcatctgtacttgcttatacataacctatcctaggtatcagttagctattatttaaaaaaaaaataattgatatgcttggaacaataaccagaagcttagaacagttgaatctttaactcaactgggtggtttctgctgacttgaactgggtttggcaaagctcactcacatttctctggtcagctgtgaattggctaggtgactttgctaatcttggctacacttaattgtttgtctggagctttgcctgggacactagactgactcacctctgttccatgtgtctcatcctccagcaggctagcccaggcatgttcttgtgatgaaggcagtggagagtggagaagaaagagagagagtgaataagagagaacaagtgaacacagaaaatgcaccatacaccttgaggcctaggcttggaactgacaaaatgccacttccttcacattttattggctaagcaggttgcaagggtccatgaaatagactccatctcttaatgggatgaactgcaaagtaacatttgaaaggttgctgatatacagaggggtgaataattatagtcatttctacaatcaatacactattttaggaaaggatggaatgggactagaaccctattttatgcctctagacccgatttctttttattgcactagtttttcttcctacttacctataccatgagtctgaatgtttctgaggaaaataaaaagcatttatgttttcagcatagagaatctatattgaaatgttaccaatatagagaatcttttgaaagttaagaaggattttttcacattgctttacctgtttatttcttttgactataagtctctggaaactcgaacaataatattagggttatataaccctagttatcagggttttaggttcacttcacatcttatattttttatcattagtatcattagtatttgtgacagattctttttggaaatcaagttataggataagacataaaacttcagggtgtgttttttctcacattgatatttttatcatagcccactcaccccttgttactgcccttgcctttgtggacctagagacggatgaaaaagataaaattgttattgaattgtagcagcttcaagctgtcctgtttgtttgtccccagatctttctatgccagttccaaattccctcttgccaaaattaggtttggaaaaataatgtatttcgtatatgacatatgtttgaaattagcaggaaatgcagccaagatttggaaattaacaaggaaaaagttatttctgaaaacagttgggagccaaagaagagtgtttggcttaaaacattagggtatttcattgtttagcaaattaaataattcaaaaaaatccaagaaggaacaacacagcattttttttcaatatatgtggatagttcttatttaagaaccttttagacagaaattaaatgaggaatccaaatgtaccatctacaggatatataatcttctaatatctagtaaatctaattcttcatgaatttttttgaaattaagtcacatacttctgtttgcccatatgtgaaaaagagatttactattgatctgctacttacaaaataaacaggaatagttgaggggacccagaacaagaatcagatcttccctttccaatatgaaggactatttggacctgacttcttgataaacacattatcatttctgtattaaatgttgaattgtctcctctagcaatttatctctttgaattaatttaattcaaggtaaggaacattactaggcattgtctatacaggggagtaagatgataaggaggcatgtagattgacaaactgtggtccttaaccacaggagacttaaagtctgattgaagagaataggattatttaatgcgaggtattgttcttttcaggccc

SEQ ID NO: 52312 - DNA, 907 bp, Homo sapiens
tactacatacatacaataatttttttttgaaagtgagggccctgataaggaaagagtaggacaccaaggccggtgatggagatatttaagtgggtgaacctaagaattttgaacacttccattaccttgaatctctcaagagtatcagaagtaggcctttttctcttcataaagaaagatggtcttatcgtgattggactctgcaatgtttttacataaagcagtttcctggcagatgatgtttgtttttactgtccattactactaggacatccaggtagataatcaaagtcattactataactaatgtgcataaggagggagcaggggtggggacttggaaagagtagatcccagtgggccaactggacccactgaaattctggcttctcttcccagtggctgttcagaggagcaaataacacaatccagaaatgagaagtagcttattcaccatggagtgaactttgaccaatgaaggacagtagatggcaaataaactgctgacctattctccgaaagatggattgcttaagttacagtggttttctatagcaaacatcctgtgcaactgagaaaaccagctctgttttcctgaacacctctggctatctgagtgttaaacttgcgggatgggagaaggtagatgttctggcaaagatctctggagctgattataataatttgttgtgatggttccttgaatcttgaaagcaacaatggttaccattaaacaagggtggacataccagaatgtccttgacatggtatgaaggaaggaatcagaaaactcagagaaatgagaatgtatctgtgcattactatgtcatatctgagaatctatcacatgactatgtaccctgggggtggggctggggacactaccttcacttaggcaataaagaat

SEQ ID NO: 52313 - DNA, 1467 bp, Homo sapiens
gccatcccaattgaccctaatccaaccaatggtactgctggattttggtgactatgtaactgcctgtaaataggtgtctaggttggactgtcatgctccctttaggttataccactcatcagcaatacagctctgctgctgtagcaaatcttaatattttccctagagataggccaattccaaggtattgaccagctctgatcctgtttaacttacgagaacaatcaagctccctacttgaggtgataccatatttacagttcttgggaaagaatgactaaataaatgtcacggagaggaagccataagaggcagtgtctgcctctgcctggaaatgctgtgtgtgtctttgattctgtctccattgtcacctggaatgctttacctcggttgtttaagggttttccactgcagtttctttttgctatctcttgcattccttcccataaagtaggcagtttacagtaatagcattggaatgaagctctacttcaggcaggaaaggttaaacattttaaaaatgcaaaccagataaaattttaaaaacctcaaaatagtcttggagccacaatgcctctgtgccatccccagccattctctttaacaaaagacatccctctcttatgcaagcttctcatttgtcagaggagagatttccctgtctcctcggcgcacactctgtataatttaagatgactcactgtacaggaaagttcaccttccattagcatgttttctttagtaagcactctcttgcaagtgctgtagtgtaaacatgagtgcctacgaatatgaacatttattaaatagcactgatgaatatttcaatacctcggggagagcaattcacagctcaatcattcaagctgttttaagtgcagcacaggacaattccactacatcttccattaatatttaattgcccattttattctgtttacctttttggttaatatataatttaaagctcttctactaaaaagggggaaaagagaacagctgttcatctgcttttaacaaatctctggtgagagcttttacctcatttaaaattcattgcaaagagtttttatttaatatcagtaacacaaaaccttaggtattaaaagtaaaacttggaagtgactgtcatgcaaaaagcttagctgtgacttgggtttgattacacatccattcctgagtggcaggcattgacaggaaatgtctgaatcgccagcaatggcgccatgtgtcacgtcctcatgaaatagaatcaccgtaactcgacctgacacattctgacaacatgttggaaagttgttatgcaccctgcagaaagtcagtactgtcatcctggcaatgcagattttactgacgagataaaacacatatctgcttgctaaaggacaagggagtcaaataggtgcatggccttgaggatctggggaatccctgaggcactaaagattcacttctccttggccctcc

SEQ ID NO: 52314 - DNA, 2560 bp, Homo sapiens
caagactcagatctgggaaaccatgttcacatttcaatttcttcccactttgcttcaaagcaacctccaaataatcctccttatgactgtcagtttgactttctcaggctttctctcacccgtctcaatatctgatgccttttgcatttccaaaattctatgatttgctgcctggattatgacaaatgatgtagaggttaatgcaaattatctcttcatttatctaaactgttaggtgaagccaaaaaaaaaaaagtgagatagtcctttggactattgattacttcaatggtttttcaatccacacacacatttgaattacctaaggaactttaaaaataaataatgatgtctggatccaacctccagagattctgatttaattgctctagggttgatgtccagacatgagtatttttttaaagctccccagataattctaatgtgcatccagtgttcaaaaccactggggaaatttcttctctttacccccttctgttttcttctctttatctttccccaccaacttttgaaaaatgttttggtttctcaaatacaatcaaagttctgcatcttggccaacattaatggtgttactcaaaaatttaacatctaaatgtgtgtgcgtgtgtgtgtgtgtgtgtgtgtgtgtgtgtgtgtgtgtgtgtttgcttgctttggctaccatgggaggaaaggggaaaattatggagaagggtgttgtagaaagagatcatgggctagagacatctggtagcatacatttataattactagaatgtagacacctcaaagccagtgatttggtctgttttggtcattgctgtttatccagcatgttgaaaaatgtttggcacacagtaggcacttaaatatttactaatgagtatttccccacatctccctcaaccatgctaatccagagctaagtagaaccccatgaaggttccccatgctaggggaattccagttttgtctccacttggaatacttgcctgcccatctcttcccaaactctaagtcctgtcttcctttaaggactagctttagtgaactttctttcacaagcctttctggttctcttttgaactgttacaggtgattatttatgtttcactcattgctgctacttcccactgcctatcttgtgtatattacagtttatgtggatgtctttgcttttcttctagacataacccattttatctttgcatctcttctagtacacatggaaatctctcagttaatatttgtttgaatgaatgaccattgcttctggtatgtgaaattcctacattatacaatgatgagggtttaaatagcatttcataatgtttgattttgttttatgctttgtatttttgaaacccatattatatatatgatatgtatgatatcatatctgatttgctcctcaacacaaccctggggaatgaaacagatggacattattgttgtaaatgaaaagaaactgaggcatgaaaatgatattaagtgatctactcaaggccatgccctatcaaaggcagaatggatggagtggctaaatttccagctccatttttgcacacagctttgctagggaacattgtgttttccccagcatgaggtaagcaaactgacaatttgcttttgtttacttccaaagtccgcacctctccagctcagttataaaacctaagtcctatgcttttagacagaatacaattcagtcagatcagttcttgtttttgttgatagcttgtgcatcatgttcttatttcagtgtattatgacttatttattttacttttcatgaaaccttcaatttgttaattagatcaaaataatgccagaaagggagatgcatgtttgtgacaatttggatagataatagccaggctgtgagaagtactgcattcaagagaactagtagaaaagcaatgagaaccaagtggtatgcagcttcccagctggttttctctgtatatcttttttaaacatttaaactcttgcccttgcctattcggtagtttctaatcacccaatcaacagcatgaacctagggtgcagaaattccatttcttcatatattttagcccaaaggaatgattatgaatccatactaaatgacacaatgttttattttttcataaatacattaaacatgcatcaatgaaaacagcattttaatcatgtgagcaggactttattgatttatccaagatggaattaagcaatattttttgacaacacaaggagtataaatagctcctcatagtatgatttaaatttgattattacatagttttaatcataacttgtgcacatttttcaaaagtagaaataaaacattgtcaagttctctggaacaaaacaaaattgttttttggtttgtattagatgtagttacattgagagttgtgcttgagtgtatgtatggtgtaataagggataaagtagccttgtgatacttttttcatttacataaatacagttcagggaatattactaatgaagtggatgtgggggtcacctagccaccttaggaaaaggttactactttattttaagtagccca

SEQ ID NO: 52315 - DNA, 1701 bp, Homo sapiens
caggtaagaatataaaaatacatttgctttttcccagtggttaattttctgttcctctggagatcaatatctatttacatttacttacctaaggagagaaaggctagaaatttttcagaggacaaggttagaggtcaggaaattattcagttgcattcagaaacttctaagaaacacttgaaacatttgacatgttgaagccaagctcaacagctcaaacaagataaatcttattctgacttatcaatatgaaggaaaaactattagctttgacaaagtcattgctaaaaagtattccaaagctgaaaatttggacatgtcattgtcctcctaaaagttttccatatctttctatcacctataggataaaacctaaactctataacatcattttcataatctgggcttcatccatctgttcacttgcatctcttgtcatcaaatctccccactctactgtatttaagaatttacaattctctgaatactctgtgtgtgggcctctgggtatttgcttatgctatgccttttgcctggaatgactcatcaccttgctcaactggaaaacacctactcttctttctaaatgcaactcaaatgacacctgcttaatggagtctttcctgccttctccagctgacatagaggatccaagataggttatacacaactctaccctgatcattatcatcatcctctattagatttgtctctttcctggctgtctttatcccagaaggcaacctccttacgagtaggtatcatatgagagaataaatgattgtgtcctattcccaaaatgattccctctatatacgtactcccaaaggtgggaaagtataggtaaccaatgactctcacgtgtacttcttcttcagtaaaatgtttactgtcttcagtaagtctttgctttttgaggtgagcattaacttaagacctagattaaaaccaaagcaggtcatgaactgttgtggtcattctcttacactttgcccacacttcctatcaaactcctgcctctgttcctccttctccatgtcaacccttgcccagagtgacaacagtagaaaatgtctttctaacctcagagtaacagtcaaaggtagctaagatttcataatctcccaacatgatgacaaaaaacacacaggtaaaagcatgctttatagacatatgaatcctaagtaaaccttaaatgtttttctattcacctccctccttctctcttgcatttttggaattagtccaaattccttttgagattaccttgatctttaagtcctcaaacacatctaaaacttgtcttgcttcatctggtatagtttctttttcatgacattataagaatcaactaaaatttcaagagtccagaatgttgcagctgaagcactttcatatttgaaaaaagcataatcacaattctttccccatatgctaccttctcagcagggctatttttttcaccctcagaaatgtatagtgtcagaattcctcaaataagttaagagttgagaatcaaactcagaatgatcctgtcactacattccagagggaatgcctctttgcccaggtccctggaatctcccatttccaattctgtgctgtagacctggaacaagcttaaagaaccactgttcaaaaaggatacaggtatctattttcattcaattcaacatgtggtctgagatgcatatctgaaag

SEQ ID NO: 52316 - DNA, 1276 bp, Homo sapiens
gtttgttttattgtaatatgatgccatccttaatatttctgtaagaaaaatataatgtttaagcaataagtcaatggacagacaaaaataaccaataaattagcttttctttttctaaggcccataggatgttggtctaatgctatgagcttactaagtagaaaacaagtctagattggagtccctggaggactttcaaaaggtcagaacagtacctggtttcccacatgcctgtgcctggactttgctactctggtaaaatgtctctgtagcaaacaaactagcagttcaacctgaaatctgcagagtggatcacaatggtattcaccagagtgaatgttgttcttacttcttatcttgttccacacttccaaagggctcatccaagcgttgatttacagggacagtttgtgatttgttccagattagctttttttttttcttgacagagtgatccaaaagagagagcttcacatacaatatcctatgcctactttctcagctcagagagagaggctcagtcattcataaactggagcaacattcatgtactgcggaccactttgaaagacttatctgtctcctgtttacagatgtgtacagcaagctgcaaagcactgcctgtccttttactcacaatcaattgcagagaacatgaagtacagaagacaacagctttttttttcttttggaaaatcccttaagtcctttccgtgctgtgctatcattgttcaggtgctaaagtgaaataaatgtgtcgtctaatcactaaggtgtcatgaactcaaaaatttaactggcagtgaagagtcagggaacattgtaattttgccttgtcacaggaatactagttcaaaagtgggaggaatgtatttgccaatatggtctacatcttcaaatgcacattgtttactcaaacttcataggcacatgttcaatgaagggcataaaaaagacatttacaaagctcattgaaagctggcattaggaagccctgccacagaataaaggacctattaatcatattggtgatcatagtgctttctgcacaaggacaactgatgatttgactgaagtccagggtaaagagcagaaaacattaagcttgctagagacttagctgcaagtcctgctcactgctccagggtggaaggagtcttggagtgttacctgaagctttgtttacctggggtacataattgaatattcctgttcaataacttgttgatttaattaagcaacagacctgacactttaattaatcaattatttactg

SEQ ID NO: 52317 - DNA, 881 bp, Homo sapiens
tcactctttcactagaaggaaggttacagcatctttcacaaaagatttgcctgcttgtaattactgcctgcagcgtacagacaaatgcaatttttaaaatgctaactgtgttatacttacactcaagggatccccgggtacaaatgtaacgcggcctcaccagtttgtcttagtgagaccttacagtgctgattgaaaacagctgaactaaatcaacagttaccttgagccaggggcctttggagagcaattagagtcaaggcttgggttttgaacccaatatgctctgtcagtctcaatgatttgtgtttgttgtactcagtctcatttcctgcatgaaatatgaggctgtataaagagaaaaaattcccaagattaaaaaatatttgacctcagtgcatttgtgagcagagaagtacacatgtctaaatgaccatttgggtttgtagtacaaagttctattgatgttggcagcccaagcttcccagtctcaaagccacatgaatggtttcgagtttcagccaaaaaatgttttccacatgctttagtgtgggccaatttacacagtagatttcgtggatactgtggccaagtgcttcataaagggctgccttctctgggatcagggaaaccacaacagacacattgctaatgcaatctaattatctgcttgaatatttttccagatgtatccaatgtctaaaaatactgcaataaaaaaggtattatttgactccctcgactgaaacagtggcataaagaacctgtttgtctagagggaaagttatgacattgtacttctatgactgcatttaaatcagtcagtcgaaacagtacccacagggcaggctgtactttctgtttgaatgagtcttccaaac

SEQ ID NO: 52318 - DNA, 1436 bp, Homo sapiens
ttttataattaaatgaaacaaaataaaatccttttcactttgaggaaaaaaatacataattctaggaggaaaaaggcatcaacaacaacaaaatattaatttctggctcttcgctcagagccatgtctttcagactttaaccctcaattgatgggtcccaccctggagattctgattcaataactcaggatggggcctgagaatttccatgtttcacaagcctaaggatgacactttgaggaacttggctgtaacagtgaaccatcatgtggatatgttttttggcttatatttatgactgagtcagttctgcctcaaattatttttttgtctgtgactatcacagtgagaagggaaaattcctgcatccatatccacttaacttaagaatctcaccatcacacttaatgtgttgtttctaattccctcacatagaagcatctggagctaaagaattgtcctaaggctcagttccactggaaaagtgtgtttctaccccagatgagacttaaacccagaatgtttagttcagcatcccagagtttaatccatttgggccttaggaccccaggaccctccaaaaccatgcattgagaaaacacagacagctatctaaagtcagggcaaatcaatggggcagtggcttggaacgagtttcctgttggagctctggcactagcacgtgctctcagtaacaaaatcacaggtcatccctaggcaacggattagctggtcagtgaactgaactttgtttcatcaccgagttttatctgaaatgtcaaggaagaaaaagtcacagagaaagaaggaggcagggcagggagagagagagaaaaatggtttctaagagctctcaatattaacttactaaggggtgcatcctatgtaaattatctactttctaatttaaaaaaataacttgactgaaaataagcactgggttaattacaattttgctgctttgaccacatcactgaggtctaaatgacagaaaaaaagtaaagtggatcttctaaccacagaatgccttccatttgcaagtcttcgccacagaagcagccataatgctaatatttatgggagcttactgggtgccttctgttccctgagttagtcatccccacgtgattactttaaacaggaaagcccaaagcaccaatctttgaatggtttcagggtcagtgtcactttggcaacattgttctttggtattttgctctagatttagagctaaagaacctttcttacgtatctcacgtgtgtgtgcattcattacctcctgcgaatgcttatgtgtgatatataaggaagtgtatgcaagtacatgtgcctgaagtaggggtaaatactgcacttgatttatttagggggtcaattcccttccttcttcctttcagtggttctcttctccaccttatttcagaaggggaaaagga

SEQ ID NO: 52319 - DNA, 616 bp, Homo sapiens
ccattctttgcagggttttattttgaggatgtacattgctgggtaaagaggggcctttagggtagagtatatttcaaaacacaattaaaataaactcttcaagtggaaatgtaaaatgcatttgtattctattaaagcctttggcttatcaactgcagagtgctcctttacaaggtcattagtaaccagcatcacacagtggccaacaggcatcagctgcacaaaaacagacaggggcccaaacaccacaatcacttcctgtacctgttcttgtttgcttgctgagccctcgaaattgggagttgctgaaatacataaaagcgtaacagcttgagtcaatatttgccggcctaagcgagtgattttgtttagtgaggtgactgaaccccttgaataaatacatctccttgtatgtaggagaacaaccccaggcaggcccttcgaggagggctaagggcagaactagaactgcccttggggtggaacttggggtggggggcagcggcgctgagtcttccaaggatcttgctctggttctttccctgcaattctctgcatctagctgcactctcctgcttctagacgaaaggttcgcatcatcatcacctgggaggct

SEQ ID NO: 52320 - DNA, 1197 bp, Homo sapiens
ctgataatattacagaattttaaaatgccgcaatttaaccctcaaagttggcagtccatatatgagaaaagccaatagtcttatttaaccactacaccccacagcaccatgcttgataacacagcatactgatagaacacacgtgccttgttaagcagacatatgatgagaatgaatagggtaatacgtacaatctccttgggatgggagattgcagacgctagcataaacagtgtgactatttcctctctggttcacccaggctccacagatgataaagcaaaatcgctacagcaaagtttatcttctgtttgtttgtcttcttcaaagtaatctcaacctttctcagtttatctgaggtcaaaatacctttgttttaatgaaccagggtaaagggcagagaatgttaccaccgaggctgcctctgagctgtctttaatatctgagaccatatatattttttccttaagataagtgtctctgtcagcataaaactcttattctggttttaagccattcaccgtccccggttaccgtcactcctgcccactcactctggctgctcacccgaaacctggaccagccctgccagaaatccagccctccctggaagataacttgtgtccgaaaagggttttgatatgagggctgtttatactcagtagtatctaagtggagagacctcataggagaagccccgcttattgagaggtgtgtctgtgtgagcatacgtgtatgtataaaaagacatttcagttttcaataaactgtttactgttcaaacattaaataaatgtagaactgttttaatcagctgaacaaatatttaatgtacactccagcataagagctatgtttaaaaatatcctctatgctgctaagacacagggaatttatggaaaccagtgacctaaaaggtaaaataaacattcatggggggaaaaaatgaagcacatagttttaaatttaaactgatctccctactcttttactagcatccattagtattttatccctctgtgtgcatgtgtgtgtgtctgtgtgtgtgtgtgtgtgtgtgtgtgtgtgtaagtcctgggaattgctgattggattgcacatctgcttacattttctagaacagctagtggtcaggtaactaccaaattaatttccagtacattgctgtgagaaggtaaaacacagcaaagttcatat

SEQ ID NO: 52321 - DNA, 1227 bp, Homo sapiens
gtgactaatattcacttctcaatatttgtatgataaatgaagtccaaaaatactcttgatattaattgacagcctttgtaaatacccccatcagtttggaatagaagcaggacccttgcaaagatcagaaggcaatgtcctacagtgagaaaattgataccatgaaacagcaattctctttgaagctcagagaagaggtccacagaggaaatttaaacacacaaaagccaagatttgccaactatggggaaaaatgtcagcatctgaaactatttcaagcagcagtctaatttctagcagtggtaaattgtcaagactggactgaagaggaccagtgaagtggtgctttcctcccctaaatctcgtgtcttaaacaactctcatagcaactggttagtagggtcagaggacccaagaagccaaagggcatttgtctcagcatctgtggagttcacagcacatgttatccttggacattacccagtggcctggtgtggacagaatccactgggcttagtttcatagagataagcaaacactaacagcaactgaaagtaaacttcagaaacacatttttataaaggagcctgtgagtctgagattacacttataaaatcatctgtacaaacactcctgggaccactcctccctccagccaagtcatatgtatatgtatacacacaagcctcttgaatttttatttacataacataaaattaatcattttaaagcgaacaattcagtggcatttaatacacacacaatgttgaacaaccactgcatttatttagctacaaaagaatttcatcacaccaaaaggaaacctcatacacgtaagcattcactcctctccctgccttccccaacctgtaacaaccaccaatctgctttctgtctgtagggattttcctattcttgatattttatataaatgaaatacaattggagaagtggtctttttccacttagacaattttttttaaagattaaaaaacagtttatatattttttactatactttattttggggtccaaatttccttatttgggatgttaaaaactacactgtctgtttgtacagctctccacaaagtacctttactcccttcttgtactttgatcattacagctattttacaaagcaggcagggacaaccttattatcaccattttacaggtgagaatattgaggcaaagtgatgtgctccagcagccccacagcaaagt

SEQ ID NO: 52322 - DNA, 982 bp, Homo sapiens
agctgccaagtcttcaggtcttgcgtggtgtctggagcttggcttttctatctgtacagtaaaaagttggacagaaatgacccttaaggtctcttccagatcaagattttacaatgtttagctaagcaccagctcaaactcaacactgaactcatgtgcttcatccacacaaggtgaatacaactatttgaaagatgagtcagtcaaaaggtttctttcattatcaatgccaacagccattccattttgctgaaaattttcaggacatcgtgaatgttctttatgaaactcactatcccatctagattttattgactaaatattttgtatgtaaatagacaatgcataaaaaggccctagtaatttggtgatggccacattcttgcctttctggtattaggcaacatttcagacgaggagctcattccatggtagagctgttcatattcatcgctcttgaattgtatgcagtcaaattagaaggactgccaaacagcatttttagcatgttcatagacatgtgtttccaacctggtgcttaagcccaatcattaacttgccatcaaccaaaaattaatatctgaatcttgttatgccccctctatagattttcctgggttaggttttatttttagcggtagcttctgcaattcacccaggataggggagtagtcagatttagcagggctagactgccatctagagaccagaatttgagttccaacgtcttgctcctcagtgagcttgctctttaacaaaagcagcaaactgccaaatgaagcttgagtttgcttgggcaaggtgggagatgcaccccgaatctagagatcatcaagagcaaggagcttgtggtggcccagctctgaaagccttccagtcactgaaggttaggtgggaccttaatgacaatgagtagatagaaccctgccccctggctcaggagtgagctcttaaactttgtcttataagcagaaccccattt

SEQ ID NO: 52323 - DNA, 1832 bp, Homo sapiens
gtacactgtgaagagtaatcctaactggatattattatcttttatactttctgcttttcattgtaaactcttggaaaccagatatttatctattatccagaatctttgcatgtaatgagtgttgtagtcagtcatctttttttagcaaggggcagaaattcaacttccattaggttaaaaaatattgtcttgtatattcttaagcctaggagtagcctgatatcagcttcaggcaagttgaatcaggttctctaaggaagacagaagaatttctctctccatcccctgtctctggttttctctgtattctcccaaggttctcttacagcaggattaaaggtggccccagaaatattacacttggatagtaacaccagcagataaggagctcgtcttctccataatgttagcaaaacatcatgaatttattcttaatggcctatcataggttgtgtgatcagctgatttactatatccggtccactggaaaatgagtcactggggccagaagaagaatgggacacaatgactggctggtctaattcatgtgcccaccagtggagcagatggggaccaacttatcttttgttgaaataagtaaacaaaaaggagctgctctggattgtctgcaaggtttgcgaagaattagctgagtcagtgatcagtaaacaatgccaggagcttgctctggtaaggtctgcattctttaaaaatggtgtcatagatatcagaaagtgaacatggttaaccatttgtaatcatcagaaaacaagaaaggaaaataaataaaataaaatagaaattgtaaaaatcagcacttgaatcacaacacttacagttatgaaaactagactaataacacatatcaatcagaaattcttgtattacagttttaagaacttccctgaaaagccacagggaaaaggcaactcttatttgaactgtggaatgatctttattgccaacaatatatgtatccttcaaatgaaaataaattactcctatgaaaacaatgtctatgaaaacatgcttaaacttcatacattatacgttaatacattatattttcaaggtgtaggaacctataaaaatgtgcaatatggtttttctcaagtgccataatttacattaccttatttatttaagcaattttaatcaactccttaaaagctttgagtggttcttacttcaccaaaccagaggacaagcataagtttcaagaagccagcaactgacaagcctccaggaagagctgcaccacaacatcacaggtggctgtcctcacatgtctatcttggcatctcacaattcacatcacttgcccaactcttggcaaaagtctatttttacatggaaatgaatctctatttgctcctgatcacaggattaaataagctggtcattccgaaataattctcaaaatgtttcctcaaaaaggttatgctttcctaatttttactcttaggaatttcctaattgtaccaaaagcaaagatggtgttttctattttaaaaagttgctacagaccaatcattttcagctgagttactatatccagtacgaaactagggaaactactttttgccataacattgccagaacctaaacatttttcccactatgatgagcgatagcactgaaatgaacgtcatcatgaacaaacacaaaaagattgaatgggaacagtttgtataaaagcatacactggacatttccaatctagtcatatagattaagaggatgtccatcgatgtaaataaattcaaaggttgaatctgactttctcctcccttgaagaacgatttgcagatattggctggcctttttttttt

SEQ ID NO: 52324 - DNA, 2020 bp, Homo sapiens
tctccatgcccaatattccccttactttccaagctggagggagaagttgggaggagaaggaagtgagggcttccaatgaacaagcacactgacaaccttccagggatacttccttttcaatgttctgtctcagatgtgcaaactgccaaccaaaatgatgcctttcagagcgtcttaataacgacagccagagctcagcaaaatttcagctaaaatccaaacataaagcagaaaaacacttaacagcactgaaatgtgtgtatcgctggggcatgaagtgaaaaatagcagctggagacacccaccacaccaaggcatggacaaatgcaaacgaaactcaaaaagaaaatctgagcctctctccctccaggccctgaaatcccacctgcaggcatccccttacctcctgataattaagtccgtgacttgacacgttatttctgtcagagcagtaagagcagagaatatactgtgtcattttatcattttattccgtcacataaaaagtgagtttttcagttcacaaaatttgggtcaaatctctgctgtttaactgggcaagtcccttaacgtctgtctaatttctaggtctaagttcagaaataagctagcctaccttctagggatgttatgaaaattaaatgcgtgaactctgtaaaatgcctagcaggtacatcaatcaatatttgtgtccagcaatgtaaaagcccaacaaagtttccttttctatagtcttaggaaaacgacaaatcagaaaactattacagaggacgccaaattggcaaacagcccgggccccagccctggggtgagagcctaaggcctggggtagaaggtgacgtaaccaggacgcggtgagatgtggcgcgcgcgcctaaactcgcgcggggcgccagcagctgcagatttcaggagagctcctgtaatgaacacgccgccctttgcaggctcaggattcagcacgtaaaactttctccccaaacgctgactctctgactcctttttcttaactctagcggatcttggaaaagtcaaagcgagtaggtgaaggaagacaagcaactcacagagaagactaggggggggggccattgggtctgcacacctgcaagtaagtgggaagaagcaagcaggaagcgccagaataacctcccgcccccagctcacactcgcacctgggaatgaacttggcttcgtccccaagtcgcgcctggaaatcctgccaagcccggccgggactcgccgggccgcacgaggtggccagcgccgccgccgcgtcctcgtcgccttcgtcctcctcgctgtcgtgtgtctccggccccgcctcagacacggcgggcgcgggatccagaggaccccagtcccggcgccgccccccgcggagggacccgaggaagccacgcgcgaactcctggaaggtgatggcgccgtcacggtcggcgtccagccgctggaatactgcctcggcgtcggccggccgcacccgcagctccgtgcacagtgcccggaactcctcgcgctccaggcgccccgagcggttcgcgtcgcaggcggcgaagactgagcgcagccgggccagctcctctccgtccccatccgcctccatcccgcctggcgggggcggccgagagggctccggagcgccgcggggcgcagggccctccctggaaggacggggccacctgctgccgccgggaggcccggcgagtttggctcgtccggctggttcggccacttgagggaacgtcgggcggggcgaggaacgtcgggggtggccgagcggctcccttcgacgacggttcgggccagcccccaacaggtcccgggagcggtggggtgcgcccgggctccaggcaccgccaaggagcgcctcctgcgactgagcgcccaagcgccgaggtggctctcgccactttcccggcgggtgcagctccgcccagccagggaggaggagcgcgcgccaccgcttctccagttcccacgccccggagtccaccgctgcttgccgcgcaggtggggg

SEQ ID NO: 52325 - DNA, 1367 bp, Homo sapiens
tttaccaatggttatcctacatgatggcttggtgcaggggaagaaagctgaagcaacagctctggtctgaagacttcccctccacatcaagtacaccactggcaattttgaagcaagccatggaggagttggcagctgcaccactctctttacacagacaacaggacaaaattattgatatctctcagtgcagccatgatatggtttggctctgtgtccccacccaaatctcactttgtagctcccataattcccaagtgctatgggagggacccagtgggagatgattgaatcatggggacaaatctttcccgtgctgttcttatgatagtgaatgggtctcatgagatctgatagtagctatttcctggttttcatctgttttgtagatgtagacaccttcaaagacaaacttcaccttttaaaaatgtgattaaaaccattgaatattcaaaacaatattaaatgtatttcctacacagttcttatggaccctgtggacaaagttcttttgaaagaagaacgcgtgcttgtaatatttcacaacacatctgattttgctgctttgaagggaaaatccacagtgactcattgttttctgcatttgacatatattgacatttaagattctgttaacaaatctgaaagaagccttgccaactgctggaggaattatctgtcatcaacttcatcagacctaggggttgggcagtcagagaggaagatggaaaactaaaactgctttggccacaatcctactccaggaaaaagtgactagggaaggtcaattgtgatattgagagtgctgttccacaaatgtttggtttttctctctctttctaaaaatgtggtgggattgtaactcctcatcccatggagctcattgctttggccaagaaatatagtcagttgctttgtgatctagtgcctgcctcaccacattctatttcccttcttccaagacaggtgtcagtcatggaatttgcctagccctagaatttgccagccatggacctgggagtaagcttaacaatgctgtggaatgaagcctctaacccatccaaatggacatgagcaagaaataaacctttgttctttcaggctactaagaattggaggttgttcattatcacaacataatccagcttttcctgactgacacaaagatgatgccaaattttccttactagaggaagtgtttcttcaagtagaagtctgaagataatcagaagtctttcaactcagatgacccttaaaataaaaatgtagattggtaatcactttgttgatgccatggacagtaacagtgataaagaccctgccaggatgacctcattcttttaagaacaaaggaaggtgatacagca

SEQ ID NO: 52326 - DNA, 5123 bp, Homo sapiens
tgcactcttcctgtttcagccaaaactttatacaggagtgtgatattaaatagaagcttcatcattagttttagaatgtgtctcctccttaagctaggcttaacctgaaaataagcatttatggagaacataagggatgaggaaaaatatccaggtagccacggaagtcactgaaaaattctacccagttcaataccttcctcctcaaatcctggatatttgctcacactctgaactctccaagtagggttgcagatgagagccaaaggctacagcactggttttaatttctgagttaagtaccatacaaccaacaaaacacgttgacttaaaagaaatatgcaacacaaggaaacaatacatcctaaggtacataatagattttattttgttataggaatgactggaaactctgcagtatatgtctgctgtatccatgagattccaaggcatggtgtgaccaaatgctttaatgtcaccaaatgccttggtatattttggctcagaaaagtcagttgcctcagtagtacaaagtgaagaaaagcaatatgagttccatgctcagagatgacattctttagagctcacattcttgaagtcagtctttctattttccattttacccctgaatctcagatacctaaatggcttttctggataatctcatcttttaaaatactttgtaatctatccttgtgtaatttttttaagactttatctttttagagctgttttagtttcacagcaaaattgagtgggtggaaggtctagagactttacataaacctttagcccccacatgttcatagcctccccaattatcaacatcccatatcagaactgcacatatgttaaaagcaatgaacctacatggacacatcattatcatcaaagtccatagttcacattaaggttcactcttggtgctgtacattctatgggtttggacaaatcttgtgtaattttctattcagcagaataaaccacattttctcctgagaatcaattgttaaataccacactgacacagtattgaaaccatctgactcacatgggagcaacacactagcttttattcattcattcaatcaatcatttgttcaatacttattgagtacctgctgcgtgttaagcactgagccaagcagtcagcatacaaggaaacaagtataatgttcttgtcttcagtgactcacagcctcatgaaaggaaaccaatacccaacccagacagcttacaaacacacagggtgatgagcaatgtgtataagtgctacaaaacactgacaaaggagcaaatacccaggttgtcctagttcctccaaagctggcaggacaattcgagaataaaagggactaaattatcttgtcacctaatatttgttgaaggcttaccatgtgcaaggcactgaacaagtgtcctggactggcatccttagcttcaggttctggttttagctctaacactagctagcagtgtgatgtttctgtaacactctacttctagctcctagttcctcatgtgaaaaaaaagtgaaacagtcagacaacgtgatctcctgggtcctttctaactctgaccctagggcgtttcttcaaacaacaggatttgttcacaaatgacaggatcatctatgtataaaatattttcaatgaacaaaacagtcatgtggccaataagcaattatagaaaagttacaggaaacaaatattgtacatggcattacataaatgccaataacagagaaaataaattattttgcatctgagggcaaaaaaattatgagataggttgttagagaagaggaggggtattgttggattgaaaggaaacaatttatccaaaaggcagacttgaggacagtgtcacccagcaggaggtatcctctaacaactgtatactggattttcaacatatgaaagctagagggttagaagacagctcatcacactgaaacataatctcaaaaatagaaagcttattgataagtgtctcaaaatgtggctatactaccaagaagccattcaatttgataaggactgatctcgctcggcaaagattttccagggccattctggattgcagtggatcacttctaaatctcttaaatctcttccagtctagctatataaatgccaagactccacacagtcattggcactgatgtaggagttacagcattaactctctctgatccatgaaaactaaacatctaaatgggtatactctaagctatataagatttaaaataatggtaccttttaatatagtcagcccaaatcatccctttgtggcttgcatatatataggatgtctacagaatttgtaaagacaaatcttttttgatcagttcatctttctacctggagacaactctggtaataatggtctaaaacaacattcccaaagtatgtttcatagaaccaatattaaattaaaaaagagggtttggtgatagaacacattttccaaagatggtattaataacaacactatttcccatcctacatgttcttctagaactttactacttcctcaacaagatgtagaattgaattcccctgttcttaaacctgggtgggcttgtgaccacttgtaataaaaaaaatacaatgaaagcagcactgcataacttccaagattatgtcataagagtcatggcatcttctacttggtgagttgccatactggcatcagaactcggagctaccatgtaatagtcttacctggagaaagccatgctgtgaggaaacccaatctagcctacatagagaagccacaaggaaaagctctaacatggcaggaagacagatgaccagcaagtctccagtggtttttgccacttgttattttggacagccacctcctaatctcctaactacaatgcttgaaacatcctaagccagaagaagcacccaggtgaatccttcccagattcctgacccatggacactctaggtgatattaagtgattattgtcttatgcctctaagttttagggcaattagtttcacagcaatactaagaggtctcataacaaaatttgggcaaaactaggttaaaccaaactctatagatttttgctttccccttcaggattttttcagaggctttcatatgctaatgagcatgttcatcttcaagactgacattagtatgcagtatttcccaatttatttccccaagcaactatttctatagctattatcaagggataactttggaaaatgctgggctaaattaatgctctcttctcatttgtagatttctctctttccagtgatctgagctaaagataatgaagattttactttaccatggtaataaattgaagaacaaacagctattgcccagcccagaaagagccacctcttggtaactcctgtgtgtgacataaactcataccagcagtatcacagagcaaacagcataaactctgaatgccactcactatttgctttgccaataatagttccaggatgtactgttcttccaatgggcttaacaaacatttcgatgcactgaaatttcataatcctctggctcttctgactatcttactttcaaactgaaaagctctaagaaaaaaagaaagagagagagattttgttcctaacctctttgagaggaatgaaagaattatgcagcaaactccactccagtgtagcatcagttccttacttggctttaaaatagagtacttctcctgtccagaaactcctggaagaccaaggaaaaggactccaacactagtgattaggaaaattttgctcactttttaattgtttaaaaacaagagacaacattgaaaaatttagaaatagttcatttttaaaatcaaatatgtgaaatggtaattaagctaaaggagtcaaaccttagtaaatatataacaagggattatcacttactgatttgataaaagaacaggagtgaggagttactcatctgattcccaattagtcactatatgaatacgtcgaatgatctaacctatgactcagtttctccacaaataaaatgccactctgttttctagcccctttacctaaagtctagtcaaagttagagctaggactgggatgaagacaatgaggcactctccatcagtgcaaaatttaaaaggacaccaaaaatctcagtaaccaagttaaataatatttagtgcaattgtttttaaaaatcaaaataatgcaaacaaaatctatgattaacaaaaggtcaaaactttcaataaaaatttatcaataatactgattttcccctttccctgaggttccaatatggctcagaatggtgctcttactgagctctaaaactcacacaaattgagttccaccaattcatcatatacacagtaattaaggcaaataagaaaccaatgcttattttagttcccccatgcaattcacaggtattctcttacatagagatcacacttatctacttatcgaagcaaatcacttcaggattctgcactagtccaaattatgatagtcaacattaacaatataggtatgggtatacacatagacatacatgtagatatctgtacagatatcaatactaacatacataggtatacaccaaatgtaccgaagtggaattttcccacttacatccagactttctgatccctcttctctccctccctactctcagccacctgactagcagaggtggttttactgtactttcacagagaagtgtaacagagaatacatgggatagaaactcatgtcttgtccagaaaatcctgtgaagaacacttagtccacaccttttaccaaagagctttctcatttgatcacactgattgcgaacagattctttcccccaacaaagaatttgttcctctttgatcacaatagcgcacacacacacacacacacacacacacacacacacacacatatatatatatcagataagatagggcctttgttcagtttaaatacaaagttggtaccaaatgaaataaaacctcattacaccaggcttgttacccacagattggagctcatagattttaaaaaattacttctttctaattattaatatatgtccattacagaagaataagtaaacaaaagaagaaagtaagagctacctacaatggggtc

SEQ ID NO: 52327 - DNA, 591 bp, Homo sapiens
aacagggcaacgataaaaacaatcaccagcaattcagttaacctctgtgggcctcagtatcatcacttgaaaaagggaaatataaacaggtggaataggctagatcatccctaagggtccttctagaactaaaaaagtgtgattcttaattaaacttttactaatcccctactatgtgctatgtttctccgaataaaaaagatttctaaacccatacatacacacatatgtccctttgagtgtttcataatttcgctattttgtagagtagaattgctgctacttgcttgttattacagcaagaaagaatccaatatttgcacaccaattgatccatgaatgtcaacagagagcacacagcctctgccctcctaaattgttcatctgtgaacttgggtgaaagttgaaaactcttatcgaatattcaaatctctttttgacagcttctgtctgaccgaaattttcaaactaaattgtatgggtgcatatgctaaacaaggaacttaacacccttctgttttaaacagtcattgtatctaaaatctcaggaacatttcccaccattacaaatccttaactgaaggcacaagt

SEQ ID NO: 52328 - DNA, 1142 bp, Homo sapiens
ttaccaggtctttgcatcaatggggttcagattccttagtttaaaaatgaggacaatacctgcctggtttgtatagtgtcactgtcaggaggaaaggacagaagcgatgtggaaagccctgtgaactacacagtcttctgcaaattgactggctggcaccctcctttggcctctttgctttatctatttgaccgtaaggtctcatttgaaagttcaaacctttctagaaccctttcttcccagcactgaaagtaccatccacagtccttattttcagtcatgtaatttcagacaggccagtcacttctgaatactagatttctctctgcatgagtcacagtgagaaaactcacagctgggcaagaagctagtctcctccccttctctgccctgaccctgtgttcccacttcctgagtgcacctgatggcctttgaaacactcaaaagtcaggaacttctaaagcacaaagagtcagagcatgatttccacaagttctctacctaggttggccatctctctttctaccccatggtgatatccttgctcacaatccaatttttctaaagcctgcctttttctgtctttgcattggcatactattttcttcctgcttgcttttaaaataagaatccttgcctcattgcattaataaagtgttctcatgtaggtgaaataactaacactttactgtgggttcacaactatctaaggaaataatggaggaaggtattttcactcctactttagaatgaaaaaaggaggcccagaaattctgtgtggcttgccccaagatcacaccgaaaggaggtagcaaagtctagcctcatctaccagcctgctgagtcagagctaaccttcttcccaccacctcttgtgggttagtaagaaaaacaagaggcacagccaagggagaacacttatgtcacccagtacaaacaggcagcctgaatccagaggtaaaccagaaaggaataaaaggcaaaggcagctgagtccaagaacaatgggcagcattttggagccgttcaattcccaagtcaggttacagggccataaatacattttaaggcctttagaatacctggatgctctgtgacccttcttctatctgtgtttgggtgtattagtccattttcatgct

SEQ ID NO: 52329 - DNA, 1016 bp, Homo sapiens
ttcttagcctgactgtcctggacgagaattccgtccccacttgcaggtcgggcactgagtgcctggacagagagttaggtcccccgcttaccccgccctaaggctgcggaaggcggcgccatcggtcgccatggaaatcgcggcggatgggcggatcctgggcaggttggctgggtcgggctgcccgggcgacgccggagttgcagttggaggctgcgggaatacaaaggtaagagagcaactcctgggttcccttgactcgcaagggcttgacccctgcccgggttctgggaaagtgaagcagaaagtcgcctcccagcgcagaatattcaaatttgccagatgatcagaattacgctgatttaaaacccaaaccctccctagtttcccactcctgccctgctaaatcaaaatctcccagccaggatccggaatctggatttaaccaggggccgtttatagagttgggagattggtagatacgaggttcgcctattcttatttctcaacgccataccactaccccgtaatggtaaaagaatttgcaccccaaaatcctccccagcggctctgaaatggagtgcttggagctggaaatgcggagcccattcctctccttgcaatactgaaagttgtgagctgattggaagcgtcgctgcttcttgtgggtttcccactggggggcagcctcgtccttcgctcctattccttccgcaaagcagagccgacagtgtggtttctggctaattccggctgcagcctggttaataatataagcagcacttctaggaagcggagcttggatgcagagcagagcctagggctgtaaatggaagaagctctcagccccaattcctagtttacagttagggttcagaacaaagaatccacgcttgtaaagcaataatgttccccttgaggggaacattacactgcccttcagttcacgtgtattatttctcagcccccccgagctttatctttcattgggcaatcaggtgggacttcaggattga

SEQ ID NO: 52330 - DNA, 1206 bp, Homo sapiens
agtatcagcttttgctgaaggtataaaggtgtcaaaagtgtcacttgtccttctcttgtctctgatttgttgaccatgaggccctttttaacttccccaattgcagctcccttactattttgtcttctccagttttgtgcctgcacttggtgttatttttccatactctcacctcctgacctggcctgagttctaggtggaagtttccatttgcctttcaggaatgagctcttatcaaaagatcactaactcataaacatgcttgcttgccagctgctggcacagcactctgcagagagaggacacttagttcaatgtgggacttgggcttcttcagagaaaccctagcactcttcagaaggaacccgtggcagctcgaggcatagacaatcctcattaggtacccaatatttattaactaaactcttcacccaactcccttccctcattgcattcccaatctagtggctggaaaggacactgccacacacctggaagcaatggacttaaaacacggcattgcaagagtcttccccacatccggccctctggatgcctagccttgtcccaggatgctggttaacttgtatgatgacagggaaggatgggctagagtgatattttaagtgcaatctcctccataaaccacttctacagctctggccttgccactgagccaggagccaagtctgccaggtcactatgtttcctttgccccaaggaatccaggaaaataccgagagcactgccagatggcaagcagccaccaaggctgctgggtggcccgggaggaatgtgactgtgtgtcctttgtgtggtgtggccccctccctcagcctggccagcctctgctccccagcagtccacgcacattccaaggttttatgtgtgcatttcaatgaagcccagcaccccaccacagaaaatgtcaccactgcctcaggccctccgggacttttaaagctttgagcccagcaggttaaacttataaaacaaaggtcatagatcactcatccaatgcctgaataaatatctgtttgtaagttcaatataaaaggaatataagtttaatatgaaaggaattcttccattatcctttttttcttaaatagatttaacagatttaaaaaaattttaatttcaatagctttagaggtacaagcatttttggttatgtggacaaattatatagtgctgaagtaggat

SEQ ID NO: 52331 - DNA, 921 bp, Homo sapiens
gctccgaaagtggatcattttcatggtcctcctgcctctcggcacacagtggcaggaggcgaacatgcaccgcggccgtggggagcgagcgggaggctcagggccggcgcggtgctcgcctgcgcggacacacacgctcgcacgcactgtccgggacacctgggcgcggctcagccccgggacatcggcagcgtcgggcgcctgcggacacacatgcccagcggccggggcgcggcgggcgggtccctccctctgttcgctcgcctccgcctcgccccctcctttccccgcctccttctgtcgcgcgcgctcgtgcgcctccctctgcccgggctcgctcgccgaggacgcccagagcctgagacccccggcgggctcgcgacgcactcactcccacgcgcgccgagcagctgaaggaggaggcggagggatggctggcgcggctggcccgggtgccctggtggtggcctgctcagtcgcagccgccgctgcgtcaagctgggcccgactgccttcctcagcctcaccgcctcctccctcccctggccgctgtcgctcgggctcccggttgtgctcgtcccggccccggctccccaacgcgctcgacagcgccctgctctgctcagctccagggacctggcgcgggtaggggacggagagcgatcctgacccacaccgccagggggattccgcctcgggaaaggattgctgggcccagggcgagtgacagagagagtgacagccctgacacggctacaccaggaatatcgctaatagtaaaaatctctggtactcatggagattgtttaagccattgttttatttaatgctagctaggactcagtctctttctccaaaaaagagccttccatgtgcaaatcctcctttaaatctcccaacatcttagtgtgatctttgata

SEQ ID NO: 52332 - DNA, 740 bp, Homo sapiens
tagaggagataaggacatactctgtcaaagacatactaaagggcatttttattttgttttgttttaaagtggacttaattttttttaataaaatgtaactcttatttagtggcaagtattcacatactaacacctgtgaaggagtattatgcaatgtcattggtgtccgagatagttatcagcaagtgcaatgtcagcagaaacactagcggccagttagggaataaatcaagctggaggagaggaaggtcgagatcaatttagatttctagcataccagacattattcattcctgctttgcctgcaggggacactttcctgggtcgctcactgctgccggcacccgtaaattaggcagggaagatcccagttaagtgtgtgtgtgatacattacacacaaagaagtatataaaatctacatgtacagcttgaaataaaagaatagataaacatctgtgtaatcaatatctaggctaagaaatagaacattaccagttcactagaggacatttggtgcctcttccaagagctttcgttttgaattttaggttaatcattcttttcttctctgcatagttttagtgtgtgtgtgtgtgtgtgtgtgtgtgtgtgtgtgtcttttaactacaaatgtattgcttaattttcttgtttttaaattttctgtaattgaggatcatacggattgtattcttacaatcagcaatatggctttgatatgcttttgtagctgtagttt

SEQ ID NO: 52333 - DNA, 1055 bp, Homo sapiens
aaccgctgtggaaatggtcagcttcatacaggagcgctgccatttctgtttgagacttacagtacatgctgtccagaatctgggggtgatctggacttgagtgactatagaaacgcatgcaagaagctgtgcctcgctagggactcggggtttccagagtaccatgtgcctcagtacaacagttcttgcagtagacaggacctaaaaccagaccaatattcagcatctgggttgccccatagtaacagctgggaagcaccgagacaaccaggaccagcaggtggcactctttggaaagcaaaaaaaaaaacgtggaattcagctcttaggggcacctttgaagttccgctgtcctggaagcaggcacagagtttcactgacactggcatgctgggtatctttcattggtacctccagatacaatctccacccttctcttccctgctctgagcccaggaaattggcatgcatgggcaccgccggactccctagctctccaccttccaattgggtttggctggtggggtttggccacgagcaggagatcacagggcaagaggaggggaggggaggttatttattctcctgattatttttctgctgggtcaacaaggaatgtctatctctctcttcctaaggctacagtcctgtcagacacttctttctatatggtctattctctctgtctctctccttccattctcttcccttcccatataaaggctccctctcatcagcccctttctatttaagagtgaaaacacttctcggttactcagatgtggactctgcccctagttgctttttctgaccctacccacacctgtgctaatagtccctttgttaaatcctgttcacctgccccaatttgagcatgctgtttcctgccaccaccctgagcagcacagcaagtttaagatccttggacatgtctggggaaagaaatccaaggagaagaatcagattttctgctaatcattctgatttgaacattgaaagaaatatgagcttttttttttcatactgagctagcgaagcagggcacgagttaagag

SEQ ID NO: 52334 - DNA, 2148 bp, Homo sapiens
aaaaagaagtgcttttaatcaaatagttcaaacgacacataattaacattgttttaaagcaaatggacactttaaagtggtgctccttcctcttaaagccccaaccagtgctggatttaacagcagagccatacagccaagacatatgctgctacggtcaacactcaaccctaagtttgacaccaaaagatggccgccatttattattgtgacaaaaggccagattacaaaacgctgtgtacggcctgatcccagttttacaaaatactcatacccatctatctacgacggggcgcggggaaaggggagtcgttttaggaagtgctgcttattgctgcctggtgtgggaaattatgagtcttattttctgtttattctttttacaagaacatttttataaatgaatgaatgaatgctttccatgggtggatgaggatccggcctgccagggtgaggatcctctggaaccaagaggggccggggcagtagaacgacaggtggcggggctttgggcggctccctccagcccagggagacgcgagtgccaggccgggcgcgcgcttcacttccgggaagaggaaagagggaggggaggggagaggaaaagaaggggcaggagagagaggccgggaggttgggaaagggaggaggaaagcatggaaaaggggcgcgggaaaacggggagggcgcagaggggcacggccctcactgccccggccggggcgagagcggctccgcccctcgagcgccgggtaggccggggccggcggggcccggaaggcgacgggaaggagccgagcttgggttatggcggcgccgggcgcgctgctggtgatgggcgtgagcggctcggggaagtaggtccgggagagggcggggggcgcccgggacaagtgttgcgggcgcggcggaggccggacgcgtcgccgtccctgccggtggactggggtcttggggaccccccacccttccctttgcagatgaagaaaccgaggcccgcggctgccgcgccctctccccgccctccagcctgctcgcggggcgcccatcctgggaccgcatccgagctccgggttcccgctctaagacggggaggctgcggcgaccgcaggctcagggaggaagccgctcctgaacaggcggctgcggggccgcgcaggtggaggcctagcgagcggcgcggggctaggtttcggggcgccttgtcggggccaggcgggagggcgcacggcctctagcgagaggacgcaaaccacggcccaggctctcacagacctttggccatctggacacacagcggcctcctcctatgaggccctggacttctccgattcaattttggaaagtgaatcgttttccccttcctttcatcagcttaacctggaaggagacagcgttaatatggagggtggctcctgagggtttggaaagaaagaagagaattgtggaaaccacagaggtagcccagtgtgctaacctggagactgaggagttaacatttggcttcctgtttaaaccaaagtctaactgtgccctttatcagaaaagacagctgctgtaccattcgaccacaggcagcaaaggacagaacttgatcagctaaaacatcataaccttcaagggcctataggacccttctagaattttctgaatcaggaacggcccatgttgtggcctgtgtagtcaggtgtatattaaagatttactccaggtagatgggttttgctttccaaaattattgtagggttctcagccacaaagataaaaagaaatcttgaactgcaattgaaataaaacatggagcccccaaatccctagctgccatatgatttgaatcagttggagaatgtaaaatcattgccatggtgtgatgtaacaggagtgaagagccctaggtcttggttctgttgctgtctggctgtgtgagcctgggcagttcatgtaccccctctgagtcttgaatcagatgagggaggcctaatccctatgatgtatagcttgtgatattcatgtactcagtaattattgagctcaatccttactctatgtcattgtcatatagcgaacaggacagataaaatccctgccctcaaaggatttacattctggtatgggagacagagtaaatgaatatatgtagtgtgtgag

SEQ ID NO: 52335 - DNA, 990 bp, Homo sapiens
ccagcctctttaggagccatgcgcctccatatctccacaggagctccctggcctcttccagcccctcccactgcaatgcttctcccatggggcctttgtatccctgttcccttcttccctgagctagcccttctcatcctttgatctcagcacccatgctgcttcctcagggaagtgaaacctccatgatggactctcatggtgccatttcattgttgcacttgtccctgtggcagctcaacaactgatggtctgagaatttgattaatgtttgtctctgcaactagactttacccctaaaagggcagggactgtggctgtttctgttaaccattgtaccccccaggcctgacacacagtaaacatcagaaaatagttgtggcatgttttcgagtgaatgaatggatgaatagcactctcctgtgtgcaggccgtgaggccatcccctagagtgtctcacaccagagttacaaactcgctggcataactggccatagttcaggagagatgagggcaggtcaaaggctggggccacgcactaagtgtgtccaaagggcaagaacgaatggaactggccgcagaccaacactgttgttctcactttcagtggggctgggctcacccccaggtgtcctttccctagctcactgtctttttcttttttgtgccttgagccattaaaccattattaggtctattctagagcaccccaagagtgcacttctctttgttattgggggtacagcttgagtttgcagtgcttcaggccttgaatcatcacaggtttgcaacatttgattttagaagatagggcaatagaactataaaagagagtaataataatgagagtaataatagtataatagagtagtaataaaaaagagtagtaataatgttgatactaaactagagataataaacataggcaacctggttccaccaccaggcttgtatgagcttgacaaagggcttagtctctctgtgccccat

SEQ ID NO: 52336 - DNA, 390 bp, Homo sapiens
tcctcttccttctatggagagtggatccaggtaactagagggtttttgacttgctgagcacaaagtgatagccttggtagaatgaccttgcacttactgaagataaattactgtgaataagaaatggcctgagcccaggggagatacccaggagctaaaggtggttacccagagctggagagcttaaaaggctcctcatggaaaagatcaaaggaaaataaaaatggccaaagtccaaagcaaaacgagaacatctcatgtgccaaaatcaaagtgtggcaaggctgaactaaaccagaataacccactcccccacattttttgactgtataaaagccaggagagcaggaggctgaggttttgatgagcctatagagatgggagataaga

SEQ ID NO: 52337 - DNA, 2854 bp, Homo sapiens
ttcagagattaagtcagtaattatggaaaacacgacgtattcaacaatacactaaaattatttgttaaattccaccaagaatcttaattaactgcaagatttgtattcctgaaccaagtttaagtaatattctgcattcactccgattttcttttatttgattgcaaccgctaatatcaacatcgctatcgcccctctaaaatcaaacaaaaacctacccaatgattggcatctaagagatgataaacatactaaaagggaaagagcaagtcatcagtgaaagaaagtcattcacttttctccttaaacctagtactatcactattacttaagatggagctaaaaacagtttctacgtcataatttttttttaaaggttgcaaggtgggaaagatttcaggagttaaaatgcagaactaaatatacacatgcacctcaccccaaaacccaccttaacaagcaggcacgtaaaacaacgaggatcccacccacccctttttaattcatgaaacaaaaccgcagcctgagctaaagcgaaccctcgcccccgcccagcctccaccccgcccggaggctggcggtgggtccctttcctttgtgaggagttggaggggaggcgacggagggcggggaactgggggaggaggctgagggtcggcggataccagagaaggaaggctccgagaaaagcggcatcagcccgtcccacaaacaggccgcgccgccacgccacaaaccattgcggtgtcccaaggcgcaaacccacgaacttgggtgtgatctaatttgggacgacgcccgggagaatggccgaggacgacccctctcccaggcccttccaaaaggtctcctggggcggcgggcggaggtcctgccgccacccccatcccggcccgagccccaggcggcctcacctgctggacggagctattctcgggcacggcgaattcctccttttccttcggggtcttcacggtgactttcatgattttgggctccgcggaggcagcggccgcgggggcgccagcaccttcggctccggcggcgctatcctgggagcccggaggaccgccgctttcaccactctcggccatggctgtggcggcggcggcggcggtgactcaggcaagcaggagggagcaggcgagcaaggaggagccagcagacaccagagccggcaggcctggacagcgaagaatgcagagcacgccgcctcagtagcaacgggcgcagggccaccgtagcgggtgtggggccccggagctcggtgcaggctctggcgcaggcccgggtcaggcgctcggcagccgccgtgtgttcaggcgccgctcgctcacaccgacatccgcagcagccaccgcttcctcctccctgccccttcccccacgtcccttcgccggcgccgcgcggagcacgccgggtaacgcgcctggcggcgtcgccgagtcatccccggctggcgcgactttgagctcagcctgcgtgccttttcctttcccgctccattgcccaaagtgcaggcgaagccagtgtgaaggactaaaagcaaaatggggcggggtaggtcagttcatggtttttttccactcctttcaccaaaaactaaatcgcagtttccagttaagcgctgtaacggcgcaccgagatgacgtcacggttagcgaaattactagaaagggaccagtgggccctgcggccgcggctgcgcctgcgcgcttgctgtccaggtagtctccccaccttacctcatgcccagctgggccgtgttcacccctccgcgctgtcacaatcgccttgccctcccttgcctctctgtctactctgcgttccccgctgggaggagggtctggtgataaaatagcggcgaggtattttgttattttaatatgcttagcgtttgatatttggaggggtcgtattgccctatgcgggggagttggggtaagttaatggtggaaaggcctcagcacaacgaacagaaaatggagtgaacgcccgtgactgccctgcgcaatcctgcggagtcattgcttcatggccagagcttatttaccgccctcgggttagcccggtttggtcagacgatcagtcaggcaacctgtattgacagtggcctctgctgctacgatgacagctgtgcgcgagcgcccccagattatctgtgtgtagggcggaacagggtgcccgaggagtgtccacccaaatgggacaatttaatatagttgaggtgttcgccttatattctatcaaattaagttactggtcaatttcaggctttaagtggcattaaggatagttccaaaattattttcagtgtaatacagagagaaattatctctgagaatcctaatttgaaatgacgtcattggcttttaaagatgacttgcaaggaatgtacaaaccagcccattattaatcaatgttgcacaatttaaatcctgacagcccactatgacccaaatccgcaaagatacattctgcctttctgctcctaagccgtccaaccctgttctgagaataaatactgttacataaacacgactttttagcagagctctatggaatctgggtctaagagaatcctgagggtatcgatttcagtatagacatcatttgatatcacctaaatttctggcagcatggctcaataacaaggccttctgcttaatgaaggatgactacttggttatgtccaggtgtgagatgatcactgcttctaaagctagaaagtgccacaactggacaaccaatcatttggaatttcttccatatgtctaaataaaatttctcctcaacttcattagctcctcattacctgtttttccctgtcatgctgtgtcttacctgcatgctt

SEQ ID NO: 52338 - DNA, 442 bp, Homo sapiens
atacaactactatattttaacaaatcattttggactattcattaattgttcaacacaccaatattttatgaaccactaaaaaaatatacagtgccaattacaacatgtttattttatttttttgagacggtcttgctctgtcacctaggctggaatgcagtggtgcaatcatgactcactgcagccttgacctctggggctgaatcagtcctcctacctcagccttccaagtagctgggactacaggcgtgtgtcaccatgcccagtacgcatcagtagtttttataaattttttttgcagtgtattagaattgataaaatatagtatagatgtcctgttattattagttggcagaagtagctgctattcaagaaaagtcttcagtgagagagcattaagggcattaagttttttgtgttgttttttttttttgacattttt

SEQ ID NO: 52339 - DNA, 1768 bp, Homo sapiens
cctgtctcaaaacaaaacaaacaaacaatagtaatggtccacaaacatagggcttgtaaaacatcaatatacaagaaataaagtttttacacaatccatagcacttatacttcagattctgatcaattatagtcatcagaaacatacgtattatgttgccaataaatgatttaaaaaaaagcaaaatctgattggtcgtatttaagtatactcaacgggtttttgaaatctgagcaaaggcaagagaaatattgaatccctcatgtcatgtcactggtcaggaatgagtgtctccaaaaaccgttgccatcccgtacccttgatttcccagaaagcagtggttgtcttaaatgtgtggtttgttaattattttcataaaaaacttgccagtagatggacagtaaatcgcatacggagctcagaaaaggccccaaatgcgtaaagacgacaaaagagtaaagaagggcaaacaacaaggattttcaacactggagacttaaaaggtgttacttaaaaggtgtttcaaagaaagaatctgggcgctttgctctttatagtcacctgcctccgagggagggagctctcgggcttgaatgtgcccaaggttcaacctctacggtaggaaatgcgcccaagtttcaacctctacggtgggaaatgcgcccaagtttcaacctctacggtgggaaatgcgcccaagtttcaacctctacggtgggaaaaagacgcctgcgataaaacaaagcgctcggtggtggtggccctcgcgtcgcacctcacgccgtgcagcgacacgagacgaacacagggtgcgctctgaaaggccgggtcccgcgttccggtcgatcggtgttccccgggacccgctcctcagggctgacccaacttcctccggaaggggcgctctgcctctagtcgctcgccggctcccagccccgaccccagacccctcggacgcccccataggcctagctggcgccccaaccgcccaccctccgctacccacccgcggcggccccgaccccaagccggagcctactagtcccaacggccggctgggggcgcgggagcggcgggcgcggcgggctggagggcgggcaccgcgaagggagggcgccccacttccccgcaccgcccgccaggcccgccgagcactgaccggctcgggacagcccaggcccctgtcggcgagcgctggactcctcagcttcgctctgccacaccgcgcagccgccgtccgcgtcttttgttgtcgcgagttctcctggcaaccggcgaagcccgcctcccgccgcgtcctctcctggatgccgcgtcctggccccgcccccatcctggccacgcctccaagcccgccgcgcaggagtcctgcgtccccaggaagtccgcaaagggccggcccctgggcttgcctgcaaatccgagttgtgtcccaccaacgcgctgggaccggtctgtgaggcctgagcgcaagcatctttctacgggttcgtgaaatgagtgagaacgattccacaccgtgtttcaatatcttagctaccaattcagtttatttttatttttattgagtaaaacttgcctaacataaaccatcttaaaactcacaattcagtggcgtttaatgcattcacagtgttgtgcaaccatcacctctgtatatagttcagaaacattttcataaccccaaaagaaaatccccaaaccagttagcagtcattccttctggttcccctctccccacaaccccagccagccactaatctacttt

SEQ ID NO: 52340 - DNA, 1996 bp, Homo sapiens
ccaggatggtcttgatctcctgaccttgtgatcctcctgcctcggcctcccaaagtgctgggattacaggcgtgagccaccacgcccggccaaagcaacatgtttatgtttttttaaaaaaggaacaaagctgttgagccttaataattgcattctactcctgcaaccaaatacaggttagtattctatatcaactgactcttagtctatcttgagagtggcaaaatgggaatggcgaagaaagggagagaattcctaggtttgtcctgtctccagacaggaagttggattagtgctttcttttccttttccttttttttttttcttttgagacatagtctggctctattgcgcaggctggagtgctggagtgcaatgatgcaatctcagcttgctgcaacctctgtctcccaggttcaagtgattctcctgatctcagccaagatcgtaccattgcactccagcttgggcaacaagagtgacattccatctcaaaaaaaaaagaaagaaaagaaaagaaatatgaggtatggtctttgtgcattttaatccctagactgtaactagttacatgatcatggctaaagccagctctatccctgggcttattttgttgatcactacaattgctttttcactatgctagttttagtttgatttatttcatttaaaactaaaacatccttaacccaaagggataaaagaaaggaaaagatacacagtgtatggaaaaaagagaaatttagatgaatggcacaataatatatttctccaaacttccaattgtttaatcaataaattgtatacctgcaaggaattttacaaattacaggcatgcatcacataacaatgatttggtcacccatgaactgcatacaccatagtatatggtatcccatgagattatcccatcccagtgggacaagaccagacacagacccttcaattcctcattcttttttacaatttttttttttttttccgtagagacggggtcttgctatgttgcctaggctggtcttgaacacctgggctcaagtaatcctcctgtgtgggcctctcaaagtggtgggattacagatgtgcatcaccatgctcagcccaattcctcattctttgtctctctattagaactctttgtccacctaaaaccagcatgacacagagataaatatttcctgtttggcaactgactgagacttctgattgcaaaacaatcccacatgtaagtcctccacctgtaacttgtatactcctctctataaaagtctaaggcaaaaccaccctgccaagagactctgatctttggatttggagtgcttttcctattgtaatagcctgaatagatcaattcccttacttgtttaggttttgtatttgactatagcacccaccaaaaagctggaaattttaaactaaagcaaaaaacagcacacctcgagaaagacgggtcacagagttgcaaggaaaaggaaggtctagttgcctcaaagctgatcccctaggtcatatacagtcattaaatccgcatctggggcagactggggtgccagcctgactaagccattatccattcagcttcaggggaggggacactgtgaggaagctcaatacatgatttctgaattgaatgaaacaaaatctattaatttgccttggtgctaattagggagaagtttaaggttgataaaggaaaaaaagcagcccctgataaaaagctggcctggcacccacagctataccagttagtcttctgttggacataatcactttcctagccttcttggcagttagttgtggtcacgtgactaaatcctagtaagatgaaaccaaagtggaatgtggtggctaccaaagcctttcttgtcaaccctttgtttttttctttctttctttctttttttttttttttagagactggatcagaaaggttactcagagaccatgataaagtaagactaaataaggccacttcagaattttgcctaaccacaga

SEQ ID NO: 52341 - DNA, 2292 bp, Homo sapiens
aaaatgagttctggaagtaaaagagttaactctgagatgattaagacttctaaaatccccaacagaagcaactcacctcaaacagagtcacatctctgtaagaaggaaaactttcaaccaccaggtgcattaacttctgcgcactattctcactttctcggacgcagttgagaaaagagcctccaaacttctccagcagaattttcccggtttcattgagaatccgatgcctctcttctactaaaggcatggaaacgtctgtgtcagaacgaagtatattccgaacctgatccagggtcactgtcgcgtagtacgaggcactagttattggtatccctttagtgaaaaaataaaattcagaggaccaatgtcatacttccatatgcattaaacccttgcttttacaacatggaattaatatgaaaccaaatgagtggtataggaatgcaccaaaagtggaagaataaaaaatctaaagcaaaactcattttctacttgttcatctgtacttattcacccatttctaactattgcaatattacatcagatgtattctgagtaaattgctttataacatcggtccttttgttcttcaggtgtcattcaaatggcattctttataaaactgacttttatgctactgtaacttttatgctgcaatgataaatattaacatcattttccactaaaatatgccccttttcatacttctattttaagcataaggacttgcaacgaacttcaggttcgctttccattattccatctcccaacccgctccttggaactcccctacacacaccccaagtaaatggaaacctcaaaggccgttaggtccgatggcaagtatggcaccaaccttcgtcgagggctctgttgacggcggcgcacagggaccagtacccactgtatgttttccctctgtacctcaccacacacttgtgctcgtcctgctccgaccaaaaggagaagttgagcgtgtctgtcacgaacacccagttgaccgcggcctcgtcggccgccctggggttcagctcatgaagggctttccacccctccacgcgcagctctggccccgccgccttggccagcagcagctctgccaccctccgtacgcctccgctgtcaataaacacatcccgactgttttctgcaatgaatttagaggattccctgggatttaggagcccgtccattctgccctttgggacccggcgggccaaactcttcccgccctaggcgggtcaaggtccactctgcgccttgcgctactacgaaccgcgcgatcacagggcctaaacaaggtcccgccctgccagggagtggcaccgagaacttagtgcagccaaggtaaaggttctctcccgcggcgttgccctgattaggaaaccagagagaccccggggcagctcgctgggcagaggccgcaagcacttccgggaaagcggtcccgttcacgccctctcgggcgcgctctcaggctccgcttccggttccaaaggtctggaaactgctaagggtccggcgttcaccggccgtgagttgcccaccctgggaggtgcatggctttgccatgttttgccttttctcaccccgcttcggacaggtgggactcgaagacggcgactcgccgccttgccctgggtcgcgatgcccccaccccgctcccacccctctcctttcccgcagcctgagcaagacgccttcggcaacgccccgcatccgggctccttggcctcgaagagcattatggccgtagatctgggtgctgaggactgagccacccccagactgcgacatgggcggcggtgcctccttccccaagccccagggagtgtttttttgtttgttttgttttttgtttttgtttaagtgaattcctggcccatttggccgaacgaacgttaggattagttggaaggtttggagaaatggatgaggaaacaaatgtgttaaattgttaaattaaccttgtgtgcctggcagtgtacttaagtactaaatctcacctaggctgggtcatgacgaaagcggctattgtgatcccgcttttgcaagtgaagctgagtggttcattgattaacccccatcacagcaatggtttgggctaggatttaaacctttgataattgagccccctaaatcgagggcactttatgagccaatcaccagtgccaaccattctggtcagtcaaatagtgactatatcagtggccctactgagaagacattaaaaatgaggaaataagtgtctcacaactgcaaacttacacaagtaccttatattaggag

SEQ ID NO: 52342 - DNA, 879 bp, Homo sapiens
attgtgcccagcccatattttgcttttaattagtgaagttaatatttcctacttaggaggaagagctaagtattattttaaaacagtacaaaaataaacaggtacaaaggattatttaacttggattcccttgaaaacagaatctggggcaggggttaagtgctgatatttaatctatgaggtgcaatctttgggtgtggacattgacggggacactgtattgtcctgccactgcttcatggtgagctcagagagacacagctagtcactcagtaggagtgctggcacagtctttggggaagtctctcgacaaactttctggacaaactgcctcagggcagtttttgggaggaaggaaaacaaattcccattggttacagtttgccccacagggagttaactcctccataattccaggttgcatcatccagctcctttggtggttactcaggaagtcgtatccctgtgaggtgtggcattttatccaagtctgaaagtgaaggaaaagccagaaaccctaggtatgggctgggcatggtggctaacacctgtaatcccagcactatgggaggccgaggctggcaaattgtcttgagtccatcagttcaacaccagcctgggcaacatggtgaaaccccatctctacaaaaaatttaaaaaagttagctgggcatggtggcacgcgcctctagttcctgctactcaggaggctgaggcaggaggatggcttgaacctgggaggcaaaggttgcagtgaggagagatcctgccactgtactccagcctgggcaacaaagtgagatcctatctcaaaaaaaaaaaaaaaaaaaaaaaaaaaaagagcccaggtatgttactcattgtcctgcctgttcaacc

SEQ ID NO: 52343 - DNA, 3395 bp, Homo sapiens
ttgtttattcttattactgaatatttgtttccgatcacagtgaatactgatttgaacccaaaaaaccagctgtttctaaaacttgattcttcattttagggtttcacaattcaaatgactgcctaaaaaatacaaaattcaagggagcctggtttcattttttgctaagttagaacaataacttttagccactggattaagtcccaccacagcaatgaattgttttatacggcacattcccaaaaccctgaaaagataaatgtcatccacaaagcatacatttatgaaaagttacaatgcatcttattcactgggaaaactaattttatattaaaacttccaattgctttcctatttctttcgactcatgcttgaagcgatcttatgtgacatctctaaagtttacaaatacaacggcaattgcgaacacatccaacaaccagaacaatctaccggagggataaatccaaaaatctaatataggaccagacccaaactaccacaataccagtctattattaatcagcgaaacaaatggagcccttgaaaactaacagtcactagcggattattttaaattaggcttaagggagtacaacacaacaatcatgcctgtaacacgaaaactaaagtgtctacgtgccaaaacggtcgataggactacaaacagcctttttaagcttccctcttgtcgggactaggagttgacaagcggcctctactagaaggttggctagacagcaaagagccaacaagcgaggcacatttatgcctcccattctcccataccgttggtcgacttattgctctcctaacgacaactgaaacgacatccttccggcccagcacgcaatttctgaggtgtggtgggagaagagttggataagaaagtttaagcaaaaacagcagggcttatctgtaagaataacgttgccgcttgccgttcacccttcgggtcctgcagtcactagtccccaggcctcaaaaatccgctaagtatgtgctccactggccgagcgccaacgcgccctcccctccccgcctcccggcaccgagatcaaaaacagccgggtaacaggacgggaaaaagcgaaagtcgacagcagaagcaccgcacctctcctcacccggatccgacaggaaatggcggcccgcgtaatggcgactacgtgctactaggcggagccgagcgccgaccccctcccccacccaccacgcggtcccgaggtctcatcccccgcatcctccccccactgcccgagacaaagccatcgaggcagccctgaccgttccatccccgccgctccagctccgaccccgggccgggagacccaaggtgaggcggggctcacacaaagagagcggcggcgcgaccttctccccgcaccggcctcctttcctccacgaggtccctagttcccagtgccacatagctccagctcatcctagaggcacatgcctcacgaatccccaagtctctaggaccacaacgcggactgcggatacacgctcagggaaatggcggaggtgggggaggggacaccgggcaacgttcccactcggagaagcggccaaacaccaaagcggctcccaggacgcctccctcaagcggaaaaactgggctccgaccctcacctccacgagccgctcccccaacccggctcctcaccgcgcgagactgccgtccctccgctgccgcgccgcctcagccggtcggagctagacagaaaacgagcgcaggctcccctcccccgccttctcgcgtcctccccgccgtcgcgccctattggctgccagggcttcagcgatggtgcgagggcgaagcgattggcccgaggccacgtcaatcaaggcgacggaggaggcgacaaccccgcctcccgccagcgcctcccttcgggctgggaggccactaagggctcgagaaaacccgggcttgggaaaagtaaacgcagcctttcagggagccccaacccttacccgaatcagcaatacccaagctccaataactccaattacctataggccgcgaacaagtgggacacaggcaagacgtcgaggtcggtgcagcagagaaacagaggataatggcgtctgcagtgctgtcgcctggagcgccctcctcctttctcgttcgcgcactcactagctggggggaggggcggctagggggcgaacctctcgcgagatctaacaactgcctagttcacgcgcacagggagggggcggggaaggggcgttttccagccccgaaggagtcctttggggttggaggaggggcgcgagcgcgcggcaaatcgggcgggaagaggtaaaaaaggaactgggagcgcgccgcggcggttcctgtccttacagttgcgctgcccagggaccgatgttgcgcgaggaaaatgcgggacgcccaggtcggtgctcggcccagacttatgcccgtgttttcacagcccacactcgtgcccgaagccccttaccccgccccgggctgtggtctgtgggctgtgggacgagctgcggcgcggtaagtgcgggccgtctgcgtccgctgggccgggcccacgcttcggaaacccgttgtttgtaatggtccggggcgcccgtcagtcaaggccgggcccgggggcgcagctggcggttctcggcctgccttgcgccggggcgggagccggggaaacgcggggcgagcctgggagtactggagaacttctcgccgagagggcacaggcggtttcacagggctctcggttctgagactttcctcttgggtaatgggacctgagatggaagtattttgtagtgtcgtcgctgtagtttattccgataaaatttttaggcaatatgtattgcccttgtctcctaaaatgaatgcgtatcgctgaatacgttgcagacctccacgttccattcaaagcgcctgccttgtggcagtgatgaaaacagacaaaaacccttgccctcaaacgtgctcctgttctagcgggttcagcgcacacttgcattgtattcggttccttacttttaaggctcctgtgccaagctttcatgacttcctttgttaaggcacataaggtcactttcaatcggtgacagccctgggaaatctccagccctggtagtacccgctttccacatccttactcgtcaaccttccagcctccgcccacaatcccaaactcattttgaagcataaaggtgtcataatctgcacataaagcgaaatccaccattggccgaatacatgcatatattttagtgttgatgaatttgtgctgattcattcctgttataatgtttccttcttgggtaatttgcaaaacatatataccagcattcttttaaatggccatgattgcatccacccagcatcttttacttgactgattagaggaaaactc

SEQ ID NO: 52344 - DNA, 1551 bp, Homo sapiens
agtaggtgtaggtgatatttttaagtttttctttcatttgattttgtaaatgaaacaatttagaatgcattagatgggcttgttatttacgtgagatctgagaattctgttcattatagtagcagcaaaccactcttatagaatggccgtttatatgtggattttatacataagtgggttttatagatgaattgagggactggttttacttcctctttccacttaagttgacagaaaaaggtaaaagaatggagattagcagaatttatgttctagttctgggtctgctgttgggtatgatatgtatgccttaatcttcatgcctcagtttcatcattgtcaaaaatagatgagaatactctttctatcaaaaaattactgttttgaggtttagataacattgtagatgtagaagtacattttttattgatatctttaaaaaaattttaagtcttacaaaataggttttaatttattttcagcaaagtcttcacttctctgtttatacatctgtacctgctgggaaatataggattaatatctctgaaattcattcttgtttattttctgtccagccttgaccttttcagttcataaccaatcagtcttcttttcttactgattcatttcttttgaagtttcaaagtcaactgaaagtacactttgtcctcatttcagtttacttaatctaatgtctgtcatcacatttttacaacacctttgaaaattatactaggtccatttgccagcactgtgttatttaaattttactggaggaaataggaaccttattgaattggtgcaactaagagccatggctgggttccttccctcccctcccctccccttcccttcgctttccgatggagtctcactctgtcacccatgctggagtgcagtgggaaacccttggctcactgcaacctctgcctcctggattcaagcgattttctgcctcagcctcctgagtagctggaattacaagcacgtgccaccacgcccagctaatttttgtatgtttagtagagatggggtttcaccatgttgactcacactcctgacctcagatgatccacccgcctcggcctcccaaagtgctagggttacaggcgtgagccaccgcgtccggcctgccttcttattgtttctatttttatcacttttctgctccttttgtgccttcttttagattgttttctttatattttcctcagctagtttgaaagttagttgttacatttctattcttttggtgtttaccttcagttttttaattggagtataatttaccttcagtaaaattcatattttttggagtatagttctgagttttgataaacagataacagtcatgtaaccaccaaccaccaccatcgtcatgttatagaacaattccatcaccccaaaaattttcttttgccccttgtagtcaacctctttccacatttctggcctttggcaaccactgaactgttttctgtttgtatagtgttgcatttttccagaatgtcatataaatggaattattcctttacttaccatactgaattt

SEQ ID NO: 52345 - DNA, 843 bp, Homo sapiens
tgtccgttgcttgtgcagttggcaaccttatttgaaggtttaaagacacctcatttaatatatatcattgaatcattaacattgaacttacacagccaacagtgctgtaactcatgcctgaataagcttatctaaaatacatattttctccacaagacagatcacagctttcttgtgcttaggtacactaggtagcacttgagcactgtgccagggatccattttaaacatcaaaactactggaaaaaaaaaaaagcataaaaacatggcactaagtagagcactaaaaggagacttgtttattgtatgagacctgaaccaaaaaggcacaatatcactttgacctcagctgggaatgtgcatgttgggtgactcaggtttttcactgctctgcacatgttcatgaatgaccacgagagtgcagtaaatattgattttgggattacaaataaattttagtgagtaggcaaataaggaatctgtgaatgaagatcaattatataaaagtaaaattgacttttgtgctatatattggccttatatcttgctaactcaggtgatagagcttttttgtagattctttagcattttcttcatcaatattcatgtcattggcaaataggggtacttttattattccttttttctctcttccatctttttctctttttaaaattgtagtgaaaagcacatcaaataaatttacctactggtctgattgcagtgatgtttacaactaattgatcacaaccaattatagatttctttattccttctccatttccagtgctttacttgagtagcctaaaaaaaaaaaattacactcttaacaaattttgaata

SEQ ID NO: 52346 - DNA, 604 bp, Homo sapiens
cctgtatagtctgggtagcaagttattccttctttatgactttattttttccaattctgaattcgtttcatgatatgagtatatttctatctcactctataaacatttggcctttcagagatggctgagttatctcagccctaaaacatcaaaccagctaaactgccaggtagaggttgctgggggagggtgctaagtgaaatgctgtataaactgcaggcttcttacaaacagcagaggttctcttctccagcctgccactaaactgctggtttaacgttttaggctgaatcttttttcagcctaaaagttggcctaactgaagctggggtaatttggaggtaaatttggagtctctaagtgagaaaacaatttagaagtgtatgaataacaacacaccacaaaaaaagaaagctgaaggaaaacccgaatgcatgtttctgactcattgacaagtgtttgtagggacttcccagaggaggatgggcttcctggggcatgtgggagcctcaagaaggaactgactgtggccagccatggggccaagctgcctttcccctgtaaaataatgttccttctttagttaggagaaggcctatcccct

SEQ ID NO: 52347 - DNA, 736 bp, Homo sapiens
tcctgacctcagattatcacctgtcttggcctccgaaagtgctgggattacagttgtgacccacagcacccagcccatatgaattttaaaatagttttttctagttctgtaaagaatatcactggtcgtttgataggaatagcactaaatctataaattcaatgagcagtatggccattgtaacaatattgattcttcctatgaataagcatggaatgttttcccatttaaggagttttttttttggggaggggataattggtggagccttttattctgccaacttgctctgcttccctcatagattttttaaaaattaaaatttaaaaaagaaactaaaaaaatacttttaagagagaaaagaaacagcaaatataacaaatgggttcactgtattatgctaaaagtggtaagtgctgtggaaaaaaaggaaaaagttgggtagaggaagggattttgaaatgccagggggcaggagggctcatatttctcagtattcatagggtgaactcactgaggttgtgcaagaagatatctgtggtcaaagtactggcaagaactgttaaaaacgccctaacgtgggagcatgaagttgtgtcagaagtactgcagcctggtcagggtggaggagctggggagagggagtagaagatgaagtcagatgaagatggactctgtagggcatggcatgatcaaatttacttttttttttttgttttgagacagagtcccactc

SEQ ID NO: 52348 - DNA, 606 bp, Homo sapiens
atgggtttccactggcagatcgtctctagccaaaatgcgcagatatgtttctctcggctttagtgagagactcaaagtttatctcttggaattcatctgcctatcgagtgtaattgtgcttgggtaaatactcagcaaataatcaaatgatttctgcttcactactcctgggaatgcaaacctttgtggtgccagttcagaagagtcctttgaactgctcttgccaaaacatcatgtggggattcttctgccagggccagcattgtcagatgctgccaattcttgctcaatattttaacaaacatgttgactggaaatcaactggttagttggaggagctaaatcaatgtaggaatatggtcaatgttgcaaagcgaggaatgggacgggaatgctcttcctcatcccttaaacagagacaattcccttctctctgccctgcagactggttaaatctaatcaccaaacgtgccagatgcctgaccctggggaggcattggagataaatctgcacttagtctctccagcaatttaaaaatacttttgcaataatctgaacgaattccttgagggagataacttttacatagtggatctttatttttc

SEQ ID NO: 52349 - DNA, 1937 bp, Homo sapiens
agcaaagaagacaaaagtagtcttggtttgggctggttggtcttgcagggaagtctttgatgtggcagagcctttgtaggcaaatgccaagttcttaccatgagtgacagcgggacagttgtcagttaagatggctgattctagctgctaaaggccagctctttgatggtcacagggtcctctggggagaactgacggtggaagtgtgtacttgtttatgtctttatgtggtggaatgcagtctttattttttatttgtttgtcaggcaaaacatctttgttggcaaggtgccctacgaaatgtaaaatggagtcttttcctaagatggagttagttgcatcaagggtgctccatataatatgataggtcagtttagcctctaagccatcagcaattagccaagttcagtaagcaaggacaacagactctcagggagtctgtcagttatgcccccaacaatgctgcataacaaaccagctcatgactgagtgactgagagcagcaatcatttatgctccgtggatctgcagtcagctgatgctgactgagctctgcttctggtgcctctcatccttttcttgccaccagccggttgactcttctggattcaatgggctagtctgggcatgttcttctcatggcaatggcagaggcagaagagggcaagcacaatcactcaagagagcatttgatcatgtcatgtccactaactttccatttgtcaaaagaagtcacatgcctgaacctgaagttgaggatcagggaaatatactcctgtttttcagtgagaggaacttcaaagtcatatggcaaagagtatggataaaggtggggtgaataactgggccattaatgctctctctttcagggagcatctggatttaagatgccaacagaagaaagagggatctcatagggaaatgctgaggaggagcagatagggatgtcagaggggaccagaacatggcagtgtctgggaagttgagggagaagggagattctaatagtgtccagtgcttcagaggggacccacaaaataggataagagaaaaaaacttggtcaaagagaacactgttaatgaccttaagagactatctaaacaagcaggctcagttaatcttttagtagcaaggctgtgctggctgatgatctccagtccagaaatgaacggtgtttggcttgttttcttcatcaaaaggggaaaaagaaaactttggcgagttataatgctggctctttatgaaatattttgatgtgcattttaaatgcacataggtacctgattttctgtgcaaattacccttggtgtaagaagtgaaagttgctaaggaagcaattagaaaggagaagagtaatatttacttcaagtttgatgatttgctagagcatgcacatatctaaaggtaaactgctctgaaatccaagttcaataaatagaaaatattaaaacacaattgttgattaactcagtgagcaagtccagtgcacacatcatgccaaaaagatattacccagcacaagctacacaagggggggtggttgcaatcacagggcaaagtgtacgcaggtggtgaggattgggtaatgagattgagctaatcaaggaaaaattctgtgacttcacacacacagagtatcttaaattagaattgtagttggcagttgcatagatacctttctttgcagtccccaatgtgggaaaaacttttttctattttgatccagtactgagagtatctgatttggaaaacacaactgcttatagctttttgattttgtaataaatgttaaaccttggttttgactaaatagaaaaagccttggtgagaccttaacgggttttgggaccccgtttcttaatgtcttgttgaccattttcttgaaaactccttcagttgccataaaatttgcatttccacatcttgaatgaccttt

SEQ ID NO: 52350 - DNA, 2245 bp, Homo sapiens
ggtcctttctaactacaaattgtcatgcattgtaattaaacacaactacaatgttaaacacctgaaggaaaaaacccacatagaattaatactgccaaagaaaatttccgctatcttcaggcacttgagtaagctatgttaaaacgggaaatgggctttaaattatcaacattcacatcgattacactatgatgcatgaaaactccattctacaatgagtaaacgcccaagaaaggaacccaaccaactccaattgccctggtgctcgtaagaggtttataccgcacaaggggtaaaacaacggtagagtcgagcaagcctttgggttacaacagtccttgaacacttgcaattgagaacccgcaattcaggaaggaagacactaaggaaactctgcactgtcatccagggtgatctgattcaggttcaaaccaaacgctcaaggcgacaagttgtaaacagaagacacacttcagctcaaaccacccagcgagaggaagcaaacgtgcccatcgccgatgtcacagcaaatcccaccttgctggcgctcagtcgggaacgctagaattctcgaagcacaggggcccgcgattcagcggcccgctaccactggggcgggggagagcggggctgggcgcgcccgcccccggccctgcagcccctcggctggactccccgcggcgccgcgagctcgggcccgagagaaagggctgagcagaaagggcggcctccgcccagagaccgcgcccgataccctccgcaaggtctgggacggggatccaccgagggtccggggactggggaaggcgttttccagacccagtcaaagccccaccccgtcagggctttccctcaagaccgagtgcgttcccctcacgcgtcacatgtgtaacatgcgttacacaacccgtcaggtaaggggcgcagggatccggggtcgcccctcctacccccgggcgccgtcgctcgcatctcccgcggcccggggagagcagagggacggccggccgggacatgaggactgcagcagggcgctcaccggctcaggatggggcgctggcggggaccgcgcagagccgcagcacccggctcagcacctggatcacggcggatccctcgccgcccgccgcccggtgttttcatacaaaccccggtggcaggcgaggcggaggcggcggcggcggcagctgcggcggcggcgctggaggcggcggaacctgtccgcatcccgggcaacgtcagcgcggcgccccgcccaccgcacgccttgccagccggctcccagcacgcgcagggagtgggggcggggcgtgcgaggccgcgaaaggggcggggcggagcgcacgccctcttcccgccgcgtcccttgttacctccgtgcgcgctgcgccccgcctctctgcgcgcctgacgggagggagcgcgcgcgtgggggcggagcgcgcacgggagcgggaattaggggcgggtgttccgcgcgctgccggtcccttgtacccagcagccccggccaccgcccctccgtaccgaactgcgagcgactccccacgttcttcaagtcatctttctgtacactcccaacgagggccccagccttttcccggaactaagcccgcgcccaccccctcccccgccatcaatcagtcactttcttaggaagggttcttaaagctccccacgtgatcccggggtcgcatcaaacgctggggactgcggtaaagcttagacctttcctgacctcaaggagggtccataataagaggctggaagggacatgctgttactacaatcgggctcccagaaaacaacaggattgcaccttgtggccaaatctcagtaaattagatgcctagtgctgcagcgaacaaaatagcatgctgatttactgttttttgaaaaagtgcctgcatataatcaaaacggtaatgctaagttggctactgaaggcaaaggcggaatgttttatctgagccaaagtaatgtgtcagagaaattactaatacacccccttctgttttgactgtacttcagtgtactgcaatgtattgcaaataaatactgacatcatttactttttcacgttgcacaagaacatgtttgctactgtttatggtaaggaatgtaatatcacaactagataagggaatgcattgagaactgtgagatttttgttttgttttatgatcttgttcaaataaaattaagcaggtgtgaaagcaattcaaaaagtaacccaaggtacacc

SEQ ID NO: 52351 - DNA, 2245 bp, Homo sapiens
aatgagccgagatcaggtcactgcactctagcaggggcgacaagagtgacactctgtctcaaacaaaaacaaaaacaaagcaaaacaaagctggtatgaacattaacgtacaagcctttgtatgaatatgtttttgttcctaagtaaattcgtagattactggatcgaatgataagtatatgattataaggagagattgttaagttttccaaagtggttgtaccattttgcattaccaccaccaacataacagaggtccagttgctctgcatccttgccaacatttggtattatcttttccatcttttaattttgggccatcctaaagaacaggtggtgataaagatgtgcttcttacctgcgcccgtctatttatgtaaccccatttaaaaactgatcattttattaataaattaaaaaaatctaaaacatataagaatctgaaattaaatgtctggcttgactttgcagatattttgaatctatgtttcctcacgaaactcccaggcgctgtataggaaacataaatccgttgtcaggcagcagtagcacgctgttgctctcggagcttggctgctcgttcgtgctcgcaaccactaaggtctacgcaaacctccacggtttccttccgccttcgcgtcacctttctaagaaattcccagagggcagcgcagacggggcgggctctgagactccgggctccgcctctttccgggaaccgcccactacccaggactccgacagagggtgaaaaaagataacttccggtctcgcgatcgtctctaatctcgcgagaagagaaggcggccgccatcggccgaacggaggcggtggcgagggagggggtgtggccggggagcgcgaagtccccgggagtaagggagagggggcggggtcgcgcgtcccgggcatacgcatgcgtgcacgctgccggtcgggctgggctgagaggggagggggcggcggcggccgaggcggcgtcgttatttccgtggtccggacagtgcgtggcggcgcgggtgaccacgggagaagtaggtagggaccgcccctgcgtagccattgaaaccctctcgctcgtgtgtccgagagccgcagccccccgcgcgtgtggcagatcctggggaccccaggtcaccctgcggccccggccctcccgctgcgcgtcaggtaggagcggcgggctccccagtgcccgctgtcggccgaggccccactcttgcccggtgttgccgaggcgacgacccggcgccggacgtgcccgccctcccgcgcggcgacagctctgtccttgcttatgcgcccagtgggaccggggctgggctgggctgacccgggcagggcggaagggaagcgtgtgcccgcctcaggtgtgcctcggccctaggcccggccggcgggaccctgcggtgcctgccggctcctcattgctcccggcgaggttctgcctgggtccgggccggctctggcccgggagaggtcccagcgagctctggccagatgaagggctaccttgattgacttcggtagctgccgcatggggtcctgggctgcgagaggggaccctgaatagtgccttggtcttttgtggctattattgaaagttggaagctctggagttgttcttttcgggccagaggtgagatggtttgtgatttttcttcttaaacagtaggaaggcaaaatgtttatgggccctggtaggtggtgggctaatagtaagcagcaggagtgttaattgacgtgcgatttgattgcattaaggttattctttgcagtactgtccttagactcagaagagttctgctttaaagagtttagttaagacttcatcctatgctgaaacaaacacccatttctgcaaatactcttgccctgaaagctacatcctctctcttacatcagtattaattttacaggcataatggttatgaaagcttctgtagatgatgacgattcaggatgggagctcagtatgccagaaaaaatggagaaaagcaatacaaactgggtggacattacccaagattttgaagaagcttgtcgaggtgagtctgatttttggattagaagttcagcatctggaaggggtagaatgacgattgtgctttctaaacttacctcattagatgaaatcaacaggtaaatgtggtttgttgagtttgttagccacacttattctgtatcctctaattttaactttaaagcaaatgtatatttgatacagcattaaatacagatgttg

SEQ ID NO: 52352 - DNA, 1036 bp, Homo sapiens
ctgagaacctgctacactgtctcctttggtagcagcctgcccctgtgcctctaacctacacgtgacttgggtcaaataaaacttccaggaggatccaaacctgaaggacagtgggaaccccagaatgcactttgaggcttctctagcagtggacgagcgcctgtcttcttagtccctgaccctggatctttctgaaggtctcctcatcacccagctgccagggaacctggctgcccctgaagcagctcacactggtctgtcccctctgcagcaccacccaagctgcccctcagctcttcccgctgctctcactcctgaacacttaaggagatggcaggggaggagctgccgaaccagaggagcaccccacacactgccaacagggcttgacccaggagcgggggcttgaaaagctccagctccgtttttagaggaagaagaatgccggattacaacacagcaccagcaatctggatattcgttccctggctgttctttaaccagccaggaaatgccctgtgcaagggctggaggcctggggctgcagactcccaatctcaatgggcaccccagggctgagccacctgagggcactgggggtttccattttcaaacgggaatcctagcagcttccctgctcccacctgcggaagaggagacacttttgtacattctgactttctgcagacaggtaaaaaggcgtacacagacctttggggatgaaagagaaactaaaactgaaccaagtgtacaggttacagcgtcacagtcaaggcacctaacagaccctacttactgtttgttcttaaacatgaatgactgcagatccctgccagagacggtaagtgaaaaaacagctacctcctattttctttacgtatttcccatcaaacgcctgtcttgggttgggttaagaattacagaaggtaaacggagtcaattccaagtcactcaagcaattttctgtgtgaagagagaacaagacaaaagccaaccacaacagcaaaacccaaagcctccgttacgccttctatgg

SEQ ID NO: 52353 - DNA, 1071 bp, Homo sapiens
tttgcttttaagacaaaatgtttgtaatttaacaaagccttctaattactttttttaaaagaaagaaaaggcatatgaaaatggacaacatgccaaatacacgagccccttgaccctcctagtcaaatattatgtttaacatttccttattttcatatagggctttaaatcagaaaagcaaatatataggagcaatcgcgtcagattagcatgtttgaccaacatcaaccagtgcagaaactgggcttctccaaacagtggtggagccacacctctaactccttctcagaggaatggccccagcggctcagcaggaagttcagaagtcactgcaatgagcaaacagacctgagcacaccccggcgcagcctggagtccgggaaagaatcagtcaccaagttttctgatggcctggaaatattccaccctgtcccaagaatgtctctaagccaggggtgagcaaactatggcccacaggccatatccgggcctggtttttttttttttaaagttttactatacactgccataaatactgcctatggctgctttctggctacaaagtagaactgaaaagttgagacagagacagagactcacagaccaactctgcccatagggtattgtgaggattaaacatttaccatctgaccatttagacagtttgtcaactctgcctctaacccattgggattaaatgaccaaggtcactgtgttctgcttaaattgctttaaaaacttactaggaaatacacagactctcttcctctcacttccccaaaatgaacaccatcttttccccaatgctagaagctgacagtgtctaaagattaaaacttttaaaatgaatgtatagtggtaggtagtagaaacaccaaaaagcgaggtggatgagtgaaaatgaactagggaaccaaattcttcctgttttgaaattttctgaagaaaggttgaaccaccgtcaagaatatatcctggggccagcacgatggctcacgtctataatcccagcactttggtaggctgaggcaggaggatcacttgagcccaggaattcgagaccagattggg

SEQ ID NO: 52354 - DNA, 1587 bp, Homo sapiens
gcgagaaaaccccgagcatccacgagaacgggatgcagccgcgctctggacgcgcggcgggaggacccggagcccaagctccggggtcaccagccacgaggcccagcggcaacgtggaccccagggcggccggagcgcgcctggggctggaggggaggaagaggcggcgggagccgagagactcgcggctcggccagcctcccgcgcctggtgcaaatcacgctgcagaactggaactagtgcgacttagggggtgcacgcttttgactttggatgccgacgcgcgtgacaaagctcagaacaaaaagacaggccccgcatcgcctgagactgcagggcagggaatcctcgcgaggcccctcatcgcagggcaagggggccgcgcgcccggtcttggggagcgagccgaggggcccaggcagccgcgggctactcggtgcaggaaggtgcggagccagccccgagcgcagccagcgaaggttgcagccccggcgcaagccgcggggaggctccggggaccgacgcgaggtctcggcgcgcggggtacgggccctgggcaaaggagggaggaagcgatggaccgcggttcgggcagcctggggccgcgcgccgcccactcacctcttttcgaggctccggccgccactcggggatccggggccccgctacgaggccgcccgggtcgctctcccgccgccgccggcctcgagctccggccggctccgcgccgtgcgcccagcgcctccgcgtccagcgccgccgcgtctccggcctccgcagcggcaaggccccgcccccgagcagcgccggcggcgcgaagggaggaggcggcgccgcgagcgcggagaagcgaggcaggggctgccggggccgcgcggactcccggccccacggtgcgcgcgccccggccggtggccgcccctcggcgggagcaggaacgccagcgtgcgcccagttctcgccgctgggcgttgccccttcccccgggccaccccatcgccccttccgacgcgggagctggcgcctgagcagcgacgcggagcggggaagcggctgtggggaaagggtacctggggggagcccccatcccacgttccgccccgagggaatgttcccgaacagccaaccgcacccagcgccacactcacgttaccttctttataaaagtcgtcgggtcaaaactgcccagagaaggaagcgaacgaaaaacaggtttttagggggcttatactcacaaaattgtcttttttctcccacgaggcattccctgttgaccatcatctcgcctcggttgtcaccgctcaggccttagtgtttggtctgtgacccttccactgctagcaacggaaaaagtgaagattcccggacgccttcgggtgtgatcttatagcccgggcagctgcatttgaaacagcgcctcagatgacgctcaggcgcactgatgtttgagaagccctatgaggccgtacctcccggagagaatgccacaaaactagtgacctacagggaaaccatgctagaaaattctaaagcaatggttcttaactctggcagcacctgccatccattagaattatttggggagct

SEQ ID NO: 52355 - DNA, 539 bp, Homo sapiens
gtgtggtggtgggtgcctgtagtcccagctatttgggaggctgaggcaggagaatggtgtgaacccaggagggcggagcttgcagtgagccgagatcgcaccactgcactccagcctgggcgacagagtgagaattcatctcaaaaaaaaaaaaaaaaaaagtgaaccaaggcatccaccaagggtgacatggtgaggtcacatctatgtgggttttgaaatgagtcatgcccagtattagtcatcagaaagaaagaacatagaacatctaaggtaggtgggagagagggccagtcctgctttcttggtctacagcagtggttgtgtcactatgttaggtgttaaaagacaaacacagaaaaacaaaaatcacatgttctcacttaaatgtgggggctaaaaaaaagtggatcttatgaaggtagagagtagattggtgatcacccgaggctgggaagggtggaggggaggatgaagagaggttgactaatacagttcaactacacggtttgacagaagaactaagaactagtaattga

SEQ ID NO: 52356 - DNA, 737 bp, Homo sapiens
ccaattgtggttatacagggctgttttaagagtcaagtcatgtttgggatgggggtggggtgcacagtcttgtatcaagcattttctgtagcagagctcaatcagcatctacaaggcagggctgggccactcctgcctctgagcctgtcttcagtagtgggtgcctttgtaacgagccagcctgtccccggacccaggcagagtgacaaaacagctacacattcatgaagaacactggctgtctccataacaaccacggttaacatgactctgtagaactatgggcgtggcccttgggtctcctggcctggctaccaacatgcctgtggcttctcattgggccccgtgagtgctggcagggctgtgaagcaggtgtgactaatgggtcagctccccgctgggactgtgaccctgaagctaacaaacctaagggcaaggccaggcgcagcagctttctgagtctcttctgaagtggcttgaagtcgatactgtgtgtgtatgtaagatctagcctgaaggaaggcgctttgttcagttgctaacttattttcttggtggtaagctttagatatcacttagcttttatgtttgcttgttttgttacagattaagtagctgtcataagaaaaaggactatttacttactatctggagtcttgttctgtttgatacccctaggcacatgttcaattcagagataagagccctggaagttatagattgcaaacagttttttc

SEQ ID NO: 52357 - DNA, 501 bp, Homo sapiens
aactaaatgagagctcttgaagaaatattattttatctttaaggcctagtacaaagaaaacccatctattcaccacccttaatagaattcagtacacgaatcattatatctgtcactaggtccagatactatctgtgggcacttcaatagctgcagaaattttaccttctctggcaaatttctgggaaaatgaatatgaagagagaaaatgtgttacatcatggagggaaaaactgtagttccacatggatactcctgttcactcagtaaatatctatgatgattcattccacaaataatcattgagtatatgtgtcaaggagtgtccttggcactggagatacaatgacaaacagaatgacaagattcctattgggaaagacagaccaactgatattacatagtgaacaagaaaaaaattatagggctgggcgcagtggctcacgcctgtaatcccagcactttgggaggccgaggcaggtggatcacgaggtcaggagt

SEQ ID NO: 52358 - DNA, 2569 bp, Homo sapiens
taatcagggtaatatcaaaggcctaaaaaattgattataaaaataaattctctcacctgatcacaattttcttctactttgctacaaacttattttctggtaataggcccttttggcattagatgcaacagaatcgatgagtcaatttaaatcgttttttttcccagtctctaagcgaatggttgcataaagtcgtctccttcactaaaaggggagtgtatgtaggaacgtgatcataaatttttcttttggggtgaaagtattttggaactagatagaggtgatggttgcacgacactgtgaatgtcttaaatggcactgaattgtaccctttaaaaggactaattttatgttatgtggattttccttccactaaaaaactgaacggtgcggccggaacactgagctcagtgaattctctaagtaatcaatggttgcactctggtgccctctgagtgtttgacctttcacccagaaaaggctgtaaactcactctgggaaatcatcttttgtcctaagagcctaggcttgctagaggcacagagggagtttcaaaggcctcaatcacccaggacaccggcaagtaacgctttgcgcgccgcggccgtgacctcggcaggagccgggggctttgttgtcgctgtgctcgccctctgcgaacgctgtcgccccgacacagcggtccttcggacagcctggtccctccccaccccacgcacctccaggctaggactccgggccaccaccgggaacccccgccaccgggcacgttcagcctctgcttaaccggaacggccgaacagcgcaggccggcaggagtgtggaggcgatcggcccccggggacgcccacccccgggatcccctccggcccgcacgcggttgccgcgcggcctgacgggaaacgtagtttccggggccaagagagcagccccgcccgggacttgtttatcgttgcaaagaggggccggaggcgaaggaggcggcgaggctgtgcggcgggtcggagcgacgccgaggtctgacgtgtccgcgtccctgcggccccactcccggccgccgtgacctccccttgcacggggcggacacgagcaatgtcacgggccccgccgcgcgccgcgagcactcaccagggtgagggctgcccgggtgggctgcagcttcctcttgctcacagcccggacagttgcccggactaaggaagccgacatcttcgccgtcccggcgccccggtgcctcgggccgaaggtcggccgcctcagcttctctccatggacacggcgggcgcattgacgccacaagcttcggcgcacggcgccctcagtcctagccccgccccccgccgccaccattgggtgagttgcatgagtgacgagccgggggcggggcaagccgctcggggcggggttttgccgctcaacgccgggggtctagcagctgggttgcgcacggtctccggcagtggggttaccacgctgcagggcgcagggcccgggaggaatgtcttcaccgccgaggacggagtcggcgtgacgtcggggagcgggcgggagggggcgaggaatgacctcagacctgctgactccggatgcacgtagcttcaccacctgcccccggggcaaggtgcagcgtcaccccctgctttaatactcaccgtgacaaacaccatcataggcggtgacacttaaggacgcataagtcaaccctgcactgggagcttatgctctcaaatgcagagtgatcgttccgatgcccagacatctacatccattttcattcttcttttgtggtccaattaggctgttcttaagagcatggcgttaccgcagagttgtataatcgccaccctccacccttctccccagcgtgctgtactgctggggatgctgaagggtggtgactaatgcagttttcattctggtgctgaactgggaaccaaccctacttgaaaatgtgactgggcagcagtgtgaatagtcacatttatagcgagcaacaattactcgatttaaaacgtgttgtcagaccttgtcctggctgctcaggggcttaattctgccttttgatgcagtattcctgagcaccagacactgcacaggcgcggtacccaggcatacacaggaagccaggtaaagaggggccagggaagaatgagatactggcaggacagggctagcagatgaagagaggaggacatcaagacaggtggcatttgtcattgaagtgctagaagtgaaggaaaaagggcaggaggggtctatgaagcagtcctggggaggacagattcgcagtgtttgaatgtgggaagaactaatcagtgaaacattttttaaagccaagtttatcttcgatctcctgcagtttctgaaaggatagttcaaaattccatcaagtagttctgacttcctgctacagaaatgcaatcgcattgacaataagaggacgcttttttttttcccctaagccttatctgcacataaactgggggccgggcgcgtggctcacgcctgtaatcccagcactttgggaggccgaggcggggagatcacctgaggtcaggagttcgagacc

SEQ ID NO: 52359 - DNA, 3141 bp, Homo sapiens
agaatggtgtgaacccaggaggcggaggttgcaatgagccaagattgcgccactgcactccagcctgggcaacagagcgagactccgtctcaaaaaaaaaagtttcaaatgggagcatgattcatctctgtaacaataaaagagtgttttcccaagagttggaggaatgtacctaatgaagaatcattacagcctataaaccacccatttacagtagtgacagtaatgctttcacacagaggcagagagagataaaccagagaggtcacactgttactcagcactgccataaatgctgccaaaaagggtggcaaaatacaggtgattacagcaagtaactatttaataaggctgttttttaacgagttgaaatggaccgaaatacttccttgctatattttttcttttaagtcattttattatttttaaaatgagattttccccttttacatcaaatgccaaaagtatagggagaatgttagtaggaaccatgtgtgataaccaaataaaaagcttataattctagaaattggacattaagatgtagtaaagtacttgtgcttttggcaagttgagagttagtaaataaacagtttaaagaaatgagacctttgcttttctctgcacaccaccactggcaccctagcatggaagtctgcatcaacatcaataaaggagtctgaggaaagaagaagaaaaatattaagttggttaattaaagctttgtttaaaagcagaaccagataaagtacaagtaccagttgtcccttagctgttgagtcttttgaaagaccactactaaataatgctctgcaatgacttgaaaaggaaaaaatattacattcaaaaaccaagttatcacattagtgtaaaacccttagtttgtaaagtgaatgtttcattataagtgactacatcattggatcagaaaattcaaatgttatatggataacaattagaaatataggtaatacatttaaaaacaaagttgctgtaaaagctactaaaatattcagtgtcaaaatatgtattgatcgaagacaaaatttaaccaaaacaaggaggatggggatgactaattcaagagatgacacagtttcataaggactatgtaaaacacaaagagccataaagccccaagctggacattgtattagacaactgataaacctaaatgggcaccactctgtggattcattaattagggttgggttacacctattcactgttggtaaaatactgattttaaccattgataaaagcagattatccttcagttttaccctcaagagtacattttacatattttgcatttcttagtcacatctaggactcatttaatctttataaatagtgatgatgtcatcaagctaaaagctttacttatgaaatggttattctgcatagtagaactactaacaggactctagttaataattcatgggcatttgctttggatattacccacataaataattttaaaagcatgccttgctattttcaaagtttgagaaataagatagatccaaattatagacaacataaaaattttttaaatgtggaatttggccttaccactgttctttaaacattcttgaacaagtaagaggacatctggctgagacatctaggaaataaatcaatgaatacatgaaattattcctaagtgattttgcttcactgatataagagtcatccgaagttccccaaattcctttctaaatgagaaatgcacattgctatcaaagtaaagaaattactcactatgttgtttgcatatgtcagtcaaagacagacagatcaacaccaaatgaagacaaatgtgggcaagagacctactatacaactaacttctgatttaactaattattgaggttaacctgcctctcagcaagtctcaaagtggtagctggaagtttgtcaaactgctaacaatattacctttcactctaataccattgcaacagatagcttactggtcccggagtcagtcttgcacttctttttaaaatccttgtttcgcaatggagccagggccatttaaaatcataaactgtatccttacaactctcaatgacttcttactgcccttaggtcaaaaccaaattctttatttaccatggtctacacaattcggccagtcaagcccagcctacctagccatcctaatctcctgctcttctttttcttggtcccttcaccatacttacacaacctttcttttagctccttgaatatgccaaactctttattgatttagggtatttgcaaatgctgctccccctgcctgaaactcttttccctcccgtttccccctctcctgcaggctccttttcgtcttttagaactcagcttaaatgttccctcttcaaagaagccttcatgactgctgtatctctgcccagaccttgtcattttctatccctgaacctttacctgcacagctctcactataattacaaggtaattactaatctcctttactagatgagttccataaagaggaaccatctctgttttgtcctttataacctagtatgtctgccatacaaatgggatgagtgaatatttgctaaatgaattaatgacaccggatcaaaataactgctatggctggtaaatcactgatcagaatttaaggttaaaaaaacagtctattgggtagcttaccaggtagctacagcactcaggtttagcaagaagtaagaggttgtaaaatagaacctctggggccccagaatctggattttttttgagagaggtggggctggccaggctgttcatgaactcctgggctcaagtaaccctccaacctcagtctcccgagtagctgggattagagggtgaagccactgcacccagctcagaatatggatttttaacaagcaacccaagtaactgcaaacacatcatctataaacaggcctgtgggaactaacagcagagaaatggataatctactaaagtgcctttcagttttttgtttttttaagagatagggtctcactatgttgcccaggctggaatgcagtggcaattctcaagtgcagtcacagctaactacagctttgaacttctgggctcgtgatcctcccgcctcaacctccagagtagctgggactacagaactgtgccgtgtcc

SEQ ID NO: 52360 - DNA, 2963 bp, Homo sapiens
tctcttctggtcacaaaggtttctccatataaccatatttgctgtcattttctagaaagagtaacttctctcttcctccaaagacctcaatcaactcctactgcttttatacagaagtggatggctgcagaaattctgtcagataatggcagctaccatgatggtgtatcttattatgcaacagatgtaaagcactttatatgtactgccttatttaatccctacagcaatcctgctaatactgtccccattgtacagatggggacaatgcgaatccaagagaataacttctccaagaacacatggctaaatcaaagtaaagggattgaaaatatagattaaaatatggatggggccaggtgcagtgggtcatgcctgtaattcccagcactttgggagggtaaggtgggaggactgcttgagctcagaagttcaagaccagcctggacaacatagtgagatgtcatctctagcaaaaatgaaaaaaatcagccagcaagatgactcactcctgtggtcccagctactcaggaggctgagacggaaggactgcttaagcccaggaggtgaggctgtggtgagtcatgattgcgccattgcactccagcctgggtgacagagtgagactctgtctaaaaaacaaacaaacaaaaaaaggatgaaatcctgaaattcagccttctaactaacaacataaaaactggaaagaaattactaaaatcccttcttggaacatacccattcacatctagagtggactagcactgaaaggcaatataaccttctaaacctactttcacaggcatgcatggtaaaaactgtcaaaatctcaccggagggactcttggagggtaaagctaggtactgatgaaaaattcttggccaggcgtggcagctcatgcctgtaatcccagcattttgggaggccgaggcaggtggatcacctgaggtcgggagttcgagaccatcctggccaacatggtgaaaccctgtctctactaaaaatacaaaaattagctgggcgtggtggcaggcacctgtaatcccagctactcgggaggctgaggcaggagaattgcttgaactcgggaggcagaggttgcagtgaaccgagatcatgccattgcactccagcctgggcgacaagagtgaaactccatctcaaaaaaaaaaaagaaaaaagaaaaattctcataattacttggaggaagactacctggcttacctcagatttattgtaataagagttctctatattcggcattccaagtttcccatattttatttgcatatggttcacaaaggacatgtgtatttgagtggatgctttccagctaagatcattaatggcaatgtcccaaatacattaaactggcaatctaggacatttgaaggctaaagtaggggcagtaatgtagagctgaaaaaaacagaaggtagtaccgtatgtgggggggaaaaaagcaactccaccataatttccattatatcttctcacattgttgaataatacccttccttattaagacacaattttgataaagaaatttcgatctctttaatgagatcctttttagtttatactttcagttgaatctctctaaactaaataatgttataccgaagcttaatgcttcctatatgaagattttcaagggatagaaactgaataattctttacttaataactgtgaaagcatatacctgtatgtcatacagcaaaaacatgcaaacttttgaattacctccaataaaaaaatagcaaaatgcatttcctattcaaatacacttaaaagcaacttctttagttgcttttataagaatacacataaaataagaaaacatataaaagtttttgtggtcagccaacagttccttttaatgtctagttgcaaatttttgatctataaactttctttttaaaatgcttttcagccgggtgcagtggctcacacctgtaatcccaacactttgggacgtcaaggcaggcagatcatgaggtcagggtatcgagactacccctggccaacatgctaaaaccccaactctactaaaaatacaaaaattagctaggtgtggtggcacgtgcctgtagtcccagccactcaggaggctgaggcaagagaattgcttgaacctgggagatggaggttgcagtgaaccaagatcgcaccactgcactccagcctgggctacagagcgagactccatctcaaaaaagagaataataataataaaatgaaatggttttcaagatcaacttctacaagactataggtaacaaaattaaatacccacatcccacctggacagtaatacagaaacacttaaatatacacaatttttaataaagaaaaacacaaatcaaaagcccagaaattatcaagaaatattcggctccgccgtcaggatttcaggtccagcgaggctgagttaatggccagagtagcagagtccccaattttagttctacttcctcatttaccgcgctgcataaacaggtctgtggaaatttaacctctctgagctgcagctgcctgatttgtaaaactgtgattccatttttgatatattacaacagagtactgcatcagataattcctcaagctatttctagcttaaagatttaagttttatgtctccctactacttaacgcctttataacacttcattctgtttctgctacttgatattaatatatactcttaattttcaaatttaaaaatatctgagggccaggcgcggtagttcacgcctgtaatcccagcactttgggaagcagaggcaggtcgatcacttgaggtcaggagttcaagaccagcctggccaacagggagaaaccctatctctattaaaaaacagaaaaattagctgggcatggtggtgtgcacctgtagtcccagctacttgggaggctgagacatgagaaccgcttgatcctgggaggcagaggccacagtga

SEQ ID NO: 52361 - DNA, 4130 bp, Homo sapiens
ctgggtgacagagcgagactccgtctcaaaaaataaaataaaatataaataaacagatctgacaactagaagtatctgtgaaaaaagaaaaaaaatcaagtagcacatttccccccatttaatattaataagtgcttgagactttcatttttatcctaagaccttgtaaagataaaagacgaccttttggcttttaagtattctatacgcatgggacacaaattcaaacaccttataggtaaccagtgtatgaactggccactgtgagataacatgaagagaaaaggcatcgggtgatctagaaagtgtccatattccctgaatgcatttaaactaaaaaaatttatttaaaagtgctggccagtttgaaacacattctatacaaccactaaaaaacgctttcagccactaaacttacaagtccatgtttccaactgtgatattgtttcattttttccatccaatttgtgactttatttcatttcggtatatatctcccattagataaaaataaccttcctgtttgcagaaatcgttgccacatggataaaatctactttttacttttagaaaaacatattatctccttattatccctttggggcaattaaccaagcatgtgagggcaccgagaaattagttttggtcttactgaaaccaaacagcaaagcttgaatctatttctgactttctaaacttgtttctcaacctgtttgtcacgatcccttttgaaaaacaaagatctcagattatccatctcgggacactgacactacatccaaaagatatatctcttgtggcaggagatatacgcagtgtatactgtgtttttacatcaacaaataagttttttttttaaaaaaagctttatattctgtcatttatattatgaacacattaattattcaaatacaaaattataatcacaattttgaaaacacacaaaccactgagcaattacgatatggtcccctggagcatatagctaccctcttctgtaaaaaacacgttacagaaaacatgtttactgacgtaaagtgagccctggggcaaagtaaacttttaaagggatcaacatatgaaatgtgttttagctgctcaaatatcatgattactatccttaaaataatcacactaagtgaccatttcttaaaacagaaactgtgaaaaactgaaactaaattgctgaaaataacaaaactcatttggatgaaaaagaataaaacattgctgactctggggttgtgatctgacaagttggaaaacattaccaggacttcctgcttccatttctgacgtggtttctaggcttgttaggtctttatgaaacagtcgtcttacagttctgcagcctcttgtgtcttgccacctataaccatcttcattttcttgaaaggagtcttttctttgtcggtttataacaggaattctaggtccaggtttgaattctctccagttgtctgaattaccagtatgttcatcagacagccatctcttactctgatctttgtggctgtcattcatccaagcgggttgactgtagattgggtttttaaatgcatatggattgctggaaacagcacatggtccttttctgggggtattcccatagttccctggtgttatcttctttttttgaaggcccttttccattttactgccatggcctttagcatggtcatctattattaaataatcttgttgggggtgaccccttctgaagtcatcatcatccatagtcccccggtctttagtgcgcttcacgaaataaggttttgctgtatctcccatggtctttgacttcaattttcttactttgcacctgaaagaaggtattttggggaaatatcaaactatataacaagatatcatacaagtatacaaaataacaatttatcgtacagatgccccaaagcctgtaagaaagaaactccctatttttttaaaataaaaattctatcacattcttaataatcagtgctttaccctagaggttgggaggcttggtcctctaatattcttcatgaaaattaatacttactatttagcatgaagattaaatgtgtgaataagagaagctctataggttccagaactgtagcatagtagaatattactcatatcaagtatggtcggcttttccctctgtaacaaggcgtttctcttcaaagaaaacctcatcccaagccaatattattactaaactaccgaaacagtcttttgttttttaagttggcaattacttgtaagtgttatacaccgaaactttacgtgaaaggagtactacatttctcaactccaattttccgtcccttcaccacccctattctggacagaccggctttgagcgcttaggttacggaggggctgggcttccgaccaaggtgcagctgtaattaaagaggctgggtttccgatcaagggacaactccatctaacctcctcaatccccgttctccaaccccaaacaagtttggttttgtcaggaacagcaattccctgaggaatgacactcctcttcaatccccatctgaccgctccaccaccgatctgccttagtttccacccttttgagcccgacgtggagaaagaggaggcgtccctgcactcctggccaagaagccaccgtggggaccaggaagcaggaagtgacctgctgtctccatggggttccagggttcccccggccggccagggggccagagccgaatgtcttgacccaaatcccgtcttctgcgcccgcagtctgacaaaaagtgaaaacacggactcgaacccgagggctcagcctctgccggcctgggggttcctcggtcacccaaactggtgcgaggaggccggcgggggatggaaccaacgtacctccggggccaggccggacagctactctggagtccaggaaaccaactggagaatcagcccggaggcgagtctggcagggacgttgggagaaggcgcccaagagcactcaccaccttcgccgcggtccccagcctcttcctgtcccggccgggctccctctccgtgttttccttcggccccacttccggcgctcagcgctgtctcattgtgcgcgattgggagccgactgtgcccccgccctagcgctccgccgcgcacaccggaaacgagcgacgcgccccgccccgcggtgccccgcccacgctccgaccccgcctcccgcgcctttgccagcctggcctctcctgtccggcgccccagcgcactcgctccaggtgtcgggcgccgggtctggccaccgggcgcaaccgtcggagcgggctaattactggctcgccggatagccggttcgccggcgcttgggggccaggcccgaacttcttaccagagcggcgcccgccccttttctctcccggcttcgacgctcctctggttcccctctctgctcgggaggctaagtgctcgggagaggcgcgggagccaagacttatgcacccggagagggacgcggagccagcggtcgggcaaagccgcattccccgcgcttggggcctcggctttgcccctgggtgctccccggttacttccagggggagtaaaggctccgaggcctcgtagcgctcttggtgtttttctgataattcgtagtgattaatgttttcgtgaattcttaattgccgaccttgtagaaatgccagcatttaaacatccactgctcacccagatctcaaagtggtcaaggaaaatgctctgcttttttcttaggttgtgtaaggattacttttacttggaaaaaaaaaaaatcagttcatttcgaagaatatgtgtaatggcaagggatgaccagagagcgttacattcgaatttttgagttgaagagtgcacacctcgaactcggggttgctttttctttctttactgtatgaccttccttgctgtttacagtgttctaaatgctttgaaaaacatcaagcaactagtgaaattagggagcgttgggaaaatcgacagttttcatttctctgcttttttaaagcatgtaaattgaaagctgtcaggtcctgtggagcaatggtcttaaaataataacacacaaagttctggctatgccaataactgttttgaaggctttacaaatattaactcctttgttttatatttttgtagag

SEQ ID NO: 52362 - DNA, 2123 bp, Homo sapiens
acctgggaagtcaaggctgcagtgagcctgatcatgccactgaactccagactgggtgacagagcgagatcctgtttcaaaaaaaaatacataaaaataaatttatttctttccttccttccttctttccttccttccttccttcctgcttccttccttctttcctttctttccttccttccttccttctttctctctctctctctctttctttctttccttctttttctttctttctctcgagacaaagtttcactcttgttgcccaggctggagtgcaatggcacaatctcacccactgcagcctctgcctcccaggttcaagtgtttctcctgcctcagcctcccaaatagctgagattagaggcacccaccaccatgcctggttaatttttctggatttttagtagagatgggatgtcatgatgttggccaggctgttctcagacccttgacctcaggtgatctacccacctctgcctcccaaagtgctgggattacaggggtgagcctccatgcccagtaataaatttcaacaaagaaaatgttacaatcttgttacaggtatgccaagatcatatgcctactgcatagtaatagaccaatacactgagacagcatggtttgcagcagagaaagagtttaatgattgcagggcagccaagtagagagacgagaggaatcctcaaatccatatcctccggggagttctggactggggtttttaaggagattttggagggcaaggggctggaaaattggggctgttgattcattgtggcaaggggatgagatcatcaggatgtggaaacttcattcattggtgagtcaacttctcatagaatcctacagaccagctggcatcagtagtttcagtatgcaggatctgaaagaatatctgaaatggaaaacaatatttcacaatgcttaagttgctatctctagaacagttcaggggaagtataatcttgtgacagagtttgtgtgattccagcgcagtaggttgtaaacaactatgaggaaacaggtcagagaacaagctggcctaatgattaatgctgaatgtgctgcaaggttggtttgttttcatttctccatctccctttttcactgattaattttataaagtttataggaacagttttgatcctgttaaatttcttttaactttggagcactgacttcattttttttgcagtctgtatttccaggatggctattcccagttttttgctggaataaactcattaaaactgaattctcattcttttggttatttcaggttgacagttttatagagctatatataccttgttacctgctacatcatgtagctatttattattgttatttatttcttgtcttttattttattttccactaaaatataaataccacaagggcagagattttcctgttgggttaacctgtatgtcctccagaacgtagtatttcatgaggtatataaaccacatttactttatctgtttattttactggacacctaggttgattccttatcttgcctattgtgaatagcgctgcaataaataggcggatgccaatgtctcttctatgtaatgatttcctttgccttggataacttcccagtagtaggattgctggatcatacagtagttctatttatttttttttgagacggaatttccctcttgtcacccaagctggagtgcaatggcgccatctcagctccctgcaacctctgcctcctgggttcaagtgattatcctgcctcagcctctcaagtagctgggattacaggcacacatcactatgcccagctaatttttgtatttttggtagaaacggggtttcaccatgttggccaggctgatctcaaactcctgacctcaggtgatccacccacctcggcttctcaaagttctgggattacaggtgtgaggcactgtgcccattcctatttgtcatttttaaagggagctccatactgttctccatagtggctgtaagggttgcattctcaccaacagtgtatacaagctcccttttcttggccaagtgcggtggctcatgcctataatcccagcactttgggaggttgaggcaggaggatcacttgagcccaggagttcgagaccatc

SEQ ID NO: 52363 - DNA, 1527 bp, Homo sapiens
gtgggagtaggagaaagcttggaaattcagtaagaaaaaattgagcctaaggcagagctgcactgccaatatataaggagaaaattgaagagtggccttcattcaagaaaatagagttcgatgaaacaaaaaaagtaaataaaaaagataaatggacctaaccttgaactgtcctggttcctgaactggtatgctttatcccctgggcatggaacaggccaaagtgcctctcagtggggttgccagagcaaataaagggtgtcccatacactacttggaacattcttgtaccaaaaaaattgttcattgcttgcctgaaactcaaatctcactgggtgttttgtattcacttaatttattttgtttttgcttaattactctgtgagggcttgcgctctgggaaaggatcaacccagaggaatatttaccggctctcaggttgcctaaccatgctatcatcttgccgtgactgtgaaaaaaactcccttttcttcttattcccaatgttttactttgaaaaatgtcaaacctacagaagatttgtgagaaatgtacaatgaacttccatatgctgtttatatgtcactaattttaccatttttgtcacattttcttcctttctctccctttgtacgtgtgtatccttagctgaaccatttgagagttacagatatcatgatacccaagccccaaaacactctgcatgtctctctcaaaaattagaatattttcctatatataagcatgatgcaaagatcacactcgggtcatatttaacattgacacaatactattttctaatatgcagtctatatttaaatttctgcagttggcccaatactgctttttagcatggtttctaattttaattttcaatttatatttttagagactaggtcccgctgtgctgcccagtctggtctcaaactcctgggctcaagcgttcctcccgtctcagccacttgagcagctggaaccacaggtccgtgctgctatgctcaagtcagtttttgttttttaattcaaagtttgggcaatgatcagaccttgcatttgttttcatgtctctttagtgttctttaatgtaaaacagtttgccagcccttttaaaatttgtgcatgatattgacatttttgaagagttcaggctggttcttctgcacgtgtctgattgttttcccatgactagactttggttaaacattattggcaagaatactgcacagggtgtggttgtgtcatgggtctcagtacattacagagcagaggactggtgatgtgaattgttttaaaaattggtgatgttgaatttgttcatttaattaaagtggtgtctactggatttccccatcataatcattcctttttttctttataattaaaatataaccagtgatgtgctactttgagactgcgtgaatatcctgtttccccatctttctcccaatggttttagtacccacagatgattcctttgcgaatcatatattactgtggtagttacgaaatggcaattttctttctttc

SEQ ID NO: 52364 - DNA, 4876 bp, Homo sapiens
tgccttctagctctacttctgcctgtattttttctgctttatgatctgtcaacttggacacaaaccccactcatactcttaacccacttccaagcctttatgggcttagtggctttggtgagactttgaggggctgtcttctttatcactgcattgactcttcttttttctctctcttttaactttctctttccttcagtctcttcttcctccttcacttcaggagtgtcacagacatctcacccttctcaggataattttgtggaagccacagtgccagccaacatccatgaccccatgggtacctccctggctgaagtgggctgacccagggtcttttcccaacaatgatggatcctgtacaagatgaattctggtacctgctgctaaaaggatacaatttcattattgttatgggctgaatgttgtgtacctccaaaatgggtatgttgaaatcctaacccccaaggtgatggtatcaggaggtggaggctttgggaggtgattaggcaatgatgaagaagccctcttgaatgggattagtgcccctttagaaggcaccccatagaacgccctcattatgtgagacacagtgagaagaaccaggaagcaggccctcaccagacatggaatctatcagtgtcttgatctgggacactccagcctccagaacagtaagaaataataagttcctgttgtttataagccaaccagtttatggtattttgttataaaagccaaaatagactaagaacattatgttatattagagtgatatcatataactgatcaagtttggaggatgtccagtgccctagcccatgccgtctgaggagaggttgatgaagagaatgatgagaggaagtgagaataactttctcacctttcctgagacacattcctcctaccatggtcccattacggggccttcctacaatcactttccagctttcccttgtttccctgtttctaccctcagacaaagtagtagaatgattacattctcaagaggtcctgtgaggatgcttgggcaaaatcagactcatgtcaggccattttaatttctagaatccccggataggacctgcggccagctcagaaagacctgatggtaatgtgccatcttcccttcacaaacacttgagtgggtctgtctaaatgtcctaagtggacatttctgttatcctcagtttttcttccagggttcgtcgcatttctttgtgaaaagctaccttatgcaagcattttgtgtgatactgttcagagtctgaggttttagcgctgaccctggagaccgttagttttattctatactaggtgtttgtaagtggggactttatttagataaattgacaacagcaaagtgccaccccacttcaccccaacattcattaaggatttgctgtgtcccagaaattatactctggtggttatacacattgcctcattatatccttaaaactgctttttgagacagataggattgtgattcctgtagcaatcttgaaactggactcagagagggtaggaagtttgttctaaggcgcacagctatgaccagcacaactgaatcttaccttaactcacatcaaagcctctgagcttaaatattaggctatttaccatggctgtgagagacggggaacaaaaaacagtgtttagttaaatcaacagctatgtttacactctctgtataaacagtgcaatgtcctcaaagaaatcacacaagaaggaacagtaactcctgccaacacactggtaaacttggctctgccaaaactattagctcttgttttcactcatcaatgtcttatgtttcttttgccatcatctttttttattcattaaccccagagcctcaactatctctcatttaagataattgttcttatagttttccagaaaaacccatttctccttttactttttcctagtatctcttcccataaaaggcaatgcccctaaatttgtatcattccaggcattagagaaccaagctcagaaacacttataagatttttaaggttatcgttctccccccaaaacacatgcacattacctttgcagagttattattcaaaatatagacttagaagctctctgggctatagtcagctggtaattaattataatgacttcaaggtatgttaaatttgtacgggggtggggagagggtcacttgcagcctcaagaggacagagcacaccgtgaaccagttctggaacctgcttacagatctcaaaagttcctgcagcaggagggctaatgacattctcccttctagaaaagcagagtgactcaggatacagatgttccgcctaccctgcatttgtaattatgagctggctgtggtacttcccagggagtctttgaatcatctgttcttgcaatttatcttgccgctgctctttttagaacaatctaggacatgtcagctgaaaacatgtaccagttgcttgcaaagaaaagaatggctttttgtgtgggggtgggggacacagagcgttctcttcctccctctctgctggggaacatggtaggcagaatgagctaataattctcagagaaaaaaatatgagccctgaagaaccccaatgcctagagagcacgaagtgaaggtagcttaatgttagtcctggtgtgtatacaatgagggccagagcttcaggaagacgtgctaatttcactttaattaacacatactaatgcaaaggagatgaaccagagaaacttgaatttgcaggcagactcatgaaacaaaagtaaacctggtacctattgtgaaatcatctttggtgcagtgtggctcaggaatgtgccactcctgatactttttttcatctgcacgtgagtgtctggactctggattcagaaaaacagatggaactttaggtcagatgggttcctgagtcaccccgacacagggggcaggctgtattttaaaaatttgttgagtatttatttgtacaaagcattctgtaaggcactaaaccgtagtttctgctctagtcttctttcaatgacgggttctgggaggggtgatggaagcagaagtgatagttatttatgtcacagactttgagagcaaaaacgtacttcagaggaatgcttctcaaagatttctcaaatgcaggttcatggactagtgataattatgaaattaacaatttggacaaaatgagagacaaagaaacaaggtgagctttgtataaagctaaatgtgttcagttgaaaaaattttttttctttagaacatgtgtcctacttttcttatttttaaaagaccatttcatggtgattttaggggaataagaccattctcctttaccctctcatttctgcccccttttctgccagaggagaagcacctcaagaaactgacatccagatgggaatcaaagtcccatttttgacctagttaagccctgcttccaggccagctctcgtgaagctgcgatatggacttttagttggcaggcctgagggcagccttctactttctcccctgaaaccagattcagacaggtcccttctacaaggtccttctgactcattcctggtcacgggcagagggggtggagcagaaagtgaattacagatttgctgaggtcagccctgctcagcttgctggctacacaaagataaagacatttacaggtaacactgactctgtaccttgcccactggggaaccatgcactgtgatgccagccctcactcatcagattcagtacttctcttccttttggatggcagggaagtggagtggaagctttcctccccgcattggtctagaggtagaagtgtgcggggaggaagatctttcctccatggatcaacatggggaatgcaggggggtgctgggtaagctgcggtattcactaaaagagcctcaagaagccttgaatttcattgcaacctgccagcattggatagcttagagttatccaaagaatcataagtgttcttaattccacagctgggctaagaaggattttttttttattgaagattaaagtgttaaatgctggtaaaatacacataacataaaatttaccacgttaatcatttttaaatccacagtttaatggcattaagtacattcacattgttatgctatcattgctactatccaaactgaaactctatgcccattaaacaataactccccattctcatctcctcccagttcctgacaaccattctgcatgtctttatgatttttttgttttttttttgagacaggtttcactcttttgcccaggctggagtgcagtggcacgatcttggctcaccgcaccctcaacctctggccacaagtgatcttctcatcttagccttctaagtagcagggactataggcatgtgccactatgcccagctaaatttttgtattttttgtagaggtgaggtcttaccatgtcacccaggctggtctcaaactcctgagcttgagcaatctgcctgcctctgcctcccaaggtgctagggttataggtgaataccactgcacccagacttctctatgaatttaactgctccagattcctcatgtaagtggaattgtgcagtatttatctttctgtatctggcttatttcgcttagcctaagtcctcagggttcatcaatgttgtagcatgtgtcagaatgtcctccctttttaagactgagtcatattctattgcatgtatttaactgtttgttctctaagggatttgagacaaaccctcagcatggtagccagtacctgccacattaatatgaatagttctgggaatggcctaaagttttgtgggcaattctagcatcttcctgagcacagagctggagagtgcacagaggcccagggtaaattctgtatctctgctgagaaaca

SEQ ID NO: 52365 - DNA, 689 bp, Homo sapiens
ggtcgctcttcaggacccactgtaaatatgtgtcagtggtatcttaggaacacaaacgctttattggctattttttttcttatttggctgtggtgtgcttcccttcacccatttctctcttgttctttctttgctaactcataatctacatatttttactttcagggggagttttatacctggtatactatttgtagccttcgtagagggttctccattctagtcacaccgatttcctctctgctgcagacattggacactggcctagtgttccagaagctctgagttcagagtcctcatgtactaatgccagcaacagtcagtttcacagtgcctctggccagctgcactcttatgcaactcaacaatttctcaccttttctccttttaaaaacaatataagcaacaaaaccacccagctcccactgctgcataacccagaagtattggaaagatcacttcatacaattcttgaggcaatcctgcaggatcaagcaattaggtccttggagtggtggccagctcatcaaagcctctttgtactggtgcttcccctgatcctgttttgttcccttgtccctctttcctgctcctagctaggatcacactccccaataaagtttttgaacaatgacctgtgtttaggctacatctttctggggaacttgcaccaaaactccattacatac

SEQ ID NO: 52366 - DNA, 1638 bp, Homo sapiens
agcgccgccgggcctcggtgcagcccatgaccccgcccgcgccggggccgcccgcgccgccgccgctcgtccggggcaggcacggctcaatggcgcgcttggtggacttgcagttctcgtcctgcgcgcagtcacagtcctccagggcgggcccgcggcgcgtgtggttgagctgaatgagggccgagatgcagtgactcgggcagcgccagcgcgacgagaaagaggcggccgaggccgggaaagcggcggcggcggccccgggcgcgtcgcccccgccgtgctgcgccagcaccggcgcgcacgcctcggcgtactggttgtaggcgtagctgcactccggctccccctggcactgcagcagcgcctgccagcagatgaggcggcggccgtgcgccagccccgatccccgcggcgccgagcccagcagctgcagcagcgccatcaggcacagccaggcgcccggcactgtccccccgcgggcctcgccgccgccgcccagcagcgcggccaccatcgcgggcagcggcggccgccgggagaggaggggaaaggagacgaggcgcggggagcggcggacgcggagccggtggaaaagtttgtccaagtcctgcccacttcttgcatgagtgtcttcataaatccatgcgcgccgctggctgatgccccgctggtggcagaaggtcccctttcgctctggctgcggtggcttcctggaaatgaacagctgtcgagatctggtcccgctctcccacccgagagccctccgctcggcccccggtggtggcgggagaggctcactgtcgccccgggggggtgcgggccgcggggccgtggcggggctgcaggaccgcgcggcgcggcgggtgcattttgctccgcgcctgcagatccgttgtgcggccggctgtccccgtgccggctgctcgcgctgcggccgcggcggctccttcctcctgggctcagtgcctcgccgccgccaccgccgccgcggtctctcgcatcgcgccgcttcctggcccggcgtccgcgcgctgcccgccttcccgcggcccggccgccccgcgtcccctccccctccgcccgcggcaaccccggcctccgcagagctccggggagctctttccgggaagcgcggggagaacaagaaagtcggcgctgccggagagcggctccctggcttcactcggcggcagcttctcgggtgaccaagagcccggggagcggatccgctgagcccggctgcagactcgttagcagcgaggctttaaatacaaaagtgggccgggagcccccgcgtggtgccgcggtgccccctcattatgcatgcatggaaaagcaaacaaacaaaaacattagcaacgctcctccggctcgccgagccccggccccgcgcgctccgagcctgcccgctttctcctttctccactctctttcgccctttgctcggccccctttcccggcttttcgagatgctattggtcctgcctgttgttgttgaaagtttttttttttttttttacgagccgctggagtggggttgcggagtgggggagggcgggagggtggtgggcagctcacattcaggcattcagggcttgaaaggaacggcttagggagcctgacggaggcccggag

SEQ ID NO: 52367 - DNA, 339 bp, Homo sapiens
ccctccttccagtgctgccaggagagggaaaaggcactcagggagtttttgctggagataagagcaatttttgaaaaaaaggtagtaaggcaggaggtggagtctgccacgggtctctttcaaacttgctactttccatcccgttaatacaatcccggccctgtttcccggccccgcggccattgcagagtcatgaagtcatcgcagctgcgcctgcagccaggcgggaacgggaacgggaactggctggccgcggtcccttctgtcccccgccagccggaaatgtccgcgcgctgaaaagcagacgctgcctgcccggggaacggcgagagagagcga

SEQ ID NO: 52368 - DNA, 1449 bp, Homo sapiens
tacaaaggcagtctagtacccagacaaggaggaggtctgctttgggaaagggctgttaccgtctttgttcaaactataaagtaagtttctcccaaagttagttcagcctatgcccaggaatgaacaaggacagcttggaggttagaagcaagatggagtcagttaagttagatctctttcactgtctcagtcataaatttgcaaaagcagtttcaaaagctgtgcttgtcagttggcctcacatctgcatgtctacttcagtggctacaaaatttctagagcttagcacctttctccacttttgttggacacctggctcatcccacaagtacttctgcaaatataatttttatttaagttgtttactttcctcagaaactagagcatcattgagggagcaaatgtctgtaaaacatttagggagcaaatgtctcaatcccgaggctgaagcatgaaagcctgacactgctccaaagtacgagcttgctctcatgacaactttaggttcaagatcaacagttggtgatatttagggaaggccttgctttgttttggtgtgtagttaagcatcactcctgttgaagagttttacacacacacacagacacacacacacactagagaaatacagagagtagaaggtagatacgcaggtatgcagagtatgtggagatacagcatcaaggtcagaaacatcactggggtccaaactcaaatggcttcacagccttccaaggaacattaatgtgtaaatgtggttgggggtgggggggtgcgggaaagaggacaatagggaaagataagagctgcacgggagaagagagtgcccaaagtcttcaaatttcaatgatttttaattcatactttgagacatatctgcaggcagcagaggcttgaagatcacagcctgagacatcctgattctgtcatgctgccagaacattgcctcctctactgctgttgttggcactaaaccttactgcccagactgccatccaattagtaataggattcatcaacacttttgaattaagtgaggggggaggtacagaaagatgtcattcattcatgcccaccatcataggagatgcaaccttcataaaataaatccatgccctcaaccagctagggaacaatgtggggacgtagggtttgtaaataagggccggattacaaagcagtgcaggatcagtgtaaacaagcctggcatggaaaaatacccatcatggggtgtgagagtatgatggattctttccagatgtggtcaactagaaaaacattacgaaaatatttggggccgggcacagtggctcacacttataatcccaacactgtggaatgctgaggcaggaggattgcttgagcccaagaattcatgactagcccaggcaacacagagagaccccgtctgataaaagaaactatccgagcatggtggtacacagctgt

SEQ ID NO: 52369 - DNA, 606 bp, Homo sapiens
aatatatttctttgtcgtccttgaatttttatccttcgcaggagaatccccctgaaaatgagaagtttagtcactccaggggttctcaaattttgctgcacgttaaaatcctctagagtgcttttcaaaaatacccatatttgggccaggcctaaacaaatactgatttactcagtctgagggtgaggcccagataggattcatttgtaaaaactttccaggtgattccaattcatagtcagtttgagaagtagtgagcacttaattaagggaaaatgcaaagaaaagaaaaaagaaatactgggaaaagaaaactttggttaatattttataatattgtgcaatcataaatgtatcaacattatgcaatcgtacataaataccagaagatggaaaagtccttgaaaatgaatttgaatgtcagtgtgaataaattagaagataactgtggaaaccttacataccacaggcatctaataacttttttctttttgaaggctcaggatatctgaatgcttagcaaatcctggcatggtatttggaaatccttgttttccaacttacatatttcagctgtcttacatttttttctaaagtccagtggcc

SEQ ID NO: 52370 - DNA, 677 bp, Homo sapiens
aaaatccacctctggtcaagcatgagatccatgtttgagtcctgatgtgccctggcaggtgaaggcaggttctgtgtctttaactgacaagggaggaaagggggtgaccagaggcgacagaaggagatgatgcagagaaggtgatgagaaaagctagtggcctgaagctagtgtatgaaataggagaaaaagtacattgaagaatatgagcatttttacaaaggcaaattgcgctctcccgcgctagtctgcgacaaagagtgcgtgtgttagccaagcaaatttgtcatcaatgattaacttctggaagaacaaattatttgacctctccagctgaacaaacacagaactgcagcgactaaaagagccaaaggcaatgcttcagcaaaactgaacacattttcataaaagtcctgtcattttatgtcacaagagccttagggaagcttaggtaatggtgcctctttagctaaagaaagagatttccctcggcctgggttgtggctgcagtaaatgaatgatacagagaatggctttagatcttgaggttgattttgctacagctttgaaaatgcctagggcttctgaaaaggagagtttgatttatgaaaaatatgtttctgggatattaacaaagaaaatgaaggtagtaaaatggttcaaggagccagtgacat

SEQ ID NO: 52371 - DNA, 2248 bp, Homo sapiens
caaaacaaaaagtgaaaaaaaaaattaaaacacataaaacagaccataggtttgttcaagaacccctaccaagttaagcgactgatctcacacaaataagaggatttcactttattaaaagtaaaaagaggcccagaattccaataaaaagagagtaagattactattaatgattatggcttaattagctccaaataaacaatgatgatttttagtgttcctaccaaatctccatcaaacactggaattatttccttgcctctcctcactacacccaccccaacttttcaacccaatgtatcccttgttaagtttagcttaaagctgcctccttacctcaaaaggttcctctgtacatagtgaactgtaacctatctgaatgtgtaaacagactgtaacctactattgtattaattgtggagtttcagccaatcacagacagccaactgtacaaactgtgtttaaataaggccaagctgtaaccagtcctgctgttcctgtgcctcacttcctttttctgtccataaattctctgaccactgggcagtgccatagtctttctgaacctattctggctaggaggctgcccaattcaagaatcgttctttgctcagctaaactctgttcaaaataatttgtttaaagtttttcttttaacaccctaagctacctctgctcacatagaaatttgcatattcccctaagagaatatgatcttaaccactggaaatttagggctttggggaaggaatgttgacttatttgtcttcatatcccagggtcagtgtgatacttgtcacaaaataggtcctaacacttgggatatctgcacagtctcagtgcagatactacttagcccaggggcctgatggccaggctgattctctcctttccgttcggagtcctctgccgcaaacacgctccgccggatcatcagtcaggccaagaagcatccgagcttgatcaccctctttgtatttattggagctttgtatttattggagatactggagcagcactgtatgtcttgcgtctggcattgttcaatccaaatgttagttgggacagaaagaataacccagagccctggaacaagctgggtcccaatgattaatacaagttctactcagtgaatgtggattacagcaaactgaagaaagaaggtccatatttctaaatgaaatgtttcactatgaagctgctttagaatgaaggtcttccagaagccatcctcacaattttccacttaaccaggaaatatttatcctctgaattcatgaaatcatgttgatgtaatctattggagattacactgattaataaataactgaaacttggcaaggtgtggtggcttacaccaataatcctagcactttgggaggccggggcaggtgaatcacctgaggtcaggagtttgagacgagcctgacgcacatggtgaaaccctgcctctactaaaaatacaaaaattagctgggtgtgggggcatgcacctgtaatctcagctactcaggagtctgagacaggagaatcacttgaacccaggaggcagagattgcagtgaaccgagttgacgccactacactccaggctgggtgcaccactgcactccaggctgggcaacagagcaagactccatctcaaaataaataaataaataaataactgaaacttgaaaaaaaataggttttaggggggcaagagcagtaactgcaggagaaaacctcctgagctgataagaggaaatgaagcccaagagcaaagtggaggtgttggccttccttctttataatcaacgggagtgtgtggaggcagaggcagtgccagacaagggagtgtgtacatgcttaaggctttctatgtcctcttgttgaatatcaggcacatggagacaaatgtgaaagatctgacaggagtgaaggtgtgaagtggtcaaacaagacagtggaaaaactaatatactagggatgcttaataaggttactgggtggctgggcatggtggttcacacctgtaatcccagcactttgggaggccaaggtgggcagatcacgaagtcaagagatcaagaccatcctggccaacatggtgaaactctgtctctactaaaaatacaaaaattagccaggcgtggtagcacacgcctgtagtcccagctactcaggaggttgaggcagaagaattgcttgaacctgggaggcagaggttgcagtgagctgagataacgccattgcactccagcctggtg

SEQ ID NO: 52372 - DNA, 1234 bp, Homo sapiens
ggatgctggtagcgtggctcagtccaagtctgaaagcctcagaatcatggaagccaatggtgtaattctcagtctaggccaaaggctggagaacggtgtggctgctggtgtaagtcttagcatctaaaggtcaatgagcctggagttctgacagccaagtacaggagaagcatgtcgaagctccaggaaacagaaatagaaaattgcctttcttttgccttttttattctatctggacccctacctgatcgaataatgcccacccacattaaggacggatcttccctcctcagttcactgactcatgtgccaatctcctctagaaacaccctcacagacacactcagaaataatgctttgcccgttctctaggtattccttaatccagtcaggttgacacctagaatttatcatcacaagtccattccttgtcaacctaacactcacagccatctcctcaaaccatacttaatcttcaagtaaggacgagaacaaggtagtaattctccataacatgatgcagctatcctgcatacaactgaaaattcacaaattccttccccaggttgggtgcagtggctcatgcctgcaatcccaatgctttgggaggctgaagcaggaggatggcttgaggccaggggttaaagaccagcctgggaaacacagcatgacttcatctctaaaaaactataacaaattagtcagatatggtggcacgtatcttgtattagtcagttctcacactgctataaagaaatacctgagtttgggtaatttgtaaagaaaagaggtttaattggctgatggtttcacaagctatacaggaatcatggcagcatctgcttctggggaggcctcagggagctcttactcattgtggaaggcaaagtgggagcaggcgtcttgcatggcaggagcaggagaaagagagtgacagtgggaggcactacacacttttgaacaaccaattctcgtgagaactctataacaagacagcaccaagagggtggtgctaaaccattcatgaaggaaggatctattcgcatgatccaatcacctcccaccaaggcccaattccagcattggggattacattacaacatgagatttgggtggggacacagacccaaacaatatcacacctacagtcctagctactgaggaggattgcttgagcccaggagtttgagtgagctatgatcacaccactgcaatacagcctgggcaagacctt

SEQ ID NO: 52373 - DNA, 763 bp, Homo sapiens
ctgcgcccagccggttttgtatttttagtggagacggggtttcaccctattggccaggctggtctcaaactcctgacctcaagtaatccacccacctcggcctcctaaagtcctgggattataggcatgagccaccgctccgggctgagattcttacagcatagctgatatcagagtgcatctctctctctcccctctcccccaggactctggagccatgagtaacaccaggcaggagagcacccaggagtgtgtggtttctgtggtggctgggccactgcaagtttccttggccacgtgaccattcttagcccaggaagacgactccagtagtactttcttcacttcccctttcacttctcttgttcaccaatgttaagggaccaccagtttttagagattcacccacattgtgaaggtggtgaggtcatgttgccactttgacaatgacatggcatttaatttttaaccaaaccaaatacagcattctgtcactcgggacaacctttggagacagctccaaggaagtctcccctcatgttctgcctgccggattaaacaggagtcttgttgaagaaaacatgaaacagggaaagttaagacctcagcagtcataactgttaataaaacatgagactgcaagaggtgatgttagaaaagaaacttaatgtccgcctaggtaatcatatcttcttatcgtgggaccaaagcataaatgtaactcatatatgtttgtccattaaaattaagtggtggatcacat

SEQ ID NO: 52374 - DNA, 3133 bp, Homo sapiens
tgccattctctattccattaacctgtttcgtggtaaacgtaggactgatcctccaaaattaccttattaattagcttacatatttattatctatctgtcccaccagaatgcaggtttccggaaggcagggatttaaaaaaatctgttttgttctatgtgattttcccataccaagcaccgtgcccggcacaagctgggatcccagtacacatctcgggacggaagaaccgtgtttccctagaacccagtcagagggcagcttagcaatgtgtcacaggtggggcgcccgcgttccgggcggacgcactggctccccggccggcgtgggtgtggggcgagtgggtgtgtgcggggtgtgcgcggtagagcgcgccagcgagcccggagcgcggagctgggaggagcagcgagcgccgcgcagaacccgcagcgccggcctggcagggcagctcggaggtgggtgggccgcgccgccagcccgcttgcagggtccccattggccgcctgccggccgccctccgcccaaaaggcggcaaggagccgagaggctgcttcggagtgtgaggaggacagccggaccgagccaacgccggggactttgttccctccgcggaggggactcggcaactcgcagcggcagggtctggggccggcgcctgggagggatctgcgccccccactcactccctagctgtgttcccgccgccgccccggctagtctccggcgctggcgcctatggtcggcctccgacagcgctccggagggaccgggggagctcccaggcgcccgggtgagtagccaggcgcggctccccggtccccccgacccccggcgccagcttttgctttcccagccagggcgcggtggggtttgtccgggcagtgcctcgagcaactgggaaggccaaggcggagggaaacttggcttcggggagaagtgcgatcgcagccgggaggcttccccagccccgcgggccgggtgagaacaggtggcgccggcccgaccaggcgctttgtgtcggggcgcgaggatctggagcgaactgctgcgcctcggtgggccgctcccttccctcccttgctcccccgggcggccgcacgccgggtcggccgggtaacggagagggagtcgccaggaatgtggctctggggactgcctcgctcggggaaggggagagggtggccacggtgttaggagaggcgcgggagccgagaggtggcgcgggggtgccaccgttgccgcaggctggagagagattgctcccagtgaggcgcgtaccgtctgggcgagggcttcattcttccgcggcgtccctggaggtgggaaagctgggtgggcatgtgtgcagagaaaggggaggcggggaggccagtcacttccggagccggttctgatcccaacagaccgcccagcgtttggggacgccgacctcggggtgccgtggtgcccggccccacgcgcgcgcggggctgaggggtcgggggcgtccctggccgcccagctttaacaaagggtgctcctctccaccccgcgaggaggggcagctccggagacccggtcttcagcgagcggggtcttagcgccggggaggtctacttccttttggggttgccattttactattattattgccttttttttttcttcaaaaggactggagactgatgcatgagggggctacggaggcgcaggagcggtggtgatggtctgggaagcggagctgaagtgccctgggctttggtgaggcgtgacagtttatcatgaccgtgttcaggcaggaaaacgtggatgattactacgacaccggcgaggaacttggcaggtaaagggggtaccagaagcgtaccctcctggattgtggaaatgcataacgatggggccattgggtggtaaacaaatgcagtttgaatcaggcgtctccctcgccctttctggagatgcgcaaatcatagagaaaagagttactaacccagcggtaaaccgcctgatccaagggcctgggggtggaggagaggcagcagttcagggctagattatgatgcacagtatattgatccagtcccctggacaaaatcagatttaattgtccgtgctaactcttgtcagcccttgcccttctgtgacaacaggacaaacactaagattataattgcaattggagttagcttttatgtgtgatttaaacggagggtacaaactaattaataggttttaaaaatcttagtactttaccctctatctaaattttcagtgtaatttgagcaagtattggtaggtggtaaatggagacttgccagatgttgacattgggcttggattttgaaacttcttccaaccaggaatttaattacctggttggtgttggtggttgctttggtttcatttacaatgttaaatttttaacaaatcaatgagagtctaatatggctatctggattcagagcatacctccattgctgtagcagctgtgattctcagtgtaaaatctttcagtttctaggtaaacaaagaatagtttctttcggggcatctaagggctgattgctgtttcctttgactgtgtattagacagagtgttttgggctctggtcaactttagtagaaaacctagttttcatacatacatttaaaactgaatttatggaatttgactgtggtgtatttacattgtgagtggagtaggcaaaaggatctttaaacaaacaaaatatgtatttacttatatgtgcattgaaatatgtattttcccatatacatctgatgtcctgatacaaagcttcctttttctccatgaaaaggaaattaaaaaacacccacatcctggattgcctaatgagaattatggaaactaagcttaactaaatttttttaaaaattcaaatgatagtgtagaatttttttaaaagttactgtaacagagtatttctctaaatatttagtatcgactgaaaacatagatgggggcctgtgcttaggaagagctctctgtatattgatgatctggtgagtaaataaggaaagctcttcaaacatcacatttcatggatatgtttaagattaaagtttaagagtgtgtgggtgaaatatttggtttaactggaattaaataactttactgtggttttcagcaag

SEQ ID NO: 52375 - DNA, 1229 bp, Homo sapiens
accgtgcctggcttattttttgtatttttagtagagacggggtttcaccatcttggccaggctggtcttgaactcctgacctcgtgagtcaccctcctcggcctcccgaagtgctgggattacaggcatgaatcactgtgcctggccttttgcatttttggagacgaagtcttgctctgttgcccaggctagagtgcagtggggcgatcttggctcactgcaacctctgcctccccagttcaagtgattctctgtctcagcctccaaatagctggaattataggcatgcatcaccatacctggctaatttttttatttttagtagaggtggggtttcgccatgttggctaggctggtcttgaactcctgacctcaagtgatccgcccgtctcggcctcccaaagtgctgggattataagcgtcagcctctcgctgtgcctggccgggactttgacctggaagaaggctgagtgaccagcattgcctcccttcacattttatccacctgtgtttagacaggtcaagtggctttctccaggcagctgattaaaaggtggcaagacatggacccagaacccagggccaggcctatttcattatctgtgctatttaggatttggcagttttccatctttgaaagccagatgaagttgatatttaagagaggtgaagtaggcagccatttggcgccaatttatttcagcatctgcatggagaaaatggttagggataaatagtagacccttcatggaaggttttcatttgaagcccagccaaaggcaacagggtctgccctttgagctcagaactttcgcaggccttaacgacacactgggaccttctttccttttccaaatggcttcagccttgcagtttggaatgatgtcaacatgtggcgtagttttattcaagtcccaagttaatggtttacctttttagaaaactccaaaaacactttcattgttatttaacttttgagttatgtaatgtctaagagtcttgtctctgacccgtgcacctacctgccactgaccaacagtttctcatttccttacgcaacaactagtctggctagcttagagttggtgtgtgattgtttgagactttatgtggaagataatatttaattgttttgttctggtttgttggggtaaattatacaaatggaatgcatcctttctcggccttgaaagaggttatatgacagtacaattataataaattcagtg

SEQ ID NO: 52376 - DNA, 465 bp, Homo sapiens
agggggcgcaaaattcccccaccctctgtagagaaccacaggactacaagatcaagagagatcagtcttgactgatgtgcttaggaggctagagctggtgtagggaaggaggagcctgcacctagtgggcaaagaaaacacccctgtggaatgagatgagagaagatattgaccttgggtgtccagagctggtgaggggagagaaaaggctgccagatggtctgagcgtgaggtctagggcagttgctgttgtactttgatttgtatggactgtcccaggagtgcgtagtttcctgtgtcccagaggtctgggctgagacagacaatgggtatgacctggagaacctgctggtgaggcttgtgggtgtcagagccctgttgaatcacttttccctctccattcaaatagccactgcaattccatacctatttgtataattactttcaaatgtcattctcttcctt

SEQ ID NO: 52377 - DNA, 1315 bp, Homo sapiens
gtggtgtgttcgtgcccaatggttgatcagtgtccactccctgctcatgccctctgtgacagccgcgtagaccttcttgccacaatggcatagtttttggcgccattttggatatgttctttatttagtttaggatgcccgtctccccttttcctccttggagcttctttttcctatattcaaaacccaggtgcttctccggattccctctggtgccctccatacacatctctgttactggcactttactttctacattgcactctgctgatttgtttacagtttagtctgatgctgacctctgtaggaaaagagtctattttctctctactggctcttgggccctgactcagatcctggcacacagtatgcttggtgggttattgggtgacaaggcatagagaataactactatgtgatgtcagggggtatggctgaccagtcctggctgtcccattcactgagacatgtgtgacaaatgactcaccacttaaggcccatttttgttaactgggaaatgagggtttctgtcttagtccactttttcctgctctaacagaatacgtgagaatgggtaatttatgaacaatggaagtttattttgcatatggtgctggaggctgggaggtccaagaccatgtcaccagcatctggttatggccttcctactgtgttatttcatggcagaaggcaagagggatggggagggagggagggggagagagagagagagaggaggaaggagcaagagggagggagggaggaagggagagagagagattgagaaaaagaaagagagagagagagatgaagcaaggtaaactcatcttcttaatctggaaccagctcccacaataactgcattaattcattcatgaggcagagccgtcatgatctaatcacctcttaacggtctcacctcttaacactgttgcattggggattaaatttctaacacatcaacttggggaacacattcaaaccacagccagtgccactggctattctgattccaactttcttatgtggtagaagcaataaagactcttggatttctgaagaggaagagctgatagccctgtggtttcatttcttcattggttttggctgaaggcaagtgggtttcactgtgtctgggaaaacacagtgaaaaccaggaagaccctatccacatttgctgaatgctggcaggcagtgtgctgtggaaattcccagaaagacttttcacacagaagctcaaagggcccgaggtcacgaatgctccagaaagcaccaccacagctccttggtgactcccaggatatgttgcagaggt

SEQ ID NO: 52378 - DNA, 1921 bp, Homo sapiens
gtgatgagcagactttatactgagaaaggaattttagaggaatacagaatccagctaacttagtaggagtgattaaaaaatactggaggtgtggggcgaggcagattctcttgatagaggaaattctccaggtcacgtgtgtttttttaataagtagcatccctttgcattaacctcagtggttctcagccttggctggttggggaatccctctgaactttaaacactgcctgtacttgggctcagcctcagagattaggacttaattggtgtggagtctggtgagggcatctggactttcaacagctcccctcccccactgacgatggttgagaattactactccagtctgtgagttttagagttcactgtgcatcagaagcacccaggagctctttaaaatgcaggttgctgggctttgccccatggactgaatccagagttcacgggggagcccaggaacctgtatttttcaaagctctacctccagcgagactcaggtgatcattgacttatgtgcttcatcgcaggtgcccatatagaaatacgcagataggttatttcaatttgcaattaatacatataaatactttagtgtcctacttttgacaagcagttggatggaaaatcgatcttttgaaatggatgtcagtttaggctcaaaacgtgtgattacctaagttctcactgctggagaattcaagctgataggccatgtttttcaaaggaagtgggtgcagaactggatcctgtcagtgtcaatgcgggtgcatccgggtgtgtagcagtgccttttggttaaacccaggctttccctacgagaggtcttccagtccattaatcttgtgttaagtttcttggctggaagggtggtttatagaagtggtgccaaacagctgtaaatgcaaggctgagaactatttgtcctcttcctttatttttaagacttcagaaaacaactttcactaaattggtaaataaagttttaggtattattttctgattaatgaaatcaccataaactactacttctagacttccgaatgtcatgattttatttctggtcttattatatttgtgtttctgagtcttaatgagctagaaatgcttataagacaaaagcaatgtgtgttttttcctgcatcagattcttttacaccttatcttgaagtttgcataactgagtcactttctatttttttttaatcactttgataagagaaaaatttatgttagttgcagtccaggaaaaagaaggcacaaacactgctgatcaaatattactaaagcttttatggactcttgaacctcattttccctcccatatgtacacaagacacacttcattcttactctgtttatgcctctctgtctaatagaaacttcacttctgactccagctttgtctaattattaacacagagaggtactagaagttgtccattagcaaagaagagaaaaattatgtttagggaactaattttataacagcttaaaatggctttgatgtaaatctgccagatgcctctttttatatcatcaaatactttgctttaccttgaagaatattacccccaggttgggacaggagctttcccattcttttcattattttgtatgtaaaaaaaacccaaaaagccagttgtacctctcgtaaataatacatgttttcctctgcagaactgtagtctatgtgacacctacaaacaagggactgcttgaggagtgaaaacctggcttaacccaggcgtgcacttcttagggaattctttataggaaggagtcatcattcatagcagtgatttagaagatttcattccaaagattgaattgcctgttcagctgttcaaaatgcctgattccccagatttcaggaacagcagagaggggagagaaaccatttgcaaacacatagggtgtc

SEQ ID NO: 52379 - DNA, 1506 bp, Homo sapiens
tcagagcttacctccaccatgaagcaatctcttcacctggaagtccagttgccttcatttctggaggcattgcagagccctatggaagtcagtaccctggagtagaaagtctaaacagggggcctgtggtgatacacgtgtaactagaggcatccctgcttccctggtagaccgtcctccgctccagggccattgccaccatttcctttaggccccattatgctgagcatggtggattctttaaacaggccaggctgtctgacctcagtgtttccgtatcactgcagacaagcacagcctcttgatccaagtgacaagaccatgttgaccccagctctgcagggtccaaggccacccatgctgggaggggtacagagctccttagcccccagcccactgcagatgatgaggaggaaacccagcaagaggaagggcttcccacccaaccacagcatgggctgtaggagaggtcattcctccttctcgcccactagtggacttcccatttcacccccttccctgccaggggattatgtttccatccacagagcttctaaagccccccagtgatgatcacttcatatcccatagaagtcatattccacacttttttggaagcagtgctccatggaaaggtcattgggtttacaatccctgcttcaggagataccaactccaaaccgcattcgcacaaattgtattttattttgtttagtgtttgacctgagacttaattagtgacacattctcttcaaaagtggcacttccgagagttaacgccatcagtctctttactgtcctggccgtggtggatacagtcttgccctggctctcacgataagctgcatgcttgctcggatcgggccgcgggggtgaggtcagcctcgtggctgacttccagggagttctgcttccactgagagaatactcaggcttcccgggagctccggtttctttttaacttatcatctttcagttttatctgagtggctgtcacttcaggtaactccagcagtgccattccctgccagcctcttcttgcctgccctgaagtgaccctgcggtcccctccccattttctcctccccctagacttcctccacgaggtgagtccccacttggttcagagccaaggtgacagatctgtagacatcatgggaaatggcttggcctagagcactgtaaaaaggattcttctttgctgggctgacagccagacagccactcactgcctccctgagacctgggcctgtgactcttgcaaccccagacacggaagaccccaaagaagcttggctaccctcagttgtattcagtctccagagcaggacagacctgtgaatggtgtctcccaagcatgttggccacccaactgcactaaatgccacatagtgccagtgccaggaatatttgaatttctcccaagacactgagtgcaaactcttcgtcagttcagagcagacttcccagtgtaaggtggagctaattcttccaatgacaaagcat

SEQ ID NO: 52380 - DNA, 1207 bp, Homo sapiens
tctctctctttctttgtgacaggaaattccatttaattagtgcagtctgctatggttgtagccaagtgcagggcgtggagtgaataatgcattttttatatttaaaaaggtaaattttgctgatttttttaatcatggtaaaacaacatacagtttaccatcttaaccatttttaagtgcacagtacagcagtgttaattctatgcatattgttgtgcaacagatttctagaaccttttcgtcttgcaaaactgaaatgctgtgcctattgaacaactcctttttagctctgtgttttactttggctaagttaataatttctggaattcagtttgcccatcacaaacaactgctaagttgtattcaaacatttgtgcaatattaggtcactttatgtaggatcacggttcagttggctcactctctcataaccaaactgagatgcaaaataatcagaatacaaatacaactttgtttttcattgtatgtcagcgtggtgcatgtatgtagacgaacacatggtgccttggtcagcaagatcagaatcgcaagagcctttgaagaaacacatgcagtgattaaagtgatagtttcaaaggatcttaaaagtggcaaaaattgtacagagctgaatgtggtggtcgggacttagggaagctgataaatggggtgtgtggcacagagcccttcagtctccctgtctctgcttctctctgggcgctcacgaaccacaatagcacacactcagacttcctcaatgcgttcttttgctgccacatttgttctctcttttctgagctcgagccagctcttttgactttttgaacttttgtctttattcacaaaggtaatttcaagagctcttgtgggttccacttctggcatcccgctcctcagatacctactattaggcaagagcagagaagtaaagtgcatttggcagcagtctctgcctttcaaagcagagctaaatcatgtaaaataggttattttccatccaggcattctcttgagaaagaaaaccctgtgtgtgtcttcccccatactctcacttcttgccagttcagttgaaaagtgttcccttaatgttattaaataggtattttcactcactgaagtggattatttgatttctgcacggtcttaagaaaaagtgagacaataggagtcttacaaacaaaccctatgtggtatctgtgagctcata

SEQ ID NO: 52381 - DNA, 503 bp, Homo sapiens
tagccaaagatttcataagaagacttctggtcaaggatccaaagtgagtgtccacgttcctgaaaggtgcttggccacggcctcagccagcccagagcctgtgtctgttccatgcacagggccacgttcctcagaccctgcttgcttcatctgccaaagggcagcatgccatgtgaaacgcttcagaaaatgcaagcagggccctctgcccccactcagtcagtccctgcaggcacagtgaaataatcacaaaaagaccgatgttgtttttggctttcttccctgaactgcattttccacagtatctgcttggcaggcccagccagcatgaaaacaaccttagtatttgctgctatggtcacagcattttttttcttctccccctcccctcaaggaagagaatgacaattcaagatagtttgcagcatccctggatcaaggtgagttgcatattacgaaactgtttagatcactttctatgtgattggtttgggcaccctggt

SEQ ID NO: 52382 - DNA, 668 bp, Homo sapiens
catggcaacatttatatcatcagacagcaagaagtttgcttttagaattttggcccttttccactgccgttctcttgagaacgctggaggccaaggctgagctcccagccaggagaccggacggggtcccctcgaagttttctgttgcacacatcactcagctgtggggacactgagggttgtggctgttgagctgtgggaaggaaaacatccaaggtcataggaggcatgaatgtccaggaagagtatttgaagaagccattcctattcccgcggagaggagcctgcgggaggaattcccggtgaccaggtaaagtgggtctcctgggagccgtcacgttacaccgccagggggcagtagctaacaaaaatgatttcctgggatttcggtgcttccccatgaaattattgttttcataacaccttgtacaaagcctgtcctaaccttttatcctcccaacgaaaactgtcaccgaggagcaggaatgactgccatttaccaacgtctgctctcattaagcacagggccacatgccactaaaagaaggcttgttcctgacaggcaggcacccagacacaaattccaggtcacagggaagtggacagacccattcttgggcaacccagcagcttttgcaggctgggattaacaatatgcagagaaatac

SEQ ID NO: 52383 - DNA, 1666 bp, Homo sapiens
acaacatttccacacgtgtgacaaacacagcctcaagtgacgctctgaactgcagttctcggctcaccttaggagctgtcattttgtcttgtcgtgttttgcttttatttccagagtctgttagtttgggagtgcagtgcccactgccctgggtgactgggtctctcttcactccccctgggcaccaggaacttaatctgctactcctggcagccttcaggatggcttctttgtatcagcgtggagtcatcagctccacacagatctcctgggtgggaaaacagttgagaaaaggcagtgaggtgtccttgtggaggcaatgtctggagatacaaagacagagaactctggtgcacagatacacagagtaatcataattaaagatgcacattaaaaaactctagcaagcaatgcccagcagaaatgattgagaatgggaggctttgctctggttctgtgacattgagcaccagggcgcggtttggaaaccctgttctaatggcatcatatgcctgtcccaggaacgggggcagtgccttcgtgtttctccaccatgtgaaattgggagcctacatgaactagtgtgggccaagaagagcggttctgaatattgcaactaaaagcagctctgagattattaaaagccagatgcttacctccccaatctcaggtgccaggtctggccctatagccagtttgtatgagtcatacaaatttcttgaaactaaacctgaatccacaagccagtgaccttgaaaactggagtcgccgggcagtaatttcatcagcctttaaactcccagttaaatggccagagaatctgccaactcatccaggaatactttaaagtgattgaatccaaggaagaacacaggtgaaggaccacatcttagatgacaagatactgctggatgtaaaaaatgtgtcaattctaattctaaactcctttggcacaggagtcccttgctttctagtagtagaccagcaactttctagatcatatcatatagtctcctttatttgtcattacatccctgcttgcccttgagagtttagtaagtaaatgaagatgtaaagaaggagggtaattaggcagcaggaactacattgtgtggcccgactttgattggccccgggcctcctccagacctgccttccgtatctaatttgcagatcttcagaactccccagtggcccttctgactctgttttctggcccagggtcccacactacgtttagctgactgtcttagctccctgttctcctccactatgggacagtttcgtctttcctgagcctgaggcgatgagcagtgtttaggaccaaactgcaaatggtattccagcaaatgctgtatcaggaactagatcaatattggctctgccctccaggaattttcaacctaggttcaattctgaatagactcttagacagggggcatctttcaggtttaagccagactgtgggcaggaaattactgtgtggtcaccggtggggtcagagcctccaagtgagggagtccagggcgatggccactctccaagaaaggaagcagaactcttccataaagggaaagttccttctgttttttgtcacttttttttcctttctttttatttttttaagaaataaacacaaccaaaaagctaaagtccccttgggcca

SEQ ID NO: 52384 - DNA, 3300 bp, Homo sapiens
gcgtggtgagggggcgcctgtaatcccagctactcaggagactgaggcaggagaattgcttgaacccgggaggcagaggttgcagtgaaatgagattgctccattgcactccagcctgggcgactgagcgagactccatctcaaaataaacgaatgaatgaattaaaagatgatttcagttttgcaagatgaagaaagtttctggagggcatggtgatgatggcacaacaatatgaatgtattgaatgccactgatctgtgcagttcaagttgggtaaagtagtaaattttgtgtttctctatattaccacagttttctttaaaaaaaaaaaaaaaactaaaaagataaagctgaaacctaaaaatgtccaggtaacaataaagctggcagagtaatgtacaagactacctactgtatttagagcagctcagccaagcggagccccccagaaaaggggaacaggaaaagggattgattgctttttaaagaatttaatatttgttatttcaaaaaaaaaaaaactttaaagtggtcctcagagggggaagaagtgagagttctgtttggcttctttcctcttttgattggcagagggttttgtttttagtttgaattcgtatttgagacccagcgccacagtctttgcaggactatgcattcctgagaacttaaactgaactgtttatgaggaatagtgtgagggtgagggcccagccctggctcactgagtcctcagggctcagctccacagctgcctgaggaatttgctctcaagggcaatcttcagcgatctggagcatagctgggctttgggtggcaacctgagggtgaggtcagactgtagcatcacaaccaaaagtcacatgctgatgacaggctccaaatcctcccagcccagggcctggtggcttccagatgttgactcaggacaggaaccgcttgtctgccctaaatgaatgccatggccagagagggtggaccaggggcacctctgacagggagagttaaggagcagtgagctcccttccacctccgctgagcagaaaggaaccctggaaataccttcaggacagacagctgctgatctcttcctggaagcgctgggcctcagaagcttgctggttcctgcctatttgctcccacggcaaattcttgattctttatcagaaaggagggaagaagtgtgtgggtgtgagggggaagaagccacaggaatgcccacagcagaggtcctcggggacgctgggctatccctggtggcaacactcttggggctggtgctgggtgaggacggcctcccaagcaccctatgctgtgactccagcccccaggattctcctcagggtagagagaaggagctcaggtgagctctggatgaatgataccatcttttccattgaaatcacagaattttacaactaaagagaacttccagatggtttgagtcaaccgcactctggcagctggaagcagagatgaaaagattcaggcaaaattacacagttcaattattaacaattcagactaagcatcaggccatctgaccccaactgagggcccctcatcctattctactaagtatattacactgcagtctgtatgtgtgtgtgcatgtgtgtgtcatgagagtacacggatatgcaggtgtatgcatctgtattttgtgcataaatgtgtgcatttgtgtacatgtatattaatgtatgtgcgtgtgtcatgtgcatatgtgtagcagagttagtgtgcatatgcacatgtgtatatgtgtattgcgcatgtgtatacacatgtatatatgggggtaagtctgtgtctttggtatgtgcatatatgtgtgtgtgtgatgtgtgtgcatgtgtgtgtgctttgtgtgtgtggtgtgtgtgcatgtggtgtgtgtgggggtgtgtgtggtgtgtgtttatgtgatgtgtgtgtggtgtgtgtgtgaggtgtgtagggtgtgtgcgtgtgtggtgtgcatgtggtatggttgtgtgtggtgtgtgcgtgtgtggtgtgtgtgtggggtgtgcgcatatgtgtggcatatgtatgtgtatatgtgtggtgtgtgttgtgtttggtgtgtgtggtgtgtgcatgtgtgtatctggtgtgtgtggtgtgtgtgatgtgtgtatgtgcggtgtgtgtgtttttggtgtgtggtgtttgtggtgtgtatgtgtttggtgtgtggtgtgtgtgtttggtgtgtggtgtgtgtgtggtgtgtgtgtggggggggtgtggtgtgtgtgtggtgtgtcgtgtgtgtgtgtgtcatgagagattcttaggccataatggcttttttttctgaccaagagacttgattcttgctgattcagccatgagtgtgcatttcccacaatcagggtgactaaccaggacatccggagaagtttcttcctctctgcctcacccatcccactcgctccatcctcaaagcggacactcagatgctggggcttctgccccagtgtgtgaccccacgggaggtttgcagagtcctcaggttgcgtcacagccagcgttgatgagcatcatcctgtcttccaagaaggcaggccagtcacccaagaatgagccagagctgcttctgtaaatcacgagattctgtgacccagattaacatggaaggagaaaccagcagctgctgccgccgtaggcacaagtcagcaacttcagtccttctgaggctggcccttcctggccatgggctgccctttccctttggggtaatttgaggcaatgaaagtttttattccctttggttgtattttctagacatgttttaatgtagctgaaatcatatgaagtgttcaattttataccctgctttttttaaacggaagattatgacacagcttttttacaatgttattagaagcttttcagaaacattccttttaacggctgcaaaatgctataataatattgtcatatcccaattccctactgtgaaacactcaggcgttattccctgttgaaaacaaagctgggctaaacatctttatgcacatttttttctgtatttcggactggacatgatatatgtggctttttgggctgtcggcacataacaattaaaatccaaaaagagaaaacattaattgctgagcaaaactttgcatttatgttgcactctatctggttttcttttcttccagaaaaacattattttattaatcaatggctaacacactttataataatttttaccaaattttttgctacatataacagcttttataatcttactcttttagcaagaacggaaaaaattcattctt

SEQ ID NO: 52385 - DNA, 504 bp, Homo sapiens
ctgtgcaggtgccttttgctgagaaggcacccttcccagtgctctgggccattctctgtgtggttccattgctatcccgctccaggtaccaaaggatttggcctccaaactctgctgcccaccttggtggttggacacatactcctggaggacctggagtcaaaacaagccacatacatcctgctgacatggagaacagccagctactgagcaaacatgcaacactggtgatattgtgcaatgttcccagctgtgaatttatctcattgttttcacccagtgacatttttatcttatccctccataagccaggcaaaagtacactaaacgcttgaatagattctctcttgtcattttggaattactattttcattttttatttgaaaatgagaaataaaaaggaatcttataacttctctctgccccttaaagctattttcaataaagagtagcttttttttttttttttttgtgaaatggagtcttgctctgtcactctgtcg

SEQ ID NO: 52386 - DNA, 1591 bp, Homo sapiens
taaagcccagctgcacccacccttaagtgggagataaggcttctgcccgcgggctctgcgttcgtccacccggccccacgtttgctgtggactaaacaggagccactggactagagtacacttgactctcggctctgcggaccaaaaattccaggactaaggaatagcaaggttaggctgaaacagtccacacagggcttgcggtaaacgtcttttcaggagccactcgcccagtgcagtaagtcgtgtacttagttgactcgagcgctccagggagacgcccgaccctactctgcgccgccccggggcaccagctctgcttcctccaggtccactgaggcaggcacgcccagctctgggacagtcagtaaacaagccacgaaccgcgccagggatcagagcacccagagtccccgcccagctgccggcacagccaatcgcagcgcagccaggcggcggggcggtgccggccgaacccagacccgaggttttagaagcagagtcaggcgaagctgggccagaaccgcgacctccgcaaccttgagcggcatccgtggagtgcgcctgcgcagctacgaccgcagcaggaaagcgccgccggccaggcccagctgtggccggacagggactggaagagaggacgcggtcgagtaggtgtgcaccagccctggcaacgagagcgtctaccccgaactctgctggccttgaggtggggaagccggggagggcagttgaggaccccgcggaggcgcgtgactggttgagcgggcaggccagcctccgagccgggtggacacaggtaccgcagccaggccgcgccgcgccgactcagggcctggcccggccagacagggaagctcagtccccgcacgccagacagcggtactcctgctggcgtcaccgcaaacatcctctgaccgctacagccagtgtgtggcgcaggcgtcatgtccccggccctgccacgcctggagccctggaagctggctgcagggcgctggcttcccgcgtgcggccatatgaccccgtccctgatttaggggagcagtttggggtgtcggcagcacaggcccaagtgaatgaaggagggagcagtgcgtgctctccttcccagtttttcctgggaaagcatttcagaaaggtttcatttaaggagaggttggggcggcgcggtggctcactcctgtaatcccagcactttgggaggctgaggtgggcggatcacctgaggtcagtagttcgagaccagcctggccaacatggtgaaaccccgtctctactgaaaatacaaaattagacgggcgaggcggcgcacgcctgtagttccagctattcaagaggctgaggaagaatggcttgaacccgggaggcagaggttgctgtgagccgatatcgcgccgttgaactccagcctgggccacagagcaagactccatctcaaaaaataaataaataaataaataaataaataaataaataaataggagagattggaaaacttatctcagcttttggtgtttgttagtcaggaagatgtgtgaaggcctcctaactcttggggatctctttgtccctacttgggaatcccacc

SEQ ID NO: 52387 - DNA, 1069 bp, Homo sapiens
aaaaaaagaaaagaaaagaaaagaaaaaagacctttgggtgcttgtcagcttcttggaagtgaagccagaccatttccttgctcaagccaaagagctcattgactcaaggagcatcatagcaactgggctgcatctaaaagggaagaatcaagggcgtgatccacaaccaaggcctgaggaagcagggcccatagttgacctgcacagtatgagtcatgacccatgtgctggggctctagccatgggcggtgcctcttgccatttccagcttcctcctgcagagggtgggtgttaacggtcttcattgctcataaccttctcaaaggcacgagtttcggtttctgccttccctgaatcaagtcttctacattgcagttgctgtaacaaaaactattagcaacaacacagcactacagaagcaagctccttgctaacagtgattgctgatgacattgtcttctagagaccactctagtggctcggcagccttggtatagagctgatgataaaaacttttcctgcttttgccagtcatgaggagcatttctttgtctagataagggaactgaaacccactggccagccagaatatactcaaagcagtcattgggatacgaatcccaccatcatctcccatgttatcccttttgttacctttaaatatggtcccatttactcaggaccaatattcccttatgtggagagcaggactagtgcccttgagttacttacggtgactcatctttgagtggggaatgtgttagtattttcagcaaatgttaagtgtgatgaaacatttgctgaactgtctccccgtttcgaaataagctaacagcactcaggggctctatttacagcaattgggtggagtcaggagtgggaacgcatcttgcactgtcaccttgattgacaatagctctgacctgtggaggatggtcaagtcctgtctcctataacgtggggcagtgatgggtcagggtcatggctcctgcatttgggtgaggccttctcatcacttttagacaagcaagttcagggtgaccgcaggcctccccacttccatcagta

SEQ ID NO: 52388 - DNA, 706 bp, Homo sapiens
cttgaagttttcccacaggtcacttatgatctgttctttattttcagtcttttgtttttcttttactttggacagtttgtattgctatatgttcaagtttatgtcttctgcatatatgtactgacattcacctgcatgaaaactagcaaactttagacttgacagcctgtgggagagcagcccagatcctcccaggccatggccactcttcaaacatcctccaaagcagggcagtgctcagggtgtctcagaggagtccacctcagggcatagttcacatctatgtcaggtcggtgaaggatatttccaaaggaggtgacaccatctagcttcttgctttgtatacacccctgtgatgatctttcagtttcagtttgaacatcgccagtgacaatgattttattttatcagtggacacctctagaagttggggaaattcctcctggccctgagcagtaatgtgctgtttccatctgctgatcctggttttgcggtcagggcacagtgtctacttccttttccacaggccagcctttcagtgatttgaaggggttttcttgcccaagtcttttctgtccaaacattcatttccacacctcgtgccagcttggtcatctctgccagagtgtcctgtctggaaaggtctcttgagatgtcacttccaagtgtgtgggcctgattgggctctcagtaagtacattcattt

SEQ ID NO: 52389 - DNA, 1297 bp, Homo sapiens
tcagtcaggagcactctctcttacagactaagagtatttaagtgttttagggcaagatagcttatcacaggcttggaatgtttctgtgtggaggagaagtttattgcggggtttggaatgtctccagctggaggggaggttatctcggggctggcatgtgtctggttggggaggggtttatcttaggggttggaatgtttctggttggagatgtcatttgtgatttatggtcatgctgaccttagctgatgccctttggatttaggtggtttctgatcaaggggaattttaaaatggtggtgcttgtccaagatggtgatgttcctgctctgtcagaagcctgtttaggcagttttctttgtgcctgtacagtggggtgtcatgccctaacatacattgcataattagaaaatggtagataagccccaatttgggcagagattttcgtattacagtgagattatgaggaaaactcagtgaaaggtcagtgctgaagtccatcttgtcttcagccaactggatctggtccaattctcatagggaatgccagagttttgttttagtaaacttggaatatggtcaggttcttatcaggaatgctagagtccggcttttagcaaccttgggagacatcacttaaggcaataaacagtttcttctatttgtggttaagaattcagcctgatcagctaagttaggagaggcttcccttctgctatgtgacttaggtcagcttgttaagggaggcaagaaggtaggggagggaatatgcctggacatgtgagccccatgagcctcggtctacaaagaccaagtctctttcctatactgtctcataatgattattttccctacatctttttaccctgaatatcttggccttgtattttccagctctgatattgccaaagtcccaaccaagtagttagctcattagccattaaccaagagttcatgaagatagaaaccttgggaaaatggcgtatctattgctaggagtaatgcacatatggaatgagtgtctgaatggggttaaaggctgtagctctccttggtctgaattccttatgccctgtgctccctcatcagtaatgagaggccattggttctcttgttttgagattgctgaccatcctccctccagtccccactaagcaagaggcagaggcattttcaggattttggcaagttgacctcagtggcagggtatgtggctattttctcatggaatgttacactccagtaggactaaatgtgagttgattctgtaaataccatttccattgtagtaagaagg

SEQ ID NO: 52390 - DNA, 1256 bp, Homo sapiens
actgagggtgagaataccatgccccccctcccctactcacatactgattgtcctccatctcctgcagagccttaatctcccgcagggcctggttagggaagccgtcctccaaccgccttagggccaccttcttgagggcaactatctcgccagtctgcaggatagaaggcagacactgccagcccaccctcggctgggaaagagagatgaaggtgggtgaggggaaggtggttgagagagagacacgcgcccccggctcggccagaggccctcctcgggggtctaggactagcctgggacccagccgctggggtaggggaccaagccagctgtgcggagggaagcgcaacggcccaaagtaggtttagaatatgagtaggttttaaaaactgtactggatgtaaaaagggaaccgaaacagtttagagcgttagccggagggtggcgggggcacacccccgccaggctgccggccgcggtccagcctcacctccacgtgcttggccttgaagacgatgccgtgggcgccctccccgatgcggcccaggatgcagtactggtccatcccgctgcagtcgtgggcctgtgcccctgtgcccctgaacttccaaactccacttctcctccaccccacgctgatctgagctcgcacgctgttgcctagcaacagcgcggcagctgaccactggggcggttcctgtaggcgacgtcaccaggagaacggaagctgcgtcgagtcaggggtgacagctccgggccccactgcgccttttcctagccctccgctgtcacgcagcagcaagcttaatcccgcataaaaaacgcatgcgccgagagcgtgcccgcagcagggcccacggaacgatgacagcaggcacctcctatctgcccccgcccccggcgtcacgtgactagctgcgctggtgcacgcagccgggaggggcgggctccttcccctggcaagccggaagctccgcacctgtaagtagaggttcaggcttcgaccacgcgcaggtgctgttttctagctccgaaagccaggcactattgatgcagacagacaggtcccgggctgcgttgtggaaagagggtctgtgggtcctcttgtcttaaaatgtcagttggctacgtgtacccacagatttttaaaagggcatactctgagggccgggcacggtggctcacgcctgtaatcccagcgctttgggaggctgaggcgggcggatcatcaggtcaggagttcgagaccagcctga

SEQ ID NO: 52391 - DNA, 1824 bp, Homo sapiens
aaagtaaatatcatttaatccagtcctctaaccatatttgagttttctgggtttcatctataaattgattgaatacgtaacaccagagtcttattaatacattgtcttgaaacatgtccagggtaaaactaaaggcacagaattaatcagaaagcattccattgaaagtaccaatcaatagagtgaaattagacttcaacagctgcagcctgttaccgcctaaggataggttgtatgaggactcaggaggacctgttgttgaggttaggatgaaatgtttgtctaaattcccttgagaacaccacgctgtcctgggatagaaagccaggctctgctcattgcccactccccgccttccctcccacctcccgcccttctgatcccattaattgctctttttggcagggtcgagtggtgtcaaagcagacgtctgctcggtgtggccgtatttttgtgagcggagctgcttttgtgagcgctgcgtccctgcagcatctctgcactgacgcgtggagtcgccgagaagctgcctggcggctccagcagcctccacgcctagagggctgcgcgtccgggatcgcagcgccttagcgtctccttcccgcctccctccgccctcccgccagcgagcgcgtggcgccccggaggtgcagggttgaccagggtgcacccctctactcctaagccaacctaggcagggcccttccagtttctgccgcagcatttccagcccctcgagcccctgcagctcctgagggtagctcagcagccagcccagcgcaccctcttccggggctagcgcgcactccctcggctctgcttgcggtccctcggtgtccttctgcccctggcagaagctctcacaccaccctcccttcatttcccctgccgggcggggctcgctattcagctccctgtgctcagtctgacccctcagcctgctgtacccgcaggctctgcggaatgagcccgggccccagcccttgccctcccgcccgccaccacgtccctcctcccgcctggagcttccagggccctgccgcgggcccctgcatctcccgccaggccgtctctctctgcctccgtctcctgcagcccagctccgcctcattctccattcctcgcccagaaacctgtacattctgtccgcggtcgccgcctgcggttcctccacgtcacgcaggcagacgccaggctccgccagctcacagaactgctcttgccgaaccccgaaggcctccacctggttgaccttggcagccagcccggccttccttggcagtcagcccggccctcctcggtcctgactttggggccgctgcctcccgccagctctgtcttcgcctggtttcagggcccgcaccgcctttgccggtacggcctcatggcccgacccctggcctccagaccccaggatctcccccaacacaccggcccctgcccaggccacccgtgtcagctcggggcacctctatccttgcacttgttcagacctccagtgacctctgagtcttctctcccccagttttcacatcccaccctccagcgtcctcctttctcaagaaggatctagattccaacccgctctcatcccccacggtgctacctgccagttctctctgcctctagggtgtccttgcttcccctcctgggcctggctgggatccttgtaatgtggtgtgtgtgctcccgacggttggcttccatctatgaaaaggccaacatcaggaagctgcctaggaggccgcctggcccacgacctttctaacccatgtccacctactcccaccctccacccggtgatcatggcctcccctcccccca

SEQ ID NO: 52392 - DNA, 966 bp, Homo sapiens
tagtaaaaagcattaaaggtaagtcactggagaaaccaggaatcctaaaccgctttgcctgcctgccagcagccctcacctgctgtggggtgccgagtcagggagcagcatcgagacttcagaagcccatcgtgaaaatccagagtgtttttattgcctccttgcctgcatttaaaaccaatctatccccatcaaaatggtgttcagggcctcccatagaccaggaggaatgctctggctgttatgtcaacattgtccttaggcctgtgagggttgatcatcccaactgggtcattcttgtcctaccaaactaaagcagagataagaagcgagaagccagtggttggagggcaggggggtgtgggacagggctgtgggaaaagcgctcagggaccaaaacattgctcccagggtgtcatcctttgcgagtctcgctgctggaactgcttgttgaaatctgaaaccagttttatctctagcttctgagataacttgctgcaactctaggactaatttttcccattgccattgctcaacaatcagagcttgccagctctccaggagcttcccagtgtcaatgaactttctcaaagaacaatacgtaacattgcggagcgtaccagagaccacctgttctgtgtgtatgccccgaattgtgattctctcttcccaaatgaaacattaaatttagatatttgggtctacatttatattttgactttgacaggctctatgtattttacattgttaccattccatatcgattcctctgtttaaattttttttaaaaaactcaaacccttggctggacatggtggctcacgcctgtaatcccagcactgtgggaggctgaggcaggcagatcacttgaggtcaggagtttgagaacagcctggccaacattgtgaaaccccatctctactaaaaatacaaaaaatatccaggcgtggtggcaggcacctgtag

SEQ ID NO: 52393 - DNA, 2536 bp, Homo sapiens
aaaacaaaaaagacattaaacacacaaatgaaagtgagtaatttctcaacacttggtaacttgtaagtacagcgatacacttttatatctcagttttgaaattagctctctagttggcctgtgaacgtcccatgcctgccaagtgtgtcatctgagacaagcacttcaatttgtttgagcaggcatctatcaatcttatttgttagaaaaggtgccagtgaaaccccaaagagtattgctaactaataactgtgctgcagtttagagtgttcaaggtgctttccagtaacatgttctggaatttgatctgacaacgctttgggaggcggtttattacgatgaggctgcgctgtcgcactcgaggaaccaggtcagtgacctgctccaggacacgggactggcggggaggggagagcgcctggactcagcctccaagtctcgcactcgactctgcaggagtaaaaactattcttgatcctacctctctcccttctgcaaacaagcaacaaaatgctgaaaaggcatcttaactgaaacggaagtcaaatgaattcgcgtgcgatcatgggaatttttggctcctaaccttgcgagtagagctgggtgagttccatttgtggtgggggagtggaaacaggtttctgggcttgcagaagccacatcccgtccccacacaacctaggacaggccaggtacttgtaggtgaggctccggggctccagctaacctgagctacctgggctgggctttgtgcggggaggcagcaagcggggtgagccggcgacgacgccggcctctacgcagtgcggtggtgaagacgtctcttccagggagtcacaggaagcaaatccatccttttaaagggctcgcgtcccgcggccctgaaccggcgcgctggagcagtaatgcgacgttctccgaggttcaaggctcacggcccagccctgtgatccagtttcctcagtcttcgcggtgtgcaccactcaggacgacttgcggcttacgtccaggacaaagggggcttgtcctttcttcaacgtcctactgcgcaaaaacgaagcccttctcaggctgcctgccttccaggaaaagctgcgccccctcaggaacctgtgccccgcgcgcctgccgccgcccattcccggcgcgcacctggcagtcccgggctcgagccccgccctgccgccagccaggtgagaggggccaggccccgccctcgccggccccgccccgccccactgcgcctgcgcagtcggccgtcggcgccaggcgccggggcggcgcggccgtcgcagttcggcgggcgcagtgcgcgtgcgccctgactgttggggggcgggcggcgtccgcggcgagggagcgggggcggggaggcgccgtctggctcaggctggggccggcgggagcgcgaacgagcgacggcggaacccgtgggcctgtggactgcagcctcggcggtcagcaggtgaggcccgcgcagggcgggcgtgggtcgtgagggagtgcgggctgcgggcgggccagcggtgcggcggtctgcccgggggcgcaggtgagcgcggcccgcgcggggcccggcggagcattgtccagcgggcggcgcccgcatagcgccccctgccggctgggccgcggcggggacccgggctgggcgggcctgggcctcggggcgggcgcgcgctcctttgttcgccggcccctactcctccgtgcccccatccccgccgccccccgccaacatggccgccaccctctcgtccccagttccccggccgccgccggccccttagcgcgcgctttgtttggagccgggcggggaggccggcgggcagggggcggcggcgctgcgcagtcgggcgcggggagggggcgctgcgccagaatgcaggcggggagggggaacgttgcataatcccgggccggcgacgggggcggggcggggggaggggcgggaccccggcgcgacgggtcgggtcaccccggggacgcgggcctgccctggggccacccctcccaggcccgggggatggccgcggaccttgtaagttgcaggctccgcggttcgcggcgccggaacgcccaccggccagtcctcgcgcccgcgcagcccctttcctgatgcgccgtctcttcgccgccctccgtgggggcgcggcgaacgggttgcgtgctctggagagagacaggcacttttcctctccatcgtgagtgaccttgggtgtattcgtcaaggaatgtgttgaaacgaattgtgcgatgcgggaactgcgcagcgcctcgggtttggctttctcgagcattttattgcattgattgtgcgttctcgattttacagaggttcgttttgagtaatggcttcagtaatgtcatcgtatacgcatttcaaagtttgtttatggaattgtttttacatttattctctttttacttataatttttgaatcagattttgtgttttggagagattttccgtacgtggtggaagtgttttcactcatggtaaatatggattgtttggcaattttatcacgttaat

SEQ ID NO: 52394 - DNA, 550 bp, Homo sapiens
gaaagccctaaaatcattgagcatctggagaaaaagccttggacattcaaactgactccactggtcaattaaagttcaaagtaatgccaaattttaaactcaatctcgaggtatttcaacaaacagaaacttggcacagtggagaccccaagggcacccaagtctttgccccaggagcctagagcctgatgtggtgagaaggaggctgagggtggaagcatacaggagctggcacttactgtgtgttttcttgttctttcccctctgtgtagacacagaacgcagggatcaaaggttgcccagggaatgagtggcagaggcacacttccagcccaagcctgctgccaccaggcccatgacacagcaaggaacagggctgtggaggcaggggaggccacagagcttggggcccaccactccagaaggtgagccgcaggtgctcctacacagacaaacccagaaccatcttcccatacgatcaatgctgaaaagaggcagtcagcttccagacccacccacaaactttttttcccacctcacatcagatgtg

SEQ ID NO: 52395 - DNA, 698 bp, Homo sapiens
agaaaaggaattccatcaaagccaatttaaaaagcatatttaaaaaaaattatttttgatgcaccttatacaaataatctggtcaagtataagactaaggcttatttttgcaaacaaatcagtctgttatgatttgtcttgagtaaaagtgggataatagagagagagaaaaaattatgtttcaagtactatggtacacctgttataaaattctggtttcatcagttgtttttgagggttttttttctgcgatttagactgactctgtttattcctgtgaatcaatcagtgatctctggctgcagctcagaagaattgagatggatgagtaatgtagaaacaatctggatcaatattctaattctcagcatatactggaatcagctagcaaccccatatcagcttggtttcaacaattttccagttcatagaaagccttcttatttagtttacttggcataattttgcttattttgctttactgttgtggaatatattgctgtcgtactccttgtgtaggaatgcaggataagcttacgcaatattctcttaaattgaacacttattaatcttccagatatcacattttgtcagagctcaagagtcatgaatgaccctcaccaaactgatgctttctgactgagctcctctctaccctgaggagccccagtagttaggcaggaatatcattaccccta

SEQ ID NO: 52396 - DNA, 1454 bp, Homo sapiens
acttccaaaaaagaagagtgcttctttcacgagtggcaacaggctccagaaatccattccaaaaaaggggctgcatttgaagctttaatcctactgaatgtgtttaagctctggaaaaacgcctaagaaatgctacaaatacatttcaatgttccttcagttgctgcttgcaaccctgcagtcaggaaggaaaaaatgcagctgttcttattgcacatcaaatccacaaggaggaaaatatgccttcttttcaggagtcaggctcgggcttgcaagtaaaatgcacaggccttcttcctctcagttaggagagcaaggctttcgctgtccccagaggtctgcccgagactgaagccctctgactcttgacctcagtgggctctgccaggcttcctcatgcattaggatcacctgctccacagtgaaacactcactatcaaagttttcccgcaacttctgagcaagcgaataaattcagctctagcacactctcaggtcaccctgagtcctctcactcccatgaccgaacatgtggggcacgtgaggtcctgagtcttgaaccctgctctatggagcagagtttaatgagcgccactcatggcgggcgagcgggtgaggccaacccctaggacgcaagagcgcagaggagccgcggcgtccccggtacaggaaacgcgtccccacggctcgcctcctgtgccgcagccctagcagaacagctacacggcactcatttgttccctttccctagcttgcatagcaacagcaattgcacaccccatagatgattttgatggttatcagagtcctccccagatctgtagcgaaacagccctatcattcccaaagcgagatcttcattagatgcagacaaaaaccgcaaaatgtgaatgaaatgctgtttgtgtgaatgaaaaggctagcgagcgagccagcgtttctgtgaatgaagcagggccttgcagccggtgccaggcaatcccctgggctccagcggcctcagccaatgagcggccgccccgatgactcattcaacaaaggcttgctcaatagtggaagattccatttcaatcaaaggcgggatcttttatccaacggcagtgtgggaaaaaaaaaaagaaaaagaaaaaaaaacacccagccggattacaaagataccgggaggaagaggccagctgctatggagaggaaaagctagttttacaagggaattcaagatcccttggtcaggtctaagtgtgaagagggtctctcttggaggtgagctgtgcccctaaactttcattcagccgttcatttacatcaaggagcaaccatgaatgtgccagtcgttcagcttttattatgaatgtacattgaatgcacgttcaaaacctaggttcctagcccttgattctttttttgtaaaaggcatgtaggacacctgtacacgttctgaggctccagggaggaaa

SEQ ID NO: 52397 - DNA, 1743 bp, Homo sapiens
tccaaacaccctcttcccccaagaagtgattgtattaggaagttaggaggtggggccttcgggaggtaatcaagattagatggtcatgagggtggggccctcacccatggagattataaatgtccttagccggcctgtctcacttgttcagaaaccggaaaagtccgtggtctgcagtgtggaaaagggcacccggacctcttacttccagcctctagtctggaaactttgtctaaggtaccccatctacattacttagtcacagccaccctgaacccactagcctgtactgcgctggagcatttcgcataaaatgaaattaacataaaaatgacacgtgctcgttgtggaaaaaataccaaaaagatcacttttaattctgtcatctaaaaataaccaccagttacatttataaatttcttccagtaacttttttatatgaacatgtttttaaacttgggtcaatattaaaagaccagaagttgttaaacatcattttaaatccccttatccaggaattagcattgttattcttggccgcagcagaatattattttattccctcaagctttccatggcttgggtctgccctggttttgaacattaggttaggctacagaaagcattctgggtctctggcccatttgtttctttctttgtggagacggggtctggctctgttgctcaggcctgtctggaactcctgggctcaagcgacactccacctcggcctcccgagtggctgggaccactggcgcccgccgccaccgcgccggctccgggcctctctctacgcgtggctccgcaggctccattctccacacagtcgtctaggggggcgccaggagccccgcgacgggccaggccggaagctcagcaagtgcaccaggcggcgaaacggccggctgcgcagggcagccccggacacagccacgccgcggccgcccggcgctcccccgacccagccgaccacgaagccgccctccccctcacaccgcagaacctttctgccttttactacttttcaaagtggacctaggctcctggctcgagcctgaggggatacaagggatcacgaggagcgccatcaccgtgcaaggtcgacagcttccgctcaaagccctgtggcccacgcttccggcctcgaccgactacgtcatcaccaaaccccgtgatacctcactccaccttcaggtcctccgtcccaacggttccgtgtcctggaactttccacgttcctgcgcacgcgctctgcggcccttaacgtcccgacttcgccctcctctggccacgcccctgcccgttaagggccctgccacccccgtgacgtacctatcttccctcgggcaacctcgcaacagatctctgattggctgacccaggaagcggactttgcgaggcggcggcgacgataggctggcagccggccgacttccgcagaaggtgattggtcggcgctgctgtccaatcggcggcgggctgtcggattcaaatccggatcgttgggactgcggtcgttagtctccggcgagttgttgcctgggctggacgtggttttgtctgctgcgcccgctcttcgcgctctcgtttcattttctgcagcgcgccagcaggatggcccacaagcagatctactactcggacaagtacttcgacgaacactacgagtaccggtgggcgcctttcttagaccccgagccggctccctcagccggggcccccgcgggcggggcgacccaggca

SEQ ID NO: 52398 - DNA, 2045 bp, Homo sapiens
ggtgtctttacacatgagggcaataaattttgaaggttgtgattagcagcatcctaaaatctactgccactaccataggttgtgtccagggtaaccaacagaaacatgacaaaatcaagtaaacttcattacacttccgggtagacccaatagtgctgaaaggaaggcgacagctacccctaaacttccagcataaattcctgccagaccagaccctaaggatcacttctgctagaggctgtgtagtgaactgagacccaccaggacagaaatctgaaaaaactggagctgcacctgccttacttgcttgaaatacttcgtattcaatggtagagttaacgtctgtgcaagggacagaggaaacctacaatttgcctcaacctaatccccattcctcaaatagcctgttttgctgacattttctgttccttaaatccacttgcactttcctccaagcctttgagtgagaggaaagttcctcctccatctattgaaatccactctgcattcttccctgtacttttggtcaacctcctatccctgccgcactttatacatttctctcaatatttaacgaatttgctctgtgtagaactttttttttctcgtgaaaattatactattccatctcttgaccatatcttagcactttttttaatttttgaaagaaaccgagcgatttttaaattattttctgtggctacttccaaacttaaggtttctggaaatttaggataccatcaagagtcttgtaggctttccaggtttgtaggacctacagggtatgcaattcctgtaagtcaccaatcttggggaaattttagggaaatgcagtggcgggggtgagagtaatctcggcctcctcagtttccttattagtaaatctttctcttcaggtgactgctcaaaggtcacctcagcgagaggcctttccagactaccccatcccgtcctaacgctagactcgtgaggcccaggggagaaaagtaaatcacggcctaactcttgtttatagtcgctactgccttggtggagactatctccgatatcccagcactaaaaggcagatccaagactcccgcaagctacggtgggtccccagcccagaggactcctgggggtccccattttccgcaagcgccccactgcctccacgtgctgcccgcgcaggtccagtgccgccgccgcgtacttccggccggaagaaagggcgggctctgtcgctttgctgtgacgcacttcctggcgtcgcctgcgggggcggaaacgctttgtctgtccggcaagccgacggcccgctgctggcctccgtgacgcggcctcctccgcgcctcgcggcatggcgtcggaggggccgcgggagcccgaaagcgaggtaagggccgacgggggctctctcggcagcctcagtccgtccgcctgcctcgcactgggggctcggccgggcggtgacggggctggtccagcgggcgtgggtcggatgctggtgacggcacgggagcgccctaccgggtggccgcgatcttcgcgccccgcctcgggtccgccttggggtggcggtcagcggctacagaccccgcccacagttagcgccgcgtctgtggtgcgatgtcacccagcgcagtgactgcggcccagcccggcgctccccgcagtcggggcggggggactctggcgagcttcccgcgctcttgggaacggatagattgttttaaaggatcctgcgtttttctgaacgtcattctccgctctacgtactcagcattaccactagatggagccctggcgatcgcttgcatcatttttagacccataaaattctcggtgaaagtaaatctcttactacgtcactaaaaactaaagaaagaaatcttagtgaattgaaatttcaaaggctcgtggtgataatattttctagcaaagcaaggtttggtatttcaataaagcaagacttagtggttcatgagtaaaatgcatatgcttttgtgcaactttttcaagaaaatgtaatggaaataaacgtctgcagtgtgttttgggtgctg

SEQ ID NO: 52399 - DNA, 735 bp, Homo sapiens
tgggaaaaagtgaaatagtaagtggaaatgacctgaaagttggagatggaggcctggactagggaaggtgctggattgtttatatttatgtcaagtcctaagcagaaagataagaggttctgacccagaatgtgtcagatgggtgagataaggagggtgtagaggagactgcactagggaaagagacagagatagagccttggagggcaggtgagagccaggcgagcaaagtccaggccagggagcttttcaagtcatgtgatggtcaagccagacccaacgggtgcctggagggagaggcaagaaggaggtcctgggagacctggaagccgttggtgggaaaggggcaaagggaagtggagccaggagaccagcaggtattgcacaattactcagacagtttgattttagtatggatggggtagcttaggacagtgaatgagaaacaggtgtgttactgtgggtttagggtcatctgggccactcctggcatctggaatttcccagacatgccatttgaagccacgccagatgctgtgagttactgctttgatgttttgtattttgtgttgttttctgcatgtaattgtgtttgcactggatggaaatggaaaataccaactttccagaggaggaaggaccagtgaggggacagaaacccaaatgacttacccagaatagaaaactggattgtgattgagctaggaccccaaccaaggtctcctgactcctgga

SEQ ID NO: 52400 - DNA, 857 bp, Homo sapiens
tgtggtttttgtttttattgagtaactgtttcccaactgcattgaccattaccaagtgccttaccctctgtagggcaggtgggtcctgtgatcctgcacgctgggaggccagccagcccacacaggcctctggcatcagggaaagacctgcctctgttgtgcaggccactgccctggggctgggattgtcactggtcacttgcaccacagagatgctgtgcctggcagccaggcagtacctacctagggctttcatctacttgacattttgttgttcagtctgtggttgactcatctgtttgcttgttacagatgtggctttgtctaaatactttgccattttacttaaactggaatgtgtgtttttgttttgttggatgtgatatgctgggtcaggtaacagtgaaccctcacctgtgacatctcatgtttaccctgtgcttgtgctgtcttggctcctggaggacttgcctgtgttgtgtcctcgaattgagcaataggagaactgataagagcagagtggcattgctcatggacacctgtccttcatctccatctaggctagggaacactcacaagcccctccctggcctcattcctttctcctgcagtgtcaaattcagctttacggagtcccactttgagataatgcatccacatcctggggctgaaccctcaaagatgatgtttcccagttaccatttcatatctaaagcctggaagttttgtgacatgtccgaggcccccagccagcagctcgtccctgtcctaacttggtacgggtccagcatcaccgctgaccagaatatgacagaagggatctcagtgacccactcatctgattgtgtgcccagagg

SEQ ID NO: 52401 - DNA, 885 bp, Homo sapiens
aggaaaaggctttggcaaaacagacaactggaaacccaagtgttatgggttattccagtttttttccaaggaaaataaactgttccatggttgaccccaagaatcctcaccaacagtcgacattacacttgaggctaagtgccacatgagggggctcccatgctccaccagccctcggggtgtcactggtaagtgccctaggcaggcggtgaggacagggggcatgtgaggttggctgggaggctccaagggcaggccacaatgcgctgccagccaccgtggctcctggcccctgtccctgttccagaagtgcttatttcagagtccacatgccagggcacatctaaaacctggctcctcggccaggaagcagggacgtggtcctctgccagcagtcaggaaacgccaggctgacgcctcctcccaggtggctcacacctgccccctgcgtgggcactgccccaactcctcggcggccagtactcctctgccccagcccagcccagccacaggccaggacttgcatttttatttttaacaagtacctccagtagcctggtggtcccagatctgaaagccacctggtgtggtgacttctcagaaatcttcttacgctcccacaaacctcccaggtcacctcgagggaggcaatggaactactcacgaaagaataattggatttcccagttttcctaccagaggacacagatgtgctgtcactgtcaagcctgccaagccctcggaacccacctgtgctgacaaacatgacatcatagacagtcccatccagggcctgggtccggtccaccacgatctgggtgtagttcacatctttcttgattaacctgggcctgttgtctattggggttaccgagtcatccatca

SEQ ID NO: 52402 - DNA, 625 bp, Homo sapiens
tctagctccctgatgtgtgtaaaccaaaatctgtgaccatgagtgaacacattttacgaagctatgcatagaaggagccatgatggtgtcagggacagctgcccttgggagggagctggtgctgcagtgaactctgagggccaggacaccccatgtaggtcacagccccacagagggctgtgcacatgcctgtcacacccatttccccatgtgagggaaggaatcggcctggaaattcccaatttctacataaagttcactatatttaggaggaaaaaatgtgactcctgttgactagtggacagtgcagaggcctttgccaaggaatcatgtgtttctctgtaagaaactgaaaatgaaacagacctaattgttatgcaatgttaattgtgcaaaacagctgccccagccttcttgtttgtgcaatagtgtagcaatggctgttacgtaacatgcaaaagggaagaaggatgagctgtgctcatcggccgtccctgtcccaatgcagagagccttggcgtggccaggtacccagcccatgagcaggccccagtgcctgtactggattccatgccctgggccttgaagggaaagcacggcccgcccccagtgccccagctcaccg

SEQ ID NO: 52403 - DNA, 825 bp, Homo sapiens
ttaaccaagagtaccaaccaacaaagagtacaaccaaatggtgcctgtgacttcaaaggccaggtcatcaaaggctgacagctccctcctgcggggcttgctgaagccctcattcttggagatctgagccaccaaataagaagcctgagcctcctcagcccaccatgccatgggaagcccaggctgcagcaaaaggctacatggagaggatccattcaacaaccccgggctaccagctggcagccagcatcagtgtccatccaggtgggtgagtcaccggatggctggcccagtcaagccttctgatgactccagccccactgatatctgactatcaccacatgaaacaccctatacagcaactcacacagcttagtcctcctcacattcctgaccctacaattgtgaaatgtcatatgatacaatggtgttgtcttaagctactagcttggggtgatttgcagtgcatgcataaggctgtgcccatgctcagaggtgtgcgcaggctcaggaaagacctaagaaggcccagagctgtcacctctggctgaccttgaggccctgtgccagcaggaagtgaaggccaaagcagagttggcaattaactggctgactgaatgttgaaggcatgccagacacacatacacagagccctgttgcaaagatcaggggacatactggcttcaggctgcattagtcaggattttccagagaaatagaaccaataggatagatagatagatagatagatagatagatagatagatagatagatagatagatatatgatggattgtttcacccaattatggaagctaaaaagtt

SEQ ID NO: 52404 - DNA, 1854 bp, Homo sapiens
tgaagaaacgaaatgaaccgtgcatgcctgaaaagtaaagatactcacacagctatgacaggtgtttgtggtgtgctccacaacctttcagggctggaaattacacatttcttctctttttgagatcaaataagtttggcccagcagctcttggctttccaggactaccacaggcccctctggggttttcgaagaacactgaggcctggcaatttgaagaagggtcactggtccccactcctccaggctgctgttgctggcgtgtcctgcccatgcaggagtagccctgggaagtgggtgcccttgggcacgctactgatgttcccgccaagccctccgggtgtgcctctgtccccctggggagctgagtttggctgagagcccctgatgccacctgcctctgcccctaccccagttctggcagcagcttcccccttcccttggggcacctgctcctcctccctccctgacttgggtttgaatcttgatgaaacagctggctgactagggacacgtgtgccttacctcccttcacctcagcttcctcctctgtaagataaggaccctaatgccatgtggcaggttgtgagaggattaaataaggaaatgcacttcaagtgtttagcttagagtctggggcctaagatgtggtcagttaatgttagttaaaatgaaaccaaggaaaccccagctgtgcaggacagacatgattaggagggagcaggcatgcctgctacgggcaggtcagaggtggcttggggtcagcgagtcgacttcctggaggaggtggtcctggaaggacagatgggatttgaatgaggcacaagggtggacagctccaggaccaggggtcagcctggcatccctcacctggaaggtcagctgggaggtagtggaggtggagtgctttccggcgtggaaggtactggctggcccggtgggggtgttctgactctgcagagggggagtgtcatccccagctcagacgctgttgtgatgtcaccggcagcacccagcacttccccacctttgccctctagggtgggtgagctgcaacacaggttgcagtggcccagggggaggggatcatagaccatagactgccctggacttgggctgtttccagtgtggggctaccgggaacaaagctgctatgaaactttgtgtgcaagtctgtgtgtgtgtgtgtgtgtgtgtgtgtgagagagagagagagagaggacttccatttctcttgggtaagcactaggagtggacttgctcaatcagacgtgactaatgtttacttgtaccttgtacaggaaattgctgggaagtctcttgagagcagtgaccatttcccattcccgataaccgcatgtgggggtcctacaccaacccaccacaacctcaccgatgccgagcgctgttgcgcattcacactccggtcactctcgtgggtgtgccgtggcaccttcatgtggtttgaatctgcacgttcctgtaggtgaaccgtgctgagcctttcttcatgtgcttattggccaagggtgttcattcctttgtgaagaatgtgttcaaatcttttgctcattaaaaaaaattcgttgttggtctttttgttattgagttgtataacttctatatatatatatatatatatatatatacacacacacacatacatacatacacacatatatacatacatatatatatatatatataaatttgttgttgctttttgagatggagtctcactctgtcacccaggctggagagcaatggcatgatcttggctcactgcaacctccgcctcctgggttcaaggtattcttctgcctcagcctcccgagtagctgggattacaggcac

SEQ ID NO: 52405 - DNA, 1539 bp, Homo sapiens
actgctctgtgactaccaaaccctactgcaccatcctctgagccggcctgacttctcgggggctgcccagctgtggcacagtggggtctgagcccactgttaccagggtctgctgcatctggatattaaccttaatgtgtgatgagagcccatgggctcaccagaaacacgcttacagggcagcacttgcaggcctggaagggtttaggccagctgaggtgttagaagctactttttagggctggaagcgatattctctttgaccgcaagatgtcaccctgcaaccatgacattgggacaggcactgttggattcagggttcctgaggagaaccaaaaatggttttgaaacctcattttcacctggatgctctccttgtccttggtggtcaaatggtttgttctaaaggctcgagaaatggtttcacagtgaaattcatctgttccctcttgcttcagagaggagctcagaacacccagctttgccacctcctggctgtgtgaccttgagcaagttgttcaacctctctgtgcccaagattcctcatgcctaaaatggtgataatagcacctacataacgagtttgttatgagaattaaacaatgttttcaaagtgcttggaacagtgcttggtgcacagcaagtcctggaaaagtctagtaaataaaataacaacaatactactaatagtgtactcaaggagtgccacacccttctcaaacagacaaaattcaaacactgaaaaattaaataataccctacagtctcaagcacaggttgagtatattacatgttttgaaattttagaattccctgctgtgttatgtaggcaatggaaacaattttcataatctattactgtaattcatttctggaaaacagacattttcaacaagaagggagtggaagataatttcttccattgctgcttgcctcagtgtgcgcagaggatccccaagggtcctgtgaaccgcatttgtaaggaaaggtgccgtccagggtgtttggttctgacttgccggctggccttctttcctgcctccagcatgttgcctgggattccatcccagtcatgccagagttaacctccgagtacagttatgacgattttcactcagtcacaggcgcagaccggcgtcagatggcaagaggaggagtgcaggaatcaaaggtcacagtctcaggagcaaagccccacagacgtctggcttctggatctgtgaccatatggtcaaagattgctctgcacaataacctccagagcagtcaggttgaggatgtctggtactgaagttactccatttgagaagttttatatatttttgttaaataaaattgaattgtaaatgtttaattgcagtaaagcatagtgaagaaaattaaaaatcacttataatctcatcactccaagatacaatcaccattcctactttgtgactttatacagtgatagtcgtgtacgctgaaagtttttgcaaaattagaattgcacaatttcgtattttgctttttttcacattatatcatgccgggaactac

SEQ ID NO: 52406 - DNA, 4459 bp, Homo sapiens
tttaatagttttaaaagagtaatacctatattccaatcacttaaaattaacatattttatccaatcaaggcatatcatcattttatacatcaagaaagaaaagaaactagcgaacaaacggggcataatgccgcctggctccgcttccccctcccctctccccccgtccttaggagacacctctggagttcagaaatgctaggagagcaagctcttcattcttagaatccaggaagggccgggcttttgcagctctcctctgccaggaagccgctggggggcgcaagacgccagcttctcaccttggcagaagtgcctgcctgcaagcgcagaatggaaacttccccataacaaattcagaagtaccttgtacattcaccacccacctgaagaaagcctgaatgaaaggaacaaagccacggcgttgtttactttcccattatcgccccagtcttgcggcagggcccgggtttccatccaatccacccggcccgccactgtcctggccagtctccaaggcttcacccaaaaaaaggaagcaatgaggtgtcccccagcgcgccttttcacgtagcacagaaggtgctcagtgggtgaatcctctgaaagtgccagcgtgtatggtcaaacggcagcaacctctagcctattaaactctcccaagatctcttccagacttattccattgccggaaaaaaggctttttacatatgcgcatttaagtaattaagatatttcaacatggtataagacgtaggggctcttactccatcagtactggatgggaatttccttttgccctctactccccagggtaactgcagtcccacctgaatgcgttttgcagcccttactcgggttctatttatgcgcagcttggacagggctcactgggcccggccgggcagctccgtggccgtccctctccaccgcccttcccccgcgccaggccaatgcaagggtgtgtgtgttggggggaggggaggacaaaaggggttcaggatctttttaacctgcctgcagatggcgccccgggaaagattccgagctgcattacctaagctccaggggctgcagccgcggggtcccggccacagggcgtccagccgcgaagactgcacagcagctctccgtccttcccaactcgcgcggctgttcggcacccgtgcgaggaacggatggaagggaattacttgtagcagggccagtactgggggcgtgcactcagggaccacggagtggcactcagcctcgaccccacgcgccaggcagcccggcgacccccacgcgcggcggggtcctgcccaccccacccggcggcaggtggacagtgttgctatgaagagaaagcctcgattgtccctacagcaaaccgccacacgccagacctctgctattgtgcgccctccatagaaatgcaaacgagcggcgtgcgccggccgcaatctgctcgtccccgcccgcccccgtctcccgcgccccgccgcgctcggccaagggcggggaggtggggtgggatcttccagagacggctcaatgtacacattgagtatgcctggcaggcatcaccagcgcgctcgggacgctagtggtcagctgcagggggctgtgcccactgccttttgcaagcctctaactggcgctacctgtttttaccttaatttctggctccaatgcaacagtctcatagacttcaaattaaagaaaagaaacaaatagaaaggtagcaatacaaaatgcaaaaaaaaatccctttgcttctataaaggtgcttttcgcaaattgcagcatcatataagcaaacaaggtttttgtgggttgggttttttcttttttttttttttttactttttccttttaaggacttcaaaaaaaaaaaaaagccaggcgagatgaaatctgcaggctccagtctgcctggtaacaccccaacaaaagcggcagatttgaggcattgtcatcccccgcacccctccccacgtggccttctggcacgagccgctggctcgccgcctcatttacatcagaaagcgggtgccggccaataggcgcgcagcctcgcgccagctggcggcgccgcacccaccagcctatataagggcgcgcagcgtagtaggggcgcactcgctggtggtgggcgcgccgtgctgagctctggctgtcagtgtgttcgcccgcgtcccctccgcgctctccgcttgtggataactagctgctggttgatcgcactatgactctggaagaagtccgcggccaggacacagttccggaaagcacagccaggtgggtttcagggcgctgagaaagccgctggtcggtcggcgaccgtcagggttttccagggtgggaatccgcggggtaggaggggagcgcgggggtccgggcgccagatcccggttggagagccggggtgcaggcgctgagccgggattggagtgtggttggagttggggagccaagggtgtgtgccggtggccggggctggggtctccgccgcgccctccggccggctcccgctcactgcgctggctcctccgcaggatgcagggtgccgggaaagcgctgcatgagttgctgctgtcggcgcagcgtcagggctgcctcactgccggcgtctacgagtcagccaaagtcttgaacgtgtaagtgtagacgcggcccaggctgggagacaggggcgggggtgaatggcgaggagactggcggatgggaggggtggcggcgggagaactcggctagccggttctgacctaggtccccgccttgccctcgcagggaccccgacaatgtgaccttctgtgtgctggctgcgggtgaggaggacgagggcgacatcgcgctgcagatccattttacgctgatccaggctttctgctgcgagaacgacatcgacatagtgcgcgtgggcgatgtgcagcggctggcggctatcgtgggcgccggcgaggaggcgggtgcgccgggcgacctgcactgcatcctcatttcggtgagtacagtcccgtcctgtccccgccccagtgtcgttcccgcctcggcccgcggccagccaggctgaccctgctctctctccgcagaaccccaacgaggacgcctggaaggatcccgccttggagaagctcagcctgttttgcgaggagagccgcagcgttaacgactgggtgcccagcatcaccctccccgagtgacagcccggcggggaccttggtctgatcgacgtggtgacgccccggggcgcctagagcgcggctggctctgtggaggggccctccgagggtgcccgagtgcggcgtggagactggcaggcggggggggcgcctggagagcgaggaggcgcggcctcccgaggaggggcccggtggcggcagggccaggctggtccgagctgaggactctgcaagtgtctggagcggctgctcgcccaggaaggcctaggctaggacgttggcctcagggccaggaaggacagactggccgggcaggcgtgactcagcagcctgcgctcggcaggaaggagcggcgccctggacttggtacagttgcaggagcgtgaaggacttagccgactgcgctgctttttcaaaacggatccgggcaatgcttcgttttctaaaggatgctgctgttgaagctttgaattttacaataaactttttgaaacaaacttatgctctttattgagggtaggggatctttgtgtcgggggaggtggcgtgcagggtttcagaggattgctggaactccgtggaactgatggcacctgttccgtcttcctgtcgggcaagaatgacaggctcctcccctctggcagagggagggcatgctgcccagtgctagggtagaacttgagcctggctcctacttttctccttttaggaagattttaaacttgcaaaacaggagcatacttgagataagacagtgcagcagctgaagtcttgccttccaaggcgataacagtgacctgtgcctcccctccccctcctcggccctcctccccctccctcctacagctgcttatctgaacagcttgcaggaggcctcaggctttcctgcacaatgagcattgccttctgcaggccctgccctttgtggtccctgaggatggtggcagactgctcctgctcttggggactttttcctcttaaatgctctgacacaaagcaatgctacaaaggtactaataccaaatatgacattgatgactgcatttaagtatgagtcattactttgtcatggctgtgatagaacttggaagatctgagaaaaaattggaaggcagcatctatataaataggcatgagcaattctgagggggcctggcatctgctatctactattttcagtgttctctgcccacatcagagttacgaggattgctgctattcacaattccgtttaaagactcataggaaaaaaaaattaaatattttaagccaagactttctttaaaaaggaa

SEQ ID NO: 52407 - DNA, 1641 bp, Homo sapiens
tcacagggaagtgacctgtcatagccctgagtctgagaaggcgtccagtcagggacacaccaaggcagagcttgggtgtgagaccagagcaggatggactgtcctgtgcaaacacagggatgggaacagagctcttgctgggtgagacttcctgatagaagcacccgggaggcccctctttacatcgttggaccctcccccttgtctgtgctgtgggtccctcatgctgcacctctgtgagtgtagttgctggtatgaaactgtctgggtggtggagtgtggctgcggagagctggagggacagttttgggagagtcagcgctgggggctactttccttgctgtgtgggacccagtgcctggagcatctccttgaagcaaacttttaataaaattctttgtatggtgagctaatcactccttccaaaatgagtctggccggatgtttcccttctctgtctaggaacggaggagcacatgtctctgctgcaatacccacatgttaccaaaaaaaaaaaaaaaaaaatcaaacaaacgtggaactgagttcatgacacttaggcccgtgtgcttagggcaaaggtccggatgcctgtccttgtctttgaagtaggtacacagcacgatggactgatgagtgggtggacagatttgagataaagcaggtatggcaaaatgttcatggtgcatgcacgctgtggagttcaggatgcaattctttccacttttctagatattagaaatgttcatagtgaaacactgggtgatctcagagctgtgaggccccttagggtcacccactcatgtctccattctgcactgagcacactgtcagagcacagtactggagatgggacacctgccctttggaaggtgcatggtgtgtattcttgggaaggacaccctgtggtggaggacgggctgcctcctgcagggcagtcagcagctctggcccccaggcactgactcctgggagaagccctcagtcactgagacagggccagacagggcagatgaggcagtgccaccccaggtcgacaagtgctagtctaggcctggaaggcccagaaagggcagcctgccctggggagggtacacagcatgggagtggctgccgcaacgtagagtctgggagcctgagcccctggctggactttttgttcattctctttcttcttataaaaccaaatggtgcttgagtcagtcatttagggcattgtagcaattctctgctctgggtaccactgaatgtactgaaaatcaccatggtcgtgctttctctcttcaagtttacggaactatgggggaggcggggcggtgtgtgtttggagttgtttttccaggaactgtgacaggtcctgctgattcacacacaacagagaagtatctgatagggctgccaggtttatggatgcagcctgtgaccttggaacgatgtttttaaatctaaaattactgatctaagtagtattaaacctcagactccacctgttcctagtcggagctcacaattaaagtcagttgaccagatttaccatttgtggttaagtcactgtcaaagccacacactccttgggggagtgggggttgcactgtgactgctccagtggccgagagggcctgagctcactgtttccaatgt

SEQ ID NO: 52408 - DNA, 747 bp, Homo sapiens
aattaatcctcatacatttaacccaacttaattcaacccaaattaatgctaactcttacaatagacagactccatgatcgaatgagctaacacgatcaggttgtattttcctccttactctgtgttctccttcctaaagccttgcctttggactccgggtggctgcagcagggaagggaggggcacaggagacaatgtgctccggctgcctcagctctgcaggggttctcgtcacctgatgtcctgtctccttgcccagaatggtgggcctgtcccctgccagggaggttgggaaactcttgctgtcaccaaagtttgtctttgttttctagttttgcaaagtttggcaatgtttgacaaagttttgctttgccaatgtttttactggtttgtctctgtttttttttttttttttttttttttttttactaatttgtaaaggcttttgacgtattatggaccataacccttagttttgtcatggagggcttaaatgtttcctcccactttgttgtttgttttaaaactctgtgttctctttgaccctacacacatgttttggctttatgtgtttccaggtagcaatattctgagagcttctggattttcacgttctgcttaggggggttgtcctgtgccaaggttatgacatctccttccacatgtttctattaagttgatagtttttaaagcgtattgatatatttaacccaactgtcatctgttttcgtgtacattgtgagagtg

SEQ ID NO: 52409 - DNA, 1374 bp, Homo sapiens
acaacaggtcccccccactctggccgtatggctgacccagccgatccctcctcccagcctagatcttgtttgcagtgaccttccagcttcctcctactcaaggactcctgctccagaccacagagctgcccacgcttcccgcagcccgacacctcatagctccatggctttgcaggggccatgtcttctgtgtagaactcttcctccagctccctgtctggcaaattcctgtttccttgacagcccagtttaatctacaccctctgcaatatcccctgacctgccaagtgactgggccttcctccctgctgcctcacaatccggcagagcctgcacatgctgagattggcctgggactctggtgtgccagctcactgtcaattgtcaatgaggccttgagctcctggaggccagagccccagtcctcctgcccttggctgccagtgcctggtgcctcacagtggtggggccttgatgagaataaacctgtgaaacagatggtcttggaaggcgaggagggcaggggctgtccctgtataggtcaggtgggccttggcagcataagtaagtagccagccaccccaggcattgctgtgggagctcaggcctgcactgccctgtctgtccattcagctgcagcatcacaacaaggagggtccacggctggaagcctgcccagcttgctcgaaacttctttttaaaagcacgcattttgttcttcaaattccaaagcctcacccaaccctgcaaaaacgacgactcctagaactaccatgctgtgcacaaggcccccgacacccctcagagggagtgatgactgcaaagacatcttgggactgtgatctcctgcggggtcaggcggactctgcctgtgcgggcacacacaccgctggatgcttttccctaagcccccggagtgaaagcgatgctgcacctccactgccttccgcaagcggtttcactttccaggccctgagtgtggagtcatccagagggctggctgctgggtcgaagcacattctctgacctggctggagctcaggtccggtcacaggctgggtcaccttggccttttgtcctctcagcatggagtgactgaggaggaccagctgtttttcagcctcagaggctggctagcagtggggtgcaagccctgtccctgatatggagactttagctgtcccttctctgtcagtccatgtacgtgacatgcagtcctctccccaccggacttcctataaacctgggttggcaaagcatcaacatgtaagtcgccaccacttccttcctcttgggcagccaccacgaactcacctgacaggctgtgtctgaacacagcctcagaatccttctcaacactggaggagaaccacc

SEQ ID NO: 52410 - DNA, 1148 bp, Homo sapiens
tccagggcttcatggctgtggagaacagatcctgcatgccttttgtcttctgtgagcatctgccactctggtatggccaccaaatgctcttctccctggtgcatgccagggagctttgcgcacagcattccacagatagcatggactagggaacacaccccaggtggacatgtgacaggcagaagacttgtgcagcgtgctgttcagggcgagtgtgcaaagacaggccacctcttggggagacggcccatagcgcggaaagaagtcatcttcctttccggccattctctttttctctacacacgagccctgcaataggactcagtggctgccgccttcagtctgggctgggccactcctgctctcgagggtggaacactgagatctaagggcctctccctgtcatgatccctgtttatccttcgttgtgctcaacacgatgtttgtcattactaaagcgctcttaaaattgcatctgcacgtctgaatagcctgctaatgcagagctgccctttgcattcaacacaggaacctgcttctgcctggctctaggacaacacttcttgctgggctcctgccaagtgcggctgggctgggcctggagcgaccaatccactgatccaccaatccggagggcagcccaggaggagcgggatcttagtggatggacgccctgcctgtctgtggaatggcttcttcctggggcaaccccgagaacaagagggaaaacagcctctccccctcgcctcctgccctcctgcaggcagccacctcctcagctaattgaaaacaaaaagggacgcagttgtgaaattcagcccccagcgccatcatcatctcctgcgggctcagggggctcctcactgtgtttatttacaaatcagcacatgttgttttggccacggcagcagacagtgaccccagagagggaggtccagagcactacacaaattgcacaacacaagcaggtcatctgtcccctttgctgaagattcctaagaaaacagaggcagctgactctcaggccatctggaagccaccctcaggggccgagcgctcgggggcgtgtacgccagccttgggggtgctatccggacaccaacaatgtcactgctgctgccagcctcagtttctccatctgtgaaggg

SEQ ID NO: 52411 - DNA, 774 bp, Homo sapiens
tggccctagagcccagcctccctccacagagcccctgcctttggaaagatggtctgactgaggctcgccatgcccttgctgctttgctctgcaggggctgggccggatcccccagagcagcgagccctggctgtgtctctccccctgtcaaacttgcctggcggtttgttgctgagtctgtcgtggctgaggcacctgctcccttcagagcatcacacccagccagttcccggaggtggctgagtgtttgctttcaggacattcagtagtactgggaaatgtgtgttgacacaggagataagaaggtcagatgggaagagaggaaggagggctgccactgcccagcaggcagccaggaggcctgtggatcccaagattgggatcgattcctcgggttcatctcaatattgtgggaggaaaacataaaggagcccagagccacttgttgagggccctggaaactgtccatatgaaataggcaccaacactcatctgtgaactctttgaatatgacaagggtaaattcccaatttcccttttccaggtatagaacgcttaaatgcattttcctgaagcccttctgcctccatctactaggatgccctcccaccttctcacagaggctgcatggctgtcacctttccatgtggcagctgagttgggtgtggggatccccgtttgagaggcaaagcttttgatgtgcaccagggagcggactgatctgaagtagtcgtttgactttggcaactgcttcagtttcctcatggcaggtgt

SEQ ID NO: 52412 - DNA, 610 bp, Homo sapiens
ggcatttgggcctgggaattttttggattatagtgtggataccacataccctacaccaccccttgaggtgtggggagcaccctgtaagcaaatgggttagtgtttcgtagcgaaaccaaatcaggtaaataaagactcacaggcattcaggtcaagcttggcctccaaatgagttatggaacaatggtcagttctcaaagtttattgggttttgagtgactgcttagcaattgctgacctgcaaaagtcaacaaactcagttgactgaacaaaccaagttgactgaacaaacccagttgacccaaaagtcaggccccttcttggtcacagggcttggctctgcttgcagataggccctgtgccatcaagcaggggctgggtaggggacctaaaggccagcaccagaggtggatgctactggaaagagacctggggtgggagggatctgaggatgagctgcttggcccaggtccagcctctgctgaggtgaatcattccttggatagtctgcagcccccaggaaggttgggtgggggcaacagccaggatggccaagggattgatcagagacaagtggctctgggccgggcgcagtggctcacgcatgtaa

SEQ ID NO: 52413 - DNA, 726 bp, Homo sapiens
gtagtgggctttcacctaatgcaaccatcagcattaagatgaagcagcatatgacagcgttattaaaacatggccactcatttcctttttgcttagctttagagatgatgaaaacatacagtgattccttgtttgaaaaggaaatgtcaaagaacagatgctatcagggtctgatttataaaagtgtgggcttttataaagtgtccaggtctcctgggcagcatctttaggggactactggacacagctcagggggctgaccccctggccactgccaagctacaaccttctcaaggccctgagtcacagaagacagtctgcgggtggcagtgtctgtcgcccgtgtgtgcacatgtgtgcctgctcctgtacagggccccggcacgcgtctcagacgggctgccggctttgttgttggaggcgcaggcttctccagattggctggtcttcaaagcaatgacatgccgtgtcagatctgccatagtccaggcacgtggcaggcgtccagcatgcaaatgagtcggacgctttgcactggcctggagcgccctagacagccgccccacacccctgggaggcccagcaggtgcccgcgaggcaggtgtgcagctcgccatatgctctgctgagcgtcgggtttctgccagcatctttcaatgacctaccaggtgagataaagtgagtggaaaggggcccgtgccaacctgtggctgcacaggccacttc

SEQ ID NO: 52414 - DNA, 1997 bp, Homo sapiens
tcatgccacacaaaacacaggcacgtgcggtgcgtgggtttttatgccttatcgcctgtaccaaaaataaatcttccttgtcaggcctgactccagagcatgggagtgggcacagcgtcagtcgtctggcactgcctcccttgtcatcctggggttgccatcatggaatggaactgctctctgtctgctttgtcttactcctccactccagcgtgtacccacagagaggaatggcacaggggacacacatttccctggatgtgggacatctgcaagggctctctgtgtgtccctccagcaggagggctgtgtcctgttctttgggggagctggggatctggtgggtataaatgctccacctccggcttccagcatcctaacagaggctgcgcccatttgggcagaagattggacccggggcagggtccgtgagcactgggaggctcgccagtggcttggccctgcgtaaacctggacaacttggacaaactctggggcagggtggggagaggcccaggaactaccctggtggaaattcccacccatgtggtgtgggggatccggctcttgatatgtagggaaatgacgaatgtgcaattttctgctcacctgagatccacgctggccataagagcattattattttctgacaggacaataaaaatgcgtgctttctcttaccatctagctctgtgcactccagttaaatcacacctagctggctgctgactcagcctcttgcagaacgtccagacagatgttccaacattacctggtcactcctgcctggagctgcagcctccctgctggttcccatccccagggagccggcctgctcttcctgccctgccacctgtgttgctccaggctcagccctcatcctcggggagcatcaaggtcagagtcagcaatgctctcacgtggttctgaacaacatgcccaggcagctcccaagagcagctctgccagattctaccattcccattctcctgttggtgactatatgccttctctttttataaaactatttccttctcctttgtaggcagctcactcagtttccttatggctgagttgcccccttggtaagtgagatatcagatgtaggatgcctagaagcccctctacaaaggacactgatgactatgatactgatgatgtacagctttctagaagcattggtggaccctgctatgcactctagactcccttccaggaagaccttgctgcccagctgcagggatgtggtcagcagacagcccccagctggccttcctccaggctcagggtcacctcagcttcctcagccactgcacccatcccaggtggccacctccagcactggggtgcagtccaggaggcagtcgcacagggccggcagctgcctaacgggcaaatcttcagtggtatccctgacctacagccccctcggggccagcccaggctggcagggagcctgtatcttgctgtcctgtaccctgccctgtgctatggatcccagggtgctccttcatccaaccctgcatgccagctctgtgagagttggctaggatgggcacagatgtcaaagctggggggccggagagtttacttccagctccctctttcaataggtgaggcgcagcatggctgacctgcagctcagccccagcctctctctgcatattcattgggacagcagacaggaggccagagagccagtgcttccgacagaagccagggaggcctgtggaaaactgtatttccttgtggtttatacaatgagaacactggtgtagagttccaggcccctccactctgtagggcattttatttcttggcttcagtgtcagaggacagaatgacattagccccattcaatatttctttcatgctctcaagggaggctgcagggctccacctgcccatcctgtatgtctgtaatttttgctcctggtttattacttacccacatgcgcaatgtaaacacgtgcctactgagtggccaggccggtcac

SEQ ID NO: 52415 - DNA, 1036 bp, Homo sapiens
tgaaatctgcatgtcacttaggttggcaatgcctgcgccctccctagtggtgccagcaaggcagtcatttctctaacctaccagctgctcctgtgaaaagggagcattcagtgcagaaaactaggagggaaaggaactcacctccacttcctgggtgctgatgaaagatgctgacatctccccttcctctaggtgcagagggtgcaggcccatttcacaatggggaagactgatgctcagagaatagccagtatgcttgatcataccggtggcatgtggcagagaaggctgaagtccaggttctactgttggcaaagcttgggccctttccactctgctgtgccttcctcacctccacagtgacctggacatgaaaggccctcttggatgaactggtagtgtcactggcagcagctgctaggctaccaggctgggctggcttgccatcctggcttccccactggccgggtatgtggacctgtgtgatggtggattgtatgtgccaacttggctgggtcatggggtgccaagatatttggtcaaacattctcctgggtgtttctgtgaagctaactttaaatcaatgaactgtgaggaaagcagattgtcctccctaatatgggtgggcctcatcagttcattgaagacctgaatagagcaaaaggctgatcttgcctgggaggagagagttgcctttggacttctctgcaccatcagcagacagccttcagatgcctgcagtgtcagctctcctggggctccagcctgtggcccaccatccagagtttggaacttgccagtctctgtattcatgtgagcaaagtcccctagactttctctctctatacacactttgctggctattttcctctggagagccctgactcataccgttgcactgagctttttgacttttcggatctcccgcttttctgtgctctgcaataaatcacccttgaatcacagaaatgggatgatgaaggctggtggtctttaaactttagcaagaaccacaaccattcagaggtttcttaaa

SEQ ID NO: 52416 - DNA, 995 bp, Homo sapiens
ttgatagagacaaaagccaactttgtaatcctggatgtaaatttgagtagggaaagtctctccttgttttctaacttccgttggcactgattttcatctcttaatgacaaactctgtactgttaggggccatatgtatgtgtggcttcagcagtgcttggcaaaaatgtccctgtgtacatgaactcttgattggctgaatgaaaaaggtcagtgatgtctcccgctaaagcatttataggagcaaggcacattttccagtttggtaaaagaggaggtcaacctttgcatgtgggtctcgtgagagatttccaattcgttccagcgacaggccctggattcttagaacgtctgcctggtgacttaccagcttgaatttctcaggcctgcccgccaggctctcctagtctgacgcagaacatgtcaccaacttcgtggctaccatctccattagaggcatcgattgcttcaaatgctcactcctgatggaagccaagggtcatagtcccaagtccacactttctctcctctctcagtgacaatccagtcccagtaggacggtgaccctgggactcgagctgtgttcagagtcacctcttttcgctttgatgtgctcactttgcctgatttgaattcactcagtcttcctctttctctggcacattcaatgctttgggttcagttcgtcttgctacccaattccctccagggctgaccatttccaaaccttcaaccctcactccctttctcccaatcccactccagcctcacctactccacagacctttccaggggacgttcagctgctgcccttctctgtcctcccatggacatacattaccttcttcagttgcagctgaggtgtcttcacattgcactgttttctctagtgtgtttgttcacgtgtcttatttttggctttctttattagctggaagggccctggtgcgcccacatccctctccagagagttctgtctggtgatttgcacacgtg

SEQ ID NO: 52417 - DNA, 983 bp, Homo sapiens
cctgaccaccttttgcgtattctttcctctgtgctctgatgtcacagggcacatgcatgcctggcggtgctcgcttgtgccagttgcagtggtctgttggtgaggttttccctctcagctgcaaactcctcagggagtctctccatctctgcacccccaggactcgaaacagcccttgaatgcatcaattcacttgtacccttaccacactatctattctgtcccaggagtcaccttctacagtgtcctgtcacaaaggtttggctgggactgctggcaaaagccactggcttgctgcctgtccctccctggcaagccaggcctgtgtgctgtgtgtgtaacctttgacaaagtttgtggtctaaaggttatgctgactgggctggaggtgaggcgaggacagcgtgtgttggaggttggtggagttttgccaactagagcaagcttagtgccaccccctcgctgggccctgttccctgaggaaagagcctatggttggctcttacaagaccacaggtcagtctgtgccttcctgtgtgcgtctcaccctggtcgggtggggtagagtgagcacagaactaggcacatggttccaggccgcttcactgcttccttaaggttgagaatgtcccccaggtctcttgtgcctgggattagtggaagcaggtcctgctgggactgcagctgggtgccctggtcaccaatccagcttcaggaactgagctggatacctgacaccttaagtggggtcatttgccctatggacccacatctgggcacagggccatttcgttctcaactcttttgtcaggaaatcttttcgtgttctactcacttggtgattttgtccattcaacacaggtttttggagtccctggcaggggcttggcagatgctgtgatgtattggtccagggaatcggcttccacccgcagccccaaagctctttctttctggcatccccatccatgagggctggctgt

SEQ ID NO: 52418 - DNA, 1277 bp, Homo sapiens
gtctattttcctgggagttgctgggattgccagctctgggccctgggggtgttggggacattaaggactctgaggttccatctccagctactcggagagggttccttgtgtcattcatcaggcagcttgcttatcttatccctcttttagcaattgtcatactgcattaaagttagtttgctggtctctctattagcctggatgattttgcggttctggactctgttttattgaccattatgtctccagcacctcagaaagctttctgtgattggagtctttgaatgaggctgtgagtggatgacgagcctctgaaccgacgcgggcgggagggggctgctggccaactcactcaccgggccacctttactgtctgtttactgtctgtttactttaaaagaatgccttggtggtctgaaaaccttcctaagtgccaaatgagagcatctcaaagctggcagagcccctgggtgttatcagggtggagaatcacgttcctttcattctctgatgggagcgtgcatgtgtgtgcgtatgcccatcaccctccactggcttcactcatgatcgcagataaggggaaaacacttacctcggactttggattgaaaccagatcaggaggcttagtcaccccaaacgcaaccttagaaagcatgaagttaatatgaaacatcggcccgtgtaacgtagcaaaacctcccctgtgaatgagttttaaactttttttttttttttttaacatcctgaatgtttttgagcacatgctgctgccttcttagctgtttgttgggtgggtggtagagccaaggcaacagggggactgttgatttgagcacagcagaagcgggctctgaacggcctcccgcttattgccatgaaagcttcagccagtcccgcttgcctgccttgtgcacagagcagagcagtgcagcccctgggttaatgcaggaaagagcagctctgacccgggaggcatttctctccacgctgccataaacctaagactctctttaagttgtccaagatcaagggctgcttctgatgaagagggagcagaggtctgtagtagccagtgcctttaaccagtagcagtgatggccagggcgtctcccaggggaagggacagcgtggctacaaaggcccaccaggaagaaaggccccatttgccagttggctgaagagatccagcctacttcctctagattcaggatttaaaaagggtgtgtgattttgttctctgttgggagaaaatgacttagagatacttcaaactgt

SEQ ID NO: 52419 - DNA, 872 bp, Homo sapiens
ctagaatcctgtctcagaggttttgggggagcccaaactaagatatatatgtaaagcagaagtttctgcatacttctataattctatgataggcttgtagcatttacagttacaaaagcaaacacttctacaagttaatagcaaacagaccttaaaaccaaagaaagtcaaatcagcagcattaattgattgtgacagatgagtcatatgtaggcactcggtgtcagctgcagagaggccgcagtcccactgtgtgcttgggtgtcttgagctggcagggccggacctcggctttgaaccctggggaagatgcattccctccactaatcagcagtgtcctttggcttgagcactgacctttgcctctgagtgatcctatcgactgtgaccccgagtcatgctctcaggtcacggacagtgcccagggctgcttacttacatcacatgatccaaaatgggctttttacatttttttctttttagttaaaaaaattgtggtaaaatgcatataacctaaaatttgccattgtaagtattttcaagtgcacagctagctcagtggcattcatttcattcacactgttgtgctaccatcaccacccaccatgtccagaactttctcatcttccaaaactaaaactccttactcattaggcaacagagccccattaccctcctcgagctcctggcaaccaccattttactttctggctcatgaatgtgactactttacgttcctcacaggagtggaatcacacagtatttgtcctcttggtgactggcttatttcacttggcataagtcctcaagcttcagtcccatagcctatcacaggattttttttttcctttttaaggcagaacaatatttca

SEQ ID NO: 52420 - DNA, 765 bp, Homo sapiens
gtgttgaaataacgttggacagacagaaaagttacaaggatagagtttccatacatacttttttcatgtcaagatcttgtatcaacacggcccattggtcaaatctgaggaattattgtgggtaaaatacgattagccaaatggtagactttgtttgagtttccctatctttccactcactccctttttctgttccaggatccagaccaggagcctacatttcactaacttgtcaggactcccgtctctcctccagcctgcgacagctcctccgtcttcttttgtcttttctaaccttgatacttttgacgagtactggccagctgtttcgcaggattttcctccagctgagttggcttgaggttttctctgattggatcacagttaccggttttcggaggaacagcacagaggtgaacggtctcacttatcactccacatcaaagcaggcatgacacccacgtgactcattcctaggaggctgaccttcaccttttggtctgggcgacatctgccaggtttttccactgtctagtgactatttttttcttttcctttttttatgtttgtgaaagtcctgcccacactcaaggggcgggaaatgaaactacaccccctggtgtaatttgtgaggtacattaaaaccaccctagtaataggaaatgctcacattatgcttttggtcattgttattgagctagttatgaggcttctttttccctctgtgggaagatgacattttcacccgtaataccttgtcacccg

SEQ ID NO: 52421 - DNA, 3052 bp, Homo sapiens
gtgtgtgtattagtgtgtatgaggaatgtgtatatggggtgtgtgtgtcattgtgtatacgtgagtgtgtatgtgagtgtgagcatgagtgttagagtatatgcattcgtgtgtatgggtatgttgtatatatgtttgtgtgcatgtgggattgtgtgagcatgagtatgtgcccatgagtgtgtgtgtatgattgtacatggctgtgtgcatgcatgtgtataagtatgagtgtgtaggtgtgtgtgtgtgagtgtgtaagggagtgtgtgaacatatgtataagagtatgtatatgtgagtgtgaccatgaatgtgtgagagtatatccatgagtgtgtatgggtatgtgtgtgagtatgagtgagtgattgtgtgtatatgagtacatgcatgagggtatgagtgtgtctgtgattgggggtgtatgattgtgtatgtgtgtgtgcatgcatgtgtatgagagtgtgcaaatgtgtatgtgtgtgtggcctcagcacctctgcctcctttctttagcaatagcaccccacttttcttggggtacataccccacatgatccctgcaagctgccagtccagattgcctgacaccctgggaggcagagtcctgactcctgcaggggagcaggaaattcaagggcagcagtggcagaggccaaaggggagtgtcccttacttgagccacctgtgtcaccagggcccagagcgtcttcatgtgatcctcgagctctcctgagatagaagctttctaatgtcattttataaattcctttcctgcttaagtcagctagggaggcaggctgtttgcaaatacgagctctattacataactgtcttgtgaaggggcccctgctgttccactagaattgtgaaattatttcctgatggtggcctgacagggcaaagggcagattaggtctcgtcactgtcggggaggggcagagggccaggcttgtggctaagagacagaaactgcaaggacactgtctcaacaggatttctcccaaaatccatgtatgggatcaatccaataaccagggtaaggatgacagttgtagacagatagaggaaagaatccctggaatccaagaagcatgtgacaccttatcttgctaacaaaagcaatgcaccctgaccacatactgtgcaccaggcctgagatactacattactgaaccatcgcagcacctggaaaatagatttttaaaaggcccttagtatctccatgtccagtcagtacccctcattcagaagacctcaggtgcacagaggttacacagaaacacgcaggtcagtggtggagcggggaatgaatgaggacggccccactccagagtagccaagtctgaatctctgggggaggagccgggaatctgcattctagcaatcactcgcacagccctttatgcacctgtctgaaaaccactgccttatgcagagagctggatcagtgtgctgtgaaacacaggttgatttctgtgttctctgcatctgacttctgagggatctggttagaatactaagaaacataaatggtgggctccatggatccgtcctgccctgcatgcctgggaaagttctcccacagcacaggctgtggcctcccacagagccgtctcatctgaacattagcctcacaggctgcttgggtatggggagaacttgctagaatcctcctggaacatgtgacctgttgtccaggatccatagctacggactccgcatcagctgtgggagccgctcagtgtgaaccaggctcaaagaacactgcgtagagagctgcccacgtttgtttacgcacggtttgttgtgtttccagaatgaaaggaacaggacatacagggtggacaaaaccgacaggggcagctatgtcatttcagacgaaaacaagccttttcggaaacattcaaatactagatgattatggctttccacggacaatgtctctctacttctgtctgcaaacatccccagggactgaaagcatcttgaagcctgcctccccagattagggagtcactgacagggcagaagtcacattttgaatgtgtgttttatcggcacttcacagaggatgagacaaaggcacagatatctgacactgcggctgtgcctccgtacccccgctgtcagtgaccgcctcacccttcaggatggccccgtagactcacacactactgctccattctgctttggtcttgatgtttttgttctgtgtttcattttcagtgtctttggctgctcttggggtctcctctttccctcaggcaggggccgaagggcaggcaggggggtgttgggcccaagggggccagctggtgaggacagccccgcctgccctggtggtctcgcctctcctcagtgggctcatcacattcacagaggttcttcgtgcctccctcactttgttgccacaacaagaaagatttcactccgtctctattttaaagagagctggagacatcaagtggctggctgtggtcacccagccccaaccctgggtctcattggtgtaggaccccgtgtttatcttcctgtcatttcatcttccccctactcccgccaacaccttctatttaatctttcccccagctcttcctccttcttgcacaactgaggtgcctgtgaggggctggatgtgggaggtgggtgacacctcaaacagtaatttccagaagcattttagatgcaacctcggagtcttcaaaggagcactgggcaattttgcttggagagggggtggaggcgggtaaaggatctctgtattttcatcccctggaactggctggaactggctggaactggctgcctgttggatgtccctggaggtgtggcatcctttgcatgtcaacatcaggatttggctcttgtctctgccccgggcctgactccctgctgccaatgcctgtggtctggatgcacttgctgcgaattgcccaggtggcagtggtggagcagagtctgctgggagacacagcaggaaacatacagcatcatggggtcccaggtgtgacggctgggcatggtgtatttgtgagaagaggctcca

SEQ ID NO: 52422 - DNA, 2305 bp, Homo sapiens
tacctcaatatatatgtatatatatgtctgtatgtgtgtgttgtatgtacacacacatacacagagacattacagacatgtactcactctctttcacctgagttggcagaaagttttgttgctgggccctgctgagataaccggtttgcccagtggcttgctggccttgccaggctgtgctgagctgttctgcgatggctggcaggcgctgcctgggctagaactggtagtagagctccaggttttaaatggacctagggggatcagcccagggttccatgcaggtttagcaggtagggtgtagcaggccacagctctgagaaggctctgacctggcaaatgctcacggacttgaggcctgccctgcctgacagcggctctgatttcctgacctgtgcacaggagctggctgaggggcagcccctgcaggcttagagttttctggtgaaaagtgttgtggcaaaaggagcttgagctggtcccccagtacctctgggccatgtggggccttccccctcccgaggagaggggcatgactgagatgtgccctctgccccagggaggcacacaccagggcagggctaggagacactcagcctcagtagccactttccagtcaagggcctggggtcacagaaacctcagggctccttcctgtaagtcggggtggttctcagcagcaagctttcactttccatgcctggctgggacagctgggtattgagactgaagagacagcccacctctccttctgcccagaaagtgaaaatgcctgagaaggcgctgggagtgactggggacagccagatgaaggtccagttctggtgtcgggtccctgaggagggagctctgtggactggctccgtagcacatgctcctggggcttgcctggcaccggtgcagggatcaaggtcggagtccactggctgctgggaaggctggcattggagttacactaaggcgctgagcagcgttaggcactcaaaatctattttaagccttgtgtaaacatgcatgaggcgaagtctccctctccctgctgctcctgcagaaagagctgtcctttgcattgccaacttctcagggttcttgtggaggttaagcaagtgctgttttgatttttttctggaggtgaagtgaattatagccttgttgttttaataagtcacaatatttacaagttcatttctttgaactgtgtgtggggggttattttgtctgcaattttgaaggtaaataattttctgctgtttcactgtcgtttcagccagatatttttgtttggtttggttttcaaaaggaggagaagggaactagcttttatggaaggtctttgctctgtccttaccaacgcgggagttgtgcttccattaccttctttaatcattttcataaggatttttgtacaaatgatgaggaatgacgggtggttttaaatttgtttttcagaaagaagtaatgcatgactctgatttgcggctgcaggataaatccgaactatttcagggagatgtcatggagagctcatctctcagcatcaaagttgcctctcctgacttttgaattttaagtgttctgtgtggaagaaaaatggagacaacaaatttctatgcatggattcaaagaatcctcgtaatatacagactacattctccccagctttttatctctatatattctttttgttgagtttcaaccacatagggttgaaattcaccttcccacattacatttttcatcaatagttgaagacctatgtatgtaaatatcaggaactatcagaactccctgcaacaggaaacctgacccccaactcccccgaaatgcatcatgataaacagtcacttgccaaaataacaaatcagcttcctggaacatgcttgctcaaaaccaggagaggagcttagagacgtcagcttgacttctgcctcgtacgcaggaagggtgaccttcaaagatcaaacatcgtcccaaatctcccttcatcttgtagtactcctgcttgtcgtagctcctgttaccatcaggtactgggccaaccatccgtcatgtcagaagagagttggggacaatccctggattatttcacctttgccctgctggtatagacaatgtgtgttatggctgggtgacttgctgacttttactctgagcaacagctttgtcagagtaaactaaaacagagacttcagagcataataaaatatgacattttttctgtatagaactaaagacacgggggagagagaacaacttaattaaaaagacagtgccctttcagtgtctttttttttttttttttttt

SEQ ID NO: 52423 - DNA, 611 bp, Homo sapiens
atttgataggcatggtggcatgttcccgtagtcccagctactcgagaagctgaggcaggaggattgcttgaacccaggaggtcaaggctatagtgagctatgatcacaccactgcactttagcctttggcgacatagtgaaaccctgtttctgaaaaaaaaaaaaaaaaaaaaaaaaaagaggcttaagagaactcctgtgaccctttcaccatgtgaggacacagaaagaaggctctgtctatgaacctggaggcaggctctcatgagacactgaatttgccagagcctagattgtggactttcagcctccaggactgtaaaaaatgtttgttattccttgcagtgtacagtattttgccacaacagcctgaatggcataagtcaggaaataagcaatgttttcagaggaataatggcattgctttggcatgtgattagttaataaattgccacctgcttccatggcctgctgccataatacaaaaggcaggaggcccctgaaaactgaaagtgtacacttcctcatgcccagcctttctaacttctatcacttggaactcctggcagaatgtggaactccacattcagactgtcgtggagtaggagtag

SEQ ID NO: 52424 - DNA, 953 bp, Homo sapiens
atttaccaagtagcccaaagggtgggagggggactctgccattgtttgggatctttggtgatttctttttaaggagctgatggctcaggcagaatggttctaagggccttgaacacaggcctctcccacacgtcttccttaatagactcccgactccagacaggagtccaacattaatacttcatatctgggtgaccaaaccctgctggctcacacctaggagaggagcaagtggaggaagcagagccttctgggaggagtgggaggaaggcttgcaaggggatgaggctgctgcacccaagaggaaccaagcctgggtgcagtggggtcttgcaccctcctcccagtgttccacaggatgggtgtctatgcccaggagaaatgcacaggaagggagacacctagagacactcccgtggtccagacacatggtgaacccaagcccagaagacagtccaggctgacaacagtaaggcaggggctgaacaaaacccatcagggagcaagctaaggtggttggctcctcctgacgaatattcagaagtgcttcctttgctcttttgagtaactaaaattcagccaaattgcataggagagaagcctcctcctgcctaggctcctcctgggctgttcaggacagctgcagccaagttcagacttagagctgtgagtaagcaagaggaagcaaggcaggcagctctaccgctggcaggtctgaggcatcccagacagctccgtgcagcaaattcttctgcagtgactgtttggcatcatctgggtggaaacaaaacaaaacaggtgaacaaagaaacaggagctgtagcttgccagtttataggtatttttaattgcctcttagctttcttggtgcagacatagcatccctttctttaagttttgggggctcactaaccttacaagatggtggcatgaaagttcctagcacagagaca

SEQ ID NO: 52425 - DNA, 417 bp, Homo sapiens
gtgttggagcccctgttctactgtctttcaccctcatgtgaggcttagggtagagccagctcccagttcataccaggttaatgtctaatgggtgcagaccacaggccaggactgtgctaaaggctacacttggcttattgccctcagtcctcaaaacagccctgtgcagtaggcattgtagttgaccttgtcttacaggtggggagaatgagccacagagaaaataaataatttctgggaaatcatccaacaagcaaatggtattgctgggattttgagtccatcctgccaccagcttccaggcaatgacagctctttccaaaagtaactatgtggcccatggtcctatctgtcctccttagaaagactgctctgccaggaatcatgttgaaccagctggggaattctctttacttt

SEQ ID NO: 52426 - DNA, 1872 bp, Homo sapiens
gaggcaaggctgccactcagatatctcttaagaaaggctataggtagctgttccttgacacatacggtttcaaaactttgctcagatctgtcaaaggaagcagggaaggctggcctcgtgataggcgctgtgttttcaggtaataggtggggatcctgtaactatgtagactcagtggatggatactgggaaagccaggcttttgtgtgtgtttgtgagggttcaggaaggagtcaggcatttataagaggtgtattactattattatgtaaataaatctaacaacaacagcaccaataatgggtaacaattatataataggtactctgtgccaggtaatgttctaagtgttttacaatttttgattgatgcagtcctcaaaataaccatatgggaaaagtgaggcagaagaagatgaaatgacttgctcaggtcacacagccagcaactgactgagctagatcttcaagtggctgcttccagacactgtgcccttgacccactggctcactggtggaagtttaatgacctgctctccaaacaaaaacgccctggtttgaagcatttgccaaatcctgtgatacaaatccttcaagctaccaatatgacatcactgagcagagtccgggaggaattagagtgcattatgttactatataatactttattatcatattatacagtgtttcccccagacatacagtatagatttcagtaatctcaaaagcataggtttacaatgtagtgaaattattagaaactgatacgttttgagtatttatcttcttaaaaatgtggtttatttaatttaaaatttctgttatttaatcttgaatacttgctaggtttaatgactagcctgtaaaattcctgacaatttaaaattggctcttgtgacccagtacacgctgacttcaggctccactgccccaaccaggatgctttacaaaaaacttaaaactaaatattacacatgggtgccccttaacaactaatgacctgttgcctcttcagccagctggagctttggcctccagagcaacgtcctatctttctgctccatttctgacttctcagttcccaacatctaagaagtaataaataaaattgaacatacatttttcaaaaatctcatgttcctagggagagtaattccttcctttgctttcccatttcttgctgactcgttccctctctgactgactagctgtgcatgtgagtcagagtcactagctgtggaaatggagccccttccaaaaaggcattttgatccagctcttaatgttcctcctacgttgttttggagtggtccttctcaggacagctggtggtaggagtaattttctttaatttatggagcggtatctaagtcatgtagactcacagtgaagagagtgtatgtctcatagcacaaggggatgcccttgcactggggctgccttggacaaaagaggacgtgatgctgccagagttgggagaaaactttgaactgagactgtgagtttgacaaggagattattccaaagggaaggatggtgttcttcagctccactcctcaaattcccagagcctctcagttgtacctactgggcattccaagaaacttgtgtttgaagcaattgttttgtttctttattttatttatttatttattttgagacagggtctcactccccttgcccaagctacagtgcaagggcttgatcatggctcactacagcctcgacttccgtgggctcaggtgattctcccacctaggcctcacaagtagctgggactacaggtgcgcgccaccattccaggctgtttttttgtattttctagtagagatgggtttttgcgaagttgtccaggctggtcttgaactcttgg

SEQ ID NO: 52427 - DNA, 568 bp, Homo sapiens
taacactatgaattaaaaagggaataagaaaggtcttgtgtttgatcaaatatttatctattaatgtagaaattctccttggaaccctggttggtgctattgcttttaacagtaatgaaaagaaagaagcaaacctatcagagactctccaaattccaagcaacggtgatcccagaagccttgttctcttcccagcttgcttttattccgttaagtgcctttgtggccaagtcacagtcctggcagctaatggcatgactcatgcagtgaacacacctgctcaggctggattcgaatcaggaaatattggacactgtccttggaactatatttatagcaaatggaagctgtcaaaacaaaactgtttattagcaacatagcatgggtctcctagaaaacaaatttaaaagtagtgctcctcaggcctctgtttctcttgaagtaagaataacttcattctcaaccaacatgacaaagatttccgtgatagcactggctagtctgatacaccatacttattttttccagttaacatgttattttttttccagttaacatgaacatctct

SEQ ID NO: 52428 - DNA, 627 bp, Homo sapiens
taaaaaaaaaacttgaaattcatgaggaaaagcatcttattttaccatgaaggatttatttatttttctaagtgctgcccattgctcttatgaatcgtgtactgtgctcttcaacttgcttgtttctgtaaattattatacatctaccaaggtgtgtcttccagagagtgaaggtcattgttctggagtaggcccttgaaatagcatccacgtaagtgaaagtaaatagcagagataatggagtcaaaagtttaaattaaccctttctagattatccaggtcatttgtttttcctagagataaagtatagaaaccaggatgatttatcctactattcaaatgatttagttttaactttcattgtaagttcttgtttttatcaaagtaatacatgaaaatggcttaaattcttaaacagtgccacaaatgttggaacaagaaacagtaatctcttgccatactactgattctctctttctagagaaggcaattttcaaccattttagctatttaccttttttttttttttacttagataacataccttattagatattcctggattttcctctccccatggtatctttatttctgttggaagcttttaaaaccattaaaaatattcaa

SEQ ID NO: 52429 - DNA, 1587 bp, Homo sapiens
ccattgatcccaggtcttcgataaactcaacaaactgtcaaccagaaaatgtttaaatttacctatagcccggaagcccctgctttgagttgtcccgcctttctggaccaaaccaatgtatttcttaaatgtatttgattgatgcctcatgcctccctaaaatgtgtaaaaccaagctgtaccccgaccaccttgggcacatgttctcaggatctcctgagggctgagtcatgggccctggtgactgacatttcgctcaaaataaatctcttaatatattttacagagtttgactctttttgtcgacatgagctaacatagctgagtgaaaatgacctgggatatgtaagtaacttgagtactctgagtcagtagcaaattccatgaaagaatatagagcctgttagtaaaaccatccccacagcgttgtcaagaattgcgtgctgggttctggatagaaatatagctctaattaagcattcatcaggctgcacttggctcacttccttgttgccgaaagtcaggtagcactcgatgcagaccacctctctcctcactgattctccggacaggctttctgatgttaggatcataagacttctgtttaagaattgatttgcatgcctattgctcctatagataaaatacctgacattagaatcctgaggcttttgtttaaagattgcttaagatgtttttctgattctgaattccagtgaaacagctgatgcaaaccagtttgaaaacatccacagaaaaatagaatcagcatgagagtgcagtttcttcatttccctgtcccatgactcaaccctgcactctgaccaatcaataatttccacacttcagcccactccaaaatccttaaaatcctagccccagctcctgggggagacatttttgagatttcctcttatcttctcatttggcaaccttgtgattaaacctctttctctgtggcaactcggtgtctcagcatcctgacttgctgtatgtattgaaaaatggacctactgtgattacattaggagatggccacaaagggatgcttatccaataaacatttattttcctccattatagtttttgtgcaagatcttttttttattaaaactatagattttggaaaagcaaaatacatatctaagttattttttaattttttctcacagcttaacacaatgactggcacagagcttttgctcaatatatatgtgttagagaaagaactgagaagcttccatttctagcacaattgcagattagataatctaaaaatctctcttaaaaaacacctagaaatgctgcataaactgtagcaagaaattctcaacagagaaaggcaaagaaaattcccttctagattctggcagtgggagaagagtcaccactgtgaaatactcctagaactttctccctagcaaaggcctgctctccatagtgaaggataacctagtattatcccacctgagggaaggatatttttctgactccagacccctctagctttcctgtgtcatctgagggagaaaaacaaaacaaaacaaaaacaaaacaaaacaaaactagaaaatatttatgaaggtc

SEQ ID NO: 52430 - DNA, 433 bp, Homo sapiens
gaatggattgacacaaggacaagaggtaatgctcatgcaattgtcaaatgagccgtgaggagatggctaagtgttggcacctgccacttacacccctggcactgccctgtgttctgccagggtggatttccagattgtgactcattctgtgaggtatctctgatatttttgacacatacctattttgtaataattaaccagagtagatgactatagtctacaaacaaagaattaatcaacaagaccccgcacctgcttgacttaactttagtcagcatcctctaagcactgcaggcttctaccatggtgtgcatctttgtcaggactgagtcgctcagttacaacagaaatcttgccaagtcagtgcggtgagaaccccccaccctccatatctcatcggcctcctcatcctccccctcccccaggtgatgtc

SEQ ID NO: 52431 - DNA, 905 bp, Homo sapiens
attgggttgggtttttgtttttgacttttatttttattttttaggttttgctattacattgtcctaggagactgtacaattctgcaaaagtaataagttatattaagtaatctcagaagaattctgaaatagaagtgaataaaaattaagtaaggcagtatttaataaggaggttattttttttttttaatttaagcccaaaacatatgaggcacatataagaaggcccttggtaaatattttgaagaaaaaaaaaggtttatttcctgcagaaattatttttggtatttattgcaaaatagaaaatctaattttctcaaaattttaaaactgtttccatgacacagcaacgtggtgtgcagagcagtcctggatgcccatagtatttccctggctctgctcccagcctctctgaagcagtgattgcccattgatagctatggagtccaagggtcatttcctgtgtactgccagagtccctgtggccacctgctggtgaccaaggaagacctcacagctgggctagcttgctgatggatgtcagcagcaccatccctgcctccccttccccgctgctgggtacaacccttcaaggctgcaggcgccagtcttgccgtagccttctgctctcagtattctgtggaggttttcataaagagatattttgttttcagtaacacttgggttggactggactggattggactggaaacaatttaagcaaaagttattttttatatagactccaaatgacactttctgaccctcacttgccaggtcaaatcacaatataaatttcttggaaatcaatttcttttgttttttttttctggagacagagtctcgctctgttgcccaggctggagtgcagtggcctgatctcagctcactgcaagctccgcctc

SEQ ID NO: 52432 - DNA, 946 bp, Homo sapiens
tagggtcggctgattgtcattatctccgtaaattggagccctgactaatgttgcaataatgacctgaagctgggcggagggttggagtagggaggggcatgcagacagcaagacctggaaagctgttgataaagaggctggaagaagcggaagtttctggtggtttttgtacttgggtagtttgattttcactttgccgccaaccttccagatagaatgctacatagtcagcagatttttgtatatttcctctgaaagctcaatatatgacaagccagctctgtgctttgtgcttatcattaaattaaccctcagggccaccaccctgcagacgttaatcattcccattttgcagaagcactaagagggcaagaacctccccagtgtcacttagccattccgtggcagagtgaggatttcgtttttagtgtttgatggatttttcctgcatcatcaaaattaagctttatttcacaattagtgtggaaaaagagaaataaagaccaaacagaagcagtactcagcaacaatgctagggcagaaactgtccccacagggttgacaagaatggcatgccaggttctggatagaaatagaataataattaaacattaatcaggctgcactttggcccacttccttgttgctaaaagtcacgtagcactagatcctgaccatttgtatctcttcgttcctgtagataagatttctggcattaaggttataagatggtttaagaattgatctgcatccctgttgttcccatagacaggacctctgacattagaatcataaggcttttgtttaaggatcacttaagattttttcagcccccaaattccagcacccaatttgaagaccccacagaaggacggaatcagcatgagattgcagcttcttcatcctcatcccacgacttcaccccaaactctttgaccaatcaatg

SEQ ID NO: 52433 - DNA, 558 bp, Homo sapiens
tggccctgcccatccactgacacaggaaacctgagcctcgaaagcagcccatggcgcacctcagtgctggtgcactcaccctcttcagcctcctggttcttccacggagcccagctctggagcagcagagctcagggacactgtgttcctcctgtcctcacatgctgcagcccaccaccttgccaagctgtgtctgggcacgtttctggaacctggcttggctccagcactggccctgccagctctgtgcagacaagctcccaggagacgccctgggatttcacaatgagcctcgtgtgcccagtctacccctgccccccagctgctgtccgctgcaccttcctttggtttccagaccaggtcaagacatgggatgagcctgctcagaagggatgagcctgctcagaagccctgggccacacacaagccctggccagccacagtcggtgccctatgctcaaagagccacagcgctcttgacccagctccacattgctggccgcaggcacttcatttcttgtaaattaacccttctttctctctggaaacttcaaaaac

SEQ ID NO: 52434 - DNA, 481 bp, Homo sapiens
tcatcaacttcttatcaccatctggtagtcattccttggtgggaacagaccatgactcagttatacattccactgctgagggccagtcacatggtttcctgtacttattcctactagctggtgtgaagcacgatgcttccgagagtattttcaggccaaagaagctggtattgtccaaataatttaaggaacaaatgaggaagaggagatggagaaaaggagatgttggtcagagagtacaaagtttcagttagacaggaggaatcatttttgtgatctattggacagcatggtgattctggttataataatgtattatatatttcaaaattgcttttaaagagtaaatattgaatgctctcaccaaggaaaaatgacaagtatgtgagatgatggatatcctaatgtgcttgatttaatcattctacaatgcacacatgtactaaaccatcagggtgggtgtgctggctcatgcttataa

SEQ ID NO: 52435 - DNA, 3071 bp, Homo sapiens
aaagaataacagttatagaactcaagtccaaaattggggaaatggaaggtaaaaaggagtcatttgtttcaatctgttttgaaacccagctgggcaaaatccaccaggtctcaaagccaggtaacctgtgtctctcagctgctctgggctttcatcttcaacttctgggctcctgctttagctcttagagtcatgctccgtttttcacaaaaggtgacaggtgtttgcagctggggaattttatcagtctgcttttgccattttgtaatatctatattccatttagtcctagttggcatctttattttctgctaatctgttttgctaaaatatttccactaatacaatgtttttttctaaagtgtgtgggccttgtgtgtattttcactgggtttctctgcattagacaaaagctatacacacaaatctttctctaataatctcttctctatctttggcttctgcttggagtgctgaacaccagtgtttttaagcttcccagaggctctctggtttgattagaagatctacatggaacactcttaatcccttggaagagtcattatgtggctgaatacacaagacctctgagctttccagggtttcagcaaagagctgcacaaacacatattcagccttttctctatgtcataattttggcatccatctctgacttctaggggtattttttgccacctggagaggctaaacttttgaaattatcaagtcgttgtcccttcaataagtcttccttcaatatgtctctcttctattacattttaacataaaaagcaagaaaaaaacaagcagcaccttcaacactttgcctggaaatttccttagctatatattccagtttattacttatgagttctgctttttatgtaacaactggacacaatttcactaaactttctgcaattatataacaaggatctcttttcttcaggtttccaataacgtgtttctcacttccttcttggcccatgtcagtagtatccttaaagtccagatttctactagcaatctgtttaaagtgattcagctttttctataatgctcctcacttttttctgagacttcactggcagagtctttaacacacatatctcagtcaaccaatcaaactattagagtcctttctaacccatcactttaaaacactgagtccatactctcagtgagcctgtatcagtaatttcagactgatacaactttatattccttccactttgatgccacacccttaagatccattcccacacatattccccaggtttctgtcactataagctagaaacatcacatagttcttttggtgtccatcacacctctctgtgggtcacaacttgtacttcaccttaggatctactgggacttgagcctcacgataggtctctaggtccagaggaggatcagcagtgcctatagggtcactaggtcagaaaagctcatcataagtcttcagtaaaggggggataacctcaggcagggggaagaagctgcttctactgttgtactgggggtccccaagaccactccccacctcagtgattatctaggaggactcagcatacagttgtactcactgttataatgtattacctcaaaaggataaaaaagcaaaatcagcaaagaaaaaaggtcaataggacaaagtctggaggaaactaggcacagcttcctagagtcctctccctgcagagtcacagagcctggactaatttctccagcatctagttgtgacaactcctgtaaaatatcatctaccagagagacagaccagggtttttattgagggctgttcacacaaccactgtctgcttagcacataccaaaattccagagtcccagaaggaaaatcaatctcagcctagatcaaattgtttgcacaatcaggttaaacagcgtgagcaacctttgccatttagggaatagggaaactctcccaaaatccaagttcccagaaatcaaccaaggctcaaccttataagcagacctttctaaggagagcattctcaggccttgctctgttaaaactctttcctacacagctgtcaatgaagacatggtagaatttaggggtttgaggcccccagtttgcttgcatctcttcctatgtccatactccagttttcaaaatcccacttcttcccagtcagtgctctaaatttcacaaaagacaaattgtgagttaatgaattcaatttgctttgtaattaagccatgacagaatcagactctgagtttaaccatttgctacaacaattgggggtgcttctggcatttggtaggaagaaaatagggatgctagacatcccacaaaataacaaacttcccctcatcccatatgaattttgaatgcccacttggattttcacatagatggagcaacctgcttataatgatctgagccaataatctaactctttacatgtaaatagaagggatatttttacatgggtttaaaattcattgacttttccaagaatatatccattgtgtaaattaagaagagattgtgctctgttttccttggaactttaccaagagtggctcatcactttagaaaatcacattcctgatgaccaaactacttgtgatgcttgagtcacaaaaacaacacttgtatcatcagtctgcattcatgacttgggcattcaaaatgattatctctgtgtgtgtgtgtgtgtgtgtgtgtgtgtgtgtgtgtgtgtgtgtgtgtatttatttcaaaatgtcaaatatagaaacaaatttttagttgaatattggtttccttttttcaaattaaacctttttattttaagtagttacaataatctattaatagttatctctttgtctcctagtgatatactctctcttcttttttttgttatactttaagttctggggtacatgtgcagaacttgcaggtttgttatataggtatacaagtgtcatggtggtttgctgcatccatcaacccgtcatctacattaggtatttctcctaatgctatccttcccccagccccccattccctgacaggccctgttgtgtgatgcccgcccccccacccccaccat

SEQ ID NO: 52436 - DNA, 3014 bp, Homo sapiens
tcgaaatcccctagaatctgtgataaacacacactgtttatcttggaagaaaagagtttcgggaatttctttaaaagtaacattatgtatattgcctcacatgtggactttatgcaaaactctcacttggcaatttagttttggtgtgtttcagaaataatctcatttgctttcatatcatgtagaaagaatgaaagaaaagccagtttgtttagtcagtaactcttgctttggactcagaggcctgggggaaaagagagtatgtatgtgcatatgtgtgtgtgtgtgaatgtgtgtgtgtatgagtgcgtgtgtgtgggtgcatgcagaacaaaagcaaatgcaataaaatgagaagagatgtgtgtcattgtccagttgcttgcttgtaatgtgaatagcttatgttactggagggactgatgccaggagcaacgaagccaattgcttcccatcccatgatgggatgggaaaacactggccacttcagtccatgccactgtgtggcaccctacttttccttgggtactgaaacttggtgcctggagtttcatagaaaacttgaggtattctaaccacaaaagtaaaacatgcttctgcctgcagtgcccagtggaatagtatagcccgggcaggccacccgagagaccaacagccacactgcgcatcctacccgaagccagtaggaaatgttagcctttggagctcactcaacacacagtaggcctgtgataaacctttgtgaatagtgcatcaagttcctagctgtcttccctgagcggcagaaacacagggctgaaacacgtccagccagcctgggcccacgtctgccaacaagcctaggcgtgtgacgctcgtaacaattctgcattttctacacggcacaattaccatcagtgccagagtatgatagagaagccaaacaactgcatttgcagataccctgaactaacaaaacttcatcctcaaaacagctcggttcctgtttgcaatcatgagtttgcataatctgttacctggaagcaatacgaattgcacagcagctctgggaaatgagccgggtaattacatcttcaggagctgaggacaagatgtgacattttacctacagggcaccaaacaaagtcaacatgtttaatttttattctgctcccactgtccttctggccttttgtttgaaactatcttatgaaaatacagcattcaaacagccagaaagccctcagagagaccacaagagaaatgataacgaattgtttgtgaacagccccatggccagattagtttttataagatacagctttttctactacccatctttggctccctccattatttttcagcttcctggggtcccattttctgtttgttagggaaaggtttttgtttcatagctctaattgtgtgtaatgtcaaataaatcccagaggagagaaccaccatgttgccatcatcgtgtataaatcgcgggcccaccatgaaaaccgtttggaagtcttactcccattttttcgtctttctagaaaaccacatctggtcaggagcccagtgtgtcccacttggacaagaatagaaatctctcttctggaatatggtaaacacagattttgtttccaagttaacacataatgtagttctatcatgtttacagacagtaagttctcaatatcatattaaatatagattctgtgccaaaagaatagggatcaacctgtcatctctatttccaggaattagtcttttttattcctctagtggaaacctttgaggaatttgctcattttccccctaaagctgtgaagaaaagttaaaggtcaaatgggagaatagaatgaaagaagaagaaaacagaaactcaaagaaacctagactcttgaatttgaactcatttttttgcaaaataattgaatgagtcagtccgaaatcatcagagggctctccacctatttctcaatgaactgagaagcatggaggattcagggtggggctagggaggtggaaacccatgctttgattcagggagaggtaatgcttctaagcttcattaggaactgaataatggcaaggtgcccagggagcatgcctggattctggctccttgcccaaccctcaccctgccccagggcaaactcagaaaaccaagtcagatcatcataatgacgtgcatggctgctgttacctgagacagaagccatgatgtcatcttgtcataattgacttcaggtttgtcactctcagatcttctctggttggagccaatggtttctttcagacctgagatatcctgatgaagcagaccacacctgccctcagagatgacctcatgaggaagctgagctgcataacaaacatctctgctgctcagccacctccactctttttcaacagaccttggagatagcacagcacccacaccaaaaaatcaggaagctctcttatcagcaatctttctgtacctatgaaatcagacattccagccatggcagaacctcctgagtgggccagagcctcagagtcaggaaaagctggggcctaatgatgtttcaaatcaaatcactctgtaggggattttccatttaacatattgtgattgtgcagtaacattagtctttgccatttaatttattaaattttaaaatcttataatatcctcaacaccgtctttgtctcgatttatacatataacatatacatttttattacatattacaaacaattgatatatatgaagaactctgtgtgtttaaatgccaatcactggtacacaggctcgaggaatgtaatatccaggattcagtctaggaaaccaaagtaattctaggtacttgattgaagaaggtttaatatttggaatttaatgttttaaaaattattgaagaggctgggcacggtggctcacacctgtaatcccagcactttgggaggctgaggctgccaggtcatgaggtcaagagatcgagatcttcctggccaacacaatgaaaccccatctctactaaaaatacaaaacttag

SEQ ID NO: 52437 - DNA, 1777 bp, Homo sapiens
ggcctttgagaggtttatacacatgtgcgatgtgggccagcgggcggccccgggagccagcaaaggtcagacatttgtccttccagacacagctcccgcgaggtagaacacggcaccaagatgcagcgtggaccccacgaccaccattggggtacccaggcgcccagagaacacatgccacgcggcagcgtttgtaccacggagggcaatgcaaacagctgacacctggcagcgctccagaactgccgctggggcgttttgcttctgaaaaaaccaccctcctgtatcctctgttcacacaattccctccgccccagggctcccctcccgctgcaacggctgcatcctgcacacccctttgcactcctctctcataccaggacactggggggcagtcatccgacacaccacacaactccgtcctctgctccagcttccgctcagcggagaatggctcccttatctgatggttccaggatgctctgtggcaacactgagtgtaaagcaaacaaggccatcgggtgctgcagcctgcacaccagcgtggtcctgggccacacaccgggcagccggagagaatctctgcagctcccaggcggcagggtgcacaaatcacagcctttccttgaccccgcgagctgagagagcaaagtcacagacagactgttttaagtggattcagggaaacaccccccactgctgtcccccctcccgccccaacgcacacatacatgcacacacagctttgtttccttgtcattcctctcattccctcaataacccctgataggcttctaggaatacttcctctctcagcaaaggaaaagtgtatggttctgtgttacaagatgattgggctttaagcaaatgaaattgaaggcctacagcactggggtaaacctcctccaggcagcagcaggcattgaaacagtgctcattagagcttaggattcttcctccttctcactacagcattttaattaactggaaacaatacctcaaggcagtattgcaatacctttggactgaaacattaataaacagagaaaatttgcttacaaaatggcaagttagaggaaatggaggccgactaataaataaatgagccaaagttcaaaggctgcaggatgactcacacgtgccgtgcctgcctcgcagccaggactttcaaaaacaaaggggtggtggacggattccacaagaacggctgttaaagtccacgaggctgacccaggctgggacttcctggaaactccaaggagaggaactgcccacagagccagggactcaggactggcacaagaaatggcacagcgcctgtgctgcacgtttgcaagtgacctgctcttctgaccgcagaagcgccactgaaggtggtcggctcgagtcaccaggcaacctggtatgattctcagtgcacggtccgccttcagaaggcaaagctggttgtgtggaagagaaaccagagtcctgctgaggctggacagagtttcttcatcaagatcatgaactattttcagattcgtgtccaaatgaaagacagaaaggatgtgtgaatgttttcatgtgcacgtgtatggtggatgcatatgtggtatgtgcaagtatgtgcatacacatgcatgtgtggtgtgtgactgtgttcatgtgtgctagtgcgtatgagtgtgcatgtgtggtgtgtgtgcatggtgtgtgagtgggtgtgagtatgcttgtgtgcctgtgagtgagtgcatgcgcagtgtttgtgtgcatggtgtgtgagtggctgtgt

SEQ ID NO: 52438 - DNA, 1739 bp, Homo sapiens
acatcctgttctcttctgtgttgggtatatagaaaaatacaaacccccctccttcacaggtagatggggccaggtgactggcatgggccaatgggctgtgggtggaaaggaagcgtttcctacatggtaagcctggcacttgtgagttcccattgactctgggctctctgtgccaattctagagggaggatggcaatgctggcacttcttcagcctggtcaccgactaactatgcaaaatacagctaataacaaacagccccaaagtctcagtggcttaacacaacaaagctttatttcttgttctcttacaaaggatgtgaacaagatgtccaacaaaggatgtttatcagcttaagcctagaagatcctaacaactacacagagatttatatcaaatgagattcattgtagcattacttataacagtataattttaacaacactctaaatgtcaaaacataagagatgaccaaataagttatgacccatggtataatactataataaatatcttacaaaaaatagaagtgatatgttgaagatatctagcagcaatggagaaattctcacaataaaatactgaggaaaaaaggcagaatattaaacaattcatacagtaaaatcacattatttatttatttaaaacaattgactaaatgcaaaggaaaaataaagcccaaacacctcagcattagtaatgatcatggtagtgaagcaacacaagattagtgatcaaaaggctgaaggtggctgtcagggagtttgtaaaatgaagtattgatgatgagcttgaatgatgctatttcatgttaatatagaaaaaaataagtaaagactattttcccaaaccatgcaagcagcaagtgggaatgagtcatgactggttatggggaattttttcattgagcaagcatacccacgactttcaaaatcgtagcatggggcattgggccaatgtgtttgtttattttcctttgttttctctgacagcaaccctaatctcaggttacagtttggctggccatagttaaagggaaatagagatgaagtgatgaaacatgcagggggattcaaagagcattctcgtggcttgctaaccttaaaatcaagtgttgaggtgtggattattagatatgccatataacagcacagacaacttgaacttgccatcctcagaggtttgagaaatacgccaaaccatctgactgcccataaacattgtgtacttaggaagggtgttggcttgcagaaaaaaataggaatgttttgaaattatcagggcccattccaggaaaaaacaggggagtggaggatcactgtggtttcagaaatggccatcggactgatcaaagaactttcacatctcagcaacaaatagagttccaacaaatccaactgtttcttctctggggaagtccttcaggctaaggacttcctttctcgtctttgtgggtttttccagaggcgatcacgtgaaagttcatgtctcagcacagtttgggctggaatgactcccatatagatgctgataaacctttttccagaggctacaaattctgttgtgtgacatccacagctcctgaatgtcaccaactaggaggttactcagattctcttccactgcaggagtgacaattgataactcactgtgagtgcaaagtaatactgctaatttttaagacaaggatgacaatgttttataggataactccctgaggatatttgagagaggagtaa

SEQ ID NO: 52439 - DNA, 1103 bp, Homo sapiens
gctgtcccttgctgcggatgcgtctgcagacacatgacacttggctcagagttccctgggcctctgcagacaagagcggcctgagattaccatgagataggaggacacctgctctactcgcacttccagggaacgcagcacggcaagctcctgtcattttccagactttgagaaaaggatgttcacttgcttcccagcttcttgcttcatcagacaattgactcagaaagaaaaatgctcattggatttctcacctcctctgtcagtgctgcgtaaacagatcagaaaaggcagagggatgtggggtccggcctccttgatgagagagtgagtcaccagcttgtggggggtgatcgatagtgcagaaattagtcatgaaatctgaatgaaaacaaaagagctgatcccatcctgtggctcgtggtaccacagagacagtcaatgaaaacagccttgaacacaggcagatgcagagatcaactccacagagctcagagagcggctcacctccctatcccaagttcaaaatcccagcatccttatcgaggaaaagtccctcgcagcagggaggagagaagagaagcagagggagggagggagagagtgagggaggagaggggcctgacactcaggctgagtctgggacaccttgcagcagcgtggccagccttcccttccactggacctcggtggccaagggctactcccagtcccttccacatgcccctggccgagcactcaggtcacttttagtttgcctgcagaaaaaggcagtcagaggacaaacggcctttgacccccccactctcctggtgctggaaaggaggcagcgcccagcaaatgggactctccctggagccataaggactaggagggctggcatttggctgagtagccagggtatttttatccactctgtacaatctgatttttttagttggcatactttcagacagaattttcctattaaaatgtgctaaaattatgcctgaagagaaagcccattgtatacagataactccccacaaaaggccctctgattgcacaggccccacgtgactccaaaaagcactggggtcggccgggcgtggtggctcacgcct

SEQ ID NO: 52440 - DNA, 1782 bp, Homo sapiens
actgcaaaaggcaatgatttgcttagaaaaaattcatttaaaatgtcttgcaattattgacactgtcatcagatcttggcagtagcagcttattattacctcctatgtatgtttgccgggagaagagtctcattgtttaggagggagaaataaagcaaaagtccaagggtattgtgcttgaaatacatgcctagagatatggagttgattgccccagaaaaaaaaggaagcctatgtgtatattattattcacctcggtagcccgaatcctctatttctctctctctctctctctctctctctctctctctctctctcatacagttgagctcagctgggcagccatccaagtgattcatattaaattctagctatattcagcacaaaagtcatctagcatcagaggatcaaagttacatcaactaacaagcactgggggattgataagctgctaaaattaggtcattgcatagcagcagcctttgatggatgaagtgaaatttagccgcgggtttgctatttaaagatctgttacagcaccctttcctgtagccacaatgaacacacaacaaagtatcatgtgtctgattaaatgtttaatcatcgctgttgagcttgccgactgtggcaaagattcagtttccttaagagtgcattcagctcttgggccaagccagtacctgcattttaattcccacatccagagccttacaacagggcccatttctccctcctcaggatgaattctgtaaagttagtttaatcgtttttaaaagcatttggtcacacagttccacctctaagtccctgtcagttcagtgtttcaaaactcttcgtcagcgtcacacacacacacacacacacacacacacacacacacacacggctccagactgcccagtggatgcagcaactggtctggtgagcgcatttctgtttcttgctcattccctcaatttcagaatcacacacctgtccaaaatggctcacgtctctctcttctttgggactgtttttgtttccagatgggttaaggtggggatttgacttcatttggtttaggttttggctgtggctgaggccccaggcatgtggcagtcaccagttctgatttcataactcccatggccaggccaggagccacacaggaagccggaaggggcctcgggtcagtgtgtcctgtcccagcagcacggggtgggggactgtgtgcccccaggtgtcctatccacccctcagctccaaagggcatgtggacatgcgtcaggtcccctgaggccatctacaaacaccagatggactgttgagcttcccaggctcagaacctaagaacccgcaactggaaggaaaaggcagcagaagatgagaaaaacggtcagggaggaaagaaaacactttaacccaaacaaagtttaaaataaaataaagagtggtgaacactcagctgggagaggagaggaggcctctgtgggcaaagggaaatgctgctgagaggcagctaagcctgagtctggaagactggagggaggcagctccagggtgagcacctggagtgcacaaggctctggaaggggagggcaaggggtatcaccctccccagagccccagggaagcctgattcatcagtacacccaggaaggggctggctgcagcgatagccccctgcccagttgtcccagatgaaccctgggcttggaaacagtccagggacactggcagactgagagccaccggagagggtcaccccgtccccctcctgcctgtaggggcacacaggtttcc

SEQ ID NO: 52441 - DNA, 508 bp, Homo sapiens
agttgaattctgaagtcaggcaacttgtgtccaaagtccatgaccagaatctttctgttttgccgccatgctcaaaataggaaaggcaaggtgaagcgtgctgttaaacattgttaactggtgggcactatgggtgttttttacttttttctttttgtatttttatctttcaggcgattactttaaaacatgaaagaaattgcaccttttccttaagggcaagatggtgctgtgggctttcctctctcctgatgagatgatgcaaatggactccatagagaaacgctgcccgtgtaacaatgcagttacgcaacccggtgcatgacacatgaattgcagcgcacctgagatcctgatgaaatcctgggagcctggagctgtcaaacatggttttaaaaaataaagggaatacacccagcccacaccctgactttacaacctttaattaattagaggaaagaaagagagatttgtctggtttcatgacttcaactttccacctggaata

SEQ ID NO: 52442 - DNA, 2734 bp, Homo sapiens
cccaggcatctctcaatcactacctctacaagaccccagggtctgggtaatgggggctggcagagcctggactcattcctgcaatgacgtcggataccagcggcacccattccctctccaaagctcatgtccacaagggcaaacgatagcatccccctccaccccggcagtaagcagcagcgagtctcaccaatttgagagtctctagaacaacagatggtaatttgttgacacaaagatttaaggggactcaattacagtcccactgaaaaagctctctctaaaataagaaagtatacagattcctcagctcgcagaaattgctgacagctttgttttcaaccctccaggagtaaaaagaagctgacaacttatttttgcaggttatgctcattcaagtctatttttagatcttgttcctaaataagtacaccagaatagcattcagtttgaaaatcaccatctgttcagagcaatgagcttggcctcgctgggctgggtatacctggcccatggcaaggtggcagtccccttgtggactgaaccgagggggcagtttcaggtctccaagtggtgtttgaagaatgcactaaaaacagtcacaggcagttggcattttaaatgcccattaaacaactattaatatattttatttataagctgagaaccacacaaaaaatgcccttggctttttaaaaagaagttcaaataatcccttgtatttaaatagatttcttataaaaaggcgatccagcctaagtttggtagttaagataaaaattaacctatggaaaagaaagccagctcagaacgctataaaaaggccccttccccccccccctttcttccggtgtatggtggccctcccctccctctgcagccacttggtagtgactcacgcttttctttggaaatgcagttgctgcgtgaaacacaacgtgagaatgggaatctgacatatgagtaacccggccgagaggcacctcttggaaatgacactgggccttggctagaattacgcacaggccctgggagggctgcggctcgtaggcccgtagggggcagggtgagggcggaggtcctggcgcccccaggcctgacccgcccgcaccgctgggctatttttagcgtccactaaacttagccgactccaccctcttgaataacccacatcttaaaatgctatttttctccaacaggtcaaaagaattctgcgagttagagcgcagattaagttgctagcgacgggcattgaaggttttagaaccgagaaaatgagccggtggcggggagcgcgtcctcagcggccaggcccggcacggggctcgggcactcggggacacacggtggtcgtcgctgtgtctcagcaggaccctgtgcgctggagagcttggggccgcgagtcgcgcagcaaggaggcttctggcttctctatttttagcctctgaacgttttccaaaataattaccaaaaggaaatacacacgcacacatggacctaacacacaaaacgtccttctgcgggaagccagcactaggaaagaaaaaaaaaaaaatccgaagtgaaattatgacacagggttttgtaacccgcggtggcgcgcttctgaaacccgagcccggcagcggcttcttatctgcaccgcgttccaggaagcagccggcgtttcggccgcgcaagggcagccgccgcacgtaggcagcgtcccccagcccgggacccgcaggaatgcgaggggcaagacagatcgccggaggagcaggggtcagaagtcagtgtttaaccactcactggctttcggtgaagccagaatgttagcagcgagtcgcggtcgggggccttggggttgcacacgcttgctccaagcaccgaggctcagctgagcacatgcacaaccctctcgatgcagcggaaagtcgtgtggcttagggccgcaccccgaatttcgccgcacccgccgctgtgccatttacaaccccccaccccgccactgctgtcacgtagcaatcaagagtaaaggttatcacaaagtctgttcttcgaaggaaagagttggaatcaaggacttcggacgggaggaagttggtaagttaccgcttcctccctcctgttttcctctccttgtttaacttctcacaagaacatgtggcagcgctgcaggttaactcatcttacataacttcggggccgtgtcaactgttcagaagaaagaaaaacaagtattctcttctgtagaagttgtatttagaaacaggctctgttgtttaggacaagttcacttgtgttgcctgatcacttgcagcagaaaatcttagaactgctcctcaagcaacaaaaagtaggggctcccatttccatctttctttcttttctttttctttctctctctctccttccctccctccctccttcctctctctctctttctttctttctgatggaggcttgctctgtcgcccagctgcagtgcagtagcacgatctcagctcactgcaacctccgcctcccgggttcaagcgattcccctgccttagcctcccgagtagctgggactacaggtgcgcaccaccacgcccagctaattttttgtatgttagtagagatggggtttcactatgttggccaggatggtctcgatctcctaactgcgtgatccgcctgcctcggcctcccaaagtgctgggattacaggtgtgagccactgtgcccagccgggctcccatttttctgaata

SEQ ID NO: 52443 - DNA, 3651 bp, Homo sapiens
gaggagcccaacatgagagtaactggacaattgtcttcctctgagaaaacaaaatgacaaacaaccaacatgaatcaaatgatgacttggtatttcattaaacacaactcttacagcaccaggaagacagtagcccattttgtgccaagcgtatttactcagttggtggcaataggggtttggagaatcttgcattgtggtttgctggggtccacaagccacacatcgggtgtctggccatcctgcatgtccaaaggtgaacaaagaaatgcactaataacctagagacacagggacaagaacaagcccagtaatacccatgtagccgtctgctagaattgaaagccaggtatggtgggcttctaccccaccccaatcacgacgtcctaatgagggctaccaactaccaattaccacacctcccccctggcctagggccctcatcctccccaaacatctctgagcagagtggcaattaagagcaccctgctctgtggctgggagcctgggagctgccaggggccatatcctcctaccacaggggaagctggatagcagaggagatggggagatgggagaagaaagactgagttcccagagtcctgagacagcagtccagtggctccctggctgggcacagggagtcccttttcctgactcgttcagttcaagctgggtctgttacttgcctccagaagagttttgatacaggtgttggcaccttctcaatgccctgtctccatggttgacccacttccctgacagtgccttgagctcctcccctgatctgggctggtccaggcccttgctgggggacgccacgtgctagggtagaccagaagtcccttcttggaagccctacttcctgtggttcttagatgccatgtggctgacatctggagagagggtggactatggactccctccccacatgaaatctatgaaaggccaaataaggtttaagaggtctgttctcagcccctgacaacctccaggactctctaagactgcacgaacaaaaatgaagtagtgcatggaccaatgaggtgataagaccccagcggaaaaattttctccaatattcctctaggaaagagtcctagcagcaagaacattggtcacgagattggccaagggatcaatcaactctctagtcccttcccgtgatgtgaaatgcggtgtgggctggagcccttgtatgctttgcccccagtaggcggttgcctccctcactgggcactgaggccataggccgctttgttctgcagagccacgcctggcctctagaggaatggatgtgacctagagatctggactcagagctgggcagaaccctggggtgatgcttactgagcaggatgcccaggtttgtgactgtgtctatgagaggccttaaggcatgtaggggtcatctgggggaaaggacggctgactgagtcaaggttggcctgggtggctgctttgtttttgggtccatgacagcagccctctcttctcctgaagagatctccctcctccaatcatagtaccccaccaccctggccacagggaggccatatgatctgagctaggcctatcagaggcctttcctgggagtttctgagttcaaagtgagtgaagagcatgacccctctttcctgctggggggccatgcagttgggagctgtcatcaggtggagctggtctacagggacaggcccaaaggatggagccacataccagagactacaaacacatggtggggagtggagtgtcctggcagccctgtgactccggctcccctgtctttccacagtttggggctgagagccaatgaagtttcctttcgtctaagctactttggttgactttctgccatcacaatacagtcttcgtgcacccagtatttcagactgcactcaactgctaagattcaaacttcaacaaaatgcagaattttagttgtttacctttttagttacatggactcaaaaacaagcatcaccataactttccactgtgtgtgacaatataagagtcatatctttgtggctccaaaaatgtttaaaaaagcaactagtatattcaatatttagctcataagagctaagcactgtaaaatacgtctgacatcttcaacatcaaactagaataaaggtaaaattaaaatagggtagaagagtgttcatgcatgatccaatctcacatgaaaccctagtcctaaaaaaaaggcaactcccaaataggtgtcttgatttcacccagtggctttaaaatagttcttaatcatgtatgcattaagaagccaaaactcattgttatttctgaagcacattattttgaaattctgtttaaatcttccatatttgtatgatgaaagttatgtcacaaagttaatcattcccaggatgcttgcagtaggggtaatgaaaaacttcttgtgcaagcggccattaatcagcagtgtaacattgcataacgtgctccaaagcacgtgtcatgggatcagagtacacagctgcataatgcaggccagtgtctgtgcctcctgctgaccttttccaatgcagaactcgaaccatgtgatgcatgcttcttgccaagtcacttattgccaatgattaagttggatgatatggagaaacataaatttctttctttcttttttttttttggagttctaaaaggaagactctttgaagtccctggcttctggcacagtgttgttgctggcttggttatattactcttgatcattataaaaactctccattaaaactgatatcaaatattttgctcaagtggttcctggcatttgcattagaaacaatagacatacccccacaagaagagtattttatatgtaagcaacgcaaaaagtcaaagacgctagaagccaaagacatacatatatcaaatcccaatccatcacgtttgatgttcttgagcaatactgttagcgagaaactattacttaatcttgctagtattatccaaagagaacacttgcgaaatacttaagacaaacatgctgtaattattacatgaataaagagcttgtgtagcataaactgtttttgtaacatcaacacaaattctgttggagcaggctaataattagccgtggtaacaacaatggccactgtgtttgagaagctctgagaggtaacagtgctgccggaggtgagatgactcacgcgttatcttctaccctcaaagtagccttggtgtagagggactgttttcaataatatcttaacctagaaagtcttctgaaatttcaccaagggctaattatacattctagtaccaactagaatatatctggttccctaacatatattggaaattaaatttcatcttcattttactttttttttttaaggaaaggactcttcgatttgattactagcaaactcttactgtacatgaaatcctgttcaaggtctgaaagctcaaattaataaatgattttgtcatcataatctaaatgtctaacagtggaacatgaatttaacagtgtggaagaaaagttgtcctaaaacataagacatctatatgtgctgggatttcaatactttttatttttactacttgaatgctgcatttatgcattgctttgctttggtttatggctgttagtttagcaactaagggctgaatgaacagatc

SEQ ID NO: 52444 - DNA, 2669 bp, Homo sapiens
tttatggtatgtgaattatatctagaaaaataaaatcgccaagttctatttttcctcaacattgattctagagttccaaacccagaatcctgatgagaggttatggaatggagtccaagaatacaatacctcttacaggtaccagcagttttgggaatccctgcccttgggtgggtctgaggaatagacaagatgaggtcccgctcacagacatggcccccactccacctctgctgcaggtgacagagcacgagaggtagggctggaccagggccgagattcggctcttttctctggtaccatagcccctacgctgctcatcacgtttacatttgaagactagtttatccccgggggaaactcaaaacaattttaaatgttaggtatgtcaagtttttcaggacagtcaacatatatcttcctatctacacatgcaagcatttttaatacgcatgaagcacatgtgggcgtacataagctgcaagtctagggaagcaaagcaagcaccgagggcttggagttttgaggttaccgagccattctgagcctggactaatgagatcacaccacaactgaactcagaagtaccagggccatggatagtctaggataaacactctctctgagtcctctcagaagagtggtttagcaatctcgactcataccatgccttcccacaaagaccagaggaaaagaaaggagcttttcagtgttatttgcaagccaatactggtgttaggcaagcatataacagagccaccgtaggtattaagaacaaatactccaatcacatcttccaataattagagtttccttccaccaagatgaatgtgagctgtcatttcctagctcttatggcgtgtgacacatttcttgtacttacatttttaaataactcaaattacagtcactcttacacaagttctaggcgtcataaaaagcatgtttcaggaaagtgttaatagacaactcaaaagaaatgttactcaatgcagccgaggctattaggagctcgaacttctctctcttgccaaacagttcttcactttctgtaaactgcacaaaggtttcattcaacacagtttgaaggctgaaagtgaaagtgactcagactatttttggaaaggtcaagaaagtgcacctgccaattttcaaatttctctgaaaccttttcctgcaaacatcaccactaaagctacgtagtccctgagctgcaacttgatgatgtggtgattttactatttctcttgggaggttcaggtacacactgtgccgtgggttcatgggagactttgttcagacagcattttacacgacagtctgtttaaatgctttaggggaccaaaacatctaaaggtaccttggcagcaagatgggggaatgaactgaagcctaggaaggaagcctggcctgcccttggcctgaccacagccaccgcagggctagagtcctccagtatctcctgaggtggggagcaggtgggccgctccatgaaaaccaactagatgatgggaaaatggacagctttgctcagggcaatcttcccaccctggcccccaaaattggtactataaacatggcactcaaacatgagaatgatttcttaaaatgttagaggaactaaaactccttaaattgtagattacctcaagggccaatatagttaaccagacacaccttaggcagatacctgttttctctgtctctcaaggcccaactcactagtgaccagtatttgtaaggagacccatctttctcatctgctaaatccatgccagtgttagaggcctgcaccagtcagagtctgcgccagtgctggaggcctgcagtctgctttcacttcacaaaaaccgtctaagttggaagaactgtcctctggtgcctcttaacttcccgcagcaatggccctgcccatgcctgcccactttctgctctaacactccagaggcagtgggcagcttttggacctaggagggtgtaagtaacttccctgcatagactttagtcaacatctcttgtctctggacaagcgcagagcaacaagcagaagtggggaggtggggaggagccctgcatggtttcccctcgccctggaagcctctgaagacctgtttcatattgcagttctactggaggcagctaccatgtttccctagacttctcttttcctgagtgaagagcccaggttcttgtacatgcctccaaaccagccatggttgcgagacccaccttcccgtcttctgaaatatgaaacaaataaaacacgaccaccacataaagcacttttatacagatcacatccaatgtgactgggtcttcaaaaccatcctgaactactggattcttctacaaatgaagaaatgggctcagggacatgaggcactttgtccacggtctcatcgctgacttcggtggagctgaaacttggccaaagagctcctgtgtgctttacagaaaactacagagtgaatctatgaccacctgaaattgcaatgctgagtactgaatacaacaatccagatgagtctgaccagggccaaatagagcaacacacctgtcacccttcccaaaagctgtctgggacactcttgacccacagggagcacatcttgccccctttttgttttttattttattttagagatggagtcttgctctgtcgcccaggc

SEQ ID NO: 52445 - DNA, 2825 bp, Homo sapiens
catcttgccccctttttgacaagcattgctatcaaaccatgagtcttcacacttatactccagttgctggttttagggggaactgagttgtgaggacatacaccaatcactactagcatcttgacagatccaagcatcattcacatctaccaagactggctccgtgcccttgatggtatagccgttaaacattggaacccagaacacagaatgcccagcatgaatcctgctgcctcagtttcttaaactataaatcagcaaacccatttcataagattttggtattaggtgtgaaaacgcacagtgtctgatagaggaggcgctgagtgggcattagctctaattgttacattacttgcctgtgtcatcagatctgctgataagcacacttttggtatctttccaagtaatgagaaaattgttgaccaaatcagagcaaaggacactactccctcttggttgacgaaaacacacgtatcagcagccttctgttatgctgtttggctgttttcaagctcaacagtgacaaaagggccagtagccctgggtgtaattcctgactccagcatgtacatgccgtggggctgtgggtaagtgatccctctatggttttctcttcctctgtgccacagaataaccaaagtgcctatcctttcggggatgtagtgtctgtaaagcatctggtaggtatgaatggcttcataaatgttactcagtattaccataatacccagctcttattcactcatcttatttagagggtattttcagtgatcttgtcaaaatgtttccttaaatcaaaacaccacacagtactgtttctatattaggcctttaaaaaggaccttacatgttggttcctaggagctcactttggggcccctgagggaactgccagctcccggaaaaggggccatctcatgtcttgccacacaggcgcgtctcctgggctgctcctgagccacatgggtgcatgtcttggtctgtccttgacatcctttattttccccaccaggtccccagatctctcatgctgccctgagaattattttgggttgcttattaggtgctaaccctctaaggggtagctgaatttctggaggtcccaaagaagactgtgaaaatccaaaggcaagcatttgaaacagtgatatttttggagcctgagacacaaatacaattgaacagaggattcagccaccttccacctcccaaaataccccaaatcacaatctgtatcctgcttcatttatgcagaaaagtacctcttatgttgtgttaccagaatattagcaactaactttaaaatgttttattttttgtgaaacatgtatagttattaatatactatgagaaaataacttctattgctattctgataaagttcaatacgtactgatgtaagtattagttaatattttactagatcggtagacaaataatggcatgattaactatttctgaatgtgtgtgccaggatccttggagcccgaataagagcaaatgtagggcatatcaccagaggtagaagttcaggtcaagtgaggaaaagggccgatggcgggccagcaacacacccatgtgcaggtacacactttttctaagtgctgatccatgaatcgacactccactactttggcctattcacacttagaaaagtgctatcagaaaagtaacactttgtgacaagccaatttttgattgctagaaaaacaacaaaaaaaatgattaacaggaaaaccagatccatcattattaagaacaaagcaaacgtgaaatgatcctttacattacagaaatcagtctcagaaaatctgactcttattttggccattactagaacttttctcttgcctcagaacttcagaaacttggagacctcttttcctttcctttcatagacaagttagaaattaaccagcactaaattacttcaaaaccagtaggcctcatgctctgagataacggaaaattttttctttattttgctttcatcttctgaattctatctgtgcttgatcactcatcctccttgagagccttctctaacctagtctgaacacatggatacgtctactgcatttccaactctgtgcaccaacaggcggtgtgctggagaaaagaggagcagcccatgcaggggaccctccctaggtagcacggccctatccagagccctgtgagcttgacttgggggaggatcaggactgcttagcagcaagaccgatactgaaaggaaaatcaagagaaaggcaaacatttattcagagaattggacaggcacttttctctgccataatacatgaagtctgcaataccttaagtcactacaggactttactttcagatacattccagtgacttcatcagaacttgttaggaaattaaatggtgctcgatcagtgacagtagactagagtatgaatccaagagaaacgactcacacagcacactcttaatatttttccctaacgacataattatttcctgctcagttcaagagaaagtggtatttagcatgtcatggataggacaaactggccctgcaacctttaaaaggctatgaaaaccaccaccagcattttaggtgcaaattatcacgcacaaaacgaatagcccagcaagtttagtatgcatgccacccgatacgaccaccacagagagtgccaaatgtgaattttagtaagccctctttatagtatgatgatcagctgagcaatcatcataaatccgcagagcctcagcaccaaaggtcataaagaaaatagcgctcaccttagtgtccaaacatgagtgaagacaccgcctacctttgtcaggacaga

SEQ ID NO: 52446 - DNA, 418 bp, Homo sapiens
gtgagactctgtctcaaaaaaaaggaaaaaaaatgttaataatcatagcaggaactcaataaaatacacctttagaaaggtagattatgaatttcaaagatctaaaggaatagcaaaatgacagttgtatataagcacaaataaatgaaacaggaactgcgaatccaacgagcaatggctattcccaacagcaagaggaagaaattatgactcagtatgttatgcaaccaataggatcagatactattttcagtttcgtaccaggaaatgagccaggtatgacaaagaagataataatcctttgaaatgctcctaaaaatataattaaagcaaacaattaaacagtttgctattttaagagggaaaaaagcaactgtaaggcaggcccctggttcacttcagtagtctgtaggacctg

SEQ ID NO: 52447 - DNA, 1799 bp, Homo sapiens
ttacacgtgagataagtctgcccaagaaccctcacaaatggcaaaatccactgcctattaaagaatgccttggaacccctttcaaatggcgaaaccctgcaggtattacagccctttcctcttaccatgccttgaaagttcacacagcctactaataaccaggatctgcttcactacactaaaaccaatcacgacttacacgcttttcacttctgcttaacagattataggtgctcaacaaatgcatgtcaaaattaaaacactggtcctctggcttaacccggaggttaagggtggaaactgctattccacccttcacgacccttttagcttttccctgcactgccagtgaaaggaactgagctgtaacagtattccctaggattgtcagcctccttcaaagccttcaaagctctgtattgtattgctaatgatgtctcctcccgtagaaggtagctcaagggcaagatccataccatccacattcttatcgccagagctgaggaaaataaaaagtgctcaaaattgtttaaatgaagtggaacagtccctcaagactaactttctaagagaaaatgaacaagaggaaaaattgttccagctgagcagcttcaaatttaagattctccgtaataataaaaggcagtttcaccgcagcttttacaactccaccactaatagctgagtttacagaaagccattacacagcaacaataaagcctggtagcaaggattaaatccccagggtatatattgaccttggcttgtctggagcggagggcgtaagctgcacttctgtttgccgcgctgaatgcggtcactttacaggtaagctgctcgggggtacacgtttaggttattaaaagcaagaaataggtgcacaaggaagcggccacgctgggtgagtagggaggtgagaaaggggagggacccaggttcggtgcgcctgcctgacctcgaccccgcgtcctgccggcggacgctgcaccttatgcccgtcctgagagcgagcggccgcccgctgccccgcgcctgcccagcgttcgcacctcacctcggttctcctcctccaggtgccgcacccgcagctcgtcctccgtcttcatctcagagctgtagccccttttcggggcgggacccccggccgcaggtacccagccctgggcccagatcgccgggcccgctcgccggcctgccaacgagccgggcagcctcaaccccgggcagagccacgcactgcaagcggccaccaggcgggcgccgccagcatgcagggatcccaaggccccaggtgccgccgccaccgcggccgccatgttgtctgtttacggcgtggacctgcgacggccgctccgcccccgcccggcgccgacctgccgcgcgcacgcgcacggcgtccggacccgccgcctcgctccggcttggccccgccctccggagccgtgttcccgcccctcactgccccgccgaagcccggtgacccgaggccttgccccattctccaagcgagattggatggtttgtccaatacaaaaggaaagaaagtagttttccaaggttatggaataattcagggaagacttttctataagaaccacccggagggaattatctccccgtactccctggaccatgccctgcggtcctgtgttaagtaagctgcaaaagtgaacaaaaaagttttgtctcctcaagttggctgaaagtgtggcagcccatcgttggtcactgccttacttatggatctcaggttgttggtttagcgtccctgataagcataaatgatgtttactacgtgg

SEQ ID NO: 52448 - DNA, 766 bp, Homo sapiens
catattgatgtttaaccatgtgtttgatgttcctgctttttaacttttaaagattcttttataattccttgcattttaccctcagaataatccaatgcattcagagaaatcaggtattcttattttacaagtgaagaaactgaggcacagaaggattaagtgacttgaccaaagtcttctagcaagtggtctcctgaaccgacagcctttctatgtaccacattcaacctatcaaatggagtatttcacaataactgtctctgctggtgcttatttccacataggtcacattcattcagcaaacatattgagcaactagtttgtgtctgtctttcttaggagttgaggagacaatgacggagaggacacagtcctgcttttgaggagcacatggtctaggtgtgttgacagacacatgaacaacattttatataatgtgagaaacactataatcacagcatgagtacggcattgtagggacaccactgagaatgtctttacagatgtggtagaaactgagtgggtcttgaagaattcaaaggagtttgtcagacagggatggggattcccaatggaagaagcttcatgtgcagaggcccagagttgtgcaaggtgggaacaaggacgctgaggatggaaaagagattggagtgtggcagtgcagggagggggagatttcatacttgtctactaaaaacgttagatacctttagctttatgacaaactcactgttttgtggttcttcatttttcactagtttcacca

SEQ ID NO: 52449 - DNA, 9272 bp, Homo sapiens
ggctctgagctctccttatgcccctcaacaatgaacttaaagcaaatgcaaaagtagtttacgatgccttcaaaaagcctcaggatttatgctaacctaacaaatttatttcaagcctcaatattttcccttatgattaatttaacaattacttcatctatgcatcatcttttcaaatcaacatctaatgttgtggtatattagtcattgcttaagtttcttttttggtgaataattgacactacatgccaattctatgatgttagtgtattcagcacgattaacttcattacacacattagatgatatgactctccttgaaaacacaaataaaaaagagaaatttaagagcaggtattattacctaccagttgacatatttttccatacatactccgaaggtgccatcactaattaatgcttttgtatagtccatcacactacttctctaagcaagaattatatagcaagaattatatttcataagcccagatttttaaagtttaagtcagattaccctattgtttttaattaagtacaagatttgatttagaaaattctataaaagaatataacctcataacaataattctagaccaaatttatccttgaggagttatctcattagttatgtttatgatagacctttatcttccctggtctctcccagaactaatgtttaacaatccaagctccacaaaagaaaagaataaacatgctttgtttcaatcatctgaaatcttactaatagtctaaacattaaaatctactctgagaacattttgttattaattatctataaagggtaagttttattgcaaattgcaatatatattttgtttttaaaattctgtcaatagaagatgaaatactatttgatatgcccaatgatttggaaacattatagaattatcttattttccctctactctctgaatgtattgttttctccctgttatataatacagataacagtaaaggaaaaaaaaatgtcttcaaggtaaacctaagttatgttaaactgtaagccacctctccagtaagacagcagatgcttattttttagataaatgtcattttcatgaaaaaatcaaatcaattaatcaattcacatctctttatacttttaaagtatgaatactagcaatatgttaaccctacattttcttcctgtgggtaaaattcacagtatctgcgtcaatgaaatgctttacttcttttcatggatgagaaaacaatctagtatttaaaagcagagatgaaataagaaaagaattcactatacatgtacaacccagaggaaatggggagtgaaaaaactcagtcagaaaacaccgaagttgcaagagaattttctaatcccgttgaaaaagagaaggatttttaagctgagaaaactatgttaaacctctctaagggccattctgtccccaagaagcagcttaccccaaagttagagagaaatgtgcacttgatcaagacaggcaagacgcacacacacacatacacacacactctcgcacactgccagaatctattctatcatagcaacaaattgacctactttttctatttgggtgcctctgtaaataaatgtgtcaaagcctgatccagtttatgataaatgaaaatatttcaagttcgacaaaggactagctgaaaattaaatttaaatttaataaatacgatgacaacattgcattttattacatcactgatgtaatttaagtaattgaaatatgaaatagtataacttaacattcttctttaagaggtcgtcagtgtttgaaacttaatacacaattaaattattctgaagcctgcacagagtaagcacatacacgctagcacgaccaattaactgcacagcttgagaaataagaacagctctcactaaagatgggtagtaacatgggggaaaaacagaacagtaataattttttaaaaatctatagaaacttaaatgtggggactattaatatcttgaaacttctgaaaagataactgatcagtgtagcaactaatctgaaatcttaaaaggacaccaacaatcacaaagtaacccagttgtagaaaattccccaatgaataagtaatacatgcaacatggtgtaatgatggcaaaaatggtgggctaaggggacagtcaggctgagaaaattcttgaaagtttctaatgataatgtagaatcatcccaacttgcttcacttggctttttaatttctttttccacttttccagtcagtggatgattataaatgtcattttctaccttatgaatagagtggattttcaaatgcttatttgtagtgtttatttgaaggccagttaattacagtttaagacccctaaaaagctaattaataaaagacatcatgttctgataactaaaaggcttataaacatcattctgagtcctatgaaactgagtcctcaaagcacagattaataacaaatggcatctagcaaatctctagtaaactttcttatcataaaaacaagtttatgctctattattaaagccatatgagaaacagttttgggtgttttttttttttttaactacagtaaagttacttacaaagaaatgtgaaagataactggggtagtagtaataaaaattcattttgaaactgaaaaattcatattgtaatgtctgtgatcaaaggtcaacgtctttcaacattctcatacaagtccaacctggatagaaatcaactcaaatataatttagaaaaataacaggatatcaaacaatgtattaaaccccgtgaaatacaggcataccttacaaaaacaagaaatgaatattaaaggcaatttcaattacattgtttctgttatattttgaattgaatcccaagtgtgctctcattcctcaatacaaattaaaaataaacaactttaacagcatcaatggcatctggattacaatggaaatcatgaagtatatgagtttaacctgggtaaaaataaagcccaggcaatatgactgcaccttttccattccatgctgcaatcgcatttacatctcgaaattgactctaatgaccaaggcaaggtcaactagaaaaatccactcagctggtgagtcaggcacattgctcaacgtccgaaaggcctctcacaaagggttttaattttcaggctgttgcatcacagtgatgttataactgcactgcacaaaaataagtctttaacccagaaaaggaaattgtttcaaaaactacagtgagtgtgagaatacactttgttgaggtgcaaatttccccatctggttttcaggctctgcgacctgggctgcaaattcatttctctgagtttccatttcctcatctatgaaatgtggatgataacagagcccctcaacactgtgcctggcacatgcagagtatgtgtttagtaaatactaactctttatctcttttctgaagaatgatcagtatcaaaaggcaacgatgcctatcagttccaggctgtttttgctgctcgtgactcttactgaagccctgacctatgtcgcaagtgtaagggtaaaccaaatgaaaatttggtcaaaagggtcaaatatcaacagtttcacaggactggccttagttttcaggctacatataccccctacaagagagcttatctgtggggtctcaccatccactgctgatctcagaccacaaagttttagatagagaaatcatccaagctacagaaaatgagtcacagaatgtgtaagggaattggaaaaagctgagctattaatatggcaattgtcacgtcattcctgctactataatcgactcatctctctattccttcaagcagctccccaaaacattaacccaatgacttgggaagtttgaggttctgcaatcctgtcaggaattcccctcaaactgaaattaacattgaacacgatggcaaattaaaaaatatatatattattagaacaaaaaaagtatctcaagaaagatcttacagacttaattccaacacgaatccttactgttactgcgaagagatttacaaagagaaaaatgaaggtaaatacacacacacacacacacacacacacacacacacacacagattctggttcctgatcaataacacaggaaacatttattgaactcctcacaaccaactaagtcaacaggttttattccctcagtttaccctggagagtgatggaaatcaggacagtgttggaagataacaagctggggcctgggacccagggttcttgtgagcccagggcctgcgctcttaggatctgtacctcaccgaaacctgttctctaactactgcctgtaacaggagggaaactgattagggatagcggtgtagggtatgatgccaaagaaagcaagttttcggtcagttttcaacaaagagcagattgcgttgatatgcttcaggagaacatctgtgatgtctccatgaattactgcatgggtacaatcttggaagtctttatgcgaggatgaaagtactgtagttttacagtaggacagcagcgtctatgtgggcgtttagattttattttgaactctggagatcagtgttctctctcctctagcctttgaccacataaattaaaggttaaaaaaaatcggctcaactcaactggccaaagtcaagctgaggccttccttttaatcactatcaatactggagcgcctccacccccaatttctgtggccggtggacgtttggaggtttttcttaaggtctttttcacttcaagaatggagacgcgcttggttccgaaatacaatgaagactcttggaacaaaggtgtctgcaggtttctgaacctcaccgcagaacaggcgcggagtcaggcccctggatttgccctgttggaaggagggccgcggagacgcaggcgctccgggtcgcccgcgctgcccctgtctgccccgtgcgggagccggggtccctggctccctggctccctggctcccgcggcccgggcgaacccagagcgcacccgtacgccggccccggccggtccctagcgcccgggctccacgggccgcgcccccacgcggcgcctcccagagaccctcctccctccgggtgggcggcgcagcggggcctcggcgccgcgaggaccccccgcgccagaacaaaggaatgtggggagggggcagggaggagctcaggccactgagcagccccagtataactgccgttcggaggcgcttctcggtcccgacccgaggtccccgcccgccactaccagacccgcccccagccccggattctcgcagaccccaccggcccgcaggagggagcggcgcactgggggccgcacggactcgccattggagatcgcgatcggaaggtggcgccacgcggcccctacaggcctgggactcccacccgagctcgcaaagtaggtcggggtctgaagctgggggcctagagcaactagcttcttggaaagcgactgcaattatttggggtaatatactctgttccagagacgtccaccccccacctcccacaaaaaaaaaccctgcacttaatttaaatgttacgttatatatacatcccatcatatacatatattcacacataatcactatgtaacagtccaggaagaaatttaatatttgggtaaattacatattcacacatcttcacataagtaaaaccagggtatccagacaaaaaaacaatctactaacctatatctgtttcccataggtcatatctggtctgggggtaaataaatacttctgacctcacttactgttgttatttacaaaagccaagaacagaagatgacacttggccattccctgctgttctcagagaacagcagtttcctaaagtgtcctttaaaaacataaatgggagccagcatccagcaaatcaccgggcgctgcgaaatgccttcctaaaaatacaatcttatcaaaggtctccgaaggcgtggagttaaaactacagcaaatggccttgaacttgtatttgcacacagccctggagaaaacaccagaaatagcactgcgaggccacaattgttaaaatgtgatagggctaaatttagaagaacgtgcgtttcatttagggcaaaagacacacattcggcagcatgagcaaactccatgcttacccggttgtctactttcctgtttaaaatatccttaaggaaaaaaaaaaaactgttatagtgacattcttaaaggctgagactgtcctactttctttgtagcaagattataaaatcacgtaattagctccctctctctatgctcactgccagcaaattcggcagttacataatgcaacatttccaggaaactattatgtgatttgtcttgtcgtgtctgaaaaagcaatgacaataaggtgagaaaaagggctgatcgaatggaatgcattaaaattaggaaggtggggaggtaaacgtcacaatggttcgtcccagatttaaaaataacagctgagaacattgaaagggcgaaccccagtagtacccaagatcagaattcaatgcgagcaattcttgcttttaggttttgtagtatcgttttaaaacctgtttatttgggacgtaatatagacgtaaataacgatctaatatccaacgctgcgcctcaattaccaaatcattgcacacatacgcgcatattcccacatcagcccgcaattcttgccaacatttcaccgtgggcagattatgcaatgtatgaaaggacaaatcccacaaccttcccgagggcttgtaaaacacgctgacgacaaacagggtggaaaacgtctgtgcagacacagcccctgacacaaacaaacgccgcgcaggcattctccgaatgccgtcaccgttcacgctaccaaccctttttctcaccaagcaaattaagactattccccattcctcaaccccccattcctctcccccctacgccgccagccccagagaaggaacgagaaagaaagacactagagaggaaagagcatcttcccgctcggagagggctcagcctgcctggcgctcttctttaccaaaacatcaattttcctgaaatcaggagacattatgcaacagcagcggggggagagcgcaaaccagccaggactacgtgccggcgcgaaggcgctgcaatcaaagcagccaccttaaggtggcgagtcccatcctgacaaggcagcaaaagtttatgtaatgaatgccccgcgcgcactcgccgccgctggcgagcccagcttacagcccgaccccgcacacagcgcggcccgcaccccgcgcccgcccgcccgcccgcagcgcgccctgggagcggtcgccgggcccccggccggcggtgggcggagcgcttaccgtgttcctgctctcgggccggcgaggagaaagaaaggggcggccgggagtcgggccgccggcgctcggggctcgggccgggccgggcctccggggccgcggcgggaggcgggcggcggcgagggcgcggcgcgggaggcgggcgggcgcgccgggtccgcgggcgccgtggccgcgcggagagatgtgtgttagtaggtcagttccgagcgccgcgctacgtcgccgcccgccagccccgcgtgactggcggccgcggccccaatcgccgcgcccgcacccgcccccggcccgccgccaatggccgcggccggcaggggcgggccggggcgggcactccgcggccccgccccgcctccccgccctcagctccccctccgcggcggcgccactaccagctcgcgtccctccccggccagggccaccgccgtccgagcgcccgcgagggctggcgccccattcccggcgcaacgagtgttgcgcaacggcccacgcggccgacacgaccggagcgagcctgcggaggagcccgggagccccccgtcccaccgccccgtccgctcttggctcccttcaccctcccggtcgccgcggtggctctgcgctccccgcgaccctcacttgctcgcagaggcgctttttgtcttcctgagagccgcagcctgctgggctacctgttgccgactgagcactgcgggttgcggctacccgggcgtggcccggacctcggcctccccttccccgcacactcccgagaggagccctctaccttggggtgggcaggagggaaggcggggggtggcggctggcaagctgccaacactcggggcgcgctgcggcggggaaggggttggcgcggccgggcagctgcgcagggctgcgcggcggaggcagcgattaaaatgtcccggcgcctctcccgagagccgcgacggcccggagccgggagggaaagctccacgcacaaacaccgccccctgcacaattagggcgaagatgacggctgcaaagttgttgcgtaacacgactgggaaacgaggctcgctgaggtccatctacccacccccgccacgcgggtgcggcgttcctcggaggatgtgaaggtccgcgctcgggtgcccccgctgggacgcccactgtcgtttggtgctggggcttgagacgaccgcgcgggatctcttcctgtgattttgagctgatagctgcttagtgttatttctgcgtctaactggatacggtagtcttctctcccaaattcccgggctacggaagagacgtaaaaaaatggaaaaaagagcacctagccgcgacttcttaagtcgtcgcgctagactgtcaaggcacgtggcacactccctgcgtttaccgatacacggatagtggtcagtgctggccttggcgaagggagccatgttcccgacagtgactcacaggcttgcccaaatacggagtgtggcaggtgggcaggacctccaccagccagctccctcctggtctccttgaactacgtgggggctgggccgagtgcctccacgactttccacttctttttgctcctttcgtttttaaaaagcaaaaaccaaagtaaagagaagagcagagtgaacacccaggtaccatccctagtgtctgccatgagcagcagatctatctactcgccaagattgtcttttctacctttccccttcttgcacagttaatatcataataacgcaagtcatatttaaaaaatttttatcacctatcagttgagtttttggaaagccttccagggcagcgttgtggttttgaacgcactcttgttcgtgatttatctggtagtacagctctgctgacaaggctctgaaaactcagacgtacaatatgggcttagcgtgttccccgacaccatcttcccggtgctgactaatgcaagaaccacatcccctccactacacattt

SEQ ID NO: 52450 - DNA, 1460 bp, Homo sapiens
atggtggcacatgcctgtaatctcagctacctgggaagctgaggcaggagaatcgcttaaacccgggaggcggaggttgtagtgagccgagatcacgcccttgcactccagcttgagcaacaagtgcgaaacaccgtctcaaaaaaaaaaaacaaaaataaataaataaaaatcgactaaactagttgtatctttataagacagaaaactgatgtacgcagaagaatgacaaactattttttattcacaaatcctaagtcacttgatttcttttcgacaaaaacaaactccaatttattacaattttattccccaacgaactgtaccgtagttccaaagagctgacttccttaggaccttcccagacgaaggtgttccactcattttcaccactccgttttatcgtccgtctaaactctggtttttgcagacctgtctcctgcgtccccttacacgtgttcctttccggagcttccaggggacccggagcataagaattcaaaccgagaccctcagtcccagcccccgcccccgcccgttcctccctacactcaaccgctgggactagaagctcccggcagtccttccagcaagaggcaccgagtctgggcgtgaccgagccagtcccgccgaggtctcaggccacaaatccacacgcgtcctcccaccctccccgggcccgggtgtggtcgcggaccgctaatggcgcggagcccacctcgtaaagcgcctgtaccatctccaccagaacccactgctccgtggcggtcgccatagttagccgcttccttccggaaggcgggtcacaagcgcgtcccaaaagtgcgcgtcgctgctcagtgtcgttatcacctccgcagagggcggggcggcggagcgctgggcaccgcctactcgcacttgcgcactggttgacaggaggctggacggggtcaggtgggatgccgcagtttttccaagaattgtttaccttgtgtcctattaccctccctgctggattcaggatggagaaagtagtaatgaacgggccttacacttggtcatcagctgggcgcagagagttaaaatgattgcaatacgtttactttatttttttttttttgagacggagtttcgcttttgttgcccaggctgtagtgcaatggcgtgatctcggttcaccgcaacctccgcctcccgggttcaagcgattctcctgccccagcctcccgagtagccgggattacaggcgtgggctaccacgcctggctaattttgtatttttagtagagacggggtttctccatgttggtcaggctggtctcaaactcctgacctcaggtgatccgcctgcctcggcctcccaaagtgctgggattagaggcgtgagccaccgcgcctggccaatacgtttacgtttagtagcataagtaatccagcaatgcattatcattaagaaatgcataattatacacaaaaat

SEQ ID NO: 52451 - DNA, 1065 bp, Homo sapiens
gacatggctgttagaagacaagacaaattagcagactcatgctcatttctgtcattgaacaattcgtctcattccttcctcaaggcgctgccgttttcctgctctccgtccgtgggggtgtttgtttacacatctctcgcaagaaaagcgcttctctctggcttccctctgcctccccccctccttcctgccctctcccctgccttcccttcctccttccttctctccctccctccttttctccccgttcctttcttcccttctctctgtccttcccccttccttcctttactgatgtaacaaccttggtgtgccgtggctaagccacactccacccctgacctgcgggggatgagtcaaacggtcagacttgcctgggcttgttccacgctcccctggctagacaggcgtctacacattctcagttaggggctggacaggggcagctgctagacaggtcctattctgggcctctctgagaaaaagtgtccctgaaaagaaagggagctcccacttccatggacccttagccatgccaaggggcagtaccggctttctgctggtgctgatgagctgtggtgtgaactcacgaaggtcagctgattcacgggccctggatctctgctctccttccgctaagtgggactcgggccagcctgccatgaaggaggtagctgctgcagctttcaggaaggaacaccaggtgtcaaccccaccgggtggccaaccccacctggctaggacccagtccctggtggctgctctcccgagaggcgggcagggctggggctaggggctgtccaggagtgttctggactgtcccttcgccacaattcccacaggctgctcaggaccgaggctgagacgggcgaccaggacgggattgtatggctgcaggaggctacacagtcccaggaggctgcttctaagaggcccacgtggcctgcatggggatgcgcctggctgtccagcatgtggtcatttgaattgtacatgtttcactgggatgcctacagaaaagtagacagaagatgtggaaaaagtttttgaaatgttgcaaactta

SEQ ID NO: 52452 - DNA, 651 bp, Homo sapiens
ataacacagggcaaaattctgctggtgcccaaggagggagtatttggaccagccctaggtcagagaggaatccctcataccagcgggaggaaactgagtcccagctggcttaaccaccagctgactaaagtagccttcatcttgaataaacatcagtggcagccaggttgtagtggccatgggctttggatgagcctcagtactgtgctgttctggaaagctgtgggcttcaagtgccattcaacatggagccagctatggtggccatgggagtgcctacatcacccctccttcaactccaggtagctcagtgtagtgagagactcctgattaggggaaagagagggaagagagtgacgaattttgcctggtaacccaggaaattctctcttatctttcccaaagccaccaaggtcacatgtctatgagtctacaagagttgcagcattcctggacttagggcactcacagtgctaaaacagctaacaatgaccacaggcttatgtaacaacactcaatcccatttcaattactgaaagccttctcaaaaaggatggatacaaacaagtccagactacaaagactgaaataaatacctaactcttgaatgctcagatatcattgaacatccacaagaatcaagagcatcca

SEQ ID NO: 52453 - DNA, 1616 bp, Homo sapiens
ccaatatcttccctaccttaatatcatactttcataagtatatctaaaattcctagatgtaacaacagaaatgctattgtaatctttctttttttgtactgtacttttatggagaacccactaccagaagagttaaatgtttttcaagccaattgctatttacttttaatgataattaccagaatccacacactgccttttctagttttagaaaaaacaggccattttatttccgggcaaagctcatgtaccctcctggctaccttcctcaagagaactgttgtgaaaacagttccatcttccctccctgctccatcttttctgagcttccactctctgactctacccactactgtccagagcaatacttcaagacagagtgctgtgccgatctctactgtgggacagaatatcaacacgtgagtacacaaagtcaaacctaatctgaaaccctttagtagtagttcagtggaactcaggactcacctgtgttttttcttgaataaggactttatccgatggagaaactggatatggtttcaagggagcctttatggtggtaaatatgaactctgtgtggctttcaataacactattcagatatgttccttcagactttgctttatagtacactgtgatttcatcagttggaaccagattgcactgaaaacacacacagaaaaatttaaaagggaagtacattctattaatcagaactgaaggaaggtactgttgaacaagggctacagatcccatgctgaatcatcacagaagggcagtcacccttccctccctgctgggtgatccgtaagactaactgcactcagtacatgattaactttgtgtctttttcaccactctttgggggatagggcatgtttcttttcctagaacaatcagtacctcatgaatgttgaaaccaagaaattacttagaacccacttacaaagctctgaactgattcagaggtcacaagcacccactcatctgctggaacagcctcctcagaccttgaaccgtctgggaagaaagatgtatgttagctgtcactgccctctacagggcaagaaattcctgattctctcactagcaggggctttgcagcccctctgcgctccaggatgagctccctgcatattcctcagctctctaataaggaaaaactacccaactctgtccaaatccgggaatctcccctaagctagaagcctgtctatgctgactgcacctctgcccttctgcaaagacactatcagctctgattaccttctgctccagtcacaggggatattctgtagaagcccaacggagctaaaaaaaaggatgggaaaaggcacaggctggctgaaagctacgacttgggagtgaacacgtggggagaggaagaggagtgacttttctgcagaatacattccaaatggactatggattagtgattgttatgcattgatcactatggtttatattacctgcctctcctatcttctccaaacaaccaaaacaaacaaaaagccaaaacagtagcttattcttaactgacaaactaacctttttgcgaagtttctgtatgcgattgatgacttcccgagccattccttcatctaccattgactggt

SEQ ID NO: 52454 - DNA, 2718 bp, Homo sapiens
agagacagggttttgccatgttgccctggctggtcttcaactcctaggctaaagcgatcctcttgccctgggctcccaaagggctgggattacaggcatgagccactatgcctggccagctcattcagcttttactgtgttttttagggagtctctactttccccaaagattaagaatcactgcattattacgtcaagcataaacactcagtataacagcattgactattcaggaagaatcatgtaccagcgaccgggctatggcagctgctgaggagaagcagcctccatgcataaatcacaggattgctatggcccatcgaatccactggagagctgtccatgcacaacagcatccagcaaccacagggcagggacagagcaggttaaccttgcacaacaaccttgttgtgcagagggatgccatcccctttgcttccctcttattataatccaggcccttgactcttcgctgctccacaactccttcaggtcaccttaacctcaacttcccgttcagcaatttcgagaccaccctccctgatattaactacatattattcacattacttcatattattttgcctcaatatattttagaaacgcacactaaaaccatgttttgtttaaaatttcataattccttccagaattgcttcccttttaaactactgtattagtggttccaatattcttcccattacttaggcatgacatttttgagtcacccctgacactactcagaagatacacacaaccaattaatcatcaagtcatgtggatcctacctataagcctatttctgttcccccttttcattctcctctaaatccatttctgtttctccttttattctcaggtcttcataatctattaagtcaaatgtaacctgaaagtgggaccgtctcaaacgtttcctcaatttagttatatcctattaacatagactccacaggtatactcatgcaaatgtacaaaatgtgtatacaatgacattcaccgaataattgtttctccaggcaaataactgaaaacaatctaaatattcatggtgactgaagtaaattacggtacatcaataaaataagtatctcgcagccattgaaggtaataaattaagacatataaaaatacgtattgcctatacataaagtcacagctatatcaatttatactatgtatatcattttaaaaagattttactcatttcaaacactacctcattcaaaaaggcgaccataaattcctgaggctggaaacgaacgaacggcaagccccgaagaaacacgctcttttaaaaattaaatcttgtgctactgtttcggggttgtaacgcgtgcgtgaccctcgtctttgagggccggatcctgcagggaagagagggcgtacctgaggggcctcgcgtgcctggacagccccgcgggccagcaagcctaaaagcaactcatccggcgtccacgctgcaaccgggcgcacggaggtgatgcaacgcgctgaaaatgcgggatccagtgaaggagacaggctccgcaccggccaatcagtgcgcgctgcctgacacctgccaacaagccaggcgccgattggtcgcgccggacatgattgcgcccactggctcggatggtgcgacagtggtgcttgctggttttgcgcctccacgtggaaaacgaaccagcgctgagggcggcgctgtgcgtgctgcttgtatccgttgcagtagtgtagaccgaggtctcactcgggttgtgggcacctccgggtaggtgacggcccactgggaaggggcgccgaggtcggggctcatgttcttcatcttgtttgcttttgtcagtatttatctgactggacacttcgtacctaaattgataacgacaaacagcaacttccggagaggtggctttaataattatacttttgggccctgagccgccgaccccaaagccgcttctcctatcataaatggctacgtgaaacgataataacaaaagggaaggaagggtctgacaaccagatttaaaagttttattgtattttacttaaaatgtttccggtaatgaaaacattgcacaaacgatttttttttctttttttgagaagcggtctcattctgtcgcccaggctggagtgcagtggcacggtcatggctcactgcagcctcaacctccccggatcagatgatcctcgcacctcatccctggccaagtagctgggactacaggctagcgccaccacgcccggctaatttttgtattttctgtagcaacggggtcttgctatgttgcctaggctgctgtcaaactcgtgggctcaagcgatctgcttgccttagcctccttaactgttgggattacaggcatgagccactgcacccggcctgcatacttattatcattgctatgagtcggcttggtaccttactgatctgctggttaaaatctggagccttgcaaagggcagtaggcctcgggctttggccccagagcctctaaaggaaattctggatcttgccaaattgggagtagttccgtagctgcctattgtatccgttagagggatataaaaaatttatctggcctagaataggtagaatgcagtttcttattaagtttaggaacattttgatagtctgttcagcatatatttaactttacttaccgtcttggccctgtgtgaaggattaaagtggtttcatgtcctccatcatgggtaactcagtgt

SEQ ID NO: 52455 - DNA, 2092 bp, Homo sapiens
tttcacttcctattgtattacttccaaattttagtcttcgaggttttgcccaagccctacatccacatctttcatgaatgcactttggaacagcaaccccatacccatatagacacaggtacagacagagtttttttcctccaaatggccataatattacactctatccctcttaattttatgtattcatgtttttagatgtttttccttgactcactcatacattcatttactgtctttaacaaagtctgacagaaacaggatgtaacgcactaaaagataaaaagagctagcctacctcttcctaattgtctccacccccaacctacccaccccagccttcttcctcctagaagacccaaagaagtgaatagagaggctaggagctccttatagtcacaaaagaataaaacaaatggcacaatattatgtcacaataaaagtgctgcaaagtggggttcagacacaaagatcaagggatatagcgaatacagacttgtgtttttgctatgtgcctgcattgtacaaagtagtttgcatgtttcccatttttcaggagagcagaagaggttaagtcacttcctcaatgccataccgaaaattagtgaatccaggattataatgcaggtctaccttcagaacttggaattcttaacactatactatgaaggttgctgtatcacaggggactcaggaaaacttttccagaggtactagggcccatcatagtatctctcatttcgtttagcacccggcaggcgctcagctctcgcccttcccttccccaagagctgacagactctttccagaagagactcccaaccagcgtccaccacatggcgtgtattctgggcagaacttcggcctacctcttcccgatagtctccgcccccagcctacccacggcagccttctttctctgagaagacccaaagaagtgaagagagactaggaaacggccctgtgacttctcatgcccgaaacccactcctcaccacgtcgttcacctaaagccagcgccgctgcagcccctaacttctggtcacgtgtcccaacggagcatcctctcttccttcctactcgatttccaacccagcctcctaaggttccgttaccacaattcagttcccaagagcttttaatttccttttccgtcctcccaccttccctgacgcctccgtcacctccccctcaacgactgcaaaagagcctaaaccaaaatcccctagtttctattgaacactatcgctgtgtgtaccaattcctggactaggtcggcgtaagagaggaagtaggtgaaaaaaataaagaggcgctcccctccacgtgatcccagccctgcctctttagtgaggcacgcggccgggcggctccaaggctgccggctagggtgagcagcggagcgcttgggcttggagtagcaaagaacgcgctctccagagaaagtatagccactgcttagacagccagggaaacgtgtgcggggaagtggaggactcaggctctcgtgcgagagcggagttggacgtgcagggccgctggggtcacgcggagctctcccgcctcccctccgcgtgagctctgggatggtccgcgccgggagcgcgcgcgaggcttgaagcgcgggtgaagcgcgcaggtcggagtgacagctgcgctgccggcccggctgcggtcagcaacgcgccatggacgcagagctggcagaggtgcgcgccttgcaagctgagatcgcggccctgcggcgagcgtgtgaggacccaccggcgccctgggaagagaagtcccgagtccagtacgtgaccaccccaagtcccccagggcccgctggccagggttcccgggccaggcgggtgaatctccacagacatcctcggtctcctactcccagccctagaaagtgggcatgaactggcattgatcctgtcatgacgatggcctagagttgggagcagcgcgtacggcgcccagctgtaaacgcattgcagggtattaactcgtttaatcgcagtcgtctgtgtggatgactgacaaggaggaagtcttgactatatccctagctagataattccgcctccagtatgcagaagta

SEQ ID NO: 52456 - DNA, 2485 bp, Homo sapiens
agaggaatgttattttagaaactttactctggcaccactgagtcatcataaattattactctcagatagaagatttaattcttgcagttagccatgtcagtttatcatgagtaatcagaaagtgttactcagaagctttattgtgaatattcagtttgttacagtgaacatggatgtgtatgggtgggaaggtagtgtgcactggcaccacagaatattctgttttcatcttatgcttgaactaatttattgatgagattctcatttctgtagtataaaaggaaaatattttgcagttatctcgtatttgaaagactttgccatagagaactttatcagaaatggatgaacttttcattatttcttataagcatattggttttggcctgcttgagtttaaaactttttttggtagacttagaatgttaatatttagataaagaaaatattttactgaagacattaccagaaagtaaaataacttgaacatttctgtattagctctttatcagagaataacatttattttatttggaaagttttcctaaatatgagactatctgctatttctcagactaagtgaaaaatttaataaaatagctgccttgataggaggaaaacaaagttcttactttataaggaataacgtatgaatcataaaagaagaatgagcgatcatgggaaacatttagcttttcaaagtttttggaacatgtaccttaaatgcttttgggatccagtaaaggccaggaaaggcaaagagttgaaagtttcttggatttatcctcgtacttacatcattagtaataggaataatgcatctcaaatttgggcatttatataaaaacatgatttttaaatggtagtctagtataaactaggattttgtaatgctgtttaaatattttcatattactttgtttcgaacgtagacattcagtcttactttttacttattatatgtaagattttgaacatccttgcttaaaatattaaattccttcaaaatgagatacaaggttaatattaaaccaatacttaagttcctttactcattgttgagacagactattagtgtaggtgtactttcatttatatgttgtaccaatagaggttaaaagtatgaccctatcggtaatctttttaagcaaataaaactgtttggatgctttcccaggacgattggattgccctccaggcgtatctcttcaatgcggtcccggatgtaactggtgtcattagccttgcagaatgtgtcatctgtaattgaagctatgttgttgaactgaaaaaaaacgaggaaaacattgttcagaaatctgaaatcaacctttcatatgctatataatgggtaaaggaaacctaagtcagaggtctgagtgccccctcacttcaaatccttgtgtcaaattaattaggaaatactcaaatgtacacctggagacaaatacaatcaagagcagacttcacacgtactgtgctggtctacttgttatgctctggatggaatctggacttctgggaagaaagttcatgagcctagtattaatctttttgataggcagacatttagctatcacgctactacagtgatctaaccaaaatttgtatgtgaataagtgaggttcccaatgagtcacaagattttgactcataggtaattagagtcagatattgtgaaaggaactatcatacctgaagatgaattacacgtagactttctggtaaattaagaggcacggattccagggcattatggtccaagtagaggaaggtgaggttattcagtttctgtaaggaaaatttcatgtgagtgttattgaggttctgtacattctttcacaggattcaagcaatatatatgtgcatatgagtatatgtctatatatacagacttgcatattgatatgaatacatcaattatatcaattgttcgtatggtagtttcttgtttgggttttttttctgacttcacgtgtagtgtattttgatcctttatgatggccagtggagctctgccgcataccccacacttctgtccattcatctgatctctgaatatccggctctaatgccaacttctggtactctttgtgtttgtcttgataggaactaatgaggtgagtccctatgtgggattgaattttgaccctggtgctgccataacctctcctgtacctctggagtttcccatctcagttccaccaatttctagctaagtggttacttcttagaaatgtgtgtgcttgtatgtttttagtagagacgaggtttcaccatgttggctggtatggtatcgatttcctgacctcgtgatctgcccgcctcagcctcccaaagtgctgggattacaggtgtgagccaccatgcccggcctaaaaaaatacaaaaaattagacaggcgtggtggtgggcgcctgtagtcccagctactcgggaggctgaggcaggagaatgctgtgaacccaggaggcagagcttgcag

SEQ ID NO: 52457 - DNA, 631 bp, Homo sapiens
tcccagaacagaggcctgtaaggaaaaaaatcctaccatgtgccctcagcattctggcatattttagatattggggatatagtaatggatcctgagaaatgactcaatctcttatcagttttttgggtatttctcagggcaataagacagcatcctccagaggaggtctaataactccagagagtaaaaagagctcgtaccagtgtgagtgtgctctctgcacaagtcttttgcaacatgtccaagggtgcatggctgcttgggtgaccagccatctcagtctgcccagatcatgagattatgggatgtggggatttcagaacccaaactgggaatgtcctaggcaaactgggacatgttggtaactctgataaggattttcattgcaaaatgagcatagctcagttctttactctttgccagattgttcaaagagaatttctgtgtttaccaagaatgatgacaggccactaagcgtcttcaggacctttttgtccctctttaccaatccaggtcatctgattttctcaaggagcagctctagattcattcattttatgattttgttctcaaattcatttcacaaaaatctccctttgtttaatatgcctcactggtattactcatattg

SEQ ID NO: 52458 - DNA, 1471 bp, Homo sapiens
aatatgtgtaaggaacagaagcaagagagaagagagggagggagataggaaagagaggcagaggagtttccatagaaattgtggtggctgaacagggatttggaattcaggtaggaaaggaatagaaagttgtggacagtcattggaaacattgcaaagacatagatgtatgaagtggcagcataataggcaatggggtgggtagaagtttaatgcaatgaatgatttctttttctaggacacagaaaagaacactttccctggctcaccctcagtctctgaacaagggagtcagaagtaaaccagaacagtgaattcccatcatagttactcacttgttggcacagagtgcagccaaatggaagctttgaaagaatgatgatcaaaaattctccatgcattcagattgaactagcaagaaaggcctttatacaaacaaattttttctactttgtttctactagtctcaggagtggtatgatccaggtcaaatggaagttctgtgctgcaaaatggacagctcagcaatgataatacccaaaggcatctgagtcagaggctcagggtgtggccaaaattcccagattaggggatgttttctattcaacccccttcatgggcattgcaccgaatgccatgtgggactccgttctgctcttaggcaacagcaaagacggttgcatcaggaatagaaataataaatgctggaagattaaaagaagaaaaagcagtgtagatgtgagtggtatgaaagtgccaggctcctacagacagaaagatttagatagaagtaggaggaacttccaagctgaaatagccagctgagcacatgtaggtgaaagaccatgtgggtttgctcagggagagaggagactagccctggagtggctgtgcacagtggagtgaaggttggtgctcagagagaagtacactgggagggcctttttttacattttttaaattttattttattttatttagagacagagtcttgctctgtcacccaggctggagtgcaatagcgtggtcttggctcactgcaacctccgcctcccgggttcaagcaattctcctgcctcagcctcccgagtatctggcattgcaggcccccaccaccacactcagctaattctgggagggcctttgcaccctggacaacaacgtctggctctcattctctaggcagcaagatggggatggcaggacaagggccacattttacaaaggttaacctggtggtggtgctcaggattaatggaagtgctgagcaacaggaagtagccaggccagccagtaaattgggataagtggttatatttcctcatattctctttcatttccaaaactaaaggtactgagaatctgacatctttctctagtacataggtgaagttttgaaatgcagtggaagtttttcattgaaaaatagataacagaaatgaactagtggccattacatgactgagagaaa

SEQ ID NO: 52459 - DNA, 4384 bp, Homo sapiens
cagagagcaaagtagtatgttggaagggaataacaacaacagcaggggaaagcaatatgaaaacctgaactgagagacaaagtgaaactagaatttgctgagtggcatggcaagtgtgctctgatggatatcataagtgctctgcaatgcatgaaatgtatacattgaaattttcttgcattaacaattgtatgtgcagaccttccatcctgttgtgaggagtcagggcctagacctcgaggctctagagttaaactctcatgagggtctcaggcatcctgctgtcctgaggcatcctgaaagcactcacttatggggcattgcctgattgagtgcttaggagtgtgaatgtgccagctgtggccattctgagcacacccctctctcccagtatcctcattctggaaactacctctctttctttttttcccccaaattgactcacttttacttacccagaaatctaaatagataggcacagaaataaacttacagagctatttgaattttgacaaaatcagtatctaaacagtctcactacagtgtttaaatacattttaggaaatggtctctcaatactaattttactattaatgcttaggccctcattattttcattgatatacagaattttgctttgcacttaatatttgctttcataaacaacttcgtaattgagtgtttgcctcctagaggtaaattttctgggattccaatcatagtatcatttttatcaagtaatttttttccttctagcacttactgtgtttatcccaacattaaatattatttataaaccttgattaacttatttttcttcatttaaaatttcttaccagttatcttaagtaaactttaaaaatattaatttagaattttaaaattctacatgaagtcatgagatgtctattatctattttcacttcattcaacagatttaaaatgaaaaatattttgaattatttatgttcttttaggacttaaaaattaataatattttcaaaccaatttatacttctattgaacacataattccacctaaacatataaaaataatttaatactaagtatacaaggtctgaaatacttgggaagtacatcgtgaaaaaaacaaacagaataatgcatactttgaactttaaaaatctattagtaacgagctaatttactcaagagttaaacagttgtgaaataaaatacccaaatattaaaaccattccacatgctaagtagaaacttaaaatttaaaacttttttacctggagatctaaactaagtaggctttgcttggtgtcatttaagtctccagctgaaaatgaaacaaaatcagagctttctttaaaaacaaagaaaggacagaagggaatgttgaaaagtatttgctgaacttcttagtaaaatctaaaataactgcctcccttggggataaatgcctttcagttctttgtgcagaaaatcagccaagaaagtaaccagggaaaatggttaccaagggaaatattttttttaatcataagaaaagtagaaaacagcagtgggtgtgggggaagagcattttgtttgcaggctgaaaaggcagagttggaaacacaaaaatgagcttgattaagaaatctgtggttttcatagactattcgcattaaaaatgttaaagtttatactagccaggatgatgtcacttgagctttatcagattatagggatgatattctcgtcagctaaaggctgtgtatatctggaatctattttaaattggattaataatatttaactcatctgcccacccacctcgatctcacacacaatactaacaaaacgacaacaacaaaaaaatggttacgtattaatatcagtggaaattatgtaacttctaaccatgaaataatagaaagaaaatgtgaaagggagctgtgtggctcctaattacctgttacgctggcaaattagttgtgtactttggcctcagtttctttatctgcaaatgagaagttagagacagatcaggattccaagcgcaaccctgctgtttatgagggaccttgagtaagttacttaatgtttctgaccaaagttcactcttctgtaaaactagggtgatacctttcaaatttttctgaaaataaaaggaataacagatatgaaggtcctaactcagtgcctatcctagactaggtaattttagaactattttttaaattttttttttttttttgagacgggagtttttgctctgttgcccaggctagagtgcaatgtcgtgatctcagcacactgaaacctccgcctcccaggttcaagggattctcctgcctcagcttcccgagtaggtgggcttaaaggcgcctgccaccatgccagattaatttttgtatttttttttttagtagagatggggtttcaccatgttggccaggctggtctcgaactcttgacctcatgtgatccacccacctcggccttccaaagtgctgggattacaggcatgagccaccgcacctggcctgaaattcttatatcgttatttcaggggtccaaatcatttggcaaagaggagctaaatatttgtttaaatgacgtggttagactgaatcaggattttgtaaaatgacctagatagactgaatcaagataagggactaaatacataagccactcaacttcctaaaaataaggaaaatgatatctatttttaaaaatgtaaaactagctgagtgcagtggctcacacctgtaatcccagcactttgggaggcagagacaggtggatcacctgaggttaggagtttgagaccagcctggccaacatgtgaaaccccgtctctactaacagtacaaaaattagccgagtatggtagcacatgcctgtagtcccagctactcaggaggctgaggtaggagaatcacttgaacctaggaggcggaggttgcagtgagccaagattgtgccattgcactccagcctgggcaacagagcgagactacatctcaaaaaagaaaagaaaagaaaagaaaaagatgagtacaaatgagcaaacaccattaaacaggcagttcatagaagaggaaatgtcagtggtcaataaaacagaagaggaagatttctcaatctcagtaacagtcaagaaaagtaaattaaaacaggaaggttattttttcactaccatagtgagatgttgctgacaaaactttgggggtagaaaaattacccaaataatgccaatgctcaatcaagcttgaagaccactgctaatcaaaaatcatggcctgatttgaaatacatacattgttttttgggggaaaaaaatgttgatgatatgctgtgttggccagtgtgtagggaaaacagaaactctcctcttccttgaggacagctgaacagtagctatgctgtctgtcctaccatttcacctctaggaacccattgtagaaacacctctttctgtacaaaagtgtgccttcaaggaagtactctgaagtactgtaaccatggattagaaaaaaagttaacccagttgtgtatagatagagaacaaagtgggcttaccataaagctatttggagaaacagaagtaactccattaataccaccatgcatagttgtccatgctataccaggaataaagagattttcaaaactgtacatgtattatgatcttaccttcttttgatgtatgtaatttagcattttactagagaacaaattggaaggaataaacaacaaaatattaacagtaattacagcgagacttttactatgttcttttatatttttatcatgttttgagctttgtataatcagataagaataacttaaaaagaatacaaacaatcaaaaaagaagtaactcttaaagtaacagcactgaggaataccagtaattaccacgatgagattgagaaggttgcagaaaaccaaattttataatttctgaggttcctgctctaaaattttgtggtttaatggactgttacatgagtccttttgcagaaactattttaaccacactagcacatggaaaatgctggtattatggtttctcctaccccctttattattgcagacatgattatgtcccaaaacttggttctgacaacactctgcaggaatgtggtattggtcaccaaacaacatgagcagagtgagcattacccgtgccacagggccatctgcctatgaagatttagactctaggacatttctttcaggtgatatttaagtaaaatcaccttttcagtatttttcctgattgtctagagtaccaataaattggggttttttttaaggatgcaattgtctaccatatgacagctttgtagatattaatacccaaataaaggtaaattttggaaattttaagtagggccatactcagaaattagttttac

SEQ ID NO: 52460 - DNA, 1790 bp, Homo sapiens
tctatcattcagccttcacattatgttcaagtttcaaagacactgcagggaaagagttagaccttgtggagaactaatgtgcaatcttcgctttccttgaaccgagtcgacatcacggcgttgtctttggcacgtacagtctttgaataatagttgacgatcttgccgtccagtttatactgatggggaatgctctcgtagggcttgaggtcaaggtccagcacagacacggaaaaggcaaacctggacctcgatgaagggacgacaggcctttgatcagagctgcaagtaaaaagtaccatttcaggatacacaagccccccattcatttccctccctcccgttctctctccctttcttctttcaactagtatgtttttatgttttttctttgacttctgcaaagttagataaatcaatctcttttaaaagagaagtgaatggcctcacaccccagctcacaaagagcactcgttctgtgcacctgtgatctgtgcgtgtgacagctgtctgtgccggctgtgtgcaccagcgtgcaaagcttcctcaggccagtgcaccccaccataccaggcgagagagggttaaaggactgaaagatggaaaagtaattatgtggaacatgtgagcgatgttcccccagcccagtggtataaacgaacgctgaaaaatcactttatcatgagccaagtattacaaaacccaacaaaaagtaaaaagtagatctggccattccagcgccaaatggatggaatgtcgacaagccttcttctttgcctctcctgtctgctgagaaacgcaagctcctttggttcacatttgaagagatctggtttctcattttattctcaaattttatcttcagtcctttgtattttgcttctcagggcttagttttgtggttttaacctcagaagtcgtgtgcttataacaagatgtgattaattatttgccctgaaaaacacatttaggattactccgagtcctgagctctgactgctgtgtgtcccgcttttcgtctccgggcactcagcgcacagcactcaagacactggctaaacaagtgacctaagctcagttcagtccaagagaagtatcctgggttctggtgtcccaatgtttactacgctttgagatttagaaatcaacaagccaaaccccaacttcaaaagctcctgccgaggagaggaaatactgatcagcacgtccctgctctgacgctgctcaccatggccttggcgctcactgctgccctgccccagaatcctgtttgtagaaaaaacaaatccctgactaagctgctggggtaagtaactattctcatctgaagagtaaacagcaaataactcatttacaaattaaggtcatgagtctcgctccagaagctggagtgtgcctgcagctcatcccaaggggccacattttattgggagaacctcagaagcccaaggtactgctcagttctgaggcctgagacccaagctgggtgcacctgggctggaacagtcacatccccagcccatgactagggttacgtattttaaaggacaccccaatttctcagaagcagcacctgacaagaccatgggtgtaaagacaggaaggatgttccaggcagctcccggggagggtctgactacctgggtcaaccacaagctagctccatgggaaccaatggcagtgaccagcgggcaccagctcctgacacagaaatgctcttcttccccctcagtaccccggaggccaagactgggcaagaggccccagggacacacctgtcccttgtgcca

SEQ ID NO: 52461 - DNA, 529 bp, Homo sapiens
ctggacgatgaaatgaaactctgtctcaaaaaaacaaaaataaaaacaaagccatttcttttctcatcgttatgataaaacaacattgaacaaaatgatgttatttgaggacctgctgtataggtcacttcacttaaagtcacagtttccacgaacctgtcaaggatgctgagaaaggacttactatatatccattcatggatcactctaaagtaaatagaaatgtggcaataaagtaaatagaaatgtggcaatgggtgcactagcaaaggtgaatctcataaatattacacagagctaaaaaaaaaaaacaaacaggagacatgaatatatacagcatgatctcgtaagtcaagttcaaaaacaggacagactaaactacagggatgtaagtcagtacaacagttaaccctgggaggaaggagaaaggtctggttggatgggacaacaggaattctgattgctgccagtgttccatgtccaaatataagtggtggttccataagaatttttactttgtgacaagtca

SEQ ID NO: 52462 - DNA, 2325 bp, Homo sapiens
tcatccctgacaagctgttcgactcgggcaatgcccttaacctctctgattttcactttatttatctgtccaagggatgacaattatcacttgctaagcataacttgatgggttcctgcgtaactggtctttgcaacaatcccacaaagtgaattctactactagttccacttcacaaatgtagacactgagattcctgtgcctttaacacccatgctctaactcctccctacatgacacctatcctcgcctccctcacccccctcccccgttccagccggccacattcctgcgtggttgtaccagacagcaaaaggtcagagagatctgggccctcacagaaacccacacgcttcactcttgggattcacctttgcgagatcttactgcagtttctaaaactttcaccctcgttgaattcaggtgaaagccttcaaattctaaaaggttgagaagaggacctgtggacaacatccccttactattaacagcacagcaattccgtagtctcacgaggctgaactcttttggtgctgagagtaacagcactgtgggcactctgcttcttcctccagtgctggccgggccctccgtcccaaccaagcctccaccccactgcggcctggcagtccggcgggcatccaggcgggaggcggcaccgcgtgaggctgagcgcggcaccgacggggcggggagggggatgtggaactgactctgacggggaacgggaatactgaggggacgacagaccggccaggagaaggatctggggcaatgggagactgacccagtagagaggggatactggggtgatgaggaacccaagcggtagggggggatgctggagggtgggggaattccggagaccggccggggaggaggaaggtactggggggacgtggaaccgaccctgttgaggaaacggataatgggggcggggtgataccggccgtcggagtgaggtaccggacctgcgccgcacgtccaccgctcacctgcgcgtgggccaccaccaggctcttattgccctctccgtggtacccccattcattctcgtccatcttcccctcttccatgcccaggcgcagccctggcgcctcgcgggctaggactcggggacgcgagctgggggccgcccgcctcgctgggaaccagccgctgcggtcgggggaggagcgcctgtcagctgccgcccccgctcgaccccgccgcggcgactagcaagctgtggccgccggaagccacgcccccggcgcctgccatgacggagtcgggcaattccgggttcgtgacactttcctcacaccgatcgcgacggtggatgggccggcggccatcttaggtactggtagagcgactcatttccggaacgcggtcttgggagccggaagagaagcttccggcctcggcgccggatgtgtagctggcggaaggagccggcggcttttcggcgcccggtagtgaccggcagtccccgggtagccagggtgtctgggtgttgggaccgcttagtcgcgagaccccagcaaacctcttggcgtctctgagcctcagcttttgcttctgtagaatagggtgtactcatcgtacatttcatgggaatacctaacgcagtcatttggatggtcctgtgaggtagaaaacattgtccaacgttctacgcgaggaaatgtggctgggccacaggactggactccccagtcccgcttttgcctgaagacttcgagggacgcagttggagcgcaaggctcctgcttggcggtgaggcagagggctaacgaccttccttctcctaaattcactgatgcggcggcaagaatggcaccgcctcgtagagctaccgcatttcccaaactcgtagtctcaggaccactttatactcataaaaatgagggccccaagcttttgctaatgtgggttacagctatcgatgttaccacattctaagttaaaatgctttaaagttttttgttgtttcgtttaaaagtaaacagccgggcgcggtagctcacgcctgtaatcccagcactttgggaggctgaggcgggcgtatcacctgaggtcaggagtttgagaccagcctggccaacatggtgaaaccctgtctctactaaaaatacaaaaatgagccaggtatggtggcgcaggcctgtaatcccagctactccggaggctgaggcaagagaatcatttgaacccaggaggcggaggttgcggtaagccaagatcgcgccattgcactccagcgtggacgacagagtgagactccatctcaaaaaaaaaaaaaaaaaaaaaagtaaacattacattccacgcccaccacca

SEQ ID NO: 52463 - DNA, 562 bp, Homo sapiens
cactcttgctcccctcaaattcatgtctatgtcacaagcaaaatacattaattccatcccaatagcccccaaactcttaaaacattccagcaccaactccaaaatctccagttcagagtttcatctaaatcagatataggtgagactgaaagtatgactcattctgaggtaaactgctctctagcagtgaaacaaacatgttctgtgcttccaaaatacaatggtgggatgggcataggatagatatttccattttaaaagggagaaataggaaagaagaaaacagtgactggtcccaagtaagtctgaaacccaacagaggaaacaacatgaaatgttacggcttgagaataatcattggctcaatgttctgccctccaggcccactaaggtgatagtgccaccttcaggacacaatgtggtagcagccctgccccgtggctttgggtggccttgcccctgaggcagccatgtgcttgtgccttgctcctgcctccacagtagctctgtgcctgggtcatgcatctgaggctctcctggaaaccaccactggtgactctac

SEQ ID NO: 52464 - DNA, 1985 bp, Homo sapiens
gccaggggcaacctccacgtgcaaccccgagcccctactcacttaggccgctgtccacgacctttccccacctcggaggcactcatgaaagaagcagaaacgctccgaaagtagctgcgcccagagaggggaagtgctttctctgaaggtgacagagccgcagccacccagacccaggcccaccctcggcctctcccagcgggtcaccagcatccgtggcctcagctcccggctcagccactgccctcccaaccccaccccacactcagacacacccggaacagcgaccaccgcaaagcatcagcccttacgaagccccgccccgccggggccgcccaggtccgcacagaagcaggcgggcagctgcaggaggcgacaaggcgcccggacccctgcattagcggcgtctgcaacggccgcggcaccggcctgctagccaaggccgggcccactcccacatactgcccgtgccccctccgccccggcggcccacccctgccggcccccgcttggcaagctgaccttggccgccctggtgccagggacgacgcccacaggccccggcgccgggcgggggtcgcagggcagggcggctcggctcacctccttgagctgctccatctcgctgcggatagcctcatagtccacctcgagctcctcgaactgcagcttgagctggtgcttctcctcgagcaccgccagcccgtactcggccgcctggatcttctcacgcgtggtctcggccagctcgtgggacagccgcttcacctcggcgcgcagccactccggctgcgcctccatcaccagccgcgcgtactcctcctcctccgacggcgccgacatggtggccgagggctgagccggctcccactgaggctctcgcaggccgggccctcctcagccgccgccgctgccgccgccgccgccgccctgccccgacggccgcccgcccgcccgcgccgccgcacggctcctcccctccggcgcgcggggcccgctgggggctggagtcctgcctgcgctccgaccacaaggtccatcatgcccggcgcccgcccggcccccggctatgattggcccatgctctgtgaggggcgggccctcgggcgcagccactgacgccaatgtggcccagggggctgtggggacagtagtcccgctagcgcaccgactacaaaacccgtccagccccgcgcccacccgtccccgtccgtgattggcctgcgccgccagcgtcgagccggatgtaccggcgccttgcagtcccctggacggcggtcgagtgggcgcggccccgcggccttccccacactcagagccggggacactgctcggtcgccgggcctcgcgctcccctgtgcctctggcagccggcggccacgcggggtggcaagacggctgccgggagaacccccagggggaggcgggtgcggggcggcaggactgggctcccgaccgtgggacgaacaacgcggacagagcccgggaggccacgagctagaagcgcatccgagagcgcgggtgaacggctgctgctggaaacccgtggacggtgtgacgcatgctctgtgcagacgtctgggggcgggaggaggacgggccagcagggggcgcccaggggccagcgggaacctcagcaccgcccctcagtccttcaaggtctatttcttgggaataaagacatttccattaatacagggtcataaacgtggtaaatataattgttgtctccgcatctatttttaggcctgacttaagttgtttgaaagccagtcgtacccttcgccttggcgtaggtaacacttctccgtatatggtggtgtgtgagataactcgtttattctttatctcattgacctaaagcgcaacacaccccacagccgctgaccgccatagcacctaatggccagtatcagtgcagatgagttcacccttccctcgtattttctttagccagtccacaggccccaagggaaatcctaaag

SEQ ID NO: 52465 - DNA, 1116 bp, Homo sapiens
atcacaggcaagtcctttactctctagggactggctatccctgggaggggctgtcactccaggtcagcaagtccccaagatgtcaaagcatcagaatacagaaaataaaaaaatatgattaatatgggcccccagagggagtctccagccgctagaagttgggctgaggcccccgagtgggcatggctgaggagacatggcaggcacagacggcatctgctacaggtgaccagaccaaagtcagctggctcaggaccagggtttcagctcagggcagcctgatgccaaattccacattctgaactatagctcggtttggtgagaggagagaaaagaacaacaggtgttttccagcgtcattgaccacattacctattcggactgtgtctcacttgcatgttctgcagaccatcaccagtgcctgctctgtgcctggccccatgctgggctctggggccacagagatgagccaggcatggttcctgcccttgaggtatgatttgtctgcaggggatttgaggagggagcaaacctgtggtccagcccaaccctggatggctagagaatccttgctgaagaaggtggtgcccgagctgagtgctgaagcaccagcagggccacagagctgagcagagcgggcaggaaagtcactgcagctggaacacagtggggacagggctggggcagggaagtcactgtagctggaacactgtacggacaggctgggggaggaaagtcactgcagctggaacactgtagggacaggctgggggagggtgtctcctgctccactggggagtgaggactttgctcctgggccctgtggatttgggagatctccagggccagcagcgtggagcacagagacaggcagagcctgtcagtattaatgagtggatggaataaaattgggaagcagctgggcgcagtggctcatgcctgtaatcccagcactttgggaggccaaggcaggtggattacgaggtcaagagatccagaccatcctcgccaacatggtgaggtctctactaaaaatacaaaaattagctgggcatggtggtgcgcacctgtagtcccagctactcgggaggctgaggcaggagaattgcttgaacc

SEQ ID NO: 52466 - DNA, 1413 bp, Homo sapiens
ctgctgcaagtggagctgggtgggaaggggaagccaggagaagggaggcctccaggtgtggtgggccctgcagacagaccccagggctttccatcctgtttcccccagccgggggcccctcagtgagaaccgaagacaacaagggcacccagacctcagtgtgcctcagacggcctggcccagtgagagacagggaaagaaggctgggtccacacaggactctgggggtgagtgggttacgggaggggcgggccggggaggcgttttgctgtttgccctttggtaccggccgaatccggcaccctgagaaggcaaaatcctgctcaaaaaataaaaacacagaagcacatggaaaaaccacactaggagtgaaggtgagaacaggaagggatgggggaagggtgttgggcagaggtagccacgcgtgcaacgccccggagtagcaacactttccgctcagccggctgccttggcccgctgggtatttggtctccccaagggcccccgcccacagcccccggccggacctcggccccagtccaacgtgtgggcgtggtctgtaagttgcatggaaccgcccctgggcgggcgtggagggcggggcctccccgcccctcacccaggcccaggcccaggccccgcccccacaagccgggctcactcccctggcagaccccgccaagcgcctcggagcgcgcaggatgcgctgggcggccgccaccctccgtggcaaggcgaggccccgggggcgggccggggtcaccacgcctgccccagggaaccgcacaggtgagggctggggccgagtggccgcgtgcggggctctgcgcccatttcacagacgggaaagccgaggggagggggtcgcggggccgcacagccgtgggtgggggccacagcaacgatctgccccgaggacgaacctcctcgaccctccgccggcccagcaggcgccctagcggagccgaagcctggcagcgagcagttcgaaaccaggcggctgcacgcagcagcccgcgcgcccgttcccgagtggccgcagcgccttggtcccgggcgtctgcggacagcgcggccggccaagcctctccacgccgcaggctccgggcccctccgcgcccctcccggggaagtcgaaaccggcctcacctggcgggcgggtggcgcgggggcgggaggggggagccgggagccctctctgcgcctgagggaggtgtcatcttcacgattccttggtgaccagcgcagctccactttacagatggagaaactgagcctgcgagaggggagtggctgtccgaggtcaccctgtagccaggcttgggatcgcctcggctgtctcggaggaggctcagaggcctttggaaggaagagaagctgctttttattttacttttaagtgtttgaattcaa

SEQ ID NO: 52467 - DNA, 871 bp, Homo sapiens
ttgcttgagtccaggagctcgaaaccaacctgggtaacatagcaagaccccgtatctacaaaaaatgcaaaaaaaaaattagctgagcatggtggcatgcgcctgtagtcccagctattcgggaggctgaaaggtggaaggattgctttcgtccagagttcgaggctacagtgagctgtgatcacctcactgcactccaccctgggcaacagagcgagattctgtctcaaaacaaaacaaaaaccaaaaacatagcacggggatgtgtgtttttcccaccatctttaaaatggggccattaccactggttttcctagagtagatatgaagagcacagtagtgtggacagactgatcttcctgagaggcaggaagtggtcttccctcatctcccatgagcgccctgggagaagggcagggcgcgggggagactagctcagagtaggagtttatcatgtttgttgtatgactggcccctggccctgctcccaggtcagccccagcactccctgatctgggagattgtccaggaaagcagggttccagtggctgtaggtaacccccctggcatccgtggaagggccttggaggaagggcctggagagggggtagcaggaggcatgctctgctggtgccttcttggcttcacccctgaactcctgccccagaactggactgtgtccattttacagaggagaaactgagaccccgtgaatgcatgtgtaaatcaaagcaaggcagacacaccctgtgatgcctggctatggcctcctgccacccattggcatcgaaagagctgctggtagaaggcataggttcccggaccctcggttttccaccagggatgtgggagtacatgttcctcatttgga

SEQ ID NO: 52468 - DNA, 752 bp, Homo sapiens
ccgcagtgcagcaaggcctctgctcagatgtctagtacattagttatttattgccgtggaactgattacccaaaaacatgggagttcaaacacaacaatcgtcatttattctctttcacttggtgggtcaagaatttgggctttgcagggtgattctgacataagggtttcttatgccactgcagtcagatgtcagccagggttgcagtttcatctgaagtctctattggggcttaggatccacttccaagatgattcactctctcacagtgagtcactgctggttgttggctgggggcctagttcctctccacacagggctctctgcaaggcaggttgagcatccttacaatatagtagctgattcgccccagaacaagctatctgaagatgcaaaggctgaagccatgatgcctctgtgacccagcctcagaagtcacactgtcacccctgccacacttcactggccacacagaccagcctgattgactgtgggaggagactacacaagggcatgacctggaatgtgaggattgctggggccaccttggaggctggcaacctcataggcatcctccgcctctttctttgcctgactcatctccctagctcttaccagatcaacatgcagatgtgtgtttgtgtcctctggtaacagggaagctccatgggggagtggagcttccagtcttccttgtgatccagctctgggttgggcctatgtttaggagatatttgttgaatgaattaat

SEQ ID NO: 52469 - DNA, 2700 bp, Homo sapiens
gaaggggacactgagttgggcccccattccgggtcaggctctggcatctcaaattagagctgctatgggggaacggcccacacaggcagggaaggaaagaggaagggaaactgctgctgctggctgggagagtgctgctattccttccttcacgggtctccacttcctggctggggcccagtgcattcacatcatgtggggctaggagcttcttgtggcgggctccggagctggaaatgccaggcctacgagagggaaagcaggaaggaaagcgggagggaagtggagttggcccaaggtcactcattttacagtccaggaaactgaggctcaggcaggttaagtgacctctctagttcgggtcacactgtcaagctagtgtcttcttttgaaggtgggggactggggtcccccaagaaggtgtcccccccccaccccgccgagcgaggtcacaccgttgagtccttctcccctggatttgggaaagcatcactgggcactgcctcctttggctggtccctgtggcgtactggacgcccaccggccttttgccccaggcctggccctgtactccccagggcctgactttctgtatgacgttggatcagtcacgtcccctctcagtttcagttttctcatccaaggggtggggcgcgaggccgggagcggggaggtggactgagccggccggcgggccacctggatcccgactccgccactcaacgcggcagggcccggaagggcgggcccaagacgggcagggctccgggcaggagcgggcgcctccagggaggcgcgcggcggtcgtagctgaggccgccttgagggcgggacttggacgcgggcagggctcgagtgagaggcggggttaaaggccgctgcgacggcgttatagacgccggcgggaccggggcccagcgaggggagggactctgggcccctcgcggcgtcttaactgacgctgggaggggcgggagtccggtggcgcccgcccacgcccgcagtcgcccgcccacgcccgcagtcgcatggcagagcaggaaggggcggggctcagggcccctggaggcgcggaggccgacgacggaggggggcggggctcgagtaaggggcggggcccggtggggggttccttgaggctcggaagccgtcgtcggagggggcggggttcaggtgcagggcggggctcagaactccgggagaggcggaagccgacgccggagggggcggggctcgagtgaggggcaaggctccaggatcctcgcagcggcctatcccaggacggcaagggggcgggactcgagtgagaggggcggagtttagagccctgggggagccgtagcgggcgcggaaggggcggggcctaacggtagggggcggggctcgtcaaagggcggggtttagagtccccgaggctacacagccaaagccggggggctggcctagccaaaaggggcgggcgagcacggcccgcgggcggcgttcgctggagctggtggaccgggcggctgaccgaggggcggacgcgcggcggggcagaccgctggggactgcgggcggcgctgtgtccgtcgccatgacaggtgggcacggggtcggctgggcggcagggatgcgggcgccctggatgggtggcccggcccgggggtccggctgccttgcgagtcgcctgcaggccgcgcctgggcagcgggggccgagtgaccttggcccgtcagctgtcggtggtgcgcgagtgcacccccgcgaagtggtgggtgtcccggggcttctacccggcggggccgtgccagccgaggcggtgccgggcatgatgggtggtggccaggtgcggggcccgaagagggcgggggctacaaggcagctccagggtggggctgcacagccgcggtctgggctcagccactgccaatgtgtgtgtgtcccgtggtggggaatttggtctgaaagagtaggaggtggtagaaatgacaccggagagaattcacagcggtcctgctgtgattctggccacggaaacaacgctccatccttacaaccaccccagcgaggtcgcgggacaggcgatgcgttcctcggcggcatgtgattcctgtgggactcttggagtctcccagactccttcggtggtccacgacgctcttgcccctgtttagttctaagagaatcggggacagcgactggaccccccaaggttgttgtgctccacgctagtggccccagcccagccttcctccccagggcctctctggtctggggacctgcccaccatcctcctgatcccaaacagggtgactctgccctgtggaccttcccctgttggagaagccccatgagggtgatgggctggtaagggaccccatggcagcccggccagggagtatgggggttcccagaagctacacttcattcttactgttctgtttcatggagcagaattggctcaggggctcagggtagccccagaagtccctagtcctctctcggtgctcgctctcttgagtctcagcctaggtcctgcccacaaataggatctcatgggctggaaactgatgacttccaggacaccaggccagaagagacttccagcctaggccacaagagaccccagctgccacctgctcccctttgtcctcccttctaactcttcttatttgtggctctcatttctgagcacttactgtgcattggaccctgtgt

SEQ ID NO: 52470 - DNA, 1533 bp, Homo sapiens
gggtgagagagggttagggagaggtaagggaggggtaagggagggggtgagggaggaggtaagggaggtgatgagggaggagtgagggaggggatgagggaggagtgagggaggggataagggaggggtgagagagggggtgaaggaggagtgagggaggggtgagggagggggtgagggagggttgagggggtgagagacgggtgaaggagggagggggtgagggaggggtgggggtgagagacgggtgaaggagggaggtggaagtgggtgagggagaggtgagggaaggagttgagggaggagagagagagtgaaggagagggtgaaggagagtgaaggagggcatgggggggtgagggaggggtgaaggagggaggtgacggggtgagggagaggtgagggaaggaattgagggaggagggagggagggaggggtgagggtgggggtgaggaaggggtgagggaggggtgttgggggacctagtatggaacccaggagtatatttgtcacaggtcagcaaggacacagggcacttgagctcagaggccggaagtatagctggtcttgcacaatccacggtaccggtctgggagaaatgaccctgctgactacaaacacaggctgggttttgggggtgctgacgcagctttgttgtgctgctgcttccagttctgccggctcagtgccttgtgaccggggccggtggctcctccatagagggctcacaggggtcctgcccactcagtgcctctcacacctctgcacaaaccctgggtctcagcagccacagggttctggccttccttgggtgagcctggacacccaccctcatgcagacaggttcagaatctgggagggggtccagcctcttgtgcgccctactgtcccccacacctgaggggcactcgggagacagagtactgggggcatgctgttgtcaccacggcctgctggggtcatgtcacagctcagagccttggtccccccagctgtaacgttagcatgagaatggggactctggcagtcgaggaacacccaccctcccgcagcctggctgggcaagtgctggatgggggttgcagtgggaccccaaatcttgatcagatctggggaggggaccctagcactaccttgcaggggggtgagggaccaggggtgggtctccacagaccctactgcagccacaggtttggagggagtgggctacactggcctaaaactggcctgaagacagctggtgggagaacccggctgttcactggctggaaggacgaggacgtgctgggctgggggccacagaggctgcagctggtggggcagcttcctgcggtcacaacaggtcaacagcacctggagttagtgtttcctctaaagtaaagtatttgagagaaagagaagaaaaatatgaaagcattcagacctctaatttattattattattttttgagacggagtctggctcttgtcgcccaggctggagtacagtggggcgatcttggctcatgcaagctccgcctcccaggttcacg

SEQ ID NO: 52471 - DNA, 1877 bp, Homo sapiens
catgcacagggcctagcacatacaggcaagtgagtgggttctgccccagacatttactgagcacctactatatgctggacagtgctgaggacacaggctgcagataggtgatggcatctggtaggagagccaggtcagacaaaggatccttaagtaggagaagcacagacagggatgcgggtgccaagccatgcccccagctccagcagagccccttggccctcaggagacccagcaggcagaacactcattctcggagtgcctgccctggacttgggctggactcagactccagctccaggggagagtccacctggccgcactgtctctggcaacatggacagtgactccatcccaaggcaccagagcataaattgtaatggggccaagacagtgatcagggaggggcggcatcagactggtcaggacggcctctggagtaaccttagagctaagccccggccagccgacgggggcctggaaggatgctcttcagggggcagcagcacaggctgaggactgagatgggaaccccagaagtcagggtcagagctggtggagtggttggtgaataagcctgggagttggtgggcagggaggttgggggcggccagcatgggcgtctgagtaggggaggccacctgggcattgggactgcagggggtcagggcacacacatccaactggggatggcccagggcccagcacagtcatctgggttcacccctccgactcggtcccagtgaacttcctctcctggccaaaggaggagctaagacatgtgttggccaacatccggctgctggtgtgtgaggccaggcacacagggggccctccctcctgcctggctgccagccagcccacactgcaggccatggccaaatcagggaccaagcgctgggcggcatgcatctgagtcagcgctggccacgcaacctgcggccaatgctacattgcctcctgtcaggagcacatttcgcacccaccgtataccttcgcagcttccttttcaactcagcacatctcagaactcattcccatatcaactacttttcaaaccctctatgggacaaacacaaaagtggagagagcagtgccacgagctcagcttctcggcatccacgcggtccacctactcagtagttgctgttgttttcccccgggagtgctttagagcagagcccagttagaccccctcactcaggagtgcttctgctttctgtcacttcagcaatggggctatgcagacctgatgtcagcccagacacaggactgcaggtgggggccactcatccatccgaggaacgggagctggagccaccccaagtcacggggctcagcccaggtggggacagaagaaaagtgatgaggaagtaagtgggggcctcagtagtgctggaggccttgccccctcccctgtgcccctggaaggctgcttggaggaggaaagggcagaggctggcaggagatgcacaggtacctcagctggaggggccaggtcgggggacccacagcggggacacagaggcagtgcgggatggaggacggggcaggctgaccccactcccacctcaggccaccagatgctccacatccagggagatgaggggctggggctgggaggggcggtggggagaacagaatgggtagtggggggttggggaaggatgggggaccaaggagaagagagtgaaacgccagacactggcggcccgggagccaggtttccactgggtgaggggtcctgtggggcaggtgggccctgagagtccagggcctggtcccggcatggctcccagctcccctgtgcccagagaatgtccccgctgaccacaggcatcactggacaccactgcggggaagcagcaacttcaaac

SEQ ID NO: 52472 - DNA, 3099 bp, Homo sapiens
gagcggccctcgaagttttctacccctcaaggggaaatgtgctcatcctcacactggctcatagcctttccacagctccctggacaccagaccgtgatcaggcctgcaaggcccctcccatcggcctggcttcccatccccccacctcctacctggccctcatgtgctctgtggtccagcctctgagcctttgctcccactgttccctctgcctagatgcccttccacacatctcagagagccagatctgctcacccaccttccctgccctccagggctcagagccaatgtccccacctccacagaaagccttccctgaccaccatgccccgccccccacgatgggctcccagcccccagggaaccccctgctttgccctggcctctcctgccctgtctgggctgggctgctctccaaccgcggcttggtggggcggggctgtgtctctctccctctggtgcccagagccaagacagtgatccgggaacaaatccaacccaatctcctctgggcttgagatgcacccatctcaggaggcacagcctatcctgccgcccgcagaagtgagcagagactgctctgagtggagggcattgcccgggcaaggtcagggttgggggaggagcagtatcccttcctttccaaggcgcttccaagccactgacctgtttattacctgacttgctttccccacttccctgaaggcaggagagaccctttgttctctctttataagaccatgtctaaaaggcccagcgaggtgtggcaacttcccaaggacacacagccggaggagccccctgcctattgctccaaagtgctcacacactggggcagggccaggtcgctggggtcccgcacaccggtcaagtcctgcagtgcgacagctcctctctaacctaggaacaagtgtccatgcagccccagggccatcctatcccgtggctcatggggccccgcctccccgaacatgtcctgtccccacagcaccggcctaggactgttcaccagcgagtgggcagagtgtctttgccccagtctggtccacgccatggagaggcctggaaaaacccaacaggctgctgttccctgcccccatccctgagggggttagaaaaggaaagaatgttcaaagtaaacaagtcaccagagggccatgccaggaccttgcaacaaacacaaggtgctcagtaagtgctgagtcctgggatgaagaattctgaagcgggaccactaccagggcctgccccctgcccacagccctcccaggccgggcagggcaagttctggagggccggtggcggcatacactgaaggctgtgtgacgtttctatttctcaaggcaggtgagtggaatagggaccacagcgggccccaagttcccccatcaaggcacgcatcagattgtgtggtcagcgtggggtgacgtaactgtctgcatgcagctggtctggagcccggaggctgtgactcccctccgcccgcctccgggcaaagtgcgcggaggagccggcacggcgaggctgaagttagagaggcccgcgcgagagtgggggggaggtcgggaaagccgggcgccggcagtccttagcccgaggagctgcgccgaggccccctccgccgtgcagccaagcgcgggcgctgcttagtggggctggggacgccagcccgccctgcgcccccacgccccctcgtcccgcccacttgccgggggtggctggagctcccgggggcatcgttctgaccctgatggggcgggaaggacttggcctagagcgggacgtcccccaacactctgcagtgcggacgcggcgcacacaggtgcccggggagccgcggcgccccgaaaggacagggcctggcaagatcatgcagcggtggggggaaggtcttaccgaggcgtccggggagccgggtgtgcccggaggcaggccgccgttgagctcgtactcctcggttcccgagtccatggtgcggccgcccaggccgccaggatccgggcctgagcgcgcccgagcctcagccgcaggctccagctgcgcgcccgcccccggcccgcccccggcccgcccggcggcgagctgctgccccagactccgcctccacccggggcgggcccggggcctggaggctgtacgctgagagcgcgcagtttggggcgaccccaacccctcgggcctgagacggtcccgcggggccccacaagggagggggcgcgacgccgatggccccagaggaccctgcgctgcgtcttgctctgaacctccgtcgcggacacttttaatccacaaaatgaggccaagaacgacctttccctggccaccaggcaaactgcatgaaagcgagcgggcgttgccgctggcgcccacgctgggtttttcccaggcggggttcgccctgggaaccgcagatcgctccagcacagcgcctgctgcgcccctagtaacagcgtcagagagtccggggttcccctgattgcgggccacgctgacacagggcttcccactccctgaccttaggttttcctgcctgggaaatgggggttatgagggcacagactgctggaggggctgggggaggcacaaaggggatgaacgtgcgctgactcatgggcccatctgtgccacctgtggcagggggtgggctgggggcagcacagtgcccagagccctggccagatgctaggcgggcccccacctgttgtatgattgaagtggttgtttggtctctgtttctccatatgttcattcctcagcactttgcccatctgggggcctgggggtcgagagcatgtggcggccaccctgggaggccaggggagttcatcctgaccacagcatagtcagcttgcggcagtatggccactctatttccagaagggcagtggaaggaaggccagctcagaccccaggctctgtccagtcaggctgccaccgggacaggaggtaggagtgagtgggcatgggcagggcagcaggattgcgcttgccctgatcctccaaacggggtcatcccatgaaggaggagctgtcgtgggcccacttcacagcagagaaactgaggctcaggctgtcactgccccagctctgcctcagagg

SEQ ID NO: 52473 - DNA, 803 bp, Homo sapiens
tggtatgtgcatatccagttttcccagcagacgttgttgaaaactgctttcccctttgaatggtcttggcccccttgtggagagtcactgcagcataagagttagccttcatctctgggctctcctctcctgtgactcccgtaatgttttactcatccacttcatggtggaccaccctctggctctgtccactctgccacttttttcctctgctcctcacaggatcatttccattgtaagtgtctccagcttgctgattctttattctgcctgctcagatctgccggtgaacccctctagtgaatttgtaagtgtcagttattattttcagctcttctagttccatttgatcaccttcataattcctatctgttgatatcctcattgtgttcctctgtgattttcctgacttcctgtagttctgtgtccatggcttccttcagttcttcgagcacatttaagacagtcggtttaaagcctttgtttactaagtccaatgtctaggcttccttgggcatgtttttgtcagttaaatattttcctttgaatgagtcataccttcctgttttatttgctttagattttaggtcactaaatttttctttgtgtctaaactgctgttaaacctatccattcagtttttaatttgggttattgtgtttttcagttgaatttttttttaaccgtatctcctgtatctttaaaaaaaaaaaaaagtttctgactctttaccaaaattctctatcttgtatctccttcacataatattttttagtttttgtttgctctttgtcctagttttt

SEQ ID NO: 52474 - DNA, 3466 bp, Homo sapiens
tccatgtgctgggcagcagctgtccggccacagcctgtcggttgcatcctgctcctctacagaggtttctccaaaaaaagaacaaatggagagatgaaggtaagtaaaagcggcactttaaaacttttagagtgctgggtttctaaatttatattctgaaagacattaatctctttttgaaaatgttttatgcaagcctaatatacatacagtatcaacctcattttagaagcagttacgacagagctttggaacagaatttacgtaaacgacctccttccagaagatgctactaaagcaacaagattcaaatccctctccctcagaagagctgggagatccactgcaaaggcgcacgtttcagtctagccattgcgcagtggtaacgcaggctttcccacgctgcaacagacctgtgctctcaagacagtctcttccgtgacgagcaggcgcttagggctacctgtaccttcagacattatggtgtgtttggccatgtcatttgtcataggtgtaaaaaccacaaccgagagcccgaagctgctgggatgagcacctgccgcggaactgcattctcgcgctccttcctgctctttccaagaagccaggcgcggccggccagcatcccgctctcccggaccccgcagtcagtgtgggcagcaggcccagagtggtgcgagccgacggcggcgttagaaaggcggcgtcccgacgaacagagtgactcggcctcggctccccttcaaagcgccatcttatcgctgcttccctcaggagcaggcgagctcttccccaggacctgcttcgcggcttcccttcgcccgagaaccaccgggcggaggcggcggcctctctggccctgccgggaacagggcgcaggggaggggagcggcggccgaccggcctgaggcgggcgaacggcctctggcctccaggcgctgcctgctccggctcagaagcctcccggatcccgtcccggcccaactccgggcctccgcctccgccgccgcctccgggagccccgagccgcgtcccgccggcgccgcctcttccgcctgctagccggcgggcctgggcggcgtccgcgccgggcgggtccgctacgtcagcgccgcccgcccgccccgccccggccctcagcctcggcctcggcctcggcctcgcagcggcggcagcggcggcggcggcaggtccctccccagacatggccctgggaggcggcagcacatggcggccgcggcggccatgagcgcgcccccgacccgccccagtcccccctagaggccgccgcccccgcccgccagcccgcccgcgcgccacggccccaccacccccggccccgccgccccccgcccgcacccgcgcccgcgcccccgccgccgccatgggcgtgcagggcttccaggactacatcgagaagcactgcccgagcgccgtggtgccggtggagctgcagaagctggcccggggcagcctggtgggcggcgggcggcagcggcccccgcagaccccgctgcgcctgctggtggacgccgacaactgcctgcaccgcctctacggcggcttctacaccgactgggtcagcggcggccagtggaaccacatgcttggctacctggcggcgctggccaaggcctgcttcggcggcaacatcgagctcttcgtcttcttcaacggcgcgctcgagaaggcccggctgcacgagtgggtcaagcggcagggcaacgagcgccagacggcacagcagatcgtcagccatgtccagaacaagggcaccccgccgccaaaggtctggttcctgccgcccgtctgcatggcccactgcatccgcctggcgctcatccgcttccacgtcaaggtgaggccggggatccgggcgggccggggaccggggccgcgccgcacccctatcccccttcccagggcgcagaatgtcgcccggccgtggcggcgctgggggcagcgagttcccccagcccttgcccgggatagcctggccgggccgggctgcaagatggatggccgcgggtgcaggccgcgcgctgcccaagcccgtctccagctgtccctgttcggggtccgcggccgcgtggggacacttgagggctgggagagagccccggaccagaattcggaggcgacagtgtcatcatccccaatatccttagtttttcccatcctatttgaggcgggcaggctatcactcaccttcaactttgacaaaatactcccttttctaatttagcctgttctttcccagcaacaggttcatcttggaagcaggcaggatacagagtaatagagggggtttcgccagagcccttgggggctgcaaatatcagtgctgctgccgccgcccttgccaatgttgttagcccggtgacagcgagacgtgtctaagggccagtgccctggcctctacttcagaacgcagtgccctgtccgtgttcctcttagtacagggtgtttagagaatctttctatggctttttgtgttagatttcaaagacccgtgcactttgacaggatgggattttgtcagttctgtgacttcacgtccgtgtgaaagaggtctttaaggcagttcggttttgtagatcccatgcgaaaggagtcgctcaaaatcagggggcgaactacgcgggcgtgaactcgcaggatttatttttcgggtgcacagtaagtattcagtgaccttcagcggtgccctgacgggtgggtaatcagagctctatatcaccggcctcctctggccctttggcagagggcttcgcagctggcactgggccagaggagaacttcaggacccagcagtgactgtgaagataagcacatccatgatcctggacttcacgttctgattgcttgcttttttcattggttttcttgaaaacaaattttgggggcctttttgttgtcttagctcttgacactcggtcttccatcttgtcatttgacatttccttgaaactgctggagctgaaagtttgtgaaattctgtcttcgcggttgcccccactgcccgcgaggagatggtggtagttaagcctaaaatgatagcggaagtcccacccacgatccggttgcaattggtgagatggtgtttaagtcgtgggtggaggcggccggcagagtcccgattggcccctgcgcctggcagacacacagctgccattcctcagggaagttcgggtgagaggaagtgcctgccttttaatttctgaatcggagcctggggcgctcagggaagtaaggtgctgccatttgtctgaagcgatccatctccctaatagagcgtaaaagtgttcatagtttagtcttgttcagagatggaaaagactacttaaaagacaggatgagctgcactgacttgcctttggtaaccgcacagctctctacttaactagtcaagcgactttcaagggaacactgtgaatattacttaggattagaatcagtatgtatg

SEQ ID NO: 52475 - DNA, 1289 bp, Homo sapiens
tggtggggtcctgctgctggggtgtctctgtgtctaggccctcatagctgacagctacaggtgctactgctgcttgggggtccgtgtaaggagatctgtgtgaacaccagatcttccattgtttctgtacccacctatgtgtgtattttcacctgaacaccggttctcactgatgtctcatggctaatgcagcaccatgaggttcattctagccttctccttttgcatgattatttgtagtttctttctctgacagtgaggacctggctcatacggcatttgctttaaccctagtgttcctgcaaagtaatttcagaattgttaacacagattctgggaggcatacttacacaagtcgagtgcactgtttcccaggtactcaggcagttccttttccccaaccagtttcagtgaggctatttcatacattttataatacaattttatagatttgtcagtctgcattctatcctggcatcccctgacacccaggttgatttgttttttcatttgcatacattaaagtttattctgtgtgatgtacaattgtatgagtttcgacaaatgctgagtcatcttgttgctaccacccctaggcaatcgactttgaactctttcattcagagttttttgtgattttctttgccagatctgctgtcaccccccccccccttttcccccattgaataactgtggaaccacacttccattattcacccatggaaaaggacatcctctctgttactcttgtggtttttaatgccaggttgcatttcctcagataaaagcacaattaattttaacgagagggaagagttctagaattttagaagttgaaggaatgtagagatctgagattttacattggttgttggggaggttgtcctggcaggttgggtatctggggcagagctggagcgtagactccgatttccctccccccgaccctctttactcaggagacttgggataggaaagatggactgaggccaggttgggagtggtcctacctttgctgcaggtgtgaagctgtgttcatgggtgtggtcctttatcttttgttttaggacacaaattctagcagtcagatgtttgtttaatgctctgtctggttttgggaaggattatggtatggttaatcatttgcaaattagagttgtactgaattattgtttgctttttaatgccaatctaaagtcaagtgttctcagtgaataggtaattctgttatgggtggaggaaggaggtaattatgaaaagccccacatgccacctttgtttttttgtat

SEQ ID NO: 52476 - DNA, 1611 bp, Homo sapiens
gtttccggcttagagggacattaatatatgattaatttgtttgatagctcagtttcaagcaaccaaggggataaaaaaattctgtttgataaagcagacttacagaagaggtttttttaagccctgaggaagcaataaatttgactccaccacgttttaaaagctggatgttacaagtatagtccgtttttcatgccatccttttgactgaaggctcttctctgcagcctgatatgaggtccccgtacccaggtccgccgagcgcctggagaaagcgccccgtgctgccctctagcgggggatggtgggctaacggcgccggaggcggccaggagagctgcggcgatcccgctccagggaggggctggcgctcgcccgggggcgcgtttccttcctgtggaagggcggggcggggccttgcgtggcgcttccccgtccgccaccgcgcaggtcccggtgcgcgcgcagcccgcgaggcggggccgtgtcagtgaggcctactcccagctttttcctcccggaggctgagactgcgccgttgaagccggttctctgtgcggggccggcgccgggcccagcaaagacccgagtgccccgagagagaccgagcagaccctgggagcccgagtcccagcaaggcccgagccgagccagtttctccaactagcagcctgagagcgctcttggtcctggctgttcagaccccagacgaatttaccccttctttttatggggtgggccttcagagtttgaaggaagtgaagctagcctcgctcactccagggcctcttcccaccctgactcgccggttcctgacggtggcccgctgttccggggccacggctgagtccctctgcgccagcctcccggtggcgggccagccagccccttctctgtgctgtgagaagatgggggcgcccggacgctccatctttcaaaaacaccattccactgaggaccctgcctgtgacgggaaccagtctaacccactctggatcgcacgtgcctggcagagggacagcgttgtggaggaacactttccaggcccaccagcttccaccatccattgctaggcagtacctctcccaccgtgacaaccacgcgcttttcttccctctctcaaggggcaggcccacgccacttgagaatagcaaactgacagggagagccctctggctttaagaggggagagggacaggtttctgaacagtacagtctcagcagcaggagcgcgcgcatgtcaagggtccctctctgctccctgacaagcaggtgctccttctttccggtggttctcatctcttagttgcaattgctgtaggtgagagagcagcacagcttgctttaggtcactctcagcagggactgggctggaacccaacccttagctccaagttgggtctgtccacccgctcctgaagctccagtaggtgcaggcgtgggcattaaggagagaggaagggagagggtgctggggctccggcgaccctgtggctggaacaaggaggccaaggacatccctccttgctggagccatgctggccactccttccacaccaccagaattgcagaggaaggcccaagggcgatgctgtcatgggcccaggggtc

SEQ ID NO: 52477 - DNA, 3081 bp, Homo sapiens
ccttgtcatggatgctgctaggagactgagccaggtttcctgtccggagattctggaattccgagcaggggtggcccacatttcccagcacgatgcggattttgctgagggaggatggggagagaaagagggtgagggaggaagggcgggcagggatgtggcccctgcccagcgcggatgccccaaggatgcagcgctggcgaggcagggaagtcctcctctagaacgcgtgcaagtgacccctcagagcgcacctccgcttctcctccccaccgtgggggctcagttccctggacacgggggccagggttcccatactcctcgccccttaggtcacgggcctggggggctcaaatgccagggagctctctcttgacagagctgaccagcccggccccttaggtcacgggcctggggggctcaaatgccagggaacagagctgaccagcccgtgccagcgcactcccggcccgggcttctgtcctcttcctctggggctgagcatcagggaagtccgcgggatcctgcgagggaggcggcagtccccagccgaaaatgaggggaaagaggaagtggtgtcccaaccagaaactcagtggggaacggagggaggcagcgcggccgaggaggaggaacacccccaccgtggtgggggtcagaagaaagttagggccaagtatttgcttgtcggccttctagactaggaaggctctcctgcgggctccactcccgcaccccgcgtctctccttctgccttgcccgggttcccccaacttatcttatcctcggggtcccgcccaccttctccccggggtcccaccccactttcagtctcaaggctcccccagctcaccttcgcgcccgcggacccctgggtctaccttcagccttgggggcccttctcggcctatcttccaccttcgagatccccccacccgccttctcccccggcagggtccccccggccgtcttctcccccggcagggtcccccaacccaccttctcccccgcagggttccccagcccgccttcccggcggcgggagcggcggcccaggccggcgggcggaggcggcgccacccggggcgctgacgtagaggccgctcggcggccgggggtcccttcggtggggccgcggctccccgcccgccgcccccgcgcgtccattcccttttgtgtcccgcgcgcggcccgtcccccgcgcacactagcgccctgagccccgcgggccggcgggcggctcccggcgcggcccctccagccagcgcgcccggcattgtgtggacgcgcctggccgggagcgcgcgcgggggctgtcgtgcgcccccgtccccgtcccctcccggccgcggcgccgcctgcgccccgccgcccccgccgcccccgcgcggcccggcccccggcccggcccggaccgacccgggcagcgcagcggcggggccgagcggcggcgcggcgcggcaacatggcgacggtgcccgtgtactgcgtctgccggctcccctacgacgttacccgcttcatgatcgagtgcgacgcctgcaaggactggttccacggcaggtgagcgcgcggcggctgctcggctcggcccggcccggcccggccaccttgcccgaccgagccccgcgcccccggctgcgcgcccgcaggcccggctcggggacgggccgccgccgccgccgccgcattccgggcgccccggtcggggctgggccgtgccgggccgcgcgcccttttgtgcccagggcgggggcgccaagcacggggcccgcgctgggcgcccctggccgccgcgcacaaagcgaggcccgcgggccgggaggtgggctcggggctcggggcgcggggaagttggggctccaggcccgggccgggccgcctgtcagctgggtcgcggcggccgcagaggccgggcatccggagggaggccgaggcccggagcccccgccgcctcccccctgcgaagttgcaggaactttccccgcgcgggctcggggttggccgggccgggagaagcgggcgcgcagcccggcgcgggtcccgggagaggcgcgagtggcgggctccgactccggcagggctggggagtccgtgggggctccggcgaggtggcagccggcgcgcccaccctccgccgtggccggcgagctcccttggaccttgtccccgagggcaggacccctcccggacccccgcggagcagctagacccggcaggcctgcaggtccgcgggcaggagtgcggtgacagaatagtgtctgtgagttgggtaaggggggtttgttgtggctttgccacctcctccctggccttcagttttccccgtttctctcctctccgttcccggcaggaacgccggttttgacatgatcttatgctccctaaggaagatggggaggggggaaggaggtaacgcttggagacactgaaaacccccgccctcttggcccttgccgatggccatgacctggccccatgcctagggcaggtcccttcccaccaagaagtaaatggaggaggaggaagaggaggtgacagtgttgcccaaactgctccaacaggttctcttgcatctgactttgcctgtgggatgtgtttggacccggggctggccagggctgtatgccctctggggctccagtcccaaaccaccggcagcaagcagccgggggaaagagaggggtgtgtggtggtgggtggtccgggattctccttccagagaggagatcctcctgcaggttctaagactgggtcttcaagactggtcagtggtgcttaagagtgggctgtggccccaagtccagtcctgccagtttacatgtggggacctgggtggctgggatgtgacagggcctgctatgtctgtcagccccagtcctgagtcctacctccctgctgttagaagggcctgggactctgtggggtggggatgcccacggaaatctgggctgccttcctgggtatgcccagggctgtggaagccccttagagcaagggagactgagtgtgaacaccgggctctgcccagaacagggctgacatgcacaccctcaactggcagccgttgagaagttcatg

SEQ ID NO: 52478 - DNA, 1484 bp, Homo sapiens
gatgtgatggctggagctccaactaccattttggcccataaggcaaattggtggacacaagccaggtgtagggatgacagagccgaacgaccttaggtaccttcctcccactttcttttatgggagaggggaaaagcccctcgtgggtttaggatactggaatctgggggttcctgttacacgcaggcaaaccccgtcagccactctgtaaactgctgggccttgctctcacccagattctgctcctcggatttctctgaaccacctggggccgcgacgaaccacctggggccgcgacgccgtaagagttgggacgataggaccagtagaagcaggaggaacaacacaggaagcgcgcccggagaggcggccagtcgctgggttccgtccgcggtgctccagggctctcctggctcttcctccattcactcttctcgaccctgtggccggggagcgcttgcagccagctccgccgccgtccttcttggctcgcgccgtcccctagccgtcctcacgccgtccccttacttagggtcccctttccgcacccgcgccatcccctcagcgtccctcacggttccctcaccgcccgcgcccgttcgaaaatgcccagagccaccgctctcgtcacggtccgcttcaggcctccattggccagcacacgtcacgtgcggcgtgtggcggctgacattggcgggcgggcgcgctgagggcagcgccggggacgcggcctcagcaggggcgccccgccacggggagcagcccaggcgctcgccccaggacgttgtccggcgggctgggctgggacccctctgcctccagggcgcgtcgggagcagcagggatcggtgccgcgccgtgagggtgcgcagaggctgccctcgggcccgctacccacagaccctccgcggggcagcgtctccgggccggccgcgccctggtccgccgaccgcagacgacttgtgacacggacggcgcgtcctgctgaccccagccggcgccgagggcttggaatctcgagcgggaaaaggttcggaattcgcagctagtttagccgcacactcagtatggttctttcagatttgtttttttaaacgtctagatattaagtgatgcgtggtggaggcaaatcactgagggtcgtgagcttgaaactaaagtttaaaggtcttggatttgagggtctcacattcagatgtctgcagggaccaggctgggagatgctgggagaacccccacgttctggggtggcgagtgcctctcaactgccgctggaagcgatctcagatttttcatgagaagttgaatatcgggatttttatgtgaaatctcttgatttgtaaatgttggcaatcaattaaaaaaaaaagaagaaacactggaagccaagcaaaagacatttataagctggttctagtctgccagtttgtgacctctaatttaggtctaattctgccactaaattagtcacgtgaccttgaccaa

SEQ ID NO: 52479 - DNA, 2458 bp, Homo sapiens
ctgaggtgggaggatctctagagtccggatgtcgaggctacagtgagccgtgacccacgccactgcactccagccctggagaaagagcgagagaccgtgtctcgaaaaaacaaacaacaaaaaaaccctcagaccccaaaacgtcaaggaataaaagtaaaaggttgggcggacacaactcctccatttgacagatgagcaaactgaggcacagaactccaggaggcctggccaaggcctcctggagggaacagggtcagttgacggaaaagagccagaggctgcacgctggacagcgttcggaccttccgggtcgcgcacgtgtaaattgcccccaggagcctgagggagcaaagcagccgccccgccccgcgggcagcgcgttcagcggccacgtgacacagccagcccatcacgcgcaaagggcagggcctggaggacaccacccccgccactctctcagccctccactaggaaagaaggagatggtattggtgggcgggccagacccgcctcccccacggtggccaccccgcgcgaggcgggcccagccgccgccctccagtgaggggacggacgagctcagctaggccaaggcgaaagagcgacgcgcacttcaatcagacggcttcaccaatgggcttgcgcgctttccgcggcgcccgcccctgcatcggcctcccggcgaccgcgctgctttccctcaggccgccgcggcggcgcccgcccgcgcctccatccgggtcctggcgcggtgctctcccggcagcgacgggcgcgagggccggggcattcccacggccgcgacggccctctccgcgagcgcgaggtgggtatggcggacgcggcagcgagcgcgggtccgtcgccattttatttcgcggagactcgcggcagcgggtgggcagaatgggagagccgtgcgccggcccgcgcctgtccggctaacgcgggctgggactggtggggcggcctgccccctccagcgggcgggtggccccggggggccggcgggctgctagcggaagtcgcgggcgctcggggcacgggggaggggtgccgcgtggccgccgcggggccggctccaaccccctccgcttcccgcccagctcctcaccgacagggcgggggagggggggtcattcttcacattccttaccccgcccttccccccgcttcaatcaaacttggggcgggcggaaggcccgccttccggccggcgcctgttggccggcgccgcctctgactgtggcgtgactggttgtaggcgccgccaggtgcctctgacgtcacttccgctatcaagtttgtgggccggggagaccttggccttgggggttgggatgaaggagggaaggtaggaagtgcgaggggcggggggacagggcgggaaggcgcgggcggggagggcgggagagtcgtggctggctgcatgcccctgctccccgcggccaagtgcagcctcccttcctgaagcagctgctgcggctggaggtccgctgcggcagccgtccttggcgagggggaggggaacgcgggagcgggaggaaatcgtatcccgggggacggggcttggagatttgcgactcggtgtcaccggaaacagcgctggccttttgagtcgacgctgcaaactcttggaaccgagtgcctctcagaaggcttgctaataaacttcccgggcgggctctagtgtgaggaatgtggtaacctgtatgtccttggccagtaatgcccttcggtctttcaactttttacagtagattctgtgtcagaggtaatggtatgtattcttcaacttaccggtttttaaaaaattgactaacgagagggcgggcagacaggaaaaaggcagggaagacagtgaatgttaaaattttgaggtaaatcaggagactggttgagttttgctttttaacttcattgataatactgctttcttggcatacagttcctaaagttaaagcatcatgtggcattcctttgcatttatttctgttggcctgaagtataagaacattgaatgtcaaattccaaatttatgtgtagtttaggaaataattgtttatatccagaattcttttggtgtttggcggggtctggttttatttactgtatattcgggaagtatgtgtagttagggaagtaaaaacttggaagttactttgggttttgtgagaatgtttgattcattatacatatttgttaaaagtttactttgaaacttcaactttgagaatagacaaatttcttgacgtcctgtaaattcagtggtattatatagcattttaaaatttatcacttaggtgcaattacagtgtgaggggaaaagttaacttttttgaatagttacattgcagtgacagcaagagagtatttttatgtgtagacaggctgtgggttcccctcacttaaattgaagctctgttgaacttgagacacttaagaatcttgcaag

SEQ ID NO: 52480 - DNA, 981 bp, Homo sapiens
gaccgtataaaaagttaaagaagacttactgctcacctgaccacccttctcatagacccgaaagttagattttactttctgatttttcacaatttctcctggatgctgcggtcccgcccctcgcagcattctggatgttgtagtccctcgctccagggcatccacggtagggtagttgcgcgccccgtggcagtctgggtagtgtagttccgtgcccaggggcagtccggctcgcgtacttccgcgttccggcatcgtcgcctggtgcgtggtgagtgtcctttcacagttctggtgagctagcccggaggtggtccccgctttcgcgggccttccactggaaggaaggtcgggaaagctggcatgggcagtccatgtcgtggccacatgttccttggtgttttgagtttcggctgtggggtctgggcgtgcgtggtccaccccggagagaggtcttggcggaggtcctctggtggggagggggcgttggcgttgtcgcgtgcttctggcgggactttgggcccagtatgttgacctggaggggccagtgcaggcctgggaccgacttcccgagctacttcgcaggtgcgtccccggtacttcgggggccgctgagtgggctctgcctggggtacccagacagcatcctgccactagtatcccgccatcccctccccaccatcgcgcctcggaggtctctgggccagcaaatgtgcctttggaggacatgatatcctcggttggagcaaacttccccattagtgggaggcacgcggcttgggcatcagtcgggttgtttatttgtttatttattaaattttatttatttatttatttatttttgaaacagagtctctctctgtcgcccaggctggagtgcagtggcgcaatctcggttcactgcaatctccgcgccccaccccagccgccgggttcaagccatgctcccgcgtcagcctcccgagcagctgggattacagg

SEQ ID NO: 52481 - DNA, 1296 bp, Homo sapiens
cccaacagctgcaggcaatgtaaccaatacccccccaaaccatcccaactcctcggccgcaggcagtgttagcacccgatagtgcccacctgacgcagccacgggtattgctgcactagacagcgccccaaacccgccccaccctcaccccgccatgggcagtgcagctcctgatagcgcacccccagtcacaggcagtgcagcaccggaccacgcccttaaaccaccccccactgccagcattgtagccccagataactccacccaacccgcccctgccacggacagtgcagcagaagacaacgcccctaagccatccaccgccactggcagtacacgttagtgtacacaacctgcctctcccgaccacccctgccacctcgggcagtgtagccccccattccaccaccagcaatgcaaccccagagagtgcccccaaacagtccaatgccacaggcagtgtagcctttggcagtgagcccctatagtacacccaacccttacccccagaagagggcagtgcagccctggataactcacctaccctaccacatttctaccactgtggccgagctgcggtctctgatttcaccaccaaccgcagcgaggcgagccgcggaggcgcaagctccggctccagcctccagcacgcggcggtgcctcttctttctgtcttccagcccggcaggagaagctctcgctgctagcctccctcctaccgctccgtcaccaccaccaccaacagggagggagtgccccaggctccaggctccaagctccaggctccagggggcgaaaagtgacggagccttccagttctttaagccgggtacgtagtagctccccacacccacacataagtgccagaaatgacgcgccgctgcctcagcatgctttatatactgaggttaggagaccctggactacatgttctgattggatgagagaaaaacctctaggcctactctgattggactttattttcatgctgtgattggttgtcttaagacttgctctcatccaatcagaacatgcagtctaggaaccggcatgcgcataacctcaggatataaataatgctgaagcagagttacgttttttttgttgttgttttttttgtttttgtttttttaggtttccgtgtgtttctattgagctgctcagtgcccggcttagaagaccaggaaaaggagtcacaggtcgtatgctggaggcttgagccgcggcaccgtggcgcggctcgcctcgctgcggttggtggtggcggtggacattgcagcgcggctggaggggtag

SEQ ID NO: 52482 - DNA, 1050 bp, Homo sapiens
ttttcaaaatttttgaccacaagtataccggaatattcttttatcgttggtagaaaaataaataaataaatgtctttcaaaaaactatatagaaaagaaagccatctcacaacagttgctgggtgcagagcgcagggcccagccagactgtccatggtgcaaaggaggaaagtctgtgtacagagacaaaacataaaagctcccagaaagttgaagccgctggaaacccgagtacagctgtagcagtgttttcagcagaaaccgtcagcctggctttgcagcaagcgcaaacaaagaggaagcacttagcacctccctggcgggaggctcagccccgtcaggcaccgcagacagaagggctggaatcaaatcccagcagccctgcattgcgcttccaaacattcaggactgaggagggcaaaagactatcaaacacacagaagcttccctacagggatgctcccctgcaatctggaaacaagaagggattgaatgttttctctgcttccaccaactcaaaggtaacaagagaaggcaccagaagaatgggaagcagtcagggcccggcaaatcacagtcagcaaacatcagtggtgcccgaaattccatcctgggctcaggtggaactttgctctggttctgccactaactcccccaccccacccctacccaggtcaccacatttggcgactttaactagtgctattaccctacccttgtttatttgttaagtgcccatgcttccaaggaggtgaaagtccacttccctgacagcctgggacaaaggcagcctgtgttgagttagccttcctgccacacacagacccggcctcacctccagcagcctatctcgcacagaaggttcctgttccttgtctgttcctggggttcagtttgccagcaaaaagcactttacacatagttcactaatgtcataggaggacatctctaaaagttaaaaaagttggccaggcatggtggctcatgcctgtaatcccagcactttgggaggctgaggcgggcagatcacctgaggttaggagttcgcga

SEQ ID NO: 52483 - DNA, 727 bp, Homo sapiens
gaaatccttggatattttaattaaattttagcattgttttccaagtttacaaatggtttctaaaacagaatgaaccatttcacagccatggactttgtgacactgaacatgcagatttgtgatgattgggggaggctgccttccacagcatctctaaaacactgaaggacacaaggattggagccaggggctgacagaactagagccctccagggctgcctggatctgctgacttaggaccatctcctcccgaagtcactgtgactgagtaacacgattgcagcagcaacacttcacacagcacacagaagaaccagactcgggctcggaacacgcagctcaaccaaaagggagggagattattacttaatccttatcactaaagtcaaaggtaagactggcttgttactgcttgattccatggtaatcaaccatttgcccagccaggaacatccaaaggttcagaaatacattgaagaggtgctagtgagagctgctttcaaaggtcacaaatacctgcctctgcttgcattcaccggggcctaaactggtaaacaggatggaacgtggctgtctgcgcttcttttatgcaaacaaacttgcaatttcactccttggtcatgtggagaagagaattcaagaaacataaaataaatctggtaaagtttctaaaagcttaatgccaaaaactgcaaattggaagataagcctaaacgtgtattagctg

SEQ ID NO: 52484 - DNA, 2450 bp, Homo sapiens
ctcacaagaaggggtcctttgagtctccactccacttgaccccttgctactcacaatgtgatgagtagacaaacagtatctgatgggcagcacccaccacaggagaacttcttagaaatgcagaatctcaggacctgtcccagagctatggaaggagggcacacatcttaccaagatccccaaatgattcctgtgcccagtgacgttcgagatgcactccatagcgcattcagaaccattctacaaaccacttttgagctttccactaattgggcagaggctgcacacaccatcattgcaaatcgataggggttttgaagccctgggtgtttcctgtttctggcacagcatggcaactgtcccagcaaggggcagcccacgggagctcctttgcacacaagccctgctgctcctaaaggctctggacacacaggagacctcccagcctgcttgcggggggggcgggggggacactcgctcctaacaggtcttgtttcaggtcagagataactggattagaaacctgacttgggtccctaattgcagaaagagtgaaggaggacaaagaagaaatggggaaggaaggcacctgagctagcactttcctgtctgaggctagggcgggtatgacgggcaggccaggtgcccacacttggccggctgagaggggtacgaggcaggctgctcagggcagagaagaggaatgcaagatggaatcaggtgtacacctgtgagacggacccccaggtgggcccctccaaggtcaagggaggagatgaggacttgagtgaggctgagccagcttctggagagaggggctaccagacagagagcgagagaggcgctcagacatcagacggacagacagaggctgacggcaggaggctcagagggcccaacgtcagcccgccgggcaggctccccaggcagacagacaggacggggcccaccgcccaaggcccgactcacaggtgcgcgatgcccgccttgcgcaccgccgaagagatggctttgactgctgtgcagagcgagttgagcagctgggtcaactcgcccgtgccgcgggccttcctgccctcctccatgacgaagcgggtcagggtgttgacgtccgtgtcgaagggcgcctggtcagccatgcttgaaccgggtagagcgcggggctgcaggtgcaagcggcaggtgcggggctgcaggtgcgggcggcaagagagggcagtaggcactggccgcaggtgcggagctgcaggtgcgggcggcaggtgcgggccgcgggacctggcgggaggactgacagaccgactgccgccccgagtgtccgcagcgctcgtggtgcaactgggccaggccaggcgccggcgggtgaatcgcggaaacctttagacgcgggtcggccccccgcccccgggaacactcttgcgccccgcctaccccgcggaccagaccgcggctccgcctgcttggatcttcagacaaggtcggggatcctccctgcggtctcccaacccccgcccccacgcgccctgccgccccctagtcttcctgggctgtcgccccccacacacacccctccgtgccctccacccgcactgtggagcgggactcgggccatcggactctgccagagagaaagctatgactgtttcctccaaaatcataaaacggaagttcagaaaggttaagtaacttgctcaatgccaccagctaggcagcgaaacccgcagccagtccacatggcctggctttagctctgcagctcctgccccgtgtggctgcctgcccccgccccctgcccaagccccgtccactctgcctggcctgtcacctggcccttctgtccccgctaggagacacagagtccccgtttctcacccatctgagggcccacgtctgaatccttaatccaggcctcttctcaagattcctagaattcgagagctattgagtatttgaatttccaagatgtgagtctcgcccggaagtttcccggaaaacggtcgctgacacagagtcctcggctaccacacaaaggccagagggctccaccgcccgcatcctgaccccctggtagccacaatgctgcaattgatgtgctgattcacgaaacaacacctattgagcacctgctgtgctgaacactgtcctaccttccaggggtggagcctgatccaaacagacaaaactcctgcccttttcgagtgtacgttttcacagagaaacagtaaaaataaatatataaacaatagattagtttgttacataagccataagtaccatagagagaaacgaaatagaaaaggaagacacggaatgtggaggggagaagagggtgagcagaggcctcagtaaaagcttctctgagaaagggatatgtgagcaaagaggtgaaggatgcaacgcgccggtggagatgggaaggagagcggtttcctcaccgggagagccagtgc

SEQ ID NO: 52485 - DNA, 2299 bp, Homo sapiens
tactgacaaatgctggtaatgggactgcatgagagcagtcatactctgaggaatccaccggcttttaagtgtggttccattacaggattatgtggcgccacgaagtccaatacccaggaacagaggatggggaatgtgacccacagagctcaaacaaaatgacaaaggagaccacttgggttctagggcagcagatcacatttgcttcttccaaagaaccagaaagctttttaaaaagcaaatggaataaagatgtggatgaaaagttttctccctgggataagtggatggggaggaagaaaatgaaaaacaggtaaattgctgaagaaaaggcagtatagtgaaaaaatcaacatttaagaattaattatatgccacttttcaagaaataagcataagacaccagaaaaatacgaatttagtgaaggtcgaacaaacacttttttcccagtggctatgaaagagagaagcaagcatctttaaacgctggcaattatgcagatggcagaaagaataaagactgaatttcattcccacataagggagagtataagggagagtattagggagacaaaaagcaacctgaagcgtttacagttttgagtgagcggacagcccagcaagcatttagaactcattatctgagctgtgaaaaatgaccctcagaaatcactgaaattaatcaagaagttaaacatttattaaaaacaagcttagagattataggagaaaggtcgagtccagagactccaacaaagctgaatcagctgatttctgggctgtgaaatgtgtggtgctcaatttagggcacaaggttcagatgcaggtaaggcctctggagccccgtcgggccggacctgagcctgcatatggggaaatcgctgttgttgtcagccgctcttgcaaaaagctgatgatgtggctgttgaacaacctgggacccttgaccctgccatgacgtttgtaccaatgtgggtgtctgggtgacattcaaaattaaataaatcaaacttaaattaccaagttctagactccaatgtccagggaaatgccacattttgctgtgggcgacagaattttgccccctccacgctttttgtcataagggtcaaataaacaggatcattgaacagacagagtgggctctgatgtgcttctcagctggacactgaacacgggcagtactgtagtgatgtccccaggagcgattgtgcaggagtgaggtggggcagacggcttttcctgctggctgctgagttggtgccatatacatctctgctgcccgaggcaggagtaacattgagccaataccatatcctgttgaattttgccaaaatgagaacgcacagaatcctcagatggtcaagtgggagaaacaaaaagaaaaatgttctgtcctcctaccttggtctaattatttactttctttcttttttttttttttttttttttttttgagacggagtctcagtctgtcgcccaggctggagtacagtggtgtgatctcagctcactgcaagctccgcctcccgggtccacgccattctcctgcctcagcctcccgagtagctgggactacaggcaaccgccaccacgcctggctaatttttggtatttttagtagagacggcgtttcaccgtgtcagccaggatggtctcgatctcctgacctcgtgatccgcccgcctcggccttccaaagtgctgggattacaggcatgagccaccgcgcccggcgatgtttagagtttttttaaaatcaggttacaaaatggtgtaagccaaattaaaatgtacagagaaaccaaaagaggacggcaacatgcctcagtgaaatagtgactgcatctgagtagctgttttttctgtttcttcagactttgctgcacttccccaatcctccataatagcaacagcagaagcacagcctgtggggctagccttgctttaagcattagctgctgttattcccagcgttgttactcgtatcatcaaaagttgataaactgaaagctgagaaaaagaccaaaggttagagggaaacatttagaaatgtgttagagacttgtttttaaagaaacttttaattttgaacgaattttaggtctacactgcaaagataatttagagagacccttccccccgtcccggtttccccagttgtgaacatcttacatcaccgtagtacatgtgtcaaaactaggagattacgactggtacatgacttaactaaaccccagacttcgtttgaaatttacttgtttggctgggcgtagtggctcacacctataatcccagca

SEQ ID NO: 52486 - DNA, 1229 bp, Homo sapiens
ttttctgactcgccacccagaggtaatcattaccctgacttttatggcaataatatccttgcttttcttggtagtgttactgtccagctataatctcctcagtaaagtagttgtgcctgtttttgaactttatgtacatgaacgcatgctgtatattcttttgttcaaggttatctggttgttgtgtggtgtgtgtgtctatggctcattcattttcattgctgtgtggtactcgactgagatgctctttgatattttctcctgctccctgcccttccctaatcaaatagaccttctgcctccatgtcccagggatggcaatataaccacagaaaatcaaattaaaattatttattattatttcaaaagcccacatcctcacggatttaaacgagatttatagcaggatttctcaacctccaccctattgacgttagacctaataattcatttgttgtggggatgtcctgttcagtgcaggatgtttagcagcttccctgggctctaccactaggtgccagtagcatccacggccctccagttgtgagaaccaaaatgtctccagatattattgccaaacatccccagggaggcaaagtcaccccagatgagagccactgtgagaagaaggaaaggaaaaaatcagttggggaaaatgcagactgcagaagcaacctgcctgaaaagttacagcaacaggcaaaaatgaaacaaccttggggaaaaaaaaaaacaaaaaacctcaggctgcacctgcgcacagataagcaacttagtgagctcccaggaaaaaagtttcttcccttttttcaggcatatatacggtggaaacttgcacagatggggagggggcttacctaaaacaaacccacagttaatacaaactagaaaagcagaattcgtgatggcctagagacatacccacggctgcgtaacagaaggggaattgcacagacagctttactgataagagaagtgactcaaactgctagagataagagtttctgataaaagcttttgaactcagctgtaaccccgcaatccactcggaatcctctctcctctgcagagagcgttttttctgtcactttttttttctttttccttttttttttttttttttttttgagatggagtctctctctgtcgcccaggctagggtgcagtgccgcagtctcggctcactgcaagctccgccccccgggctcacgccattctcccgcgtcagc

SEQ ID NO: 52487 - DNA, 899 bp, Homo sapiens
tcaagtccttactcggttcattattgtgttaccaacctagagcagaaggctctgggggagattccaccgacaatggaggctccactccccagggcatagggcggaggtagagttggtggctaaccttctgttctgagggcaaagggagttcggatccttggtcctggaggaagagcagaggaaagaaacatggccctggacctccagggaacacatagtgagctcagccccacccccagaaccacacctatggacgctggatgctgaaccaatggataaagtgaagggaattgtgtgtgggcctcaagccaaagcaggacaggtggctcatccagaggacctgggccaacattccattctgcatcagtgcccaaacaaagatgcctctcaccagggctccagcttctctgtgagttaaacgttaactggggtttgagctcctgtatccaggaatgcagtaaacacaaagttctcagccagggtctgataccctcctgagggcatctgaaatgtgtgaaggtgtttctggcagacccgttggtcctcggggaaaagcatttgccagcaatggcacatgctctgcagttcatggaatagacccgtgcaatgaagacctgtcctgaccaaatgccagcagctcccccttgagaagggctgctagggagccatgctggtgttcctgggctgctggaatgcagaggggagggacagcctcagtatcttgaattccagtgagcctcactttcctcatttaatctcaaggatgcttgtaagaatcaagagataattacatttgagtcttttgtcgactggcaaatgttataaacatatcaatcattgtaatgtgtcctccagtggctcctaaatgtgatgtctttttaaaaaaaaataatgaggcc

SEQ ID NO: 52488 - DNA, 1413 bp, Homo sapiens
aaattttatttgaaacagggtcttgctctgtggctcagggtggagtgtagtggcacgttcatagctcattgcagcctcgaactcctggacctaagcaatcctcctgcctcagcctccatagtagctggaccacaggtgcacgccaccacactcggctaattttttaatttttttgtagagacggggcctccccaggttgcccaggctggtgatttttttcttaagcttcataaagattttgcaattaggaatactagggtaccagggcaactctacaagccctagccagccaagctgctcgcgccctcctatgaccgcggcagctccgcgcctgcgcagatctcccccgggcggtctcgccctctcatcctaagggggcgggcctagcggaaggcgggtcaggcagaatgcggccccgggcgcgtgtggatgacgtcacccggcgcgtgccggggtagcccgtagtaaccccgagtctgcggaagtggtgacccgtgggacgcggctgagacaggtaacctgttcgctccctgttgggtccctgccttcctctcctccggcgtcgggatggcggcggggacagcatcattccgttctgaaggcgacggggaaccctcccttaccctcacttttgctcgaccagcgaggacccgcatcccctcctcagttctcccagactcctggggctgaaacccatcctggggactgggcggagcggtcacatcttaccacctcagctgtagaggtggccacgggctctggctgtcttctccccggcggcacagacctttctcagcctctgggtgcctcctccttcgtctcttgcctccaggccctcggtcacctgccggtctcggcttctagccccacagggctcatctccagtcttaagtaggcagaacagtttcgattcgattcatttccacttgcagtgaaacccatccgcctcttcttcccccggaggatctttactgagagcaccacattttgagttttggggtccctatagaacattcatactgttagtctggagttttgttcatgaacgcatgcatgggcggggagggggtggcacagtaatgtgattatgattatctattgtgataataaaatatccacttaggatccaatccactgttgagatgcatggaacagttaatagcattgcataaaatgccccttgtacctgatttctttttggttttcgtgcaatgatgacaattacccttgcaaaggtagccctcaaaataagtaacataacccgctagggatgtttagatcgcaaaaaaacaacaataaggttcatatggttgataaagaaataatatgggttattacaaaaccagacagaatagatgctgagtatatgggacgagaagcagaattctgaaatccttgatctcattgattgtt

SEQ ID NO: 52489 - DNA, 783 bp, Homo sapiens
atcggaggtggtggaaagttagtggtatgagatgccacagagagtcaaggaaaataaggcctgaggttaaactagacttggcaagaagtaagtcattgtgaatgtttgaaagtaaacttgtagtgaagtggtgtgatcagatgccagatttcaacagtttaagaaatatgcagtcacaaaatagaaaaggttataaccttctggtcagaaaagtttgatagataaacaaaagcaacaactagagtgttagctattgagcccagcaagggaaagcacattttgttattgttttttccaataggaaatcatgagcaactcaaaaggcttctaccacctggaagatgggaaaatcaatgagggaggagggagatggcagtgttccatggctgggaatggagtggaggacagaggccatgggagtggacccgggggtgaggacaggggttggattgaacccaggtaactacccacacagcagataaggtcattaggaggggaaacgtggatgggaatctgcaaatctcagttgactcaaacagggaaaaatgcaagctggcatacctgggagttagtcttgatgctgcggtagatgtggtcagagttaagcgagcagggacttgggagtcccagtgagagcattaatgaagtgctttgacattgtgaccatggggtccagcgtgggctactcagcttcttcctctagtccacactcggtaaaaatgaaggttactgaataacaaggcaatggtggggagggaggaatggagtggggttacttaatcc

SEQ ID NO: 52490 - DNA, 626 bp, Homo sapiens
gaggacagagtaataaaatagatgcttattgagatttacttacgttcacaccacttacaccttatatgatatcacagaacaatctttgccagttcaagctgagggagaattaagctagacaagataaaagaactctatgcttaatactgcaattcctcccacagacagggtttatcagaggacaatcaggaaacagtactaataaagctgtttgccagaaccaaaatggctgttctgaggatggaataatgtctacaaatgtatctgcactccttagagaaaggggatgtggatacaagatgatgctatttcctttctaagtcatgttttctcgattggcagattggtctcataggacctctactctgttgtgcagaatgccctttaaaacgatgagctatctttgaaaacatgactggcaaagcgcgacccagcaagtcacagtttccatcacagtgacacataggcctgattagcacatttcccgggcaccagctgatttttccacagaagcaaggcacctgggagcagataacagcaacagaaatgacagcagcccttgggcagggaacagaaatcagaagacagatctctgggtccttgcttcataagggaaatcatttctc

SEQ ID NO: 52491 - DNA, 1400 bp, Homo sapiens
tttttaagggtaaacgtattaatcttttcccattagaaagatgccggtgagccagtaatttctaaatctgtgtcagttaattcttttgttttgtgatttgttgttgactagttcttgcttaccctcctggcactgcgcttactgtacacgacatatgtgaaagtcatcatggtttctttcagacattgatgattctggcaggcatgtatataccagttctcattgctgtggatttttgtcttggacttgacattcatgaatgttccatgtgagtaaagcactcaagtttacctgtgaccacctggagcagtatgatttggtgtccagttagctgatccagcttaaggggaactgggtcacctgcattgaaggtcagagtggccggtgagacttgaataacaagcctggtggggcatattcctttaggtatcccgttagccaacaaggaaaacctatagaggcgcttgtgttcagcagatggcgctcttttacctagttcacaagaatgatcttgaaggtcattctctcttgcctctcctgtgcctgaggcggtaccatgttgcaggcaaggaaaaccgaagccttgctgggtagcatcagtgcttgcaaagtggtggcctgacctggcacattgccctggttaggcaatgctggtgcccagggcgtcttactgtctcgtttgttctggtgccagttacaacccttgagcaactgcggagaagaactaacaagagacagtcacgctatgggtattcacgagggtggcactcacttagaaaactggaaggtgtagacgcggcatctgcaaagtcctgacagaaagctagtttgctgaaagacccaagcagtggagaaggaggccaggaggggaagagcagccaaaatggggagctctctctccttttcgtgaatgtattatatttattgtacagatgtatgtatattatatatttaaaatatatgatatatacattctctatagtatgtctgtatacacttataagtgtacatgtttctgaatatacatattcctgtaaacattgttaggcatctttaatttgtgatacaaagatgttccaaagtaatcataacatatataatagtttggataggaattgctgaaataaggaattgtggttagagaaagaaacaattttgaggtagcaaagtagcaggggctactgaaggattgaggaaagaaagattatatgttaaataaaagcacgtatcaatttgatatttccgaatgcttcatgctgtttgtctaacctatagtggagaggttgaaaaagtaaaatggatggttttcataggaagaatttaagtgcctgttttaatttgcagtgaaaacaataactctttaatatgagaagttccatgagatgcttaacttggcagag

SEQ ID NO: 52492 - DNA, 454 bp, Homo sapiens
ccttagatatcttgctgagatctgacttagaatctaagaggaagaccagtgcttgccaacctgtcctccccagaatccggaagtcttcccaaggccatagaagtgcatcacactgtctcgctccaagggactcaaaccactttctctttataccccctgcctgaggggcacctctgtaagggaatcttattacttacctttggcacacatcctgccctgggatttcccagttagaatgccaagtagaggaggctgagaaatgtgtggtatgagaatgactggaccatgtttcctatcactgggaggagcctggtgtcagagaatgtaggagaagcagagtaagggagagaaatggcattcactctgtgcccctgcccttcctatgggtctctgagccttcaaataaggactttatttggtcaaagctggttgagttgagtttctgttgtttaca

SEQ ID NO: 52493 - DNA, 1061 bp, Homo sapiens
atcttgactttacagatgaggaaagtgaggcttgggtcataggatttgaaaatcttggtctttgagcctcaaaccctttacattttcgtccactgaagccaccagatagtttcttagaacattctaaaatgtttgttgtcttgggtgagtgtatgggaagaaattcataagagaatgttccatatttggtttcttctctaacttatcatgaggacatagactgtcttttcttcctacacatttccttacactgatagtgtactaagatgacccttttaaaatttatatgggaactgtttagaggctcctaccgcatgttttcagggctggaactgtggagtgatcttttcctgacctgactggtctttgtccaaataggacattgagcaagccagaaaccaggccccagcagaaaaaagcaaatagagataaatagttatcctcgtcccagtgggatccctaggctttcaagatcaaaggcctactttgtgtgtgcctgttcataagccagagagaggggtacagaagtaggcaggctgtagtgtagactctggtgcccaggctgtttaactctcagattctctagtgatattatttaaaaagattcccatttataaaaatcagaaatataacttgcatttcccggacacagaataagaacaagggagagaaccagatgagaacagagaaaaaaagaagaggagaagtaatggcaaagaaaggaccagaggcagaaggcgagggaagcagggaggaggagcagtggttgtggtcagcacggggaatatttttataggaggcgtggaggagaatgctgcgatagatgtttatttctcccaccctgtgggctggcttcattttcttgatagtgtcctctgacgcacagaagtctttatatttgatgaagcccaatttatctactttgttctttagtttcttgtgcttttggtgtcatatttaagaattcattgcctattccaaagtcacaaagatttctccctgtgttttctgctaagagtgatttatttattatgattttagctcttatatttaggtctttg

SEQ ID NO: 52494 - DNA, 786 bp, Homo sapiens
cttgtatcattggccaccttttaaggataccagggaattaactcattattttgaaaactggtaaataaagagactcaggcatttattttgtcttcctgtatacagcatctcagcataaatcgttgagaaggggagtttgtctttatagaatgtagctaataaattaagtaatggtagaatgagagtattattttttgcaactcgtaaatcattaatggatctaggcaatgatcattttgtgtttcctaatgggagtacataacaaccctgttgaaatactcttgcccaggttgcccaagttacaccaacctgaatctgatcaagccccgagatctgattaccagcttacaggaagtaaagaggacagagaaacaaattaaatgacactaccggaatacagaggatagaaatatctgataggcaatcaggaatatctgcttaccaatttacaggaagtacagaggaacaaattaaatgataccacaggagtacagtgagcaaaatccaggcaatcttaggctctgtaagataaacaacgtggtttcttcaaaagatacattgcaaggaaaagagagagagattgggagaactgaaaagaaatttagagaaataccaaccaattacagcgtgtgggccttatttagatcccaatttggatgaaccaaatataaacaaacatttatgagcttatcaagaagttgaacactgactggatagttagtgatattaaggaattattatattatttaaggtacaagaatggtattgtggttttgtttaaaaaag

SEQ ID NO: 52495 - DNA, 1137 bp, Homo sapiens
tgacgttaacgatgagtttaatgtgcagagaaagcagaatagggtattcttcatcagacagatattgtataatatccatggtacacgcatggagaagcagttactctcataggtacatgctagcagagcttttacttcacacttgggcagaaccagtgatgggcagattatcaatcacctcttagcacatgcgcagcacttatgtgaaagggaattgcctgatgagtttttgttcaatgaaaacccacatcgtaagagaagactgctttgtttgatttggttaatgattatattgtgagtcatgaaggagaatgaaaaaggtaagttgggtcagtggcaaccagtaagaaaggacaaaaaggacattgttacatgactcagaagttgcattagaatatggtggacggcagtattttattttcagagagcaggtggtggtctgtactgtgcctgctgacactgtagttgaaaggaattgtgaaaatgtgacaatttcttataaaaatgaagaaaatgggcagcaagtcatgtactggaggcaaaggtgcctcatgaaagattttggaatgtggtatgaattaaaaacatgacactgaacagtgtctctaaaggccatttctattatttaggtggctttctcaaatgatgtgctattttaaggctgaacattaagatttttaatgctaagcacaagaaatcctgttataggtatgtgagggcagagaccatcttctggtttccagctgtatccctagtgccaagcagtgtcaccagtagctactaaatatttgctgaatgaatggatttttattccttagtcaaagaactaatgacatactataggttatgttttaaaacgacatccaaatgctaaaacatgcttgctaactgcaaccaaaagcaggttacacatctatttgttgatttctcttccccgatggaacatttaacccagccttctagctcttgaatttaatatgcccatcaatttatgtttaccataataaacatgaaatcacctcataatttgtaggactatgttggatcggaacatccaaatgtatctgacagaggcaccaaacgagctctacatatgagttaggatgttctaacttagaagaaacaaaaagtaagaaa

SEQ ID NO: 52496 - DNA, 2560 bp, Homo sapiens
gagatgaaggtggcttagacctgggtggagagggtgctggtggggaaaattggagagttccaagatatgctctggagaatgcaggacttgagagttttatatggggagatgatgaggaagagggagatgtcaagggtgactcccgagtttctggcagaagccgctggatggatgggtgctccattgactaatgtggggaggacaggaagaggagcagattaggagaaaagattctgagttctctgtacatgtcaggtttaagaagccacttagcacagtgcctgacacagagcacaccataaatagtagattttagtagcttctaattctgtccatttcaaagtcataattgaccgttgagtcaggagacttgggttctagctctggctagtccatgttagataaataaacctcttagggcatcagtgtcctcatctacaaattgggggcagtcagattcggtgctttttgcggtttctttcagcttcagtgtgctgacaatgctatgagattctttggtcttgaccacctggaatccactgtggccagctggatctgcttcagaggggctgatgaaccagaactctgcatatggatggcagtttctggtggaagctgacgtacggggagctctggccaaggcaaattgtggctctcgaggaggcttcatgacgaaggggaaggatgtggtttgagggcagcagcagcagctgctgtcaccaaacaagcatgaaatccactgagcttcagatgacattgcaactgaggatggctgtttattaattggcaaattaatatgatgtgggggcatatggagaaatggtgatgggcagaaaagaagatgaagagagaaacatatactggttctttcctgtgtattcatctgttactgacacagagtcatcattagtgccacaatgagtatcagggatgggtcatctccagttgaactcccttaatttacagattaagcaaccaaggtcaacaacgacttccatgacaacagagccaagctggcactcaggtctcttcacacctggcctgtgctttcctgctccaccaggctgccaggggtggttcccatgagctgttttaggcccatttttggaaaaagagtcatttggtttcatttgtcttagactagatcccagagatgttatttactgttcccaacccccgatataaaaccactgaatgtgcaggccctctcatcagccagtgcttgacgagtagtacacctggtgcagcctggattccacagccatcctccctgtaactgcatgggtcgggtcctccgtgcttctgtaggacctgctcttctgaagcacgttctgcgagtgaaggctgcactacgtctttcatgaggctagacggtgctcttcttgtcctcagagttgtttgttgtttggttggattttaaaaactcaacaacggctttgtttatgaaaagcagcttactaggaaagttgcttcatcctgtgatcgtggctagtttgtgagtgattaaattccctggcctcctctttggaagcaatgaccagtcattctgttggtttattactatttcacaacataggaagcagagcacaccacctctacctaacagtttaacttgaaacacctcatcagagtatgtgagtgagacttcacatgtgcctgttgcatagtaaaaaggacgtttctttcaaagtcactgggctggctgagcaggacccccacagaaaaacagtgttcttgggcctcaggcatacctcagggcgatgctcagggatgtctgagcaatgtcaagcctgttagatgcatggcagggaggatctggagcacagattgatctctcagatgtggggtgaatggggaggtaaatcatcctttaaagggactctttttcaaggctgagaaaccatgtcctgagaaaagggagggctctgtttccagaggccacacgtctggttgacctccttccagtctccttgaacatgctctgttcattactgaaacagcggtttgcctgcgactggtccccacccttgaggatgctcagccagtttccactgcatctccaggttctgcccctcctgcaaggcccaccttaagggccagcgcctccctggaaccttctcccagagtctccgtcctccctgtttttggtttctggattccatccccacttgcaatcacactgcacagttttgcactttgttgcctcatgttgtttcctctgggtggatgtgttgggagagaggataggtggtgcgtgtttgtcctttctcagtggcaaactcactaacttcctaaggacaagaactccgtcttggacttctttatattctctcatagtgttaggcttaattctcgggacaaagtatatgcgcacaaatacttgatcattcactagaaaagagtttcagtgtgttcgtcgagtaataggtttaaaaagacacacataaagtctacatggacttgttttccaaattattttcaaaagcataatggcaagatttaatttggttgtgcgtgacagaacacttgaaataatgacttaggtaagacagaagtttcc

SEQ ID NO: 52497 - DNA, 3824 bp, Homo sapiens
ggacatgcgtgcccttttcaagtttctgaaatcagtgtatttctgaagaatcatttaaataagctcaccagcgtgttttattttgtgaaatgtggggcatgccggttatgaaatggggactctgaaatgtgatacatccatcttaaccagctcagggtttattcaattcttccagccctaatcctattaactctcatgcacaaaggaaatacaggactcctctctgatgattctacccaggcctcctggcatttggaaaccaaactttaaattttacaaatgatgtctactagttcattaaaaactaatcataataatgtttttaataaactaataggctttacatgtaaaatctaaaatttgaaggtagcttcaagcatcaaggaagctacctttcaaaattttagattgtttactttaagaaaaggcattagaagagattgatgatttcaatcagtatatagaattgtaggatttttataaaaacaatttatttgaatatggaaatttttggtgtgaagtacatcaaatataagtctttttcaaaccaaatctttggttttacaaataaagcttattggttgattaaaaatacagccagcatcaatgtaaccagtgttcaaattggattttttagactgtttacttaagggattttgaagagtttggtgactcataatcagtttataaaatgtgaggattttttaatagcagccttatttaaaataagtcaaaatgttggtgtgaaatgcatgaaacttatttctggctgtatgtcatttggacataaatctaacccagcaaaattccaagatctaattatgatgctatgggaagctaatctcattgcagtgaagatgagctaatgacacattagtccatattgtattatatacttttcagtctgctgcctgctattttgattaaatttacttcctaccattcagatttgaaacagcaaagcctttctgttattacctatcaagtttataaagcttttctctgaaattttgaagtgttttagatttccttcacttaacaaaattttatacaacgcttaatgtaaaatcacagaagatttgcatttatcccctttctgtttagaagtacttgctatttccaggtaccaggctgtagtcagcacggcccactctcggccgaggtggcctggaatgtctagtcatttcagtttacgtaacagtttccctggcctgtttgctttcagaggtcacttcagtgtcagcctcagcagtccacgtataagtctgcctgttccacacgattcacagagggaaagaaaatactgtatctgaggcattcttcctactttgcgtagcccatattatttgaatgtacattaaaacagtgataacattcacctcatacactgaagagtagatttgcttttctttctgatttcttattctgtcagactcttttcctgactggaagacacctagttttctagccaggatagctgaatgctccctttgcaaacaccttggcctgaagttagaatgaaactgtagtcagcaccccttatcattcttcagaaagtcttcccagccctgataggatctgttctgattcggaatatcagggaacatttcttggtgaataaacctggcttcttatatactggtgcagtcacttccctgtaacgaggtaatttaagccagttgcctttcatttcaaccatgtcaaagtatcaaataaagctataacttcagaccagccaggaaaatgagaggccggacagagtaacatgtttataatataaatccttcctgttttctcaacccatgctcccctggctgttttccattctgacagaacactctggagatttgcctacagacagtgaccaccaatttaaagatttgttgatgactaagaaaaattccaaagctgcaaatgaacgaatccaatgctgactaaaacaactgaccaaaattactaattcctaggctgctttagcacgaatggtcataacaactgggatagcaggcctgtgtcactcattccctagtaaagcagcttggaggccacaggtgacttcctcttctttccagactgagatgtaccagaaatagtgcagttcaccagtttggggaaggcagttgtctgggagtaatcatacctgcaaatcacttgatctcaaggactgtgcttgctgacttgagaacatctattttcttcaattttagatgtaacacggctaccttgtactcactttgagtctcaccgaattcccgtgcattgagggtccactggaattctttgttcatgggcattttgactgctagtatggatgaggtggtgagaaatggtggcagacacacataatttgtgtgtcccatattttcattttgcaccaagcttctttgctcccatgcatgctccattgctgcatcagatttcacttacaaagcgtaggtccaaagataacattaacaggagtttcaagacagtgacagcagatcattaaaccaagtgtgggatgagtggggccttgtgactacacaggccaatgcagtggaagctccctatgttaccttccctgatttcattcctttccctgcccctctcccagcaaccactataattttctattctcatgtgtatctttattattttacttcatgtgtattcggaatgtatttagtattgcttgccatattttaaaacttaatgtggacagtgtcattaggaacctgcagcttgttttttcctctcaaaacgtttactgtatgtttttggccaggcatgggggctctcgcctataatcccagcactttgggaggccagtgcaggtggatcacttgaggtcaggagttcgagaccagcctggccagcatggtgaaaccccttctctactaaaaatacaaaaattagctgggcatggtggtgtgtacctgtaattccagctacttgggaggctgaggcaagataatccctggaacctgggaggcagaggctgcagtgagccaagactgcgccacttcactcaaacctgggtgacagagcaagactccgtctcaaaaaataaaaataaaaaataaataaaaataaagacatttgctgtatgttttaaaaatttgtccatgttgctgtggcaatagcctttgtgtccagtttaattttatgtgtctgaagttccaagtttttgatcctttaagttgttgactgttagtgaatgccctatttctagcttgggtggggtgcatgtagtgattagcttttgaggctgtatttaaccaaaaatttgtttggagacttgagtcatcaacccttatctgttgtattgagtttccactcagcccattgtctgggcggaatgtgggctggaaaagtttactagtgtctcttggcaatcaattgctgtgggatggcacagcccacatagaatggggttggtaatgttttttgggttagaccatttaccttcaaatgaaattgaattagtgtaaaaggaagcctgtagaaatatagaatcaaagccagatacggctcgtgttacccagaagcagaatgaatgattacttatctgtagaatgtcatctgagtacagcgtatctgctgtgaatctctctccacagatttttcctttaggtaatcattgcccaatctcattatactcattactttttacagtttgtaatattaagtgtgaccctttgataggagtggcattatcaaattgatttctcccctaataggaaagatggaacatgattgggcacttcgtcctcaggcaggagagggaggaatagaagccatgaattttttttttttttttttttttttttttttttttgagaaag

SEQ ID NO: 52498 - DNA, 1686 bp, Homo sapiens
agctgcagtgagccatgatcgcaccactgcacttcagcctaggtgtcagagtgggaccctatctaaaaaaaaacaaacaaaaacaaaaatataaaattctcagaacaaagaaattggaacaaagtacagacaacccttttcaataagcattacaaaatttttagacgtaggttgcttgagtcccaacttactgtctctataattagaattattgagttactgagttaaatctagccccaagcaggttaatgtgttacctgacccctcccccccagccaaatatatagattcaagtaaactttttgaaatactgaactatgagtctgtgagtcatagttcatggattcctgtggacttgaatgagatggaggggtctggggaacccaggttagaaaccacagttataatatgaagagcactgggcaggggggtcagaggatgaaggccagactgactgctggccgccgccaactagctagctatgtgagccaacctctcagcctgagttttcttgtctgtgaaatgagactgggggtaaaaggaagtggtaaaagacccttctagcaaccaaattctgtgatttatgaatattgtaacctgtaaactttcaatggcaccaaggtgattgtgaggaccacagtagcctgctaatgtaagcactattcttcaggtcacagtttcagggccaaaacaccatccttcccaggtcgtcaagtaattctcctcggtagatgatctgctgaggccggcgattattcagcccttcgggaggtgagtgcagagctgtttttctcaccatctttagccttctgggtattcctcatgcttccccctctctcaggagaatctcttgcctcctcctcatcttcttcttcctgatttatcactgcctctgccccatctgacattaggaaagtgtttcatcgtgctcgagtagaagatttcatgggaaacagactaccatctttggaacaggatccgatatgaataattctttgaaacatttttctctgcatgtctgtatcttagtcaactttcagtttcccctgcttgaggagagtggggcatgtagacaatccaaatgtcatctatatttggctttagagtgtgttttctacttagctttgagttctggatagatctgcgattctgggaactgactttaaacaaaatcacgaagctttgcagtgaagacacatctgactcacaagtaagttgaatgctttccaagggcccatttttttagaacttgctcaactctttcctgcaataatgctgtgcttggatcagcccactttctctcagaccctggcaaactggccattccaatattccttcctgttaaaaggtggttgccatttggctttttatttgtaattcatgcgaagttcaataagtaatatgaaacatcatttcagtaagtggttcggtgggagacattatcaaaacaattagaatgtgttactgtcaataagcaagaaatcaaaatttcataatcttctctgactcatgtggaattgacttatacttatggccctttcagcttttaatgaagaatggccaaaaagtatagagtattcaagtttgctcaaataagaatcgattgcttcttcctctgagcccccatagcaagaatgtattttttcaatgtagcggctttaatcacctaatagtatagtatagtac

SEQ ID NO: 52499 - DNA, 3167 bp, Homo sapiens
cgagctgtaaaataataaatttgtgttgttttaggccaccgtacttgtggtggtttgttgcagctgccctaggaaaccaatgcactgatgctgctggcaagagggagagccaggagttgacccccagctctgtccccaaagaccgagttcttaaaaaccactagaatagatagtaccgctcttagctttgttaggtgtttggtcattggtgagggtatgaaggtaaaatgaaagtgcaagtgccagccagcgtgcagttaagttgggtactaggtagccagtgtctttgaggtactctgacttgcccagcccccgacccccatgctcagaatgtcccctgcctggaaagaaggaatgtgatatgttactaacacttcagtgtgagttgagtgcgttatctcttcctaaagtatttgcgttctaaaagatgacctaagtgatgactttctgctatttatgagaaagagggctacactacggtgccatggctgaccgtgtgagacccaattccttgtccatcttccactacagagtcagaaaacaccaaaaagcatctttcccatgctgccttaacagctagcagagactaaagagtaggaatctcggctatgggctccctgggaaaagttgctttcctgatgaaagggatcgttgttgctggcacagcgcgtttcttccatgttaaacacgaacatggtgcatgaaggtgtagtggtcaacccgtgagcatgaggggcaagcatgaggaaagaagtgcacacaggaaggatggagagtgggagtatagcaagtcctccagctcccgctgcactgccagtcactgcaccagccccagcaaggtcttgtcactccagtgatattgtttcaagaaaggaaaaacctctccagtgtgtgccagtgttcattgtattttttgttacttgcagctgaatacattccaaacagacccgggtgcctttcagatcacaaaaaggtaaccacctaggaatggggacatgggcaggcagaattctttagaatgaaaggaattcctgggatccttgcccacattttcaccacggtgaacacatgcaaagaatgatgagtcaagggaaccatccagagaaatgggattgagctgtagatatccaataaacctgatgcattccatttggggagaagaaatagaaggctcataattttaaatggaaaggttagttaaaatcaggagactttggagagactttggagagacttttatttgtttatttttgtttctggtgaggtttattacctttcagagggacatgctgttaagttgaatacctctgaggatgaccatctgtcacatattttccaggaccaccctgggaaataagaaggatattgtctccttatctcgacaagcgtgccatggtggtctatccatggagtcataatttgagattaggaaatatgctgttattcttaaaagttcaattatttatgaatccccaatagccaggtgatcccttatacttagtggcatttattgatgcagatgagtactttgaaaaattaagagagacatttactttttaagctaccactaagacggtctctgaccggataaagataacttgagcaggcgaatttgtttaacaaaggtggtgacatatattgtggcagctgaatgcccccttacagccaagggagaacaatcagtgaattcattcgtttaattcatgaattttccttctatttacactttaaacaaacatgccagttgtttgcttagttaacaagctctgccttcattataagccattagtggctagtaataactgaaactgtgtttggatttcacaaatacaataaacccaattaatttcacccttagtaatatggaatttgtctgatcaacctgagctaggcagaagtttgtgtctttgccctttgcatgaagggtttgctaaatcatcttatagccataaataggaattcttcataagaaaaactaaacaaaacagcttaaatcctaatgcttctaaggggccaggcagcaatataaattagtgaatgggttggatagagcatcctctaagaaacacttggtctacttttgatggagacatggatgtaagaaatatttcactttttaatcctgtgataagaaggaaaaaaaccacacacatgattataaatgacaaggaggctcagccaatggcagggagacgggagggagaagttgggaccacagcaaactggagagcccaagccctgtctgaaaggaccagctccgattcagctgcagttactacataagaatgcaggcctgtgatgagggactccaaagcaggttttgcctgcttctcggatttcaccaggatgaatcataacagggacctgataaaatcctatctttgaaatgctctgtaatgcttattattgttcttaggaaatgataaaatattgccctttggcattagacgtgtgtgtgtgtgtgtgtgtgtgtgtgtgtgtgtgtgtatgtacaggataaatatgtgcccacttctaaaaaagacctgggcctagtgtggccacatctttcaaatttttaatgtaatgtcaaaatctggatttctggataaaatcttcccatttataaactttggcaatgagtttttgctatttaagctgatgctgtgcagccaccacagtgcagatcagcagctctcaatgtggtctctggaccagccacattagcattacccgggaacttcacagaaatgcaggttcctaggccctacccaggcctactgaaacaaactctcttggggtgaggcccagagatctgttttaacaagcctttcaggtagggctgccagcttttagcaaatatttcatggaacatacaccaaaaaattattcgttgtttatctgaaattcaaatttgagtacgtgtgctgttttcttatctagcggacctacctcccggtgcttctgatacccgctggtgttgatcaagcaaaacatgtgtatgagccaggctgcttgtgtttgaatctgctttgacacatattaactctgggattttaggcaagtgacataatttctgtgtggcttggtttacttacatgtaaaataggcacgataataatttcttcctcatggggtggttgctggaattgaatgagttaacgaacataaaatacttagaactttgc

SEQ ID NO: 52500 - DNA, 2276 bp, Homo sapiens
agggatgaggaggagccgggctgggctgttgagtccaggctgaggtaggagtgcagtgttttacaggtccgttctgttttgtgggtggacatgggtagattacctgttgggaaagaaatacttaatattattccttgaagtgagctaaagagaattacttttcttcactcactgttgaagaaaagcaatctaaaaaaagaggttaaatctacttaacatgagacgttcagacatttagtgcccaagggagggaaggaaattctccttgaaagaatattctgttggtccttttatgtcaggattttgttaacagcctttgagaaaggttatcaaaaccttactccatgtttttggtttagtttttaaaagaagccttttccttcatagggaaatagccccagagtatccagtatgtcaaacccaaccttagagggccaaacgggccccggaggctttcgattcaggttcccagccggaaaattgcttttcagggagaaggtcatgttttccgcagatagtggggtcatttgtatggttaaacgcccttccttctgagccggcaggatgttcagacttggcctccctcagaggacagtaggaagtacatttacccccgactcagaagaaaggattgaagatgggaaggggaaatttaggtggaattctggcaacgctgggtcctgtcccaagcccaacaagatggactgaggccggggtcgtgtctccagaacattgaagggtggggagggaagtgtggtgcagacaacaaggactgctcaaggggaaaaaatgaaagggtgggagaaagaagtgccacccaccctccccacagctgcttttgtgcattccttcaggccctcgcagacttttatatttgcataaatgggccctggtgaggcttccacactgggacagaagagcaggcaggtccccggacagtggaggctttttcttcatgaatagtcttagagcgatttcgcagtcatccactcgtggaagcttcctggctggagtccgccctccagtctctgtaaggacgtgcgtgtctgtctttctggctgcagaccctgcccacgcaggcttgccctccagcctgtttataaggcctgaagttacttctgtcttgttttagcccaaagggtgaactgctgccagcagtatgtctggaatgttatttacttggtacatttctgtggctttttgtagcattgcacatgccagagccatttacttgaaaatgccaggttgcacagtttgtcttctcaacggggtgactttctcagttaggggagtttagttcctgtgtctctcagtttcttccttccttccttgtttttttttttcccctgagttagtgctctgaacaatactgttggtgcctgttgcatcgcacccctttatcctgagtgccccaactccacttgtaatttctggggtttctggtgtcctcttcagagcacctggcagatgctttttcatttgcatgcctgccctgttattacttcacatgaaagctgtctgttttggcagacatgactaccatgattgcagttgagctctctgagctgaatgggtgatgttgtgtaagggaactcgaggtggggttttctctaatggtggctgtgggagtggaagaaaaacctgcgagcagtcttggcttgtgccgagccgacatgatagcaaacaaatgacttttgaagggaggaaccggtgtgtacagtttcctaatttggaaggtttcacaactgtttttgttcaactgatggaggagagatttttttaagggcaaattcttcattaggaagactgtaaacaagtcctggaaaaaggataattgctgaaggaggaggcatggaagatatttgatgggcctctttcgtcagctccccttcttcccattccacctatgcagttttaatggtgatattttgggttttaacacaaggtatggaaaatgagattagataaatctccctgtctggtgccagtcctggggccatttgcacacctgggtgggataactccctgccttctttctgtcagcataattttgttctgtcatgtgagtctataagcacttgcagatatgatggaaaagcttggccttacacggtctcggcctttattcgggcctcctggaaacctcagccatccccggcacctgctcgtttgttaacatcatagccagctccccgtgcagaatggaacattttctgctccattcttcttggctttttctgtccttctgcatgacttctcaatttgtttgtaagctg

SEQ ID NO: 52501 - DNA, 952 bp, Homo sapiens
tacccccgtcccctccccggagattggggggcggggctgaaagtcccaaccctctaatgctgccttggtctttccagtgaccagctcctcctgaagctacctaggggctgctagccacccatcaactcattagcatacaaaggcgtaattgtgaagatccagaggattttagaaattatatgccaggaaacgaggacaaaaaccaaatatacactccacagtgtgacagccatcttctcgctgtgtcctcaagcggccttttctctgcgtgtgcatgtccctcgtgtccctctgtatgtcttaatctgctcttcctaaaggacactagtcacattggaataggcccaccctgacagcctcattttaatttaaccaccccttgaagccctcaactgccctatctccaaagacagtcatattctgaggtacagggggatatggttccaacatatacatttgggggaacccagttcagtcatagctcctaccatctgcctgctctttcttacctccatgccttttaaagatgttgtctctatttagaatatccttgccttgctgcataattccatatcattatgactcatcattatgactcagcacagattgcattgccttcccagaaactctcagaccctatcctaatgtaagctgctgtccctcctctgtactcctaggctctcttctctgtctctctctgatcttactacatgatttggtcattctttttatgtttaccacattaaattgccaatatttgaccatttttgccctacaagaacaatttcttttttcttttttgagatggaatctcgctctgtcacccaggctggagtgcagtggcgtggtctcggctcactgcaacctccacctccctgggttcaagcgattctcctgcctcagcctcccgagtagctgggactacaggcacatgccaccacacccagataat

SEQ ID NO: 52502 - DNA, 2067 bp, Homo sapiens
ggccaacatggtgaaaccccatctccactaaatataaaaattagcctggcatggtggcatgcctataatcctagctactcagaaggctgaggcacgagaatttcttgaacctgagaggcagaggctgaagtgagctcagactgcactccagcctggacagcaaagtgagactccatctcaataaataaataaataaataataaaataaaataaaatagaatgaatattggcaatttcctacagttcaggtaaatacttaacacgtttgatgctatcatctatgtcctctggcacttggaaaaggtttgtccaacaagtggcagagggcacagggacacagcccccactgcccctcctggcttattctgatttcctcagcctggctcgtcccctcatgtccgcatggctctggagctgggcccttccctttccctgctgccacccttccctggggaccacacaaggcatctgctcctgtctcttgaccaaccagaacatggaaacacctccctcccttcctgacaagtataattggctggaatgttcaacaagttaattttactaattaagagaatgttaaaaaaaaaagtgcaagaatgcctggttacaaatgtagagcacaggcataaaaggaaagagtctgaaagttcaacagagatgctcaagcaaatcgctagaggtaagaattgaatgagcagcacttctaagactacccttctggaacctacatctagtccagcccctctgaagggcaacccttgggtcccctctggctcttctctgtaaagctcctctggcctctgttcaaaatctcaccactgtccagagtggaaaaaagttcttgcctttatggcttccgagagttcctacctgatcattggcctgtgcctctcctaaggtctcaactgtatgtcttagaattcctgccctacacccctctatccctcaggcacgtgggattcccctacccactcctgtctgtctagtgtttttatttgaaccacatacactaacaagcgacctgtgaagagtgtttctacctgttcttgatgggaggatgctatacctatgccagcattttctgaaaaactttagagctctcagctagccagaaatggactctgccctttcctgtttcaaaggtcagctccaccagcctgagctgcccactcagtttgtttcctgttagagggacaccctcagctctcagctcttttaaacagcaaagatgacagacatgtcctgaataattgaactcaaataaccttccctctttatttttccagaccatttcctggttagtcagcactcaggtctttctaagggggagagaattctccatagacccctaattacatatttacagtacttggtgtttcatttttgcaataacatctagtagggtcctttttctttatatagaaaaacatgaaaaagcaagacatttcataatcactggttagttaactttggttaatttttttcaaagcacatagtaagaaaattcaagcagtttagaaaagtataaaattccatttactaccactgtagtcccttacccaaagataattactgctactgttttcttgtgaatcttgggaaagtaaattttgtaagtatacatgcatacttccatattgctgctccgtgtagcactgattcattataatgctatttgactataaaatatttcgtacaaaattattcatgtacatatgccagtccataataattcactcttattttgcccatcctaaggatatcttatgcactcagccagtaggaagaatcactatgtacattacatgttcagctaatgagcgttagtttcccattcagaaaaactctcatccagtgagtgctttctcatgtaacgccaaattcactttgttccacagagtatttgcttacttcctgtgcccctttttcctaccatttagtttgtgttttggccaacagttttgatctagaatggatgacaaaaactatatgggtattctgctggacctgccacaaagacacgaaagaagaacatcctgctagatgttacaaatctgctttacagga

SEQ ID NO: 52503 - DNA, 2045 bp, Homo sapiens
ttggtttctttttagggtgattaacatgttctaaagttgattacattctaaagtttattgcacatcatcaacttatgtgcaactcataaggttgcacaaccttatgagtacactaaaaaccactatatgtgaattacatctcaattttttaaaaaagagagagattgatggaaatcatttaatgttctctactgtctcataatacccctgtagcctggtggggttgatcaacaatcatctggaggagacatggaaaaagaaattagggcaggaggcgactggtgacctccgaggtttggatgagacccacggggccatttccagcgttggatggatggaagacatctccatagggtctgtgatataacaaccccgtggaatgataattcactcccaagaaagcatccctcaagcacaagtgtatacacacaagattgtgtgttttatccatgccatgctatacctcccattgtcctcttaataatagaatcctggctagtgttctgtcatcaacacagtgaattatttgtttttttttaactgctgtgagtattcccagatatgaatgttccgttactaaccatcaaacatttgttaaccattgggcgtcatcatggtcatttctagttttttgctttcataaacaatgctatggtgaatggtctcacacttactgttagatgcactgcatgtgaaatagaagacccaaagagcacactgttgctggcaaggctgagaagagagctcctctgctgaggactcgtcctcttgtgcatcctggtatgtactgggctgaaaaccaggcaagccctccacccctgccgctgccgcccccatgcctagggccgtgctgtcctccactgaggagggaaaagtccttctccagctcccacgggccatctgctcctcgttgagtcatcagatgaggcgatccttcccattacctcagcacacagcactgcacatgctgttggtgttcaaaacgggcttcgagcctcctcttgtaaaatgaagccaatgtttgtctcatttgcctctttccagaagaagtcgtgattttttttttaatgcaatacagaaaaagttttccatttttattctttctacttttgcttccagtaattttcaggttctctgtattcctgtgttctgaatgtgtatggcacaccagcagcctgagttatggctgagtcactatgatcaccttaaccctgatagatgaacccagcttatgaggagacctgtctcagcacattgcacagctctaccccgccccaaacagaacactgtgaaaagtacagtcaaggccttgtactgcctggatcctatactcaaaaagttaattctatctcgcaatatatatttaatacaattcagttaagcttcctctaaataattcatttagtttagtttttttgaaatgaaaaccacacttgatgctgatttagcaaggccaaagctatgtagcaaacctcttgactctactgaatggatgaataatgttttccttcacatgctttagcttaaatatattccgggctgtacagtctcttaaaattgtagatattagagtcagaaaggaccttaaaagtgattttgcctaaccttccctgtgcctgacagatggccactcagcttctacctgagcagttccaggatccaggtctcattgcactagcaaacagcagatttcctgtgctcagcttctacctgagcagttccaggatccaggtctcattgcactaacaaacagcagatttcctgtaggaagagcctgatccttagaatggcccttctcagatttggctggaatctgcctcctgtaacatctgcgcagtcctcttagctcttatctccagaattgcacagaatgcgccttgctcccaccaaaacaatctacgtatctgaaggctcttctttcttttcctgaccaataggtcacttttttgggtgaatttagcatatataccgcatgcctgggagaacgttcgctttcttgggcttggtccttggttgttctctttgttgacagtggtcttctccaa

SEQ ID NO: 52504 - DNA, 965 bp, Homo sapiens
ctcatttctgggatgcttagtccctggctcaggcgtggcagcagcaggtttatagttgaagaatctcttgtggctctcatgctgactgctgggagtgtgagaggaagagtgctgctggagggcccgcctgggtgggggcagagcagcaggtgggtattcagacccagctgacatgccagaggacagttcagaggcattttctcaaatcccacccttggggttatcctgcaggattggacctttcttcaggaggcccgattcgaaatcaaatcattatgtatcaaatatcactgccacctgcccactctttaaatatccacattgcctctgtggttgtggtggaaaaggaaggcgtggggaagggaaagggcacgtcaatctcagttgttgcatttggtgccaagtacaacagaaaccaagggcatttgagctcagatgaccttggtaacttgatctctcacattccatgtattccagccaaagaaataaacaccagagtgtaatgtctaagagatactgaacacttttgcttttatggaatgcttccacatgacctgagcctcactgcagactttacaggtgaggaagctgagcttcagggagggtaagcaattcctctaaggttctccacttagtacttggcacagccaagatggggacctggatcttgggggggccccagagtgtagcaaggactttggtgttctgtggacctgggttcttaacctcgactctgccactaaccagttttgtggtcttctctaggactcactttctttaacttttaaatgggcataaacaggatgtggcctcatcaggatcttatgagggaagagggtgtgatgcataataagaagagcttggctgagtacctggcacagaggataaccaggaaacgttagctgttagtactagtccagttagaaacgaatctggctacaattattgcagcaataaagcaatgg

SEQ ID NO: 52505 - DNA, 6025 bp, Homo sapiens
acagtttacctgcaggatatattttttccttttcttcgtacctaccccggaataacttttcaggtcctctcacagaatgaagcagtttccttaggaactaaaaccgagaaaaaaagaaaattaatagaaatggtgtattactttcttagactgttaccaaagtctgtttctgagtggtgactatgcattctttcaaaagaacttcttagggcataaatatagtaattttcactgaagcaataaagtgcatttttagttttggaggtctctcttttaatcctcttcctaataaggttatggagttcatttggatggcccctgagccctctggctctgggggaacctggattttatcattgtgaatatttattgaggctgcacactgagcccacaaagagacttttgttgttgtaattgtggaacttaagagcagtgtccctgtcttaatggtggcccccaatcaccaatcacatgccttttgataggatacctctcccggttaggatcgtgttttgtctagcaggcttaagcttctttttaaaaaaatctccttaaaagctaaggagatttcatttttacaatgaatcgatttcagcaggtataccagaatatattttgaaattcaaaatctttttgcctgctaactaatctcagaatctagttcagctattaaaacagactgtttaccctattagttatgcgacatattgtaccaattttatctaggtctccaaaggccccacacctaccccccggagcctctaatctttggcctctgttgcaaactgatccttgggcacatctgttaggcacgtgaactgttctgatgaggcaaggtttttcagattagaccagtctgtcagtgttcaggggccggcactctctaggccttactgcctttgcattgttctcttgctttgatttactcaacattctctattgagcatctcccataccaggctttgggctggacactggggaacctagaggaataaatcccatgagtagccctaggaggctcctagccgactactgaagacaaaacagaaacaagtcattatgactccatgtaggaagtgctctgctgaggttcagagtcctggggacacagagagggtccatcagtcccagctctgagccttcaggcacctgtacctctaacgggcttaaggaaggcagtgccgtcaacagattggaaagacacctgccgagggcagtgtggccgagggcagtgtggcagagagatgggggcggagaggactggaagccaggaaaacaattagaaaccaatagagcggttcagtcaagagacctggagaggtggagctatggcagggacggtgaccgtggtggtgggtttgagagtaaataacggccaaggcatactttagagttgccacagaaaagacttggttgactggttgtgaaagttgagtccgacctttctttcttagccactaagtcacactctgaagtagcagtggaaatgcaggagggcaggtgtttggggagtctgaatggggcagagggagtgaaagggacgagcgttggaaggcagaaagatgctgtcaggtaaaactaaaagggctcagaagaaaacccagacaatcctgagcagcagtctctcctggtgaaagagccccgtggaacgccttatgccagtgtccttgctgcctggtgttccagtgttagtaacagctgccacttctttccttgcccatcagttactgtgtttgtgtgtgcatgttcctgtgtttgttttaatctaatactgttcctcccccacggagctacacagtacttgttttataagtgtgacctcagcaatctttattatctacccaagcacaaatgaatgttttgatcaagaaaataaatcagctgggcaccgtggctcatgcctgtaatcccagcactttgggaggccaaggtgggcagatcacttttagcttaggagttggagaccagcctggccaacatggtaaaatcccatctctaccaaaaatacaaaaaattagcctgcatggtggtacgtgtctgtagtctcagctactcgggaggctgaggtgggaggatggcttgagtccaggcgtttgaggctgcaatgagctgagattgcaccactgcacgccagcctgggagacagagtgagaccctgtctcaaaaaaaaaaggaagaaaataagtaactctgcacagctttgagatccacccacatgtagagagggaatttaaacatgtaaactaaatgtaaacatcgacacagatgtaaattgaattccagaaaagggcattttccattccagaccctgagctctgcagtttctgctgccttacctctatctggctgcacttcccaattctttaagtctgtcatttagttcatgtgaaaattgctggggctgtgtgcttcccttcagaggcactgacagactgtgatctttaggatctcaagagctgaagacaggagccaaaagtgatgaagacatttctcttgatcaagcaacatgttgataggcacaagtagcagatccatcctataatccccattcttgtcatcccaccttggaaatcaactgagcgagcaaatacaggcatgggcaacaccgtcttcacacaagcctgttgatttattttaacttcgtaaagagatgaacaattggttactttctggctttacacacagcttgtttttctaaccagtatcatgccaggtggtcagcatattctctcccctgccgtgttaactaagtgtgaccaaatttatagctccgaggaactggagaccattgacactcagagtcgccctataggatgtgggggtgcaccagggaacagccagccagagggcaaagccacctgctgttcctcatacccaggaggcccagggctaaggcctgggtttcagtactgaggcggaaagtccgcgctcactagtacggatacgcaggactcgcagtcatgggtctgtgtacttttagctctctgtataaaatcaatttccatagtgatcagacatgcagaagagtaatttcctgtaagttctaggtcctggctaagtggaaatgcttctgcttgtctgttgcgattatttaagccacatgacctcagagggaaaaaattcaccgttggcttggattctgaatatcttgatttgaaaaagtcagcttttagtttaaccactgtataaatccaatcccagacctaaaaattcacctgcagtgtcatttcaataattatgctccaaacagcagaacctgcacacatgtcatctttcttcctgagacctacatcctgtttcttccctgagctacctgcatgctatgttctttctgcaacatattagtccatttctttgctgaaaattaaacattgtcctatggtgtcccatgattccttgggagataaggccactcatagtaccttaaaaatttttgttagcagctggaattaatgctttcatctttctctcataatttaacatcttattccacattaacaatccccaaatagggcatgatgcagtgtgatgtcgacactgatactggaagtttagaaatctggatttttttcctttgctgacttgggtcagagtcctcctatgctcctgtgctaagaagccacacaacagtggacactcacttcacagggatattatgagaaatgagtaatggttataagatgcttcgaacctttccaaagaaaagtgatctgaaaacacacgttctcttcattcacggagagggccttttgcctctggatgcagctcactgacgagctctcctgctcccacacttttgcccctcccaagggtctcctgatctcttcagaaatgtaaccgaagggttgacaaacagggcaaccacgcaggagccaggctgtcttcagcaggagccaggctgtcttcagcaggagagattagtgagagggggaagtcggcatggtttggagcaggcacaggcccaccccttctgccagcttgtcagttccatagtagaaacccatgtgtcatgaagcctgagtttagcacggaaagaaaagctggggtttcatagccacgcaccaaaggttcaaatcccagctcttcaagtaccatctgtgtggccttggatacatttctcaatttcttggaacctgtatttgtttgtctgtaagattaagacagtaatattggtcatttggctgggtgtggtggttcatgcctgtaatcccagcactttgggaggctgggatcatttgaggccaggagtttaagaccagtttgggcaatatagtgagaccccgtctctataaaaaatttcaaaaattagtcgggcgtggtggcacatgcctgtagtcccggttactcggaaggctgagatgggaggatcgtttcatccctggaggaggaggaggttgttgcagtgagctgagattgaaccactgcactccaggctgagtgacaaagtgggactctgtctctaataataataataataataagtaataataataatattggtcttgcacagttattgtcaagtatagatgatactctgtctattgtgtctggcacacagtaggtgttcaataagcagtagcttctagttttatgccttttcttggcagtggatagaggactttttatttgtttcacttttagtgccacggtagaatagtgtctgtgtgtgcaagtactaactatgttaaagcagaatttgccaatgaactaaccctctgagttggccgaagactgtggcacaggcaaattgtatgcagccacatgcttcctacggaaagtcatcctgcagagattcctggggcccactatctgcacagtgtctcccaaccctgcagctggactgcttcagtgctgccctgcagatccgtcccctgcacgccacatccatgtgggccgctctcgttgcctcctgcagaaacattctgcaagttctggtgtggtctccctgcctccagcctcttctccgctttttcttccttgactcagttctctgccgtgtccctctgcaattttgctccagagcctccttgacaaaggcagggcccggtagcagggactgcagagtccccgcaggacccgctgttttctttctcagctcattctggaggccagccccactgagctgaacggagtctgcacactactgcactggcattcctgctcctgctatctttgccccgatgtgcttttcttccatttctattggctttgccccaccaggacccagtcatgcatggccttcttaggaagcctctcctgatgcacctcctcttgtcctgttttacctatcccacctgcagcagtggttcttcaacacctagaggaccatcatctctacaggcgctggtagcattctgcctggtgtctattacacatccctaatccacagtcactccctgggttttcccatcccagccttccacagaacctttgcccagcagccatccagcgaatgtttgccacatagagaatgttgcctgtttttcagtcttctctggtgaagactttggacctcacttaataacattccagggctcaactccccagcccccactccatgccacccctagagaagcatctgtaagtgaaaattccccaaaggaaatttatgtccgtgtcttcatattcactcccccatgctgatacacaacagctgttcactgtcttttgtaaaatcactcaaaaatagcaattaagtcgctcctcggacttctcttctctgggatatttaacctcagttccctttacctcccttgtgggctcttccccttttgatcgtcactattgctctctctaagtcctttccaaattctgcatcttcctcttaaatatcttatgggaaaggtggagacttgttttcagttcagaagacagcctctttttttttttttttttctttttgggggtttgagacagggtctcactttgtccccaggctggagtgtagtggtgtgatccaggctcactgcaacctctgcctcccaggctcaagccattctcccacctcagcctcccaaatagctgg

SEQ ID NO: 52506 - DNA, 1093 bp, Homo sapiens
tggaattacaggcgtgagccactgtgcctggcccagaagtcagcctcttgctctggctttcctgaggatcgcttgaaggatgggtgaaaggagctttgggctcagggttctgggcacagaaacgtccctctctggctggaaaggaagccagtgaaggacactttcctacctgtgcacaagtaagcttgaagttgctttattttctcatgaaatgtgtgaagatggaggtaagacagattttataaagtgcattgaaagcaaggctgcccagtggaaggcctattcttggtgggtatgaacgcactgtccccaccttatctgctgctggacatgcccctggagaggatagttcatttggtggaggggtcaggttcctgcctgcaacccggagcagccctgggctttcagagcttgtggaggcttctgcagtactctatgtcacctgccctgatttagaggcacaggcctgttttcttctcggatcttcttcattggtgtttctctctagctggtcagttagccccactgctctggcaaattgctactgcccattaagggaatctccagcctctctcccaggtaaataaagcttaaaaaagaacaatgacctcatagaaggtgctctgagagcttcctcctctcttcaagtctcccctgcctccaccacacacacacggatacacatgcacacatccatgcatgcgcacactcccacactctcatagcttacagggggacttggccatttgcgctgaagctgatgctatgaaaatgaccactaagaagcagtggaaggcccagcgatggtggcacaggcctttctgtgaggtctgcccggtaattccactgagtctgggaccctggaggacctagagaggtagtcccctccccttctcttgcctgctaatcacacagagggccatcatctttcatatgaactcaaagccctttttctgcataagccctctttccctccatgaactttttctgttttgaaatagcaattgcctttttaagcagcctttcattttgcccttggctagggaggacgaggggcaccagtgagcgaccaatagggggaaagaaaggaaga

SEQ ID NO: 52507 - DNA, 745 bp, Homo sapiens
ctgggattacagatgcgagccagccagtttctacagaactctgactcctccctttctttgatttcctccctaaattgccaagtcctgaggcccttctgtacacacttaccaaatgtctaattttctttcctagcacctctgccatttataaattatatttcgcttggactggtgcaatagcaaactggtcttttagctctctcctttttgattcattgttcacatcaatgccaagtaaatcttcccacaacccagctcagacccactcttctcaccagagacttttcccccatggacaatggatttagaacaaactccttggcctgctatttgaggctaccagcagactggtcaaagtcacccttttcaactttatttcctggcattctggagattcgcccgctcacgactgtcggtgcacaggtatttgcaagcttttccatcagcctgcctttgtgcatgccctttgctccttggcatgctttcctctccctctctttagcatacatcacaacctgccttacatgtttctctctgtatctgtcccatgccgtcccctcccctcccccctcccccggaaacaagggttatgtctataagcctcatcctgtagtacctgttgtggtgcttatctcttttgggccttgcatatattaacagtagatgctcaggagctcaccgtccaatgcactagctacatgtggttggtaagcacttgaaatatatcgaaagcacctgaggagct

SEQ ID NO: 52508 - DNA, 1132 bp, Homo sapiens
aagaagcttcttttctaagtacaacctaaacccttagaatccttcatttttatacccttcctgagtaacccaaacttttttttttttttttttttgagacagagtcttgctctcttgcccaggctggagtgcagtggcgtgatctcagctcactgcaacctccacctccacgaatcaagagattctcctgcctcagcctcctgagtagctgggattacagacactagccaccatactcggctaatttttgtatttttatagcgacagggtttcaccatattggccaggctggtctcaaactcctgaccttgtgatccgcccgcctcggcctcccaaagtgctgggattacaggcatgagccactgcgcccggccaagtaacccaaacatttggctttgtggtttagtttattagttcaagcagtttgccaaacattgcgctgggtggtttgcatataaagccgaaagggcacagaccctgcccatgagctcatggtttgtggaagcatctgcaaaccaacctttgcccaacaggtctccaccccagagtttgagacctgcgaagaactgtagaggttgatgtcttgtgtttgccatgttccgctgggaggctaaatctgtaagaaaacaaatacgcttggagggaggagactgcccttaagccccactcaatcacaagtcagctggcccattgtgcaaaggagccagcatgactgtcctcaaggtgtagtctggtgagccatatttggacacatgggcagtacctgtctttcaggctttcaagtattggcccacagaaagagtcactgaaggaaggactactgcatccctaataatgagcggacctgtaataggatttcactgcagtgctgccttattttgtagagaaacctttttagaaagaaagagcaatgcaaactcaaagaactaggacaaagatagcagctctagagtgtaaaccttgtatcaatagaaaaacaactgattctgctttttaagaaaaactgcccccattttctcttttattaggctaaagacatactctggtagactcttcgtcaaaagcagattatttaatttaattaattaattaattaattaattaatttctgaggtggagtttcactgtcgcc

SEQ ID NO: 52509 - DNA, 6301 bp, Homo sapiens
tcctcctgcctcagccccccaaagtgctgggattataggcatgagccaccgcgcctggccaaaagcagattattttatattgacattgcactcttcccacacctggaaggtaaagcccggcaaagcagtagttgagtgagttgtgcacatggctgcatacacaagcatgaccccttggctgtttgacatcgcacagcatcatggcacatgctgatagaagatcaacacccagggctttttaggctgctgcccccactgtggccctgcacaatgctcacagtggcttgtcccagctcttgcagccagagcaccctgctgaccgggaaagccatcaggagcacctggctacttttacagtcagggctttttttccttctcttttgtggaagccattatgtggtaccaaataggtatacatttaatacctgcatggtatttctcctgtgtggcctctgctgcttcatggttaaatattagttttttctggtattgtgcaactttgagcttgctgtagaatcacaggctacagatgagtcttagagtgcagtgcgtcttcttcttactgggggagcggagccccaggagaagtgtagtatctgcccaagctcgcagcactagttagtggcagagctatggcttgagtacaggattctaagtcttcagcccatcagactaaagcattttgtaatttgggtcccatctttgccttagtttctacgaagacctatgagtagataataaaggagtatggcagagggccctgagaagtgatgatttttcattaatgactcctctttttcttgaagctgtttgttcctattctttcacagatgcaggatatggacctcactttccagagcttttcacaaatatgtgtcatggatatacatgcccctcttccactagatatttctaaacggtagccctatgtatctagatggaatattttgcataggaaatactgggctccattgcatcaaaaagctggtatattttttggtgtgagtgaatgtgattgtatatagagattagtttaggtctttgcatttggaaagatacagccattcctcacttgagatggaaactaaattacataataccaggccacccaaacaaacaaacgaatgggaaaaagtaaatggttaaacaaaaagtgtatcttgatgtacatttttcatatcctcttatttgctttcacaagcacacttccaaccagagtccctgtcttttgccctgaagctgacccagagcagaagactgtcagagagcacaaaggtggtggccagccaacaagtgtctcacaggtcagggtaactgtcaatgattgttgaactgcacagatcccagtgtgtgtttaaaaaggccagcgttcttgtcacacatctctggatggcagctgtctacttttcactggtgcttggtaaggagtctgttgcaatcattcagcaaaagaccctgttcttccaggtcagtcctccagcttgggcctttacgaccccagtattttctgcttctgatcctgtcgagttacagccaccaccgtcacactgtaagtgggctccaaacagtttggtgcataacatgcaagacagcgttactttaaagttaatcagcaagattggaggctgggtagaggaggaaagtcggtttgttatgtccaaatccatgtttttttcacagagttctttattatgaagttttgttcagcaaggctagtcctatagtggatgaagacgtcagtgaatccattaaataccagctttggagtcagctctaccacctcgaagccgtgtagcagtgggcgagccacttgccctctctgaggctcactgcctctttgggggtaaggggagctggcctgggtgaaggcactctgggctgcgtccggtgccgtgctgaggcctgcaatgcaggtgtacctggtcgcatctgagaggagaaaagttgggatttactttcatgtgtctttccttctgtccttggaacctgtagaattgccctcagacttaaaagttgcccttagcttggactggtattgggagagttttttaaatatactttgtcctgtatggtgttttacaaagttacactatctgggaaccctgtttcttcatttcttttcttttccagtggaaaattgctatttgagagatgattgagagaactgagtaataatcaatctacaaaagcatttatgctgcctgaccactgaagaataggcatttgcttctagttgaaatcaattattcatagagattaacctgtttgatcaggagatgaaaaaatttttgctggcctttttagtcttaaaattcctacgggtcagtagtaactgcaggtcagttttaccttagacagggacaattattatttctaagatacattttgagacatagagataaaatatttatgcccgttgcctaaataaccttgggggaaaagtccagtgagtccagtttgccttttggaggaggggaagccattgttgcccaatgctctagaaagagcacttcgtgttttatgctgctttttatctcaatcattcaagtatttgctgcttttaaaaaaacaaacagaaccagtaatgaaatgtgtgtgagaaattgctacagtgatcgctgcatattttatagcaaaacgttgcagtatttcttatattgagaaagtagaacctatttggggttgaaatgatcaaacccagatgctttcctaaaattatatttttggtgcatttatatgtctgttacaaagtgtgctacatgctaaaaatattttcctttgtaggccgaggggagtttcaaaccgcactgagagacgtagatcagatggttttccgtaagagtgttaccagcatcctggttgttattagccttgactttgcaatatgacattatttatgccagaagacttcacaattcagttcttctttaatttcaccaactttattggcatgaacatgcatggaagggaggccaaagtcaatacatcagaatttgggactcagactccagggcaacaagcaataatgggattcggctggagataacccctccattcctggggtctgtttccctgggacgcagaagctgcctcccacgtcaggcagcgtctcttgccttttgtccaagcgcttcctcttgtttttctctggtgtctcccttcttctcccgagccacgcatgctgccacttttcacattccatgcagccaggtagagacacacttctccttaagatgcttctggattctgtttattgcaaaggcagttgctctacaattctctctggttattcctcctcaaattgtatttcctagtcactgtcattggttttataattgagagacatctgcctgggttttgcataaatgcctctagtcaattaagctgcaaatgggtaaatctaagaatatgtagattgtctaactctctatagaattgtagtttttaacttaatccttcccttccctccttcccctcacctccctgcctccagttgactagagtatcctattttacatttagaacatccagaatgagcagaaaaggctatatactaagtgcattatacataatagctatttatttctcctagtcacaactccgtaagacagacattgttattatacccattttacagatgaagaaactgaaaaccaaatctgtctgacttaaaagccttcatccttaattattatactggttttaaatgcatgtagctctggttaggattatagctatttttgcatctagcacctgaccatggtggtatcttcagagagcaatgtagaaatatcagatttcaggctgggcatggtggctcatgcctgtaatcccagcactttgggaggccgaggtgggtggatcacctgaggtcaggagttcgagaacagcctgaccaacatggtgaaacctcgtctctactaaaaatacaaaattagccgggtgtggtggtgtacacctgtaatcccagctactcgggaggctgaggcaagagaattgtttgaacgcaggaggtggaggttgcaatgacctgagatcatgccactgcactctatcccgggcaacagagtgaaactccatctcaaaaacagaaaaaaagaagtatcaaatttcactttgtgatattcttgtaataacagtcagcttactgttttgaatgagacaggaccagaaatggaattatctcctttataataagacacatgagaaacagaacttggtttctcatgtccattggttgtcattggaagggatacacacttgtttgtagtagctcagatgtgttgtgtctttgcaggctccgtacaagggcattgagcctgtgtgcttgtcaggccaggctttttattatgacgtcacaactcagttattttgatacctttgaaaatttacttaggttcaaaataccagatagacttttgtttctgaggggaaagaggaagggatttgcatttactggtctattttgtgccttttaccatgtgcaccatctcattttatcctcaccacagcattatctctgtttcatagctcagagaggttgtgtgacatgcacgtccaaggccacagagcttcttggtggcaatgacagagagtgcctagtctaaattcccagctgtggatttcctatgacaccatggctttgtactgaaacagttaagtcacatttacagggtgacatgtaaaaacagcaacagcatatttggttgtcccttatcatgatttccagtatccttgaaactcagagatcaaggcagtgatggtaagaaatgctcccatagaaggcaaaacaggccataatatttacataataaattgaaacccataattataaaagcattcagaaactcctagaagatagatttaataagattctaacatacctaatataaatctgaatataaattaactgggtggtaggttcttaaatcctgcatattaggaggtgtctaataaagctctaatgttctttgtggttcttttccaactatcatactggtgagcacaaaagctgtgttatgtacagaatggctgggtttatccctagtagaaagaagttatgtttggtatctaaagaacaatgagagtttgctgcttggctgatcagtgctggatcaagttcacattccccggctcccactctccacctccacatgcagggggtggaagcagaacacagggaggggaggacaggtcctttttcacggagagacgtgagcctgggctttccttatatggacacagctcggcctgtgtagcattaaacactgatttcatccaccgctggagaaaacatcctacaaaaagtgaagagattagcagccaattaattctggcccttcccattgttttcctggaacacctccttgtatggcactgaatgtttggtgaacaaacattctggaaaatagctttctctcatatcttatttatatttggaacagccactccaccccccacatgtggtggattttacttgcctctgtgtgtgtgtgtgtgtgtgtgtgtgtgtgtgtgtgtgtgtgagagagagattttacttcttcatcaagggatggatgaatcaggcccattcctcttgttgcaagttgtgacttcattggttttcttttggaggatatataacaagccacacagtctgagtgccaagctttttaaaactcgacctgccagggccacagactcccatcacgtcccctccttcagaggcactgtggagcatccacatgtccatgtgcccacacttccagataccacacctgctctatcttaggaaataacgggaaagtacctagacatggttgtttgcttttcaagctggtgaaatatcaacatctgatatttttgtgtttttcagtagtaactaatccctttttgtaaggcattttgtcagaataattttcctatagcagcaatatatgtgtgtgtgttttctaaacaatagagcccatgtggttagagcacagtgctcaagactggaggaagtcagcatgggttgcttcctgaatggaacaataccttttgcacacagcaaagggtcttttccattggtgcacactgtcccctaattctagccagcaatcttccaaatgcagatgttcatttcaagggaatggatggcagccctcagcataattagaacatcatctacagatgatgagttggaaataccaccttcatgtttacagtattgcaggtcagcactaagattgggttcctaaagataaggatgtatgcacttttcgctaaggacccagaactgtattagctttagagaaaaaaagtcagatatctgcccatt

SEQ ID NO: 52510 - DNA, 7287 bp, Homo sapiens
aacttaaaactgctctaagaatcactctaaaggaaataaacagaatgttattagaaagtatagtggagtgacataatttggactggggagtaaggaaagacctttctgcaaaagcgctgcttaaacccagaactagaggataagtgggctaccacgcaaagaagagatggaaaagcattctcagtgaagcaaagtggtatcatttgaattacctttggacgtaccattctggcttctctgtggaggatggattctgggatggcaattgggaggagagttgggggacaaaggacaaacgagacaagaggcaattaggatgggtcacagcttttgcttcctacttagcaaaatcctagaagagcagagtgacagtaggctgtttcctttgttcagctcatgccggaaaccgttaggttatccatgatctgggtgctaggaagaaaggagactgtgtcagtagcagagcaagacagggtttccaggtctcagtttctaagatctttccagtggttcaatgggatttatagaattaagaatgtgtgtgtgtgtgtgtgtgtgtgcgcgcgcgcgcgcgtgtgtgactgcaaccagttaaaaactgcaaagggaaaaaacttttcaaataactagtacccagctgttaacaacagctttcatataagtctgtaagatttaatttgcaatagttgtctttattcctgttactggactattggaatttattttggattttgtttcttccaagactgtatgttgaaaaactgtatttaagcagagcactgttttagtacatcaatattgaatggctcatatcacagtttctggggatcgtgaactcccaaggaaaaaaattctagtgggtaaaaggaagtgcctgccaagatagatttctattgattgtggaactcttattagcagcataaaaggttgaagagtttaaagttctctttccctttaaaattaagcagctcagaataatccacttcaccatttataattatttacctgcctatgtgcaagatttccaaaccattaactatttatatatatttcctttacagtaaaaaattgtatatgatggctgtacagtctatactaaaagatataataacacattgaaaaatctctagcaaatgagcacacatttcgtagcacttagctattataataatgacgcaaaatggttaacacgtctatttatattgctctctagatttcaacttttttgtattcctggaaacagtaagaatccctcatttgagcagacttgttgtttgttttaggaaatagacatacatcatccgtgtaattttaagtagtccagttatgaatatggaatgaagggataaattcctgatgtctccattaagctcctctgtgtaaaatactccatggcaaagttgctgctatttaaagtagtgagtttgatcttggctttgatctaaaccttttgatcttgaaagaaggatggagtagcaataaagagagggcaagacagattttctttaaagaaatgtgataaagttaaagggatggtcaagacccagcaagcaacaggacaacccgactctccgccccggcccgccctcaccggcaggcgggttccagcaactgctgatgcggatgagaaggcctttggcgggtggaggaaaatcttggggtatcgcacatttttataaagtaagtgtaaactttctccctaattatgaaaacagattgaccccttctttttaaattctacccagtggttctgggggtccacggcagtctgagggctgcgggtccacactcgcgggagcgcggggctgggtttctctgcgccctggcctcgccccccgggaggtcacctgccgctgcccggagccccgaggggccactgggaaacgtctactcgagggcgtagaacccggtcccggagaaaactccactaggaaagttactttccctgcgcgaaagccaccgggaccaggtttccgactccaggagcgcgctacgctggctacgggcggggttccttccccgccaccgctccctccagcctgcggcgggcggcgcgggcccctctcgctgccgggaagccgctcgcagggcgcggagccgggggaggggtggcgggggcaaggtgcgcgggggcgcggggcggccggagcccggggaggggtggcgggggcaaggtgcgcgggggcgcggggcggccggagcccgggagcgggagcacgccgttcgtggggagaacaatacaatgccggcgcgggcgggagggcgacctgcgggaggcggcgcggccgctatacctttaaggcaggccccgcccccgctcggtgcccgcccgcccgcccgcgccgccgcccaggccccgcgcccgccgcccgcgccgcgcctgaggtgatgcggaccccgggcgggcgcagggcgcgggctccggcgccgccgctgcgtcctccccggccgcgggcgaggtacggggcgggcacgccgagttagcgggcgcggggcagggaggccggggccgctcccgcggtaaacttgactgtgtcctcttcccccgcagccgctgcagagggagcgtcgcgccggggcggagtgcgggcttgcgcggcaagtgcgcgccgaggtgagtgcgggcggcgcggtccctgcgccccggtggcgccggcgcgagaccgcggctggcgagaggccctggctctgcgctgcggcgcgcgggtgcggggactacccgccaggctccggctcgggcgcggggagcggccgtgacgaaggtcgcggcccctgcggtgaggcgcccggcgagttccgcgggcgggcgcgggtggcctcccgaggtgcggggaagaccaggtcgcgaggccgggggtctctgctttctcgcgctgggggatggccgtcaggaccctgtcgccttctttgaaatgctgtggtttttgaacctcaggtcacgaaatggattggagtgaaccggagaccccgaaaacggaagcgcagggagaaggaagaggtgtttgaaaaggtaggggttcccgagacggtactcggtgcaggtcttggtaaatccgcttctgccccgtgaggacctggtcatgacaatagagtagtgtttaatttaaaaagtttttgttataataaaccatagatttaatatatggggaaattctacagaaatattggtcgataaggctaatgatcatttatatagtctcattaggagagagtagcccatgaaatttgtttcatgctcattaaatacagcaatcggacttaagtgggttccattattattttagatcagcagtgtttattatctcagtgttaaggtacctctgaaaaatgaaaagtgttccgaataaatcgcccacagtattaggtttccatgctgtactttctctcacctagactttaaattggagtcatctaagaaatagagagagaagaagaaagaagtggattacttttaaaacactaggaggaattttatttactgtaaagcagatgagaaatttgtttgcccaagtttagaatttcagtatgttactttgcagaagtttggactgcctgtcttttgattttgtattaaaacttgatttgtcattgtaatatcatgaaataaggtaagtagcccgttgttttctaagtgacttgcggaaaactcgtaaaagtgaataattttttgacaaatattacagcagataggtttttttgttgcttttgcttaattacatttcactgttttttgattcttgataccagcaagggattaaaatagcggtgtgtttttctgctgctagaatgtatgatgaatcactcttgattctgaagccaaattcttgctgatagcattgctgccaatttctgtgctatgttgccttagtatgggcattgcagcgtccgagaatgtgcacaaagcacatcagaataaaggtgatcccagagctgcagagtgcacgtcaggataccagagggcagcttctgagagagctggaaaaggaaccagcctgcgaatatagttgtttgtagctggactttcagtgtgcatgaaaagggggaccccaccccttttctttttccacagagggtcatatatgtcacttcagttgaagaataatagaaaaagttgtgatttggaacagacttgagttttctgaccatacctcagcatggtatggtaagttgtgtttaatggtttaggtgtttttttaaatgtttgtgaggtgatgaatgagatcataaaatacccaaagaaggaaaagaattatggcttgcttggtattttttaaaaaatgtgtcgttgctgttaattttttttttttttttttgagacggagtcttgctctgtcacccaggctggagtgcagtggcgtgatctcggctcattgaagcctcggcctcccaggttcaagctattcttctgcctcagcctcccgaatagctggaactacaggcacatggcaccacaccctgctaatttttgtatttttagtagagacggggtttcactgtgttagccaggatggtctcgatctcctgacttcgtgatctgcccgcctcggtgtcccaaagtgctgggattacaggcgtgagccactgcaccctgccagctgttaatttttaagccaaaaataagattaccaaaatgcacaatgtgctgtagaaaggaaggggaagccattatctttgtggattactagatgttgtcactaccaaaatctaacctagaagtaaccgtatttgtgacacccatgacctgactactgggtctcctgagaatcggggtggggagaaagtgggggggggactgattattttaccttgcaggagaatgaagttctttgcccaaccgtttcctcttgatacaagctcttgcgttaaaacttagggggaagatttgcctctcactttttttcttggaaaatgtgggcagcaattttaaagagaacatgaaaatggagtaggttgaaaccaacattcagaacttcctttcatggattgaaacttaaagctgaggaggtttgagggtggaggtgaggaagggctagaagatagcaaatttcagagtcatatcagagaatatgaactgtcagtgtttccaatgtttctcttggctctgcacagcacttccaagcccttttgctcactgttttgcttctgccacacctaggagaagattcagagcttgctgaggcaaaacatgcgatatttccaagggccttccccctattctgaaatagaaattgagctttgtgatcatgtgtattcattccaaggtctatgtgttaaccttttgctaggatttgaacctgttattagtaggagccgacgcagttcacttgctgttgagtctaataagttatttttaaaaacgtttgccatgtcacaagtagaagcagattattcaatttctcttttttcctgcatccactatatttttcttctgtgttaaaataaagctatggtattttctgattttattcattttgtattagtgtaaaataaaatgaatcttagtcatttctggtagatgccgctttgaaatgtagccattgcttttgattgtctactttgttttccttgcctccgttcatcccctccacattgcccttgcctccagccccgaagggtctgtctacacctgcaggcttctctcaggattcagcctagatgagtaaattcggtgaagtcatctgtactaactctgctgggggtcacaacctttttcctccgataggagggggcagcttttttcctgccgtgtggaaagcagaacctctgacctgcccgggaaaggaaaacagtgctctagtgagaggacggactctgaccacgggcgctgagcaaggagctacacggtagaacggcatcttccagggatgtttgttttccccttaaagaaaatctcgaaggtgctgagtagtaggcacagtctgatgtaacctgaaatactagttgagtttttcagtgaactcacaaggggaagcaaaacaaactcaccctgtgctcagctgtgggttaaaataacgaatagtgaaataaagtaaattggggactgagatgtaccatgcagataaagtgatgtaaagtgctctgccggcctttccccgccttctgcttccagtcatcccacccaccagagaattgtgccatctttctgtgttgtcctaacaggcttcatttcttatctctctgaagatgcatcattctgtctcatgcgtcttttcatattttctctgacatttatttccattttattttagtttcatattttagcccttgttctcctggtatgactgaattcttttatattttgtttttcgtttaaaatgacaaaactcacctcttctacttctggtcctcaggtatttttttcttctattctgatactcttttttattatttcaagttcctttcatttagtttgaataatttttgcaacagaaaaacaaggaaagtatgaataactaacgaagaacaattaggatgattggatcagccagctgtgcaaaggacaggatgaacggttgtgattgcaacagtggattttatgtgtgtttttaaactaatagatttcactaaatggctattggttttggaagaggaatgcacttttttttctttttttttaccttcgttagctgattcaaagataaaattgtgtgccatcacagattaaggaatgtttttataaatatatacatataatataaagatttagtaactcttttatcaatattctaaggattagaatgtatagtagaatagtcttttatgaaataatatacttatggaaaatatatgactggtatatgattcctttagaggaagaaaatttcaattttcagattcaaaggaagcacccttcctagtctatatatatagtaagcggagaactagttttacagtgctcatttcaggtcttcagtaagtgtgtatgatgatgtcagaagtattcattggctcactttcaaatcattgaaaattcagccatgctaaggttggctattacgtgtattagcgtttccaagcgagtggtcttggctggggtgagattgtcagctgtctgttaggattagtcacaacaaacatggtgcaaatggtttccaacaacagcgcacttcaatgttaccttcataattcttttctgccagaacccaaaaaacaatactcttgagctactcagtgttccaattgttaaaaatttcctgaaattttccttcatgtattcaaagtgaaacataaagatctagaaggatggttgtgaaaagtatagactttatagtatctagtgggcatttt

SEQ ID NO: 52511 - DNA, 2005 bp, Homo sapiens
tattaatgtatctaaacctgtctaaacatagaaaagggacagtaaaaatacagtattatattcttatgggaccaccgttgtgtatgtgacccatcgttgactgaaatgtcgttatgcagcgtgtggctctaccttcaacatttactcctgatgacaaaggtaaagattgctgagtgcccccacagacagcaaagatggtgattctgagtctcgctcttaatgactttcttgagttatatgtcatgtatacgttacatgccaggaaattcatccacagacagtttgttgagttttaagaaatgcttatagttgtgtacctgatacgacagtccagttttagaacatttccatcacccagaaagttccttgtatccatttgtagtcaatccccattcctcctcctagccccaggcaagtactagtctgctttctggtttatagtttaccttttctagaaatttcatgtaattgaatcatacactactcagtcttttggatctgcttctttcattgtaaagtttgagctccagtggtgttgcatgtatcactagttcctttttattttaaagtagttttgcattgtatggatatactacattttgttgatccacttactggttatgagatgtttggaatgttttttgcagtttttggctattatgaataacccatctgtggacactggtataactgtctttgtgtagacatatgttttcatttctcttgggtgggtacctaggcattgaatggcttggctatatggcaggtatatgtttaactttttaagaagttgctagactgttttccaaagtacctgtaccattttacatttccaccagcagtgtttaaggtttttagtttctctgcctccttgtcagctcctggtattgtcagacttctttattttagccactccggtgggtgttcaaacgtgcttttttatacttaacattttatttcttgagaggatttgaaagtgtctagataccttaatgctgctcgtgtcttccattttacagaccagaaggcattggcccagtaaatgggaatctaaatgtctcacccgagattcccaaatgagtcactgagcctagaatcttcatgcgtcagttggagttgtagcaacctgcttttgttctgtcaactattgtgactcagaatcctctctgtccttgtagcattgttaggtgtgcctttctttttatcctttcaaaatcatctgttcttatcctctctggaattgtgtctgatgacatgcagcttgttttctgcagaagaatgctagtgttgtggagaggttctctctgcctcttggctgcagcacacaggcgctgggtggtcagacctgcttccgaggctgtctccacagtgactgtgcaaccgcatgtcatcctgtgaaagggcagatacgtgcctcgtcagagccttgtgggagttagtgaggggacttctctaaggcagctagtactcactcaatacttaatgcatcttaaggcacctcttcacagaaggcggtggaaggctgcttacgtgatggcatgtggatagcgatgccatccgtttgtttttttctcctccatgacagagaagcaggaaaacattcctaaatttatttatagacgttaaaaaaaaatcaggcttggttttttcctgtaactgttcttcagccggcagcaagtatagcagcaagtatacagcagcaagtatacagcagcaagtatacagcagcaagtacagcagcagcaagtacagcagcagtactttatgagttgttgtgtttattccctgccttttggctttactcaagaaaaccagttgtgtttctcagagcaactgtattgttttatttgccactctcttcactttgtccattatagtacaatagattgtccttgtcccgtctccaaattggaagctccctaggtggtggtcaggctgttgatgagatttgtattctatcaaagctccattttagataatctatcatcattttttatacgcagta

SEQ ID NO: 52512 - DNA, 4265 bp, Homo sapiens
ttcctgacctcatgatccgcccgccttggcctcccaaagtgctgggattacgggcgtaagccaccgcgtctggcctattttgtttttttttaaagacagttcattattgtctatcttaatatgttagaaatcactcaaaataaagcagctgttttaacaatagctcagtagaaatagtttgttgagagtgttttacttcccaagaagttttttgatgtagttttcttagcaggaaaaatgtttgtctgttgtggatggaaacatttccccccttgcccagaacatgtgtggtttccattaacttatttttccatagaactttggccatggctgtagctgatgctgtgggtcacctgtgctattagggttaaattgagatcttaaggtacctttctccccgctgtagtccggaatgacatgggtttgtgatcagacaaactgattgaaatcccacctttttgcccctcaccggctttttcacgctggaccgactcgcttctctaagtctcagtttcctcatctgcaaaacagacttcacgggaaaacattttgcacagagctgcccctgcatcatgggtcacagacagtagtaattaatgttactggggaatgggcttttccagtactgttttcagacttaaagtcatttgttatctgtggtgtgttatgggaacagaagatgttcctgagagctgataggagagaccaggaagtgtagctgcaggaagaatgacgatgagggcacgtttggaacatcagcgtggcggatgtgggccagctgaagtgtccccagcattaagactgggaaagcagcccagtcacttctctagtgggtcccagccacaggtgcagaggacgcctgcctcccaggcagacccaggaagctgccccatggggccactctgccctagtcaaatactgcctcaggttcagttggaagtttccagtcggctcctccaaagggagttttagttgaagtcactagagctgttttattgattttggttgaggtctttgtgagctcaatttacaaaaagtctggttatccacaaaaaaatgcttgctggtgtcctgagcaactgaagaattccagaaacctttcaacaacaagtgttgagatctcccctgacccccgcctcccagcaactacagaggtctgagtttgcagtaactattattcttgtgtggaattggctctggatcgttaataagtttccctgagcgctgactaacagaaacccacttagtcacagaagaaatgggtccagtgtttgtcccagctatgagtaatgggttatgcatgatttaaaaaggcttctcagaaaggccttgcttatgtagtcaaggatcaatatttttgaaaagaagtttttataggtaagccataacattacttgataatcagacatcattttcaagtagttaaaagggtcattggataaagctcagtggaccgacactggcttcctaattgctaagggctgaaactccacatgccctgtaaattatgagcatgcttgaattttttatgggaaaagaaattatggttttatgtcggataattttcatgtcaaatgttagatcagccagccggctctatcatccaggcaggttgttgtttttccccacctgatccctgcttttccttgagaagtttattttaaatggagagtcaggaatgagagagaacgtaggataggaatgaatcatgagaaaaatgccaccagttgttttccatagtccgtgtccttgttggaatatccttacctttgtcaacagagagtagcagttcatccacaagctcgtgagcagccactggcagcactgcctccatgaggcctcgggagcattctcattgttttctccaggctgtgctgttcttcccctcagccttgagagtgaccagggatctcctaggcctagggaaacgccacctggtcattggccagagccgtttctagatatggtatctgacccctgtgtgagtaccgactgcccaagagctggcagtagttttgtactctgagcctgagcgtgtggccccacgttccatgaggcctttggccggtttgtttgccagagtgtctctgagaggagggagaatgttggtatggagaataattttattgctttcttctcaaaataaaggaaatactcaagggaatggtgggaggggaggggataaatatagcgtttccgatttcctgcttcctctactcttccacagcatttcacttttcatacggttagattttcatcctatcgacttcagctaaaaataattccaaccatttctatcagattggccctcttatcatacttgttattattttgctttcctattcaaaacctttttttccccttaggccaatgaactgttttactttattagcttcatatttatttatttgttattgatggataataggtatacatagttttagggtacatgtgatttagtaccatcatataatttataaaaatcaaatcattatatttgggatctcaatcaacttaaatatttgtcttttctttatgctagaaccattctcaatagcttttctacagggaataaaagatggtctacagtgctcacctgctgcacctggtgcatgtgtcatggtcttatggctggggcagtcttggtgtcctggcttttggatggtcagaaattctggcttgtccttgttcttccttctcccgtgatccattttcccagcagaggccattacatatgctggtgtccccctactccttccagccttctgttaacagatactgtcagcccacagccactgcagacgtggcccattgctacttccttgtccacagcaacagtgctggatacggctcagtgccttgtcagacagacaagagttgttgatgagtctgcaaagcagagctggtaggttagctgccagagctgaccccactgagcaaagcagtgagtttagtaggtacttggcaaaagttaattcatcaggagttgggagaaaaggtgcaagaaaggtcgtcttagattattgggcatgggctgcctgcttaccacattggtattttcgttttgtataattattaagttgatagtgattttaacaaataaaacataactttgaagtttgggaggtaagtgacttgtgtaaggttttaggttacatgagctaaagataagaatttctgtagtgtcatttcctaattgttcagagtgcccattatgcttagcctaggtgtcttgcttgggttagcccattctaaaagtcgtgtgttcctagggcagtggtcatgatcatcactggactctgccagttcccaggccccagcactgcctccgccggcagcaagcagtaataagtaagctccgagtggttaagcctaatagggctgtgacccagtttgaactccgtaatgaggaaagagcagatttatttgctcccctgcatgcgtccctcccccgtgttcctttattatctttagaggaaattgaatagcaaaattctgcattctcataatgctaatggactgatgtcatcttttccactctgaagtcaagaaagtaagagaaaaccggaatatagatttaacacttcatagctacccagggcttcagcacaggttctttctgtgtatatatatgtttttaacaactttaaggcgtaatttacgtgccataaacaattcactgattttaagtaagttagctaagttgtgcaaccatcaccacaatctagttttaaaacatttccatcatcccagagaaacccctggcatccatcactaatcactgcctatttccccctctcctcatccctaggcaacctgtaaatctacttcttgtttctgtagatttgcagtttctggacatttcatatcagtggaatcatataatacatggtcttacgtgtttgttttctttcacttagcataacgtattgaggtgcatgcatgtcgcagtgtgtatcgctgtgttccctttattcctggacagtattccattttatggttacaccacattttatctgtctgttcaccagttgatgcacatttgggttatttccagtttagggctgtagtaatgctgcagtaagtacagatgagttgttaaatgaacatatgcttttacctctctccgatagatgacctaggagtcacgtaagttgagtaaatttatatgagcagttgagtaaatggagtgatttaagaagcctagattgttttccaaagtggctataccacattaccttcccaccagtgatgaacaagggtcc

SEQ ID NO: 52513 - DNA, 916 bp, Homo sapiens
taagtcgtatcatcagtcatgacagagcattccggtgaaataaccctctcgtcgtgggtgaagttcaggaccaccctttgggtctcagcagaatcatgagcctcagaacactcattgcaggcctgtttatctttcaaatttgtgcttgtccaaatattctgaagcggggcatgcagtctgtcaagaggaaaagatgagaggcattccagttcacacctagcacccaggtgcccagtgccagaagttcatgggaggaaaatagtgacagagatgattttcttagggtctgatatctgaataaacaacctcaactgaacacaatttacatcaattattttggcctccagaggcacttttgtcatgtggtggcagtttgttataaaggaacggttctcatagggcagaatcaccctcgtgggagtgatgtgggtgctttgtgatcggggtgctttggccgtgggtgtatggagtccaggcgcactatgcctgtggtgcacagtgcattccagcagactggagaattacgtcactacccacacagccttcaggtgccagctggagagctgtacaggtgaaaaactggtgtctaatatttgggcttagaaattcttttatgtacacagttttaatattgactcaggtttctgggaatgagtctgaagggtaaatctgggaagattgtattttgttgaatttttccaagagttacttgccatttcagaaaatctcttttgcagtgagaatgcatttgtgatgtttgagtgaccacctgccacagctgcttcagtttgcattaacagctgtgtgttagtggggattctccaggcagcccattgcttcactgttgtatttaattgggtactcaggcatcagcttgtaaatattgacgtccatattaatgctttataactcactt

SEQ ID NO: 52514 - DNA, 1008 bp, Homo sapiens
agtaatactaatatccttgtgaaatggcatgtatgctatagttttaaactttttttcttaaataccatatgcaaagagagaaagtcctcacattgtgtaagtgagaggagaaattgctacagctatgactgcctttgttctcaaagccatttgaattgccggctgtgttggggctggtttgtaccttgttgaagtgctgagatgagaacttctcattagagtaattgcctaattgccgggtgggagcggcccatccggggcggggcggggtgaggcggggcctggggcgcaggggcggggcgaggtgccggcggccgagatactcacgggcgcgggacctggccgggagactgacagcaccgggaccgaccacggcccacccctccggccgcggcggccgggaccagaacagcgcaggctctccgcccacgcctgccctcggctcccagtccgcgctgccgccgcccaggtgacacgcagggacgggagcggggctgctatgtccctcgggcgcgctttgggacgttgctgagtggctactgcttgtgctttcttgcttccaagctggcggtaaaccttttaaattcagagtgattcaagggcataggcgtcggaattgtgatttcgtgcgtgttttatttaccaggccttcaaatcaaaaaggccaggcaaacacacgttctggggctatcaagaaagttcacacgaaggacaaatccagcagggagaaagtgacataccttgcgggctcaggcttgggatttctgcagccacgcgcgcgttcacccgacgggacctcgcctgcactgccgccgggagaagcctgctctagactccggctccaggggagagggctgggctccacagagaggagcagcctgtgagttttcaaacatttctctgtcagagttagctcttacttgttaaattccgagatgagaatctatactgtgaaatcagcagaaaagtggttcttagaaattttaaagtttgtttatccactttact

SEQ ID NO: 52515 - DNA, 2183 bp, Homo sapiens
aaaaacgaccagcgtcacaggcctgtcccgtagcacgggcagtagctgaagaggccctgcagaccctgtgtaatgggtctaggtctcctctacctcttttttgtttgtatgtttgagacggagtctcgctgtgtctcccaggctggagtgcagtggcacgatcttggctcactgcaacctccaactcccaggttcaagcagttctgcctcagcctcccgagtagctggattacaggtgcccaccaccacgcccagccaattttttgtattttaatagagacggggtttcaccatcttggccaggctgttctcgaactcctgacctcatgatccacctgccttggcttcccaaagtgctgggattacaggcgtgagccaccgcgcctggcctcgtctacctcttttgatgcatcgtacacaagccattggtcagggggcgggtccacaagctggtatttatcttaatatgctgttactaatacattgtttacttgggaagaaagcaccatagcatttatttgcagtccaaaggtggaagttgtgagtccagcaacacaatcatgtgacagctttaatgctcatttatgaatttcatttgggccaaaagcatagttctgtgactcaagcacttaatgattaatagaactctagaggaacttaccaaaggggcaaagaatgaaggtttgatggttgttacatctccagattctaaaattgatccatagttgtggttctgttcgttcctttcagtgctagaactctttccattagagatgactttcgtcttctgctttggagggcttggagatgtgaaatgttcaggagggtcttttccctgctgttggagcttctttttcttccctggttgctttttcatagtattctggctacaaataagtaagacatttctattttgttttgttacagagtggcttagaggaaaggttagatataatctctttgggctctgttgctgtttcaggatgctcgatgctttagatttattaatatgtagtgtgctgaacttagaagtccttcctcttgtctgccttgatccagagtctaagcgtaataaaggcagaaactctggctatgctgacgtcaggtcctgtcatcgtggtgtgtgagggcagcacccagctctgcctctcccaccacggtgctggcaccagggcctctgccccgtaggacaccgaggcttatgaataggagcagtgccggccaaggcgccggcaccatcttggtgatgtccagggggcccacccaggcccccttttcctctcctccccttctcctgctggctgcccttggtgcaggcgaatccagggcctcattactaagccagctggctcaccacgtcatcatccagcattgtcaggagacaccattgtggaacagagccctacaaggcaggttttcagattgaacatgaaaaagaacaccattgtggagtgtcagagtagtgtgtgcaattagtgaaatgcttttatagggtaaaatacaaggaaccaggtccccccgggatcccaaaagggcaagttgacacttgccacctccacctggcaacccacagaagctcagcattaggccgtttctcacagtatgattgcaggtacaggggtctggcttactggcccattgatgccatcaaccttaggttacagatcaagaggccagataccgatgagtctgaactttagaacatggcctgtgaatagtgtgacttcaggtttttagaaagctgagaccatgcttgtgagggtcatggctgtccctttgacagagcattattccttttctagagtttaaaaggtgggtatagattgaaaaaagggattggggtaattgtctttagttactttagacatatctttttacaccatctgctttttatgataggagaaagaatagagttctctggttttatttgtgcattttttctttgtcttatttggtttatgaaacatttaatcgatgtttcagaacattctttcaaagtcaggacggtctgtctctcagtacatccttcttagggttttctttctgttattcaattcagtgcctctggaactttcctgtggaaagcctgcaacagcatctcccctgttatactgtgataaagggattttttttttaaaaagctgatctaaaatcacaaagaactttcttttttagataaataa

SEQ ID NO: 52516 - DNA, 736 bp, Homo sapiens
ggggagccccatggctatgccctgaggctgcgtggggctaaacggcactgaagggccactgaggggctggagggcagaggccgcaacacgccaccctggcccctgtggcctgcagccactagcaacgtcacagggccatctgtcccctgagtggtaggtacgaacagttaactgggtttgccaggtttaataaaagatcagggagaggcagcaagttaatgggttaattgccactgtcctccaggagaacaaacggatgccgggtccagtccttccccctgaggccgcagagatgccagtgtttcagcccgcaggagccgggcagcccagtgcagggcacttctccagaggccagcacgttttaaaccatgtcccctgctgccgcctccggctgtctgaacacaggctgcgccaacctgtggctgggcccgggcccagggcctgctgcgggaggggaggtagccagggcatctgagggtgaccccagcccagagggcccccccttcgaagggaggaagcagcagtgaccacaccctgcacttggtcgcctgcaggcctcgccagcaccctggggccggcctagaaaggcagcccctgcctccctgctggggttgaagggacaggaggacctccccagcccagggctctggaccacagccaggggtataagggcagggaattctggctggacaaaggcaaaaagtggggtgagggaggatacaggaaagaaacacca

SEQ ID NO: 52517 - DNA, 2170 bp, Homo sapiens
attccagaccctgtcgcacctctgaagaccttggtccagttccttccagggtggcttcacgccttgccatccctgcctccctgcggctgcccctgtgcccaggccccgccaacgccgtcaaggccccctcggccacgccgcgtccccgcccagcatctcggatgccattccttcccggtggcacctgcccaggctttgccgaaatcgaaggcaacaagagggggaggtgggcttaagagtgcctgcccggccgccacctgtcttggaggtggagggaatggccgaggggtggctcccccagctccccacctttgagcatctctcaggctgggaaagggcaaagggccacatgaagccagcaggcacttcagtgccacgtccccagagggacagtcctcccacccaggaacccctggctgcccagaaagcaccaccggcaaggccgcctccaccgcacccgtgagaggactcggcagctgtgaaggaactgggagattctgcagatgggccgaggtcagggcttccaggctaggaagaagtcttccagatgcctagcttcaccagtcccaggagaaggaaggaaggggcatgggcagaggcctggcaggggaggaggaagaggccaaccctgtacacaggaccacaggacagggtggaggactgtcccaggagtccctccacaacaggaggcctggtcccagtggcccctctctctaggggttccctgctgccaccatgtccacagaggagtcacagcttccatggcccagccacaagttctggcttaaagtcagaacaggagagaggccctcaactccagtgaagcatgcagctcctttttcaaccccaacacctctgacgaagcatgtttgttatatgaaggcaaggatcatgatggcacgaagcatgttatatgaaggcaatgaccatgagcacgaagcatgttatatgaaggcaatgaccatgatggcagctgccaccaaaatactttaccagcacacccttctgactgcagcatttctcagaagaaaggctcaggtgaaaagttcctggaattttccagatcttcagtggatctattagcattgccacataccaaaataaggaatttccctaaaggttaacttctaatccagcaaaactttgctcatacctcaaaacggagccaagactcagactaatacacacaaatcaaaatggacaaaagcaagtcttgactcacttgacaaacagaatagacacaaaagaatgtacaaccaatacaattccagaatgtccctgaaaggaaaaagcaccctgtactgacatgaaataaatgttaaccttgagattacactaacaatgcctttttttaagagatggtctcgctctgttgcccaggctggagtgcagtgtcatgatctcggctcactacaactcccacctcccgggttcaagagatcctcatgcctcagcctcttgaatagctgggattacagatgcatgccattgcaccccgataatttttgtatttttagtagagatagggtattgccatgttagccaggcagtctggaactcctgggctgaagtaatccccctgccttggcctcccaaagtgctgggatcacaggtgtgagccactgcacccagccaggccaattctttatcaggaatttccaattcccatttccatttaacaagagaactaactaactgaattaatcctgccttctaatgtttctggaacacatcctctaccttcgcctgccggctcctctgatgtcccaagggccttttggtagcagttagcatcatttagcaaatacagagtggaaagagtgtgccggaggcccgggcttgggtgtgctgtctgctcctgtggcctgtcaggcaggtccagggagacacaagggaagcctgagggaccctgactccccttgaagaatttctccatacagcaagacagtgtggctttatcccagatccctgactcctaaaaagagtctaaaaagagctaagttctctctaaattctttaatggttcatgaccaaattcttggttctaagactttgaatttttaaataatagatgtgcagcttgacttgggtaaaaactagaaacctgttctcccacccaggcctttgctttagtaattatcaagctgacggtctggccgggcgggcacca

SEQ ID NO: 52518 - DNA, 1096 bp, Homo sapiens
gtcttcctttctcttctatcgtggtaaactttcaagtcaggtgggatccgtgtgtgcagcctgaggtacaggtgagagcagcgtggctgtcagcacctgcaaccctatgcacatcgccctgggaggccaaggggaagggtgaaaggggccatgaaacaaggggagaaacgggatcgcggaggaaggcaactgattccattaggattcccttagacagtctccaactagaaagagaaagaaagaacacagaagtcccaactgaactaaacaagttgaaggcctctaggaggtaggggttctatgagctcaggaaaagtgggcacagccaacctcagggacttcctcagtctcagctcaagggcgagggtgaacactccctccttcccagtgtcccggccactaactaaagaccggaccgttcactgtggctcttggaactcactttctccacttgcaggaagcaggaagaagtggaaggcaatctctgtgccacatccctgcagattacgaaagctaaagggaaaaagggcagagttcactggagctcctggaagacagaggctgcgggaccatggcacctgcaggtttctgaatcattttttcagggtgccttggtctttattcctgtccttacaaaatgtgctccaatcccacagagctgcctcccacaaaggaatatgactggcgagtcagtggtggcgagggccactgagagcccagggtgccagacactgggccaggaggtggatgtccacgtgggctggagtccccagctgcacagtcctgagcgggaagggagccaggcgccaccgcgcaggggagggtgaaggcaggtggcctcacaccaaaagaaaacttacagaagtcttagctggttctgctgctttaaccatttttctggggttttgtgtctcttatttcatctttcctctagtgaagagctacaagtttattttttgaatgtttttaattgattcttcctcttacccatatgttcatttccaaaaacttattttccatgctgaaataagaaatactgtttttaaaaagtctgttgtgcaaatgtcaattcttgtgaacatgtgatatacggcat

SEQ ID NO: 52519 - DNA, 2798 bp, Homo sapiens
cccggccaccaacagtttttattttttagagccagggtcttgctacattgcccaggctggacttgaactcctggcctcaagtgattctcctgctttggcctcctgagtagctgggattacaggtgtgtgccactgtgcctgtctttttatttttattttttaaagcctacagcacccgctaatccccaggcccaacccccctcagcttctgagatcaggcaagactgggcacatttagggtggagtggctgtagacgctaatggttacggggtatttactgtggatacgaggcactgtgctaagaatattacagtcattcaacccatttaaatcttagtgtaagtatttgtcctagtttgtaagtttatttctgttatcccactatacttataaaagggatctcttttaactctcagaagtggcatggtctagattttaaatcatatggccaccctatttaacactcagagccaccccgagctgcgagtgttagagtggtcagagactcgtatgtcagtcactcccactacttagaagctgtttttactcacagagcacttctcacactcactgtgtggattttcttcctccacacaaaccaatgctcccaactctctagacaccaactgggtgtccagtgattcaattctgacaccatctggcattagcacacaccccacaggttaagggctcagtcccacaagactgcccccacttcagatgccaatcacaggtctaggcctctcattcttctgaccaactagctataaaatcagaggttccaatgatcctctcttcaggtttgataatttgctagaatggctcacagaactcaggaagacactttacttgccattaccaatttattctgaaagatacaattcaggaacagccacatggaagagatgcatggggccaggcctgggggaaagttctgagcttccaggccctctccaggcacgtcaccttcccagcacctggatgtgaccaccaatctggaagctatttgaaccccacagtttaggttttttatggaggtctcacaatgtaagcacgactgattaaatcgctggccagtagtgatcaggtcgaactctgggggtcaggtgtggttggttcctttggctaccagcccccatcccgaggctatctgggggcccaccaggagtcacttcattagcctacactcaggtgtggtgaaaagggacttatgaataataaaagatgctcttctcacctcatcactcaggaaatttcaagggttttaggagcctggatgaagaccaaatgcacatttcttattatatcacgagatcaccgtcatgccttcattctttttttcacttgttcagtgtctcattcattcaggcatatagaacaaattctccatccagtcttcaagcttctcagtatttttgaagcagtggattcggatgacctcagaggacatgtcatgctgtattacttatactccagacttacaaaaggacctcagcagcccgcccaggaaggttttatgccgtctttagcctgcaggtgcctatgacggcagccccagggacagacatgaaaagttgacatttaggccaagaaatttaaaagttcctctaggttatctaaaccataaagaggggcaagcatctgctgtttaaaagacaggcagaccactgctgaaaatatatgactgcatttggaagccaagaccaaagacaccagccaattgtcaaacagatgaaattccactggtgtactgtggtaagcaaatagttggaaggctaaacacgggttagagtgcattggtcaaagaaagcatgtggtttccaaatgaccacgcagcacatctggggagggggggctgggcgcggctggtaatttgcactgattgattggatcagcctcgctgtgtcaacatgtggctgggatgttccgcctacgggaaagtgtccatggagaggctccagctcttacgccactgcttggggaacttgctgagctgaagccacaggatttggacacactgaagaccacccagcacttctggacagtctgtcccttatggattagcagacataactttccaaaccaaataaattttatgagttgttgagggagaacatgctatcacaagcaaaattacaagcaagggagtgtgggcctgcttggggagccgctgccctcagcgtccctctgagcactgtgctagagcaggagtagctgttctctgggcacgtcgcctggccagtgatttctcaaacagcttttggggtttcacagaagaccaggagtattcacttccagattccctttaattcagctcttgctgaaagagtaaggctagacacgggggtggctgagaccatattctcctgtgaaatatattcctagatgaatcaagaagggagctgccacagtgaaaggcaagagcattttagttaaatattctttgtaagtattttgaaaaatcgccgtggagagtaaaaatgccagttggtgtgatcagtggtggggccgtgaagcgtgtgctccattgcgggtgttgggcactgtaaggaaagaatcgagcgccgcgccgcacgttcacaacgccctttactcagtatctcacataaggaccaaacataacgctcggactcctcagaaagctcactccacttactgggtgaattttgacagaaggtttaagagtaggtagaaaaaaggccattttatttttttagccatgaaacctgcattttgaccatttttcgaatcaagtgacttaatcttctaattctctttttaaatctcactttcacaa

SEQ ID NO: 52520 - DNA, 857 bp, Homo sapiens
ctctactaaaaacacaaaattagctgggcgtgatggtgcatgcctgtaatcccagctactcgggaggctgaggcaggagaatcacttgaacccggaaggcagaggttgcggtgagccgagattgcaccactgtactccagcctgggcaacaagagtgaaactctgtctcaaaaaagaaaagaaaagaaaagatgaaactgacacatcagagaattctctgactcatgagatggagacatctgctacagagaaagtgggctaaactgtaaataaagacaaaaaatgtgaggaaagttatttttcccttgcctttacagatgttaatgatttaccttattgtgtcttatgcaacaatattttgaatactgttatggtgcaagttaactgccacatcagtttgagaccaatcattcagagtctgaagaaaaaaaatttaaatgcagatgtgataaattaatatgtcaccaagagaactgtacttctgccttacaatagaatctctggacttactgtattgcttgtacttgtctggtatcagcaccaacttaagcacagaagctcttttatatgaaagttggccacacacccaagtggtagggaaatacttaaagtactgaataactattttgaatctcctggtttttcctggaataaccgtgttgacatttgcactgatagcgcaaaagcaacagtgggtaacacagctgtgtctcagtgggaatcagagccgagacagccctcacgctactcttcaccaccacacacacacagtcgaaacactgcattttcacatatgaatgtctgatgaagcagtttaacatactgactttattaaactgttgccctcaaggatactt

SEQ ID NO: 52521 - DNA, 1407 bp, Homo sapiens
actgtttgagcccagaagttccagaccagcctgggtaacaaagggagaccctgtctttacaaaaaaactttttaaattagccgggtatggtggcacgcatctgtagtcccaactacttgagaagctgaggttggaggactgcttgggtctgggaggtcaaggctacaatgagccatgattgtgccactgcactccagcctgggtgaaagaatcagaccccgtcacaaacaaacaaaccccaatataataaaggaactgtatggtagttatagttgagacgtactgaaagctttctctgccaggtactgtgcatctagccctgtcatcatgcttatcttgcacatggccctcacagtctgcaggaatcgtggcttgttagttaaattgcagagctgactcctgaggaaggccagtggtgctgggcccaagaggaccttctactgctgctgcagccaagatgccaagccctgagttgacataaaggagttaccaggcagaaggccaagaaacaaagtctcaagcctggacatgttctgaactgatgaagccatccaaaaagcccttctgagtgggtggaacaacacagcagaggtccccacaggacccaaaaatagtagtcaagtaggcatcagtggccaaattccaggagtccctagagaaagggttgatctcatcaggggagaaggtctacaatcaagaatataatcacgggttgagactcaagactcctaggatgggcaaagggctccatgccagagtcttggctcagaggtgttaaaggcccctaagccagcactcgcaggagtgagacacacgtcatgacccagcagctagtggagatggaatttctgaaatgctaccacaattcactgtctttagcttgggacttaggtgggaaagggctatagaacacaacagtgactcttgatggggccaattcaaaatccactaatctgctattaaaacatttttgtggctttactggcatttagtggttaaggaaaactagaaatataccatataatagcaaactgtcacacacaattttcagacgttccactgtatcatcatgtatgtggaaccttcttttagagcctaaagctgttttacatagaaatacaaaatatgttttgcatgttctggcatcctctgacttctctgaaaatgtaattaccctgttggtcagggaagattttacagcagtttcatcatagcattatcaagagttgtctatcgttttggaaaatcacctcctggaaggcaaggccacatgaggccctcctctaacagcctgaatttgcagtggtcacattctcagagagcccatgtgtagatgcatgcatccgttcatgatgtctcccagtctcataagacccaagtatttacactggaaatgtacattatctt

SEQ ID NO: 52522 - DNA, 1459 bp, Homo sapiens
tctggtacccaatttcccatgttataaaactccaagtcttttcccccattcggtgcgctggacacataagatcatagagggttcgtagttgtaaacgcacccacctaaaaaattaaaaagagcaaaccaacaaacagcacctgaaaaatctctcacgggctttgaagatatggcctggcgtccacaaaaagaatggagggaagacactggcctctgcgaacccgcctccctccgggaataaaaggcggagggcgggaggggtaacagccgcgccccgggctcctctaattggacctcgcccctcctggcgccccggcgaatggggtttgggggcaggggtgtgagggacggggaggacgaggccagctgtagagggcgaccggctcaaaggggcgagcttttcacggctcccacgagtccgaggcagagaaattcacctttgctcctctcctttgaagaagacatagctgcctgcgctcaatgaacaaaaagaaccaaaacgccaacacccggctcccgcctctccgggggctcccttccgcgcgaccccagcgccggctcccgcccccgctttccccgccctggccccgccccgcgggctggcaccgcccgccaccttccgcctcccgcctcccgcctcccgcctcagccttagccacagccctgcgccggcgggaacccctctcgcccaccgcaaggcgcgcctggcccacccgctctcgcgagccttccctcttgcccctcgcctcctcctcccgctctcgccgctgacgtgtcggccagacccccgagggaagcctccgccctcgctgcgttctgcggcctgccgcttaccgggtggtcctcgcgggagctgcttcagcagtttgggcagtggcggaaaggaagccaccgcccgggatctgtggcttgaaaatttggctttgcctcgtattggctttttgagtttttttggaattttcccgcggtcgcccggcagtggagccgcgcgcgcgcacacgtgtcagcagtgcattctggggcctggctagcggccccgcgcgctcccgcggcgtcgcgggaaaattccgacgaatctcgggtccgtggggcggggcgggcgcggccagggctctggcggaagtgggcccggctggggcgggttctaggcgagcggagtcggtactgctccagtgttcccggtttcgcgcggaagccccggcgggagcagggttgcagcagcgcccgcggagaaggggcgctggcttcttccatattctgttcaaaatgtaggggaggtaaaatggaaattagttcttttgaagaaaagttgaggctttgtcaacggggtaaaacctctaaaataagattttctaactgcgttctaaacaatagcaacaaaaaaggcatcttcagttaatgatttcccctaccgtacattagttccatacagtgtttggtcggggttcaaatcagttca

SEQ ID NO: 52523 - DNA, 1753 bp, Homo sapiens
ataattctttcaactttttccgtttgttcaaaaattttcataagatgttgggggaagaagaggtgagtcagtggtttgagtcagtggtttgatgctgtgccgcctttatattaataaacagctgggtggctggctagatcttccactttccagcactgtctctttttacttggcctcggttaaactttaacaaccggtcctgtcccaggaagaagtcttggaagcagcagacccaccccctgcatctcaccctggggccctgagactctgtgggtgagcacatttgttacttatcagaactggcccccacaaatctagctccatgtccccatttctctaaactgggagtacattagtccagggcccttcacactttgatttgcttccttagaaacacaggcggccctgcctgcacacacctgttccctgtccccgatgcggccagccgagcccccactgccacggggaggtctgcttcgggtttatgttttagggtaagaaaaaggccattaaaattctctctgatggttgagtccctgcttgtgggggagggggagacggagccaaggggaagaaatttgctggtaagcaaagccccacttaaaaattttccctttctttctttttgtttctccttttttcccccttgaagcggctttccctggagtcaaagcattttacaaaaacaaaccactccagagctttcaagtctagggaaagctcaagcaaagttaattaacatgaaggttctcacaaaagttaattaacatgaagggactcacaaaagctgtctgctggcatctgctcgcctgcctgccatgtgcagcggcccctttgtgcccgcgcacccggcccggcccggccctgcctgcgcggcggctgcggctctgggcggccccggctcccggaggcctctcccccgcggcggggcggggctcagacacctggctcctgcggggctcctgccctgcttcctgtcctggttcctgccccgcttcctgtcctggttcctgccccggcttctgcccgggttcctgccccggctcctgccccggctccggtccgcggcgagaaggtgcggccggcacgaggcagccgcggggagaaggaatagagcgagcgagaggcgccggcccaaggggcagccaggagccagacgaggaaagcaagggagaaaggacaatcacaaaatctctttaacatgtgtctcgtgcaaatcaaggttgtttttgacggactaacttaaaaatactgatacacggctctgtgatacacatgcgcagtggctcagcctgtaatcccagcactttcggaggccgaggcgggcggatcacttgaggtcaggagttcgagaccagcctggccaacatggtgaaaccccgtctctactaaaaatacaaaaattagccaggcatggtggcgcacgcctgtaatccgaactaccagggaggctgaggcaggagaatggcttgaacctgggaggcggaggttacagtgagcccagattgcaccattgcactccagcctgggtgacagtgaaattccctctcaaaaaacaaacaaacaaaaaatacatgcaaagtataaatcccacaaaacagtcatatcagaactggaggtcattatgttaagtgaaaaaggccaggcacagaaagacaaacatcgcatgttctcatttattagtgggatccagaaatcaaatctgttgaactcatggacatagagagtagaaggatggttaccagaggctggg

SEQ ID NO: 52524 - DNA, 769 bp, Homo sapiens
taacttcaccaatagtaaacataaaaaatactcactaagcccattaatggctgtcccgcctgtcacagacacaaacctaattctaactaatacactgtgtgacgaaagtggggggcagaaaggaaaacttgagacaccttttccttgcagaccagaccaaataaccctgttacaatttctttcacttgtataaacaatgcgcccctgcagcagatttcaagataaatggcttcaatttacactcttctcctaagtaaactggcaaaggtaacaaggaaatgtttctcctctgtggaaaaagaaacaaggaaaggtggccagtgtgtgttcagcacaaaacttgccaggagaagataaataaagtgattcaagtcagatgcccatggggaaatcccaattgagaggaacaaactgtatcagccacagccatcatgggcagtccctggaacctggttccatcagacgcacctggtcagcatccagaaaacacaggtgccaggttctcagtcagctgggggtgagcagcctgttttccggaagcaccccaggtgaccctgaacctgctgcccaggccgagaagtcctgcctcacaccaacccagctttccagcaagctggccagcacggggtatgcccaaagccagcgcaggagcaggtgaccaaagaaaaccatcaacactgtgactgccaaatgccttttctcttcctctcctttttacatccttaggcccaaggttatgttcaatgaacggttctgggccaagccaagc

SEQ ID NO: 52525 - DNA, 2906 bp, Homo sapiens
gcagccttcccccagaataattccatgtaaaaagcccccacccgcgaggaaacattaatctactttgcaaacatgcgttccagtctgtgccttactatttttttttccactccttccacccccaccccgcgttttttgtaccttgagacaaatgtttttttccctcagagttgaaagctgtccaaaaacaggaccacacacgccgccgcctccgcagccccgcgctgcgcccgcccccggccctccccagcgcggcggccgcggccgccgggggcgcgcacactccagccagccggaggggtggcctctggctctccccgactcctttttctttggacgcggtgggtgggggtgggggagagaagaaagccgggccgcggagcggggccgggagaggccagccccggggcgcctctcggggcgcggcccaggcggacagcggcagcggcggcgggcccggggcccccggcgcgcagagtggtccgtcccggaggggccccgcgcccccgtcccgcccccgccgctctctcccaccacacctcggccggcgcagcgccccgagtagattacagcgcggcctttgtcgggcgggcctggctcccggccaggcgcccaaacaataaacaatcccccgggtgcgggcagggggtttcgccggccgcagccaggctctaggtgtgcgctggcgaatatctctatcaaccgcgaggagggaccgggccgggggcgcgggcgccgcggcgggcgctcttaccttccacccacagctcctccacgttggtctcgaggttcgctgcttttaatcccaccgcgaaggccccaaatatgaggaggcccacaaccaagaacttgccgcagtttttttgaatgtaacaacccagtttaaataagagtctctgaaacttcgctctcagccacagcggcgctttccggccagtagccttcccctggggacgaagcagaagggaggagtgagcgccggggagtcgcggcccgcgcgcccacgcccgcttgcgcgcacccgcccggtgagcccccaacagccgtgggggcgcgggtggccgcggcacacggactcgccctcgagactgcagccccggcggatctgagcgtcatggggggctcggtcataaagccgggccgcagcgtgggagctgcacctcggggacatcagggcgcccccacccgcgggatccctgagcgacttggggcactggggctgcaatacagaagaggaagccgaggtagagaggagagaaaccactcgacacagacaatattcaccccagagctgagaagggaggggctgcgtaatcccagcgatggagcccaaggttcaggagccagcaaaccagtcctgctctgtccatcaccctcggggacgggcgctaggggcgagcgctctttggaacaacatattgcgggttcccccaactggacccccgccgagaatggtagtaagtggggatccacgtggtgagcgcggccgccggagttcactcccgacgcatttccatagcgtggggagaggctgtgtgagctgaattaggaagtggggcagccagctgcaacttacgacaatatttgtgatcggaagagggcagccacatggatctttccctcctctcccttcctttctggttaaacgtaaaaaacagccgagtgcaaagggaagggctcaggccggcgcaggctgctccccggcgcggcatttccccggcgctggccgcggccccggcgggcccccgtctgggtgctcgccttccctggattccacacatttcagcgagcctcgtaaacacaatgaacccggcagctccgcagactcgcaccgcgaatttaaggtggcaatttgtttacaacttttcctcccccgaccaggccctaaggagaggcggctcaaaacctggaaaacgggggggatatctttttccgagaataattttttaagggagcagagatttcatgctcaacaaaaccaaaactggctgccaaaaaaggaaaccacctttatttcggctccctccccccttcctctctccgcctctctccactccgcctccccctccaagatgttaagaaatgtggcagccgtacaggagtttaggctgcaaataggggcaggggcgcaggaggaagaagttcagggcagggggcacggggcaggacagtgccgcggccgcccttgaggtggtccgccgtggacggctttccagtgctccggaaaaggcacaccagggagggcgtgtgtatacacacacacacacgcacacacacacacctccaccccctgcggacctcagacagccctttcctcccaggaccagagggagggtttgaatttttcaatccccatttgtctgctgcttttcctggagaggtgtgagtgagtgtgtgtgtgtgtgtgagagagagaggaagagagtgtgtgtgtttgtgtgtggcgggggcgatcccaaagagttagaggagggaagagaaagtgggaggagagagtctgaaatgcaccttggaaatctgctccagagcgaaggcggcgtcgcagtagctgggccggtgcagatagtcccggtccggcgcggcagcacggcgcagcccccccgtccgtctgcgcctcccgcctccagccggccgtcccggggcaccgatacagccgctgccgccgccgccgcggtcctggggctcggcggcgttaccagccgaggccatgttgccgccgccgccgccgccgccgcggggacggaggcttcccgggcggcccggcgcgctgctgccgctgctgcgggctcctggcgcgcctgggcgctcggcttgcgaggacgctgctggccgcaggctgctcgggctcgggctccggttgacagaccagccgctgctgctgctcacacggcgggcgctgctgccgc

SEQ ID NO: 52526 - DNA, 1176 bp, Homo sapiens
agagggactggcagtagcgagaagtctagtgaagtcgtgaaatggggcggtgtggctttaagatgcgcacggtgtatgttcattgaaaaaaaaagaagaaagaaaggaaaggaaagaaagaaacccagatggagggaaagggggaggagcagggagaaggcggagctccggtggccacgtgaccccgcgccaggaggcccggtgcgcgcgcgcgcccggctcccggactccccgcgcccgcgcggccggggcagagtaggtagggaggcggatgcgccgggccggctccgggcctccagcgcggtctcccgagagcccaggcgaggcgcgcgcccagccggcgcggacggacgtgccggacgcgccgtagtacattcctgaaggcggaccggcccccttacgctgcccaatgcccgcgccgcctccccgcgaccggccaatggtcgcgctcacgagtccctgcccattcagcggccccgcgctggctgcccgggcgcgctgggggctgcggcggggcgcgccggccaccggggcggtccacgcggctcccgcagggggcccgtccgccggctctccccgcccccttccttcctccccggcggtttcccctccccgcttccttccttcggcctgcgccttctccttcctccctcgccccgctccctccctcaatctcccctcccccaccagcctggccaccttccctccagcctctcctcctccccggcttcagggggaggcccttcccccgaccccctaacccgcaaaccgtatgcggtgccggggtcagggcgggatgtcccgaggaagagagggagacggggtggaggtgtttgggggcgttcgcgggatccggagggggacctgagcaccgggccagcgcggaaattcaaaactcagaccgcttaaggagcacgtgattttgtgagtgcctcagggaagggctgcggaaactcggaaagcaggcgggcagcatgcgaggaaaatgacactgagttgataaagagctcagacggctccacacattgccagtttcatctttgagtacgatcctgatgtttattaggtttgataaatagcacaaaacaggaaaagaggtttactattctagcttttcttactgaatggttatgccgacacttcaagtcgaaccattgtgtgtttgcttctggaaat

SEQ ID NO: 52527 - DNA, 2455 bp, Homo sapiens
tggaaatgggaagatgatcctggattactcaggtgagccctcagaatcttttccagctgcaatcagcggtagacttgaggatggaaggttcagagagatggcatatcactggctttgaagatggaggaagggaccaaagccaaggaatgtggacagaagctggcaaaggcaagctaaggattgtcctgtggagtcaccagaaaggagtgcagcccgggtgacacccaggtagcacttctgatctacagaaccgtgagataataaatgcattgtctgtcagatgataaatttgtgctgtttcaagctacaaagtttgtggtttttggttattgtggcaatagggaacggatacaggccctgtcaggtatttcactcaatccatgaaataccttacagtatacaaattttaacatgcgcgggagccacttacggatccgtctatctgtgctgcctgggagtgtcaagaggccgtgtccttcattcacctcgcgcgtgggcggcgctgccctgaagatgctcccgggctcagtgcagacggctcagcgttctctcgcgttcaacgaaccgccagaaacgtcagatggtacggaggaaaacactttacactttaacagtatttttacgtttatttgcagcaaatgttgttggctttgtatttaaagtatttatgactcactataaagtgtaggatccaagaaaacgcgctagtttcacttggcccccgtggctgtcccggggagctctccaaggaaggactggttcctgaagttcctggggtgctgcaccaccacggaagaaccaagctccacagagaagccagaagccgcgaccgcggggacgctctctgccaggcctccaccgcctcagcggccctttacagccaccgcattctccatgcccccagttatttctagcttcgcacagcgcccggcccaccgagcgacctcaaacctcgcgacactcgcaactcccgaggcccttcctgctactggcctcagagggaagagacatcgggaagattgctccgcccacagaaaggaagatttcgttctcgcgagatcccaatgacaattcgggagcccgttctcgcgggattttccaagaccgggttggaatttgcgggggttaggagacggaagtcagagcctaggaagatttgggggtcgccttgccggcctcctgtcctcctccggcggcggcggagcccgagagaactaggtgaacaccgctttgccagcctcacacagcgtcccctggctctgccgccgctccggacgtcgccctcccgttctgcttgggtccccttagtcgctacctttgctgggatccccctcctccatcctgtggcttcgggttgccgaagagcgatgctcggagggcggccggaagtggcgttggccgccattggcctgccggccagccaccttgctgtcctccgccgccttccgggtgttacatgcagccgggctcggcccctccccctggccggatggatccgtcggcgccacagccccgcgcggaaacctcaggcaaaggtaccagctccgcgctcgccccttacgcagaggcctgtgtactgcgtcgcgttggaccagttcttgccggtgcccttcgggttggggttttgccctgtagatcctcttcagtgacagctgcagattgtgaacccctccaggcctggaaccaaatctccgattcagtgttgagaacctggactcgggagtcagcccctgggatctagtgctgcctctgacagttacttgctgagcaactttgggcaggctcctcatctgtaaaactgggttcattactaggttcttgcgattattaaatgacgtggggaatacgcaaagtatttatgtgaccccgcgtgtggcccatattaagcactcagtaaatgttattttcattctttattcttgtatgccccagttgttagtgaatggcagaagtttgttgtaagtagataaatgaaggttgagatatttagttcagttgagttttattgcctattgagtcagggcattatattctgccttaaataggaggtttaaagaaggtgtgattatctaccacaagtcacctgggatgccttctggcacccaaatgagtagttttcattaataattgtgctgtataacaaaagctaccaggtattgagtgattttcctgagcccagcaatatgctgattgtttacttgctttcctttgaggaagatatcgatctcattaaatagatgaattcagagctaaagttcagagagggcaagttacaagcctgaattctgaggtctaggaattgatgacgctgtaattcagggaccaaacatataaatacctataggagactggcagctaaaaatagatgaagctgccgagtggatattgtgactgggaggctcattccttttgataaatctagtcactcttggtatttagggaaattggtggaagg

SEQ ID NO: 52528 - DNA, 885 bp, Homo sapiens
ttagggaactttgcaggtgttaattctttgtgccctctgagtcagaagactaagaaatggaagttcttccccatgtttctcaatgagtcgtccttcaatgctcatgaatttcattatgtcacaacctgcaccagggagcagtgaggcatgattgaatccttcctcaatgaaacttcacattataacatatgaggtcatttcagaaaaggttgtgatgagcttaaactgacttatgaaggcacacccagtgaccccaaggttagggtcggtaccaagttgaaagagtaatcgtgttatcttgatgtcaagacccttgctagctagtcatgctgcggcttcgttgaagtcacatgctgggttgagtttgacagaggttgtggtgcctcctggcttgacagctgagagtagagcactgaatcttttgtttatctgctgcatcaggttacagctgggtttgcacacagcattatagataagcgagaaagcagccttcacagccttgcacttggtggtaacattacccatttttccagtcaggtatgcaccatggtgctatttttattttgcctttctctccaacaattgatctgtccagcctgatgaaatccttcagctccggcaccagatcagatgttgcaatcagcattgtgaaagtgactgatacagcacctgctgtggtcggggagtttgcttttggaatggacacaatgctgtacagcatgctgcatacgcatcttgagccgtgggcagagcgatgacagactcgtcagcttcgttgagttctagtggcatgttcaagtgtttcaatcactatgtgccttattggctttggttaccaattagggatgtagaagtaaaactgtccaaccatgtacattttaccac

SEQ ID NO: 52529 - DNA, 1916 bp, Homo sapiens
aggccggccaggcttctcaggctgtgctggggacgcagggcccggtgggtgggggcatctaccagacccgctgaactaggggcaagttgtgacaaaaccagccttattcttggggaaaatgtgtgaggtgtttttttttttttctttcctcccacacaaaggtgatttcaacaattccatttggctgcaacgttttcttctctgagaagccgtgttgaggtggccctggcttttttgtgagctctctttagtatgggctgcacacactgtcgtaatccattttttcatcagctccaggataacaaagggccccctaagccctggaaacccccctctgacgccgattacgggtttcctggtgtcagtcatggccggtttgtcagggccagggagagagagagagagagaaaagggagaaggggaggaagagagggaggaggaggttgggggggagaggggaaggaggggagggaggccgctggagttcagccgcctgtgtgtgtggtctcaggctagtccttatttcatgaaatacatgcttcattcctggctcagggtaaacctgagcctcactgaatgagtcccttatccactttccaaaacactgacgaggtttgaaagggctctgtgggtagactgtgactatcagcaaaagcaaacaggccagcttatttagctaagcatttttaatatttaaacatcccagccttcagctattcgtgaaccgctcagccaacaaggcaagaagtcaggagcgcggcgaagctgcccgtgttcccgcaggtgggcctgctgtccccgtgcggggccagcccaggccgcaagctctctcgctgtttcagagctggaactagggaccctgggggagctccgggccagagccctcgctgccgccctcacccagggcagtctgggtggtggctggctgtggaatcactcacagcctcttcataatcagatgtggtttaagcttaacctagtgtttcccaccctttgaaaaataaaagtctaggcaccccctatttgtagaaaaagaaagctctctgatggcagcgtaattaaaatgctaagctgggaagctgtgggcgtcccaagtcgggatcaggtacaacaaatattatccctgtggacacggccagagctcccgctccgggtgacgggcggcctgtaaaatcggcctgcgacagaccacaggctggacccctccctgcccggacaggatggcaccagacacccgcccaccagacttcataccaccagctggaagtggctttctggtttatggagcaagacggaactgtaaagtcagtcgttctcatgggccagagtcaagtcagcgcccccgccccacccgagccaaaggaggcttctggaggccccgccaggtccccctgagccagccggagcccagccaggcctccgggacagactcaccgggtgccaccgagggcctgaatgggctccctgtctgccagagcaaacaagctccctgggcagggcgccctgggcacagcctggagcggagcaggccggaggttacgagtgacgccaggaggacaggggacttcttctctctggagattccattagggaaaccctgccaaaaagtttgccaggaagttcagtctgctccgatattatgggttcacggacaaatagccccattcaaagaggacagggcctgaagggctttgctaaggcgaccgcctccgctcggccaggaccccctcctcccaccccaggctgctaaccaggcttcctctggggcgggctcccgggatgctctgcgttcccggggcatagtttacatccgagctcctcttttccccgtctataaaatgtgggcattgacatctcactgaggggtttacaaaagggcctgacttagtgcctggccttggggactcctcagtgaa

SEQ ID NO: 52530 - DNA, 1852 bp, Homo sapiens
aatttcaaaccaagggtagaaaaacatctattctctcaaagagctaaaagtatttatgcaaacagtaaaatatcaatcaatccattaataagaaataaataaaaactctatatgtgttcctgatactacaaaatccattgagggctattttgtgactctcataaaatatttagattcttcaccaacctaaattttgttttgtttttttttgagatggagtctcgccctgtcgcccaggctggagtgcggtggcacgatctcagctcactgcaacctccacctctcgggttcaagcgattctcctgcctcagcctcccaagtagctgggactacaggcactcgccaccacacccagctaatttctgtatttttagtagagacaggttttcaccatgttggccaagatggtctcgatctcttgacctcatgatctgcccgcctcaacctcccaaagagccgggattactggcgtgagccatcgtgaccagccccaacctaaatttttatagattttagttttatttccttaataatgatgagacggtattagtggcatttttaaaataatgcagcatgatttatttttaaatcataaaaaataatgtagcattatttatttttaaaaagaaataatcaaaggtaaacaacaataaagcccttcttcctttagacttactgttggaacgtgagtctttttcactttgcactcagggttttttaatcagggaaaaaaagtcctattatttatctctattcatcaactgtaatatactagatgtactttgaacctattgcagtgattcaaatactaaagaaagttcacccgctgagtattttccaagggcctaatttgttaacaagagaagctgtcatctctgactttgttcatcagagatagaattgaggcactgttaatagatctattgactgtgtaagtccaaagtctgggcttgaattcccggaggaatgagtcacacacacacatttaccacaatctctgatcttctccatcgctcctagtcccagttaaccagggaaaatgactcatcaagtttctttccattaacaagagaagttaacattttgctctaattcattaatcagctttcagaacactcaaaccaaacttggtaaacaaaaagcaattttatattacaggctaacacacctaattcatttctttctcctatttggtttacaatctaaaatgaattccaccacattcaaaagggaccaatgggaagaaatttgccctgattcagtgaatacagagcaatgttagtagtggaaatctcactgttgttttttgctttttgttttttatatggggttgatggcttttttcttgcagattacagtgagtgtctcatatattttggcatctcgtcatacaatacttttaaaaactagtcaaacttggctgggcgcagtggctcacgtctgtaattctagcattttggaaggccgaggcgggcagatcacgaggtcaggagttcgagaccagcctggccaacatggtgaaaccctatctttactaaaaatacaaaaattagccgggcatcatggtggcgggcgcctgtagttccagctactcaggaggctgaggcaggagaatcgcttgaacccaggaggcggaggttgcagtgagtcgagatcatgccattgcactctagcctgggcaacagagggagactccatctcaaaaaaaaaaaaaaaaaaaaaaaaaaaaaaactagtcaaatttttaactccatgacttgacttgtactttgttattttatagaaggccttttattatggttataactatactctatatcttctaattataatttttcttattggttttgaa

SEQ ID NO: 52531 - DNA, 1188 bp, Homo sapiens
aatcatgaagcaggcattgtagaaaagtactccgtatttccctagctcctgcaaaaacaaaaatgtaaaaaccactcagtttcagaaacgtgaggcacagatttcctggagccatttatacaactgcatattcatgcgaagttagaatgtgcattctgagcaactcttttggaatattttcagcaaatttctgacataaaatgctttggtttgagggtactgagattttggaataaacatttgttttacaccaaaactacagagaaaacgcatggcagtgggaagcctctagggttccattcatctccagcattctaattatgtggggttttttttaaagcatgtaattcaaaatgggaaatctggaacaaaataaagaacattaaaaatgttaatataaacaaaactctttaaaaacatctgctctttccattaaaggacagcagcatcatatatttactttcattaaagtggccacaccacttcaccattttcaaaaaaggatgacatattgtgatcctcaaaagacaacaaacctgtttttgcaaaacttctaccgttaaaaaaaaaaaaaaaaaaaaggccatgcaggggaaaaaaaaaaaaaacagagcagataaaaaaaaaaaaaaaagagcagattaaaaaaaatagctcatggaaataagcctgttggtcagagtgaactccctcatccagcacaaagagcttggaacaaagaaacatatgcctgactcatcctccgggcttccttgtaacagctgggggtgggggagggatgggggagggggagggatggggcctccacgtgacaggcagccacacaaaagcaaagctcctctgccccacccctcatcatcagaagcagcagctattgctggacaagaccttacaaattatccattgcagtcatttcattccacagataaggaaactgaagtttggagaagttaaggttcaaagtcacaacagtcagtaagtagaaaaacttgtgtctgtagcccacatctccagactccaaactagcgctctctgaacaaatatcgtgacccctgaccttgccttggtgattgatgatgctggtaaaaaaattaatttgcctttcagaataatccctttttatatgttctgagtgtgcatctaaactagtggcttttcccatcatatctcattttcacccaaaatttc

SEQ ID NO: 52532 - DNA, 733 bp, Homo sapiens
ctagcttctgagaccacttgctgcaactccaggactaattttgtccaccacctttgctcaccagtcattgtttgccagctccccaaaccctgacagtgccaataaactttctcccagcacagtatgtaacatttcttctttttcagcaaaacctcgaaccttctctttgttcttcagacattccaaagatcacccagattgtatgtatgactcacatggcaattctttcttcccaaataaaacattaaatttacagccttgtctccacattgttattttgactttgacacttgtaaggagaggatcctggcagcagtcatgggaagcaaggttcaggagagtttgctggagaccagagtagactgtgacacttcagtgtgtgggccctgaagccacaggaagggtgacctgagctaggtggagaggaaggctaagacttagataatcagtcaccagaagctcaggcagcattccacaggagacagaaaggatggcacatccagagtctcaacagagcatgagcagctgggagctaggaggacccaatcccatctcctggcctaggcctggtgggtaaggcaaagatccagctccatcaaggggggtgaaggaagcaacatcttcgggacagagtcaggttttcattaaagtaagagcacattaggagttgcttttggtttgggatacagaattccagttcccaccactgaggattccaattcagtacctttta

SEQ ID NO: 52533 - DNA, 2819 bp, Homo sapiens
ttgcttgaacccagatggtcgaggctgcagtgagtcatgattgtgtcactacactccagcctaggcaacagagtgaaaccttgtctcaaaaaaatattatacacacacacacacacacacacacacacactatatatatatatatatatatgcctgccttggcctcccaaatgctgtgattacaggtgcaaaccacctcagccagcctcagctttcgtattttatattcgagaaaagtgagacccacataagctgaatctgtatgtatatataaaaaaagaaagctgatactctaagatactctctaactaagacactctaggtctctttgggctctaaaatgttgatggcatattcttgtaacatagtagagtttacaaagagccttcacatataacagctcgtgcagagccctggagggtaattaacacgattgtaatcattcaggttttttgcatctgaaaaaaattgctgactgtgagactggtccaaaaagacaggtgttaaccggtggagctgggtctaaatccacaattttctcagtgccgctacaatggtagcagaattaagcaggattttctagtccttacaaataggttcaaggcagcacaaatttgcgtttacttcacactaatccaaaaaagtactccatatgaacttccaattgttttcccgagttttccatgaacacgctggtcatctgagaatgaacagtcaatcaatacagacttactggctcaggagtacctgaccgttgaacatggagatctgtgtaaggaattgcgtcctttgaagcaggcatttgaatccctgttttcagctcgctgggtgtatgaaagaatctgtctgagctctaccagcccacctaggacagggcgcctcgcagcagggcaggcgcgctcaggaagagaacgactttctcaggttgtggcctgagtgtagaaagctgagcgagttctggagggcgcctgggaaactcgaccaatgtgcccagctgagactcgagggtccctgtccccacccgccctgtcccgggcgccgctgaagcgcacggaggacaggggcagccccgcactcccgcagaccccccggccccgggccccgcctcacccgtaggtggtcagcagcgccttgttgacaagcacgatgaggaaggagcaggtcccgtagaagagcgccgacagcagccgggccacccgcgagggcagccgcgccgcgccgggctccccgccagcgccctcggcctcggcctggccgccggccgtcatctcctgcggccccgcggaccccgccgcccgccagccccggctgcgcactggtcccgcccggccgggccggggaagagggcgcggcaggaacaggaagagcccggcgcaatcccaggtcccgacccgccccctgcgagcgcccgaggccggcgcgggaggaccctgcgcgctggacttcaccctggttccaggcacctccttcggtctccagggccggcaatgcgctggggagttgaaaagcgctgccttcctccaggctttcctggaaagaaacgcttcagtaagtctcagggcttgttttgcttttttttttttttccctacaacttttttgtttagtgtataatttacatacaatgaagtgtacacatcttgccagtccatagtttgagatgagcttcgacaaaggcatccacaggagtaactactcaaaacaacatttccatcgccccaaaaattccccttgctgcccctttgaagttaacgcccgcatctcatcgatgactattgctgtaggttaggtttgccttttccggaatttcaaataaacagggtgctttctagaatttatgaatgagcatgtggtctcaggggttttcactctatgctttggactcgaccatgtggtttgtttaatcgttgaatagtatcacaaattgtgtatccattggttgtttccagtttaggaccattaggaaaaatgcttccatgaaaattcgtgggcgtttgtgggacctgtgtcttcatttctcttaaataaatatctaggagtggagtggctaggagtaaggtgggtgaagccttgggacttgggtgtcctctgggtgctttgtggtaggtgcattcctcgcggagggccgtttgccttcgggtcaggtcagttgaaggacagcttcccagaaccgcctacccttgtcagtctttaaaaaatatgaacttttggccaggcgcggtggctcacacatgtaatcccagcactttgggagaccgaggcgggcagatcacgaggtcaggagatcgagaccatcctggctaacacggtgaaaccccgtctctactaaagatacaaaaaaaattagccgggcgtggtggcgggcgcctgtagtcccagctactcaggaggctgaggcaggagaatggcgtgaacccgggaggcagagcttgcagtgaggcgagatcgcgccactgcactccagcctgggcgacagagcaagcctccgtctcaaaaatatatatattatatatttaatatataatgtatattatatatatatatatatatgaacttttagcttcttagaaaagcttaagatttcaagttaaataaaagttggggcctaactatatagatgcccagagaattgtttttctacccttaggcactaaacaaccaggagaatgaaaactgggaaacattttcagccctgataagaactaaagcagaactcgtgaaaattagctagcattaaaaagaccagaagtgcccaagttacccaaaacaagaaagaaaagacatgttaagtccgttttaaaagagaaaatgaatccatat

SEQ ID NO: 52534 - DNA, 1684 bp, Homo sapiens
agacaaggatgaccagtaagcttctggctgggacacaattagaaataatggggcagtaggagctaaccaggagaaagaggaggggaggaagtgatggagatatttagtttaaggtacccctagaattgtccatctaaacaatttctatgacagtgctaacaaatttccctggacgtgaataatcaaatagtatttccagattccattatataattcttatgtatttttatccaaacaaaacagagtttattccttcaaatatttatcaaggcccagaagctctgctaggccctaggcttaccataataaacaagacaaatatccctgcccggggaagctttcagtctggcagggaaggtataaaataaacaaataaatgtgtgatggatgttttgaaaaggaaaatgaaagcatctgttaagttggtcccagcccgtttgttgctgagcaggtcagggaggccttcctgagtaagagatgaaggtgagcaagaggcttagccaagtggggagtgagtgctccaggcagaggaagcagggtgcacacaggccctcatacaaaggcacctgtgttgagaaacccacagcccagcatggcaggggacagttgccttatcagagggaggcagggctatggcagcacagctaggaatcctggactttaccctaagcagccagtgaagcctgggtgaggcctgagcagctgctgctggctcgtgtacagcagacaggcccttcaaccgaaatatccttagagaaattcttttatactggcccccttgttgccattggaaaaaattaaattggtgtttttggaacctcacctaagaagaaccactaacatctatccctggtgtttttttgttttgttttgctttgttttgagacagggtctcactctgtcacccaggctggagtacaagagtgcagtggggccatcttggctcactgcaacctccgtctcccaggctcaagcgattcttctgcctcaatctcccgaataactgggattataggcacgtgccactactgcccaggtaatttttgtatttttagtaaagatggggtttcactaagttgaccagactgttctcaaactcctgacctcaggcgatccacccacctcggctgtctatccctgttttaattggcacgtagctaaggctaacataaagaaaatgaaaaaggttgcattcatgacgaatgaaatacaatacatataaaacattttttcaaaataggaaaactcttccttttaaaataaactgtagtctgggcactctaattatattgtaattttctatcacacacagatcctaagatcctaataccactcacaacaattttatagaaaatcaggggtcatttctaattatgttataaaatgtgtataaatgcagcttatttaaaatgagaggcatgtccaggtccctgacatagccccagcccgcgctgtgcatcttcacggtggactaaaggcagcattcctgacctcgccagccactcggccgcggccttgttgtcggcagcctgatgtttgctgagtgtgtccgtgggctcctctctcttcagcctggcgtaggggtgcttcggacagtggcggtttgcatgggtgaatctgctcaggcagccttcaaaacacaaggttaacacctgtcaggatctggacatccagcacatagaca

SEQ ID NO: 52535 - DNA, 5163 bp, Homo sapiens
cctcaaaacccaaacaatgtagtttcaacatccttgtgactgcatgtaaaatgatcaaactcgtttcaacttatacattatgtgctgatacagatgcagttatccactatgtgatttacttgttatctcttgcaaattgcttatcttatacagccacttaacaaatggaacctggatattacccttctgttagcaccattcattcattacacaaatattttttgagcacctttattgagcatttacagaatgtaaggtagtaaagtcatatagtcttctagatagaaatactcctggctcacctggagcttacagtctacagagttcagtataagtcagcagaaagtcaccccaaacacatgcaggactaaaagccacaaaacctcgacctagtccccgctcttccactactgagctgtgccatcgtgggaaggtcgcctcactaatcactgtaagccccagctgcctgatctgtaaaataggtttgaaccagtggtaacgaccttcccagctttaagcagtcggagactgcaagcaattttagcgtcccattccactatgtgctctcaacacctagcaagtagtatgctggataaatgaaaggcagcgaaggcacaacttcagccgcagaacaggcccagaagtcctttcttgctcttcggctgtctctgcagggcatcttttaacagggcgagggcgatctgcagtaatggagcaaacactgtgcgctccctgccctctcgcagtcggtggaacaactcaaggccctcatccctctcgtttcctctcggaactgaggactcggcagcccgccgggaggatgtcagtggccgttgacccggcctccccagcgaccccgggccgcgctcccgcccactgcacctgccgcaaggacggtctcccgcgccgctcccgcctgtcacgtgacaggccccccccgactggggccggtttttggcgcgcggcagtgacgtcagcatcctgtcagccgcagcccccgccgtagccggatcgacctcgcgttttcaactccgccccgcccgccgcaccgttaacgggccccggctgccccacgtcccgcccgcccgcccgcccgcgccgctcaccttgaggtggccgctgtctgggctgctcgcttcctcctcgtcctcacctcccgaggcggcggcggaggccgaggcggcgggcgggggcgcgccccggccacgaagccccgagtgctcggcggctgcggctgcaggcagggcggccgaggcggcggcccccgcggccccagggctgagcgtcacgttgtgtgcgttctcgccccagcgccacgggtacaccatgaagtcgctgaagccggggctggtggggatgagcggcggcggcggctccggctcccctccaccgccgcacgttggcttgatcggggtcgtcctgatgaccgacaccagcacccgcttcggggagtcgtggcagaagatgacgggcggcggcggcggcggcgggttctccgccatgggcgcctcgaagccccggatcatcgcccggcccgacccccagctccggcggccccgggccgcactcctgagcaccgctctgcccctcactcgctctgctccgagtcgcaggctcagtcctgccggctcatggcagactgacgtttcccggaatcctgcgcagcagccacctaactagttgagcagacggcaccggcgggcagggctggaccccagccccaggtcaagcgcgccctccgctctttgtactccgcagcgcaggctgcaggggtgggaagcagcgggcggcccggcccttgcggtgacaggaaagcaggacgcgcggcgctgagcccccaaaaataacaacctgccgccgcggtgcctgccccggcttttcccgcgttacatttcgcgcctgggcggaaccagtcaccgcgaggccgctgcccgctggccgcaccggcgagtgacaggcggcgcgagccaatggccaggcctggccttctttccagccggccggggcggggccgggtctgcgcgcgggtccttcccacctcgccattggccgccgctcttatatttttttctgtctggagggccaacagcgttcgaaactccagtggagcgcgcggcgtctccactcgcccggacacacccgcctgccgccccgccccgccgtccctccgcgtggttagtccgggccagggagacaagggcggcggggagggcggcaagagggcggctgattggacagcggcggggcggggtcggggggggtggtgatcgttgggcggtggaggcgcgcgccccgctcggccccgcccgccgttggttgttgggccgcggttcccgcgcgcagggagtttaaagggctggggccccgccgcccgccccgccctcggtcccaccacccgcccggcggctggagtctctgctgcccgaggtcctgatgggcacccggcgtgcctggtttcttaatcgagttccgtctgctcagctgttgcacgctctgtgaaccagccctgtcagcaccgccctgactcctccgggccgattgtgggcctccggttccccatctgtggaaaggggagagtccaggaagtggcctccgaagtccctgcgggccgctcgcggcgcggaggccacaagagccgggcgagagtagacactctcaccctggactgatgccccgaagttgcctcggggatctccccaccccggcgaccccgctctaccgagcggctgctccgggagtcggggcagcgccctactttgctcggcccccacctgccccggccgcgtcctagtactcgcgccgggacgcgcggagccccaacgtcctctgcccgccccgccccagccccgcctggctggcgccgaccgcggcccgggtggggctcgcaggctgcagaggaaggaccgggcggaggggttgcccggcttcctacccgctagatgtggcctggggagctgcgttttgttcttgggaatacagattcccaggcaccgcctgattcgcggtaggggctcaataaatatttgctgaatggatgaatgaatatccattggttaagggttaggattggtaattaagttagaacacgactgtataataacagataactaagctgaatagcttttctctctgtgaaagacacacaaatgcacagctatgactaaattaagccacaattgtttaaaaacaaataaaggaaactgtactgatatgaacaatttcaaaaatgtatttttattttaaaaggcaaaacaagcaatagtgtgattttatgtaaaattgttaaagtggggaaaatacgtttttacttttagacgtacataaaatatctggcaagatgcaaaagaaacatggatcatggagggaaattgtgtggctgggaacagaagtgaaaagatttcaagaaatacaatatataactatcttttgaactttgaaccaagtgaaagtatccttttaagaaatgaaacagtatatagcctccattttctggaggcctactacaaaaatagcatatatgtactgatacacaataatacatatggatgtttcacagttcactcaacaattgggtaaggaagatatttttcccattttataaatgagaaaagttgaggcttgtacaagattacataataaatcctttggaagaataagtctgtactgcctgtggattatattcagtgtctgctgagcaaaaggaggaaaaggctgaaaaatgggactcacacatttctcggtcccgtttctcatattccaaaactttcagggtttaggggcaaatttcatattgtaatggttgatctagaaagttgaaagttcagccctactttcacctaatttagtaaacatacattttgtttttacagtttaataccaaaaaacatatttttctgaatcagttggaagggaaatgttatccatctgttttatacttgacaagtagtgtaaagaaaaaagtgatctatccatcatggacactcgaattaggggttgagcaaaatccaacagattaatcaccaacaaatagttactgtttaacattcagagcatgccccagagggcaagatgaatcatccagcacaggatgctgactttctgcttctaaaaattgcccttcatcaacagtaacctggcaactccacttgctctcttccccaagagaatgaaagacatgccaggaatgtgtgaactgggcagaaggtgattccaggagcaaagctgaggtcataccagatctttgcttgtttggctccattttcatgcaatgaagaagctgtctgaagtgtatggatcatattcctgatgtctttgttctgtctcagatattaacagcccataatgtcagaggcctgtgaaccagagcaactccattttaaaaaggagctgggtaaaatgaggctgaaacctactgggctgcattcccagacggttaaggcattctaagtcacagcattagataggaggtcagcacaaaatacaggtcataaacacattgctgataaaacaggttgcagtaaaggaaccggccaaaactcaccaaaaccaaaatggccatgagagtgacctgtggtcctcctcaactgctacactcccaccagcgccgtgacagtttacaatgccatggcaacgtcagaaggttaccctatatggtctaaaaaggggaagcatgaataatccaccccttgattagcatatcatcaagaaataaccataaaaatgggcaaccagcagccctcagggctgctctgcctatggagtagccattctttattcctttactttctcaataaacttgctttcactctgcactgcggactcgccctgaattatttcttgtgagaaatccaagaaccctctcttggggtctggatcaggacccctttccggtaacaacaatacatactaaatctgaaaaatactgaaacctatctcaggatacttactatattactaaagtagcattttcaactcttaaaaatataggccccttcagctgggcgcggtggctgacagctataatcccagcactttgggaggccgaggtgggcagatcatgaatgaggtcaggagattgagaccatcctggctaacagggtgaaaccccgtctctacttaaaatacaaaaaattagccgggcgtagtggcgggcgcctgtaatcc

SEQ ID NO: 52536 - DNA, 1529 bp, Homo sapiens
caccgcttcgtcggcgccgcctggaccagccagtagctccgcccctgggccccgcccctccctgctgagcgaacggggcggggcccagaggtcgcgtgacgtgacagcagccggtcggtgattgggtctccaggcgcgccgtgtcggaaagggggcgcacccgcgcgcgctgactggctgtctggcgcagcggggcggacggcggcggcgccgcgggggcgggcgccggtaggggccggacagggtagggcccggagggcggtggcggcggagcgggcggcatgggtcctggccgccggcttcgctgagacgcgctcgcgtgggctgccctcccgggcccgcagtggtcgcggcggcatgaagggcgctctggggagtcccgtggctgccgctggcgccgcgatgcaggagagtttcggctgcgtggtggccaaccgcttccatcagctgctggacgacgagtcggacccgttcgacatcctgcgcgaggccgagcgccggcgccagcagcagctgcagcgcaagaggcgcgacgaggcggcggcggcggccggggccggtccccgcggcggcaggagcccagccggggcctcgggccacagagccggcgcgggcggccggagggagtcgcagaaggagcgcaagagcctcccggcgcccgtcgctcagcggcccgatagccccgggggcggcctgcaggcgccgggtacgcggggacagcggggttagcggaccacggctcggcccgctgtgagactggggtcccgggggccggtttcaggaggaggggcccgggaacagtagggagagttgagggtcctggtggccgccgaaggtaggaggagaggggcaggggtcacaccccttccagctctcgccagcctcgtgcggggctccgggggaaacgctggcttggggtgggatagggccctcgaaccctggcactgaggctctacggcaagttggacgaagttgagggaggttgtctgggtggcgtgtgggggcgaacggctgaggtcgctaccccggggctcccacatccagacctggcggggaccttcatcttccagcccagcctctgcaagattgaggtcggagccacccgagagcgcggtggggaggaggagggcgcctggtcccggggctgggggcctctgtgatgccggaggcctgggcgaccgcggggcggcctgtgacgtcggggcccgggcgggggtccccggcgcggtccggcctggcgccttcgccccttctccgtccggtagcttccaggaggcagccggcatcgtatttcagtacttcgtgtggtgttgatgggatgtgcaacttataaatagctcaaggctgctttaagaaaagcgtttttaacctttccagcaagaatattcggagttccccactccctatttagcaagaaaaaccggtgcgcagcgtggtgtcctgctgcctgtggacggggagggtgcttcagagttcattctctcaccgaactgcgtcagtggcagagccagcaacactccacctgtgtt

SEQ ID NO: 52537 - DNA, 1772 bp, Homo sapiens
aaaaaccatgttatttaacctgccaatcaaatggaaagggatcatggcaaaagcaaataccgcatccttttcttccgcagaactagagtcagagttcggcagctgcgtacaaaggcctctgccctcggcttgagcaaaagttgtaaataactagtatttattaagcacttataagcagtttttctcacttagtcctggctccagttctagagttcctctttattgcttttggtgaaagtttggggttgggggtacacctcagaggttcagtaattcacctggagtcccaccctgaacagagctggacccagagccacacacgcccgggaacacacactgtgctggggaggaagtgggcctaggagggcctgcaggtccaggcagctgtagagctgctagaagctggggtgttgctctccccgctttctcatagacacagaggtactgtctgcctgttgtcacacagttcatatgctcgcttgagatggaatctgaaccttggtcccaggatctgtgctttttcccactttgccacactgtctaaggtggctttgaactggaacccaagtgcaaataaaggttggtattcgctcctgactttgtgtagagaaaacagtcctttggttactccaggccacagcagtcggtcatgattttgttgaataatcaaagttgaatccatacacgttagggtcagttaaggatgtttgctttgggtgatagcctacttttggtctcttatttattatctgagtactaaggtttatcaactgagtgttttcttccctttcctggaaaaggcaatggatgcaagtgccctgatttctgaaatctgaacctagccggtacaacatcagggctgtgtcatgagtcagtggctttgaagctgtcacactgtcattttgcctaactgcggctttgaagattagccagagagccctttgaagaaactttcctttagtgttgtgaataatacttgaaaagcccacagcacttggtttaatgttgcagttgcaaaaacactgacagttcctatcccatagagctgttgagtcatgtggttgaagacagttttggggaacccggtgcacgttctgaacctgtaatgggctatgtttgcttaccagggctagctctcgctgacttggtcgtgtgcctggatgtaggcattttgtttgcaccctttctggatcgtgccaggttgtacatagccccaagtgccccagagaagccagggaggacagaagcgaagggcaggggggtgtcaccagcatgccgttgggacagtcagatgcggaggcggcaggaccttttggaccacagtgccccggccggactcctcaggtgcttgtgacgtgggtgtggacatgtcctgaggcagggcaccctgggcaccacgtttctggctggcgacttagactcaagcagattaaccccatgaaagacgccgatgagggctgtcgtccccaagtctcctgaaaagtggaggtcaagcaagtttgagctggttatagccaagcccaggctggactggatcatgtctgaatcaggagttgactgctaggcctcaggggtgtctgagttgtgccaccagggcggctcctgaagactcagctcagggtgaggtcctggggctgctgcgcacagcctgtcaccaggtggggaaagctgccctgcagtaactgggctggggggccagatcctctagagataggggtgcttggctgggtgcggtggctgacacctgtaatcccagcactttgggaggccaa

SEQ ID NO: 52538 - DNA, 1893 bp, Homo sapiens
atgtttctccaactgttcttagggatcactactttctaacttggaatcactacttcggtatttttacaattagacaaattaccattaaaacagaagcaatgaggtttctgcatgatgggtctgagatgaacttgtgttgcataaatgcagttaggctgctgtgaggttagcaagaatggtaatgagtagtaaggctcaggaggctccacccgcattccttgcctaaaaatcctcgggtgaaataaagtcatccacaatatctaatagtaatactagtggtgctaagaaaatacttacactcacaacgtggcaaaatcaagcacagcctttaaaatatatatactttcagcagagccagctggcaccctttccccaaatggtaaactattttttttttttttttgatctgcaattcaactcatgcaattactgcgtttatttccttgtaaactcctcagctaaaacttcttgcaaccacaaacactcaaatgggtgacagggcttaatcctttccaaccacaaggacctttgatccctgtgacagagcccaaggatctcgctcccgcgggcggggaggtgcagctcacctactaggctcaggtgcaggcacgcaagggtcacagccgcccatgagcgctgtagcccagagcctggggacaagtgccgaggccacccacacgcaggagacaagggcggccggggcccagactaggggcacctccaagccagcactgcccgccctgtcccagcgcgggtgccggagcccccaggggaagcccccgccctcccggctcacctttgatcacctcggctaccaaagctgcccccgcgccctcccggctcatgactccaaagcatctggaaggcggggcagaggcaaggactgccagccgccgagaggggaggcgccgcgaccacacccccgaagtttaaaaaacaaagtttaaagggccgcgcggggcagcgggcgcagcgacacccctcggcggcccaacggcctgacacgacagcgcaaccccggaagtccccaagtcctggaaaaagccccgcgcgcgacgaggccgtggggacggacagcaccccgccccacctcccgctttctttccccccgcctggccgcccgccttccttccccagctgggaacgcggggcggcctgtgccaaccagggctcctccagtgcccaaacgctccgcagaggggacatgcgtcagaggccagcgggcctgcagagggaagagtctgggaaagctccttagcgattaaaggacttcgagcaaaagggctctgccccaggccagggacagacccgagggtgatggcagccggggcaggggcctcctggcgcctcccccgccgcactcctgctgccaggaggtgctgcagccgcgccaggcccgggcccctgcagtgcgccctcccggagcagggcccagccccttagctctgccaagacccgccaagtgcccccgcagggccgggtcttatgggaaacgggcatcttcaaaatcgtgcaagatttcctgagatcagctgcctcagagaaaacgcttttaattgtgcaagatttaaaggcaaccctctggtcatgcattcctttaaagggacggtttgggatggtttaaaaacaaaaatgttgacaccctttttaaacaaccatttaaaattattgtagagatagagagtagaaggatggttatcggaggctgggaaaggtagtgtgggggtaatgggcacaaaaaaatagtacaaataaataagacttattatttcacagcacaatagggtgtgggtgactacagtccacaatagcttaattgtacatttaaaaataactaaaagagtacaaccggagtgtctgtaacataaaggataaatgcttaaggggatggat

SEQ ID NO: 52539 - DNA, 952 bp, Homo sapiens
cctagatataagaagaaaagctttaaaagttttataagaatatataggaaaataactcatattagtgaaacagggatggatttcttttttactcaaaacaaaaaagacccaaactgtaaagcaaaagattgagaaacttgattacataaagatttagtgtttcaatacaaaaattagctgggagccgagattgcgccattgcactccagcctgggcaacaagagcgaaactcggtctcacaaaaaaaaaaaaaaaaaaaaaagatttaatgtttctgtttaacacaggagcccagaaacaaaatttaaaaagataactcacagaataggagaagatagacacaatgtataaaaccaataaagtgtcagtatttagaatttacaaagcaccatacatcaaagagaaaaaagctaacaccccaataaatacgtgagcacagagtgagataagaaatgcacaagatgaagaagcctaactatccttcctgctcctctttttcagactgaccaaacctacaattaggatggttctggttcactctataccctatgatgaattgagtttattcgtcagaataagctgtgacaacaaataaccctgaaatcttagtgatgtgatttacaacggatgtttatttcttgccggtgctacatgtcctccggagataagagggtggaggaggcactattctacacaatcacccatggatccggggtgttgaaggctctacccatttgcagacacactgtctagaatctgtccttgtggttgtccgatgtgccagtggctgcttgcgcaagtaattccagttgccttcggatctaaatgcccacacagataaaccaagcctggtaattttaatctttgtctgtttgactcctgtgtttctcaatcagctggtctggaactaaggtagaaaaaagtaatcttatctacagaagccctggacatc

SEQ ID NO: 52540 - DNA, 912 bp, Homo sapiens
ttctaaatgctgcccactgacattcgagaaactgcagaaaaattatttctaaaactattaagcttccaacgtcaaggcttttattattgaatcttgatcccatgtgaaagcttgagcatgttaaattccacttcttacaagattagcactatgacttatttttcccctccagtaagaacagactgaattacctctgaagaaaaaatgaaaagacactgcgcaagattttaataaagagaggaaagcatccaaaaaggtaccgatagtaaacagcactgagtgacatcacatgcggtaacctgtgatctccctattgcctagcttcgtgtaagcatgtgacacacagattagaaaccctggaacaattaaaccagtagatccaccttgaaacattcccaagagtgccaaagtatttgttatcttcccttattcgaaataaaagacttaaagtggttgactttacaggcacacactctgtctagctaaggacgaggagttcctggaaatggaacttgaacggaatccacagtctctgtggagatccattcctggcatgctacactggcaatggctcagctcttccagtcactccacattcaccgaagtcaggacctgtcactggccataattctagttacacaactgttagtcaaacttccaagctacagtgatgtttataaagcctttcataaaaatcacacaacttccaagtccttaattgcatacttatctttacctggtttccttaaacatttccttgaaaaggcctcgtgaagcttgcatttattattattattattattattattattattattattattattattattattttgagacagagtttccctcttgttgcccaggctggagtgcaatggtgccatcttggctcaccacaacctccgcctc

SEQ ID NO: 52541 - DNA, 2419 bp, Homo sapiens
atctaccacccaaaacctggcattcatattaatccaatgaaatatcgcagaaactactttcagtattaactatcacagaaaccaacaaaacctttcatataaagacaaatttcaacttaagtcataaacataccaatgctgctctacagttacagaaaactgaatctgctacctaagattaagaccagcaaacaggaaaggacggaaccaagaatgacaactaacagattaaattctacagtttaaagtcatataaaagaactgcaaagtagtcaatgatctgaatacctttgttggagcagtatccatgaaaagctatagaaaaaaaaaaaagagagagagaaaagggcgtaaaactttcatataaactagagagtccagatgagatctacacattccagttcaatatccttgagtttaggaaggttacaatcaattttggaaaatgttttcaaaagtaatccctgcctaatatggacgtcaattcttcttataacactagaaatcaaatgactcactttggaagctaaaaatgaaatagtggaaagaaacaatatttgaagattagttagttcctgcgaaccagtctgtttgtctctaatacaatctcttccatatttgtcctcaacaactccgcacctacttacctcattcataaagatgcctgatctagatgaggcgtggctttgagatgttcagatggtctgtccatgtttgcatgtcaacttacagatccttataacaatgttaatgtgaaggatttacttaggttatacaaatattcagtagctaagatgggaaggaaaacaaaaaatactggctactaaaattcatttttcccagggtaataaaaaatagatttaaagatctcatttcttctttatatcctattcccaacctttccaaataacttgtctctctgctacacattaagcatggaaaggtcctttgaaagcaatttgttttacaaacaaaaaaacaaaaaaagaccctgtctgccaataatatgcaccattagtttcaaatcttttggataatcgtctgtgaaacactattttaaaacatatacaagagcattttttaaattaaccactctgaaaatttatattctatcagtaaataatttcatatattgttttattttctacctcaggctctcccatggtagaggggtctcccatctttaagaagacctccccaacaataagcttagctgcaatttaatattaggcaatataagtcttcagtataataaaaatacataacaatagcctcaagaatgaagtaacagctttggtttattcctccttttacagggaatctttctaaagagaaactctaacatttatcccaaggcagaaaagatgatcaccacggcaccaaacctcctccgctgctctgacaaatacagagccagcctcatctggagcatttctgccctgagctcgctctcagaagcagacagaggaacacactgcatttccactgtgctgattcactgaaccttttgtgcaagtacacgggaatgtttgcttcttagcttgaaacccttccagccgtgatgactgtgcctcagcctgccctttgtcctcgcagctgctgtcacgcgtgtgacacaagagaacactgatgcagccctggccatcaatgggcatcaagccaggcacttcatatgcatccccttcatttcattctcacaacaaatctgtggcagatgaaagcatcgaggctccaaaaggttactaataatctgtctgtgctcaaccctgggatggggcagagactaggtttccccagtgtcctcatgcctagtggctagcttagctggcctcatagaattggctcttcaaaaactctttgattaaagtttttcttccctaaagatttcaaccgcaatatgcgatatggttactctatatgctagttctccctcagaccctcccagtgttattttctcaattaacactgaaaacataaactccatgagagcagggactatctctagcagtgctctatttttagcacttgaggggaagaaagcttggcagagtaggtattcatttgcacatattcattatgcatttgttgaatgaataaaatatccggaaaactggggctgttaatgacagtcaatttggaaaacagcatgacctgcagaagacctgaatgatgtacttgttttgctcattttcctcaaattcagtaggtaattattcatctcctagcctaagtagcacaggactaactaggagatatccaataaatcatttatgtacaactctgtgaagcagctttatctgctggcaacagtaaaagtcaggtagtcatggctttgccaaaaagaaactacatcattgtggcccaattttatctctggccctttggcttcttcacaggggaatgtggagggttttgatct

SEQ ID NO: 52542 - DNA, 1896 bp, Homo sapiens
cccgctctgctctcagcttcatttcaaaacgaacttagtttccagattgtccatgaacctagaatattatttctcctaaacgtctgtgtttgtctaaacacttccacttaatgttctcgccactccagcttacctggtttatcaaaggctaggggctggaaacagtttttaataacgccacgcaccgaggttgacacattccccgccactgaaaacagactgccaattccctcaaaatcgtggacagctctgctgtttacacagcgttgccacatacatcatcacatttaatgccttcacacgcgtcactgtcaatcccagcaaacctaacagctgccaaattggatttatgagtctccaagaacagtcgaatcagcactaacagaacagctatcgaagggctgcttggctacctgctctggctggctgggatttctcaaaagtgacaacccggacattcgtcttgccggctggctcgaatgccaccaacgtgacaccttccttctcgaggccccggcggggagcggaccccgggaggcggaggcgttcggggggcgcgctagggggcagggcgcgggaggcccaggagaggggctcgggcttacgcgccggacgggcaacgcggcgcccagggtcccaaggctacggagcagcgggggtttggccaacgccaaaaaggggcagctcccgtgccaggcgcgttcagcgcgctcggggaatcctcaggggctgattcagaggttgtgactcgcgcgagggccaaccgggctcgcaatccctgaaggcggaatccacaggaactcagaagcagcccgcggggaggagctgcaggttcgaggcgccgggctgacgcccgcaacttagaaaggtgaccctcggtccatcttgctggtggaggagggtgcacaagctaaagttaaagctcgcagcccacgcagctagaaactcggggcggggggcgctcctcaggagccaggctcctaaagggggtgtggcggccggggcgtttaagggggtgggggcgaaggcatttcggcccggccccggaggccccgggcagcccggtgggaggtgggccagggccccgcgccgggtgcggccgtccggggccctccgcgcgcccactggccggctcaccggtgatgtccaggtacacgtcgtcctgggggtcccggcggcgcgggtcttgctgcgtggagctgcggatcttcttcacacccggcgaggtcgacgagcagcgccgcgagcaggggggcgcggcggcccagctcgaccgccgctcgcttttccgcttcatggaggcggccgcggcccgtcagggggccacgaccatggccccgcgcgcccgcgcgcccgccgaggctcccgccagccccgcgcgggcgctcggggcggcgggcgcagagcggcgctgcggggacggcgggcgccggcagagcccggcgggaggcggtcgcgcaggagccggaggaggagcccggcccacagcgcctgccccgctgcctcccgcggccgccgcaggaccggcgccgcagccctcgctacagcgcctcctgccgcggccggcgcccccagcccgcccccaggtgcccgcagccggctggcgcggccgaggcgacggggctgcagctggcggccggagctgcccggggtaaccgtgcgtgcccaccgcggccgcggccgctgctgcgtaggcgccggggcacagcaggacgcggctcgtggggaccccaggagggctgttccgtggcgcttcattcacaaaaaagggcccacaaccctcctcggggcccgcagactgaggcctttcattggccaatgcggcgtgacgtcacggagacggggcctttctacaggcaggtactcggtgacgccataaagaaaactctgagggct

SEQ ID NO: 52543 - DNA, 1715 bp, Homo sapiens
gggacatggaacttgcagcctattaacataaacatttgcacctttacgatatattagtattttcccataatgagcagctatttggagtgtaacaaaaaataaagggaagaaaataaccatttccagcatttgttttagggcattatcagtcaacatttgagaacaggcactaggttaccaggcaacaccacaattgttagtacgtttaccaccaggcagcacccaatgagttagggcagaaatagatctctgacgtctcactccttttggaggggcgagggtggagagagctgcggggaggggcaatccaggctgcaagttccgcgctggagccgcgtcctcccccgccccgctcgcaaggtctgcagaagcgggcactgggccgcccacgctgggaaactcacttgtaagaaactcctggggattttggccagatcctctacgtattccttgcagatgtaacacaggaaatgctgaaagccaaaacggcagaaagggcaagttagtaaagcagcaccctcgggccccgaaggatccctgtacttcgccgtgcgtgacgcgagcaaaggcgacgcccgcggggccgggaccggcggctcgggcgcccggcgcgtgggaagcgggcctcgccctcgccctctccctgccccgccctagttgggaagcggccgcgactgggcaggctgccttcccgtttccgtcctaagaagcaggaggcgcggctcgcatcccggcagcctgcccgggaccctgggccgcgcttcccttccagccccgccgcccgctcacccgcacgaacaccaccacggcgcggcgctcccggaacagcgcgccgaacggtacccgctgcccgcgggcgtccagcaccggcagctcggccacggcggccgccaggggctgcccgctgtcggggccgctcggggccgggaccagggcggcggcgccgctaacctgccgcgtgaccggggccggcgcggccatgacgcggggcggccgagggcctgggtccgctctgtcagcgcggaccggggcggggcgcgcagaggttgggcgcggggggcggggcggggcgtgcagaggtggggcctggcaagtcacggtttccgcggcgcggcgcgggcctgggagctgtcggagtgaaccccacgggcggttctgactcagctctcagggtaggggacagagagagaaagtaaggtccgtccacggcgagcaagcattattgaggaagaaagccgcccgcgccctccatggccacctgagcggatgttctcacctattcgagaactaatgggtgtatgtgtaaaaggtgggctagggccaggcccacgttttgtaaacacacaggccgggcctgtaatcctagcgacttgggaggccgaggcgggaagatcacttgaggccaggagttcgagaccagcctgggtaggtaacagagggcaacgccatctccgttttttaaaaaaataaataataaaaataaagaaataaaaggtgagctgggtgggatgaggatgatgaagttagatgacttagcagctgttttgtagaaatcccacacttccaattcagtttctcctggggtgggtaggcaggcatagggaaatctggggatctcagcctttgtgagaccaaactggccctggatttagaggttcatctttctctggggtttctcatgggtgctaactgtgtgtccaagatttccagagcag

SEQ ID NO: 52544 - DNA, 648 bp, Homo sapiens
cccctcctgaagccagcaccgcgttttccgacgcctggctgcattctggcgcccatacctcggcccgcaccgagcatcttccaactaggactcagccccacctaacgcccccggagcccgcccccaccggcccttctcaggctgaggtcccgggccggccgaggcacagggagcgacggcctgctttgggggagttcccgggacgtcgcgttcccgccccctggacactagcacatccctccctgcaggtccgcaatccgcgtggaggcccggcgctctcacctgagctgcgaaccctctgcaccagcaaacactaacagggagaagccggaaagtggggttgactgcacatgcgcagacgaaaacgcgcatatccgttcccagcatgctgcgcggtaacccataacatgcaagactacgtttcacatgcagtacggcgccagctgtcagtgtttttttgtttgtttttcccccaagatttatggcgtaataacatggaccgtcctgataactggagcccgggttctgtcagagccccagaggttgtgggttagacttgatgacataacagcaaatgcagcgtgtggttacagaaagcaagagccgcggaagacgtttgaaaacaattgggaaaatttgtatacggac

SEQ ID NO: 52545 - DNA, 1154 bp, Homo sapiens
tattagcgcctgaaacgggaaataaatcacacctgcctttgaaccccagctccctcactgctagcttgtgacctgagcctcagttatatttaatgcagatgtggttgtgaggtatacataggcacccaacgaatggaacaaagtgtcttctaaatataacagcagcagtccgctcatggcttagtagcctacagtcggctgtttgctttacaggtggtgacttaaagttttaaaccaacgccatgaagcagtcattattaataccctcactttcagatgagaaacctgactctcatccacgtccctacattcgcctcggcttccagttgacagagatggaacttacccgggtttttccagctccagagctcggggtctcgatgcagacccaccgtccggggatttcgggcacgttgtcgcccgcgttacaaatgcgctttccccacccccgccgccgctcgcgccgggctccggtcccgcacaccgcggcccgcacccggcacctgctccggaccaacgctcagcctcagccgccccgggagccagcggccgaagtccctctccagcggccgggaaggccgagggcccgcccggtcgcatccactgacacagggggcggggatcccacaaacttcccgcttcctctcccgcttccgggcacaaacgctgtcctcccgccccagctgcgccccctctactttccgagccgacccccgagcttcccaaaccgcttcccgggagtctcgagaacccaaatgaggaggcggggctctggctgcacaggcgcagaaggagcccaggagccccatcccagagtgctgcgcggcgaaccagactcattcaggactacatttcccataagctcttgcgtccgccttcgacgtgactcctcacgtttcggcgattcagaattggcggggatggagtttttatgaagtctcccgctcaggctctccaagaacagggagaagttaaaggttaaaacttaaacgctactgacaaatacaaagagtagccctccattggttcccggttgaaccaacattttttttttccgtaagactttcggagacaattgggaagctgaatatggattgggaattgcaaatattgaaaaaaagtaccattacttttgtgaactgtgaaaaaaaatt

SEQ ID NO: 52546 - DNA, 1126 bp, Homo sapiens
gaagagtatatccatgagctacttgaactctttaaatcaaaacaaaaggaaaaaagtttattctaagcaagtttatttcttgtctgatggttattagatgggagaacattgccagatctaagctaccaacctcaaaaatgttttcaaaaacaaatggttattgaacatcacattttacagagattctgctccctttctcccgccctccccagagagagcagtcctgcatgcgaatgatcaaaggtcagtcttaggacaacaatgagaaaacaagctatttagataaactcctctacattcccttgttatttgctttttactattaactcaaggtaagaggatcaggctgccttcagccataaccctttcctaaagcttttgcaaaaccttctggccttccaagaaggtttgcccagttctttgtaggacagatgattgatagatgtaaagtaattcatgagtaaccctgcttagcagggttagaggaatcccagggatacatagactggcagctgtttccaccttaaaaccaacagaattgtctaagttgcagatgatgtaagacagaacaatttttatgatgtgatcatgaagatgtgaaaaataggggctgtaagaaggaccattctttatacacgtgcattccttatcaagccaacaactgactatggggaatgttttacaacctcagagacctgcgcctgccatgctgctctgcacagcagccactggggggctctcttgaccgcagttttttaagctagtgccctatatagaagggtaagtttttgtgaaaagattaacatttgctcactatcacatgggttttacatattcaagcttgacgtacttgtaaagttcccatctgcctaccagctaggtgtcagacattacatgtggtaggcacttgaggatttactgaatgactttaaatccacactgggcctgtgtgtgtgctgccttttatgagtgtgaaggtgacaacactgcctcttttcatgatgcccttggctgagatgaccatcattcttgtgactaaaactgggctgtacatttctatgggcacagtaggtagcagaagtatctgacctatgattgtgatatggcctcttgctctgcctgatca

SEQ ID NO: 52547 - DNA, 2199 bp, Homo sapiens
atagatcactacccatcaatacaaaagaacaagctactaaaacatggatgacctggacctgtgacggactaaatggcactgtgtttgactcgtggatctgacacaaactaagtgggtctggataattcatggacactctgaggtccaatctcttaatggtttcaaatgagtcacaagtagatgaccataaacacctttcgtgaaccatcacggtggaattctgtgaggttaagatatcaagactagcgtgactagtgtcacgtggttatggacaggtgtgagagcagtgcagtgtctttcaagagtgggagttgtttagagatggaggaaacaggatttccaccctctgcctgcttacctcttacccctagacctccccacaagctctcctttgaagtggcctcctgtctccccttggtcttctcaaagctggtccaggcattccactgtcacagactctagtggtttctggagataatgacatcaccagatccagctcattctggcgggtggatcaagcactgtttctggctatgctccgtcctgtctgggcttttctgcctctgctgggaagctctggagagtggtaaggtcagaggggtgttctctttctaggaaagattcctgttcccagtggccccctgcttcctaattcacaagagctgctttgctctacagtgaaattatttcttgggagctgggaccagggcctgggaaacaaattttagggacacaaacctggccctctggaattcaatacattggactgaaaacatagacagcttggtagtgccagagtggctaggcgccttcgtgtgacccaacggatctgaccagacactaccagaaagcctaaaatatatctgacacaaggtaaggttctacccacattcacttcccattatttccctgtgtattttgggtcatgtcactttgctcagtgctgtaaagaccgcagggctggttttaggcaggtgtgatattcgacagcacctgagaccggaaataaatcacacctgcccttgaacctaaatttcctcactgctagcttgtgacgtgggcgcactgttcctccaacctgaacctcggttgttatttttaatgcagacggttatgccggcctcatagagtacttgtgaggtttaggtgagtcatccaatgaaaagaacaaagtgtcttctaaatacaatagcagctgtcacttactcagggtttagtaactgcacttggctgtttgctttacagccaagtgtatgatttacctaagtttcaaaacaacgccatgaagcaggcattaacaccctcattttcaggcgagaaacctcttacccggttcccgccctcgccccccgcttacaggtaataaagctggaatttatgcagctctttcggtctccacagctcggggtcttgccacagacacagcgcccacgagttctggcactttggtcaacgtttataaacgggctctcctctgccgccgcgggcatgcgctttccccaaggttcgcactgaacacctgttcctaaagggggcgcagctccacctgcgtccccgggacctctagcgtgagggggtcgatcctggggtccccccgggcttcccgttctcaccctctgaatcacaagccccattctcactagaagttgacaggctgtggggagacctggtttccccgcgtcccacttcaggtgagcaccttccccgcccgcgacacccaagggccccgggaccacctctcagccttagctaggcgtgaagcagcgagctaagcttgcacatgcgcagacgtcatccagaagaccctttcctagagtgtggcgcgcgagccattcggatttaagactacgtttcccagaaacctccacgccacgacttacttcgcagcgttttctctattggatgattggaagatgttcctgactgcctcgcctggccaggttctgccagagcccctagaggttatgggttaaatttgaactttgctgccgaatacggtgcgtggtcctccatcaaatcccgattggaaaaaacagctgccaaacacgttggaaacaatttgggaaatgtgaatgtgtactggcaattataaatattaaagaacattgccgttattcttaactgttaagtggagttatattggaaaatactagtttttataaagacatgcacagggaagcatttaacattgaaaggata

SEQ ID NO: 52548 - DNA, 637 bp, Homo sapiens
tgagtttccgtgagtttattccaccacgtgtggctcaggcaggcatggatttacaggtatgcctgtgctttgtttcatattcagatgtatagttccaacagtttactttatcagctgtactctttgtcttccttgtgttctgtcaagcatcaaatccagtgtcatctctgtgtgggtaccctgcaaatgctaattggtggtgacaaaataatgatgttgactgatgaatcatttggccccataaaactgatgaatcatttggttggagagtcccaggttcagcagttatgtaatgtggcttcaccaaacaggtaatgtttcatacctcagagcaacatggaacattttgcctgccagggcctagtcatttctattcacagctgaaaagccttctctgaagagtacaacttgtttttttttaaaaaaatcaaccctgtaggcagacgtttcatgtaagagatacagctgtttgctttgatttaggcttctaccaaaactactacccaaactcccacactgattggcaattagctgaacaaacagatggagcaagagcctgaatcagatcataaaacaaataaacgaattcatgtgagtcttaacacttcaatggtattgttcccaccttcctgtggaa

SEQ ID NO: 52549 - DNA, 1279 bp, Homo sapiens
gcctgggcgacagagcaagactccatctcaaaaaaaaaaaaaaaagtgatatttgtttctaatcctgttgatatggtgtattacattcactgttactgttcaaagtcaccaacaaatcataggcagaaccagcttgagatccagagtgtcaatctaaaataatttaaaaggttacgatctgatttaaagagagtttattcaagcacacagtgtgaaggtggccatctggggagcagagctacaatgaagaatggtgatcagtgcttcagtgtgtggggaaaaatgaggaccatttatacaggcaaaacagaggtgctgaacagaactacagcactgtccgtacaaaggctgacatatggatatactgactacactctaagagagttgtttaacactctattgtaaaaaggcaacagtcccaagggtctctgtctgcacctcttttagtctaggtttgaataaagagcagagagtctggttaatgtataacatctcaatgcaaaggtcagaaagtaaaggtcatgcaccaaagaagaaaaacagtcatattatgtgagtcagcttccaggacttttccctttggcataataaatttggaagatcctgaaacttaattttctttttataagaggctcctagaaactggactaagacttcaagttcatcctcttaaactgtaccctgttgctgccaaggtgccaaggcccaacagggccaagacaaatgtctgggtctacattgagctttacaagagaccccctcttggcaccctggagaatgctggctcttgctccagtgagaagcttgttttttaggtaaggaaagtgaagcccctggcactaggtttagaaggccttcctcaagtctgcagaccccctccaccaagggctctacagtcaaggaagttatgcagaacacaccagaaaatcgcaccaagaatcaggaagatctcaacttggatgagaacagacaatcagtatgtgtgaataccaagatgccagatgttggaattatctgacagtggtttgaaatagccataataataatgttttaataagcaattataaacacacttgaaacaaatgaaaaattagaaaatcgtaacaaaaaaatagaagaaagaaatccaagtggaagcttcaactgaaaaatataataaccaaaatttaaaaactcaatgtgtaggctcaacaggtttcaaaagtgaggagaaagaatctatgaacaaaaagaacaacagaaatgaccaatctaaacaacagggaggggaatgaacaga

SEQ ID NO: 52550 - DNA, 604 bp, Homo sapiens
tgtgtaaacaggggacccccaagaccttggacctcaggaacacaggaccccagacttcaccttggccagtatgggagtgtggggtctgtcgttgacaaggaataagtacccttatcctggcaaaccagagctcacctgtggttcatcaggctccagccaggaaggaatggccaggatgtgcctgacagagaggctgggagtcttctagggaatttccgccttgaaaggaattataccaggaattgcagggatgctggaaatcctagatcttaggtagtagcaatgtttatgcaatgaggcccagctgcagccttaaaaattgcattgcaaaatctttccccctggataagaaaccagcaagaaaagaagtgctaaggtcaaagacagaatcccaggaggagtcaaatctaaggtcaagggtcactcacggctctcctggaagtgaactgaagatgcaatgtccagcctgccctaagtccatttgcaaataatcctcctttggccttatcctttccacattacacatttggatctttttacactccccccgccccaacacatacacacatacacacttagtactgatgcaattccagtgtttgaa

SEQ ID NO: 52551 - DNA, 822 bp, Homo sapiens
gttgggttcaaacagtccctcctccaggaagttgtccttgattccagcgcctacccccaccctccagtgggatggttcctcctctgctctgtatcaagccctcccaatgagtctaagatgtaggggatgggtccagggagtgtctggcaggcggggagtctccgacttccacgcccccagcctcccgcagtgaatgccacagctgcttacctaactcctttcctggaagttgatcagatttgcctggaagtcacacagccaaagcccatcaaaaagtccctggcccctgaccacctcccgaccacattcctctcacgttgcagtaccaacagggtccaccagggggcagggcgtgcatacaaaatgggacttgaacctgggtcagactaggctccagaggaggcggtcacggcagcggaggctcagggactttagagcccagccctctctgatgacagacagggaaaccgaggcatcgagctggaagggattgttcacctactcccgtgctctctaacttcactctcctgccaccatggacagcgcccgagggagcgtctgactccagcgcagctacaatctcctgcagctgggcagcgaggcagctgggccgcttcactacacggggaacggggtctggcggctccgtggagcctccgttcccctcatcaatacggtgggcgcgacgcccggctcacaggggaagtgtgaggaccgcctaagaggaggtttgccgagagctcaagactcggtgaggggctctctcctcccaagctcaggaccctggccccgccctgcccctccccagcctcaatcgcatct

SEQ ID NO: 52552 - DNA, 674 bp, Homo sapiens
aaaagtaaggcccctctgaggcccacccagtgacttcccaggcccacctctcagcactcgacttcattttctctacagcacttgctcttttctttcacatgcctttgtccatctccccctccagactgtgagctcctggagagcagggaccacttggctgatctcagcacagcatgctgggcccactggggcacctgcacagggtgagtgctcaggcgtagttgctgcatgaataaatgggaggatcgcagactttccacctccccaccttctgaccagctaagactgtggagatgatcaatgcaaataaaaggtgtgagtcagacctgaggaaggaggacggcaggcgtgacctctgcgtgacttttccctggcaccagttgctggtaaagcagagtaggcaccgcggacacaggaggctgaccgcctcctggtggccagccgtagcactgcagccccaggccagagcgcctcgacttaagtcacacactccggctggctgacctcaaggcagtggttttttgggggtctccagggggcaaaggagcaggtccgcaggctccaaagggcagtgtgaggaacctcggaagcctcccttgacccctttttgcctccacttcctttggcgtcaagcatccttatctcggccaggacaatgcttccccctacttcca

SEQ ID NO: 52553 - DNA, 560 bp, Homo sapiens
catcatttctgtaatcaaccagtgacccgacaaagatttccttaaatgtctggttcccaaaagacatgggggtgggagcacaagtattgtctctttaaatccccaggaagctgcttcctggaggttcagctcatggaggttgaaacaatggctgtcagcctctgtgctggcccctgaaaaatcaaaagcagaaatcagcactcagaacacaaaacctaatatttgaaggacaaagtccttattgcttaccctagctctagcaagtcacaccaggaatgtgggccgccactcctaaggatgcacacatacacacacacacacacacacacacacacacacacacagctttgtaaataaagctcccataattaccgtgatatttacaagtgagcttatagttcaacctgtagtgtacaaaggaaggaaaataccatgttagtgctgacacaccatatcactctcagattaagaaccacatcgttagaggaaatctcctgcactgtcttactccagccagcagcttgctagccctccttagccaactgctagcccccaggtgc

SEQ ID NO: 52554 - DNA, 607 bp, Homo sapiens
ttcttattttggggtcctaagactgagctatatgaatgaactacaagtcaggagagggcaaaggtgacctcttagacagccaagaccctcctctgttggttctatgacctttctctacacaatatccctttaagctttcattatcccctgttttccagtgtgctgtggctgtgtggcctctaaagctttagtgatcagtcccttctggggattaggccctttcagctgactcaccttggagggctttgtgggcagattagggggttttgcttgatcagcacatccttagctttaccggggcctggattttagcagggctccggcaatctctgccttttgttttttgttttgttttgttttgtcttttctccttactcagttgaaacaaatgcagttgtctagaaattcctctgcatttgttcatgaggcaattaaagctgatgggagaggcagtgattatggtgttaatgattaaccaaaagtagatctgtccaaagattccttttgtcgtggatctatttttcctgaccttatgtaagcaaaaagtactcatgtggctgggttccatctgtatacataatttcaaacatgctgtagtttagtttca

SEQ ID NO: 52555 - DNA, 1308 bp, Homo sapiens
ctagataggtgctaaggagaaataaggttgagaatggggatagggaaagtcaaggaaggaggttgacatgttagagactgtgtccaccgtcattgaaagggtaatgcttgagaaaggcctgaaggatatgggcggacagagtgtgtgtctagggcaataaaaagtaactgctccagatgttgaagaaaataatgtgcaggagttgaactgtttggaaggagggtgagccccatagaaggagccaccctcgccccctgctgagtcccggctcgctcggcccgcgcgtacctgcgttgtccaccaggaggcgctcccgcacccgccccgcaggcgtcttccgccgccggccggtgcgtgggcacgcgcagaaaccgctaggtggcgacggtttcccttcccacgcgcggacgccggcgtgggccgacgcggccggagcgcccgcgcgtgcgcagagccgaggccaggctgccctcgaagcggggcggggcgaagcggggcggggccgagcagggcggggcgggggcttgaggtgattcccaagccgcggggcggctccggtggtgcggggaaaccgaaagtgggcggcggccgcggcggggcccctggcggagacggcggcaggagctgggcccagagacgcggggacgggccgtgggcccccggaacgaggtgagtgcaggtcctgcgggctccgggcgcgacaggtgccgggcgacgtcggacgagatttcgggcgggcgcggcgcacctgggtcaccggtgggaccgcggccagggccgggggctccaacaggctcggggccttttccctgcagccgcaggggattgcccccgccccgacgcctgggaaccgggctgggcgccgggggagttggagttccagagcgttgtgttttaaatctctgaagggaccctgctccgggccgggcgttcacgcgggagtcggacggagcctcctgccgcctcggaagctctgcgccgtgggggaaatgcagcagcggggtgtggacgcgggcgggagatgcggaccaggaagtggttcccgctaccggcgcgacaggccgcagccgccgcccccagcgagggatgtccgcgctcccctatttgaacccaagtattttacaccacgaacttctcttgaaggtctctataatctggagacgagccccaggcaggccgcttaagtaatgcaggacacacatccccatttctctcaaacgaggagcacccagtgggtacagagcacccagctgggagggaaacatggatccgtgagtaagttgtctctcaactttcagtagcatcccc

SEQ ID NO: 52556 - DNA, 705 bp, Homo sapiens
cagatcaagactctgtctcaaaataataataataataatatttagtaaataaatacattttaaattaggggaaaattttaacactgatagtctgttccttttaatatgcattcaggattgtacaaaatgtaattgcacagaagcattttggtcttttgaatatgctaataaatgagccaacacttatctcatttcagatcacaaatgttcacagcagccgggctcttgatgttcagttcctggactctggcactgtgacatctgtaaaagtgtcagagctcagggaaattccacctcggtttctacaagaaatgattgcaataccacctcaggtactatgttaccagcctgggagatttgctggaacagatttggatgtgttcataatcttattgtaagatgccttctcagttttgatctcattaatttttaagaaaattggaaattgtccaaatgtggttgtctgctggttttcagaagtaaaacattgctgacttagacaagaagaccagtcatatttacatactgttgtttgagaaatgtttgttttcaagagcatccagtcattaagctgtgttgtccagttacaggttccattttgataattagatgccagtactgacttatgtacagttccagaatattgtgtataaatgtttatttttagagtttttagtttatttaggtaaccattttctttggaaa

SEQ ID NO: 52557 - DNA, 1555 bp, Homo sapiens
aagtggtttgttctgaaaaaaaaaaaaaaaaaaaaaagccttttaagaacttgggtctttttgttgtggtcatttaaaatcagtattttagacactccactcgctctcagtgtagagagaatgtattcgattgcgtgttggaactacgtgtagacaaaacgatcgcggttaaagcttgcggctcagagcccacctggccgcgctgctgggaaacggacggagcggcgcttcaatcagaggtgaaggtgcagcagctgcttagctggctttggtccatcacttctggggacttcagattctcaaaatcttaaattctaaaccccacaggaatgcaaatctgcccaccttttcccacataactctaccgtcgctcaaactcttcctggtaccagcggggaagcggaggagacccaggcaggggcccgcgctcgctcggctgcagcccgactcccctgcgctcccggcccagggccgcgtcccgacggggaagtgcgctgcgcccgggcgcccccgagtggagggggggggaaggagggagccggcggcgggcggggcggggcgcggtgacagccgagccgggcccgcccctggctcccacccccgagcccacagctcccgcccgcccgcggccgcccgggagctcgtccagccccgcgctgcgctcgcccgcccgctgcccgccggagcaccgcggcctccgcccgcgtccatctgcccgccgcccgcgcctgttccgcagcccgcgtccgcgccggccccacagctctgcgtccgggtaagcccccaccccgcctggggtccccctcgcgctcgcggggctccctgcccccgctccggggcctcagccatatctgggcaaaatattcagctgtcgccgccgccgccaagagggactgagcgtggctccctctataaatagctgccgcctcgggttgcctctggggctagggagcccgggtctcggggttccgagcccagcgctcccgtccccgcctccccgcgcgcgcagccctggccagggcgccctccgctctggacctccgcaccgcgtctgtgaacgcgagaaggacccggggttctggaggagacggcgccccgggctggggtcctggcggaggggcgcccccgccacccgcaggactccagcgcggcggggctctgagcccgcggggtgctcagctgggtacaggtgccagccggagctgggctcgggggcgcggcctcttctccgcctgcaagagtctgggggtgggagtgggggagtaaaggctcgactggacgtggatcccaggttcgcgctgagagtgtttggggcaggtgaagtttcccaaactgggagagacaaggtttaaagcaccacgacacgcgctacgcggccaagtggagctggaaagagcttggaggcgggagccccaggttgtcgccggctctcggcatggccttggcaatccccctcttgtttctggatctcagtctcccatttgtaggggcgaggtttggtagccgcgatggagctgggagcccaagccctgagagctgcagggcgcgctcttgg

SEQ ID NO: 52558 - DNA, 1708 bp, Homo sapiens
gtagggcgttttcttgcagctcagcaaaaacagaaaacacaaagtaggtgtggcagctctgagcaatgggaggtggactggcctggaggttaggatatctggctccagccccaactctgccacccactcagaggaaccttgagcaatgagggggcagacaaggtggtctctagtggacctggagtggagagggcttagagtcttccttggaagcctttctagcatgacccatcctgtaaggaggagctggggaaggagtgagagacagtggctttcccaggtgccaagggaggacagaggtgggcagtgtcacttgctgtggagagacaggagtagggggatgaggactgggaaaagaccatcaggattggcagggatcatgagtgacttagaccagggtattgcagcaggctcaaaaaatgagatctgccagtgacccagcctgtctgagcctcgttttctcctcatacaatggagacaacaatagccccatttcataggggctgcttgtgagaattaagtgagatgattcagggcaagccctcagcccagagcctgatattgcaatgatagtattcgttgtggtgagggggaaaggcaggagctaacaggagctgaagaagttctccacttcttcaggctgtaggctgaagaaggctctcaacagagccagcaactctttctaaaagcttggatgagaaaggaagggagagggaaggtagcaggaactgaggacaaggaacagaagggaggcaggcattctaggataaagagtatggcaagtagtgagaagaacccaggagaggggagagagttaaaggggaatctaaaaggtgtgcccataatgaggattggggaccttccttagtgacttgcagaatgtcacagactctgcaggtggccttcatcccctggaatgagcaaaaaaaggtaaaacgaagcagatcctggctcagacccctatgtctctggcagaccagtatctgcgatggaggatggtgatgggctgtgaagagtgttttgaccctgctctggggcctcataaccttggcttatttatttctgaaatgacatcatctatcgatgactcctgctgagcccggtcgtaatggccttttccagtcaatgttttgacttttcagtcttactaatggaccagccaggctgccaacatttctaaagaggccagtttacttttcccttaaagccagaacaccagataaatcaattattgggctgctaggagccattatcagtttaaaaccacaggcctgtttctatggaaaagcatgaaccagatagcacaattccgggccatttcctctcttttgttttgttttgtaaaatcttcctttggctaatcatgatagaacctaattctctttgctcttaatgagagaatgagctcattggagtcaacttaggacacggtctgggaggttttctttcgtgttaggtgttgctgggtttttgtctgatctgaaaaactaaacaaactcaagcatgccttttgtttctccttctcttatgtccttttggttttctttcagagaaaaaaatgatttgtgaaagggttggacattaccatctgtgaggaggaaagagggagggagagggagacaagggcttgcgtccgtccacgcatgtccatccctgtctcagttcatgttctcaggggccccagcctcaggccccactcactctgggg

SEQ ID NO: 52559 - DNA, 1155 bp, Homo sapiens
taactcccaaagaactctgatggcctctcttgtttgtactacaatcgttagcttcctagaactctcttctgctggtgtggagggaaatgaaatggaaggggcagagcgtggggagagctaagtgtggcctgaaccagaaaagttgcagagacataggaggagtggagtgcagcatggtttgagggcaggtgggcaggccagctgagacagggagatgtcttcagactcttttcctggaaccctgttgcttacagatgattgctgtggtgactcagacaccatgatgaccccaagagatgcaaaatgaaaacatgcacccgcgcgcgcacacacacacacagacacacacacacacacacacacacacaggcttttccaatttaaaccacttgacaactttgacgtttagagcatcgagcatggctcattgtgttctgggatgaagctcatagcaactgcagaaagtgatggagtcaaacactatgtttagtgtgtttgtttttttagaaggtactttcccatatgactaagagaatgaaatcagccagtgaaaataactgcaaatgagccagaaaacaagtctgttaacaatagctggtctctaagtccccatcctcctccattcaggggctccacgcacatctgtcataatagaactaggccttaaagggccttaaatcctgtattgtcaactccccaataaccaccatcaatcaagacatcaaccctctctggaagacctcatctagggctctgccatcgctgctcacagcctatagagacaggtgctcactacttcccggcttagcccagtgtacccctgggcagtttttgtttgtttgcttgtttgtttgtttgttttttgtgtctcattctgtcacccaggctggagtacagtggtgcaaacaggactcactgcagcttcttcctcctgggctaaagcaatcctcccacttcagcctcctgagtagctgggactacaggagtgcgccatcacacctagctaatttttaaattgtttgtagagacaaggtctcaccgtgttgcccaggctggtttcaaactcctggcctcaagcgatccgcctgcctctgcctcccaaagtgctgggattaccggtgtgagtcactgtgcccagctggccctcaggcagtt

SEQ ID NO: 52560 - DNA, 557 bp, Homo sapiens
ggctcagaacctcagcttgcatgaggtcccacctcttgttgcctcactgcttcctggggatgggttcttggactagagctccctcgcccctggcaccctctggttccattcagcctcccacttcccactcctgctgggctgccagtgaggccgcctggtgtattcagctggaaactctgcagggcaagcctttcatccactgctcttacaggtacctaatgtcctggcacaggggttgtaataccgttgggaattgcccatgatattgcagtcgctgtgccaggacattaggtaatctgaattagaagtggacgaaaggattgtgttgcggcagcggccaggaccaggccactcactacctggatcggggcagacaagaagattgtgttgggccagtgaaccgtgggaaggggaaatgcctggcatgacttcctggccctgccctagggcaggatgtgtcggtcctgggtgtgataagagaaagaaattggcagccagtgggcttcttgtgcagtacacggacacctatgtggatcacggtattaataataaataaa

SEQ ID NO: 52561 - DNA, 656 bp, Homo sapiens
cctgctaccctgccagtggcagggtgtatcttatccaggagcagctcaactgcatccaagtcctgggctggagccagtttctcccacctgtccctgggatgcaggagaacatcttccagccatctgcccagagccagcccgagcagctggcagcaggaggagccggggatgtgtgctgttatctctctgcgtcctgagtggaattaccaaatgagtgaactctgccaaggcagggagaggaaacagaactcaatgttctttttcagagttcaaaaatagtcctttttgagttttgaggaagatctagacttaaaaaaaaaaaaaaatcaagttccccagtgctaaattcagccttgccaatatctacaaagaatgaagcaacaggcaatgttgatgtgccgttttctcccgtcactcacttctgttgacgtggagtgtggcacaaaaccaagtgagagggaaagttgcgattttgtgcctagggctggcagaaggtaatactagccccaggcattctgcccatcagtggaaatctagctgggcccttcccttccttcctctttccctcctttcttcttttcgtccttcctttttgtaattctaatttcctctgagctgcaaaatggttttatttcttcttagccctgctgttaaca

SEQ ID NO: 52562 - DNA, 703 bp, Homo sapiens
gaaaatcttaaaatgcagttctccaggtcatctccttggtctggtgaagtggaagaaggcatctggtttggttgcaacagtgaagcagatattcctttcagttaaatacctcctagaatataaataagaaagaagcagccatgctattctttgatttcttgaagaaaatatgaagctaatcaatcacgcaaatcagcatgggcaaagtagcccaagctaaccatccatttacttactaaatcaatagtatttacttaggaacgactcgaagtcaagcactattctaagcactgagaatatagcagtaaacgaaagtgaaaaagtttctgcctgcttagagtttacattccagtggggtgaagtaaacaagtggataaattgattttttatttttaaagtcagatggtgtaaaggttatgaagaataatcagcagggtagggaggcagtgatggagaagcccttcgaacacagagagtaggaaaagcctttctgcagcaatagcatttgagcagaaacctgaattagggagcgagccatgcagtcattagggtaaataataccagaaaagcaacaggtacaacccaaatcaatcaagatgtgtgccagcaccttcagttataaacactttcttctttttgccccttaatttcagagctatgaaaatttccttccttagaagaaatagttcccaagacagcccca

SEQ ID NO: 52563 - DNA, 2805 bp, Homo sapiens
agcgagaccctgtctcaaaaaaaaaaaatcatactccaatgacttctcaattcacttggataatgtccaaagtcctcacagagcaccttccccctacctctctgatctcatctaccactctcccgttgctcactacctatgatggcactatttgtgggtattcctgaatgggtcgttagaatatatcagcgccaagagagcaggggttttcctttgttcacctctacatcctcagcattcagaactctgcctggcacctaggaggtgctaaatgctaataaatataatattcgttgaatgaaataaaacagtgattgggtaaccaaagaaggcctcactaaggacctgacatttgagctgagacctaagtgaccaagagccagccacgcagatttagaaccagagaccttcaggtaaaggaaatagtataagttcctaaaataagaacaagcttgacttattgtaagaacagaaagagtggttggagtacagtgaggagaagtagaaccccacaggccatggcatggagtgtgcaatggaaagtcgtaggagactttttttttttgacacggtctcactttgttgcccaggctggagtgcagtgtgcgatcaccgctcactgcattctcgacctcctgggctcaagggatcctcccacctcggcccccaaccctcccctcgagtaactgggactacaggcgccaaacactaggctcagctaatttttttttttttcctgtaaagacggtgttcgccttgttgcccaggtgggtcttgaactcctaggctcaagcggatccgcccgcgtcggcctcccataagtgttaggattacaagcgttagctaccccgcccggccgtcataggagacttttaaacaaagcagtaacacgatctgattctggatttgtgttgaaagcagagcaggcagggtttacagataattgttatgtaaaaagagggaaaagagctaagaaagactctaaatttttggattaagcggccgacggatgacgtcatttactgaaatgggtaagaccgaaggagaattaggccgggagagtgaaatttcagatggccatggacaaagcagataagccagtatggtgctcataaagacatcaggggaggggacgctcacacacaggcatataggtacccaataacccttgaaaacagattactaaaacaatcatttgttccttcctaagcaaacaacttaaggaaaatgacggccagccggcaagcccggagccgcacgctcgcgtcagggccggcctttccataccaaggggcggcacgtgcggcaccgcctcccgcccaggccccaccccgcatgccgagcttggcccaacctctcctcccacttttcccaaggcggcaaaagccggaaagtgggagtagatgagcacatacccgccagtcctgatcctttctaaggtctctcttccctgcactgtctccgcctagcaattgtcactgctcaccgccctcgagcctattcccccgccgcgtatttgggtagaaaagctcgctcgtgacgtcaccaagctccggaagtctcctggcgtcggcgcaagggccgccgggaaaaccattgagaggccaccgggaaaccattgagaagccccggaggaccggcctgagcggaggcggagactagagcggccgccggcacgacccgccttcaggcgtacgacgaccgcggcccgggggctctgagtggccaaagcggcggcactttctgcgtggccccggaaggacatagagcggaaggcgggagaaagaagtagccggcaggcggaggcagcccgagggggcggttgcatgtgtgccagacgttcgtagcccactgagcttcctcacgccggctgtcgcagcgcctagccccacccggcggcctctcctgcgcttccggggccgtggcgagctagtgcgcctgcgtgccggcccatccgcgcgccttgcagctgtccttgcgtcggccagcggccagacagttcctgcagcgcttaccgcctggcctctcggttccgcggcgcaccggagggcagcatgtcgcggcggcggcacagcgacgagaacgacggtgagtgcctgcggcccggccacggaggccgctcccggttgggagccgaggctcggcgtctttgggtgtccacggaagagactggaagctcttctccccgggaacgtgcggggagccgcggagggaaagaggagaatatggtggcggtgtggtcgggcggcttctagaaagcgacttctcccccgccccagttctttgagtcaagggccgatcctcgggaaagaaggcctggtgaaccccatgggtagacccttggtctctaaggatgcttcagaatttcgtccgtaaaaccacggagcagggaagcacacctgtgtctgtgctgccgcctcttagggacccactggtcctagtgtctcgttttaaccttcaaagctgcacctgaaaagggctcggaagaattcactgaaggaaaggactgagagatctcatgagttgcagtctgaactctgttccggtagtggttatccgttgatttcacttctttcaagctgcagggaaagaatattgtcttacctgcgcccaagaggtccctaataaacagacacaggttactgcagattttgaactggccgtaagcgcatttcccttgtgtgagagagagtgctagaaaactaacttcaggcctctgagagagttagaacaggggttcccatctccgtttggatgattgtgctcgtggagatcagtgttgccttcataaagatggaataattc

SEQ ID NO: 52564 - DNA, 1946 bp, Homo sapiens
gtgctcgacaaagggcagtatagagctttaggaacacatgtacttcatgttatagaggcagccctgaagaactgcctgtcaaccaaactatattttaagtatcctgttaaagattattagttgaccccagtggcaaattctataagagaataatctgcaatgagagatcagtccttaatttacttcaatcaataaacacgttttgagcaactagtttttgccaagaaatcgcagaggtcacatgtccaagaaatagactcatggaatctatggattagaatcttaaaggtttactatccagtcccttcttctgattgctgagtaggagattctgattgctgaatctcctctcctccacataagtaagcgttcttccagttcctatttgagcgcttctagtaacgggaagctcatgagaagcaatccattgcacttttggcaactctaattgttgaaagctctccctaacaaacaccaagatctgcctcttccatcaactagttctaggtatagaggccagaatcaagaactagtctaactcctctttccgggacagctgaggccctgacacctggcagtggctgacacctcccggccggggcggctgcatccctaaacgaaaaatcgaagctgccagcagccgaggtgcagcgaagaaggcccggggctgggggtcaggaggcccgcgtgcgacagaggaacgctctgtggtcgtggacaggacgctttgacaaggcggctggctgggcggattccctctccgactcggggagaatctgcacacatacgccagcggagttgacgcgacccccgggccccgggactcggcttgcacgagccagtctggggaccggggaggcggggagagggaaggggaaagcgcggacgcggcccaaacctccagtagccgcagccgccgtcgccgagtagggccgggcagccagccgggcctggcgcagcatcagtgcccgctgccgcttccgctcgatactcgcccgcaccgaggcaggcagctccgcgggttgctctaaagccgccgcctccggcaaagccccgtcggccgccgccatctctggcccactccgaggacctagctcccagctccacgcacgcgcactgcacgccgaggcgagccagccgccctgcaccgcctctgcgctccccgcacccagcggcctttctgagtgagagcgcctgcgcagttaaggggctcggggtggcctgcccgggcgctgggcggagtctgggtatgcgcggacacggagtacccgcctaactacctgctctcttgtcatccgggagaagggtccgtgctgagatcatatctcacgacctggtcacctttaaaataggtctcgcttggtgattcagagtataggctttggagtcaggcctgggttaagtctgagctcttgacagttaaagtctgtgtgaccttgggcaagttatttaaccagagttcagtttcttcagtggtaaaatgaggataattatggaaccatttaccgagtctttgggaggattagattgccaggacaataacctggcacgtagaagacctcaaaaaatggtaacagtgagtagtagtagtgccagtcatagagcccaacagatgatagtcctgattttatgttggatacacggcctagagacacagccttagatttaaaatgagaagacctgggttgaaactcccagttaacttgctgtgtgacctcaggcaaatgcaggacttgctccaaggctgatatgcataaggttggctatctttcccatggaatattccttcagtgaggatgagctactgccaggtagacagtgggtttggatctgggccaaatatcctgacttcccaaaagtgtggctagtgtaacaaaagaaacatagcaggctttcccaaaaatgtatgctttccctttgttacaaataatgcttaattgaaacca

SEQ ID NO: 52565 - DNA, 1771 bp, Homo sapiens
taatattaagttcacagtaaaactgagagtaaggtacaaagattttccacatactccctgctcccacacatacatatcttcccccattattaacgtcctcaaccagggcggtgcatctgttacaactgatgaagctacattgacacatcatcatcacccaaagtccatagtttacattagggctgttcttggagttgtacattctgagtttgaacaaatgtataatggcatgtgtctaccattacagtaaagaatgtgagtgtctaataagaaatgccattatctctggtggtgctacggcaccacagatcacacttggaatggtaagggtctagattacaggttcccaaacttggctgtaccgggaagcacccagagtgtttaataaataccaatgcttaggccccacccccagggattctgatgtcatggggtcagagtgagatctgagcatcaggattttgtaaagccccacaccccccccccacatcattctaatgggcagccaaatttgagagcccgcatactagatggcccttatggactccatagccctaatgatctctcatgtggtgaaatatttctagaggacaaggtcacagttttcccccaaggtaaccttttgaaaataattaatccggagaacctcctccccaacaaagcattccaagcctcaatgctggagaatgtgacctacagctcggatgttgtataggctctagattctgtaactcttggcagcttttgtaactgtgttcttctttggccggtaactccttctttggtgtactgactttcgttagcaagtttcgtatagttgggtaaaaatgactcctttggagaaaagaagaatgcatatagcccacagggtgacagaggcttgagggcttgcccagagcaaagcagcatgagtcattttggtcagggcacaaaagggaaacaggcaaggaaaatagagcagtagatgtgttcttgagtctcctgattcagtctcggggaaacctgtgactgcatttatctccctgctttctacctccctcacctcccaaaccagctgtggtcctggctcaaagaggaatacttaacaaaacatagaaagaattgaaagccgtcaccgaagcctcaaaaagagcaggaaggtaagaatggaggccagaaaggagagtgagaaacttggcagtgtttcctgacagggcctgctctctaagtgcgttaccggggtgactcatgcctgagatgacagggtatgaacacatttgtctttattatctagtaaatagtacctgtgtgtggctttcttttttgtttttatttctcccctggttccctggggctttacttcttaatgtggtcactttgaacatcattggcatcaattcacaacagggaaacatctgtgagaagaaacacaccaagcggggaatctttctggaacaaggatgcagcaacacagaaattagcctgatcctgttgccttaagctgcattcatgtagtaatccaggaaatgcagtctcttttttctgtgattggccagacaaatcctccttctgaagaaacttagatttcagcctccccgaaccaaaagaaaaaaaagaattgggcaaaaacatcatagtggagcatctatcaacaaaatatgtgcacggagaggtttcaaaatcatcttgaagactcacaagaattgtctttccaaaagcagtaaggagtagaagtgtacaactgattcaactaaggacagggccatcagctctggatgccaaaatcttcacc

SEQ ID NO: 52566 - DNA, 783 bp, Homo sapiens
tgagaagggggatgataagtaagggcgtttccggttctgatgcgctggatcttgaagctcttctccaccactagcgccctgcttgtaaccttagcacacgcaactctgaacaggaatagtcctgggagaagggcggaaggttccaggagggcgcctgcctgcctagagtccccttgccggtctcaccctggaaaggtaggcggaactagaacaggcgggccccactgcctgcagcctgcgaggagacgccagggctgcaagcccccccgccctcctccgcccctgccgggacagtcagccgctaggggattaggaacgggcccagcgcccattcaagccattcagcgagacaggaagccaagcgcgctcctgcccgcccgcctctgccgggcaggtctgcgggatgacgcgcattgtgctggggactcgcccaaagggaggcccagccgtggggaaaaccgcgtcccgcgggaatccgacgcccggtgacgggggcacctgcaaggcttcagggcgaatccctgactcccagcccggggctgagtcctcgtggggccgcctccgcgctgcccagtgctgccggttatctgctcacagcgggtggctccgggccttcaggagcgcgacgggcgccatcccttccagtgcctcccgggacaaggccagggtcatcggcacacggagtttcagcccgagtgccggagtctttcttcaggacaatgcagagatctgcacaaaaggcaggcaggcgggtgaggacaagttaatctctgtgagcctgga

SEQ ID NO: 52567 - DNA, 1711 bp, Homo sapiens
aatgtattccagcttgaggtctcctaggttgttatagcaatgatatctaagaatcattatagttgagatttgtagaaagcaaaatgtgcagcaacctaaagttctgactccttggacatatatttgcatgccttggcattcagtgatgtgctgtcaatatgtcaggtgcttaagaaatattagttgacttgattttcagtctagatagttgaggtttggatcattgtcacctcctcatactcttagtaagcactcttactaggcacttggacattcataaaatttccagagcccccaaaagcctgagaggtagttaggaaaatatatgttatcgccatttttatggatggggaaactgagtctgtgaggttaggcaactgtcaagggtcacagaagtcccccaattcagaatccggtggtctttacattctaatgagctgtctgtttatcttggaataggaaaaaaaaaaaggtggtatcatcgagctagcctctgagtaatatttctctcagcctcaggagaggagaagcaccttgccaggggcacagcacaatgggaactgtgttgggacaaaaatatgagttctctcactctttgcatcgagcttttctcgttctgccatgtgccttagattcaaaaggaatagatgtaaggcagggagtacttggaactgacaaaataagaaatacttccagtcctcagagtcctggtaaattaaattcccctagagagtgactaggagaagagtttccaagcccagcgttctgcatgcctgggggagccgaagctggaatgtttcccaggagtctaggcctggctgcctagctgctgcctgagaggctcagagatggcattcgagccccagatcccctggctggagccaagcataagaaccccagggtgcttggattcacacagtgccctccccagcactgttcctgacccagctgtcacaggtgggtggacacccaagcaggggctgggaagcagagatggctggagctgctaagaggggccagggctccagggcacacttgacttgtctctcagtggagccagggacatgctccaatgacacccatggctgcttcctcatagggcaccctctgcctctctggagcctgccgctggctctatcgaaaggggccagtgggaaatagtcatggggtcctactctgatctgagcagccagagggagtgacatgagctgagagttgtgaataaacccctgtactttgtacttacttactcaacttgacaaacattccccatggacttgccctctgtcagactgcactgggaactggggattctgtagtgaatcaggcactatgtttgctcttcagaatctagtaagagttgggctcacatagccaaaatgcaaagcagagcatggcagcgccctggaagatgaattccagattcctgctgcctggtccagaatcagcatagcccaacaatgctaggtgaccttggtcaagttgcttaatctctctaccctcagtttccatccttacccttctttctcaaagagctactctaagaagaaaataagacaattggcctggacatactttggagtcaaagctgaatagggagagacgattgctagtgtttcatagtgtcatcagtaacatagacaccatttattcagtatcttcccaggtaccaagcatctgaccagtgttgcatgtcattcttccaacactc

SEQ ID NO: 52568 - DNA, 938 bp, Homo sapiens
ttttgtctaaagaaaccactggtaaggtggacgaacccgacttggcttacctctaacatcccacatcacttctgctcttctctgagtcttaattttatcatattttaactggaaatggtgtcaccacaatagacctcacaggactgctggaagaacttgttcagtattcaactaatatgtattaagcaaggagcgtgacaagtgctgggatatggagttgaacaggaaaaaatccctgcctgcaaggagcttacgttctggtgcataaacagacactctataaacaatgtggacatgaagtggcagagatcagcactaggtagagaggaaggagctcccccaagccttggccaggagggttggcaggccctggggggaggtggtgtttgaactgagtcatgagggatggataaatagaaatctttcacaagaagtgggcagggcattccaggaatgagctagaaagcccagagtccaaagcagcatgacatgtacaaaaactacacatggcacaggtaaaatgtgggtgggatgcggagacagaaaagggtcaatagggacacagctcacatgattggaagatgagaccctggatagactccagtaaaacttatgtgaatttcagagaactcctccctccttgcaataattcacaatcctattcccaccaccatgacacccagtggtatcctcagagtaggagtcagcttactgcttggacttaacctaccttccccagaaagcagagcttgaggcagagggcttttgagctgccatagatgatcctcaacttaccatggtttaacttatgacttttcaactttatgatggtgcaagagtgatacacattcagtagaaaccgtagttcaagagcccatacaaccattctgattttcacttgcagtacagtgttcaataagtcacatgagatatttaac

SEQ ID NO: 52569 - DNA, 720 bp, Homo sapiens
gaagaaaggagagagaggagaaagaaaggaagcaggcggaagagaaggagggagggaggaagagaaaggaagcagagagaaggaaggcgggagggaggagaaaaggaaaattaaaaggaaggagatggggaagggagaaggaaacggacggaaagagggaggaatgagagggataaaaaggaagagatgggagatgggaagaaagaaaaacagctgacagggaggaggaggaggaaggacgaagcggcgcaggtggacaggtggcctcgcatcgcttcctccccaggcccggcccagcgcgggggcggggcaaccgcggggcgtggctgcgcgtgacgtcaccgcccccgccgccccgccccgtccccgctcccgggccttgtgaaatcgcgcgcgctggcggccgtcgtagaccgtgcagctctccttgggtggctgcgagtgccttggccgtgggccctgtgcgcggccagccccggcggcgggagggcgataattgcccagagacgcagcacttacctgggccggttgtgcaaggcgcgcggggggaggccccgggcggcggctctcacgcctcagcggccaggcatgcgcgggggcgagggcgggccagggtcccggggagcgcctccagcggttcccgttgcggacgccgccccattcttcaggaaagagccgccgcccgtcaccgctggggatggggagacccgcgctcccatc

SEQ ID NO: 52570 - DNA, 1017 bp, Homo sapiens
gagatttctcaggtggttgtgtgcaatgaaagagacaagggctgaagaccagacgcctggcttaggggatgagcggaggaagaacaagagacaacatcgcttccctctgaaatgctggcacgggctgcgaagcatgagtcagacccttctagccccagcagcagcctcaacagcctgggtctatctcaccagccacacagttttctcctgaatgaacttgcatcactaacctcagaagctgtgttgcgaaatccgcatcagattgcgtacctctggtggcgtcctagggacaatgggcactaaagactcatagcatcctggggttggagtcctcctctccgcctccacaacatccctgccaatcagttatcgagcaccccaggcagggaactcataacttcccacggcatcccatttccttgttgagcaagtgaagatctaagaaaaccttttcttgcaatctcacgatactgaaaagtcaaagaaaaagataacgctataatttaatggtaatgatccaggacagagtgaaatgcaaggactctgcatcctggaaaatccatgtctattaatgtacccatcagcatcttcttgctggggttagggtcatggtgtttgactccccacaggaagctgcagtgatttcattactatttgcacactggttgggaatgtgctcatccgctgcaggcattcctctggcttcatcaagcagtgagtacaagggccctggaatctggccagtctctcaggactgaagcagtgcatgctacagcacaaatctaccaggctggacacgtgggaagaatgagcggctgttagatgagagcgagcccactgcaagcaaagagggcagaatgccattctgttcaacatttttttctgcgtgtttagcagcatgtggtcctgtgtgggtctctggagaagaagaaagaagatggatctaagaaatggttctcacccagctgggcacagtggctcacgcctgtaatcccagcactttgggagggagaggca

SEQ ID NO: 52571 - DNA, 2648 bp, Homo sapiens
ttctcctgcctcagcctcccgagtagctgggactacaggagcccaccaccacgcccggctgatttttttgtattttttagtagagacgaggtttcaccgtgttagccaggatggtctcgatctcctgacctcgtgatccgcccacctcggcctcccaaagtgctgggattacaggcatgagccgctgcgcccggcccaaagtgttataattaacattaactgccctgttaagatttttttttaaattattttaacgttactaaacaggtcgtatagtacctcactttccaagtgtgtatgcaaagaaacaagcgtggaaggtagacaccaagatattgacaatggctttctctggcaggttattttaattttcttccatttgctttccagtttctaaagctaatatattcctctatgaaaacgtgtgagtaaagagaaacaaattcatgccttgtctttctaggcccaatttaaaactattttctcccccagaaactttcccccttctctgtcctcattcctacagcgcaggatgcctctctatggcatttattaattcctaacccgcctaacaccatctcccatacgctatggcaaggaaacccctaagagaaaagcccctacgctgcacgtagctgctccagctactgagccaagactacgcagacagtacaagtcttataacaaagcggaacaagccagatgacgtcatcccgctcgccaaagcacatcacgtggtctccgcagcacgtgacccgtgccttcgccgtaggtaaaagaatgacgcacgtcagttccagatcgtgcgttttacacccctctcggcaacgaagtccgctgcctgggcctaaacctctccagagtgtggcaccgccggtgttggaagttacctgtctccagagccggcttaacgcagccgcacggggtcgctgtaggccgaggccccgactcctccaagccgcgcatggctactggttgctgaggtgcccacccgacgcattcaaccttccgcttccgctctccatgcctgacgcatgcgcagtggcctcgccggcgaggtcccgcgaacccaggagaatgtgcgcgcgcagggtggcgttgagggaagctttgagttctccatggggcttcgaaccctatcccgggcgtgtgcccctccgggaccccaatctcgtttatcttacacacagctgctacagttgcccgccctcctagggtagaatgcgactccggcttcccgcgctttttgagagggaacacacctccatgaagaactcgcaactatgtctctctcgaaacattattaagtaacctatacgtccagtatgaccctaatttttaagggatgtgtatatgtaattaacacagagcggaaggactggacgttaagaaatgttaagaattctcaggcacctgtggtcccagctacccaggagattgaggcgggaggatcgcttgagcccaggagtttgaggctgcagtgaaccgtgatcgcgccactgcactccagcctgggtgacagagcgagacctcgtatcaaaaaaaaaaaaaaaaaaaaaaaaaaaaaaaaaaaaaaaattatccctgggtggtgggaaatttttccataatataagttatgctttgtcagaaacaaccccaaataagtcttatttcaagtgtggtggatgttataaaggagccctactatgtgctaggggttaaggagtgggaactgtttcttgtgctccacaccttaccggaactgaagtgagaatggaattataagagtcaacatgccatgtgcattgtggggattattgtcgtttctggacagctctgagaagctaagagctaacaagaatcatttaatcccatgcaatgaccagttgtccttgcaatgatagcctatcttttacccacttgtaatgctgtctctcacctttagtaagtttctctgtatataattctctttctgggagaaattttaaaatcttttatctttttatctgttaacatctgcagtataaaatattcaaaagcatatgagtcacagattgaaaagtctaacaaccatgaaaagatgtttccatgtctgtccatttgtcattgatttctggtagaaaataaccagcaggaggagccaaataattaaagattgtggtttaaaaaataagataaaactgatcaaattcatatagtgtcttttggcaggtcatttttacaggacaacttggaaaaggctgccattttttttaggagggacagctctgtgcagctggagaaacaagtttgaaaatcattgttttatatatatatagcgcgcgcgcgtgtgtgtgtatgtgtgtgtttataaaactgggccagaattactgcgcttgccactagatggtggtgttgctaaaaatgatagtcccgctttatctgtggaaagactagatttaaagagatatttgccctcctggagggcatggtagacgttgttaatcacacaaaaaaatatgtaattaccaagtgtgacaagtactgaaatgcaaagctgatttgaatatactagggaaatagattgctacttcttttataggtaaaatttctcttgactgaaaacgggaacttaaatatgcagcacattttttagtctatgatttgaagttcttattatcttgtct

SEQ ID NO: 52572 - DNA, 3627 bp, Homo sapiens
actaaaacttaggtaaaataggaaagggggcactttcttaacttccataaaacttcatgttaatacatagaatttcaagtttttctttaacaaattgttcttagtttttggtgcttcttgtcagtacgatcttcttagattgtatttgatttgacacattatgtatttacttattgtacgctgaatataacgtcattccccggtgttctgcaaagcacaacactcatcccgatctggtgctctaacccctgggaccctttgggccagaccatgacaaaggctgcctgccaggtttcagcgaaacttagaccaccaagaatttacacacttcacaggggtgccctaaggaataaatgagattaaaaaaaaaagtctgcggggaaaccctgaggccctattagaaatgctaatcgtttccttctctagctcctattaaaatgttagaaaaccgagggagactctcctgaacagggtggggatgctcggctgctctgtggcttagcaagcgaccccagctgccctgccagggccggtcggccgcgattccgtcccgacgggggggatcctcggcggcactacggacgccagtctgccaaggaggcagcggggttcggcctgttggccccagactgtgtggcaggcaaaaggtgaacgtcaaagcctgtccccggcttcttcacatctcgcgcctccgcgggcgtcgggccgcccccgtgagcctccccggatggactgggttttagggacccccgcagccggactgcaaagcttcccaccaacccttcccgcgaacctcccagcccgggccgcaagcccagctccgggcgcgacgacgtggggccggaggtagaaggagtctcagcgcggcgggggccggggggcggggaagcccccccacccacgagaaaggtcttacatcagccgccccacgtgcaatcggagagagggaggaagtcgctcctctattcgggctgcgcctttccccagcctccgccccgcccgccgcgagtctccccgccccgccttggtgcagccgcggccgccgagccgagcagcgccgcgcggggccgagtggagccgagcagctgccgcgccgcgtcgccggtttaagcgcagtgcaggccgcggccgggggcggcggtagtgagcccagcgctgcgctccagcccccttttccctccatggtttctctccgctcccgtgagtaacttggctccgggggctccgctcgcctgcccgcacgccgcccgccacccaggaccgcgccgccggcctccgccgctagcaaacccttccgacggccctcgctgcgcaagccgggacgcctctcccccctccgcccccgccgcggaaagttaagtttgaagaggggggaagaggggaacatggacatgaagaggaggatccacctggagctgaggaaccggaccccggcagctgtaagcagagacccctctgggtgccctctcccccgatgacttgcatgtaatggtggccacctgcggggcccgggctgagggttcgccggccccggcgcggggaagagcgcagctcgtgggctcggacggggaaggcgggcgggcgcggaggggggagcgagcgcgcgaggattaactctttgccgcccgcgggcccctggggcggccggggggaggcagcggtgtgggggaaagcaaactttgagcgcttcgcccgccggggtctttcccctgagggagcgcgtgtgcaagtggccggcggcgagagagggaggcgggggttgtgtaacgctgggagccatgtttgcagcctcccgggatgcgcggccgggcggaggcccggcctgccgaggagctgcgcggccatccccgcctgggccaggccgggctccgcgcgccccgggccggccggggaaggggcgcgggtggggcgggacgggggctcttgtggccggagctcgccgtgggcgccggcccggccgaggtcagcagtcgtggggcgaggagggggcttttttcttttgaagggagcgagaagccccctcgggcgcctggaggcctgggcgggcgcggcccggcgcgcggagcgggggaggggcgggccagggcggcggaggtggcgcaaccgccgcccctcccgaggccaagtttgaaaaaaggacgtggttcccgccatttttcaagcccaaaaataaaactttctcccccgttctctcgctccctcttcgccctcggccttgcccactcctgcctcccaggggcagcccgggtcgaccaaggccaaccgttgtggcgacggcctcgcccttccccctgtgccgcggcggcggcgcccggggcccctgcccttgccccgggaggctggcccctccgtgtgggcgggcggcggctcttcacgccagccggggcgcgccacaggccgccgcagcgccatgttggcgggtgcccgtctccctgcgcctggtgagccggcccacgagcttggccttgcccgcccgccctcggcgctggctggcggccgcctcttcccgcgccgagccctcggtctgtttccccccgccccgccggggcttggctcccactggcgggagccgcgcgccgcggccgccgccgactcatcccgtcgcgggcgcgctgccgaccccctcccccttcttaaaagggcaacggcaggcggccgcccccgccccgcgccgggcgcgcgggattttgggcgggcttcggctcggctcgtgggccgggcggcctctggcctcccacgtgcttgagagcggcctggtgcggtcggccgcgcgccttgcgggctgtaggggcctgagggcggccctcttgcggcgcggctgcgtgggcgtgggtccgacctgtgggaattgccccattcgtctcccgggtttagcgcggctgcccgccgtcgcgagccccccccccgccgcggaccggcgcgggccagttagcgccgcggccgggtgccccagcgggccagtggctttcccgcggagggcggccccgcggggcctcccgacccgctctgggctaagcgagcggccaggtttcgtgccctcaggtggctgtggttaacaagtcgcgaacttgtgggaattcgtcgaccagggtttacctggtgtgctcgacattttaaatccttgctctctagtctttgaggtcaccactaacgcggggcgggccgggctccaccgcacggcgctgtccttcccggagggcccgcgagggtgggccgctccgggggttgcgagatggagggtcgcgggcgtgcgttcttccgaccttccgtcagacattttgtgcccgccacgtgctagcctatcgcccagctcgcgcctcaaaacttgagaggctttcttggcttgagaaggtgtttattccagacttttccattgcggcgtaattgcaaatccgtagaatatggagtagctaaaattagccaaagtgcccgcaagagaagtacacacgtgggtcttcagaaatgcgttaaaatctagaatttgaattctttaggatatgctcaaactaaaggtcttttaaaattctcaagagtagtgttccctctgggaaacacagttggtctgctgttccccttagaggatgttttcatatatgaagtaatattgctttaaaaacacatgtatat

SEQ ID NO: 52573 - DNA, 2095 bp, Homo sapiens
ggctggagtgcagtggtgtgatctgggctcactgcaacctccacctcccgggttcaagcgattctcctgcctcagcctctcgagtagctgggattacaggcacgcaccaccacgcccggctaatttttttgtatttttagtagagacggggtttctccatattggtcaggctggtctcgaactcctgacctcaggtgatctgcctgccttggcctcccaaagtgctgggattacaggtgtgagccaccgcgcccgcccaggtgattgtattttaagagcctggggctgggaggtccgggtactagtcccatctctgctttggctttctggatggctttggacaagccagtgcaacttctcgaacctgttgcctctcatataataggaacctccgccacttcttgaaaacttactacaagccaagtattgtgatcaggggtttctatacgtcatctcacagttctattttatttttttgcttcagagagaaacaaaaataacgctccggaagactgagtaacgtatatatgagcaggagctggtgactggcataggctggactcgatccagctctgtgattctaactctagcaaccctgttttttccattacaccatagggcgcgctctccccatgctcctgagagcaggacatagactatgccctgcgcaggcagccgtccgcctcctgcagggaatgcttgctcctgggtgcacgcacggataccgcgatggtccgagaccacgctctgggacagcaagcctcaagcctcgcacaggagagggccgcggagcttcctcgacccgccccgccgcccttcccgcgggaggccccgcccccgccccccgccccgattggctgtcgggagagaggcggggcctaggggattggctgcccggcgaccgcgggctgacgtggcggggctggcgtgtgggtctcgcagcgttgctcacagaacagagtagaggcggcggcggcggcggccggacccagactggtagtgaggctttggaccccgagccgctgcaatgccgctggagctggagctgtgtcccgggcgctgggtgggcgggcaacacccgtgcttcatcattgccgagatcggccagaaccaccagggcgacctggacgtagccaagcgcatgatccgcatggccaaggtgaggcggcagctcccgggacccgggattcgggcgccgggaggggcggggcggggccgcggggagccagggccacacggcctccgcggctgggtaccctggtccggcctcttcccgcccgccagttccgttttcggaatccttcggatccctcttcctcaccgtgtccgccaccctcgtgacctttctgcattacagcagctgcctcctaacccgacctgtttcctccccgttctggtgccagaataatctttctaaaagtcagacttgatcagaccatcccccctgcctggcaccttctgtggctccctcctgcccgcgggtagagtcgaaaccctttaacatagccttcaagattttaatgactgggccccttccagcccgtcataattcttctctgacattcttcagcgacacagagttactttcaggaatgacagttcctggaagttgctgtggtctctctcacccgccattccctgtatatgaaatatgaagtggttaaaagccgggcctttgagttcaaatctcagttccaccactactagctgtgtgaacatgggctgcttacttagcctccgtgaacccttttccccatttgaaaacggggcttgaaaacaacagttctttccacatggagttgttatggggatcaaatgagattctcagatagagctctgagcccagcacttggcacacatgagtcggtaaatgcgtgctccctcttctgttgggactgccatattcttcattacgaccccagcccccagcataaggcctggcctgcactatgattctttggtttagagatagctcaccccatctttcctttcccttcatcaatgctactcaactgattttgtatcatttgtgataggttttttaaatgtttatttatttatttatctatgttagagacagggtcttgctctgtca

SEQ ID NO: 52574 - DNA, 1831 bp, Homo sapiens
gggccacaccacactcccacaagatgaacattatacaaaagaaaactcagtggaaggttccttctttaaacagaaagcactctcttcatctgccaaatgaagtgagaagggtaggaaaattagattttattgaaaaaatatatttaaaactgatgttttttcagttctgtcttagggctagttagcagtgttatgagacacaaacaggaaggagtgaggtggaaaggtatggaaggtactgggcatggcagctgaagcttgcaaccccagcactgtgggaggccagggtgggacaactgcttgaggtcaggagtttgagaacagcccgggcaacatagcaagaccccatctccacagcaaattaaaaaaaaaaaaaaattagccacatgtggtggcacgtgcttgtggtcccagctacttgggagactgaggcaggaggattgcttgaccccaggagtttgagaccagtctgggcaacatagcaagaccccgtctctaccacaaaagaaaagaaaaagatggaaggggaaaagagaagagttaaaaataaagcagaggaagagcagtgagaaaggtgaaggaagggaggaaaggaaggaaacggtgggagggagggaggaaggaaagggagagagggagggaaggaaagggaggaaggaaagggaggaaagggagggagggaggaaggaagggagggagggaaggagacaggaagggaggtaggttggttggtccgtcggtccgtcggtcctagaccaatcagagtttgcatttcatttcagcaacttccctgggagagggaaagatttgtgcccatgtgatcaagtgtgagcaactcactaagccctaacttatttctgagtcaccattcagagacattgattttttcgacttttgatttccaacttcaaaacaaaacaaagggactcaagaaaacttttgaaggtgatgtgtatgtttattactcttgtgctgatggtagcagtagtgtatacttaagtcccaactcaccaaattacattatgtgcagtttttagtatatcaattacaccttactgaagctggaaagaaatgataataaaaagtttttgagttcttataatttgacagcaaactgagattttactcttataacttgtgatccactgattccttcagcaagcatttgctgacatttaccaatttcctgagtcttgttgatgaatactagagaaggatgttgaagagcactaaataggtaacctcaagcagtgacgttatatctgaaaaaagtgactgaggttcacttttaagtaggcagcgtgctttgaggcctgaaagggctcgggttgaatgggccctgccagccatggatccttatgtagaggctgggcaaaaaaatgctccattttccccctttcgccaagaattgaaatagccccttttcctgctcgtttggccgagtagaagggaaagcctttgaggctattcatgttttcactgcctggttttctgggtcaggattaggtcatgaccgtttcatgtttgttcatttggccttgggcccctggggcaggtagggtctggccaggggaaaggttcttttccagattcttttttttttttgagatggagtctcgctctgtggcccaggctggagtgcagtggcatgatctcagctcactgcaacctccgcctcccaggttcaagtgattctcctgcctcagccttctgagtagctgggatcacaggtgcccgccaccacacccggctaatttttatatttttagtagagacggggtttcaccatgttggtcaggctagtctcaaactcctgacctcaggtgatctg

SEQ ID NO: 52575 - DNA, 1277 bp, Homo sapiens
gagaatatgcataaagcagcatgatatttaatgttatttttctttttccattttaaaggaatatcagaagctctttcctgacattcccatagggtattctgggcatgaaacaggcatagcgatatctgtggccgcagtggctctgggggccaaggtgttggaacgtcacataactttggacaagacctggaaggggagtgaccactcggcctcgctggagcctggagaactggccgagctggtgcggtcagtgcgtcttgtggagcgtgccctgggctccccaaccaagcagctgctgccctgtgagatggcctgcaatgagaaggtgtgtcctgccggactctactcggttctgctgccgtgtgtggaaaaaggataggctggcctgagagggatggtcaggaccagccctccctgagccaggctgatgaaatgatcagtgaatgtgctcccacccgtgtcagcttcttcaggcttctcttcagtaatgcatgtcactctggcctgtagcagcagcaggagacacatgttatctaactttagcagtttctctggccacctagggtcacattagagtcttccactaattctctgaagcccatggccccagtactcctagactccagaatatgtaacaggagtgaggccctggaataagtcaagtctgggctcccttggagcaggtaagccctgagaaacatttaggcacggtgttccctgaggtaccagaagagcctgtggcatttcctaagccagggtggcactggtgggaagggcagtgagtcgttgcagaggtgggtgggtgatgatgcagctattccttgtgcaacagtgaccttcagacagaggaactggtgggcctagaagcactgcctggcatgctgactatcagggcttcctggaagccgtggcctggaccttcttgccttctgagtcatagagccaggcaggcatcctggggctgccaggcacacacacacctaacctgtaggctgtcggggtcaaggcaaagaccaaacaccaggcatgcctgggactgttgtcaccttttattctagtggggcctacctgcttccccaaatcaaagatgcatctataccaggaaattaaaataaagtaaaaagaaatagtttctttatagaggaaacaggagagaattagaccagaaaccagagtaagatttataacagctgagcacttaatttggctctctgagcagacagtaaaacataacaggatgcatgattatcacttgacattttttcctggcaccacat

SEQ ID NO: 52576 - DNA, 500 bp, Homo sapiens
tctcagttcccttgctgatgctgtcaggtgtgtttgagtgaggcgagggcaggaatggcggtctccagggacctggctgtcatccacctccacctgctccttagacagcagatgtttctgggctaggccctgtgtcagcccactggagacagaaaaagatccagtgatgcaatctctccttcaagttggccagcttagtgcactggccaacagtgcattataaacagagcaccagaagaaggggtggttccaaacaaagtccatatcctccagttgctgggtggctgcagagaggggtgagagctggctgcacatgtcctttcctttaagccttcattctcacttccttacagccctttacttctccattgtctttatccctttcctgcccttggcctctgtgtttagttggcattgtatagcagtcactccacatcagagaaaggactggtcaaaggatcttgtaggcagaaaatgctgaaagcactcctttcagagca

SEQ ID NO: 52577 - DNA, 1201 bp, Homo sapiens
ttgtcgtctcagctcttccaggggctgaggcaggagaatcccttgaacctgggaggcaaaggttgcagtaagctgagattgagccactgcattctagcctgggcaatagagtgagaccctgtctcaaaaacaaacaaacaaacattcctgtctcctatctcattacaggacaaagtctgaactccatggcacataaggccttcatgaactaactatggcctatggatccagctgtgtctctcaatccccccacccttataccctcacctctcctcaagtcaggctgcaccccagctggttccccagcctgtcaagctctcacatgtacacagttcctgtctgtcctctctgcgtcctctctatatacagtgtgctcctactcattgtccagcacccaaccctaccatcacctcttcctagaagtcttcccagactgcatccttctcccagccagagagtgtcagacatttcttggacataattttgctagcttcatatttacaaaattgtttaagctgtattgtaaataactgtttctgagcaagtcccccacccaactgtgagctcctaatgtccagcaagtgacctggctcagtacatattgatgaataaacgaatgaacacatagaaggtgggaacggtgaatgattaaaatcattagctgtggcccaagagaatttgaaaaaaaaagatgacaaagccctgaaaccgttttctgatgtgagaatagcatgcttctccatggaaggattcctttgtattccatagccttaaaaacgaccattatttaaaaagagacaattacatgtaacactttgtgcatcttgcctctcttaaagcacaacacccattatgcctaggaaaacacttcatccagaatttggctcaaacagctgacaatgagacacaggctgaaccgactgaggccacataaagacacaagagtggaaatccccagctggagactggcttggcgggttttgtgttgactggcttatttgtctgtcttattttccagccagagcccatactaatctgtggttagagttggtgccacttttagttgtaccctgccttgtcccacagcctttaaagtgtcttgtgaaggtcctctaataaggcaagatttttctttatagcgagaaaaatgaagctaagagaaaattagacacaaagtgtttgccatgaagccttagtctgg

SEQ ID NO: 52578 - DNA, 1904 bp, Homo sapiens
ggacaggtcttgagcccacgactccactggattgtcccccatgatccccttttcaccttggagttccaaggttgtcacagtgtggtggtctggagtcatgcagtaccggagaaaggctcacgatggggctgaattcatcacagaagacttcttggagacaagtggtaggatcaacagctgtcagacatgagggcctacctcacccaggcttcatgaaacccagagagagagaaggatttgagagaagccacagaaaaagtcagctgggaagctggagcaggagcccagagcccctggggcactgttaggattatgcatgggtaagggttccacggtgacaatggccctgttgggggcatctggctaatggagtcctgggttcaaggcctgcccctgcctccagagccttcctcttgtggcctataaaatggctgtaataataatggctcacccagggctgctatgagcaggaatgggagtgtctgtgtggccggggaggggagaggaggtaggtagtgacagctgaggctgctcccagggcagtcaggccgtcctcagctcaaagttcacaggccctttctgtggactgcagattaagtaaacctgagatgtctgtgtggctttctgagctacacagggctgtttattaagagggagagtttgtacctctgttaactaaaaggcagactgtcttccagcccaatggcagtgtggcggatcggccatggtggacacggtcaaggacatctgggtaccagcctgggctcccaacctctcactcctaaacccaccttttctgaagctcaactgatggctttggctcgcctttgcccttccttgggtctcaggctcccgctctgaactttcggtcgaccgcttagacgccctctggggcacctttggtttccaggttgtaacccgccactggccacggccaggcacgccccctcctcggccgttatgcctgggctggctcccccaactcccgcgcggcgaaccccgtccccatcgtccccacctgcacgtgcaccgctgcctccagcgccaggcccacagggtggccacggtgcgcgcccagcaccgggcaaagcgcgcacacgcagcggcggcagcggcgacagaagagctcagccacgcggtcgccatgctccgggcagcgccagccgcatccctcgacaagctccgacctcccaggggtccggctcccggtcgccgcgcccgccattcatctccacctcctccggctccccgggacacagggcggggctcccaagggaaaccgaaacctcggccgtgggcggggcggctccaggccggccggccgacccctaggaggatgacagcccgccgggagcagcgtcgggcctcggagcatcctccgaccagcagggtgctccctctgcccgcccaggccgggaggtggtcccaccagaaatgggaagctcctaatgagccagctaggagagggtgggcttcctgcttaatgacgctgttccagtaacgcccagaaaactgcagccctgatgatgggaccaaagttggctgtgaccttccgggggtgctcctctcactttcccttgatcctctcttgcccttttccccggaaagataatcattcccacaactgtaagataccttcatcaacctcaaataaggacacagagattctccaattgagtttatttcggactgagcagaaggattgcaattcgggaataaatgtgccatggcacccaaggggtggggacgcggagtactcagggaggcaaaggaaagcagaggcttttaaaggcaaaacgaggaggattgcatatactgttttttttgtttgtttgtttgtttttgttttttttttttttttttttttttggagacggagtctcggtctgtcgcccaggctggag

SEQ ID NO: 52579 - DNA, 1620 bp, Homo sapiens
tgttactgtaagtgctcagtaacagaagctactattatatgtatatgtatgtatatttgtatgtcaaaactgagaaaaaaaaactaaaaggaatgagccaaaatgttaatcatggttatatctagatggtggaataaatggctggctttaatatctttgtcttatttttagctatgtaagttttgcaattaaaaaaggtgtttaaaaacaaaaatacagattttctgaaaaaatgggtccatccaggattagccaaaaacttctgttataaaactgtagctcttgaagggctctagagaccaggaatggagcccacagctgcactgtcttatcctgcacctgtggcaggcattgcgaatggatcccagcaccctctctcggacctcagacttggggaaatccagcatggagtagggacttgcccagggtcactgcaaaggtgaggggcagagctgggcttgagcccaggcctctggttccccaagtgtgagcctggtgctgtacttcctgtgctctgagggagcaccagtgagtgctctgtgagtccctgccctggcctccttcctgcacacagcctttcctttctctgggatcatttcctgggtcaaaggccatgagcagtactgtgtctttggctgtggggcactgattgctctccgggcctttagactctggcccagggccatgccccaatttccgcagtgcggtttcccaagaaaagccagatgagccaatagtcaggctgccctcgggctgacgggaggcaaagtgcccaggagccccattcagacacacacctcccacctcccacagactcagggaaggcgccttagggttgggcgtggctcagaagggcctagccctagacagcttctcttccttctcagccttctcttccttctcagctgatgagggaaggctgcccactcacaccccagcccaccccagccctcccctccgccccacctcccctgccctgccctgccctgcgctgccctgcgctgccctgcgctgccctgccctgggctggcagattgctctgcttctaaaaggttttacgctgaggaccacaggcaggagcggacattagccagcctggtgggctattgactgagctgctaaaagcctgtcagggacatttatcatcaggaggccatttccaccttctgcccattaggccagcactcagccagaaacaggcttctgatggatgtggtgtacaagctctaaatcaggggagacacgcctgctcccctcgcagaccccacagaaccctggcttgggccgccctgcctggagaggcatcacctccaagtctccaaggggctgccctggggcagagggggaagacaggacagaaggacccaggaggagtcaggcgggtgggggaccagactggggactctctacggctgacctccattgccagaaagggagaggttgtgaggccactgtcacgaccctcagcagtcaagggagcagctgttcctacaacagcatcatagtcatggcctcaaatgagcatcccaacagctcagggtggagactgggaggcaggggtggcaggacgggcagagggaggacacacagtgtagcagaggtgaagtgggcaggcagact

SEQ ID NO: 52580 - DNA, 687 bp, Homo sapiens
gttggccaggctagtctcgaatgcctgacctcaagtgatctcctgccttggcctcccaaagtgccaggattacaggtgtgagccaccatgctggctaaggctggcctttaagatcatggcagtgaaatgctcctctccactctcccaggcacctgaaagccacggtgtccattaggccctcaggcccatgtcccctctggcctgtctactcccagcagggttccagggctgacccccaggggctctgcctgcccttgctttcattcctccccaccctccacacctcacagcaaagtccaccttcttcaccccctccctggagtgactctgtggcaggctgggccccaggctcaggagcacagtcctggcctctccccagccttcccctgctgcctttgttccctgagtacagtccctggttgccaaggctgcaggttgcgaaactcacctccagcctccctctaaccagctcaccctgggtcacaacaggcaagagggagggaccctgcctgcagtgtcactccctttgggacatctgaaactgcctggggcagcccggcccctctgagaaggacttcctgcacgctgtggcaaggccagacatctcccaatctcaatgcaatttatgtacttaattaaatcattagctagcttgtcccttccttgttctcacatcactcacctact

SEQ ID NO: 52581 - DNA, 831 bp, Homo sapiens
ctttacttcccttgcaaagaggctgaaacgcctgtgagatgggatcaaagaccaagaacacaaatcgttaagggacaagggtctattgaggcctagcattcaccctggatctccagagcttcacggaatttgaaggctcaggcccttccccggcctggcgcccctctggatctgtctcagctgtcctagtcttgctcagaaagcggcccaaacttcagcaggaccctcacctctgcctccaaccctctgttgctactgatgtggtaggttccacagttggacagtttggtcacaatgctactgtgcttgcagccacccaaaaccccaagtctttgtcccaagaaaagagtcctagttcccaccttcagaaacccccacagacatctcctccagtgtgactccatcaagccatccttggactctgctcccaactgttccgaaggccagcactggggatgtcatccaggccttaccaaagtccttatgctgtgagtgctgacttcatccctgcagcctgctgatgtcagaccggcctgagtattttattatctaaatatcattataacttgtattgcatacatagttggccctctgtatctgtgggtcctgcatctgtagattcaaccaacctcagatggaaaatattcgaaaaaattaaggaaaaataacaatacaacaattaaaaaatacaaatttaaaaatacagtacaatgggccaggcatggtggcttgcacctgtaatcccagtattttgggaggctgaggcgggcagattacttgagatcaagagttcgagaccagcctggccaacatagcgaaaccccatctcta

SEQ ID NO: 52582 - DNA, 1829 bp, Homo sapiens
cacagagctaggcaccagcacctggcccgggtggggaaggggaaggagctatcctataccactctctaaatcgaggtgcctacgtggggctggtccaggcagtcgtgccgccaggagtccagccacctccaacctagggctcctccagccccagacgagtaaaccctcttggcgggccggctgatgccccacatgcacgcccaggccggcttggcggggacccggggatgccccccaccccaccgtttcctgtaccaggaagctgaggcccagcaggtaacgcagccaagagggggagggtcccgacaagagtcccatggagcacccgggccacagcaggggcctgtcgggaccggctggccgcgcccagagtgagcttccctcaccgcgggcaggaggggtgggcggtgcagacagtgctcatgagggcagcgagccgtcgggagcccggacctcgaggcggcccctcccaacaaccccgcgagaagggggccaccaatgagcaagctatcctgacggggaaactgaggcctggagaggagcagtgctttgtgcaaggtcacgcaaaggggctgaaagccaggtcccccgcgctccgagccccgcatccctccctctccgggagctgcagccgcagcgcgcacgtcccgcccgacgcccccatcgcgcagaccgggaaggcacggccggcggcgcagggccgccctaccttgatgactgccgcgcaggtggcggtggcggcggcggcgtccagctccggctccgcgctcctcgccgcccgccgactcccggcgcccagagccgccgccgcctccccctgcagcccggcgggcggggccggagggcggggcgggggcctggcccaaggtccgcccttttgcccgccccgcgggtccgccctggccacccttttccgcccccacgaccccgaccgcgctcctggctccccggggcgggtctcggggcgcgcacacgtgctgggaacaggcgcgcacacgccgcagtgattggggcgggctgccggccaccaggcggaggctggggacaggcagagccgcgggccccacgtcgcgccgtgccctcgctgcgtggtgtgggatgaggaacctgacctcccggagcctcagtttcccccgttgtgaaatggagacagtaaccgcgtcggcctcttaaggctgtttgagccctggatgtgacgatcccggccgggtacagtgcgcgcgccgagcccggccagggaagcgctcctttccccgagcagttacagcggttaccgaggcttccccgtccgcagggaggagaggagccgggagcgccgctgggaaccgaggaggacgcccttccttctctcgggaccagccgggggcgctgctgccagcctcgctggctggagagccctgaggacactagacaatggggaggccctacctttgggtaccacccccacctaacactactgagccacgcactcctctaagcgccttctgtgcattacctcgcttcactgtcacacaggcctatgaggttgataccattactcacctatttaacacaaaagagctgaggcacagagatattaagtacctaggttaagatcacccggctagtcatgcaaccccaggcagtatggctcccacggctactaagctaacagccactccactccacaccacgtctgtgaagagctcttggttttgttcagtagagacgggttatcttgagggccttgaactgctccgtggcacatagtaaccactcaatatatagttgtggagtggataacagagtacactgttactactttacatatctgtatcgtttcttctaag

SEQ ID NO: 52583 - DNA, 1006 bp, Homo sapiens
catgatcatagctcactgcactcttgacctcctgggctcaagtgatcctcctgtctcaggcccctgagtagttgggactacaagtgtgtgccactacacccagctaattaatttttaattttttaaaaaggtctcattatgttgcctaggctggtctcaaactcctggcctcatgcaatcctccaaccgtggcctctcaaagcactggattgtgagccaccacgcttggctacacactgttatttctaaggctttggaaagaaggcttttgtcacataagataccctgcttccagctctagggaaggcacagacatgccggacagggaggcagagtgagcacagcctggaacagcagtggcagtgggtggcgtcgggcagtacctccccctccagctcgatgccctaccttgagtgctcgtcttggctcagaactgtagggaggaaaaagagaaacctcagaaaagagaaaagccacaggacagtcaccagtggaatgaaagaaggaaaaccctggagaagggggaccagggaagcaggagcccgggaattctctttgggccatgcccatggactaggccctgtgctgtgtggaaggcagtggcctgggcatgggaggccaggttccggctgtagccctgcctcttgctgcctgaccctgggccagtccttctcccttgccccagctcagctgtccctgccagaaaatgagtggggcagactagatttctgagtctttccagatctgatattcaagaggtcagtgatcctgttctcaaaaccaaagtctgaataacaaggggcattccctaaagttgggttcctcaatcacagggcaggcaggaaacctcaacattctctgtcctcaaactcaagacaatggatatttgatgggtattctaaaagctaaaaactaaggaacaccaactacatgcaactctttctcttttttattttttttttaatagagacagtgtcttactctgttgtccaggctggagtgcagt

SEQ ID NO: 52584 - DNA, 2132 bp, Homo sapiens
ggcggagcttgcagtgagccgagaccgcgccactgcactccaggctgggtgacagagcaagactccgtctcaaaaaataaaaataaaaaaaaataaaattcctgaatatgtaaattcaggggcacactcagtctcctagtgagtccatgattacaatcaactctcaggctgtctggagccacctggctgatctagtgttcttttttttcctttgagatggtgtttcactccttcacccaggttggagtgcagtggcacaatctcagctcactgcaacctccacctcgtgggctcaagcgatcctcccacctcggcctccagagtagacgggaacacaggcgtgcgccaccacaaatctttctgacccctgtgctgctctaccggggcttgcacagtggattccggcagtatgggtggagagaagaggaagccgcctggctgggggcaggcagggtagaaaagcaatcagatggaagcagttttccctgctgtgtggagggctgagagctttctaatcatctggctgcatttgcattggaaaggttatgtttttcttttaacccaaaagaatctctgatttcagactaaataagggaaaagattcgggaactggttatgtgggttttcagtctttgctgaaagaaagggaagggaatcaggtttcacgtccttttcctttatccttctaacagccctagtcaagaggactagttgggctatttgacacagaggtgagctaacatgcctaaagtcacacagccagaaagaggcagagccaagagtcaaagaggtcagtctgacttcaaagcttgggtggtggccactgttcaacactgcccactgagagcttttctctcaaaagcttcctgatttctttttttttctttctccatctgccctcaccgagtagttctttgatagagtagcatgagagttctcaaggttataagtctatatgtacagtctcgtgtggcttaattatgaggatacactctgagaaatgcgtcattaggtgatttcactgttgtgcaaacattgtagactggacgcagacaaacctaggtgatttagcctactacgcacccagctagatggtgtagcctattgctccgaggctgcagacctgtgcacctgttacggtactgaataccataggtggctgtcacataatggcatttgtgtatctaaacacatgtaaacatagaaaaggtagcatgttgtgctatgatgttatgacggctatgatgtcactatgtgacagggatttttctgcttcattgtaatcttatgggaccatcacatatgcagcctgttatatggcatctgactgtacatatgtggttgtgagtggcagggtttggggcaggacgaactctggttgtatggctccctttacggacagtggaggctatgagtgcactccacagccacaggcctcccagtgggacagttcctgtcacaaccctttagagaggaggctgcgggtcacggcaggcaacacacttcacataaagttcctacctcctgtgacatcactggtccctgtggggtggggaagcctagggaaagatagggacagagaaggggaaggaaggggaggaaaggaggagcagggatggtggcagcagctagaagcggcagctgagcagacagaccagaccgcagacatgagctccagcccagctccagctcctccacttcttcagcacatgaccctgggcaggctccttaacctttctcagcctcagcattccacatctgtaaagggggagcacaccagcggctgcctcacctcacagggctggcgcgaggactaaatgtggcgatgcacccaccgagggcagtgcctggcacacaggaaacaccctataaattctacagatgggagcagtgactattggcagctgcaggtcatccgtacagtgtgcaggcgcaggactgtggggggagggtcgtgctggccccttagggctctcgggtgcactgggatggcactaagggaggttgaccaggccaggccccacacttagctagtcaggctttcatctctcatttgataatctagaggcaccttcacttttcagtagcccaggataccagggctactggttaatgggtcaatcaaggcccag

SEQ ID NO: 52585 - DNA, 827 bp, Homo sapiens
catcttctgaaaccttaggactagtgaccatcctttctctggttctctcttttccttccacatgcccatccatccatccaacctttaccaagcaccactcggtgccaggccaggccctgagccaggtgccgtggcccagagagggagtggtgagagttcccacctccaaggactgcaaaggctggtgggaatgaacatgacccaccacagtggaatgatctactgcaagtcaggggaacaagggtgtttgtgggaaaggcaatgacttctgtctggggtggaggttgtggggaataccagtccagagcatttaaaagaaactgtgaagaatgagaagggccagagatggtcgagcagcaggtgggagatgagggtggggatggccctccagatgtggccaagctacagccccagtaaagacctggaggaaggaaagagctaccatggagctgtgggagccctggggtgtggcaggaagttggggtgaggacagcacagtgattgcaaaccaaaagggaatgtttggaacgtccagaatgaagaagtcagcttctcagggctcagtggagagagattaacattcctgtggttccaggaaaactgggggcctaggccattttctgcttcagctgagatttggaggttaccttggatgactgcccagggaaataaccaacagacatcattgttcagacttgccctaggagcaggaccagtgggtgtctttccctcaatttggggagttagttgactctgaagcttatttcattacatctagctgtctccttcccgcatttggctcccagaatctaagactgagacaccag

SEQ ID NO: 52586 - DNA, 6474 bp, Homo sapiens
aggctatacgttgccccactgagtttcctaaaaaattacgttcctttacccagtaatcctgattgaactaaggtggccccagagggccgcaggcagggtcccagaggggttcatcattcccagccgccaacagatggccaacatcaccacagacaacagccttccatctgccagagcagacggccttcaggctgggtggagttctgtcaactccaagggtcagtccccggccaatcagccatctggtgctatctcctagagcccaaacctcttgtggggccagtgctgcaggtatggggacagataatggcttaatgggtattgaagtcaacctgtggtttaatatgacaccagggggtacacagggagtgcattcattttttctcaagagcagttttggtgcttgtgtctcatagtgggcctcaccatgagactatggaagagaggaggcagcccagcctctagacttggagaaggaggttagggccccaatcctggcttttccagctgcctgcgcatgggcaagtcacccaactcctctgagctcctcaaatgctggcttagcccctgggagaccctgagcatgcagacactctgagaacctcagtttccctttcagagtaaggggatgaaaactattgtaaggacagagataacacatgggaaggctcagcacagtcctggggccgcgcttcataccagcagttcccatgctcacatcttctcttccccactagatggtgaggtgcccaagggcagggatttgtctgcaatgtgctctcaagagcatctcgcagtgtttgagatagaaattcctaaagagtcacgaaagccactggcaatggccagatcagctaggataagaccccaaattcccatgtcctcctgaagtttgaggtagacaggaggtgccttcccactaaagaaacacaggaaggtacctcgcaggggtagctcctgggattccaggtgcccatcttcccagctgatgaatgggactctaatgagggtctcagatggacagcggctctcctagcggcattctgagtgcctgggggcaccactgggcacccagaagttgtgctggctttttctgtctcacctctttggtttcagtatctgggctacaggtgaaaccctagagttacggggctgccattcctcccttcctaatgtggaatgaagacctaagctccctgatcactgctatggccccacggcacatttcctgaaggcactgatgggctctcacttcccgcctcgtctctgagcccctcagcagggcacctcactgcttgtagggcaggaagagattgacatggagggtaaggagggctgcagtaatcgccagaacaaccagagcctgcatctgttgggcagctgctgggtgccaggtactgggctttatgaatctgggcacaggtctctccagtaaacacggctgcaactccatttacagaagaggaaactgaggcttagataggttaagaaacttgcttagggccagaatttgagcctgtgctgtcttatttaaaggctggttctttgaatcaccctgaagactgaagttcatttgtggaatgggttggagagtaaacaaatccactcctattgcacaataattggataaactaaataaatcacaactcattctccttttgaccctctgtcccaggacacaaagtcgaggtttggtggaaggttacctggtagaaaaaaaatccagattcttcaatgcatcaacaacttcctcctgacaatttccctctgaatatatgggagttgtcaatagcctggtcaacccttattaatctccaagaatcttgcctttatttattgaagaatgatgagtcctccagagatgcagagcaatcaggggcaaactttcatgaaatctaggtttcctggggcctttctacttcatctgacaatttgtaatgtcttagaaagaaaggctgtgtcaagagaggctgcccgtatattcaggatttctttttctttccaggtttgggtttcggatttaagctctactagtccagggatcaagtagctgctatggctctgtttcatgccctctcagctctcaggagcgtccagcagcctcagaactggagcaccatgatgacaggaggaaaagacagctgggctgctaagcagcagcagaggggacctcacgtgttataactacacatttgggtgttgctttgtttaatgtctgtctctgccatgaaatgcaagctgtaagggcagagcctgtgtcttttgctcattgttctttcccagcacctggaacactgcatgcacataacaggcccttaataaaaatttggtgaataaacacatgagttaagaacgtatgaataaatgagccccctcctttgagaactctaatgtctaatcaccagttgcttcactaaatgtaactcctggccaggcacggtggctcacgcctgtaatcccagcactttgggaggctgaggtgggcagatcacttgaggtcaggagttcgaaaccagccttgccaacatggtgaaacctagtctctaataaaaatactaaaaacaaaaaccaaaaaacaaaaaaaaattagctgggcatggtggcaggtgcttgtaatcccagctacttgggaggctgaggcaggagaatcgcttgaacccgggaggcagaggttgcagtgagccaagactgcaccactgcactccagcctgggtgacagaatgagactctgtctcaaaaaaaaaaaaaaaaaagtaacttctgacatgccaggaatgaagcctctgccggttcccctgagatctgctgacagtggtcactgcttaggggcagaaaaggcagacgaggggccaaactaggtatagggagagcattttttctagatttcttcccaccaaaatagggcagaaaagaaaagaagaaatgtacaagttataagaaatattcagaaggtaatagggcataagccccacctccccagcctaagtcctctggagtcagggctggaaaacaaagcagaaagggcctccgggcagccaaagttcaaacacaaaagcttaggccttcctctagaggaaaaggagtctgggccctcactggagcccgccactgccaccacaggtcctaccaggccccaccgttgggatttatgtaacaactgcctaacttagtcgcttttatcactctaaagaggggctcccgcccggagctgcagccctctcacatctttgccctgggaccctcactacttcataaggtagcccctggcttttaataccatttactctctgggatgtaggattttggagtagttttaatgtctgtgtgtatgagatctgttttctacaattattatatagctcttgtaactctcgtaattaacttcttaccatattaagcccaaatattcctttcactgtttctgtgttggtcctggcttagccctgggccacacacatgctgcttgtttgctttctcctgtgacagtcttgtgacggtcattcagatatctgtgcccagatatcggctgccaggtcaaagttccccccagttctatcgacagcccctcccatgaccctgcatccagatcacctgcctctaaataatgtcattttctgggtagggggtgagaccatgcatggccctccaggaggggtccaagagacagttattagagtagatctccagagatacctgcccttggtgcccttttgtgacttactttgagtgacatcaggttcttgagtaatcaacagcatatttcaacattctgcagtttggcctttaaagaccagagagtagctggtgcccagcacggctaatgcgtcccatctagcttatccgaaaggctccaggaactggaggggtccactggaacctggggcctccctgggaccagacctcaccttctgagactttaactccttggtgagcatcagaacctgttgctccaaggctgccactttctcctgggcagttcggttccgtgtgattccttcagaaaagaatgggaaggtgttgttctggcgcttggctttctgagcgaaactgatggtcagagaaggcttgggtgcaggctttggagaatcctctggctctctccctgctcaagaggagaaacgcagaagttatgactgatgacatcagcagttctcaaacctgagcttgctttagaagcacctggagggcttgttaaaatgcggatggttgggccctaatttcggagctctggatttaataggtctggggcagggcttgagaatatgcacttctaaaaagttcctaggtgatgctgacacagcttgtccaggggttagactgtgagaaccactggcctacataaacgttattgcactgtgctggcccatctgctaaactgtgcctgtctccttccttcagatcccacccagcctgcattggtctatctcatgccaccctgctggtgtttgccaagtggctttctcctcaggcacaagccctggcaggatgttctgttccttatttcaggatcccacctctatgtactaggagattttcaaagcacacagatctgtctgatgataggaacacaaaatgaatgtctgtactctgcattcttgctccagagagcagctcaagcatttaacttgattcttcttattccaagctaagttaagagatatatttcccccacagttgattgtctcaaggatgcatagtccttttatctcctgggttacaacctatggttcacaggccaaatccagcccacagcctgcttttacaaataaagctttattagaacacggccatgcccatttgtttatgtgctgtctattgctgcttttactcctcaaaggcagaactgagtgcttaaaacagaaaccctatggcccacaaagcctcgaatcgttactatcttgctctttacaaaaaatgtttgccacccactgtttttaagtcatcaaaattttattcttaaatcaaaccaaacatcagagaatcattcccttgtgttgccttgtcctgccctgacccagctgtgcttctggtctctgccatcagcctgcatcaagggacatttaagggcctgactatgtagccaagggcccttgagaagcttgttcacatgggatatatacatcatgcctattatgagtccccagcagaagaaattcccttcagccctaggaacttccaagaaaagctttgcttcttataagaaaatatgtttttagtcttatggacactggaaataatctagctgcttgcatttccctctttgccttggctgctgagcttacagccacatttactgcctactctcagatattttgtaggatcgtaaattgatcttatctaaatctcctaaccaaattactcatttgcaggagtatgcattttagtaaactattacctatttcttgggactaaagtgttaaaggtgttgaaaataagaatgtggtatggcatcccaggataggggacacgcagggctttggggataggccaaatgacttagcatgagaccaggccaagggctggccaaacagtcttgaacaaataaagagttactccagtaggtgacaggaaccagacactgagtgcaaaaacagtaccttgctcggccgggcgtggtggctcacgcctgtaatcctaggactttgggaggctgaggcgggtagatcacttgaagtcaggagttcgagaccacccggccaacatggtgaaaccccgtttctactaaaaatacaaaaattagccagaaatcacttgaacccgggaggcagaggttgtagtgagccgagatcatgccagtgcgctttagcctgggcaacagagcgagactctgactcaaaacaaacgaacaaaacaacagtgccttgctgagtgcaaaaccagaacagtcttgttccagatcgaagagaaatcaggttacactgggtacaaggcagcctgcagagctcagaaatatgtactacctctttctccttcctgtaatggggtataggggagcagggaagctccttgtagcactgctgccctctgatacatgactgtgcaccaactctgaggacaggcagggcaggcctcacagtgcccagtttataattagagaaaataaggcctaagacagtggtgttcaatcagtgccctggatttcataggagtgcctcaagggctgactgggagaggaaggtggagtaagaggagcagaggaggagtccagactccaactccagcctcaactctgctttttttttttttttttttttttttaatttgtagctcatttagagtctcaaaaagaatttaggtgttttttattagtgttcaagaaactcatttgtacatattagaaaagatttattgacataaaaataatcttttcctccatttaaaaatctgattacaaccactgtttaacacagtgtaaacaccgtttaacacagtttaacacagtgttgagatattcaacactttattagaaaatag

SEQ ID NO: 52587 - DNA, 2169 bp, Homo sapiens
tccgtaaaatgggtctgtcttccctgccttgtgggaacccaatgaggaaatgggtgggaatgcactttgcaaagcacaaagttcttggaactgtcgtcaccgacactccaaatttactgtgtccacctcacactcgcgcccagccttgccctgcgaaaaggggacctcacgccgctggaaaggagaaagtcgttgcaggaatttaccttcagggtaataacccggctgggagtcttgatttcgaagatcccctcctcagcgtccgccttacagtcaaacactgcactggagaggtcgatgctgtccaagggattggcatcctgagcggtccgcgagtaatacagctgacatttcctttcgtcgtagaagaaccagcgggatttccagccccggatgggccctttgccgccgaacttacttaaatacccacagagtttcttggggaccgcctccagggaccgggcgcagtcccccgattcttcctccggaggcggcacctgtggatccctggcagactcttcggacccaggggcagaggagctggactccggggcgttctccccagcgccctccatcgctgccagccggagactgcggagggacgaggggtccgcgggaccaccagggacaaatctcggagactcggcgggcagcttcccaaagggagacacctgggcgggggcggggccgacggcgaacccgcccccaggaagccacagagtcgggaccgggtgcggtgcgcgcgcctcaaagatcgcaaacccaggttacggcggctggccacgcccctccaccgccaggccacgcccccgcagcgctcagtcggctccctgcaaagcccagctgcttccggctttttctccgcgccagtcagccatctttactgagggcagccgtgctccctggcttcaggttaaaggcgtggtggcactgagttaggttaaccgcgggcagagaagcctgtccctagctacacttccctggtagttcgcatagtcacctagaaagatagtgctttcttgcacccgatgggctgcttgttccctccctgtgccgcgcggggcaccctcggacggcgcatctcgcggccattggctgaaaggaagaccgctgggaggcccatcttccggcgtcgcccgggcagcgcggctccggagctgtctgccactcttctcctggtgttccttcagccccgtcagtgacgccgcggacggccttcttatccctcgcctgacagcagtggcctccccagctctctgtcctggctcctattcgcctcctgacagcgctggttgtgttgcttggggcgcccaggcgcggccgctgcgctgcggaaacccatgccactcctgggtcatagttgggtgcagtacatttatttttattttgttattgctattattatttttagagacggtctggctctgtcacccaggctggagtgcagtggcgcgatcagagctcactgcagtctccgcctcccggtctcaagccatcctcccgcctcagtctcccgagtagctgagaccgcaactgcgcaccaccacacccggctaatttttaaattgttttttgcagagaggggggtcttgaactcctggcctcaagcgattctcctgcctcggcctcctaaagtgctggaattacaggcgagagccaccgcgccaggctgttttgtaaataagtaaaagaatttagggtttgactaacttgctcaacttctgcctcattttacctgtttccccttaaacttctccccttccctcctaaggcgcatttctccattagggttgcggagcccaattgcgtccagctttctttaggagcttctttctgcctttctcttgccctttgttcagcctttcctcttacttcatcgtctccccctcagccgtcgttaacgagaccctcatgcacactcagtgatattgacaagaagcagggtgggggtaaaggcgagggctctagagtctatttgcataattttcagattcccactctgcaatactgagtgatttgctcaacctaaaaatggagataacacttcttcctacccacccccgacccgccgccagacaactttacggtgaagctaatgaaatttatgttcacttgcatgggtcgctgggatttgtagtctaacaggtggggagttgcaaccagggagca

SEQ ID NO: 52588 - DNA, 753 bp, Homo sapiens
cagaggttacggtggcaggggttgggatagttttgggagtgatgatgttcctgttcctgtgaggctggcaatgggcatctggaagaaaatcaagtgactcctgcactgaaccacaaagcagactgtacaagctgtaggtgttgtctaatccatccagattctacctgggcctggagttcgcagtggtctgtgcagccacacatggggagagatgcacctgagcatgcaacctgcaggggcaggtgggctacccaccccccaacccccagtgcttccttgtcattgtcgtgcaccaaagcagcaccactagagggcaccaaagagccacatgaagggtccagcctggtggtggtggattaccctctgctggggacacagaactaccaactactatagatcggtggggccggaaacggtgaagctgtcagcagcatcttgtgctactctggaaggcacccactggccttacatgaggccagatttccaagcaccatgggggactcccccacttctggagcagctgttggggaagtattcaggctatacttgggcactgcactcggcctgttcccagtgtggactgtccacgcaggccagggccagcgagcacagggcactgacccctgcagacatcagggtcagggcctaagcccgggcttcggcctcttctcttctgtacaggacagcatttgcattgcccttagaatgtttttcttgctctggatagctggcctgcaaaattttcaactggct

SEQ ID NO: 52589 - DNA, 917 bp, Homo sapiens
ctaccacttggacttaggcagcttcatttgttctaatataatatgttaggaccatttactctgcttggatttaatcaaacattccaacctgttaaagttctttgcactcaaactctgtcatccaatgtatttcatgatttctagaattcctatttataacctcatccacattactgacaaaaagatcagagatctgcggcccgtcaccagacactacgcctagaatgacctcagtctaaaaggtgaagcttattgggcagacagtgactcacctgcctgggctttcattttgttgacttttctcctgacatgatggggaggattgggagctgggacatcaaaatggaaactgacttagttcctgtgttctgtcccctacatctaacttaagctagaagtcatatggagaaaaccttttttttttagagactagattggggatcaggttaatggggatggagccttggctctgccatgaattggctgagggcccttggacaagtccctttactctatggagctctatttcctcatctgtaaaatgggaaaatcatagttgcttcacatggttattgaaaagattaaatgagataaggcataaaaaggtcacctttgtcatctgtcactagacagctgtaaaggattcaggaggagaaaatcaatagttgataatttgtccctaacctaagactctgagccctacctacagggcagggagggggtctgagtcacttcagcctcaccctgatttctggtatctccctggctaagttgagcagacttagaattagccaacaaggcttagactatgggttagactgaggtccctggttcctcgatgatggtattgttctgagccctggggttttagctccctggaaagaggaaagaacagtgaacgcaactcttctgcttcc

SEQ ID NO: 52590 - DNA, 1400 bp, Homo sapiens
gtgcagagcagcttcccagccccgcctggaaacagctaaactttagccaccccctgttcagaacaggcttggaatgagcttaaagggcctcgcgacttcatcacacagaaatggtatttcctgactttcttgatacaaatttcgatacacatctgctaaatcagccttattaatttcattattccgttcctctgtgctcttgcctttttttttttgcctgggtgaactgtccaagagtgagagagagatgttatgcctcccaatgctattgtgtttctgtcaatttccgtctctatttttaacaggcttttctttctttatttcagtgagatgtaatttaaagcaataatagtccgtgagcatgttattctcaaggtggattgaagccttatctatagaaaaggactctccttaatcctgtttgacacctgtatcttgaacacgctttggtctgatatgaatactgggattcttgctgtagtttgacttgcttggtagacctttgctcaaccttttaccttcaacctttcagtgtcactttgtttatctgatgtaaatagctagagttcgttttttgaaacacaatctgaaagtctcttccttttgataatgagtttggcctatttgaacttctggtcagaatcattatatgtggtctgcactgatctgttttgtgctttctggttttcatgtttgttttctgtttcgaaacatggatgagatttcctttgttttatttttgtgtttctgcagcttcaggttctgtttgcattatggtatatttaccactgagtcattcaaagcattctttagcttatatctacctaattatgaaactcatgagcaaaatggtctcttttgagtccctctcctagttaacaccaggagttaagcacccttcttttaaaaaattcatctcttcttaggcctgtgaaggtaatttggatttttatatctcaattatgcctattgccgtatctatttttgcattatgtataaaattatatgtaatttttgcatctgcatacacttttataacaattatttagactttgctttccttccatgggttccaatgatccctgctcagccgtttctgtcatgacctcagctgtaaagtatgccatcgcttttggctggttgacatcagacttcaggattagcttcaagaaggggacctggctggaacatcgtgtgagccccatacagtgcagaatacctcccagttgctccactgtctctgggatttaatgcttcagaggagtcagagagtggcctggtttttgcatctctatgggaagtttgtttttttcctggcctagatatttgtaagattttctccactaagtatgtcaaaattttggcaaaacctgtctaagtatgactctcttttcaccagt

SEQ ID NO: 52591 - DNA, 809 bp, Homo sapiens
aaatgtgatttgggggtcagtataaaatctacacagtaatgactgttagatcttcaaggaagtgttcacagaccaagctcaccttaattaagaaaaatagtgaactttgtgccagatggagctttgcagcaacgggcatcccacagctaaactcgcctcgggagccgagcaggcgggcatctccacactgatggctgcacatgcccatcagcagggcagccgggccaccccacccattatgggggggcaggcacactggcgccctctacagggcatgagcagttggggaagtagtacacctccggggttcccaggctggctctgtcctgcttttctgagtctctaaacaagtgctgtcccctctttccctctagaccacaacaagctcatccagcaaacggggttgagttggaaactcacagcgacaaatccaccaccacaaaagggtattttccctccctggggtaacagtctaaattgttgctatctttctggaagccaatgacattcacaacctttgacccaggaattccatttctaggtattcatcctgagcaaataatcaggcaagtgggggaaacgaaggtataaggacattcatctgagctgttaaaataacaaaaaactagaaatcccagagtctgacagttcagtcttggataaagagacacgttcctacactagaatgttctaatgtagccattaaatatgatgtggctacatggtgttttatgacatggaaaagatggtcacaacacataaatcacaaataaattggattcaacacaatatgggaaagatactaacag

SEQ ID NO: 52592 - DNA, 512 bp, Homo sapiens
atcagggtcaggacaggtctgtgtgaatgccgctgcccttgctttttctcttacaccatgctgcctcctacatttcagacagtcgattttattctgctttatagcctgggaatctgtctctctgcctgtgctctaatttccccacaggcagagcccatgtctgattcatttctaccctccccatccccaaaagcacacaccccatgccaagaggtgtggcaaggttgtggtcagcagataggctgggcattgcggcctggaggcctgctgccacctgctggcaggaatgtttgttgcaggcggctgaggacccagcctaggccagatcttcctcaatgaagtcactgctgggcccctgaagagaaagatctgcacccaccaacttcctagtaccaggagaaggaaaacaggtacctcttcccagcaaaatctcttccttcttttaacaccagagggcagaaaagttctgttttgtggtgtctctggtgggctcggagctgtgtatctccaag

SEQ ID NO: 52593 - DNA, 1564 bp, Homo sapiens
cctttgcctggcctgcccaccaatgccctgggtggggactctgcctgggtctcgcagcaccctcaacgccaagccaggaagggaaggcaggttctgaggaaactcttactgcaataagaaatgaattaaatctctaaggttctaagtctctacaattctattcgctgtctccagattctattctgaaaggccaaaatttctaagaatctgattttatgttaattcaaaagtgtttccacgtctatgctcaaagtttacaaaagactactcaaagtttaccattccaactctaaggagtccttaactcttcacctcccggggcatccggccgccggggaccgcgtctcgggccagcgccgggcaccactctggtcccgggcccccgggccccgccgcctcacctggccgcctgcatgagcgcgctccagccgtagtggttgcggctgttgaccgaggcaccgcggcgcagcaggaagcgcaccagcggttcgtggcccccggccgcggcgaactgcagtgcggtgttgcccgcctcgtccgagcaatccacgggcaccggagccccgactgcccccgccgctgcggccccgggcccggccacctcggcccccgccggctccgcgcccgcctccggctccgcgccgcgctcggctggctccgccgcccccggctccagcagccgccgcgccgtctccgtgtcgccctggtcacacgcgcgcagcagcagctggaaggccgggggcagcccgccctcgcccatcgccgccgccacgcgcggcccgctcccgtccgccccgccggccgcgtcggctccgcccccggataccgcccgcaggcgcccccttccggccacccgcccgcgccgcgcgcctactgtgtgccgggagcgcgccggggctagggccgcgcgcctgctgtgtgccgggagcgcgctagggccggggctgcgcacctccagtgcccgtattcgggagtccagggacgctcagaggagcgcccgccgcagacccgcgtgttcccttttgcctcttcggcgccctctcgccgccctgtcccggggctccagaaacttcctgtcagggcagaggtgggagcggccacgccatcccctcttcacgctgtggtcagggccctgggcccgggtctgagtccgcagctgcgtgggccttgactttactagcgggctccgctgaccccaccgcagcccctggcactgaacctgcccttctagaataaggaagcggctgaattaaggaacgaacggattgtttcctcacagtgtcctgcggtgcccttaatgtcgctccttcatctgggccaggctgctggggctaaaagcgcctcctgttctctctctctcccccaccttttatttcaactattattatagattaaagggtacaggtttgttacatgggtaaattgttacatgggtaaattgcgcgacgctgaagcttgtggtcccaacgatcccgtcacccaggcagtaagcataatacccaccaagaggttcttcagcccagagtcccctccatccctccctggcctagcgatccccagcgtt

SEQ ID NO: 52594 - DNA, 3936 bp, Homo sapiens
agctctgcagctgacttgctggggaactgatcctcagtttccttccctttaaattaagacattggagtaaataacatgtaagcattttaaacaacaagtaagtctgtaaagactgaagggaattaacatttatgacagattccttaatgtgcaatagctcatttagacctcacaacagtatctccctttaccctgggggatgctaaatctcaaagcagtcaaatagtgttcccagacccacatctagtgagtggcagccagaatttcaagtcgggtctgtaggcctccaaagccagaggcttctttctactgcccatccaacctttctcaaaaggcaaataaggtcatgcatttttatttactgaattttaagtaaagcagtgtcttttgaagcgggcccagtgccacttgcagcagaatcacctgggatgtctattacaaatgcagattcctgaaccttctccacatgaactgaagcagacttgctagggccgagggagacccaggaatctgtattattacaagctctccaggtaattggagagactttacaatttgggaaccatgattttaaactaataatttagtgttccattctagtgtagtttatttatggatctgtggctcatggaaatttcctcctagtatcaggaagatacaacttaaaaatagtctgtttttccttcctattgtatccactgaattccacggaaaatgttaaggaactggaggtgtgattaacactgattaatctaggctccgtacgtcaaaggcacagactgacatgaacatacatgctgattagaatcatacagagctggaaggggatgggcaaagaaatggcattagctaaatatttactatgttccagacactgtaccagacacattacgtcatttaaggggcccaagacaagtgattcaatcccttttatttataaacggggtaggtactattattatttacattttagagatgaagaagctaatggccagagaaaaacagtcactttctgagatcattcattcattcatacaataaaaatctcattagctcttatcttatgaaagacattgcaaatagagcagcaaaaaggcagtctagggacctcaggtggcacaaagtccaccaaatctccattgaagaaactggaactgagagggcaaattgggactggagcctgccagaagccatctctctggaatccctcagcctgagcaagaggggagtttgctgctgaggctgctggagctgcggtgtagagcaagttgcaggcctctgagcctgttggaggttcagaaaggttagctgacttgcttaagtaagtgtcctagacaggagggagaaagcgcgcgggtctcagatcccagctccaatatccacgccttttcccttttcatctcccggaaggaagccttcacaggtggggaaaatgctcacccagtgactctaaagtagtgcacaaattggcattaatcagaaccattctgattcctgctatcaaggtttatttaattctaagctcaaatgacacagaaaataaaatttcctccttaaaaggttctgcggaaaaatattctctgttctacgtaacagcctccttggctgtgtttgtgtctgaagaaaggactagtctgacaggaagaattacaaatctggagctcattttggcgtcgcagagggaaggtgggtggagcgtctcgcagtaaattaggaattcagaatgaaaacgtagagtttatttgggtttttagtgacacctcaggattattatacagcagtgtcagacacagctcaaagtaatgatgactgctccccctccgccccgcgggagctgggtgctaagaagggggaacccctcctttgaggggttggggtggggatcctccctttccaacctggatcgggaaggggtttgagaggagtgcggcttggatccccatcctggatctgtgctggagggaggcgggaggctatttgggggtgtgtttgggctcaggatctgggtctgacgctgggatctgaggactttctgggtttggaactgggtgggggagctgggtttggggtgaccgctgggagcaggaggaaataggagagtgagtcgcatgtgaagggcactgaggagggatcttcgggggaatgctgaagttgatgcgtggacttggagaggggaagttgaagtggatgcaggggcctggcgctgcagcggatctgggtggcatgtgctgggattgccaatgcggagctgtgaatggggtcagggtggggctgaggcagtaccagatcttccgcgcctagaggaggttagaagaaaagagcgtcgaacggccacagcctttttccgaaagagactcacacagacacacccatcgctctacccggccctccggggctagcggctgagcggtgctggggctggcagaccccgcccccacgcggcctctcggagccgggagccgatcgggccggggctggggtctggcggcccagcccccggggagcgtggggcgtggccagaaaccggcgctcgcggctgcggattggctgcctggcgggcccgcaggcggggctcccggctgggtcccgcttggcagctcgcggcggcggggaggcggggccggcgggagcccggcagccaatggacgcgcgtcctccgagcagttacaaagggccggagcgaggccgccgcggcggctagggaggtggggcgaggcgaggtttgctggggtgaggcagcggcgcggccgggccgggccgggccacaggcggtggcggcgggaccatggaggcggcggtcgctgctccgcgtccccggctgctcctcctcgtgctggcggcggcggcggcggcggcggcggcgctgctcccgggggcgacgggtgagcggcggcgcggcgggcgggcgactgcggggcgcgcgggccggacccggcctctggctcgctcctgctctttctcaaacatggcgcggggccgggggcgcaggtggcggcgccggggcccgggccgggctctcgtggcgccgcgcggctcggcggctgccgggcgaaccgcaagcggggagcggaggcggggcaggggcgtgtgtccgggcgcgggcggacgtgtccggctgcccgaggccgccccgctcgggactccccggggaggtggagtcgggcggagtcgtccgaggtccggggctgccctctggggtgtgagtgggcgagggccaggggcggagagtgcgaggccggcggggactggcagagccgtggctgcccgccgccgccccctgggcacggcgtgaccttgttctggggacccccgccccaagagggtccgtgccagaggctgccgaacccggggcggggtttgaggttggggtggaaggcggctcccgggcggggtgtgagctccgagcctctagggcttcgtccagtgggagtcgggggcgacgtgtggtgagacccctgggtccgcaggccgccctgactcccgcccggctcgacccgagccgaccctgctggaaggggctgctcctccagccaggggggctttgtgtgagaagaaggaagcgcggagatgcgcggaatgtttcttctttcgtgcgtctggggagtgttgaagtgagtccagtaaccagacggctacggattgttttcatagtggaaacttgaacgtttgctcattctgcgggttttggaaattttgggaacgactgtgaattgattaaacgctttttatttcctcgaaggaacatcactcacgttgttccttttcttgagtgacagttaatagtttgattcagacatctgtatagctggttttcaaggaagactgttggctggatttttcaaaatagtaaatcaggttggggtaggtggttggtatccacaaagggatgagtgaaaaacttcgttagcagctgaactgagacactagaagctaaaa

SEQ ID NO: 52595 - DNA, 2572 bp, Homo sapiens
actaaatttttaatcgagtaaatgttactttttaaagtcatcttttttaggatggggaaaaatgcacgaaggaaagagtcaagaatagctacagggcagatccaggtggacattatttaccaaggtaaaaagcttgaacttttctccaaaaaccaatggggagccatgtacaagttttaataggggcatgatatattcagcttggcgtttttaacacatgacactgctgaggacggtgtggcctggctccgaacacaaggacagtgggatgcaaatggcctgaaaggagagtcaacaaaaataacaggtaagcgggaagacaacacgcgagttactcattagtaaaaggtgactgaagctgacttctaataccagcgtttctcagagccccaaagactatctacctcggaatcaccctatgacccagttaaaatgcagatgtctgggccccacctcagggcacctggatgaaaacttcctggaggatggaaccccagcaatctgcaactttaaatgggcccacactaaagttagagaaccacaggctcgctcacaaccctgacttctccatgtcagttccgatctttgcgaaccgcagacagggaaggtcttctctcaggggtcatgcccgcggccgccctccacggcgaggtccgcactcgcgcagccggccccgcggccgcctcacctggtcgcacactaccacgtcgaactcctcgtcggcgaggaacagcacgtagagcgccaggaaaaccatgcgcacgtaggcgcagacggcggcgccgcggccgccccagcccaggcctcgcggcagccagtccccggcacagcgcaccggtagctcgcggctctcggcgaaacagtggcccgggtcgtagtgcgctgtccagatcttcacgctacacccgcgcgcctgcagcgccagcgccgcgtccaacaccagccgctcagcgccgcccacgcccaggtctgggtggaggaacagcaccgacggcttgggaaccgagtcccgttcccggccctgctcctccgccatggccctggagccgcaactgcaccccgcaccctgatgggggtcttctgcgcaagctccgcgctcgtagctcccagctggccactgcgggccgaccccgccctgccgtacgtgcgtcagttaggccacatcagcgcaaatctgtgagggtctagtaactgcctgagaaaatatcttgtctgaccccggttatatttttccttcggtagggattggactttctgaaggacgttgtgatccaaaggaaggaggccggaggtctctacttcccatacagcaggtaactaagttgtctgtagcagactgtctacaggcatatcgtgagacgacccaggcgtccctggggtcagagaggaccttgcctgcaagtccgggggcggggcctgagtcagtctcgccagctgccggtctttcgggggctccgtaactttctatccgtccgcgtcagcgccttgccaccctcatctccaatatggtatggcggcccttccatgatccccgcctctcccagaagccctgactcctcctgctttgcgccgtgcttttcctctgtagctcccttgcttcccccagcctcgggtgtgggtgtctaggccggggttctggggcaggcctgccgcgctcacccgtctgtctgcttgtctccctctacagcctggtccgacccccagtggcactaacgtgggatcctcagggcgctctcccagcaaagcagtggccgcccgggcggcgggatccactgtccggcagaggtaaggaaccctgcagttcgttcgcttccagactcggagataggacccagaacctcgctgattctggggtggagaccctagcatgtgaagattgacaaaggcaaaatgagcttctagtgacgtggccgtgggagtagttaaaggccttttgggaggaaggcgacattttttttctcgttgctcagtttagggcactactcttaaaaaaggaaagttaacaaactggaatagagtcagagataactttgagaaaaccgatgtcattaaactggtgtctctggacctgaggtttgcactcacatttccatctggcggccccataagcaatctgtcctacagataactcgtcctacacaaaacttagtctcttttcagctcagctctctcactctcaattatatctccttacttccatatggcactgttgtacactcatttactcagagccagaaacgtcagcgtcatcttggatttttcttatgctctttctctctctagtcatatgccagactttaaactctgcttgaaagctttctcataagctctttccttttccctttctactgctttgcatttgctacttaacccttttcttcaggctgtttgctttccagtccatcgttcgctctgctgttactcttctgcgtagtttctgttacttgttgctgaactaaaaaaaacaaacaaacaaaaaaaaaaaaccggggggataccaaagctcttagtggtcatttcagcctaacctttctttttcctttttttttttttgggatggaatctcactctg

SEQ ID NO: 52596 - DNA, 1428 bp, Homo sapiens
accgaatcctaagctgagctagtacctacaccctcgttttctagaaggaaaattaccttcattctggattttaggaaatgatatgctggacttttcagactatagttgaaagaggtttagattaaccaaggagatcttatttcttgtttcagttctaccagtggagtcttgagctcttgcccctccttgactcagtttccctcagaagtatgagctgtttgagccaggtgatcttgaaacttcctcccagttttgattcagggtttctagttttcccttggaaatttaactctgccacctccccctgcgccccacccccagcctgtgtctcacaaatgggttaaatgggaacaattgagaagtgaaacaactttgctatagaccagctcggaaggataatgaaattctcaacttctgatatggaaaactgttagaaaaatgcagctcctgctccacttgtgaaaaataaaaaagaaaaatggtgtttaatgtcatctgtcacccacagtggtgaattttacaagtggtcataagcacattcccctcccccaacacgcagcaggggaggaggaggtgttgggtaagcaggagcttttggaaagtgcgtgtccccaaacgaaagccagatatcggggccaggccttgctggggttaccttcccggtgcagccatgatttatttcccgcaggtctggggaccgtaagaggggattccagaagcttcatgtgagcagtgaggacccagtatcttggggctgcctgccagtaaggcgacctcgctcagtgcctgtcgacaccgtctgctgattgggagctggccgcggccgcccaggccctcgtggcctctgggtcatgtgagagacttggcaggagccggtgctcactgaatccggtattcgggtggaatctgtgccacggagctgtcagcgtgacggtgtcagcaggttcacctgcctgtgccagaggaagggccacacgccaggcagccttctgggccatcctgtcatcctgctctgcagctgacagagacacccacagtcgcatcactcagccgttttgctgacagcccggatgtgcctttgaacagcctgcatttagggtgctgcgggaggaaccctgcactcctgctgctgatgagctgggctctgcacagcgagcaggaaagaaggaggaagagctttctggatgtcaaatctcacgggaagatccacagaaaatttgaggagtaaaaagtaaaccagtcagccgagactagatcaaagattcctctgtgcctgactgcagacctgtggtgactgaagaatgctatcattccacagcaaaaatggaaaaacacagccaggagaatcaatctcataaacctaatgtcacttgaggaaatgttctttatttttagataaggaatatttttgcaactttttaatgttga

SEQ ID NO: 52597 - DNA, 1645 bp, Homo sapiens
cgcttagaaaattatggtggaagagtggggctttataagctagaatattgccctaggcccttgttagccaactacagttacagacataatcagtctcaaaaggaaaaagcatccagtagggtatgccatgtagaaggaatagtttttaaagttttgtgttccacccactgaaattctttttgttagcacagaaatggtaaattactgagatgtgtgcagatgctttctgctccggaaccacagccaacatcccaaatcaatgagggcgctcattcttgccaaacctagattctttctcaacatggtgctctaagcatctgtattagataattggaattggagaatggttgaaatccatttgccactattatcttagcaccccagtagagcagtgctcatcactcatgtcagaaaattcctgcttatgagcagattgtttaaaaaggtgttttagctttcctctccagaggttggagcctgcagccaacacaccctcataatttgaccttctctctttaactcagggacgtgggtgttatccttggtacagaaaaatcaagagaatcagaaaactcttgctcaattcttcatttggactttaatcttttcctcttctcttatgtctagatgtgaagccaatgaatgggaagctcagtattttcctcatggtttccatgttaattagtcacatagtctcacctgttctaacttccatctggaaatatgctcagatactttatacaaacaagctcaccagacaggtgcctgcagtgtgcatggcagaggaagtaacccccttaggagtaaaaataacatatatcctggatgaatgctaaaccagacaggaagtcaggacaacagactgggactttcctgagcaaatgtgggagtaaggccacgttagtcaacactatctctaagaagcacctggtatcagtcccatacttacagaatgtagaaatcacaagcatatctccatattgatgtgacttcactttttccctctagcctgatatctagactaggagcaggccaagtatctctctgattccatttccctacttctcaaattaaggaaaaaaacccaggggtgcttttaaaaaaacacttataacatgtgaccaaccaatatgtaaaacaatatacccctagaaatggagataattgaagcctatccctgccatttggatgctgtcaatccccagagatgggctgtatggaggagtcttaatcttatttaatcccagttcattatctcctggaagcgcgcatatgtggttggcgttcagcttggagattagtttgttttccatatgctgcaagtgagtcctggcacaacagtttgtcttcttgactctctggaactttgggaaagcaggacacatgagagagtgagcattagatggacccaacttggcaggtcaacagaggatggttccagtctgtcttcagctgctgaggaagagacccagcttccatctaggctcctacagctcttacagctgggaccaagtgaaataaaaagaaacaagggataattgttgagagattttacgtactttgagatttttctctctgtggcaaaggaggtatatttaatgtttctgtggactgataaaaataggagaggataggcaatgataac

SEQ ID NO: 52598 - DNA, 1197 bp, Homo sapiens
ctttaggccctggagcctctctagccaccaagaggaaacaaaccaccaccatttaaaaaatatgggttacacacatactttctgggagaattctgtttgccagttctttaaacacacacacaaaggcctcagtagagaggtagcaaggcacagtagagaaaatattgaacaaaaagtcagcagatgtgcctctggctggctacgtgataagttacctttctctactaggcctcagtttttccatgcaaaatgggatgcatcatacttgtagcacagggatctgaaaactatgcctgccaactggctgcctgttcttgtgactaacgttgtattgggacacagccttgctcatttgtttatgtatcgcctgtggctgagctgcaagggcaaagttgactagttgcaacagaaaccatgcagccaacaaatctaaaaaaatcctggccaattaagaaaaaatttcctggcccgtgatgtggcagatgtggtacctgatatgccaaaagagccctactcccagagactggccctcctttctcttgggggaggggaggtagaagtcgatgtgggaaaatcctaaaatgggtttcttactgattcccagaggtctccaatagtgttgcacccacaacagtacattggcacccccacgctctcagctttccctatcttctctgtttcctctaccagtgcttcctggagtctcttcctccacaaagcctcttgcattcaaatttttgactcaggatctgcttctaggggttcccagactaagacaggatgtaactctggtgcactttcttcttctcccttggctggttcccactggcacgaagctgcccattgacttctgggcttaggtgaaatgccagaacacctaagggatgtgtgtccctgaatggccaccatggtgctggacaacacgccccagaagtggaggggacattgctctccatgaagtcaatcttgatcatgggagggaagctgtcagacaagcatcctctgctttttccctccttgggcttctgggaagtgtgctttctctttgtaagccttccagggaattctgggcactgagcaagcacttctgtcaagagacctactgtgtctctttggcaattttttttgtgtagtggaaacttgcacaataacctccaaatcttcctgtcttccttcctaattttttcctcaccctga

SEQ ID NO: 52599 - DNA, 2664 bp, Homo sapiens
ttctatgaaagagaggctgtgtgctaccccaggaacaaggaagatgcaggatagcaatgaaagaaggcttctcaaatatgccacagctggatgcagaacagggaatggggagtgagtatctgtcagacagaagtggaaggagagcattccagacagggtatggaatctccttcctcaagggcaaggactttggagtatctgggatgttgatggtctggtgtgaccaaaactcagtgggagatgaggctgaagggtaagccagggcttgatcatggaaggaagtcttagtgtgtgtgccgaagggtatgggctcaaatttgagggcactaaacaggcacggaaggttccaagcctggaactcacagctgcagctcactctggtgggtttattcatggggccctgctcaaatcttccctagcaaagctgctttctctctagatcggggtttctcaacagcaacactatcatttgaggctggattattctttgttgggggtgggggctgttctgtgcatcagaggctgttcagcaacagcatccttagcctctattcactagattctggtagcacttccccagtttccacaaccaacaacgtcttcaaacattaccagaagtcccctgggtggcaaaatagctcctgattgagaatccctgatttgtttttcttttttgtgaatatgtacacagatgactcctcctgtatttgtcctcttccctctccccaaggcctggcaatgtcctgcttccagcctttccatgagggacactggatgctgccattggctccctgcattgccttatttcagcacctgtggctcatgctcgtggagctggggctggttgtggggaagcagctgccaatagctctgtctacctctggatcgggtcagtaaggcacctcatctcctgcagggcacaccatgtagtgtccaggagcttcccggttggattcccaccccaaggtcagctgggaacagaactgtccaagcctgttggccctgtaccctctgtccgtcagtctcactgtctgctacgctgcagtctggagggaagcatcagctcaggaagcctgccagggagagggcagcaggccggggacagagggcaggtggtggtagctggagaccatgtgactcctggaggctgtgtgtgtcacagggcagagctggccactggctcttcccttggctcagcctgagaagccttcacatgacatctctgtgggagccttcatgttgtgggcagaggagagggaggtgggagggaagagggaagtgtttttaggatccaagctagaaatacaaaatacatttgtgaatcacaagctgatcctcatcacatgaccacaatagctttgccaatgcagaaatcaggcttcggacacacatacgaaaaaatctatcctgcccctgctatgtctgggctgtggtggccaagagagtaagagagtaagaaagtggggcactggaattggagcaggaggccagggagccagctatgcagccggtctccatgtcccaaagcgtcaccaaaaccagaacacaaaaccagcccccattccagcattttctacatgcttattcatatggtaatctcataacagccacatttcccagtggaaaaccgaggcccagagtgattcctccatgttccattttcttccttccttagagtttccagggttcaatctatatatataatattttattttattaataaatattaataaaattaatatataatatatataataaaatttattaataaaattaatatataatataatatataaaatataataacaattgatatatatataatataaaatttatatatatataaattttttttttacttgtgccatcagctcactctatctctctgtgtccccaaactgcatagggcaggtccttcctgctgaagggatgtggcgaggatcctgaaattatccccactccataagagagaactccaggcaggctggggctcaaagtcccaagtctaagaggttagaagtgcatgggactctgagtcaggctagtctaaacggctgccagggtaagaatgggcctggcaagcctctgaaagccctggagcctccttcccctcagcaatgagaggaaaaccccgagggttccaccagcagccccacctcaccacccacagcgggccaagagctttatttagctgaactgaaatctcacagacctggaacatgactcctaagctggtgtccttgctgcctaagaggacaaaagctcgtgagtgggcttggcccctctgggaagacagccacctgcctcgtgcttgctgattgtctcacctcgagggctcttacttttaaaataacatttaatatatttaatctcattacttaagcaagatctattcagtgtagaatatttgggaaatccagaaaagtatcaacaaggaaattaagtttaccataatcttaccaattagagacaagcactgttagagtattaatagttttctccttgattcttgagtcatggatatgtgtatagttccaaaaagcaaaaccagaattatgttttatatacatttaaaaagataatgagttctaacatactatagtaaaaggcacagttctcaagtgtgcagctcagtacattttcaatttgttacacccttgagaa

SEQ ID NO: 52600 - DNA, 1265 bp, Homo sapiens
acactaagactaagtgacgtactgaagttcaagttcactcagtttgtcaacagcagatccaggactacaagataacctaggaacagagctcatccccatggcccccctatgataaaatgtcccctgcttttttagccatagcaagtatctgctgggctgaggccttggttgtctttgagagtgaggctgtacccctcaaggatgtgtcctgtgttgagggtagcagggcctgcctgcaaatatccgggtcagcaggccaggagagttcacactgaggggctgggcaggggtgttcaggctttgctcacaggatgactcacggagaggaagtgccactcagatttgtgagtcaccctcttgggctccacagaggccctgtcacgcaggagcctgtcagctttcatctccatctctccaacccctagggccaaaagtcaaacttggtttctgcttacttgtttgatttttagtggctcctccagctccagaacctttagcaagcagcttcctttgaaagtttaagatggaaatctctaagctggccctgtgcttcccctgacaagtgtgtaatcgatgggaaatctctcactggaggctatcctatctggagtcttgataaaaggcactttcagagaggtgaaaggctcttagagaccttttacaaagaactaagctggcctaaaattgtcacctttatcctcccaggtgaccattcactatcaccaactctctggcagagaaaaatgtgaggatacaaacacaaagaaaatcactcccttaatacacacggggtagaatcctctttgggtcagacagaaaagcagtgacttgggagaaaattgtgaagggtggttggatgctaggagctgactgggctgcatctttgagctttagttctacccttccaagtctcctgtcctccttgaagttctctgcttttgatttctgtggccaccagcacatatggccctgtttctcttgaacatacttgaaatgggccaatactttctaaaaggctttactaacacactgaagaaatgaacatagagaaataccaatggcattgagaacaatccagtttactcacaactatatcttgggcctaagaatcccagagcaagcataggagaccttcatcaagctttcccaaagcccctattcaattccaccctctgccttgcttcttctccaacattcctgcccttccctcagccataaggcttctgggtaccattttgttttctggcacctggaagatagtatga

SEQ ID NO: 52601 - DNA, 3411 bp, Homo sapiens
gaggttctcagccagggagaagagtttttttgttttgttttgttttaaatttaggtaaacaaggatactgctttgaaacggtcactggagcccaactcatatgaacaatttagcagctttataacaaccctgagtgggcaaggacctttcatacatattaacatttagaaaatgtagtttattgaataaattcattgaaagatgtcatgtttcctaaaaactgtacctaattttagggttcctgcttacagtgattccagttctacatgagagttttaattgaaggaggattaggggggtgagggaggtgcagaacacaaatgaaatttttacagcatggaaataaaagtatttttaaatcttcttgggggtgaagagttaggcaagaagtaatacgtggaaactgtcaagtgcttctctacacatccacccaccagataccatcgcagccggctgggggagtctccctcttcttgcctgacagcttcactttctttgagatctggagctggtgatcacactggcccgtcatggtattttcagttaacaaagcagttactcaacggggcaaaaagccacaaaggagcagagcagctgctgctgcacccgtgatgcaagtgcaggatgagccccgggccgccaccgccgcctcggctcctccgtgacgtccgggaagggtatccccggcactcaggaagtggtggccgcgggcagctccgcccccacgcgactcggggctggccgagctgccgggtggtagaaccgccgggccttccgcagggcgggcggggatcaccgtctccccacctccgtgcgcacacacatgcacgggcctcgcgccccgctgtcgcccgcgcctcgccctgctcacttctcacagcccgcgccggacgaagagagccgccagcgccccccctctctcccacggctcgcacccactcaccccgacccccggcgccgagcccggcccctcgtcgccggtcaccagacctggtcgaaccgagtccaagatggcgactccgcccccgccccctccgcactcccggcggggtcagggcgccccctcacgcggcgggctcgcgcccgagacccggctaaaaatagccaggcccgactatatttggttcggccggatcctggcgcggccgcgcgctccccgccccgccccgccccgccccgcgcgccctgccccgccccgcgcggcgttgaatggagaaggggcgggggtgaccgaggggaacctactccgctatctgcggcgcgcgccggcggcgggtcccggccaaccgccgaatttagtaacatcgcctgcgtcaatcacgcgcctcgcgtgcgtcagcgccgcgcggctccaggtcctgctcccccccttcaagcctttgaatggatacaatgtagcagcgccctccttccttccgaggctggattggaacccgccgcagtgcagagactcggttgctctcggctgggtcaactttcggggcattctcccacgatcctctccgcaccaccgtgtctgaattggaagtggaggcgaagaaagatatacatgccatatttacctatatgtagtttgttttcaagtttctggtcctagctcgaaccttcttcgattctgaaatgtgtgctgtctacaaaggaatcttgtatctcccctcggcgcagcgccccccgcccccgccacacacacacaaattgggacaggtcaaacatataaaacggtatttgtgattcaagcggaccacatggggaccactctatctgcattgtttcactcaaatattttctcctgtccaaaaattcatttctgaaagagactgcgttcactcagcagcaacctttgggactaggggtctttaactctgataaattttgttttcatcaagaaatttacacttaaatttatcatttccaggaagaaattgctctccttcatacagtcacccaggctttcggcacaccatttcatgacaaatgtgtccgaggagaccaaagcaaatcccctagcgagggactgactaataagtcctgttgattgatttcgaaatgtttaatttgggagatgtgggcggagggcatctacaaccatcaaaaagtgaaagtgctagttgagagttccatttctgacccggtgccggggaggaggaatgatttgcaatagtcagacccgctcagctgttcaacacgtgtgtgtttgttttacacacagagtagtttctgctgcagcgcgcgtgtgcatgatggatgtgcacttcgctgggttataacgtgtccagttaagaaacccacgccgtacgtgtaaagaaatcaaaccttatccccggaaccatctgcatccctgtgtgaaacacgcacccagtaaatgatgcggggaggggggattagcctgggcgcagaggaccggagcaacgtaaacagctttagaacctatgcaagaggaaagtgcagctgcacctcagggcgtcttcgggctggtgccagacgccttctgcaccggctgccaggtcactggagctggtcagaagctggctggcggagccttccctttcggaagagctgtcctctcccttacccccctcgccctggctccgtgcctcggggcagcctcggaggcgcgccagcagcactcctccaactctactccacccgagcctgacagctgggcggtcccgcctgacccgtgggcaggccgctgcaccctcccgcagacgcacgccctggcgagcggttccgctgcaaaaagagaagcccccaggccggggccggccgtgcggcggagtttccattgtgcggccgtgcgactggccgaggaacgcgcgcgcgcgcgcgcgcacacgaacacacacaccctccctcgcacacgcggaaccggctgggccaggggagggaggaggagggtgacgtagcgtcccatggcgtcacattgacgtctcgcattccaggcactctatggagaggccgctagggctcctgtggcataaatgacgtgccgagagagcgagcgaacgcgcagccgggagagcggagtctcctgcctcccgccccccacccctccagctcctgctcctcctccgctccccatacacagacgcgctcacacccgctccctcactcgcacacacagacacaagcgcgcacacaggctccgcacacacacttcgctctcccgcgcgctcacacccctcttgccctgagcccttgccggtgcagcgcggcgccgcagctggacgcccctcccgggctcactttgcaacgctgacggtgccggcagtggccgtggaggtgggaacagcggcggcatcctcccccctggtcacagcccaagccaggacgcccgcggaacctctcggctgtgctctcccatgagtcgggatcgcagcatcccccaccagccgctcaccgcctccggga

SEQ ID NO: 52602 - DNA, 1819 bp, Homo sapiens
aaagggctggatctggaagttaggccatgaagagaggaggacctgtgacttggacaaggcttcaaagccggccacctgcttgttcatgtggttgcagctggtctaactggaataacttgggaaggaaattaggacacccagttggagttccagctctgccataagctggctgaactggagtgagtcacttaaaactctttgttaaaccccagagtcataatctataaaatcgggataaagacgtttgccttaagccctccaccagtttttggaggaaaccacaatttgctgagctttaatttttacacctgttgcaattaagatggcactcctgccctgtccacttcacagggcttttggggacgggatggggaggcaccacctttctgagcttcagtttcaaaacagagctaagaatacatgcccaacccgcaaataaaattctaggaagaacagaggaaaacggacaggaaaactgcgaaatgcagtcggccatacaagcatgaattgtcttaaacacaacaagcagacctaaagagcgtttgtgcgtctctctcctcttggctcgagtcacaaccccataacgtaaatcaatatcacttttgaaaaaggctttcgctgttctcagcagcgtccgcatttgtactcacctgtgcgcccccagcgcccggcctgggggccctgcggggcgggggcgggggcgggggcggggcccaaccctgcccacccctcgtgatgccccgccccgtcgctcctgcgcctgcgccgtgcccaccgaccggcctcgagcgccccggcgggaggtaaggggctctctggaggccgcctttgggggcgtcgggccctcacaggcttggtgggcctggcgcccgtgtggcgcgcgcaagaggcgctgggcggcaagtagggcattggatccgaagtgcgagcgccatggtggctcctcctgtttttcagaagtggcggagcctcgcttggtttcgtttttggaagctttattggaagctggtatagggaggccgcagacgatgcgagcaggacggcctcccggggtcgcggggtggaaaagtttccggcgcgcgtcctgtctctggcgcgctgtaggccccgggtcgccagggtcgctggcgtctgggtcccgggacagacccgcgcatccgttcgctggtgggggcgtttggtgtgtgtggcccaggtgtgctgtgggtgacactgcgaggaatgacgcgacgctcgatggtagtgaggctcggaggactgggagcgagaggccggaagcccctgctcgccaaacccagaggtggttggcagaaggtcccacaccttggctccctccttttagctaaccgaggttcagagaggagactttactttgacttttctctccaaattcggtatctcttccataagtcagaaacattaagcggcgggccggaagaaatcgggcgccactagtatcctgaaaagtgggagctctgggccgatggaaggtgttcgtcacttttgggggctgggtttcctgagaaatggggtctttcacttattaataacctcctaagtaacttactgggaaacatgagtattatggtacccatctcatattagttgtaagcactacatgataaagtttgtaaagcacctggcacagtcctggcacccctctctccaagtattaatgcagtgaatacgatggcagttctttgacttctaaatgtttttacctgtcttacgtgaaacatcctcttatactaaaaaacttttttattttgaaataattttaaaattacagaaaagtttcaaaagtaatacagagttccct

SEQ ID NO: 52603 - DNA, 1883 bp, Homo sapiens
attttttgtatttttagtagagatggggtttcacaatgttagccaggatgatctcgatctcctgagctcgtggtccacccgcctcagcctcccaaagtgctgggattacaggcgtgagccactgcacccggcttttccattctttattttaaagatgttcttctgaactcttcttcccctacttcctatgtgaactttctaggcttgttgtgcagctcctgttctgggactttccttagctgcttttctgtgtttacatctctattttcctaggtattatgccttcctcatttttgctttattctgttgttttattggagtaatcttgcagtagccctctaattaagggtaccttggagataaatataagtaattgtatttctaaaaaatgcctttattctctcctgacatgtgattgctagtttcactagatatagaattctagttggaattctctttcaatattgaaggctttctatcttctttgtgttatactttaaaaagctagtatcatataatttcccagtcttttgttttgttttgttttgtttttcgttttttgagatggagtctcgctctttcgcccaggctggagtgcagtgagtgatgcaatcttggctcactgcaatctccacctcccggtttcaagcgattctcctgcctcagcctcctgagtagctgggactacagatgcgtgccaccatgcccagctaatttttgtatttttagtagaaacggggtttcaccatgttggccagaatggtctcaatctcttgaccttgtgatctgcccacctcagccttccaaagtgctgggattacaggcgtgagctactgcgcccagctgattttccagtctttgtacaggacctggttttgtttttttgttttttccctctttgggagcttttgtgattagttcatccctggtattctgaaatttgatgatgatgtcattgtgttggactgtttctttctaaaaattcatgtgctttagttctgggtaattttcttagatttttctttggtcatttattcttctgtgttttctcattttgctctttttttttttttctttaattctaaaggtccgcaaactgattcagaggctatgtctggcctctgtctatcccatttgcttacacatttctttggctgctttcacacggtaacagcagagttaagtagttgcaacagagactgtatggcctacaaagcttgagctatttactgtctggttctttgtagaaaaaatttggcagtccctgttctattggatgttggaactcttgggttgcttgtctgattttcgctctgttttctaaaagatttcctcaggtttctctttacctttttcctttgaattctttttttctgctattatgatatttagtttacaagagctttttcttgttctcttttcctttcttgatagcattttgtctatgggtgtaataggtttttttgtttgtttttctgaaatattaaaaagtagattgcttgtcttctggtggacttcacttaaggatgcttgggcaagctggcgttttccttagggatacctccaaatatcagtatctggaggttgttcttatttagttttctgaagaagaattctcattttccccctacggcaggtaggtgcttatcttacaaagttatagaggcagattagataaagacttttgggctttattcagtacaggctttttagccctgtacctggtgtttctgaatctagagtcagttgctccaaagaatacatctgtggtcctcttgaattcagaaaggttattatagctgcagtatagtgattaaattgtgatagaatgaaatgaattcaagagatcattaggaagggttacagaggtccaagaaaaagat

SEQ ID NO: 52604 - DNA, 600 bp, Homo sapiens
gtaaactgtgatggttgattatatgttggcttatacatttgttgtttatacatttgtgatagttggtttatacatttgctaaatttcatcatactataccattaaaagcagtacttgttatatgtaaattctatctaaataaagttgaattaaaaatgggaatgtgttcctacagcaagtaatgagttcgtgtcactggaggtatctgagcagaggttcagtaaccacttgtcaggaatgttacagtagggcttcgcacatcagagaggagattgacctgatgacctcaacattccttctacccagagattccatgagtcacagttgctgttgtgccagcacaggtgttgccattttatgtagaatgctttattaatatatttgatctgaaacattttaaactgtcatgattttaaaatgtattaagatacacaggtgtaaagcacagaacagtgatttcattcactgttccctactgcatattacaaatggaaagatctcataatagatcaaaccgtattgtagtcttgttcctgaaacataacaatttgtatttattggaccaagggcattttactcctaaggtaaatgtgcctgatt

SEQ ID NO: 52605 - DNA, 2573 bp, Homo sapiens
caggttaggcagttaggaatgaatgcatattcaaataaggcgcaatgaagaagaaatctgcttccatggggaaatacgttgcaataagatttgagggaggccttgagctgagattgtcaggtaaccacaccttccacccttcaaactctattctcccagtggaatccaaaccagtctccagttccgggttcccaaccaatcgcatcaagccacaacagagggatctgccaacccgggcaccgcttcagggatctagacccagtgagagtcacacaaccccagcacctgtcgacctcacactcttcccaaatggagagggtgggaaggaacgctaggtctatgcttggtcttttccgattcaagctaccaccaggtccactagccctcgaaaccgaaacccccggacttcggggagaaggggaagctcctacgccgtgactacgtatcagtccctcagggctaattctcccattctcccccgacactggtttctcaggcctcggggactccgcgcctggaagccgacaggcgagagtgagggcagcgggggagggtgcactccaaaacactgcaggaaaagacggaaaagcaggggcaggagtagcagtgttccccctgggcgagggccggaggccgttcgtgcgtttgtcgatgggtctgtcattccctcactcaccaggagcagaagggagcatctgaggtcgggtaaggataggaagacggcaggatgcatggtaacgctggggtccgtgacagggacaggcgctggcggctgggactgggctaggttgggttgggttaggaaagggctgggctccgggagccgacggcagcggaggattctccaggcagcggcacctcgtcctctcgacccgggctccagcggcgaacacccgggacaacttccagagaggcctctcacaccctcacttccgggtcctgcccacctcggtgcacttcgggaaatgtagtcctgcactagcctcaccccgcacgtcgtccgtcatctagaacttcctttcccattgggctctcggccccggtccactgagtcctctgcgcgcggggtcctgtgggatagaagggcggagggcgggtgtacgcggtgcttcagaggatgggaactacaattcccagaaggatgtgcggccgaaagcctcgggcggccttttgaggggctcggctagcttcagcgccgtggggtctgacctggctggatatagtgtaccggcccggcaggaggggcggcccggtccgggttgcgcctcctggagccgcccccgggacgtcagtcctggaggaggcgagggtgagtaggagggggcctggctggggaggctcagatcattcggtccgcaccgccttggcccctgctgcagactcacggccttcctggcctaggctgtggcctgagcctccatcattggcctcctcgcccgctgcctcttctttctgctctaattcctgcattataaagtcagagccaccactcggggcctcagttgaatgagtcaatgacttatccctgattgtctctgagggctcctgtaaggagtagatgtggtacgggatgggatagcacgtcgtaaactggaaaactgtgtgagtgattgctgctaaggcgtggatcgctcctccagtataattacgaaattccctagcaaagcagtcgaggatcctaacttggccccaggtagctctgcggcttcttctgcaaacactcagtgaggtccaggagcccacgcgatctctgcttagtacccaggaggcacactgtgcttttgtggttctccctgctcccgcctttgcttcagctttcctgctgcctggaatggccttacccgttctctctctggaatgctatcttaaatgtcaccatctctgagaacttcccgaacaaccaaccctttagtcctaatcagaattactcttcctatgagtgtgactgcagtacctctagttttgtacggttataattattagagcatttattacacgggcttgttgtataattaggcaaggatgatgacacctttgcattttatagcactttatcaaagtggttttgacttttttctataaaaaatgatttattttcttaaaggggcaaaaaatacattttttcttaagaaaaaaaaagagccctgcataatggctttctcagggtgacaaaattagacagtgatagagccaatactcttaccaaggcggcctaactcctagactagtgctcctatctcttgtccacgcccctgacagagcccaaagatagttgaaatgggaaattttaaaagagcagagacttgtaagtatgaactcattattcaagaaattaaactttgatcctgctcactttttggacttagcactcagcctgtgacctttcatccaacaaacatctactgagtactggctatatacctgttactgtgctaagtgctaagaattatgaagtaaaaagtatatatatataatatatataatatatgtacatataatatatataatatatgtatatataatatatatattatatatgtatatataatatatatattatatatgtacatata

SEQ ID NO: 52606 - DNA, 609 bp, Homo sapiens
gccttcccaagattgtaacagtataaaatatgtaaagtaagaagtgggtgaaatcagatgaaataaatacatcttggatgccatgcaaatataacattttagaacaagcaaataagatacaaatagagactactcttgttacttgtattgggcattgtgttgctgtagctattgtgcggactagcacaactataactgcaagtgacagtcatttcctctaactgctagagttggcgctctggtttctgcacataccagcccattaaccatatgtactcttatgcttccacaagccttaaaataactgaatgcggtagagcagtggctttccagtcatgcttccagctcagctttctggactgtgttgagacagagcacaggcagaatgccagccacgttgagcaagcaccaattggtcatggattagaggccatctccacagttgccagaataattagcacaacacagcacagtagccagctgctttctatattaactgttcctgacaggaatgcaaatttaaatgcactgccatccagtgaatattagtttacatcataagctctacgtttgtacaacatgttacaattaccaaatatttccaaacaa

SEQ ID NO: 52607 - DNA, 1477 bp, Homo sapiens
cgaagaactctcaaagttctactagtaattgactttaacttataacaaagattttcataacacagcaaatcaaaaagtcccactaagccacttttacagtagccggtttttagcaaaaggtaggaacgccagtctcagaggaggagctcacatcactagtccttaggtttgcgatccccaatagtttcaaagctgaatgtcacacattcctactgtaggtcttttctaattccaacaaaaggcagatcctagcgtttttaggatttcaatcgaactaaattccaactataaatagtttgcctgccaccttcttacccttcctcatttccaccttcttttccaaaaaaaatcagagagaacgatcgtactgcactcggcctttgataatttcctccccaaacccttaaactcatgagttcctccaaactccactgaggggccaaccagaggcgacagacttcccaaaaagcaaatggcccaggcaggggcgaccccagaaaactggtagtccccttccgctcgcttaactctcccgcctgggcgaccagaggacggaacaggggacgccagctcatccccactccgtattcggtcctgcatccatcccagaggcgaacacaccatgggttttaggaaaccatcgttcctcctactccaagggacgccggccaggaccagagtcggggaagtggggcccgattcacacactccgggctaaaactctctcggacccgaaaccaggcgaacccgcccagtcacctgaagctccgcaaacgccctagggggtcccgcccccgcagtgccggccgcacacccaggcccagctcggagggacgccgcggcccagacccgggggacgcaaatcgtgcacggccgaccctgcccgcttgggccgcggatcggggggcgacggccccaccacgctcagtcccgcgccccgggaggacccggcccgacgggcgacggccgcttacctgaggacccggccgcggccggggcgagaagcccgagaagacaagcgagggagcagaagcccacggggcaacagcgtgcgccgccgacctcaggctctagctcccggagcgtgttttcaaatagcctcgtcctcacgcggccgcgtctccttccgccgcccggaaatcagggcccctccccctccctgctgtgctcacgtgatcgcagcccgcagccgcgcgcaaccggggaggcgggagcgggagcggtaggccccgcccacagaggagggtaccccgccggaagccccctgctctgtgggaaccggagggaggacagcgcgaggtccccggacaaagcgtggcgcataagtccggcccgtaacttggtgggcaggcaacttaggggatgtgggcctggttatagctgagcatgcttttctattcctcccagaccacagttcttcagacctggagccactttcagagaagagtataagttgcactgaattgaaaaagggaaa

SEQ ID NO: 52608 - DNA, 5123 bp, Homo sapiens
attgttttttgagggaagaaagaaagggttgcgtgattctttgtacatagtgaaaacctagatcagtttttactttagggctatggatagtgggagttgggagggcaagcaatagtctcaaaaatgttcaaggaattaaaacacaaaaacggaaaattgcaagtgttgacaaggttgtggaaacttggaaccctcaaacattggtgatgggaatgtaaaatgattcattcagctgctgtggaaaactttttggcagttcctggaaaagttaaacatagaattaccctatgacccagaaagtccactcctaggtatgtatccaaaagaactgggaacaggtactcaaatatgtgtacaggcatgttcagagcagcactattcacaatagccaaaaggtggaagtaacccaaatatctatcaagggatgaatgaataaacaaattataatatacacatacaatgggatattaatcagccataaaaaggaatgaagtactgatccacgcctcaacatggatgaatcttaaatacaggctaagtcaaagaaacgacacaaaaggccgcatattgtatggttgcatttatatgaaatacccagaaaaaagtaaactcacagagatagaaaatagctgagtcgttgccagggtctggaggaaggagggactggggaattactgcttaatggagtatggatgtttcagaactagatagaagtggttgctcaacattatgaatgtaataaatgccaccaaatcgttcgcttttaagtggtttatgttatgcgaatttcacctcaaaaaaaaaaaaagttaaaaagccttctctgcctttctctggggttggagtcttcccaatggatccagggcaaaagaaacatccagccactctgtttgcgggaggagcaaagggtggcttgtcccgacagtttgagctgttgtgcatgcatttacacacgcattaattccaaatgagtcagcacagtgtccgagacaggtcctgggctccagtgagcacagtcgctctcctgggggaggcacgttccacaaattaacagaagttctgataaactcagcatagggggattcgctgtcccaagtatcaaggagtcctaaaagaaaagggcctatttcagtcgggggacctggactgaactaactcgtgttcatggccgccaaatcccgtgtgacaaatgtattcttttgttgttcatagaaataaaacagtttttcgggccgcttcaggagctcctctgcaaaggtggggaaaaaaggcaactaaatcagcacgaggacgtcagcccgaggatgtcaggagcggggtcggtgcggacgggcaggtgggcgggggggcaccccgcgccccgccccagtcccctggaggccggcggccgcagctcggggaagtggggactggcgcggggccgcgctcccgccctcctcggcggcgccgacggaccggcaggcggcgggcggtccgcgagggggcggcggcgtccgggctttgtggccgcggcgcgcgcggcggggcctggccggccgggggcgcgccgccgccgccgccgccgcccggcgttcgggagcccgcggccctcccggccgccctgcttgcgagaggagcccaggccgcccgccctcgcgcctcgccggcccctcccccggtcgccgcggctgccgcgccgccgctgcaggtaggaggctccccttccgggcgggccgcagccgggcgggggcgggggtggggggcgcgggccgggcgtagagggggccgggggccggcatggagggttttcgggccgagccgctgcgaccccggccttgcaggctgggcgccgggcggccgcctctgcgcgccgcgatgggactcggtgagtagggccggcctgctgcctacaaagccccggggcgcgggcctctggggtactcagtggcgcgcccacggctgggagcggggtgggctttggactcccgggctcggggagctgctcggggggaatccaggtgacctgcagtaccgcggtcttcccatcccggcgtccccactgtgtgctgatcactgtgctcggcgcttttccatacttgtctcctttaagacctccagtgccccgcccgtccagagtgtaacgggagggatccctcacttgcaggatgaaggccgagcatcacatccttgcttgactgaccttgggaaagctcctttactccgagccggggctactgtttctgtaaattagaggcgggggtcgggggggcgtggtataatatctaccctcaggtactattgtgaaagataatgtatgtaaatgataacagctaaattttgagcactctgtatgtaccaggccctaggtactaaacagttggcatgaattatcattgaatcatcaccctggcgctgtgaggtagttactgtaaattgcatgaataatctttatttaggagtacgaaacagtgaagaatttagtctccctattccgattcaggaggttgggtatttcttaggcgtgataacatttaacattacagacgttcctgcagtatcgaggagagtagttataggatgcagggatatatttgtcatacatttaaaactggaggtaggataatatcagggccagagagtgtgcctttcagcatgtcagagcagatgattgtattccaaggaaattgctgaatattaattaaaaaacatagtttctgagttaggattgaggatggctgtgggagtccagggccagagagagacatgggatggacaagggggagaagaaggattctgaagtcctggaggaagatgtagaggaaggcaccagggttcaccatccctcccctgcagcattgctgggccagatttcatccctcccgtagagacccgggctaggggacaaaggctgctggggcagggggtggggagggatgttataggttgtctctttttactcccaggccgccaaaaatattcagattgatggagggtcaggtgattgggcctcctaaaatgccattatcccttctcacaaaattcttgtgtttcagggcatggggatgcttgccagccctaatggttgatgagatgcttaaaatacaaaggtctcactgatataatggaagagtgcattttcaacaccattcactgggttagagaagtaatgggcctgaggagattattttgggtttagaatggggagaactaaaaaggctttggatcctgaagaaggaagagaggcaggaagggcccaggcactgcacctgtggggaaaggcaggagaagaaggagctgaggacttcaccccaccatctgcagaatacccaacaggctgttcagttctcagctaccaagggggcaccctttcctctcccagttggtgatgatttgttaacgtattgtggaagatcaagggctggactcaggcactcctgtcctgagtgagtaggaaagacgtctgggagaagggtggtttattttgtttttaaccaggcattgaagcagagagtaggtgggtacgtagcgatggtgaaggtagggaacatcatgcatacttggaagagcaattgctttggagagatagacagtttggggtttgaatcctagctctgccatttcttagctttgtacattttttgtgaggataaaataatgttttttcacatatctggcgtgcagttcaacaagcactagtaccgtattccctgtccgtgataacattcattcaacaaatgtctgctgagcaccagtcatgtgctgagtcatatgttacatcctggggatacagcgatgagtcagaaattatgtattcccctaggaatttcccagtccagtgtgggagatggacgcaaagagcaaattgcaaaaaatatgggaagtgctacagtacagtcatgtacaactgtcagtgagctcatagaagagtaactcattctgagccagtgggaactcagggccaatctatatctaacaaggtgagtatgagaccttatgacacaggtttttgttttttgtttttgttttttttttggggggggacagtctcgctctgttgcccaggctggagtgcagtggcatgatctcggctcactgcagtctccacctcttgggttcaagcgattctcttgtctcagcctcccaagtagctgagattacaggcacctaccaccacgcccagctaatttttgtagttttagtagaggtggggtttcaccatgttggccaggctggtctcaaactcctgacctcaggtgatctgcccaccttggcctcccaaggtattgggattataggcgtgagccaccgtgcccagctatgacacaggttttgaatgctcctttaccacctaactttgatctcttttacctttgtcttatctttgccctgctagtctctcctctctctctcaaaaaaaaaaaaaaaaaaatctagttgcagtgtgtgtgtaatttgtaagctgcttcaaacccattttagaaggaagccgttataaagaaaataaacataacagactgggtattaattgaggaaggcttaacaaaaattgcatgagagttgggctttgaagattgaaaatgggccgggcgcggtggctcacgcttgtaatgccagcactttgggagtgagactctgtgtcaaaaaaaaaaaaaaaaaagagagattgaaaatgggcccttggtggccttggggtaaaggattccagccaaaggaagccgcgtgttgagtttggtctggttaggttgaaaatacatggagagaatgaggggctggtgggggtgctataatcaggaccagatccggaaaggccatgaatgccatgtgaagagttgggacttttatcgtttaggcagtgggagagacgtctgaggtttacaaggaggcctgtggcttgatcactgtgttttaggaagatccctgtagttgtgtggaagagggtatggaagtttgggagaccattttagagattagctctgtccacagacatgggcagtgagaatgggagaggagggaacagatgtttgggtaaaatgtaccataggtcttgttaattagttgcatgtgattgaagattacatttctgctttgggaagccaagttgatgtggctgacatcatcagaaatcaggagattttggtgtatgg

SEQ ID NO: 52609 - DNA, 1043 bp, Homo sapiens
agaagcacacaccaggaaactcattttagttcggggcgacctgcagcctgtggttcctcctggacctctggggagacgcatctcggttgcccgcagggtagaaagcaagagaatggcccacaggaacgcccgcgccagcgctaaaaccacaccgggagaggacagccccacgttaccgaggactcgaggcagaagcggtctccaaggatgggtggggatcccaccactggcttccagctctgcatgcgccgcggagtccccgcgcagggcgcacctttgcggcggggtttccccgctgccttctgggaaccccgcggagcgactgccgctggacgcaatctggctggcttgcctctaccccgagctcactctctctgctctgtctgggctctggagccagagctgagtctctcttgagcatgcgcagcccggcaccctccccgcctctcccctcctccgccccctccgcgccagccttttgctctttcctttcattaaacaaacaggagatcctgaaacctggaccctgtgcaagctgcagcgccaggaggaggcagcggaggaagcagagcgcgggatgggcgcccagcggcatctgtgatcccgcgcacctccgccccacgggcgcgcgcacaaacacggacacacacatacacacactcgcgcacacactcgcacaaacacacactcgtacacgcccgcgccgctcgctcgccggcttgctctcccacgcaagcggaatgcagcagcgcctggagagcgtgtctcggaccgccgcctgaatgtacctcgctcccgggagccggacggcccagtagggcgcactggaggacgctccgctgcgggaggtgagtgcggcgcccgcagccgggccgctggggaagtctctgcaccggggcagtagggcagcgcggggcaagctcctggccggacccggcggcgcaggtgtcccatgccttgcttgtgggtgtcgaggtgcagatgaaggcggcgctggggctgtgcagaggagaggacgaacccagggagggtcgcctcctgcg

SEQ ID NO: 52610 - DNA, 924 bp, Homo sapiens
ataggcataatcctcacatattttagtctgtattattttatgcagtgatttaaactgctacatttagggaacatgtttagaacatcttatgacacattgtaactgcattgagagcactaactcctgaaatgtagagaggaaaggcaactaaaattacctgaaatttgttttttgtctaaatattctttcccagaagagactctcaaatgaaaactgatccaatagataacaattataaggtaaggcaaaaataataggctctatgttatcatatggtgtaagtgcttgtgttgtctttgggcttgtgtttggaaatatggtttactctgggtcattcatttatcattgtgtccaccagatttgtgtaatcctcatgatgatgataccttaatttgctacagagtcttaggtcatgctcaaagttcagttttgggagcagcgggaatgggcttggcttgataaagatcacatgatctttgtgtgttctcagtcaactgtttttcatatatcacaaggggtgagaagcctgacataaactttctttaacacagctagagtgagatatttgaggagattatgttttctaaaacatataaagtgtttattaagactttcagaaagtgtaaaagctgctaggtaatgcacgaggcacttccttgaactgtatacttatttcttttcatttaaaagaaattctaattttgtgaactttgttcttctggaccaagctgaaggtggaagaaatgatgggggctgccccatgcagtcattcagggtctcacggtgaaggtgatatggcatcctcacatgtagtttcacagatcctttatgtgtcaatcagtgtccagctggcgcttaagcagagagtggagaggttgtgagtacccttctagtggtggcacttccacccacatgctattggcc

SEQ ID NO: 52611 - DNA, 664 bp, Homo sapiens
agttatttcatgttatatcatatggtactgggtatccagcaaacaatctttccaaagattgcaattttcacttttcagccagccaggtatgtctgcatgattaaacacagcctgagagtgctttgtccccaccccacaagcagcaggaatatcttctgtcttgcctttgtcctaacacagaattgatgtaagtttctggattgttcccaggctgtgtcagtacaaaggccctaaataaatgctttggttagaaacagttttggctcattcacaaagcagtgacaaaagtgaccaacttccaaaggcaaagcaaatgattctgtgactggctttatttgctcagggaagaatttgtgaattttgtgccaacagcatatgtacacattgctgtagctatctcttcctcctttttagagccattgaggcttcttagcttgatgggctaaactagagagaattcgagtttttgtgttattaagtttgggacattctagcttcaatcttaccattgcttttgatttttgttttctgggtcttgtaaaagctttgagggtttgacctaccattttgttagcattgacccatcacggagctctacatgctgggtttttatgttcttggttgtccagatgggtttgttctgtgctgtggggaatgcagttaa

SEQ ID NO: 52612 - DNA, 1091 bp, Homo sapiens
tggggactgggaattccacggtcaagcttgtctggtaagggctgcatcctctggaggggacaaacaccatgtcctcacatgacaggacaaaaggccaagacagctgaatgctgtatgaagcctctttcataaggacctaaattctatttatgagagaggagccctcatagtctaatcaccttttaaagatcccatctctcaatactaccactttggccattaagtttcaacacctgaactttggaggagacatattgaaaccattagcacctaataattgcaactctgtactgttaaaatataagttcctcttagctgatatttcctcagactcttctttggcatctcctaagatgaaacactttgaagctaaaatatagtatgctttattttcagctctggagtaagacagcatggtattttagggaaagtttggatttgagggtctgacaaaatatctgtgtgaccttcagcaggttactgaccatctcggactttcagttttctaaactataaaaaggtaataatgataatacctgctttactagcctgttttcagagttaaatagagtttttaaggtgcctagaacctggcaggctacattctcagtaatcattagcttacaagacaatccagctagagcaaatatgaaaaagctagccttgtatcagttcacgggtattcttcaggtttcttatcacatagttttattcaacttgctctattatgtcatttattcaacaactcatcttgggttaagagttatttataggattctgtgtggtgaacgtctgtgacctgcaaacatgtgattgactttggcatgattcctagctcaagtgaaagctcaaagggctggcttctcaacctaatgacatacacagaatttattcagtttgtttgcttcccacagaaattagcatactttgacataactgaatgaaaagaaaaaacagatagttttgactctcttcaaacacaagatgcaaaatagggaattaatcaggtccaaccagtttggaggtttatgtgaccactcttgccactaaaaaacaagaagttgcatgaaatttttccctttggatcggtc

SEQ ID NO: 52613 - DNA, 639 bp, Homo sapiens
acttaaaatctcttggctgtgcatggtgtttccatttgcctatattctcatcaacacttattatctaaccttcaaatttttgctaatttgattagacataaaaatagcatgtcactattgttttgatttgcatttctccattagtgagctcatgtatatgaaagttagtcatttggatttctctagcatttggctggtaaatgtttaactcctggctataggggatgatgaaagagaagggagtttgatttgttgtgcagtttgtcaatttccatggtataaatactgcagcatgaccaatttcaagctaccctttagcaactagctcatgaaatttcataataggctctcataagatggcacaacacagctccaggacactattggattgttccctctagaaattgcttattcataactttgcccatgtaaatatttgatttcctgtctttcccttctggatttacaggagtttgttttatatatatgatgttaactacatctgtgtttcgaagattgcaaataatttctcccactctgcaagagttaacccttttgttaactttattgaagagttagtttactgaacagaatgccttgaagtttgatgtaattatttccatttttttgctttggcct

SEQ ID NO: 52614 - DNA, 1230 bp, Homo sapiens
ccaaatctattccatttattttgaaatatacagtaaattattgttaattattgtcactctactgttatagtgagcaggcctcattttttccatctgactgtatttttgtactgattaaccaactcctcttccccctatcgcctactaccattcctgaggaatttttttaagaaggaaagaaaacaggtgacttgaagggaagagaagggtttcaaagggagatcaatggtgtataaatagactttggctcaagaaaagacaaacaatgttgctgaccatcagttctaaagccgccatccccagttagagaggaagagccattctgactgttccaagcaattttgtagggtctttgtgggatgatattggggtttgctgaagccccatacacaaatcctgcttcaacgttaaacttgttttctctccataacatgcagccctgtttctcatcactcagtaactactcagtctgctagtgctttcaagtgacttcccaattgatgtcaaaatttgtttgcctacaaatggcctttacgtaagacccagatctgtggttgaattgctctggcataagagagaccaccctgttggcacatgcatgtgaacacacctcacagacacacacaaagctgggaaatgggaggggaaggatgtcctggaggagcctggaggcattccaaagcagagacttggagaggagacagaaaaagaagagcaaacactgagaatggcaggatatctactgtaaatgttcaatagtgctttatgtttgtggttcccatgaggcggaatgtgggaggaaggggaaggaagttattagctgaacaagtaccacatgctgtatgctttatagacagctaatcaagtgcccccagggcaactctaacaatattcctatcctcattttatagatgaggaaaatgaggctcaaagataagtaacttgcccaatagccatgcaaccaataaccagcagagggacctgggtctctccactccaaagtttctacaggttcccctcttcccagttaaagcacagtgtagggtcctcgggcgcggtggctcacgcctgtaattccagcactttgggaggccgaggccagcagatcatgatgtcaggagatcgagaccatcctggctaacacggtgaaaccccgtctctactaaaaaatacaaaaaagtagccaggcgtgctggtgggtgcctgtagtcccagctactcgggaggctg

SEQ ID NO: 52615 - DNA, 4849 bp, Homo sapiens
gatgctaaattactttgaggctcttaaatgtttatattagaaaatacttaagcataagacagaattatatagagaataagtttaggtgaagatgctaggcacagtagcttgtgcctgtaatcccagcacttcggaaggccaaggtgggagggtcagttgagcccaggagttcgagaccagcctgggcaacatagtgagacactgtctctacaaaaaatttaaaagttaaccaggcatggtggcatgtgcccagtgtcctacctactcgggaagctgagataggaggatcacttgagcccagcagatcaaggctgtactccagcctgggtgacagagtaaaccctgtctcaaaaaaaaaaaaaaaaaaaagtttgggtgaagaagttatcctattttggatgaaaaatcagggaagttttaataaaaagaggtaaggaggccaggcatggtggctcatgcctataatcccagcactttgggaggctggggcgggtggatcacctgaggtcgggagttcgataccagcctgaccaacatggagaaactctgtctctactaaaactacaaaattagccgggcatggtggtgcatgcctgtaatcccagctacttgggaggctgaggcaggagaattgcttgaacccaggagggagaggttgcagtaagctgagattgcaccattgcactccagcctgggcaacaattgtgaaactccgtctcaaaaaataaaataaaaaaaccaaagaggtaagggaaattcaggggccttggaaaagcatattagggggacggaacagcctgtgtacccttgaggagacaaaacaagggaatatttagggacaagtgagtgtgcacgtgtcaggcaaccctatctcagattttatctgcttgtgtttgctccacagaatcactctgcgtccatgaccgaagttacctgagacgactgatgtgtcacaagctgttttttaaaatcatcttccaattctatacttcaaaacacacagttgctcaatgtcaaactgtgatgacaaatattacgtttatctagttagaagctaatgttttgtacattttttgtatgaggaagtgatgtagcttgccctgattttttttttttttttttggtcagctttaatatatttatgccagaattttaaaaccaacaaaattttcttgttcaagcgtgcattgaagaaccacatttattcaatggttgacgttgttttgtgatatttgtacacaaattttcttttctcagttttataaacacagaatataacaattcactttaaacttttattaccacagttgctgcctcctccagaatttttgaattttaataaaaggcaaacttttgagctgcaggaaggacaatgttggttaataataaatctcaaagtcaattgtagaaaaaaaattgtcttcaaaaagaatgttgcactctgatctcttaacaaattgttacgttcaaagtttaaagtgatatattaacaaagtcacctagttatacaaacaattgtcagagaattctggatttggagggtattggggttatatgattctttcttagataatggcctctactaaataactcaagatctttctggaatgtcttctggcaggcaggtgccactgtcagcttttctccaaaaagcagccaacatcagcctcccctgtcaactcaacagttttgtatctcatattatatggactttatatgaaaatgaatattttacagtttgcacagtattattttacagaaaaggaatcagagaatctacaacatagggccccagaacaacagtttcactttgtggcttttaattattctagaattttaactgcatctcatttttctagcatggtgagaactaatatgtaactcctttgattgaaggagctcttttgtccgtacctatcagaatgttttcttgacacttccatgttggctcttctcagctttttttgtacatattttttttttctaaagagaagaaaaagttatcacaaaatgtattctggctcatgtcttttgtcttaagctttatccacaggacaaaggtatttgaagagtcatgatgaagtgaactcaagtgtttacactgttcagttccacgtctgctgaaataaattctaataggggcatgactgagggatagcttcacaggtgtgtgtgagaatatgtgagtgtttaggcaaataaaattctttaaattattaagatactcagaaacattctggatccctagcacgctccctctaccttcagcctacccatagatacttctgagttgtcaataaaaagttagatagtagtttttaagaacaaaagttacctctgctaaaatttttcataatcccccatctcattctggcctaagcttacctatgcacatacaatgtcatacacatcttctgggtgatatctgactacagttaggagagggaaccaaagaaatttcacaaacataatctgtctgttttcaaaacactgagcccagtgaagctgtgacaaagccaaaggagtacgatatatgtcagcagtaatatcaaaacccaggtctgcccaactccaaatttcattctttccactacatcaagatatgcctttgaaccgagtccacatcttttcatgggttttcagtgtaataaacctacttatctggtttaagggatgctgctggaagaaaaggaaacagtgagaaggaataatttgtaagctctgggctctccaatcctgtataagctacctacctgtaatgtcacgcaatttcagaatgatttttctttttctaaacatattttaggattttttaaaaagaaacaatgagggattcattttattttattgttcatcataagacatgctgaaaaatgctggcagtctaaattgcttttacattacccatttcttgtcacaatgtatctggctaccagatagcatttctaagaacataagttggtagagtgagtcatgttatccttctattcttctttctagttctgattttaaagggacctatctgtagtattccaggagctttggccacagactccattttcctggccttggacttgggagatggtgtatgactgagccatgctgagacagcactctggtccacttggagctaaggggcatctctggactcctacccctggaatccctgagtctgattccctaccactatggcatggcaactttagtgttgcctcctatttagccccaagacacttcacaggcctcacactgatctgtcaagtctgtcattcgaaattcttcaggctagagactcctccatgtgggttgcctgccaaggaaaaagccgtctgtccaaataggacaagtggcgactgtagcctcagagaatgaattctgcagtaaacttttctctttttaaggaaagcccacaggtgcatgagaaagtctgactcttcttggaagaggaaagtgggggaggagagagaaacaaaggaaggctagccaggtgtgttgacataagcaacctcatgaagctgttagcccctgtgtttatctatgatgtcttttttttttattctgtgccaagaacatcacctgacacagaaaaatcacttagttaaaatttctgtaatacacaaatagatgccagacttattcctactttggctaaagggagactatgactcatttggaaataaagaggattttagcggagcctgaagatagctgaaagatgaatacatttagatgcaggactaacaatggtgaggaaactgcacttaccagctaaacatgtgggtgccccttttggtaagttctaaatatctccctatcaggctgtgatagacagatgggctatatgtagctgaaaatatagcccttcaggagagaatatgtattctgtactgaatcagagaatgcaagcaggcaaaattctaccctcaagatgcaagagagtaggaatcactgggatgatataaagagtgaaagaaccacaagtggcatttttgtttcaaaaatctgattagactccctattacaggcaactgccagaacctctcaaatgtgttcagtgtcttagaggtaaatacatcaaataccagattgccgaagtctgttttaaggagtagattacattatggtcattatactattcctgctcttatcggaggaacccacccccaaaatttcaacataggttctttctattttccataagtgtcagcaggctgagaaataaagatagacagtataaaaagaggaattttacagctgggctgctgggggtgacatcacatatcagtaggactgtgatgcctgcctgagcctcaaaaccagcaagtttttatgaagggtttcaaaaggggagggggtgtgagaacagggagtaggtataaagatcacatgcttcaaagggcaaaaagcagaactactactaaggatctaacaaagatcacatgcttctgagggaacaggacaaagggcaaaagcagaactatactgataagagtccaacaaagatcacagggcaaagggcaaaaacagaaccactgataagggtctatgttcagcggtgcacatattgtcttgataaacaccttaaataacagaaaacagggttcgagagcagagaaccggtctgaccacaaatttaccagggcagagtttttccccatcctagtaagcctgagggtactgcaggagaccagggcttatctcagtccttatctcaatcacacaagacagacactcccagagtggccatttattgacctccccccaggaatgcattcctttccctgggtattaatattaatattccttgcttggaagagaattttgcaatatgtctccttcttgcgcgtcc

SEQ ID NO: 52616 - DNA, 1053 bp, Homo sapiens
caaatttctcgaattatccccaaaatgtctttttacagttactttattcaaaccagggccacacatcacattttgttgatatgtctcaagtctcttttagttctgaagttaattgccccagcccactctagcctttctttttttcacgtaattaacttgttgaagaaacaaggcagttgtcccgtagaatgacccatactctggatttgttaacttgtagggccatttaccttgttctccagataccatagtaattattaattaattgttaaaggcttgattagtttcaagcctactcctaggattagtttcactactcctgaaactgtcattaggagtagttctaagcagtgctgggtcctccacattacatcccatcatgaagcatatgtcactgaccccttttacagatgctaaacttaagcagtgagttcaggtggtaataatctgattccttcattgcaaagtgacattcctcccctcctcctagtaatggcaaattatttacaggataacactttgtacttttgcaaaatcactcttgggtttaaacagaacaaaaagtaaatcagaactttcttagaaattaatgaaatgagagcactgcatatcacaaagccaggaaaatacaaaagcggcagcagaaaataatttatttctaaaaatcagaaatcaatgaatcagtaaaaaacaatttgaccaaaaaataaaccaaaaactgtccctggaaaagataaataaaagagaaatatttggcaaatcaggctgagaagaaaaagaaaacatgcatataaacaataggggccatatcaaaaattgtaagagaaaaatgtgttctagaaaacatgggtgcaattctgaaaaaatgtaaatgtccagattggctctaaaacaaattttaaaacccacattaatcaatatgagaaattaatttattaaaattagatacataagaaaaattagtccattaatgaatgaaattcacctcactaacagactggagaaggacagctttatgaaaataataatggctaactctagaatagtaattgc

SEQ ID NO: 52617 - DNA, 626 bp, Homo sapiens
tctgcagacaaaatccagtctctatctgttttaatagataaagtttttgtttatgtgctatttacagctcctttcactttacaatggcagtcgatgattgccatagagaccatatattttggagcatttcagatttcagatttcagattttcagattagggatcagcctgcataaatagtttcagtttctttggaaaaccctgactaatacagcctatgatcctaaaatatttactttctacccctttatagcaaaagtttgctgacccctggtgtagctgaaaagatagaaaaagtaaacaggcaattctaatggaatgtggtaagtgcacttccaaaaataaaatcctaggaatactcagaaggggcacctaacacatagcaggaaagattcctggaagtggtacctatgagtggagcttgacacctgggtaaggactcactggataaagaagtatagaagtgccttctagaaagaaggacaagtttatttatagatatatcccctttgtgggactgcaatataataaaagcttcatgagggcaggcattttttttttactgttttattccttaaagtatccaatcacctggaactattcctggctcattgagggtgctcaata

SEQ ID NO: 52618 - DNA, 3040 bp, Homo sapiens
aataacagaagagcgtattacttacagatcagagaacagagggaaagagcaccaacgggaaggggagagctttccaggatatgcactcaaccagcatgtggggagcaagagagagagagggacctttggtccaaagcctttattggggttcagggtgttacccaagcaggtttcccgaggggagttttaattgatgggtttagaacaagcaggcaatagttccaagaggtcacaggcaactgagaggtggttgctgagcatatctgcacagttcgtatgaggtgtgggggtcagtgggcaagtcaagtaagttgtatctagctgtcccctaaggaggtggtcacaaaaaggcatttgtataagcagatatctggatcagccacagtgaggaagttgaaagagacagagaactagaaattgttgtcaagggtgactaagtcctgcttctgggatgagaaagttcaacttatactcaaagtggatacatttgagtatacatgcatataaaggcaatataaaattataagaattcactatagtagcatctttttaatttttgccatatctggctactccctgacctattacttgtaaggcaagaataatatttaataatatctctcaatgcatttacaattctcagcaatcattttattgttcttctgaagctttattacattaaggcaaagacctgggacttattgtcctagggaagaaggcaaccctgcctagaaaggtctaggccttgaccaaaggtgggaatggattatgaaaaactgaaaatcccggaggaaccttttgttctatttcctgtttggagttctggaaaacacagtaaaatgggacattgtgtgtttagacaaatagagattcaaagatagcacacgcaagtctctttttgctctcctgttctgtgaaaggtttctggaagtttccatattctcatagtgatgggcttggaaggcagctgagagttgaaggccagtaagtctcacctgaaaacattatggcaatgggtgatctaggatcacgtaactgtccttggctgctttatttataaggaaataacatagattcagtaatttataagtaatagaaatttatttctcacagttctgaatactgagaaattcaagatcaaggcactggccggtttagtgtctgatgagggtttgctctctgctccacagatggcaccttgttgctgcatcctcacatggcagaaggagcaaaaccgctgccttcaacctttttaaggctgatcccattcacgagagcagagcctctgtgatttaatcacttcccaaaaggtcccacttcttaataccattactttgggggttaggtttcaacatataaattgggggaaacaccaaaattcagaccatagagttctgcttctggccgtccgaaatgtatgttcttctcacatgcagaatgtattcattccatcccagtagctccccaggccttaacttgttccagcaccaattcaaaagtctgaggtccaaagtctcatttaaatcaaatatgactgagactcaaaggtgtgactcatcctgaggcaaattccccttcagctgtgagcctctgaaatcaaacaagttacatgctttgaaaatacaatggtgggataggcacagggcagacatttcctttccaaaaggtagaagtaggaaggaagaaaaagataataaatcctgactaactgtaaaacccaacagggcaaatattaaggctcaagaataatcttcgacttgacattttaccttctaaacacttggggggtggggggtagtcctggccatgactttgctgggcaaaacccatatagcatttctcacatattggagtcacatgcctatggctctcccaggctggaattgcacactggtggctctaccagtctggggtcttgggggtggctctgctcccacggtttcactgggcattgccatactggggtgggggctgtctgtggtggtcctgctcctgtgatagttctctgtctgggctctgaggctttctggggcatcctttgaaatctaagtggaggcaggcatgccctcatgacttgtgcactctgcactttggtagagatagcactgcacagacaccaccaagatttactatattgccttccagagagtggcccaaactgcacatgggcctgcgtgaaccatacctggggcaggtgaggagcattgcagcagaatgcaggaagtggagatttgaggccacctggcgtcaaggtcctaccggtttccaagcttcctcttttgatacagatatgttgcccccagccttggcagtctgtgcctatgataggaaggacagcacaaataaacactgaaaggcctttggtgtcattctttcattatcttgataaatagcacctgatttctgcctcaccgtactaatctccttatcaaacggttacttagccacacccttggtgttctctcttgaacacagctttccactctatacaatatgaccaggctgagaattttccaaatctttaagttctgcttccacattttattataagtagtcaaaatcctcaacattttgcttagagatttcttctagaacatgaacatgatttggccaagttcttttgcccctttgtaacagagatcatctagtcctcagttgccaataacgtgtccttcatttttgtctgagacttcatcagaatggcctttaccatctgtatttctgtattatcaacattttgatcacaaccacttaggtaatctctaagaagatggaggctatttctacagcttcttcaacctcaccttcttctgaaccctcacctgagttgcccctaaggctcctttcatggcagtggacctgtaaactctttccatcctttatttattatgcagttccaaagctgctttcccatttttaggttttgttattaacacaccctatctctctgtgcctatttctgtctttgttggtctctgctgctataatgaaatgccttagacggggtaatttacgatagaaatgtatttctcacagttct

SEQ ID NO: 52619 - DNA, 1399 bp, Homo sapiens
ctctttcctttataaattacctactctcaggtatgtctttattagcagtgtgtgaacagactaatacagttacaaagcagcttcctcctttgttgtttgtcagagtggctctttgttccttcaggatcctaaacttctcattcaaagtcatctctgtctgttttccagcacaatttatgtcaattgtagggttccactttaggaactttcgttatgtcagattgcttccattttgttaaaaatgaagatacagcagtatgaattaatcctgatttctgtgttaggcattgcactgctccaggattgtccaaagatagagtcaaaattcctccgtttgtggtgaaagtgagacagccagtgggaaggagtccatggaaaaactccaaccgcgggcgaactgggaggaatgcacactggggtgccaccgaagtttctgctatttgcagtagggaggagcctggcccctcctcttcctgtgtggaaccttggattcaaatggcgaggcagggagcgcactagctgcgattccggctttgccgaaagtaactgttcccccttttctcctttttgcccaataagttccatttttctcactccgcaaattgtgagcctaaatttttgtggccgtgggacaaggaccacatctttagctgaactaaaaagaagtcctgcaacaaaaatctgccattgatgagttctctttccgactacgttatccagcagttgctgttgtgttcaactgggtctgaaccttcacgtctcttctgaaatgaaaagttgcctgacgcatgtgtttctgatggcttaatttatttccattcttggtaaaattggctggaatgttttttttttctgtttagctggttaggtcccttgagaactgcaactggtttttttctgcacttcatatttgtcccagaaggtttgccttcctttttaacactagaaaatatcgttctatattcctgtcacctagagacggatgattcataggattaatttctttgtgaattccagttgctttcctagatgcaaggccagtgataactccataaagctgtctctttccaggcattactcatcctctgtgctcagactagtcttaccaaagccagaattctgttgaattctccatcatatgctcatcctgaattgccaggctccagttagaaaattatgcttctttcctccctgtcaatttagtttgatgatatcatccaaagacataccaattttgttgagattttcattgttgcgggctttcagtggcagcaatggggtcaccctgcctcccaccaaccaggtaccaaaatggttcatggctggggatgcctcactagaacagtcagcagagaaggccacagttggaggcctgccacctcccactcacgcacaaaga

SEQ ID NO: 52620 - DNA, 4304 bp, Homo sapiens
gtgctgggattacaggcatgagccaccgcacctggctgtgtgtgtgtatttgtatgtgtatttgtgtatacatttttgggaaatgcaatctgccacaagaggaaaggaggaataaaggagcaaataataaatgggatgaatggaaatgggagtttaaacccacacatatcaataattacgttaaatacaaacagatcaaacactccaattagaagacacaggccaggcgtggtgactcatgcctgtaatcctagcactttgggaggctgaggtatgaggaccggttgatcccaggaggttgagaccagcctgggcaacatagtgagatcccatctctacaaaaaaaaagtaaaaattagctgggtgtggtggggcaaacttgtagtcccagctgcttgagaggctgaggcagaagaattgcttgagcccaagaggtcaaggatgcagtgagctgtgatcatgccactgggtgaaagagctgactccaccttgggtgaaagagctgaaatcctatctctaaaataaatacatacataaaaataaaaaagaagacagattgtcaaactaattgaaaaagcaagtggttatttttcagaaacacattgtcaaaaaaagacagattgaaagtaaaagaaaatatatgcaacagtgtttgtgttgcatatatgtgtatatatagatgagagatgagacagacacagacataaatacatgctgacaagaatgagcctacagagagagaagtcctgagaatgataattcagtggtgagtaaacattgaatatgtttcctgagaagcttaaaaataagtgatactatagcttccaagtaccgtatttcatttgttttcttgtaatcaagaaattgagtacttaagatcatacagaaatacatgagagtcagaaatggaatctacatttccaactcttagtcaaattgattagtacttcaaaaagaatttatcaagagtctacatgtcatagtcactgacagataagatgcagttcctactctaaataagcttaaggtatagtatttcttctacatattgttacagtaggtagctagtcatgcatgagtggggcaggagagggttgcccccacccaccagaatgtcaggtgactatcaggtgatggtcactctgcttctctaaaataacaattggtcacagccagcaccagggagaggcagtttctcaactgataaaaacacctgaaattgataattggcagctttcaggaactgggcgaatgagctcaaacatgcacattaagagtcaaaatggcagagtatgaccttccaggggcattccaccagaatttgaaagaaagcctcagataagcatgcataaaactccagtaaacacactgtgcatgcccacatcccaagcacaagcagggcaccatgcatgtgggtggctccccataacccttaagggaaggatgaagggaaaggggtgcaagatgccagaagtaggccagcatataaaatcctaggttcaaggatgaacgaggcacttgacctccaagatgcctgcttgggtctctcccaagtgtgttttcctttctttcctgttctaaagctttttaataaacttctgctcctgctctgaaacttgccttggtctcttttactgccttatgcccctcagttgaattctttctttcgaggaggcaagaaatgagattgctgcagacccatacagatttgccaccagtaactcagatattcaccacccctaacaatattatccattcaatttatttctatacaaatatcacatgcatcaaccagcgtgcccaaacagaaataagtcaattagaaagtcattaactttagctcaaacttatacttgctttttttggtattttttaacattacatttcactaccagaaagcattcctgaattgcataaataggtataacatatattcaaagcttcaagaaatattttcacagaatctaattctaacatggcattagtcttacattaaaagaaaattacccttcaaacaaaatataaataggaccacagtacagtttcccagaataggagggcttattctataaaattctaggcaatagtcttttaaaagagggagaaatattgatggggatggggaagacagaataaagaaattttaacaaatgacttctgatagcctttcattttcctcagaaatataaatttcagctcaatatcatcataatagcaagtccctactgacatcctttctaagcaaatcaaaatgaaaagacacacttatctgagcactctgggcaactctacagctgagattatgaaatgaacaaaaagactatttgtcctcatgaactgctaaaattccaaacactgaggtaaataaactctgatttaattcaagagcagagattttaacttatttccaatcggcccaaataaatagtcctgattaaaatacaaagtacctggattcttcctcttgagccttcttttccagcagtagagggaaaatgacagacaccctaccaaaacttgcccagaaggccaaaacctcaaatatgcctttggaagtataacagagctaacttaagtgctaggtcaccacatacctcttgctctagtttcctattaatttttaacagttattgaacccaataaatgtatcactattttccctcttcattttctgttctctctaaatccgtccctcttagggattgccactacattttactcacattattttaataattttctttatagaagttgtttgacccctattggcaccattagggcatatttttcttctgcaataaaatactcaaggtaacttctggagggctctgcatttgcaaatggtttctttcctgagacaacaaaagatgaaaactacaaatgtgatcacagtaatgagtaataaaatactcaagccccactttcagaatttggggaggaccaaatctcctactaatcctcctcaactaattcacatggtttcttgaaatagctacagaacggagtgttagtaggattttacatgacaataaaaggactatctccataaaagtactggatcttttttgaggtgatagagcatttaaaaagtgcaaacttaaaggaaacttaaattcaacttaattttaaggaagtctgatcagccaaatactccataaaaaacttgaaaactattaagctactaccttgcaagacttatgctacagatacaactgattaagaattattaactgggatacataaaatattcctaaaaaagtaatgtctaaaaatctcaggtgaatatgagaaaaagtcttaaacaggtacttaacagacaataggacacaatcataagcttatgggaaaaggcttaatctcattatcaaagaaatgcaaattaaaatcatggtgtgtatttcatacctaaaaggttggcaacaattaaaaattccaaaaataagagttggttaggaagtgaatcactcagactcaagccctactaagggaatataaattggtaccaccactttggaaagcaattggacattgtctaataaatgtgacaatatgaataacttttgacccagcaattcttcttctagagaataaaaataaatgaattacaactacatgcaataacctggatgaatcttataaacataatgtcgttagaaactagtcataaatacacataaataaatctttcaaatttgtatttgctgaactaaaactataggccacatttttggagtaaatctttaaacaaaagcaaggaaaggattactgagagtctggattgtggtgaaaaattacattaaaagaatggaagtaagtaaatgaaaaaaatacatacctagcaagagaacctgcccccaaaatttcagcgtaggttctattttccctaagtgtcggctggtctgagaaataaagagaaagagtacaaagagaggaatttacagctgggcctccgggggtgatgtcacatatcagcaggaccgtgaggccccgagccacaaaaccagcaagtttttattaaggatttcaaaaggggagggggtgtatgaacagggagtaggtcacaaagatcacatgcttcaaagggcaaaagggagaacaagatcacatgcttctgaggccaataaagatcacaaggcaaagggcaatgcaaagatcacaaggcaaagggcaaacttagaattactgatgagggtctatgttccactgtgcatgtattgtcttgataaacatcttaaacaacagaaaacagggttcaagagcagaaaaccggtctgacctcagatttaccacagcaggattttttc

SEQ ID NO: 52621 - DNA, 2372 bp, Homo sapiens
ttctcagtaatctatttcctctagttttcttcataatttaccactttctgaaattacattacacatttgttcatttcttcctccattagaacatatgccctacgagaacaaaaatttggtctgttttagtaaccactgtattcttacaacacctaagatatagcctggcatatagtaaacagcctaaaaaatatttgttgagtgaatgaataaaacaaacttggaagagatttgagagataataacaaatattgaccaaagaagagggaaagctaatatctgaactgatgaaaaagatctttcctaattgtagtggtttttgttttaaacctaagagagcatacattgctccctagggttcctaccatacgttttgatttcctaaacactatctaagtcaaattagatttaccttcaaacaattacacatggtgcagccgtgcagcagaaaaagcagtagatggggagttaggagacatatgttctagatccagctttgcaattaacttgctttgtgactttgggaaaatcacttccctcctgtgggcctgtttcctcatatgttggagtacctcgaggatgagaatggattttgtttttcctgctgtatcctaggcgcttagagtaatgctggccctaagaaatctgttgaatgactgaatgaatgaacaaacaaaaggaggaggcagtacttcattactgaaccttgcttgtgaagaaacacagccggcaaatgagtttagtttaccaagcgctttcatgtgtttgcagacaacacactcggtgtctcgcacacgaggttaatcctgcttgcttaataaataaatgaatgagtgaagtgaaaaggaaagggggtggtatttccgttataaaatgagaaaactaaggccgagagtggaagagactgggtcccaccactcaatgagtgcttctcaactcgggaccctaaccggacctccttgtccttgctctgatcaggcgcgggaccacgatggcgtaacactctattttgaattcgtccctaatcctccttaactttccttgaacatgacccaccgtccaccataaagctttacctgaatcgagaccaaaattctctacatggtgtccctgagactgtccacatgaagactcttctggtaatgcccgacacagatcgcgccgccatcttcgatgagatccacgggcctgagcgcagccttcagccagcagtgacgcgcccagaccagccaatcggatacaatcccagtggcaagagctttctttttcctgtaggctccctcgccctttgcacgctgggaaatgtagtccagtagctgttgctggcggcgtctggaccgcggcgctctttccgagcatgacgggagttgtagttgagggggcctcgggaagaatctgggtgacgccttctggtccgggggcgggcggtcatagcgttacttggctgcaaggaggaggaactggcagcggggaggaggctctagcgaggcctgaaaggctgcgtaaccaggcaggagtaggggttggggttcggggttgggggacagccagggatcgcgtctgatatgctgttggggtcgtgaccgtctgggggccgaggcaggcactggccagacccagccagggatcctcgtattcgtcgagcctaatttccagcagccgggtaggcctcaccagaggctcctttccgtgaggccgcccccaattcctgcccctattctctgcctgggagatggcttccccgagccccccgccggagtcgaaggtaagtaagcacccccccggggatcccggttgtctcgccgctaccccagctaggccgcaccactgctttctcccccaggccccccaccaacctcctgaccgcctctttagggccagcgccttgcaaggaactccccactagtgcattggggtgcggttcgcgaacaaactgcccactggctccctttttttttttctttttctagagagacttgataaatcggcctgagaaaataagtaatgctccagactagctctctcatttgtgagttctccaggtgaagcaccatttttgaccttcccttgtgtcttctgttcctggcacagtgcctggaccccaaggtacacgcttagagaacctcaaggaattgaattgaatagagtcacaagccagtgcaaatggaaaattgaagtaggcaatgaggtgagggaagcttggagaggccttggggcagtttactaaaattaaactctcagggcataataaatcagaaaagccttatccgtaggtcctttctagtctgagatgtctgtcagttacagttcgttcccagaattgggcaacatatggaactttcagttatcatgttcctcctagcctacttggc

SEQ ID NO: 52622 - DNA, 613 bp, Homo sapiens
tattcatttttatgtttcaataactgatttattttttcccccttgtacttaagatttaacatgtgttgtatttccagcagttcaaatctaattgtgtcgaatttccaggattggaggaaaagttgctccctttcagccctcctactagaagcactggagctaggctggcgggcattggaccctagtaggtatagcaggctgtgaagagcgactgggtggaagcagccccagaagaacccgtgtgaacatactgtcctttggccgcctggcagttagcctagaagacaaatatgagagaggagactggttagagtaaatgtgaccccaccttgaccctgtctgcctctcatgggaaaccagtcaaaccttcactcagattttcttctttttacagcaatgttgctgaatattgctggggataccatccccttctataaagtatctcccctttttatcccagttttctgagcatttctttggtaagcttgaggtttgtgtcagttactggggaaatctctgttcagtaccaacaatattgcagcaacagtactagaaactaaagttgaaaaatttctcactagtatagtacactataccaaaagaaaaacatgtt

SEQ ID NO: 52623 - DNA, 827 bp, Homo sapiens
ctgaaccagaagacttagatttaataaatagtgttttgacatacatactatctactccatatatagaatagaagaaaccaatagttaatatgatactcattttacaaaggtggaaactgaagctcctaatggttaagcaactttaccaagtttgaattgctcaagagtgacagagctgggattcaaattctgcttagctaacccaatgttgtgagttaatgcttgtctacttgggcagaagtaccttgcaaaattatctaggtagcatgtgatagaaccaggattcaaacccaggtgtgtctgacctcaaagtgtggggactttccactctactgctgctaatttttttctaaaaataatacttccgggtgcagagtttaatcttctttgtccaaggtactgtggtaagcaccttatgtacattgtctaagttaatccccacaacattttgagaaatccccattttgagataggagaactgaggctcacaatatttcagtgactggcccaaggtcacagttgttaaatggaggagctggtattgaaaaccaggtacgtgtggctctaagaccagtgtaatagttgtgttttgtttttccttgcttccttctttacttgccttcatttctagcttacactggcatgattcatctcagtgggcaatatccttaccttgaatggtggtttctttgtttgttcctgcaagaggagcacctccttggtctaactgtggatacaaataattaacaggtgtcagatgtcaggaaaacacaagcagaactcttgaactaactaacagtttgcatcttttacagatcaaggagttg

SEQ ID NO: 52624 - DNA, 4900 bp, Homo sapiens
ctctgggcttgggtttctcactgcctatgaggatgctaaagttgtatggcagtccctgctccagcttcactgctttagcaaggggagactctggcttgaagaccccctaaccaagcagcctccacagtggttgtgctctgaaggagatcgttgcccctgttcggatgccactttgggttaatcttgaaaatgcaagctcaaagagccctcactttgggtgttacaaagagtgctttttgcataggttgggctaccaaagaaaaaatggtaatgaagattatcttgggtagcttcctatccaatgccagggtctcctcctttctctaatcttctctccctccaatacactcagcacagggtggatgctccatgtctacatattacttcccggaagcccagggacacctcaggtctcatctgatccattggcaatgaggtaattatagcaggtattatcttcattaattaatgagcaagctaagacgtagagaagctaactgacttgttcaaggtcccagctaggatgaagcagagtccctatccagtcctgtcctcatgacaaatatatttctccacattttctgcatcccttcagggtaggctgtcagtactctgtcccttgatataaaaagtcagtagccactgagctaattcatgagaaggtataactgatgatctcattgttgcctctccatttcaacagaggttcttgtcttaccccaaaagaatgaaactgcaatgctgttactggggtaataggacaagctagtgggcaacaatttctagagaagatgaccttctaaggcccattatgtcccagccaccagcagagcatgtttgccctgtttatatattagctgtaatattggagtcaaagacttttagctttggacctggcctccagatcatcatgctgaaaaaagccaacctgggtgtgatcttcagagcaaggtgcaaactttctctctcagtttaggcatttgtacaaaggagttgacaattaccaagaaagaaagatattttcttaatgaaacaaaagggaaaatcagcccaataataataataacaacaagtgatcatgtattgtcaagcactctgctaatggctttacatgcactatataatttttcttgaaaataatcccagaaggtggttgggctcttttcccctcccatttaatagattaggaaagaatataagagagtgtaaattatttatccaaggacaaatagctaataaggcatcaagttgagataaggggcagtactcctttccattcaagggaaagagtgagcttgatgaaaaaaatggcctttggatgactcctaatgtccttgatgacaccccagagtaccttacgctgtgggtgattacaccatggacattacttattcataaacatctgacacatttatgtagaggtttgctgctagcagatcagacagacctagttttaagaaccagctctgcctaatctagctggaacctcaggcaagtcaggcagcttcctgagtctcagtttactatggattaaatggtgataataactgttctggttgtctctttgccaggtaactcaaatgccatctatgagcaccctgctcattgtagttgctcaaaatatatttgttaaattgcatgataaacatgaagattctttacaaagcactataaaatgcaatgtattactaattctctttttttaatgaaaaaaatcacctaagtgacctccatttttctgtttactgcctattactaaactattttcttcaatctgggtatgctgactcaaccagaataacagtgaaaatgataattcaaactaatactgtttacagggagttaaacttctacagtgggattaaaggtctgtaccacgttagcacaaatgtcacctctctgttaatcataaaacagggtcacaggccaatgttcaccacaaggagacaggaggacaacctgggatgggtaatgacaaagaacgatttccgtactcctaagcctctgctctctcagatctcaagccaacttttttcagtgtgatggaagttgttcacattatattattaaatgaaaaacaagtttcagagaagtatgcaatatatactgtcctcctattttttaattaaaaaatgatatatacccatactgtttttgtgtctatataaacaaagagtaacaactctggagttacctctgaagaatggggtagggtggagagattctcacatttcttttctttttctttctttcttttttattttctgagacagagtcttgctctgttgcctagcctggagtgcactggcacaatcatgactcactgaagcctcgtcctcctgggctcaagtgatcttcccacctcagacaccaagcagctgaaactacaggcgcctgccaccatgcccagctatttttttttttatttttggtataaacaaagtcttgctatgttgcccaggcttgtcttgaactcctgagttcacgcgatcctcccaccttggcctcgcaaagtgctgggattacaggcatgagccactgcacccggccacatttcattttatacattctttatcacgcactttattacatatgtgtaacaagtaatatgtatataaatctggaggaaagttgtattaacaacagaaggtaaccacagaaaaacagagctacaaatgacctcagagatacctgcgtcaaccctgtcactttagagatgaggaaactaaagccagagagactatgtctgatgtgccttctaagttgtgatgttctaggattgcaagttacatcctattggcttatgacttagaattctatttctaatccttcagcaaaatagcaggtagaatcctatggtatggttctttctgccttccttgaagatgttctgtgaaaacataattatttgtaacatggatatttaattcctggagaaatagaaggcagcagaaagttcatttgcttctctatgtacaagacaaatggatttttaaggcaaatatgaggaggcttatttattgatagcccatgatttctaggcactgcatgcagcacttttgtacatgatgcttaaagctgccaatagcttcattatccaccccaatgtcccagtgacaagtgcagtgggatgatctagggcagtcctaggacagcctgatttccagtgccctttaacacacgcggagcagcccagaacgagtcctgaatggtgctctttcctctaaacttggaatgaagccaaaggacctcttagatattcaacatttccccattccctgccccagtatctctggctctaacctgggcctgggtgctacccagatgtgccttagctaaagtgatgaatagcagggtagcagagttcaagctctggtgcatccaaattgtctaatggagccctaggtaactatttaaagagaagttattttttaaaaaggcaacatattctcacaatgcctatttttcagatagtagagcaaatgtatcaaaatacacaaccttttgattcctactatcttaagctgtagggtcttcacagtgtctggggccagcaggaaatgttctagaaagtgtcaaacatgaagggtttggaaattcataatcaaatgatgactatgctctgtgaagtttccaaccctgttgcatttcctcatttgagcagtgggtgaaggcgaagggcaaaatactccaagggtttgtttctgtgacaaagaaacttcagtgtcggtaccagtaggtgtgggaagagaatgtagaaaatgacataaggcagtagatatgtaaataaatcactaaaataagtagttgttatgaaaagagagttgagagttgaaatgaacaggaatctcaaaaactgattagaacctaacgataggagtgttcaagttgtttttcctagatcagagactcacaagggcctcattcaggtaacacaagtaactggcaatcaatcttgggcattttgccacctctcaaaaagtcaggaaaggtgtgaatgagcatttatacttagagagaggaaaacaagcatttccctccaagcagagccatcatgttttcagccaccatcaagtttttcccgaaaacaaaggcaaaccaatcttcccttctataagcttagtagtattattaaccccttattcactggtgctgtccaggtatacaaaggaagcttttttacttacagtttgggagagaagagtcctcctagatatcaaaagctgtgggtgaggcagcagctgccaaataagacagatctttggtagcacacaatttttatagacttctcatcatgttttttttttccaatatttgccctcccctttctaccttgacctagtagggaggtgtttattcaacacctctgattggctcataaacaaccagtccttaaaatcatgcccatatactccttatgctcatagaatgttaaagctgcaaggaatgtctttagaccgtggagttcctaatccagaccctccatttcacagatgaggaaactaaggcaaggaagataaggaggttcccttaagtcatacagctagtcaatgatggagctctagggtccattaaatgatactaggaagaatgttagtgtagctgtaacacttacaaaacacatgaacttggtgacgggtttttggttttgttttttacttgtctgagccgttattttcttctctgtaaagtgggatctcaatttcacaggagcattaagtgagttgtatagtgtctgtacgcagtaggcattcaagaattattatttccaaattaggtaatcaatgctatattttcattatttatcttcagtatatcattagtagtcaattccaacaatttattctataatttatagttaaatttaaataatctttcaataaaagaaattgattctgaa

SEQ ID NO: 52625 - DNA, 2483 bp, Homo sapiens
accagaatttatggatgaaaaggtgaaatgtcaacaaaatgaaggaaaaaataaacggaactaggtgatctaaaaagagttttggtttagttttggttgtttttcctagatcagagactcacaagggcctcattcaggtaacacaagtaactggcaatcaatcttgggcattttgccacctctcaaaaagccaggaaaggtgtgaatgagcatttatacttagagagaggaaaacaagcatttccctccaagcagagccatcatgttttcagccaccatcaagtttttcctgaaaacaaaggcttctgagaacagtaagtattcatcactgaatgtgaatattgaaggaaattgaagtatttgaaacacaatattgaggctcatttggctagggaagttcccaccaagccctgtcctgaggatagtagagggatagaccagggaaaggtcctatcagctcccttgactccacttagtatctgatggcacatttcctggtttccccatcttcaactgggctcattgaagcacctgctaccatatttgtcagaccaatgtgaccagctttggggctatgtgaggtttcatcctctatgatttttggtaaaggagaatggaggaacaagaggtggatggtgatgaaagaatagagagtgggtgtaatgaaagttgttaggagtcagggctggggtagtcagaaccatagctaaaacattctacctgctgagagatgctactagtactaattattcttgttatacaacaataatagctatcctttttttgagagtctatgatgtacctggttcttttcataaattatctccaatatcagcgactctctgaagaaacgcttattacccccattttatgcataacaaaactctggttcagagagggcaagtaacttgtctagagtcacagtacaggtagctggagagtttgtctcattccaagacagtgatctaaagcagagctgcttacattttggtaactgcagactcataaattagctctttccctattgccttctcagcagtttataaccttggacattaaactttcattaatcagggaggaatgacttgcgtcagcagacgtaggtgtccttggtgagctgggcatggctccatgtgaacaacagcctggctaggaatgtcagaacagcatgagtactcctgccctgagtgctgccacttgctgctgttcttgtagcatcagcatttgcccacctctggggcttgatgtgcaactgaaactcaaagttcaggaaaacaaagctaagggcttactggaccttagagaaacagcaactcttgaccaacatacactgcttgcagggtttttgtttttatttttatttttgttaagtctcctaacacaatacaatgttcaaaattgagtattatatgtggaaacagcattggacttggaggctgtgaaacactgggaagttcttcaaccttagtccacagtttccccatctgtaaaatgaactaggaatgcctctatcagaaatgtattatgaagcatgaatgaaataatatatgagtggcactttgtacagaataggttttcattaaatagctagatctgaatgcataactggtttagaggcctttgattgtaggatcttaaaataggcaatgtaacaacaatactattcatgatcgttacagtcaatacttctaacaacagcctcgcttattctctactccctgcccaactctagatatttcttctggtttgaatgtgatatctatataagtcaatccacaggccatgagataaatgtgttattaatgcataacatgaggtctgagtcataagcaaacttctacatgcaaataaatctcacatattatagagttacacttactgtagaattagcaatattatagagaaagaactttcataaaaagagaccacattacacaatgcaactggaagaatcacgattggcattttaaaatatattttccaaactgtggtacagatatttccttatcatattgcaatctgctttggtggttggaatagtttcaggaccccaaaatcagtagttattactttggtctagagatagagctatgttttctcagcatggctctcaaaagtgttttgctgttatgtgtataaggcattttgttagctatggagactttttagaggatacgaggtgagtaagactggcctattctcaagaaacctgcattctaaaaggaagagaagattgaagttgagaatcaaataaaatcaaaccaaatacaagaatgtacataaaaacaccaagagattgttgttgttgttgctgctgttgtcactgcagcatttatggatgactgtgtgaagtaacattaaagaaaagtcctatgaaaagcccaaatattcgagattttttacaaggccaagtcaattgattcaatctgtcagactgtaagacctaggggggtagggggtagtaatgtcttaccaatgtttcc

SEQ ID NO: 52626 - DNA, 6158 bp, Homo sapiens
ttaaaatgtacactccaatggtttttttagtctgttcatagaatcagagtattagatgtcagtttgtgagagagatgtggtaggtttttaagatgctccaaatctgacggtataaatagttttaaagcaccaccatgaagtccaggagcaacagccactggggtgcagcagatatgagaatgaaagagtcatgggtcccatttcatttccttgtggtaatttttttagatgctcttcatcactaagaaatctgaactctgtgtattctaggaacactagagtgccttgtatattcaagtatccagggtaagtaaattcaatagtatccaaattgtggggcttaaaaatacccctttgactaaagagtaaagctgatgcttgaagtatgttgaagaactggaggatttccttgtctgaggaaatatggacatgcagttaggatgttgcagaggcagagtgaacaggaaataatttcacactcagtgacgagtatttagctgacaggaaagagttacacagtggtctgaagtgtccaccaacccccatttctccatatgtctttgaattgggttgttaactgccttgtcagtgttttctctttgtcttttgctcaatcatctcaaagttcagtttttccctatctaatcaggttgttaattacctaggtcatttatgacccccagcacagtatttatttcactcttccttataacaacttttcagaaactctttcataaaactttcataaaactctttggcattaaggtgagatggccttttgctagggtggaaaaatctctagataaggaggcatgaggtatgtgggtgctgagtccagttctgctgttgactggccatggagctgaacaaagtcagcttttcccagcctcccttctctaacgtgtaaagtggcctgataataccactactgcctaattttactgtgttgttgcggtgatcaaacgatatcatgtaaattagtgctctgaaaactacgaagacctacataagtgtaaaatattataaagcgagcattacacagctgatgcctgtgtgtgcacatacacatgcacacacacacacacacacacgcatgcacacacaagtttgagaatcagaaaacaaggttttggccctagctttgccttgatgacattgcccactggagcgtattcccattagttgagcacgtactattagggagacttttctgggctctagaatgtgtcatttaatctccactacctcagcagcataggcattgttttggaaaggggggagatgatctggtatcttccccaaggtcccaccattagtaagcagcagtgtagggactgaaacacagatctatgactcttaagccaaccagggctttgaattcttatctatacagcaaaatgggggtctcttctagctgtgctattctgtggtctttgctgcccaaattgcgtgtttttgagatatatggttactctagaaaaaagaaaataattttaaacagtaatataataaatatagattagaagataaaatgttttcaggccaggcactgtggctcatgcctgtaatcccagccgtttgggaggccaaggcgggtggatcagcctggccaatataatgaaaacgcatctctactaaaaatgcaaaaattagttgagtgtgttggtgggcgcctgtatttccagttactcagggggctgaggcaggagaatcgcttgaacccgggaggcggaggttgcagtgagcagagataggcgactgcactccagcttgggtgacagagcgagactgcatctcaaaaagaagaaggagaagaagaagaagaaggagaaggagaaggagaaggagaaggagaggaagaggaagaggaagaggaagaggaagaagaagaagaagaagaagaagaagaagaagaagaagaagaagaagaagaagaagaagaaatgttttctgttgagaagtgctgttggtatggattatttattgactcttacctagaaatcttcagaatgctggtatgtatggaagaaacaggtagttctaatatcctgcctcttttcctccagctatttggatttcctgcatctcacttcagcaccctttaggaatgaagaatgccagcctgaccaaatccagaactacactttcctggaagcctggctaaaagtcccagactggcaaggggcaagcagccagcagcgtgtgcgggtggcaggcctgtcagtggccacctcagtgccacctgctctcacacaaagtgaagaatggagccactccgcttcccaggttattaatccagtcacctacaaattcaactctctgcccttcagaaggttcagctataaaccttcttggagtgccaatataacttagttattaagaatgtggactttgaagtcagatcaaacttgtttcaaattccagcccagagcttttgggctgggttactttggaaaagttctctaacctttttgaacttcagtttcctcctcagcaaaaataataataataataaaacgtaccctacaacattgttggaggattgggttgaataatgaatcaaagtgttaagcatatacctagcaaaggtaagtaccacataaataacacgtcctgtgatgatcattgtcactatgcctttctcctttccacattctccacattcttctctccctctgtcaccaaagagaagtcctttcaaaatttttgctcccacagcattcaatctcatctcattatctcctgtgtccttcatctggaatcttccatcccacttccaccctcaaaagatttctccatttattatgtagaaaatgaagctggagcctgagttcatctcagaggttgtatactcgcatccaagaagagtacccctgtagaaggcagtggggagctacaaataaagaaagacttcatcccctgttacataaaccaaaggtgggtataacttacattcagaaaagatggagagaagtagaagcacgtttgaggaaaatagagaaaatggcaatattatttgtggaaagtgtaaaaaggaatgaaggagggaagataaataaagagataaggccttgcacccatgtttcctgagttagaagcagatcgggcagctggaagacccaaccttccaggcaggcagacagctgacctcgttagcacccctccgccatgtcattcaaggtgtgtggctggcctgcaccagagcacgcctgtcctccgtggcacagctgactcttaggcgtgctagatcccccactggggtgccagatggaggtgtaaataagaggctggaacaagttatctctgtggcagggagcccaggaaaattcgtccaattgctggcactccagcaggaggctgcatgctcagtgatcatgaccaggcagcagatgtcctggcttccttggaggggagaaaaggagggtattcatgctcttgcaatttatttcctacccagacccagggcgggcctgctctttttgccactccgtttaatggcttttctttgggtcatttgccaagtgagaacagagaccctctgatccgaaggaggaatggaaaagctgtcagttaaaaaaaatgggaagaatagaaaggcagtcatttattaaaaaataattatgttttttaccatatgacccaggaattccactcctgggtatctacccaagagaaataaaaacatacatccacgtaaacacacaccctagtatgcacagcagtatcatccataacagccaaaaagaggaaacaaaccaaatgttcatcaactggcaaatggataaacaaaatgtgatatatccataccatggaacattattgagtcataaagaggaatgacgtactgatacaagatacgacatggatgaaccttgaacacattatgctaagtgagaaaagccaggcacaaaaactcacatattgtatgattccatttatatacaatatctaaaatatacaaatccacagagacagaaaatatattagtattgcctagatcagttagggcagagggaatggggagtaactgctaatgtacattggatttcttttggaatgacaacatttttctaaaattagatagtgaagctgcttgctcgactttgtaaatctgctgaagaccattggattttgtgctttaaatagatgaattttatgatatgcaaattatgtctcatacagctgttaagtaaatgaataagtaaaaatataataattatattctgggatgttgtggtcagagaaaacaagcagctacctcttgctcacagtgtgtgaaggtaaatttgccagtcatttctccagtgccctctcccctcctccaaccccaaaggcatagtctctgacatcttcttcctcaagatgcatgtactcccttatccatcctggacctatgagggaagctgcctatagagattctgcaaaagtgagggtcccttttgactcaggtctaatagggaagagaaagcaggatcacacataggtatgtatagctcagatctcagctggggtctccttgtctttttagatacagaaagggctggctcaaatcttcattctacaacttccagaaagttcaatgctttcccctaatttggggggaacttcccaagggagttataatattaatgtcaccttggctcagagcttctcatttcactaactcagttcagtcaagtacctggctcatcacagcagacccttgtaccagccctgccagtgccatgatgggaaatttggttccctttatttgatttccataaaaccccaaaacaaacaaacaaacaaacaaaaatttcactttcaaaaagcctttatgtagacataactaaaagtttacaaagagaaatgggaattacatggtggcaacagatcaatttaaaattgagccttaatcctgtcaactgatcataggaagagaaaaagaagacagaaaataaacaaaattgagcattagtcatccttatttgtagaagtcctttgaaataccacaccttgtatgagataccatgtatggtgtgttctattcactgcttcaaactctgcttctcttctctcctttctcatctctcctcctcatctatttcctcacaaattccactcagagatctgagttactttttctcccctgggcagcagtcttcaactcacctttaaactttatatttccaaacagatcaatgtactggcctattgtacagggttatctgctctgctagcaacaagttgactcacaaaaaccgttttcttcctttaacacgttccatattctttaaacggcacttttggtattgcatcacaattttagtttctcttttaagtatattccaaggttgtgttgtgaggccacaggagaggcaaaggggaatgctataaatgagttcagaggaaaggcagtctcttttcctctgatactgcagggaagaatcaaaataaggaaactgcaaacaggttgggaatgtgtagagtgtttctgctccgagatagaactcacagtgtgtttgtatgaaatggaggatggagttggatgctgagctgtgatgagaagcagtccttctacatatctgttttctcccctgcccctttgccctgtgactttgggggtgaaatagacaagaaaacaccagagaagaattaacaaaggacaacaattcctttatactcagatgatgtaatttcgttttcttgagctagacatgaccagaacagacactggccttgttagctaatcattgccaggaagaaaggcaagggaagatacaggagattttgaacctgaagctattttttaaatagacatccaccttctttaaactgggttataaaactcaaagcccacacaagaaaaacacttacacatttgcttgctaaaatcaagaataacactgcttaaaattaggtaagtatcaatgtttttatcgtaggcatgtaggaaatctagccaagactagagctacttggttagtaatatacagactataagtatctggtgttttaggcattcatttgaaataaagtaaagacaatttttgaaatggagtaaaacaatgcttgtatcagcttccacatgtgtgtcgtcgtctgctgagtagaggctgaatggtctggctccttaactttcatcagaccaatgctaggggagagtctgagcttcacaa

SEQ ID NO: 52627 - DNA, 939 bp, Homo sapiens
aaaaagaaagaaaggaagaaagagagagaaagaagaaagaaagttgaaagaaaggaagaaagacgggaaggaaggaaagaaagaaagaaaaagaaagaaagaaagaaggaaggaaggaagaaagaaagaggaaagcaagaaagaaagaaaagaaaagaaaagaaagaaaagaaaagaaaagaaaagaaaagaaaagaaagaaaagaaaagaaaagagaagaaaagaaaagaaaagaaaagaaggcaggtgggcgggcgggcaggcaggcgactgacaattttaaaacattaataacagctgaaccgctgtggcggcagctgctctggccggtgcgaggcagcggcgcccggcgcctgcaggaggtgctggcggcccaggttggaggcggggacacagtcagagccgggtggggcatggagggccgaggtgggctatctgtttaggccgggacgggggtgcagggctagggcggggaccctgtcccgaccgggtcactctcgtgggaagagggcgggcgctgtgtccggcagtcagaacaagcggctgcgaaggagaaacgaagcgcacagaaccgtgagctccacagggaacggactgatcctttgctagtccccgatgcccgcactaaacctgtcacaaggcggcgcacgggtacctggtggccgaagaggcagcggtgtccagtgagttggattctggaggcggtgggagccaacacttgctgcgcatcagtgagcagagccacagtcaaatccatgtgaccttccaagagcaagcacaattgtcctgtgcaaatcccagacggatgttccagaaaagagaaatagcaacataaaaaccatgtctccaggcagcttactaaaaagtatagttcataagtaaccataattctgggcaacagcacagtctgctgaactaaccttacaagtacaataaaa

SEQ ID NO: 52628 - DNA, 1965 bp, Homo sapiens
atagaaggagaaacacacacatgcacgcgcacacacacccgcatgtgttgctaatggtccgcatggtgagatcatcattggagccgccctgcggtcccccggagagagcctgggccgagcagaggatgcgggtcacaacgaccctgcaggagctcacgccccaagacaccgcgagcgcagtgcgacactagcgacgccggagccaagggccagaaagagggcgagacacacccaggtggatctaattaaccctccctcttggaaaaagaatgggggacgatgtccagggccctggatctagtgtctgtcgctgaccttgggcagtccctgccacgcttgagcctcagtttcccacccgtaggccgagctgaccgtctccatcgctgcgctccttcccttctgctggtttttcctggtcctgggagggacgccttcctctgcccagtcgccctcccccagcccttggctgcgaggtcgcccgcagaaacccaacactgctgccgcgctctcggcgcgcccggcgaacctaaggtgtggacgcgccgcgagggtcccctgcttgcgggcggccattaggcgccaggccccttggcgcttcggccctgctaggctcggcgagggtcttacccagactggcacgcgccccgctcgcgtccttctattgacctgtcagcgcagctggcgcaggcaagggccagggaggcgcccccgagacactcaaccatccccgcactgatgcgggcccctgctgccctggggacccctgcggggtcctcgcaatcctccggcaggaagcggtcggagctgcgggcagggccgctaggcaacccgcctgcccgaggcgcactgcccggggcacaggccctctgcgatgactctccccaacccccagctgccctgcttgtgccagctgtggccacccctaatccttgtcccctcgctctagtgtccagggctccgaccaccgcgccagaagggctgggcagatcgtgcgcaacagaaacctacccggttggggcgaccagctcggtcccctgcgcgcgccgagggccgcctctggtattgcccaggctggctagctcatcccggtggaggcgccatctccggggcccggaaggagcgggcgcagcgcggtttgggtgtgcgccggagcctcacctcctcccgcctcgcagctcaggcgcagggctccccttgctcaggcgggccatgtgacccgcgagctgcggagagaccgcggcccccaaagcggcttggggaaaaaggacggcaaaaggcgccaactgatgggcagccagggaaaagcaggagtcgcccccaagtcacgcaaacaggaagcctgtttcttttgtgaggggactagaagccagcattatatttcatcaggtgtgtacatagagacttattcacaccaatggaacgatatctctcaatgcgtgtaaacgcttcatgagaaagctgttactttgggtcttgaatgtttttcagtcttccccaaaccctcaatttaaacacaaacggccacgagagacataacgcctgaggtatgagaaagtatgcacattgattgagaacaatcccggcaaagcaaataggaaaaagatacggaatgatccgagggaggaaaaatgtgggggtcaaaagaaaagtaacagcctcctacattccaccttggactttcccttctgaatgggttttcagcacacaattgtacggccttactcagtgcttctaatcctaggtttgcctgtctaggccacaggttagcaactacagtttgctgcctgttcttgtacagcccacaagctaagaatgttttttgcaatatttcatggttaaaaatggaagaatatttcagggctacgaaaattatatgaattcaaaatttgatgatcgtaaacaaagttttactgcaacatagtcatcatttacatattgtctatggctgctaccatgaaagaacag

SEQ ID NO: 52629 - DNA, 1806 bp, Homo sapiens
ttctattttttaaaaaagatatagcgatcattcttccatttctagacccttagctgacgtcattaggtagtttatcatagttctgcgagacatacagcttttcattaataggttagattaattaccgtcctatcattaaaacgcatttagtttaactgaatggaaaatagcagtttgtcataaacttaaaaaaaaaaatcaatgcttaattagcttaaaatagactagtactgagatcagagactgattggcgtttatcttttccctggacaatttcttgttcccaaaaaagcacaagggcagtagttgtcactcctgcttacgcattagaatctagtggatggaaatgcggggtttggggggaggagatgaggggaacgcttttttaaaaaagcttttgtccaggccaagtgattctaatgtgtagacagggcagaataccgctccctgtgcgggggaaaaaatccccaacatctgaaattcctcaaatccctcagattctctccagaactcttcatttcagcacgtaggggtaccaacgaacaattttctgaggtgtctgaggctagtcatgtccccggagattgacgggaccgtcagccaatcggccgtctgaacgagtgatggcaaccccaatgacaagcaacagaatgaggaactttatccccgcagaaagaccagatcgcagtagcaaaggtcaacaagtcaacaaaagccaagggctctccgtcaggcatcagcgaggcccgagtactcttagaggtcgtagccaggagagggtcccgcgcttgcccagcgttgctagggaggcggcgcttgctcaagcttctcgtgccctctccgtacgtcacttccgcccggcggggtctcatagtcctatgggctgggttgaagccacttccttttttctttccctttttcctctccgtggccccgcctcccggaagttctgccttgtctccgccgcgggtcaggggtgagagctggaatctctgcacgggccttggtgagtaactgctgcgagttctgttcccgcgcggcgccagttcaaagaacttaggttagatcacgcttagggcccaacaggactgtgccaggcctcaggagtctccaccctctccagttttggggccgtcagtctcctgggcctgcaattatccacgctgaggctgaggtctttggcttttagcgagttggattgcagccttgttctgcttctgtgtcttctctctccaggcgaggtcctactgaggttgttgccagcgatagtcctctcctggagcttgaattggaagcagagtagtcttgttagtctcggtgatggctgcgttgtttcctgaagtagccaaagtgctttagcatccattccgcctcctttgagcaccctgggaggtaggcagggcagacgaaaaatatattcgttaatattgtgcagttgaggaaactgaagctcttggcgaattcactgtttcaaagcaacacggcctctaacaggcagaactgaaattcgcacccaggtctaactaacgtagggttgcataaaacagtggagagagcgtttggaaatagggaaaacactgcaaacgttaaagaagagctggggtttctgagtgcttactttgtgttcggctttgtgccaaattctttctataattatatcatccattttattttataataagcataggaagtatatactgtggttatttattcctgggttaggaaactgaggcttagagatgataactgacttgtctagtactaatgactttagtaggcatttcacagatctctttcagctctgtg

SEQ ID NO: 52630 - DNA, 1601 bp, Homo sapiens
taaaggtaagtatgatcataatataattaccttagatccattatttaccttaagatgtgatttcactgtaattgtcaggactggggctgaactaggtcagctgaggccagaactgatgctatagggcttcttacagaaaaaaaaaaaggaggatgcctttaagcctatggcatcagaataaccccggctttttgtttatataattgacttgctatacagccaaacttcaaggtgaaaaatgacctgtggactgtggaactcaaacttctctcttgaatcattgcccatcaccagctgtgtactataccctgcagactgagcaggcagtaaggtccttgccaaacctagagtcagcaattttgggctgatgaaatgcaaatgaataaaaacagctataaatttacctccagtctagtgatgtaagccttttggcacagctactcaaatcctcatggcataggaacttttaaaatgccagtttttacttaattagataactcagaaggattaaatattaaagcatgtccaatctggccttcattcaagatgggctgggtacaaaaatatcagtagaaggtttaacctaaaggtaagaagttatacagcatagaccccaggaaaccagcctcacaggctcctaaaagcaaatcatcagacaaacagaaagataaactactgaataacaataaaaagaaaaatcctttcctcttgctttatttttctcttaggctagctcttggggttatctcataattttgtttgtcatggctaaatagtcaatttgtctttgttctggaatgctcagagaatcagtgagtgagccattattatggaggaaccctcaaagattcaggcatatattctgaataactacatttaggaatagtggatgcctcccttctcccccgcctccttcagtatacatataccatatatactatatagtgtatagtataaagcctgtagctttctacccagcatttacacttgagacaatctcccagtttatgactaatctagtgtttgcttatctttcttttctgttcagcacatttgcttctgctgcatgaatcacaagagcagcacaactaaagtagcattttgctttgtgagccaagcatctgaaggcagcagtcagctgagtaaaaaagacactttccttcttctttctttgcaaatttgagaaaattttcatgcatcagtaacaaaaaacacatggaatgatttgtaaagtttgcagttgagataaatgaggattagtgagattaagcaatttggccaagattagacagtgaagtggaactatggcttacatacatttgacataaccagaatgttagttctgtttccactaccttgtgtaatccttatagcaaagagactgatatggtttggctgtgtccccacgcagatctcaagttgtaactcccacaattcccatgtgttgtgggagggacccaatgggaggtaattgaatcatgggagtgggtctttcacttgctgttcttgtgatagtgaatgagtctcatgagatctgatggttttataaagaggaggttccctgcacaggctctccttctctgcctgctgcgatccacgta

SEQ ID NO: 52631 - DNA, 666 bp, Homo sapiens
tagagaagggctaggtccctggcaagggttccacccttgggcctgtgcccatagacctaaatgagaacacgcactcctgtttttgtgcccaaaagttgcatttccaagaccactctagcctaccatgcctctccacccccatcctgtgcccatataaacctgagaccttagcgggcacacacacaagcggctgaatgttgagaagagcagaggaacagagccgcagagaacagaagagggaggcagagagcgcagagaacagtagggcagcgccgcagagaaggaggaagaggtgtctgaaccaagccgaccgccaagaagaacggcggaactccaggcaaagattacctctcccgcctccaccttcccactccagctccccatcccgctgaaagccacatttactgctcaataaagtctccacattcatcaccttttaaacagttcgtgtgatctgattggtccaggatgccggccaagaatccgggggttaacagccgtccctggatgacaaggctaaaggagcacactgtaacacacgctcacttgggttccggcacctgttcatctgcgtgctccccctcgtctcaggggtttgagcaacagggccaccgaacagacaagccacacccctgccacacgtcctgcaaagggggatcagagagt

SEQ ID NO: 52632 - DNA, 1238 bp, Homo sapiens
gatttaatgaatttatattttattcccttcagccttgttctgccctacctaatactacttgaacttccttttcaaagaaatacagatagaggtgcctcattgacaatttggtagttaattcattgttatgacctttccacttcctgcaatgtaatcaatctctgctgttgcttaacataatgtgaagccagaacaaatgcatatgggtcagatgcacttaaatgacttccatgggtggccatggtctgtcttcaggaggaacatgaatttctgacagcttcaatagtaaccttaagatgtgaacaatattagtattgattcttttgtgacccattctagtcacttgcaaataaagccattgtttagaaagggattggaggtatttaagaatatcagaatcagattatgcaatcagggtgctggaaagactgacattactgcatttgatttatgacacatagtaaaccatttcagggaaatagtgcctccccttttaaagctggtcattaggagaaacttcctcattgtccaggtggtgagcactagagtgtgctaccagaggaagtcatcacaggttcttttcaagcaaccattcatttaattctcagatggaccaggaagcttcaatttgttccttgaacacagatttctttcttcaccccagcccttacctaaaaatgtggaacgttgcacacaagggagacggagagaaataatgagagtgaatgtgttgtcaaatgaccaggttttatagtctctcaagtcagggagattgatctcccttttttcccttctcactttcaaatgaaactcacagatttcagaaaagaaaccacaatcttgtaatgaggtggtgagactaaatcagcaaatgagaagcaaaaaacatcctaacagcaattattcaacagccgctaaaatttgcaaaagatgccagtatctcccaggagagtaaacaatcatgatgttgaaatgtcaactgtgcaaacagcaggttaaaaatgtagtgcaaaatttcccagcagtaagtattttttcttatggagtgtagcagtatgcacaatagtctgtaagtagccccagggttgtagctacatcagcagaaatgtctgtacttctttgtccatgataatggtgtaatgaactgaactgcagacatgctggctggataaatttactatcaccaattattgtttatatctaataagcttaaatgatagaatccaaatccaactcgg

SEQ ID NO: 52633 - DNA, 1014 bp, Homo sapiens
ctctgcagccgctgcctgaggtctccgcctccaggtcccgcgcgcagcttcactccactcggtgaagcggtcccaggagctggagcggtctctaggccatgcaagttggagcgtagcgcgcctccggcagtctcagatcccgctcccaggtccctccgcctggcatcctctgcccgcccggtcactgcgctgagcaggcaggcgggcgggccggcgcctgtcacccgcagctggagcgcccgttccctgcccgccccatctgcagggcgcctcgggcactgcgtccggccccgcgaggcggccgggatgagaagcagccggagttcctcgggggcagcagtgacagaggagcgacgcgctctcgcctggattcttttccttttctgcccaggcgagacccacttatttcctggggtcgcgttggagagggctttcacgcccggggtgcggaaaagaagccaaatccaccttcctccactgttggccaccctcctgcaggctcccccagcgccgacttcattttctctcttctctcgctacttcctctctgcctttctttcgttatttttccaccgagtcgccaccgccgcttgcttcctcggaggagcaacgcgactggccagcaaagggtggctctgctccgagcgccaaagttctccccgcctcagccggcgcctccctgttgctgagccctggcgcctgcctgtcgcttggctgcgctaaacgcccactgttggtgagattcccgagtggcacatcccgcgcccctggaaagtcctctcccctcaaaggctgggcgtcatagtttgcaaaattccctaaaacctaagaaggaaaataggactatgagccggtgagaattctgaattcagagtcgcacctgagggatctgaaattcggtggttcactgaaataggttcaaagaggctgtgacttaacgagcttctggatgtgtcgcttttaaggtttttctagctaagggtattaaagtaagaattatttacacatttttat

SEQ ID NO: 52634 - DNA, 685 bp, Homo sapiens
gagtcctctatgggttctcttttataatggcactaattctactcttgagggctctgcccttatgatctaatcagcttttcccaccttttgattccaccatgctggcagttagtatttcaacatgtgaattttgaggggatataaatgttcagtctattgcaactgcttagacagtccagtggtaaggttcatgtggtgaggaactgaggctttctgccaacatccagtacaaaattgccatcctgttgaatgagtcatcttagaagtagatctttgtgtctcagtccaaccttcaaatgtctccagtcccagccaacaacttgattgcagccgattgtgacactgcaagccagaaccaccatgtaagccattcctgaatccttgactgaaagctactgtgtgaaatagtatttattgttggttttaagccactaggtattagagtaatttgttgcctagtaagagataaccaatacaaatatgttcaaaggtgctttcagagaacacagtgtgtctcagtagaatcccttatactagggagttgatcctcacagctattcttagaaaaaagtaaaatatattttaccaaattaaaaaaaaaataaccaaatgctcaaaggcataagttgacttgcacaaggctatgcaattagagtggtaatgttgagttcatccaggtctaatg

SEQ ID NO: 52635 - DNA, 591 bp, Homo sapiens
actgttgtcttttttgtctgttctatgtatgaggtagagggcattgcatttctcatctttgttgggcaaaaggtgagaaattcctcagagcattaagagagcccttaggagaattattcataaagtttggagtttcccctggaaaaagaggcatatcactcactttacttcagaatggtggcctctgtgctgcatggaacctgagtgatgcagtatgaaaactgttaagagaaactgaaaatgtgatgtgtgtcctggaatttgtcatatatatttgctttccatgtggataattttgaaaacagaagcctcattgcatcatctttcaatgacaaggcaataggaagagaatagcttaaggtcaagttccagcttttgcaatagggaagatacacaatctttacctccataaaataactgtaaaatgaaacaataaatattgttttcattattataattatcaggtaaggagtaaggattagatgggaatggcagaatattgataattgttgaagctgactgatgaatacttggatttcattataccatttttggttgtttgtatatagttgatccttccttccttccttc

SEQ ID NO: 52636 - DNA, 617 bp, Homo sapiens
ttcaaatgctttcatttcaacgaaagttctggccctagactagcttctgaaatattctgcctgctaaaattgtctttgcttatctgaggccttgagtcataccagatagttgtgctaacagtgtgatttatggtgggggccatgggccaaacaataccagtttgatctgctgttgtgagactggacactgagtaattaaagtcagtaatgtgggcactacatgcctaagtgactgacacttgatggaatcctgaacactatggctcagggaacttccctgattggcaataatccatatatgttgtcacactttgtcactggaagattaagcacattctgtatgacttcaccatgaaaggaaaactggaagcttatgactagtctctcctggattctgccctatgcacctctttcctttgttgatttaaatctgtgtctttttgctgaaataaaccataaaagtcaacataacagttttttgagttataaaattatctctaaaaaattatagtattcttggagatctctgaaacattcatgatgtattaccctttttataggttactgattctgagttgctaatctgtttagcaattttatatttaattccaatagag

SEQ ID NO: 52637 - DNA, 782 bp, Homo sapiens
ccttctgaacctattgcactagcatgttttggaaataacagtaacagcatatggaaactcgctttataagctgtaagatgcattaactagaggtacaatttattataattatcatgataaatcctcattaacatggaatggagtgtacagaataccaaaaaataacggttccttatctcaaggagtaacaatattggctctcagtttataatcatttattctaaccacaaaaaagtaaacagaagggtctggaatgggaaagggaaaatggaaatcaaaaatggatttaaaagcaataatgtaatatttgtttttccttatctgccccttctgtacagctcagatcaaaagagtattttcaggtatatttgcagaagacaaaacttcgtcctctgcaagcttcaagcatggaaacttggcacttaacaactctctcttttacattccctaaatgttgctcatactaccctcctctgcttgttctctgccctacatattttgaatgcctttatctctaagtagatataaacaccattaaagaaatagtccagggattcttcatacttgtgccttaagaataactgtcagagtactttgtaaacagaaggcacctaacacgtgtttacaaaataaactccaaagattgcaaatacaattttaaagatactaaaggatcaatgattacttattactaatctactttttacttaattgaaaattaggaattcaatgatcagtttaaatggatttttcttttttaattttattttagaggttccaag

SEQ ID NO: 52638 - DNA, 1653 bp, Homo sapiens
caatcctgacacgttttttcttcctaaagaacaatacatactaataataggatcggctaataatactagattctatgcatgaagcctagtatttaaaagcatgcaatctggagctagaccgcctgggaacaaatcccagcttactagacaagctgtttaaccttttacttggtctcatttaactcatttgtaaaacgagggcaatttctgatttcatagggttgctacgtggattttaaaaagccccttgcaatatagcctaatattcagaactcaataacatgaactgtcttaaaaggtttccagaaaaaatccccaacaggttaggtcggcttatcattacaacgctttccggtataagggagatgaatagctatttagcaccacacaatttctcctctgggctcggaacagctctcggtagactacgatccctttccgacgtggaaacttcagataaaaacgctccccgaggtccgaggccagtacggggcggagccaggacgcgggccagagtcccccgaaggacggtgcctctctggccccaagaagtacagcttttattttgcagcaatctgagccaacccgagaagattctgaagcttccaaaacagaaccgacgagaacactcatagaatgcctctccacttcctaactgtcgctttgaggagagaaaagtaagccacagccagcaccgcagactggagaaggcggagtctgcagtgtgcctaacgcgaactagagggaccgaggcggggcggggctggcgaagcgcgaggacccggggccgaggtgtggggctgaccatagagtgccggacgccggtgtgaacatacactatctgctcctgtagtgcccaggcccctgccggggagtccccggagctaccattatcgagactctcattctattgccctgcggctttaatccttcgagtgtaggggaaaaattgaaccctaaagacaggcagctcctaggcaccagcacaggaaataagcaatggaggtggggtcctttgctcgcgccgaaattcaaaggaataaatagttccggcgcgggtgttgagagcggtgtggcaggtgttgtagccgctatggtgaagttcgctttgtagcggccccggctagagagttgttctgttccctgcctttgtgacccggaggagcttttggggtgcgtcaagcccctggcctgaggcagcggtgaggcgtgtgcgtgagcacggccggttgggccgggccagacttcctggcgggaggcgggaggcgggaggcggggcgcggggcgcgggggctgtagggagggggaccagtggcagagggaccttaggtgatccttagaaataaaggctagcttctgttcgaccttggagtagggcgaagaggtgtagacaggcctggagaagcgaggtaaaagcctgagtaaaagcaagaagttggagaatatgagatacatctcatctctagtaaatacttaaatgacttcccctcctcccggagtcaagcacaattcggggatgcaatgacggacgtaggtgaagacactgcgggaacttacagacaagtaatgaccgtctaatatcagctttaagtaccatgaaggaaaaagaaagccgagtgaaggattgtggagaggtgacatagggaggtcagg

SEQ ID NO: 52639 - DNA, 916 bp, Homo sapiens
acagaggtgatccactacaaccaaattaatccagcaagctaaggctcagatcactgtggatatgtccaaatcctccatgaggtaaatttgctaaataatgtaacttctgtcatttttactttcaaggtgaatgaagacttggtgaaagcattacctctggaaaggatggcttgaaacctcaacggaagggatggaagttaggcaatcagcttggctatatttgcttaaaagttaataattcactaaaactgtttaacttggagggatctagacacaggctatttttaatctggcaacctagtattagcaggaattggattagctatcataaaaatgagcttgaaggcagtagaaatgaaaagattggaaaattaaaagttttgagagtaggcttgctcttaatatttgtggggggtgaggtaaaagtacaaatggaaaacctcattatctgcatcctgtcccttttatatgtagcatcataagtagccttttgcactccagtctccattcacaaattccatccactcacctcatgtccacctctctagtctaggtttgtgtacgttgaccatgtggtctgcccttgagaatggacctggaatgaggttagtgcaagccctagaaggactatttaggcaagaactttaggagttctagaaaacagaaggatcatctatgggaaagagggagtacagatagcctaaacttttggtttcatgagctcctcccctctgtgaaagggcacagatggaagaggtcctaaggtagtttcaaactgaggaggccaggacagagaccccagttgctagggtcagagggttgtgttgtgtggggccataagctaactgccttcacatgtgagaggctctcatagtttcgtggaagggattagtgtggctagggagaagaatgggaa

SEQ ID NO: 52640 - DNA, 1989 bp, Homo sapiens
ggaagtcaacacatactatccataactgaaaatgcaataaacagcagaaaacactacttacttaaaaatacagaaacaagcattaaatgaaacagcttgaaatgttgaaggtggttactctgggaaccaacactcccggactgggaggactagaccagggtatgtttaactttgactttttcatttcaggctcgatgctgccatttctctgagctcgtggaaaatttaatctaaatcttaattaggagccttctaagatggagaacacattcattgcagagaggtcaggctcaaatacacgtctatcacaacatctaaaacttaactcggaaaaaacctccacgattttaaatacaaagcactgcacatgcacgcactcaacacctctccttctttccccatggtcaacacacccacaacccctgcacatttaccaatctacacaactgagcactggagcgaatgaggtgagtgagggcccagaaagttgaagcaggaacgatccgagccttcagttaatcctaacgtcacctctaacgtttggggtaagaacgtttcaggaaaccaagggggaaccaacgctcagcacagcagagaaagacaccaagctacgggacccgccgcgcctcccgcgccggggtggagctgaccccgccgagccccgccccagcctgcgtctgccaatgatccaggagccgctcctttccactcgggaaaccttcagaggagtctcagaaaggacacggctggctgcttttctcagcgccgaagccgcgccatgctcgtcctcagaagcgccctgactcgggcgctggcctcacggacgctggcgcctcaggtaccggccacgggggtacccaagccttcacccgacgggaggggaggggcggggcggggagtgttccgggtacgtgcgagcaatgcgcatgcgctctccgccacgcgcgcccagacctggggccccggtgaggttctagcgtgagccccggaaccccaagacaggggtacccggaacgcgcgtgaggaggaggccgctgctaggggaatacccccagccggggtcgtctcgcgggcagtggtggtcagaaggcttttctagcctggatgccacacccaccgggacactcccatggcgccggctgtttcgtttttgctgcccagctatgtcgcggctgcggcccagcgagcgctcccatgttgtcacctggcgctgtggagccgcgggtggagtcgtagctttccaagccaccgccctctctagacatcaggttgaaggagggaattgtcaaccagccgcttgccacggaaccggcctcccccttttaaatgaagcacacaacttccgagcatttcgcggagacccttgaagaggaggcccagggtcccggtggggctggaccctgcccgccacccgcgcttcgtgtggtcgctcccccaaccaggcgggaccggagcctcctatcaaaccggacgatgacagacagactcttttaaccttagatgagaaatggacaaaatggagcttgtgattctgccctaactttcgggagtggcctattctgtggcttcaacctagaaatttcttttccttttgatgtttaggactttactcctttctgaaggggcaggatgggaaggggattaacctgtcctagagacagactgaggagcactaaagaagagcagctcatgtccattcaccccgggttaacaatgcagtttttaccctaatgattctccagtggggcagggccaggaatgacgtccttatggcatgattccaaactttaagtttttagaaatgtccatcagttgttctcttttaagtgaagtggaggtcgttgctggtgggaatgatccctaacttggagataagggaggatggacgactcatgatttctgccctagcagctaaaagtcatccctgcaacaaaattcttaactcccatccggctcccccaccatacccggctcccctgcagtcttcct

SEQ ID NO: 52641 - DNA, 942 bp, Homo sapiens
cactccagcctgggcgacagagcaagactacgtctcaaacaaagaaacaagttaaccctgtcaacatctcgactttaaatgcaaagcactgcacatgcacacgctgaacacctccccttccttctccaggggcaacacaagcacaaccgccgcacatttacgaatctacacaactgcgcatcggagcgaatgaggtcagggcccagaaaggtggggcaggaacgatcccagccttcagctaattctgtcacctctaacgtctggggcaagaacgtttcaggaaaccaagggggaccgaggctcagcgccgaagagaaagacgccaactgcgggacctgtcgcgcctcccgcgccggggtggagctgaccccgccgagtcccgcccctgcctgagttcgccagtggtccaggagccgcttttttccactcgggaagacttcagagaagtctcacaaaggactcggctggctgcttttctcagtgccgaagccgcgccatgctcgttctcagaagcggcctgaccaaggcgcttgcctcacggacgctcgcgcctcaggtactggccgcgggggcgcgcccgagccctggccggaggggaggggaggggcggggggtatttctgaagcgtgcgagccacgctcaggcgctcccagacctggggccccgcgccgccgccgaagttctaacgcggtctctggagccgtctggcgcgcaaggaggaggctacaggccggggtcgtctcgctggcagtcgctgtcagaggggttttctaactggatgccagtgtttttgtgatttttgtttttgtttttgagacggagtctcgctctgtcgcccaggctggagtgcagtggcgtagtctcggctcagtgcaacctccgcctcccgggttcaagcgattctcctgcctcatcctccggagtaggtggaattacaggcgc

SEQ ID NO: 52642 - DNA, 1303 bp, Homo sapiens
gaagaaagctcctgctaacaagacccagaaaaatcctttgtccttttctttgatttaatgtattgttacagagtgggggatatttttatctaaagaacaaacactacctaacatcccaaatataacagaatagataataattacatgaattatactttgcagaaaacaagtctctggaggttctatgctttgacagtgtgccctgtgactcagttacagaattaaaacacagctccacaaatccaaatattttataacttaatcatggatttttgcaagggtggattatttcacctaaaacacatgtggctgttcctgacaacagtaggatgaagaggagagaggctgaaaggctcaacagaagactggcctattattcagggttagttcgctgctgttctatgcatgcagtattagcttatacagggacctgagccgcagcagtaaaattcattccaccgtgtaattctgaagtccattcccttggccctcgtaaacatctttggtctgctcgaatcttaccccctcctgggatgtagaagacaaacatacctgacaaatgtgtactgttcgttgtacatccagggctgaagttccaggctggggtacttgccaaagggtggcacgatcaggctgaacacaagggcaatgcagacaaacacagctggcaagacaatctttacccaggcagtggagggggcagggggacagcaggaaacggcaagtgttagaaacaaggccaaggggcaaatccctacgagtccagcccacctccccgaccaaccagcacggcaatgaggaatgcagggcctatgactgtgctgcaccaaggcattcttggcagctgggaagcaatggagcctgaaaactaaaccttttctctggcaacacaaggccagaggttatggccacctggcagaggcactaagccaagaagttcacgaagtaaatagtgctcacattcagggtgactcagaacactgggtcctgcccttcctcctcctgaagactgagaaagactacattgggccatgaacccaggaccaggagccagaagtcctgaatcctggttctgtctctagcacaagtgtacccatgtgaagtcacgctccccactggcctcagttttctcattttaatctgaggtctgagaacacatggcccattcaaatcctacactataataaaaccaactctacagcaacggctccaatcatggacaaccatagtcattatctcccatgatagtctcagaaagaataaatatccaattccttcttcaacctcctaagactttctacca

SEQ ID NO: 52643 - DNA, 1272 bp, Homo sapiens
ggttaatctaacagtccatggaagcagaagccttcctgggaaaagccagccattaggactaggcagagatagcaagggtcaagacttctgttccacatatgctactggtgacactggcctcctacacacgctacccaagaaaaatctggaaggctgttcctcatctcctgggctctcactcttcttatgtactaagctcaaatcccaccctcctggcttggccctcagctcctcatccctggtattcagtgtccactcccctaagggattccccaaaccccaatcatctcagctctctgggacactgccctgctagctcccaaaccgagccccaggcaccccagcaagcattaggccaacccgccaccaagctgctcccacacccgcagccacccagccccagcccagcagcaaaccttgagtcagcgccaccagcctctgcacctctcctcctctgcctccactctgcccagctgggggaagctcaggcaccacctgaataagaaaccccagagtccttaccgatggtcagcgtgtcactctcatggtcgctgcccaggccagcatcagaactgctctgagaaacactgtcctcctgatggcaaagaaggaggtgagaacgggtcagggacggagcaaggcagagccaccagcaccttcgccggggagggcttccaagaagctctgttgtgtgagaactaaaggaaaaagctttccctgggacacatgcactggcagccgtggcttcagaggaccctgtctggcatgtgtgtgccgtgtgaacagcctcgcttcctgagggtgaaaggtcaggaagcagagctgccaaaagaactgtggcctgccaatgaatgctgcaatgaggcctttgccaaccatctcaggcaaggcctttacctggctacatgtctagttcaatgcttctcatgctttaatgtgtgttcaaccactcaagaaccttgttaaaatgcacagattctgattcggtaggtctgagctgggcccaggttgctgaatttctaacaagttcccaagtgatcctgatgctgctggtcctcagactgcacttgagttaagaggctcattaaaaggtaaataagtggataggagtttcaggttgggatgtaaatacattaggtaccactggcttcaacacacaaataaatctcaggcatgtactgcggtacagaggaaaacatacctggtaattgggtctggtcccaccactgttatttacctgctgggtgaccttgaatcagctaccaattccct

SEQ ID NO: 52644 - DNA, 587 bp, Homo sapiens
ttgaaaagtcacgtcatgtctctgagtactcaacttctccatgcttcacggagctcgctgagacacaacttggcttggttttggtaaccctggggggcagtagatgcttataccatggcctggacactgccctctactcatcatcaagacagcaaagctacaacagtgtgtggtgaggcacaaatcctatgccacacaagagggtgccctgcatagaacagtcccaacagcgtgagtcagaaaccctaggcagtgtctgtgactgccactcaacaggcatcaatgacccaggcagcgttctgtcttacatgcaaatgtattccggcactttgtggagttctcagccccaatgctattatgaaatatttatagagtactttgtatttccaaacatttcacaagaaatcattaataaatccctgtattcctggaaatgtcactgcgtgttcacaccgcctgggaagactgagctatagagcacagaggggaggggaagggccacgaggccctgcacccagcctggaaagctccatatgcctagctttcaacctcacagcctgctggttcctgtgagtggcgtggtccag

SEQ ID NO: 52645 - DNA, 836 bp, Homo sapiens
agagtcacatttcaaaatgtttggaagtcatttcatcctaaagccttcctcagaaatcatctttacacaaaacaatcctgatcactcattctactctaactcaagagccccattttgaagagaggtctcttggtaacagcagaggggcagaagcagaacctgagtgctccacaaacccgagatatgcagaaagcacctggtagtagccaccttaatcaatacctggtcataaaccaacgcatccacaaggcacaaccacaacacagcaggatgggacacagtgtagctgacggttctgaaggtgcatttccctgcactctgtcacgctgctaatcctcccagagagatactgtcaggttgaaacctgagctgttaattatcagatgatgagggctaaacagtcattctactatgagtataattcaggcattgtgtgagtggagggattttaccgggttgtgtacacaataggtgtttaatgagtaaacagaagtgaaatggaatgaatgggcacagcaccggaacaaattacaatgtcttctaaaaacacccatcttttccaaaatttcaatcattccagctgaaagggtgagcatttgtcatgcagtgaagcagcccaaaacagtccaagaaaatggttttgtaacaaagttttgtaccattcataataacctttcaccctctatgattcacagcacaaaaaagaccaacaggctgcaaatgtctgcacaagtcagcttctctaactttttaggccagttacttagggttgcaaagatccctgtagagaaatataccttactttaaaattataacatgggaccaggcacggtgac

SEQ ID NO: 52646 - DNA, 743 bp, Homo sapiens
aaaaggcttcaatccagtgcaacaaaacagaaaaagcagcactaagaatccagaattttagtttctagagttggaggctgtgtctggtggcgtccctgcgtacctcatgtcatctttctgaacctcaatttcttgatctccaaaatgagaggtttctgaccagatgcttggtaggagccctatgactccgaaacagtatagttttccctgactcatctcatttggctgtctacctcttctccttccaacccactctcctaacagcctaacttctttgtaataaagataaaaccagctcatcaggaccacatgaactgagcccacatggccaggcactaagcaacctctagagggcaaactttgcaaactgaaatcatttaccagaagagaaacaggtttgatctgaaaatggggctacagtgtgaggcttaatgaggacaggagttaatccgcggagctaagagggtcacatgcagagataaagtaacaggagggcctgacagcccagccagtctctcataaatgctgtatgatccaggtgtattctgctttaggcaaacttcagtaatattgagttatatagacagaataaattgagcaagatttacatcgctagagaaatgattcactgctacccctctatggctagctcctagttattcctcatgacagccagtagctgttcttaggcccagttagtgtccctcagaatcagtgctcctgcaaactgctacctacctgat

SEQ ID NO: 52647 - DNA, 1503 bp, Homo sapiens
tgggcccagtccccagagattctgaaatagtgggtctagagtgcagagcctacaaatctacatttgaataagcatcccttacacttttaatgttgggggagggaggtgtggaaccacagtttaaggaacattgttttacttgcatgttgtctctaccagactatgcctataggatagggaatatgcgttcttagtaccaccaatgcccagatcaggcctggcacagaattactgcccagtgaagggtagctgaatactaaacactaggagatgggattagggctgacaaggttccaaaagtatctgagtaccatcataggagatttccttttagctggccaggtccaggaagagcccagggatgtcaggaccatccccaggccacaccccaggagtgaacaggacttctaaccactggaactgccttcccaggaacagaaagcgacatccggggtcactttctgttcttgggagaaacaggaaggaaggtgtaagctggtgtcttcagttgaggactggtgtgaaaaggtagacattaatcactgtacaaccatggaaaaagcaccaccctgggagtcagaaacctgggttctaaatccatttatttgtcgagtcatttcatgtagttgtgcctccactgccttatctataaaatgaagggtcaaaaaaggcctctgtgaaacctcaacagaaacagaatacacgtattagctaaccctcactgactaggtgggccatagcttcctcctgagcagagccagagcaatacatcatattgcaccagggaacttcaaaacagctccctccttcccaagcagggtggcagaagtgtgggagggcgacccaggccacccctgcaatgggcctaggtcatcctgcaacactctccagaccagtgagtgtgctcagcatgtttataagacttctgttatgttaacaggctctgaagatgagaacatctggatgtgatcaagctccagcctcctatcagtgaatcccccggatgagacataagaacccagagactgattaaacagtcaacaacccttggctgtgcacgtgcatggtgtggtaggttcgctgggttgggaagcagcagggagggccaaagatcctccactacaaagaacttgcagcctgatcacgtggatatccacccatgtaggcttagactcacacactagcaccaacctgtgtgaaaacaggaaggcaacatggtgtagtatactggttctcaaacatgactgcccgttagactcagctgggggcttcacaaaaatcccaaagcccaggccacaccatggagcaactaatgagaactgctagggtaagacccaggcatcagaatttaataaaacctggctgggtgaggtgggcagatcacttgaggtcaggagtttgagatcagcctggtgaaacccagtctctactaaacatatcaaaattagctgagtgtggtggtgggtgcctgtaatcccagctacttgggaggctgaagcagga

SEQ ID NO: 52648 - DNA, 1481 bp, Homo sapiens
gagccgagatcacgccattgcaatccagcctgggcaacaagagcgacactctgtctcaaaaaacaaacaaacaaaaaaaacggggctaataacattcacaggttgttgtgcaaaccaaagatcaagaacgtgaacgtgctgtttcaggggaaaaagctgacttgctccaagtgttcgctcgggtaactggaaggtatgacctctgtcacaggatgcggagctgggctactgctgccagcagaagagaaagtcactatccagcagaaggtcaagagggctctcccaccacagtctcttcaatacagaccaaaatacttgacctgctgagctcagcctccttggttttgcctggaggagcaaacagtgacctaccaattagccaagagcttctgtaaagtggggcaaaggaaaggaaaaagaacaaaaaacaggtgacatgtgtgtttgtgggctggaagaaacgaagcagaaccctcagcttcttgccacacatccaggcctctgggaccaagccggggaaccagctgggacctctgggacccaggtccaggcctctgggaccaagctgaggaacacatttgcacgtgcaggcggaggggtatgacgcggggtgggggcgaggtcctgctttccaggccattcagtgttccttcagttctctgagcatagaggacaaggaaggtgggaggagggaggagagggaagagaggggtgaaggagcttgggggaggctgggaaagaaggaggaaaggagaggagggagagcagctcaggaaggcggaggaggaaagccctttgctgagctgagctgagccagacggggttactctcggtcagtgccctccagtccccagctcaggtttcaagatctgtcttctcttttgctcaacatgaaaaggaaccagagcaatcagctgctttagaagtgggtggaggaggcaaatgaaaaaaaaggagaagtagggaaaatcacatcagcatcccaggcccagatggtcttcttcaatggacccctggggtgggggtggggtggggcctcccagcctgctaggagctgtcaactgagcagggcctgggagcgggagacaaattctaactcgtggttttaatcagcctgagcttgtccagccttacaaataagaccttgaaatacttctctgttatacaagggctggtaacaaatacactccagtgtctttatggtatttttttggtgttttgttttcctgatgctctgctgtcttcttgaagaatagacgatgcctgcttcaccaatagctgagcactctctgggaagacctggttgttgggtgctgaggagaaggggtgaggcggggtgatgcagctgctccttcaggtgactccttagagcaggggagagtaggccaggggtgtgtggtacacacagcctaaggacacccatgctgttcatcccggcctgggctttccaacccaggagacacttccttctctacagagaa

SEQ ID NO: 52649 - DNA, 3517 bp, Homo sapiens
cttcagtcccttctgccagttgaggaaatggcgtttgtcccctcctaaggatgcagcaacaaggcaccatcttagaagcagagagcagccctcaccagacaccaaacctgccaacaccttgattttggatttcccagcctccagaactgtgagaagtaaatttctattgtgtataaattactcagtctcgagaattttcttctagcagcagaaacagaataagacaatacccatgtcttactgagaagagggaaggtgggagaagttactggaagtccctagaatgagggttgaagaccctgaatggtaacaattcccccaaagagccagtgcagccccagagggaaaggatgtcctggtcacactggccagggcgtggaagggcacagtcagcctggctttgaagctcagaaggaaatggaagataacactaagacataacattgacccaaatgaattttggacctgaacagaatgagaagaagaaacaaagaaccaacatcagaaaaagcaagaagatagctgagatgaaaactctacctgaagaccagagaggcagaaaaatgagagaggacagctggaagacaaaaggagtgaaaagaaggtaagagataggaagtatgaagaaacagagtccagaaacaggaaagactacatcaaacagaaggggaagagagaaaaagaaaagagagtttgaggcattcagttcccaaggatgagctggtctctcactgaaaaaagggaccagacacttcaaacaccacacaacatgggactagaatcagcctgcagggccctgagaagtccaggcacaaaaagaacggaaaaagatgagtttacaagttggggatgagattcttcctaaggctggtctagggaagaattaacatacacaatgtataaatagtttaatttttttctaacttttaaaattaacaaaatttattaagggacatagtagtgctttgtgggcacagaaaagtgactcatatttaccaagcattaggcacactattagcattattttccagaatctttaagaacagcctataaagaaacgtattattattcccatttttcaaatgaggaaacagatctggagaatatcttgctcagggtcatagaacaaacaagtggtaaatttgaacccaaacagctttgactgcaaagctttggttctttccactatatcagcaatttaatgagatgttttaaaaatgcttcatcgtgatattggcctcaaaagctggggatggcacctatgcttcctaatgttggaataagcaacatggcagcatagtgtggggagaaaatgctaagcctaggagtcagaccccgattcaacgtacaactttactctttaatcttggacaacagacattaccctttcgagcctcggtttcctcatcaatgaaatggagataataataccaatttgcccctgctagtgctgtttgaagccttcaatgtaataatatatgaaaaatgtaaaatggtatcattatccggtgcaacttagtctgttgaatagtgtcgcactgagattgccttttggtgcctcaatgcaacagtgacaagaggaccagaaatgggaaagctttcaatgagaaacaaactggactcccaaattgctctttgccacccacagaataaataaaccttatgctggaaaagcaggagacacgcaacactgttcttgatgttaacaattcaaaactttttaaaggcagtctgatatttgtggggatacacactattctgtaatcgaatgcaattgtgttttctattcttgtctgagtaaagctgatctttgatttgatttagttcaagtaatatttcaacattgcagtgcagcgttgctccccacccccacctgcttacagcccagctgggcccaggcccttgccctggatggaaatcaaagacctggtttctgagatgcagcctggctttgacaggtctgggaaaactcatggtagtggaaaggtttccaaatataaaattctaaggcctcaaatcaaaacttttgacaagtgcatacatacagaacgtgaattgcaatcacctaaagatttcaaagaatttccattttgatgacataatgttgacacatgtatcaccagatctcccaacaagatgacacactggggttccacaaggacagaaaatatagtctgaggctgtaacctcaactttagcagctgcctgaatgggtgagggggttcagacagaaaatgagaagtggctgtgagtcacaggatgttctttctagatgggccttgggaaacattccatcggtgcctgaagccaggaagtggagtgaatctggcatttctttcagaagccctcttgtctcctttctcatcccagccagcccatgccccatgtcctgtgactttagggaagcttctggctactcagagctgctctctttaggatataacaacaacagagcacgagaaactggaattctggtcctattactgccccttgccagctgtgctttcttaggcaagttacttggcctctctgaacttcggctccttcatgtgtgtatcccctgcattttatgatgattgtaaaaatgcagtgagcttaagaacaagcctggtacctatgctgggccaggcactgtactaagtgcttccccttattcgtccattaatttgccacaatagtcctgagggaggtactattgttattccatttgaggaaactgaggcacagagatgtatggaattatccaaggttacacagctgataagcatcaagccaagatttgaacctaggccatctggctgccaagtctgttctcttaacacgaaggtatatttcccagggaatatttacaagatgttaattttctacccacttccctcaactccctgccacagccaactatcttgccatgtcaccaaagccaccctgctccctggagctcacgtctttttgattttcaaaaatcaaaccagaatcaaaggtccaccccactgagtccttagtactatcagtaaatctgacagccagagaggcatgacccttttccctaagtaaaatccagtataaccctggggactaatttccaaaaagattagtcagagccatatcagaaaggccaaacaggctgggcatggtggctcacacctgtaatcccagcactttgggaggccaacgcacctgaagtcaagagttcaacatggcaaacatggtcaggagttcaaagatggtcaggagttcaaatggccaacatggcaaaaccccgtctctactaaaaaatacaaaaattagccaggcctggtggtaagtgcctgtaatcccagctattcgggaggctgaggcaggaagaattgtttgaacccgggaggcagaggttgcagtgaaccaagatcgtgccgctccactcactccagcctgggcaacagagtaagactccgtctcaaaacaaaaacaaaaacaaacaaacaaacaaaaaaacagagccgggcgcagtggctcatgcctgtaatctcaacacttt

SEQ ID NO: 52650 - DNA, 1166 bp, Homo sapiens
taatcaacttctccagtctctcccaccactctctaagctttaacagaactgtttggagtcccaaccttttaacataccattccatatacctctgtgtcttcccttaggtaagggaagatgcttcctatcgtgctttatctggttcacttctattcattcttcaggattcatcgtggcataatttcctttactaaaatctcagcctgagctagaagccctcctcctgtgctactccagtaacccaggcacactcctcctgtagcattttcctggagctcctgaaatcatctgtttctgttgctggcttcctcagcacattgagcactctgaaagcaggcacccatctgtctgcattcccagccttagcatagtgccaggtatgtggtgactatgttgagaggagaggaccaggccaacctgctgtgctaaatacacacaacccttgctcctctaattgcacacaaagctgctccctatggggcagagaagagggctctcaaagacaatgaaaattcacacatagttccatattgacctgtgtgcactcaggactgtaaagagagagtgcaaagtccttccccatctgtccaggtctggtcatcatcttctccgatgagttaaaaagatcattgaacttctaaacaagcatgatacactggttaaaacaatgaggtttctccaaaggaaaaccctgcctcagtgagttaccaggcgataaattagcagacggacaagatggaaatcactagacacaatataattgagccagtagtgttcagacaactagttacactgcctgaagtctatcacctctcccattcctttcatttctatattccaacgttgtaatcaagataaacaccaaagagcccaaaagagtcacagggccttgtgtttcagagtaattataacttacaactgtggcttcagagtcacacagccaagataatactggtataaaatccctttttgtcttctttttttaaaaaaagcaaaagattgggctgggcacagtggctcatgcctgtaatcccagcactttgggaggccaaggccggtggatcagctgaggtcaggaattcgagaccagcctggccaacatggtgaaaccctgtctctactgaaaatacaaaaaagtagctgggcatagtggtgggtgcatggaa

SEQ ID NO: 52651 - DNA, 1426 bp, Homo sapiens
cactgaggcagatggtggccaagctgggattggaatcatgaccactgctgccggcccaggagtaaggacagggaagaaatgtgtcaggtgaaactagaagtggggaaaggatgcagagagtttccatctactctgtaaaattctctaaaagctcataaatgaggagttttaatttttggatagttcattctttttcattaaagaatgcccaaatagtggtactctggctgggtgcagtggctcatgcctgtaatcccagcagattggaaggctgaggtgggtggatcacttgaggtcaggagttcaagaccagcctggccaacatgctaaaaccatgtctctactaaaaatacaaaaattagccaggcgtggtgctgtgtgcccataatcccagctacccgggaggctgaggcatgacaattgcttgatcccgggaggcagaggttgcggcgagctgagatcataccactgcactccagcctgggcaatagagtgagactcagtttaaaaaaaaaaaaatcacaattaactattttcccagccacatgactagtcagatctatttgagaaaattaataataaaggcaaaagaaaagaggccatgtggccaccctcactttgtccagtttgttccatggggaccttggcctctggatcagcctaaaaccagatgaggatcgtgaaagctctgaagttctcttccccttcctgtccccagccctgtttgtactgaatacctgccacccacacaagttaactgttactttggacccaaactgagctttgcacccaactttcacaactcaattcaatttattctttgcctaacagaaacagcggaaaactaaccctggctgatggtcccccctcagtctgcacaatgggggtacaggagaggcaggggacccaggagttaccagcaaaccaggacacagaatgaaaaggcaagcactgcctttcaacagggttgctctggggtataccattcagctccaggctgaacatagcgtttctagtcttcctggcggcagcacacaggctttatgtatgctttctattcttcctagtgcaagggagcctcctcaagacctgcaaactaatgggccttaagacatttcccactcattcagtaaatacttactaagcatgtcccaagggccaggctctgtgctgggctctgaggccaagcgtatacactccaggatctcaggagacaggaactgtgcaatgaacatccatacgctgcaggcaacagctatcatggactgctaacttcttcccctacctaatgggcagggctggttctcactatgtgagctaacaagtggccccaaaacccttaagaggttctgacgtctaaacaatataatctagaaatctaagccaggtggattggaaagtagctaccagtcagaacttgagattc

SEQ ID NO: 52652 - DNA, 7326 bp, Homo sapiens
tgctctacagccctcacatccctctgtggaagagttccattcacctgcgcattaaagatgatctccagattactcaaagcattattggcccatctgggaagtgaatggcttagaaccctctgcagaaataaaacaagtctcagttattatattcctccaggcctgaaggaaagaatccagattgacaccaagatacccagtattgatctctaagagtggggccactaactcacttcacccacagcttccagaaatacaggggcccattaggggcttttggagagccaggtggctcccagggctgcagcaaaaggaaaaagtggggtgctcaggggcgattcggagccaggtcctagggatcagaactcatgcctgggcagtagcacaaaccaaagctactatttctacctggctgcaaatctgccctctatgataagccacatgccatatccggaccacacagtcctgtgtccataagagccagattccatcaatccctgtgtgaaaaccaacacagcttccttccctccctccctcctccaatccccaactcaaaaccacaaagaaaaaatgagagaaccccccgctgctgaaaaacccaagcttactgtttgtcttcttctgaaagtgaggttcttccacagcagcaacctcagctgaggccaacaagccatgttccctcagccagcacccccagcgtgtggctcgggagccctggaaggcagcggccagagctcacagcagggacgccgtggctggtcattaactgaaagataaagcaggaggggaaacagccatcagttattgctgcaaagccatacaccaatgaggactgctaatccagccctctcagctgagacctccaacacacagctctgcatcatgactgcttctcaatggatcatgagtcaccagctcccagcctctgggttcacccacaaagagggactcgggaggtgttccgacagcaggctaggagctacgtgttatggtcctaatcattttagttctatagatgttatcatctgggaatgaagaatgcatttctgaaaatagacctctctcaggtggccaaaaacactgaggatggaaatggcatactggaatcccagagacctacctctcttttctaagaaaatgcctccccttacatacaaagtcagcagcatttgtaaattttgcctcaagcctggagtgacttatactattccctgaacttccttacatactaattttcagtgggttatacaactgagtccttcaaatgataaaaagcaccatcggccaggcgtggtggctcaagcctataatcccagcactttgggaggccgaggcaggcggatcacgaggtcaagaaatcgagaccatcctagccaatacggtgaaaccccgtctctactaaaaatacaaaaattagctgggcatggtggcaggcacctgtagtcccagctacttgggaggctgaggcaggagaatcgctgaacctggcaggcggaggtgcagtgagccaagattgtgccactacactccagcatggcgacagagcgagactctgtctcaaaaaaaaaaaaaaaaagcaccatcaataaagcagtttcctaatctggaaaaccacaacgtgccttagatgagtgtgagtaaacaccaagaaaatgctaccgacacctggctctcaggtaatgaggacaaccctagcgctgtgtctctggaaagaaaacagcatcccatggagaaacaagtctgctatggcaggctcagggcatcaactgtgaaaccgacaaacaagctcccatggtcagcacatatgcacacttctggccttgttccacctgcacctgaacacaccgcccccctactccgttgggtgtcacaggtgcctccttggaggactgtttgccatgctagggcaagaaggtcttctcgtgaacaagggatactacattctgtgtatcccagccacccatccagcagttacccttatttaatgctggaatagtcccaagtagttatattaaagttaaagctggggagggggcagaagatgaaaaatggaagggaggacacacaggtgaaaattcggccctgctggcacttggtagccatgaactctcctagctgtgcttatgaaatggctcagtgaatcactgtggcctctagaggagtaggggcaagggtagggtgggacactgggcatgaggaacaaggagcagaaggaactaagaatgcagtagcgaggtatggatacaaaaccaagcgctagactagaaatctgtgagtccaaatgagatctccatgccaaggtcagtctctagtagaacaatacccttttatctaccacccaacaaggacttggattaaaacttctagaaaagtcaagagattggaggaaattgcagtgtctgagaagaaaagacagcctaccactatgtattccaattcattcattgacagtccaataaatcaagaaattctctgaaatagtcaagccttaggacctatttcttttccttaccatttgctcagcaaacttctagaaggacacaggcctccaaagtttcttactccaaaaagaggaagagttaaaccagcactgcatcagtttgttcaaagatgacaactggcagcacagcactggcaaccagagcagcattgtgagacacatgcttgtcatcccaaattgttttctaagtggctcaggacagagcttgcattccagagacactgaaataaataattagctagatttttctcatacagaagctgctctccaggaatcagttcgttgatttagaagctacatgaatctcttgaaatccccaaggtaacaatgaggaggggacaattaaaaaaggaaaactatcagaaagagcccaggcatgaattagccccggcttcccaactatgtgcccctggccaaggctttatgctctctaagcatcaatttcctcatggtaaaataaggatgacaatacttaccttgtatggtgttcaactgtgttctactgtggattcaacgagataatataaataatttcccaacacagtacatggcttaatttaagtgccaaagcaatgtgagttcccttctccccatttatctttcttcattccaacaatatcctctagctgagaaatggttatatcctgtccaaacaggacgttccattatttctagcaaatccattgtgggtttctggaaagataggaggggcaaagcagtaaggatgaaatcttaatagcctagtgttgcagtacccagagccaaacccaaatatagaatatcacctcccctaaaccctgagtggaaaagctcaaaggaagagaagacacacctctacacaacgttcatgagaagaagggaaggatgagttttcttggacagcattttcttggaagtaaagtgtctgggtttcaagaaaaaggttctgactccaaggactctccaggaagcacatggagaaggttgctaagaagtagcatagagccacagtagaaagttctaccgtggctttgctgggcacacttaggcaagcttcctgctccaattcctcccacccaccttggcactgacctggcctcctgcacaatttgctcccccaactcagaacacaatgatcaatactgggagcaattctgtcctaagaggagagtttggcaatgcccggccccttctgctcaggtaactgaagccaaagggacatttccacatcagttttccaagttagtgaacaaacaaaccaaaatcaaaaaaaaaaaaaaaaaagatataaaagagacagtactatgtactagatttctcaatgtttcaaatgcagtacactcacttctgccctcatacacatttccagttactggctggaaaggatcccacttcacagtcatcccagtcaataggccactctgatcctgctcctagatgaccgcaactgccacctcactggtctcccaaccatttgtcacagagcacccaaagttactcagctagaccaaatatctgaacatgcctctccccgacttaaaaccttttgccagctcctcagcacctgaacatagagtccagtgctcaccaaggtctacctggcctcccttctgtgactccagcctactctcttgccactccccacctgctaagcaatgccctggagatgtgtatacaggctcagaatatgctgcacgctctcctaccactgggacttcactggtgagttctcttgtcctaagacactttttcaagcactgctagcctggctaatgcctaggtctcaaacttaggtctccacttcttcaatgtcctttcctgatatcctcccctgcaactgacacgtgggttcagagcccttcctacgtgctccctaggaagacttggctgggaaagaggatttctaccttctgagtcagagcagagaccatttctgtttccttcatccctgttttccttagtatgcaaaagggtcctggcttgtcgtaagcacttggggatgtctgcttaattaattaagagacggataggagaaatagggtgtcagaattcaagggtggcagcactcctggacctgtggtaactcatttctcaagcctgattaaatgatttgggcaaattatccccaaagagggagctctgtgttcagcagcttctaccatatgcttgaaagtcacaaaggactgctgagcttcccaggtgactcctgggacatcctgaaaaacgtaatagaatctaagtctgtttcccataactgccagctttagctaaggactgggcagcctcccaaggccagcagggccatgcagtcgacttcccgcccgtcctcaccctcaagcccgaggcgtacgctctctgggtctcatcagtcacccaagtggatcactccttgccaaaatgtgacaatctccacacctcagccttgtttcatacagtttgggcatggcagaagtgactgctggaaacctttggccaattttttaaggaaattttaactgcaaatgccactgatattttgaagttattaatatctacagaatacaacagactgctaaattaaaaccttcccaaataagcagaaacactcatcattagctgcagagaaatgcaaattaaaaccacaatgagatatcattacatacccactaaattaaatattaaaagtgctagcatgtgtatggagacactgggactcaatacactgtggaattgtaaaatggaagagccactttggaaaatagtttgacagtttctgctaaggttatacagtactattatatgacccagtcatcccatcctaggtatttgtgaatatttatagaagccttatacagaatagccaaaaactggaaacaattagttgtcgaaaagaccatcaactggtgaataaataaaactggggctgggcacagtggctcatgcctgtaatcctagcactttgggagccagaggtgggcggatcacctgaggtcaagagtttgagatcagcctggccaacatggtgaaaccccatctctactaaaaatataaaaattagttgggcgtggcggtgggtgcctgtaatcccagctactcaggaggcaggagaattgcttgaacctgggaggcggaggttgcagtgagctgagatcgcgctaccgcactccagcctgggtgacagagtgagacacctcctcataaataaatatataaataaaactgggacacttactcagccataaaaaggaataagctactgttacatgcgacaacctggatgaatcccaaaagcctaatgctaagaaaaataagccagacacaaaaaactacatactgcatgattccatttatatgacattctggaaaaggtgaaatgaaggggacagaaatcactgcagtggtgaccagtggtcatgggtggaggggacgacagactgaaaaggagcatggcagtggtagatacacatgtgtatccatttgtcaaaactcatcatacttttgtaaaggggaagtcttactgtggtaaattacacatcaataaatctgaaccaaataaactgccttctattatcataattaacatacctcacaagtcataacttggaagacctaagaactggatagtgtaaagcctgattattgtgtgatcgccttggaagaggaatagtagataaatattcattaccacttataaattccacaaacaactgcagccttaactctgcaaggtgcccatgagccacaacaaatatttatcgagtgcctatcacatgccaggtgtgttccataccttagagattcagtggtgaacaacagaagcaaagttccttcattcatggggctcctattctaccagggatgggaaacagacaaataatagtgggttgttcaaacagtgggtggtggtggtaggattgacgaagaaaaataaagcagagtaaggggacagagagtaacggggtggaagttattcctttctgatgaagcatctttaggacaatgaactgagagagtggaccatatgctacccacaaaggggtggcttaaatgacagctgggattataaaattacttttacttttccctaaaccaaaacctggaataccagacagcagacagattcagtgatgctggcaaaagaaatacacacacacacacacacacacacacacacacacacacacacacacattcacaggaagctggctgtgaagggggaaatgatgaccctagttagcacctggcacgtgttctcccacctcttcctcaccaaaacattgtgcccttttgaacttgacatgcacatttccaggagagatgagagatgagaattataaagaagaagaaaaggggagagaggatgacactaaaaagacaagataggaggatttttccccatttggcatagccaaaagaaaaacaggaactccttcccgtgactgccctctactcttctacagcactaaatctgtctatggaaacacagtgaggaaagaaagtgcatgtatctgtacagctaccagaagctgtttgcttgtgcagtaacaaatgggctggctggtctttttccttcccgcaagaacactgccaacacatgagctttagtgctgggctcctatcgaagggtgacagtcagccctcatgcctgagccagggcaggttccagaagagggaagtctccaagcagggatcatacaagtgtcaacatctcactgggacagagaaattggcccctctgggtggaagaggagaggcttccacaaagtcatgctccatttgactgtcgtattagtagataaaatctcttggaatgttgaagactcattcccactacacccctgctgcaatcttatagacagagaagctga

SEQ ID NO: 52653 - DNA, 2867 bp, Homo sapiens
actcaggaatactttccatgcttccatactttctctgatttaggagaaagtttctcaagagaatgatactctcaacagaaacggaaagtttctcaacagaaagcctccattatttttgtggtaggtatgagaagaataggttgaaataaaaggggagatgaaaacttaaggactttaagttttgtttgaaaagaagatcataatttaagtctgggttctaaactacggccgttaaaaaaaaaagaaaaaaaaatcaagaaaattccactctttaacttgggggaaatttttgtgaggttctcttcgtgggaagcagggattcggccatggagggcaagtgacttgctgatttcagtacccagaaggtttttttaaatatgaaatttgtccactatgagatgaatgtgtatatactacccattctcttcttgaagtgtcaatgaaaagtcggattttaaaagctaatggtatcagtgctgcaaaggcaggccaattactgccagtgccagacaacttttttctttgtttatttttaatcttatttctttgcttctttttgataaaagatatacctaaagaggcacctacacataaccctggcaccgtccgccgccccaagaaccttcctgctttaccaatggcctgggagttggcaaacacgctaacaaaaaaaaaaaccaaaaaaacaaaaaaaaaaaaacaaaacgggctttcgcctcaacctcatagttcctccccgtctgcaaccaccggtcttcaccggattcacagtcggaaccgcgagcaaagacacctagtagagccggccgattcctaggtcctccggccaggaggcgctgcgggccagtctccgggggccaccgcagcccgcgcgcccagcacccccaccctcacggcagagcccagcccagccccgcggcggagctccgagttctgcgccgcccgccggggttactcccggtcattccacggcaccacctcggcccagcttccccatctgcgcccaggcagaagctgccccgagagaccagcagcaacggtctggaagatggggctgcagggaacgtgggagagggaggattgggcaccccacctccgggtctccgcaggctctcctaagtcttgtttttaaaagaaacaaaactcggccgcgcgcggtggctcacgcctataatcccagcacttggggaggccgaggccggtggatcacctgaggtcgagggttcgagaccagcctggccaacaagttgaaaccccgtctctactaaaaatacaaaaattagctggatgtggtgacgcgcctgtaatcccagctactcaggaggctgaggcaggagaatcgcttgaacccgggaggcggaggttgcagtgagcggagatcgttccattgcactccagcctgggcgacagaccgagacttaaaggaaagaaaaaaaagaaaaagaaaaggaaacaaaactcgtccgcgctctgcgccagggacaccagctcagctgagcgcacggagactgtaggcaggacctccctacccctcaggtcaaacaaagacccaaggcctctagtgagcaatagcaccacggaccgtttgggacacctccaactcgagttcccggattcacagtccgggactgtgccgctccagtcccggggagcatatagccaattcccaggtcagaacagaccagcttcttaagaaccgagtgaagactcagtgctggcatttgtctccgtaggtactggccgacctgcaaccagaagggtttctagccagctcagggccctccgaacaaagcagcgctcggtgccggacctgcagctctccccacccggcagcagcgccctcagcacgcccgggaacccccgacccctctgagcccggggtactgcgcccgggtctccacgcccagagatgctccccggtctccaccgtcgggcaagccccaagcgcagcagcgcagagtcctggggtcaccagagctcgtactaggacatcgtctccccatttaacaccgcctccggtcccatctgagttgcaagtggtggggatgtggggctccggatcaaagtccccgaaaccgagcacttcccgaagcctccttggcctcgaaacaaaacaataacgcccaagtaagtcactggagagcctcttacctgttttccacttttgtgtttgcgtctctttctcctaccccttgacaagccttccggagaaggggagaaaacagaaccggggaaaaaacaaggagcaaagcgccctgagaaccggctctgttggtgcgcggagctccccgccctgccctgccgcagcccgggagagaagggtcggctcggctctgcgggtcccggccccactcactctcgctcgcaattacggggtttttgccgggactagttccttttatagattcggctgcaccgagcgcagaggttactatcggtcaaagcctgtgctctccctcctccccgccccgttcccggcctctgtttatgtagttcagtcactcagcagaaagcacgtggagccggggcccgccccttaaacgggcgacgttcagccgcccacgacacatctagggagttggggggaggtgggtggggtgggggtggagggtacagcaggtgtcttagggtccgcggtctgcgtccccttcccccgcccgggcccgccggcctaagacgcgcgggaagcgctgggctcggggctgcgccgcagactctctagtccacgttcccggcagccaagggcaccagtggaatttgcttcctctaaatcctgctttccgcaatttttttttcctttgttagtttcctcagccggagggagggattgggggagagagagctctaggctgaatctccctcaggac

SEQ ID NO: 52654 - DNA, 1078 bp, Homo sapiens
aatttgtgaagtaggggcaacaagttgctgaacctgagagacgcctctaaatgcgctcagaggttatttcaactgtgctgtttgctagttcaggtacaacaggcaagacagaaagatgccaccgctctctccaccctcccagcgccggatcacagagcgcagaccatgcacccagccttccacacacgtcgcgatctcgccgctttaagctgctgggtaccctcggcccgcccacaagaaggcggggcggcgcggggtctgctgggagttgtagtttcgggccgggcccgagagcttcttgactcgtttccttctacccccaccgccgcacagctgcctatggactctggagttgctgtgtattgagcatggggcacagccgggggtaaaaggggagaaggctcctttaatctgcggatcggggcgccgttgatgagtgttagaggtgttggaacgcagagtaagcggcgcgcatgcgcggctgccggaggtgggggccgctcctcccgtgccactcaggggctggctgctgccttagggctgactgggctcataggtagggcctgcggtgcaagtttgtgataacactgcctgtaggctgcggttgttaaggcagagatttgaagggggtcggttgggggtgctgggtagtgtcagtaatcaagggttttaatcgctactccatcctggctttcgggaacctcccacctcctaccctttcccagtttgcagaattgcagctttccccatcccccaccccgatcgcttcgtgggaagcctttccatactgtgttgtgaaatccgttagacctcagccaaggccttttagcccgcccggaattcaagctgccccctccttgccaaatccagatcatgcgagacaacaaaaggcttgaggcacaagccctacaaggcagtgcccctgccagttctcctaaacttattgtttaccctgccctcttcttcccctgcaaattcagacagccaggcgatagattagataaatagattccatgtccttacatttgcaacaggctttcatagattcctttgctctggaaggtggcatcattataca

SEQ ID NO: 52655 - DNA, 1813 bp, Homo sapiens
acaaacttgtaacttcgatggcagttatccttaacaagattccctgcgggccctctctgaaacggaggagatgtgacattatagaactgcaaaatcttaggattcatcacctaactttaatgctgaagcgtttggagatcattcggactaaccctcatgttttacagttgaagataatgatactggagaaggactcatcccaaatcacccgtcggtggcagagcctggacaaacctatgtctcctcccttcactcgtttggggttgttgctggactgcagggactcgaagtaagtagagaggggtacagggcactggaagaagaggtattttgcaggagtctgttttttcctgctcccaaatcggtgggatgtcagcgaaggatgggtctctggaggagaggagctaacaaggtcttctgaaaaccatcactgagggtgctgtggttgggaactcgaaaccttgccagttaaaaacgtttctgcgaatgtggtttctgagggcgaggaagccctcccccgccccagcgccggccccgcccgccgggtgcccgacagtaaccccgaggcgtgcggcagccccagctgtcttcaacgtagccatctggaagacaaaaaccagaaaatgtgcgccttctcatttgaaacctggtctttaagtccggcccctccccagcaagaatgggaacatttagtttgcacccacgtggctcttccgcgggctcatgctccactcggaagcccggagctctgtccggaataggccagacagagctcccttcccatctgccttttgcaggaagaagggatgtggggcaatcggcacagctgaataggggccagctgtgggaaaagggagagcgtgacaacagatggggggaggaaggaacgaggagtaatggggcgtcagggccagggtggcagctcagagggcccaatgtcgccccgccagacccagaattagggcacgtctgcaaagctcacaccctccatttgagagccgaaccgaaaccatcacaagatgaaacctccggactcccagccgcggcgggcggcgggcagcgggcggcgcgcaagcgcgcggggccccgagtctgacctcgagttaccccgcgcggcgagtcgcagcgaagtaggtgaaaggtaactagcagacgctgctctgggcgaaggctgcggcgcgcgtgcgcggggctgggccttgggttccgttctcccccaagtttctccaagtctgcacttcgccaaactatgggtgtgtcctgggccagtgcatgaagcgatggagtggggacatcgagccgatttggaaaattcctgccacccactctctgtggagaaacgaggtctagacgcggtgcaggggagagaaccacttactgaacgccatgtgtgtgcgcggcgggcgtggtgctgggcgcccttcttttgattctcacaaccctttgaaagacctcaaaatgacccctcatggaagaggaaactgaggccctgtgagttcatttaattggcccacggtcatccaatcagttaagggcaatttccatgaagggtccgtgcttcaaagtgggtttttggccctaaaacacacaaacgacacctgtagcacatttggcaaggcactctcataggcattactcattccatccttatcagaaacctatgaggtagtaggtgctgtgactattttctttttgcagatggggaaactgagactcaaggaagttgttctggaatcccacagagaatatcagagctgaaattttctgtcctattttagagagataaaaagctgaaagctcaaagtcacgttct

SEQ ID NO: 52656 - DNA, 2693 bp, Homo sapiens
gccgggctaaagaggggaacgtttgcacagagacgtgaatgatgaacatgaggaaggagccatgagtatctcagggaagagcatctagcttcccctcctgaccacacacatacaccaatccccgccctagcagctaaattattaaaatacaaaaaatgtgtcttattctcacttctacagtaccccttggaggtttgctttaatttctgacataatttatacgtcaggaaaagactgatgctcctctagttaggttgggtcaaaatccccagtcgatgccctgtggcagttcaaaggcccctgctgagactccatggctttccaggagctcacaacattccaagggtcactttccgatctatgtcttacttccacacacctgaggtctccacgttgatcctggatctatgtcttacttccacacacctgcggtcttcaagttgacctaggtgtacaggaacccttctgaatattataaaattaatcagagaagaagggagaaggagaaactaaaataaaccaagcttgctgcatgttcagcattaatcattaggtagcttgctctccgacctgcttcaccatatttaataattgtttgttgcctactgtcctagaatcaagtaagactctgttacaagatgatagttctgttaactgctctgtagataacaacttgaacataatgaaacattaagttttccctttgagatattctttcaggtcctgtataacagtggaactactgatatcagttgctctgaaggaccccactgactcagctgagcagaggaacaccacgagcagctgactcaccaaagaaggtgatttccacattgtgatgatttcatcacccttgccctgaccaatcaattaccccaatttttaagtcccttgctcaccacaatccccctaaaaatcccagcccaggctgggctcagtggctcacgcctgtaatcccagtactttgagagaccgaggcgagcagatcatttgaggtcaggagttcaagaccagcttggccaacatggtgaaatgctgtgtctactaaaaatttgaaaattagccaggagtcatagcaggcacctgtaatcccagctactccagaggctaaggcaggagaatcacttgaacctgggaggcagaggctgcagtgagcctagattgcgccaccgcactccagcttcggttacagagtgagactctgtctcaaaacaaaaaaaaaatcccagcccagaactccttgggggtatggatttgagggcctcctcccatctcctcactcagatccctgcaatcattgaactctttctgtgctgcaaaccctgctgtctcagtataattggtctgttactgcacagtgggcatatgaatctgttggtcccataaatgattttggtgagcctaacctagagccccttgtgagcatctgcccatggctcagtgcccctttgtccttgggacagacctggagacaagtccaagcagttgcttggttccattgaactgggggctgtctccagtgccttgcttgtcaatgggacagtggtgaccttcagtgcataaatagcttgcagcaaagaaatagtttctggttttgaaagacatctttggtaagttttctctgtgcagccagcacctcttccccctttcctagtttgctggcctcctcagaggtcttttgacctttctgaggtttcgttgaccctccctggcaacaggaagggccttctttgaggggatttaccctaaattggaaggagaataaagggcactgcttgggagagatactcttgatttctgaaagttggaacttggttttggagggccttttgtttgtctttgtctagttatgtatgttatgtttatgaaaaggatttcagaaggaatttctagcaggtgacctaactcaggtgaccatccacttccccattttgcccagagaccaccacagcaagatctactcatttctcccgattttgagtagagcaagggctctggaggccaacagacgcaagtttgaatcttgccgggtcaaacttaggcactgagtgatgtgactagtgtctgtgttttgttgattgtacattgccttggctggaatgggaaacattgatttcaacatgttaattccaagcagtccattgggctgcatcctgccgagttgggaagacaagatacatcctcatcaggtcagtgcaatgggtaactttcccattaaaggcaggagtcctgtgaaaaactatgggaaaggtcaaaggcatgccaggttttctagaactccagctggttacatattatgactcattcttgtgcacatttttaaactgatgagcaaataacagcaaggaaaattcagagctcacaactgagttaaatggagttagttaaaatgtacattaaatatagagtcttttaaagctatcttttcttttctgactgctttgaatctgttgttattaagctactggtattgagatgagactcactgtttatggtattactaattcaaaactacttggagattttgtttttcttatacaattcagccagtgctacctaaaatgtaaacattgaaaactcatttaaaactgaaaaaaaggggggatcacctgaagtcgggagttcgagaccagcctggccaacatggtgaaaccctgtctctactaaaaatacaaaaaattagccaggcgtgg

SEQ ID NO: 52657 - DNA, 1280 bp, Homo sapiens
cttttttcctttcttttcttttttctttttttttttttttggtagtggggatggagtctcactctgttgcccaggcaggggtgcagtggcacaatcttggctcacagcagcctccacctcccagattcaagcaattctcctgcctcagcctcctgggtgactgggattacaggggtgcaccactactgtccactgattttgtatttttattatagagagggtttcaccacgttggccagactggtctcgaactcctgacctcaagtgacccatccgcctcagcctcccaaagtgctgagattacaggtgtgagccatcatgtccagcctacacttttttctttctaaaaatcactgcaagaattcccttgaggttgcaggaggggagagatcccggaggcagagtgcggtggactggggaagggggttgcagctctagagtgcaggctggagatgtagaggaggggaaaaattagggagctatatcagaggtagactggaaaccacctagtgattcattggaaggggtgcggtggtgagccaagaggataccggatcatggtgaggattcaagggtcaagattgcagcaggtttcactggtagatggtgtggccttctgctgggaggtggggcatttggacacagctgatgaattgattccctctagtcctcccctgatgggctcctaaccttcagggtatttgcttctcgctatccttgtcagctgcagtgggggaccacaactccttgagttctgcccagctgcagctggacaatttttgaacacttctgctcctggctgatgcctggtggcttgcggcctcccacagagagaacagattgaagcagctggcactgcagccagagatggatgcagttgagcagagagaagaggacacagaaggcaccgtgaggaactcagagctgctcaatggttatgtgaccctaggcaattcagttaccttctctgagtcttagattctctatctacactttaatgatgggggagaatacttacttcagacacgtgttttaaagatttcacataaagcggcggggtgcggcagctcacgcctgtaatcccagcacttttggaggctgaggggggtggatcacgaggtcaagagatggagaccatcctggccaacatggtgaaaccccgtctctactaaaaatacaaaaattagctgggcgtggtggcgcacccctgtagtcccagctactcgggaggctaaagcaggagaatcgcttgaacccgggaggcggaggttgcagtgagc

SEQ ID NO: 52658 - DNA, 2663 bp, Homo sapiens
cctgtaatcccagcactttgggaggccaagacgggcggatcaggaggtcaggagatcgagaccaccctggctaacatggtgaaaccccatctctactaaaaatacaaaaaattagccgggcgtggtggcgggcgcctgtagtcccagctacttgggaggctgaggcaggagaatggggtgaacctgggaggcggagcttgcagtgatccgagatcgctccactgcactccagcctgggcgacagagcgagactccatctcaaaaaaaaaaaaaaaaaaaaagatttcccataaagcatgtggaagtgattcctgaactgtaaaattctttaagggaagtgaaaggaacaaatatttttggctagatgaactgagattctccatcttacccccagctcctctcagggaagacctggggatcatagagctgatatatagaaaagtttagtccatcttgatggactcagagtaccttcgaagtgaaaataggatctgagaataggagcatgtactattagcacaataatgtcaaggttaatatttcacaacatggagaggcaaagtcattttaattggaggaatttcatgttacactggactgtgtgatcctcgtaagaaaataattcttgtacagacatttgcctaagactaatcaggaaaaaagagagcttagtcattactgccagacagaaaccaaactgaagtctggtttttaccttcccccattcccttcataaacaaagaggcccaggggaagaatcgcatgagatgaacacctcattcagacagtgcgtgatgaggtgaggagtcaaggccacatctatgtgtgtatggagcccaagcccttcctgccacaccagcaggcgagagcccccgcatctcagccctttcagcctcagctgcctctggttcccttcccccaccaaacttcctccctcctccagacacacacaagctgccaccatcaccatcaccatcaccacacacagcacccaagtgccaacccgatagctgaattggccttccctccagaaacgtgacaatactgaacaccttcccaggccctgcccgatgctggctcaggagaggggagatcctacccctgctggaggatctcccagtgaagtgaggagagagccctagaggcatgtaacactgacccctccccaaagacccagtagccctacctactccattttggaaagtacgtaactgggaagaaggaatgcacccaggaatttctaggatgtcatgcctgaggagccctgtgggagaggggttatgccagaagcatagtggggaagggagcaaaaagaggctccctttttccctgattagcgccactccattaggagcctcgagctgctcttccccctgcctggctgactgctgtcttgggtgtgtctgggaatcagccactggagacagtgagtgtggttgggggaaggccggagagtgactgctggtaaccccagctgcacatgatggtggccagctgccagctggctcctcccaaagcctcccagctggcaacggctttgaagtcagacaagccacggctcctaggctgtcccgaggggatgtaagtccaggacctacacacaaagcacctatccaatgacaagctaagtccaggcaggtcctcctaaaggcccctggctctcagaccagctgatgcaactagattagaaaaaacagaacatgcaaagcttactcactgccggctgaaacagtcggaaggacagttcacaaagccatttcccatccattatatcatttcatctgcccaaaaacccagaggagagtcctgccgaccccagccatgggcacgctgctcagcctctctgtgccttagttactgtccttgtgaaatgggcaacaataagaacacctcttctgctttctagctgtttgtcaatttctagtcacgtgtcttgggcaatgcatttaacttaattgtgcttcaattttctcacatgtcaatgaggttaaaaatagaaccaacctcatgggatagctgggaaaattaaataagttaatacacctagagcactcaaaacaatggctggatgcatacaaagtgctccataaatgctagcaactattattatttctgtggttattattaatcaggggattgttaggaggatcaacaaaacattaacagctgccatatagtgcacattgaccgtgtttctggcactgggttcagtcttttatgggaattaccttgtacataatgtttagtacacgctgactgcagcacctaattcatagagagcccttaacaaacagtagccactatccttatctccctcattccacagaggggcaaacaactcagaggcttaatgatttacccaagtccacaaagctaataagtaaggagaacttagacttgaatccaggtcttctgagaaacaggcttccatgatccttcaattctcaccttcttcttgtcccaccttccccagcctggcactcagcatttgctccacagctaaagctggcttcccttcatgagacacatctgctgctcagtcgcaaggtgcccagccttctccgcacaggtgttaagagctcctgcaggccgggcatggtggcttatgctttaatcccagcactttgggaggagatggacggatcacctgaggtcagaagttc

SEQ ID NO: 52659 - DNA, 496 bp, Homo sapiens
acctccagcattggtatgggttatataattagcaatgaagaagagacagcttccttggacaaaaaaatatgtttgtgatactgtgacaacaaagttaaatggattcctttgctctaggacttcccaagaggggaatagtttatacactgatttaagaaatggtgagttccagcaataaaatgatcatttgtaacagttgcagagagaaactgatcattctggacaactagttcaggtgtaacaaatagatgttctgtttgccttcatttctcctgcctgcccccatggaaggcatgactaatcactgcattttttgccactgactccagatataaccgtatactctttaaaacagcacttcaagaagccactactggttaatcataaatgcattaacaactttgaaacaaaaaagggctggcataaagctgcttaggataaagaaacagactagatgattcctagggtgcaacagatggagagtctaggccaaaaa

SEQ ID NO: 52660 - DNA, 520 bp, Homo sapiens
aggttcactgttagcgtgatggggttccctttatagatgacctgttcttttactttagctgcctttaatattctttttttcattttgaccttggaaaaatctggcaattatatgtcttggggatggtcttcttgggtggaatcttgcaggagttctctgaatttcctgaatttgactgtcggcctctctagcaatgttagagaagttttcttggccaacaacctgaaatatgttttccaagttgtttgctttctccccctcccctatgaatcatgccagtgattcatagatttgacctctttgcataactccatacttctaggaggttttgttcattcctttttattccttttttttttttttgtctgattgtcttctttcagagagccagtcttcaagttctgagagcctgctgttgatttattctgctgttaatagttgtgattgcattgtgaaattcttgtattgtgttattgaactctgtctggtctgttaggttcttttttttttttgagacgga

SEQ ID NO: 52661 - DNA, 1369 bp, Homo sapiens
cggagcttgcagtgagctgagatcgtaccactgcactccagcctgggcgacagagcgagactccgtctcaaaaaaaaaaaaagaaaaaacaacaacaacaaagatggagtctcactctgtcgcccaggctggagtgcaatggtgtcgtctcagctcactgcaacctctgcctgccagattcaagcaattctggtgcctcagccttccaagtagctgagattacaggcatgagccaccacactgggctaattttttgtatttagtagagacggggtttcaccatcttggtcaggctggtctcgagcccctgacctcaggtgatcctcccgccttggcctcccaaagcactgaggttacaggcgtgagctactgcgcctagactctgttttcttatccttttattagtcccgttgtgttactgtgtgcaatactcgctgcacattttagcggactttaaatgtgctgcaaccgttgagttggatctgctatactctaaagaggagagactcctctattaggttggaatcagtatttccacggtttcattagtgaggattcagacacccagatcctttctcaaaaagggagttgtactcacaaatgcctgttttatagagatccacacccatattctaggaatgccctttttccttgtgcatacagctgagtaatgggtcttctcaactttttttctgaggaatgaaagaggaaggtgtttgtatttgttctctattgctacataaaaattaccacaaatttcgtgacttaaaacgacacccatttttcagtttgcggttttgtaagtcgaaagttcaatgctttcacaatcaaacaggagacaacagtgggtctagctgcccaggaggagtgatctgggaaactaggtcattttacaccagagccatgaccttggctagccaactctttagtgctacagccacttcagtcaaggaaaagaaaaggacaggattcagagtacttttgaagagcgtgagaaagcagctgaattggggttttgctaggtttacagactttcctgagtgtttctgaaacctgacttcagatcaaaatttcatttcctatgacaggatagttgggactgtgttggattcatcagcacactgaaatttgtctaagtctccaaaaaaaaaaacaaaaaacaaaaaaaacaaaactctcctgactctttaacttttcttctgttgtctggactcccttgaggctgctcttaaactattctcttttccaaggtaccctgaaagaaaacgaatctctcagggcttcaaaatgcaaaagcagccaaaatcctccctttgcttcccatttttttctttttactttgagacaggagtctcattctgtcaccgag

SEQ ID NO: 52662 - DNA, 2363 bp, Homo sapiens
atacaactgattctttattttcataagtgtgctacagttacataagatgttaaccttagggaaagcaggtgagaggtatagaaaaactcttttgtgaattaaaatgtttcaaaataaagagtttttttaaaaaagcagcttcccggattagtaggaaagtcaaccttcccctttcttagatctaaaacatcccaggagtgcttaatttttgtccaaggcaccatcctgattgtaatttcctctccagtggagttggagtcaggcctgatggtttcacaaccatagcccagatggacaaccctctagcttgccaaatggacattcctatttgctgaacctacagggtgactgccagcaatccagatccccttccagacttgtgtcctaaaacactcaaaggaagataaaaataaaagagaattcttagaaaaagacaaggaaagaaagacaaattgaagggccaatggctaatttgggcagaactacatgtttaaggacccatgggaggcaagatgaggcctctgcctgatgttgagtctccagatctagggtgggctgagggaggggtccagaggaagaggcacagaaaactgaatggcagactcaggccttagatattcaaatcctccctaggactgtgtgtgttgccatggactccacattttacagagagctatttggggtttaaatattcttcccccttcaccactccacaaatcaactaagactcatttgggcaggagtggatctgccctgccctgccttgctaggctggaaacaaagtgctcagctcctggggagagtggggtttgtccttgctctccgctcactaagcaacctgttgatgagcttataattaccagaactgtgtgctacagaatgaatgttcttggagattgtaatgatcgaagtgaatgaacatgcttcaacatttggaaacgtgcttgagaagaataattgctttaaagtgcttcataaattgttgctaggagaccacatcaagataggcctttttacttacaacttgaagttcaactggcaggaaattcacccattcaaaatatagataagcaaatagaacaattcaaaaaaggaagaatgaaagacagaaacctgccagctattagagaaaatcttccaccaaaaacataatggagaacaagagccaagacaatgttgctggtctttatggatttgcatcttcgttcttacgggttatgtgttcttgggcaatttctttgcatgtctcatattttcagttttctcatctaaaaaaagtggagatatcaatagctcactcataggattagagatgactcacatgtggatgtatccagcacataatgctcaatatttacttatttacacacacttgttccaaagcgttttgaggtcacttacaaaattatttcctgactagtttgtgttgtcccaaaagcaggctctgacacaataaattgggtttaggtggcttatttgggaagtgattgcaggaaacttaagtgaaatagtggagaaaggaagactgaaaaggaacaaaagttcaaagttgcatcagtgagtaggaaagtccaataccaataaatcctacagggaaccctctgaagctccatggaggacatgccgcaggattatcctgccaagggatggggaagctgagggatgtgtccactgactctcatttctcaggggtcaagggttgcacctggggatcttaagttcccagtacctccacaatgtcctgagcagtctgataatttctggtagaacaggagcaaaccctctgggtgaagagtagggagccacaagcacatgaggtaggcacctgtccacgtggccaggagctgacccactcaagctgcatgtgaactcaaaggtgggccagagtgatacagggctaggtatcaacagaatctgctacacttaggattcaacgaggtaaaattagttgatgaagaaattgaggtcaaatagaaacaaatactctgtgttactgaatctttaaaaaaaaaaaagattattttgtagaaaggctggctgtaatgactgacgacattttttttctcttttctagacttctaatcaacacactagcctggaatttgagcaaggattcaatattgctgtgggcaatatatggttaggcaaatccttcatatatgtcagtcccatgttgacccaactctagggaatctggaacattcttatggcgttcaactatgtttggactttaggcctgaagcattaaatttgaagtttgggcaccaaataatagttggaaattacgttcccattctgcatggatcaggaaggaagtacatcagctactttcctatccagcagacccttccctgcttgatagc

SEQ ID NO: 52663 - DNA, 683 bp, Homo sapiens
gcctttgcactccagcttgggtgacagtgagactgtctcaaaaaaataataataataaaataaataaaaataaaaataattaaaaaaaaaagatgctcacccttagaactcagctaccaagctgtgaggaaacccaggtcatgtggcaaggctccaagtaggtattctggctgatggcaaacagttagtatcaacctccgggcatgagtaaacttcaagataactcctgcctcatagctaactgcaatcacctgacaaccctcaagcgagaaccgcttagctgagcctactctgttcccccaatggtgagagttgatgactgctgttgttttaagtcatcaagttttagtttggtttgggatacaacaacagataactggaacatgcaatagatcttattgatttctaagcctgcacctttgcttaagtcattttatacctgagagttctctttttctcccatcatcttcacttatccaaagctacgtgttaaggaccagctgaaacacaatttatgaagcctttcctaatcattgcatttgtgacctgttctttccctgtactctggacactgtatatgttcttcatgattaacaggtcattcaggagaaccccctccctgtccttaataaaataaaatgttttataatattaaaatatttaaatatagtttttttaagtac

SEQ ID NO: 52664 - DNA, 2286 bp, Homo sapiens
ccttgagtcttactgatttagcaacaggaacttggtaagtctcttttgctcgcctctttattcccagtactagtcactggaacgtagtgtgtcttcagtaagtatttttaatatgaataaattaatgtccccttattgttttttgtagactatcctgtataagaaagtttagcttagatccagtatggctttgacttgcgagcctggataactttttgccttttcctcatttctggctatttattaccatttcaaccttgggaacatttcattaggttcttggtccctttcaagcctcagtttccacatcagcaaaatggggacagtagcaacagatgcttgtttcttcccgtcttcttatcacctattccttctccaggaaaggtttcttgtgtacgctttcctctggagaaaaaaaacagccgacggggcggtaagaagccatcaggatcctgagttgtgcgtccagtagggagagggagaagtcccgcttgcctcctagatccggaagcaatccggcccctttttggcagcgagttggcccggtctttggctgcctcagaccgcgttgccctccagcctcgaggcagagagctgcctcggtgccacagctaaataagcccggcgccgcgcagcctctgacacgcgcggaagggcccggccttgttctggctgccgccgccctgccaccagcacggcgctgcactgggggcggggagtctgatgggagacgcgcgcggcgctgaggaggcggcggcccgggagagggagcgggagagggactgggcgcgggaggcgggaggcggggggacagagggaggcgccgccgccgccgccgcccgcccctttccgctggggagcagctgctgcagcaggagcagagcaggagacgcgtagccgccgtcgccgccgccgggggatgtggccggcgcctgcctctagccgcgccgcctcttgagtaccagccgccgctgcagccgccgccgccgcctagccgtgcggtgccaggccgcgccctccccgggcgcccgccggctcgcatgccgaggggctccggggcgtagctgcgcgcccggcgccgcctccgggctccttcggccccgccatgggctgctgcagctccgcctcctccgccgcgcaggtgaggggctcccgcctcccggccgcccgcccggatgcctcccgtgcgccgcgtcgcgcggcgggcgcccgccgcccgatacctctcgctgtccccagcctcccctgagcgcaccgtgcagtccaaagacccccactccgcctttccgtccgccgggtcccgccgatgcccgtgcgctggctccgcggctgccgactcaaaggcgcctctgcgcggcgcctagtgcgccctcagctcttcccggccccttccccagtcggccccctcctcccagtcacacctgagctgcccgtcccgcccgcctgcaggtagaggctgcactggcgcctcctctgccccaggtggcatccccttccctgttcttccgggcctggctcctctcttccacctccgtggagtctccccgccatccgccgcccgttttctgtgctcctcgcaggtgtacccccagcaagagctcttcacctctcccaccgaattccagtttctgcttcattagatattctgtcccttttctcttgcccgctgccccctggctgggttcagatggtttcagcgggtcccggagcccttccacggcccgctccgcagacctcgcttgctcgcttgcaccccatccccccttagtgccgtgacccgggccccgcggcctccccgcactcggaggcccctgcgggagcgccgactctgggctgggaaggagattgggcacctggtgggtgacgggagcgctacggaaactccctctttgttgccagtgtaacaggaggaagaggttccgaatttagtttttctgtgggcactggctgaatgttgtcgctgagggctgagatgcagagatttctctcagcttctaccctgcccccatccaaatttcgccaacctccttctctcggatccgagcccttaacctgggtggaaatgtttagacaactgtacgaggatcaaatgtaatagaactcgactactggccactaataactgagaggacctgtttgtaaattacctaatttagtggattagcgagtgtatttacaaatactataaaaagcaatcaggaatactgcatcaaactgtcttgtggtggtgtatgaaaaataggctctgacaacgcctgggatgtaatctcacagtttcattagcgt

SEQ ID NO: 52665 - DNA, 606 bp, Homo sapiens
gcctggctgtatttgcagctttctcatctgcatttgcagctttgccagataacttagaaggaaagtatagtggtttttgaagccactgaatcagctaccacatatgctaaagtaagtcacttctgtagactttcagcttttttttccgcctttaaggtcatcttatattgccaaggctttctctttaatcatgagaaaacttgtctatgcttgaaaacattattatgctgagaaaaattgcatgtgagccaatgtgacttcaccattatgccaacagcattcatctgttgccagtcagatatgaggtaatgcttgtcaaagaaactgcagcagaacaaactgtgctgctgacctaggactccttagatttgcccttcaacccgggaaccaaactcagatctacctccttattgatagtctaggatttttcagtttaaaataggtattccccgggaggcggagcttgcagtgagctgagatcgcaccactgcactccagcctgggcgacaaagcaagactcaaaaaaaaaaaaaaaggtattcagtaagaacaactttaagttattttaataatatgctcaaaaaacatttgaaaaagctcaacatc

SEQ ID NO: 52666 - DNA, 2323 bp, Homo sapiens
gtttttaaaataaataaatgaactagagggacatacattgtttctgaatacaaaaactagaatattgagatgtcactgttccaattaaatttaacgtgatttgagtaaaattgacaaaatgatttacaaaatgattctaagcaagaagcataaagggaggactaatatcaaaattaaaaaatagtggtcaacactgtgttgcagtttagcaataatggtcatgagttgaggtattggaggtagagtataggattccaggtctagctctgatttatcagccacatgactatggcccaggtacctaatgtcttcaaggataactttactcacctgtaaagtgtaggattaaatgagataaagagttgagcaaattgctggtgcttgggaagtactcaaaaagatgttagttgctattttgttgttgaccaaaagttaatggaaggtaatagtctacacatagaccatagtataaataagaatttattatttgttaaattagctgttctgaattaacagtattactcacactatacgtcaaaataaattccatgaaaccataaacaggtattaatagaagaaaacagtattaaatagctgaagagctttaaagtgttgagacaaggtctaaagtcaagttgatttggctgtacaaaaatttgtttccacaaaaagaaaaacaaattgggtaacaaactgaggcacaagtagtgttgtattggtgtttaacaaccagctctccaagtgaagaaaaaaaatccagatttgctacatttgctgatttccatggtgtatatactcccactatgactaattttaagctaccgatgtaaagtccatgagcagaagttaggaagaaatgttcaaggttgtctctcatgagctggtgtgagtcaatgtgagatcactgcagcacacaaatggcacagacatggcaggacatgctgagaaaccctcttaagatcacccagcccaccgaggtgaacctgtgactcccaggccagagcacattcctttttgtagttgccttccccaggaagcataagatagacataacagagcaaaaaattcactgttgtcatggagagcaccttgagggagctggacctgtagatgctctcagtagagaaatccctgtagggtggctggggcgtaccctgggagcagcctctttgggaacaaagtcatacaatgactgaagattaaggagaggggtgttgctaggcaaatgctctggaccagaacagagatgttcctctggtgccttcttttctttccgaaacctatgatattcttggcagtggcacatgtgttttactctcttccttgataaggtgcttatagtctttctctttgtttttttactatctttttgatattatttaattattgcctataatagttttcataaatgtggtcaccagaaagatgagtcatggaggcagtggtagtatatgaatgcatgaagggttgtgtctaggagtgacgactaaggtgatatcttgttgtaaaggatgtgtctgatacgggccaggcagacatgatatcgtctggaagggaggtttgaaggtatagaggcttggggtcctttgccatgtttgttgacatagggcttccatcaggggcttgcactttttattctacagtggatgactactagctggtcatttcgtaacccaggcttacatgtgccatcttaaaatgggttgttcctttgtgattgcatctgtagttctaatagaagatcagcttattcttgggtggactttgtggaaagaagcaggatttaactggctttcagagaaatgaagactttgtgaatttgggagccatattgtttaagttgtatagttatttgaagcctgtgactgagaatcattacttagggcagtacagaaagaaccaattgacatggagtgggatggggtacagagactgaggagagaagaaaatagttacttttgtgggattaacacagattaattttacactgtgagaaaagtagctgtaacagacacatagaagactggctggtgggcaagataaattgccgtaattgtatacaaaccagtgcaggtctgtctgagcttgggacctggctttacaagtgggatgtcttaatgactcattgggtgtggaggtttatagatacatgtgtttttagagcatttacttattcaagttaggcttattagcattcatttttcttggttgctttttttttttttaagaacaaatttagtatctctcatttgtagagctattaatttgatggttcactgttccccctcacttatttgagtgtgtctaatctaatcacttttga

SEQ ID NO: 52667 - DNA, 1825 bp, Homo sapiens
gacagtcattgagaagtctgatgcaagagagacatctttgtaacaggcccacaattattttttaggggaattggaggcagaatgaagtcattggcaatttatctctctgtgatctttctatcactatataaatacctaacttacaaagcagctctagttgccatttccccctttctccttaaatggatgaatgtttgtgatttagcataaagttcatgaactaagaaaagcagttgggcacagaatcctgtatctttccacgcagtgtatcttaatacctttaactgtctgttaaaataatgcttttagttttacctttccataatgaattgccatcaccaggcttagcaaatgaaacagattacttatggtaaccgtaagtagttatgcactccagatccttgacagagccttcccaaaggacaggcaatgtctttcaaaatcctattacaagattttatttgcagatgctaggaacagaaggctagagcctccatagtttattgctactcaacttcatcaggtctgctcactctattgaaaactgtggcaaaaatgatatacatcagctcttttatttttttgttaccactctgtgcaaataaaagcatattggggaatttaatgaagcagtatgtccttggagggagctttaaagattctgagtgtacaactatttgtctttaatactggaggtttctgtgtaaaactggcaggagcaaaataaagtcttcacagaccaatgtttgccacatacacacttgaatcgcacaaatgtctacgcagcggtgaccttggagatggatgcattcagtgactattatagtggcttttgaggtgtgtcagggagtagttaggacagtgaaaactacagcagagctgctggaactgtgggattgttttggagatggtcggctacctcaggaagtgaagactgtgatgttcaaacaaaaaattgggggaggggttgattactcaacaaattacccaattcaacccaaggacacattctggactctgtgcttgatgagagtacatcttagcttgctttggccttctcaggtatagtggcttttcatcagaatctgggaaaagtagcagtgatggatctgtgctgcaaaggtctaggcacacaggaagaatagcattcctttgcttgtcatgaggtataggcttcaggttatatgggattcctggcctgccagcttaactctccttactagtgacctgtaagaacacaagtatatgttgataaccttgtcagaaggatactcttgattgtgcgtaaatttctaagcttcagtactttgttagtagttaatacttttatacctcccagttgatcagaaaaaaatataagagtatgagtggtgctgtaattgtgaaatggcagcccaaatggtattggaatctataatggttggtctcttacttgtttgcaggcttaaccctgcccatataccacttctcttccctgggaccagcctccgaggctgctatttattgttactttgaatgtcggagaatgcagttctctggcttagtctgggggaatgccaaaggagcatgtagtcctttagcctgtcagaaattccaagttgcagcacctctagatatatgtgaccagatagtacttaactcattgttagtaggaatctcaccagtgacatctacatgaaaatattattccagtagcttagtaaatataaccctacacaataagtgtcagaaaacaaaggaagatatttttcctcatttctgaggctgaaaggcctcttcctaactggagccacaaaatctttagtgtgtaaaaaaatcttgaaat

SEQ ID NO: 52668 - DNA, 1649 bp, Homo sapiens
ctccgctaagtgttcctttgtccaagtgagggtgatcacttttgttcttccatactacttaagactctgtcagtattttttatatgtaactcctaccctctctccacttctcattcccagtgaaagaatttctgtgtatttagcacagacgtgacccacagcaagttgaatcgacttgttgagatgttgaatctttgtatttttctggtcaaaaatgaactatctctgtatgttatagatgaaaatttaggcattaatgaactgaatgttggtctaaggtaaaaatactaagaaaatagttggggataaagaaactacacaaccaacctgaggcttctccctttcttccctccccatacatgctgtttgttaagacaaacaaatacagcatttcaaagtagcttttgctttataaactaccatagagtaaacgtaatgaatatcaaacatgtgtccaaattctctgtttggaagcagttttactgtaatgggtactattcaagactgaaattatttaatacaaagaaacattctttattcacactgtgaacaactgtcttccaaaatacagaccacaatacaggcattcttatatgaataatacagagaattatgtcaaattattttgcagtttttcctagtcataacaaagtttccacaaaagtgcgttcttgatcatagattttagagttggaaggaacctaagagatccagactaactccttcctgccacccagagatatgaagcaatttatctaaattcatgtagctaactaatgacagagccagggagagaaccagtccttcatctcttacgccacaatgctacattcctctgggaaaaaaactgcctactcattcttggtttttaatgctagttagagtcttagggtaaggtttttttccatgactaactagtgctcttttgttttctgtgtgggtgtttgggaacaagctaactggttgtgttttttgttttgttctgttcataacaattatacagtgtaaggcaataacaaagcatttgtttaacactttaggggttaggaagaaattgttttaactccaattctccgccctcattgttgataggcagatattttaaagttgtgttttttcatctggggtttgaattccctaaattcttatgaaaattatgtgaatatatgcttactttttttctttgtttgtttttgagatggagttgcgctcttgttgctcaggctggagtgcaatggcgcgattttggcttaccacaacctccgcctcccgggttcaagcgattttcctgcctcagcctcccaagtagctgggattactggcatgcaccaccacacccgtttaactttgtatttttagtagagacggggtttctccatgttggtcagactggtctcgagctcccgacctcaggtgatcgcccgcctcggcaacccaaagtgctgggattacaggcatgagccaccatgcctggcctgtgcttacatattaagaaaagaatctgtagttttcatcaggttatcaaaggatacatagttcaacactatggttttagagggagagagaactaagcctggttgcactctatatatactaattgtaccagagggctcccttatctccagccccctcctgctcatgccctttcc

SEQ ID NO: 52669 - DNA, 1722 bp, Homo sapiens
taaattttcagaaggtaaatttatggagatttttttgtcatattttgtgaccatactactcttaagcctaaatttttaaactctttacaaaggtaacatctgtattgctagtgcatttctgcctttaggataatacttgctgtggaaaatactgcgagcaatttgaaagaggagatccagctacgtaccttagaaaatgcgggagttcaaagtcaaaatgttttgccaattctaaatagggaagtgaaaacctgtttaacagaattagatgacatgtatgcagctaggcggcaaggaagggatgattggtttttctccgtgttgtttgactaggtgtatatgtttgccatgtctaagttaaacagctggtacaaatgctcaatctgaagtctcactacttgagttggttctaggttacctgacacctgtgaagatttttacaagctttagtcattgttcatgagctgatagacaatgacctttgtaatatacttcaggtaattattaactgcttcaactatgagtttgatggcaatcaagtgggtttgccacccacttgtgtttacctgggtgtcagagttgagggcatctaagaagttagagggcacacagtccacacacaaccacccttatatctgaccccaattgcaagatcaggggtccataaaaccacctatttcctggcaaattatttgccaggaagacttgcagaactcactgaacgctactgtactcatggttatggtttatttttaggaaaggatatagagtaaaatcagccaacaaaaggagtgcatggggcagagcttccattgttgtctcccttggggagagtggagtacacggagtccgagcacagtactttctcagtgtcagtgtgtgacaatacacagagtatggctaaccaaagaagctcacctaagcctcagtgttcataatttttgttgggactccattatatggctgactcaggctccagtctccagctcctctggtcaatttgataccatgtgatcccaaactcttaatctaaacaacattgttggtctttctagggtggtcgacgcccaccctaaatagtatgtggagtggtctaccccaaccctaaaacacattgttagacttctgtgacccaagagcaccaagtaaacaaagacactcctataaggcttagaaattaactcccagaagtgaagggcaaagtccagatctctttctgagtaaggttaaattcttactacacactggggctcattaaattaaattggattttgtaaagtcgattttcaggaagaaatttaaaaatatttcattgttatagttttgttgagttataacttacatatagtaaaatttactcattcaagtgtagtttgaatttggtaactatatgcagtcatgcatcctccatcacaatccatacttcttttgctcttagaaaattaccttgtgcccctttgtagtcagtccttgcccccattcttgtccctagacaaccactgatctgcttttcgtagtatagttttgttttttctagaatgtcatatacaaataattatatattatgtagtattttgtgtctaccttttaaaacatataataatgctactgagattcatgcatgttgttaaatacatcagtggttagttccttttaaattactgagaaatattccattgtgtggctataacacagtttatctgttcactaggttttttgcca

SEQ ID NO: 52670 - DNA, 849 bp, Homo sapiens
gagcaaaactccgtctcaaaaaaaaaaaaaaaaaaaaagaaagaaagaaaaagataattagaagtaaataatttttaaaagaccaggaagctcacagccttcagttcacactgcaacagtagtaattggccattagatcatgctgttcagtgttgtcctatggggcttacctctggaacaggttaattaaataaaatcacacttcttagcttacagattttctgtcttgatgtctttgtaaagattttgagctgttttgggtatggagtctgacagtcattaactagcccccacccttcccactcccctgttgttccaagaggaccccagttctgtcaatatttgctcaccactagatgtgggccacaaccctgaaatgattcccaaagccaggccttcctggcctatgggttaagctgccccagttgcacagataagcagcttgtgcctgactggcctgcccccaaatcaggagagaatctcttagccactcgtgctgaaatgtgactttcttattagcagatattgtctaacagactgtggattcttgctcattggccaagtcaacagcctaaaggaccttactctcaaaaatttaggtaaaagttaatctttgacttagagggacaacatttttggggacagtcttcattgcatgtagtttgctctgtttgcactcatctactcttaatgtaacatcctggaaatgccaagatgttggcagattgtaactgaacaaaatttggcagtgaacttgacaatcaaaatagagccaagtgacaaaagtttgaaaagacacaaaagaaaaagatttacaagctgaagaacgctagagttagcatagagaca

SEQ ID NO: 52671 - DNA, 1294 bp, Homo sapiens
aaaggtcttttcccacgttttcgctacatccccaccccagcccttttcctccctttggaccgctgggtccgctcaagcctggctgcccctcgaaggatagtgtggggaggggcttcagatgcgtgctgggtggagggtgggctaatccgtctccagcaccagatactctttccttcccgggccctccgcaccggccggctgctggatgcccagtggcctatttcagggccggagagaccgctatcgctggaggaaaaaggatgggggaagggagtgcagcctgcagaggcactagcggtagacagacgggcggcgctccccaccctccacggctacttcccgggagcagtcagccgctgcgcgcaggcgcggtgcgctcctcagcccctcccttctgcgggccgccctttcaccctggcaaccgcggcgtgactacggcgcgcgcggtctgggcgcggacgggtggggccgggcggtgccggtgcgggctggggcagtgcagtgagtagcggtcttggggtgtgcgatctcgctgagcctcctcacacggttcgtcgtctcgggttcgagcccagtgggcttagccactcgccatggactcccagaaagtaagcgggggaggggagcccggggctaccgagacaagccgggccggcacagggtgggcggggcgcctgggcccgtgggctgtgggtgcgcggggtgggcctggccgggcgtccgggctgctgctgcggagggcaaggccgcccggccgctctctgggcgggagctaagaggcgcccacacggatgcggggaccgcgcccggtgactcgggctggcctctgctctgcgcgctgtccggggccctgactctggaggagaaacggagccatcccccttttaaaatcagccactctgcagcgctttaggccggttttcatgcctgcagactgcgagcgtgctggtgggggtgtatccctcctcagcaggtgaggaaaccgaggcacagcctttttggtgtctccctgctgacgccgaaagctggggctttctcctcgaccaagtctcgtctcagcaccacgctctttaggtcagggaccgaatctcctttgtaccgcccaccgctccccttcccatgacttttcctaagtagatcttagtgtttagtgttcgttgaatggagggaaaagacttcaattgttagggcagccttcccactctctgaccagttggtgttgctgggcacagttacttaggggtcgttgtggaatgttttatactttccgaacagttgaggaaaggttatataa

SEQ ID NO: 52672 - DNA, 937 bp, Homo sapiens
agataaaaaagggctttggctaagtggctagattataaaagcgaggaatcgccagggctcagtgaacttctggcggtgaggatgcgacaagagtcacaggaaagccgaggctggggctggaccgtgggaacgtcccagcaggaaccaagccagcctccgccgctcagcacttgacggcggcttttgcggcggttgctgtgagtgccgtaaagcggagcggctgcagcctgctgttgagtgaggtaaggtacgggaggctcaggtcggtacccggggatgggtgggcgccttcagacaggtaccgctggcgactcgggtgcccttaccgggcatcctccagcattctgggcacctgcctaccccttggtgaggaggccggccacaggctgagcgcgctccgggctgggtactcctcagtcagtccacgagcatcgcgtggtagacttccacttggccagtccttcccgcacttctgggcgtgtcatcaggtgaaatcttaatcctgggacagatgaaaggttggaggacgatcgagactcttgtagtagccgggttagggtagtgacccctgacctcaggttatccgcccgcgttggcctctcaaagtgctgagattacagccgtgagccaccgcgcccggcctgaaatttacaatttctcatttaacatgaggtaagccacatttctcttggcttcagttttgtcagatgtggaaaaaaaaaaaaaaggacctagatgatatatcagattctttatgcttttgaagatagcacgtttccagtcggtaaaaatcaagctgtgaacaaatgacaaagtgaatgatagagcagtatattagaaattgggcagatggaagcccagtagaaaaggctgtgtttgagctagactctgaggataaatagggtttgaacgattggaaaccatctctgttgggcca

SEQ ID NO: 52673 - DNA, 754 bp, Homo sapiens
ctgatgaattaacaacggatacggactttcccagggttgaatgtgttggagaaggaggttggtaagcggctcccccagcccaggtgggtggcaggacccccttaccgcccccaagtatcacacgaggcggggctctccttcctcccttgctccctttccagggcacaagagagagttggtctccggaagccagggcgcggagagtggggaggaaacggtgggagtccccgtcgggaaggggcccccgggccccgcgagacaaagggcggtgtcctataaaggcggcggcggcggcggcgcggtgtccaggcgagggcgcacacggccggcgagggcgacggctacggcgacgacgcgggctctttgcgaggaggtgcgtggactccggggggacatgggcgcaaccagggccgggctcgtgggcctgcgggtctctcgctgagccatactcacccgggagagcaggaatgcggcggagacttggtagcggccaccgagccaattcggtgggaagaccgggggactttccgcggggcaggggcggtggctcagctccgggggtgctaggccgactctctagcgtgttggcgggcccgcgtcgcttttatgcgtgatgccggggacccccttgtaccgctctcggcggcgcatctcccagagcccttcaaggagctcgcgcgtccccgagcgactcccggacacctggcagattcgaaacttcagccactagatgctttcctggactccctaaata

SEQ ID NO: 52674 - DNA, 1320 bp, Homo sapiens
atttttaacctagaggaattaaaaaaatctggctaacatttaaaaaaatccctgatgaataggaaatctttgtattgtataaggttaggtaagacctactaataaacattattattatgctagaaattgtattactgaatctattctgacagttttttcccttttgtgttgtttagattccaggattctccataggcagagtctaactgatccctgatgtagaatactatgtcaactatcctccgaaccccagttatacagttgagtgcagtctctaagagctgctgctactgttagtgtaatacagacaaaacgaagaacggaaaggagttatatgtcaggttagaataggcaggatgccaaaaaccaagtccaaatagctttgggtgttttgcctaggatcagtttctagggtagcacaatgggaattcccacatgcaaatgcaacataagaatcaaagtccactgtcacctctgggattaaagccagagaaagtcaacaaacagaaaagaccagacggttatcagatcccctggtttggtttatttgggcttcttataaagacatgttgtatcatctctgtgactgtccttcattatttataacgacacagctctctggacttgtgtgtcagtagcttcccactatggcattctttcccccaactttgtactaggtgtctagtcagagtagtgctggtctttggactttgccggaaggtggctgtggaaagatgccatatgtttgaggtatcgcagaagtggggggcaacttttcagtttcactcatttaccttttccccagctcccgatccccacccactaaacactgcagttgctctgatgccagagggagtccttgagctctttcttcatcattctgaagaatataaaaatttatctgctttctgagcctagtctttggtagatgcatatgccatggatcaggggccaatataccaatgaatatagcggtgggcctcagagattcccaatatgatgctggaggaggggatgtttggggtgcttgagcccatggttttgtggttagatatataaacagaaacaagagaaggagactgttctatggaatagtccatcatatggtggccaccttgcctgcacgacacctgttcttccacctacttaatacagaaatttttgcgtcagttcatggacttggatttgggcttctaggaggcagctattgtggatgttggggctcagaaaacaataccccaaaatgaaggcctcagaatcagccttaagagcaaaagtttttctttgatcttttcctgctgtcctgtctttcagtcccat

SEQ ID NO: 52675 - DNA, 1454 bp, Homo sapiens
acagtgtgacttgcactgtggttgctcgataaatgttaggtgaatgacatcaatttacagaaataaatccaactctgagcgtctccccttgaggaccgtgttttgttcatctgcacgctctccaggtcctgcactgcgcccaggaccaagaagacgctggacccttactaggagaaccgaggcaagagccggctggagccgcggggaacccgctcgccccgcccacccgcctagcgccggtgagcctgcggctcccgcgaagcgcggccccgccccctcggcgccagggcgcacgcgcggagctggagccggcgcggaggagcgggcggccgcggctgtgccctctcctactcctcaccgcgcgagcgcggggaaccagtagccgcggctgcttcggttgccgcggtcggtggtcgttatggattctccatgggacgagttggctctggccttctcccgcacgtccatgtttcccttttttgacatcgcgcactatctagtgtcagtgatggcggtgaaacgtcagccgggtgagtgcggggcgccgcgggccggacccctcagagtgctcctgacggcgaggaccgtctaagtcgggtgggtcgggtgggtcgggtgggcggctgagtggccgctagcccagacagttcgatggtagagttggaggggcgccaagggccggttggtctgacttactgagtgcagatggggaaacagcgtgggggaggacggaggctctagtactcctcaaaggaggcgtgacctggggtccgcgaggccgtagcctgggcgagcagggccgaccttgccaaccgcccgcagaagtcccaggactgacagaagctgccgcagcgtttcggaaccacagatatccgcgccagcccagggcttgggcggcctcctcgcggtaccgccactcgctcgcagtgtcgccactcgctcgcagtgtcgccactcgctcgcagtgtttgaaagtcatgtgaggagacagcaggtttctgactcagtctcttggagtaatagatggttgcggactactctccagttatgaaagttgtacaagcactgaaacaaaaagcctcctgtagccagaccaggattccccttcacgcagtgtcctaacaccctgcctagcatgtgagaagcgagtgcgttccccttttcacagtcacgacggacactgtacaagcaagagttacctggcgtagtttcactatctgcagaatggggatatagtcttgaaacagcattttgagttcttttagcaatgcgatcaagggacagtagttgtattttattggattttacaccagggtgcgtttgctctaatactgctttacttttgtagttattctactgtgcttttagttgtatggacctcttctttctttgaggtcagacatttctttgcctactttctttgtgttcttgctgtctttcatctgccttgccct

SEQ ID NO: 52676 - DNA, 696 bp, Homo sapiens
cttcacttgtatgattgaaaaaagaaaattccctgcaatctgatgaactatggcctgacatgagctactaaaaagatcatgtccagtaaccaaatccccagacctgagtaaggtcatgacatattttgattaaagaggagactgcattcctggaatggcataaccccacagtcacatcacagctatgtactgggagtcttcctcctaatcttattcaaagggacctgccacactgtgatggtacatattgagtgtcaacttaatgggactgaaggatacaaagtattgtttctgggtgtgtctgtgagtgtgttgccaaaggagattaacatttgagtcagtgaactgggaaaggcagacccaccctcattctggatgggcaccatctaatcagctgccagagcagctagaataaaagcaggcagaagaacgtggaaggactagattgggtgagtcttctcacttccatatttctcttgtgctgaatgcttcctgccctcaaacatcagactccaggttctccagcctttggactcttggacttataccagtggtttgctacgggctctctggctttcggccacagactgaaggctgtattatcagtgtccctacttttgaagttttgggacacggactggcttcctggctcctcagcttgcagaaagcctattgtgggacttcgccttgtgatca

SEQ ID NO: 52677 - DNA, 1519 bp, Homo sapiens
catttgaaagacagaggactagtaagattaggaccaagtctgagaagatctgagcagtaaaagcatgcaaataggagtaaggaaatataactatggggctttatattttgggtaacaaccactggaaggaagtaggtagaacgttctggctacaaagatttacagagaacattggcataaagcagtagacattgaacccattgttgtttgcattttggcagcctattctgatgactggtagaggaataaaccttcagggtcaatgactccactggccttggaaggctgtaatgctggcatagagataggagaaggtagcaggaggcttcatgtgtacacagtgggtcctcttttcctgacataataccaaatttcttctttttttccatgtgttccttggtgttcttctctcttgccattcagccatggaatgtcaatctctttatcaatctttaagtcctcattcaatgttcacttttggcactttatcaactgatttatatgcaggtttttaactcacaacatactcttaaaatatctgctatttactcgataagacaggtctctcttgaatctctctttgagaagctccactgctttcaatgtatagaataattttctcattgagactcaaaataaaagttgacaccttcttcattcctctcattgggcaacagtatttaaacatggccacttttcacataatgctatttaatttcctcccgtggcttcccaattccaaagtattattgttttcccactttacactaactctaatttgggttatgtaataattgttgatattttttgaaagattatgtgtttttatctttagcttttttcacaggcataatttccactgccttggagtcattgaagaggctgtgtaaacatgaataatgtaagaatgacctggaaagcctggcaactcgacacctttcttaataaaaggcaaagtgcaacttagaaattctaactgcagacacattcccctgaaccttgctctcaccatgcagagctgggagcataacagagggcagaaaatgaactgcctttgctctagaatcaaaggttgcttttgtgtgccttgctctcaaacatcattatctctcctgccttgacctgtccaaatgctggaatttccttgcacagacctaccattgggacctacttgacgtgaactgtctctgtttactatttgaacttaacctgaatagtattcatctagccttgttggttgctctgggctcaacctattgtcctgcatttctaagaaatggagtagatgggctttggttgaagaccaaactggtcaaaagggcttgagagtgaatctagaggaaacaaatccagacaaaactacaaacccatatgctgtgatgaacagtgtgactcctaattgataaccttacctcttaacctgcccctgccaaaccattacctatttacataagcaacagaatgatatgaccagatctgcataaattatccatttacatatatttggtcattccacacc

SEQ ID NO: 52678 - DNA, 1438 bp, Homo sapiens
gactaatatctggcatagttttcaaacataaatctattccccataaactttgactatgtgtggctccctctccagtgtaaaattttgtctgaggaaaattccaaagagtttcactgaatacaaaaaactgaagagagcaaacttaacaaataagacattttggaaaaggtcaaaggatatttaagagagcttgccaagataaacagcataggttcaaagaaaaaaaaaacttataataaattaatattttagaatccaatatatgtcactctccttgtatattagaatgaaatagacatccatttaacaagtactcaccaaggagaaattgattttgggggcccactggacattcacaccacagtttgctactgatacaatgaaaggttaatgtacccagtcacacagagccagtgaaggaggcttgaggttgcacctcattcatgaccaaatcatcttcaggcaaccaagagacttcctggaaacttctgtgagaagctgtggactttgccatcctgggccatttatccaggcatgatgtttaattagtgcacacaaagtcgacgtgaaggcttggcaactcatcctctcacccctgttgggttcattgcctcattagaaaagccctggatgactaaccagccagacaaaactaacaagcacattttccactgtccacagtagcagtagctaacatttttataaagatataaggtttacaaagtgattttatgtatgcaatactctctgttgcagagtagcagacaaagcaccagaccttggatttcaaagacccgagtctatatctcaatcgtctcaatcctgccattatgtgacgctggaaagagtgctaatgctgcctgcctcacagggagttgttgggattatctgagatagtacatgtaaacataactacccctttgcaggtgctcagtgatgattgtcgtgacccaatctactgccttcccacttctccaaccatttaatttgaagagtgaaattgcctaaattgtctgctctacatctgaagatatggtggccccagagtgaccccctatgtagatcagatggtcaatgacaatagaggttaactgagaagatcataataggagattcagacaggaaagctggaatagaagacaacgtcagctaggttgacccatcttcagataaaatcttattgccaatccagacttcctagaaattattttctagctaagcatgattcttgttagttgctgagctaatgtgattatgctgtatccatgtgaccaaaggaaacactttgaataaaacacagaagaatgttaacatttaactctacaatagaggtcttgtctcttgcctctttttcttctcccatgttttgtttcaaaactccaggactgagtcctcagctccctcaagagaagggggctggggctcacacagcaactgt

SEQ ID NO: 52679 - DNA, 634 bp, Homo sapiens
gataattttcttttagtgttcttcgctcctctaggaacaatgtcaactcctgacactaatctggctactgaaatgatggcttccagtttcattaatgatatatttatgatccttttaaaatgccagtgatctactctttttggaaaatatacacagccattaagaaagccatatttttcagctgttgctccttccattggcacctcagtttcactgcagctacagtcaccagaggatggaaagaaatttgcgggctattttgggacagtgagagaaacagatctggagagatacagaaatagagaaagcaagaggtgaaatgagaaatagcaaacagagaggtatgtgttacacagttgactacattttcccaagtattcagaaataaattagtgacattcctgaatgtgccggaatgtcttgcttcattccagctgtgttttttctgtgactcatatgttagggtcccatctcatcaactctggcatatgagtgttctgatttaacatcggtgctggcttcctgggtttttttgttttttgttttttttgttttgttttgttttagaaagacgcaattatttttgttaagaagaaagccagtctttcctgtcaatatttttatcaatgtatat

SEQ ID NO: 52680 - DNA, 1178 bp, Homo sapiens
tatgttgggccctaaggaatggacagtttaattttagcccttgcaaggaaatgggaagttctaagctcttttaatagcacaagtcttagtttggggaaggttgcttacaaaaataagaaagaaaggaaaagaggcacttagtgttatgtggaagaactctagggagtagggagtgaaaactgaagtttcggggtgaggagcaaaaatattatttctcatgcagaaattaccaaaattattttaaaagtgacaaatatgtacactgtaagtaaggactattagttatttaatattcaccaggcagaacttccaacttagaagctagttgttttaggccctagatcatttagatgaagtctcctccttccacttgcattatactgaagaggaaactggcacaaagacatgaagtgacttgcacaaggtcagaaagttcagttgtaaccgagccaggcctagaactcaggtcggccgactccagcctagtgccctttccactaccccattgcatttgattgttgagggttgtgaaatagctgctctcttctccagggcccacagctttctgagaaactctgtactcatacactagtgggcaggagtatggatttttcttagttggatttaacacgttggggagcccagggttgagcgtggtttcattcatagatccagagcccaattttgttcatgtgacattcagtaaagtgttagctcccgggtttgtagctgtacttttcttttcatctttcctgctctcatctctcattccatcatccaagggcttgggagcccttctcaaatgcccttctttggaagtttgtgtgagtctattgcaacttacaatagtgcccacaattggactctgaggatctattttgcaacgtggtgcagatttaaattggctcctttcagagatgccattttgtaatactgatgaatggctgagagggtgaaatccagtctgaaacaattactggtggttttccaatgttcttactcattcaaaatgtgccctccgtgtatcttcttggagcccaactctcttgcagactaatggctaaccttttcccattttcccagtatacatgaaatcatccttaagatgacttttaacaacacagacatttaaccatgagcaatgggacagtcctgtaaggaagggtgcaatgggtttc

SEQ ID NO: 52681 - DNA, 1930 bp, Homo sapiens
ttgcttagatcttcgccttcatatttggaggcatatactcacacacacacacatgcacacacacacgcacacacacacacacacacacatgttatgcatagatgaataatatttagtctgcaaagaaataggcctgtttcctccgtcatctgtaccttgctaacccagagacttgacatggaggaggaatgcagagagcctttcacccttaatggattccacagctgtgagtcaccctggccccaggcttctcgcctttgcctcatcccattcctgctctcacagtcagaggtctggatctccagttactgactttggaactagggggaagatgacacaggtgacataaaacaagagcccccttctatatctcagagcaaattcctgaaatatactaccaaaacataaaagtgtggacgtcaactttagacaaatccttgccttacattgatttgcagagctctttagaaatcagaccatggctttcagtatacattatataaatgtgttcttcacaacacgatgccaagaagcagatgtgctctctgagacccacagaggtcaagcaacttccccaaaatcatagctggttgattgccaggacagagacccaaaccttgtcttctgaccagccctttccagtacaccatggatgactcacccacaaatgacaaatgctttgtagtcttttaaaggaagttggggatattcaggggacatcctctaaccttgtgagaatgtatcatcatggaaggaaatcaccatccttttcatagagtagtccttggagtcagttgctgagatggcttgctatggcttttgcaggatggattttagtgatgataaaggacatggtaaatatttggtaatataacaaatgcccatggaacttgtaaacagtactatcataattgtttccatttgtcttaaccgcactcgaagcgatatctcctaactcatccccaaactaatatgtcgaaagcaacaggctctgatggagagggaaaggggtaatgctaacagtactcaggagacggcaggaactatattttctaagagtcagattccctgctatttctgttgtctcatttaatcctcactatattgttgtgcagtggatgtaattttattgttatttctatttagcatatgagaaaacagaggctttagacaggttaagtaacttgcacacttgtactacgtggtaggtgtcaaaaaactgggatgtgaacgcaggtcagttgcgctctatgcattgtgaagtgctgcctacaaacctctttgagattattgagaaatgtgatcctgacatttctggaggactagagaagtccatgaaaatatatggctaggaattactggcaacagactatgtgcaaactgacttttagtatttcctcatttaatccttgttataatcctatgaaatagtaccatctttacactttctacagtgaggaaatggaagcagagagaggttatacaacttgccaagcaagatctgaccattgttaattgataaagactggatttaaaccggtaggtgggctgcaagcccatgctcctcactgccatactgggtgctgctaggccgaggttcaaaacaacccttgttggctgaaggtttttttgagctggctcagctctggggttggtgcattctgtaaatgatcagtttgacagtgtaggtagtagagacatgctgctttaagaaagaactttgtatctctattacagagagaagatataaagatattagttcagtcttccataacacgatataacagacttttcatttttatgcgggagggatctctaactctttagtctttatcttaaggaaaatgtaaaggtattacagggttgtaagcatgacaacagatgtgattagattagctttttaaatctctcactccagatgttcagctgc

SEQ ID NO: 52682 - DNA, 1647 bp, Homo sapiens
attcattcactgaatctgtaaaattgagacttggtatgtttggctgaatcttgtgaggcacgaacactttgggccatgaagacgcacccaaggcccaaggtcagtcaggctgaccagcccccagggaaagttctcaattcatgtcttggtctttcatgatgtggaagatgacttgtactgcagcttctgcttactctgcgtcttaatcagttctgtaatgaagacccagcagcatatctgcaacttccctttaattttacaatttttgtaatgagagttcttgtgtgaaaagtgtctgtagaaacccagccagcattctgaagagtcgataaagcaacaccgtgattttctgtctctgctgtttgggcgaggtttagctctggggggggagaaatcagttatctgttgttctaagtacaagggcaagaagagctgcagtttccaaggaacttcctggtgaacccatgacatttcagagaattcctcaatacttattatttctcacttactcattcttaggacaccaagaatgggttcccatcatttgaaaggacatgatgagctggaatctcatttatcatggttgcattttgagaatttcattgagggggagtcgtcttcattttgttttgttttgtttctaaaccacatctcaagaaaattgtcaagacgcttctcagaattagaattatccagtgaactgcaagttcccctttacagacaatgaagtctaaagctactgagatatcagcctgcttcctccctttcttttcttgtcccttctcttcttttatctccttattcaaatcacacgcttccttttctacggacaggagagctggcagactgcctattggcctgttggcctcaattagccttatatcattgcaaaggaatgcatgaattctccagaaggtatgtagtatctctttctgtatgagacacttactacctgctttcataacaggtcactcagccggaatgacttcttatttacatatccaacatttttagccacttggattacatccctagatgctcatttcattttaatgatgattccaaaggtatctattaagaaatagtactccagcatactctgtagtacttgaaaactttatgcaggagagcgatcctaaaataaaaagtaacctgaaggctagcatccttggccagtaggtgattgggttattaatctgcaaattgcctgcttcagactttgtgcttatatacaaggtcccacagatggaccaggccaactgtatacaacagaggccacatgcattggcaggacttcatctcatggtatttccctgctactatttaacttcagtctcatattgggggttacatatgtgattgcaaattaatcctttctcttctgaaaatttggttttgaagaacagctgtgtctcccttctgaattccttaattatttatcctccctgatatgttaaacctttcattagtgtggtgaattgccaagagtacacagaactgcttagatcatgtagcaaaaagtataaacatttgataggtcatttgaagactacatggtgagccagaatctgtagtagtaccaaatgctatgggattgttggaggtagcttgttgttggaagttgcttgttggtttattttgctggtt

SEQ ID NO: 52683 - DNA, 1433 bp, Homo sapiens
tgcaacaacattaaagctagaacccattaggaaatcactttcatcatctcttctttttccaaatcagtgactctttttctgatctcataaccctttaatctcctttgtagcagaacaaggagattgttagtttatgtttgtgtccagtgaagttagcatccttgataatagcttcagaagacaccaagatattagagaactacatagagagatgaatttcatttctaggtggatgacttaatgccgaaggtgccctgctttccttctgcagaaccgtaacttctgttgatgttgtgcaaatcaggctcaaactttccaaaagacacacagcagaaagccttttgttgcattatttctaaaggcttgaagttttgaagggaagagattttgttttcctctctgctacacaatggagctttcagagaacctcctttaaaaggaatagctacagcctttgtgttgaagggtgtgtctgttggcagggtctgctgatgcagacagactggctggtgattaacaaaggtcattagactttggaatctggcaagcagagtcggatggtatgtcttctgtgtgtggaaggacgacttccaagaagccaaggcattctggaggtccccccactgcacccctaaatcctgatgtagaacaggatctggcccagggtcatcctgctctgaccagggctctgctgggactaacaaaccagcatatcaatcatggaataaaagaacctttggagatcttggtgaatgacatttgaggaggagaaaggtgctgcttttcagagagaaatgaaaacagttaattctttgttgggaagagaagagcataggaggagcccagcctgctcttctagcattcatttctgattgttagcctagcagactccaggagaagccatgttgtgcacggaggagaagctctgagctaaaatggctgcccctaaagctcagaggactagggcagcttagtgagtcttagagcttcagtgacgcaggagctcatatctcttgaaagtgtgataaacacattcagcagagctgtggcttgtttggctgagatgaaaggactaagcttgggggatggggagtgcacactggatgatctgcttttttctgtgaagtgttctaaatgcaggagttgtctgcaccatggaaaaatttgttttcaggtctaatggactgtgcgaaaggagaagtggggtggggcctcagtgactgctgtaatttgatccagagctgatagcaacctcttccacacaatttgggttggtgcttagacataaaagcttgtgtatctggaatattgagacttagctgaaaagagtctggtgcacagttcaatgtttattgaaaaaggataaattgctgggtgaaagaagaggaggtaaatatctgcggctcactctgcaagctcagtctgtccagaac

SEQ ID NO: 52684 - DNA, 2446 bp, Homo sapiens
agtctctacttttcttcactgaagactgaagctttctgtcttttggcagaacagtggcaacccagggatatcagcagtcactttctttcagacaccactgcggtgtgtcccaggctcgtttcctgggatcatgtgagagagacagaagggcttttcctgtgtaatcagtaacccaaggagctatctcgaaaaacaggtgacttaaaactaggctgctccttaattttttgaattgattatgcagcagtctccagtcatagagtgaagtcaccatctacagggtagggggcagacagcgggatcttttgctttgcttcctttccagataatggcccaaggctcctcaatgaccatactactttgcttttctttctcttcctttcttcctctcctttctgtgagccacaaccctagcccaactttatgtcaacttagatggggttgcagtttgaattttcttttaagatggggaagaagtgagtgaagtgtcttcagagtgggagaagcccttgttcacatttcgcaaacagtagcaacctgtgtccgggtatgttgtcctaaaatcacctccactgcatgaagaatggcagttgggcttgctctccctctaggggtagctggagaggcaggggaggaagctttgacaagaagtgctgttgagtttgggagaatgtagggagaaaaagaaagctggaggcaatgatgatggatatttattttgttggtggggcatgtgtgtgtgtgtggttctcttagcaggaggcggatgaccctgcccacttgttcctggatggattggaagcagccaaagacgccagtggcgccctggtgggccgggtggatggtgaacactgcttgcttgatggaatgttggaggatgaaacccggccggggggataccattgcagtcaatgtgacagagtcctgatgtccatgcaggggctgcgttctcatgagaggagccacctggccctggccatgtttacccgcgaggacaagtacagctgccagtattgctcgtttgtttctgctttcaggcacaagtaagtgctattggggggtcactagtggttactgggagatgatgtcatagtggaaggcactaagctaaagcagaagcttggatgagtaagaaggccccactcatggttcacacctgctgctatgttacctggagcctcagtcaccttttctgtaaaatggggctgagaacaggagattgatcggatggcgttagatttggcaaatgcaggcattttaaaaatgagaattggaggaattgctatgatttacccaaaggtaaaatggcatctgtggagagtagatgagtctcctgattcatcgttcaaacattcagccaaaatctagtcattgtttgaggaagtaaagtccatttagaaaactgagttgctaaagaggtaaaattaggactattaacccatgtgaccaaagaaacattgcttgcaatttttcaaaagatcttgaaaggtaaagaagttcatggatgccaaagagttgcttgacatacagggagattgaggagagggagcttcccattactcatcacagctttgaaagtgtaaatatggaataggtgtgtaaggctttttggggccatggaaagaggggtggttttaagaacaactttttgttgcctttctctttcagccgtgtaaaagagagataaatattcaataatgcgtttggacagtcttggataaaggtgactaagactgacatgctttttaaaacaatttttttaatgaaataaatgatggactatttgcttcttacaaaagataaagggccagttagtggttgttgaacagaagaaggaggtggtgttttcacagaggttaggatgggttgtaaacactttattattatacagagcctaatatctaatctttgtcatcagatccatacattggcataaaacttgaaatacttcaattcaagaagtatttattgaacagcatctatcacattgtctgacgcacagtggaactttaaataattgtgaataaatgaatatatcctgtcctaggtactgtacttttgggaaatataaagacacaggccatggtctgtggccaggggaatttagggtcaagggttggtttatgaaattaaaaaaaaacaaaacaaaacccactgactcatcaaaataaagcacgtctttgaaaatatcagtaaaatactatgatgtgtcaaagaagagaaatgttacatcagctttggaagagtcaggaaggttttatggcataaggagcatttgggtgaagtcttaaagtaggaaaataggacttgaatagtttggaaaggacatatgatgtagaggaaaagctgagggaggagaccatgaagctgactggggccctagctgggggttcagtttgactaatccttaagttacatgtaaaggaatagtgaaagataaggtcta

SEQ ID NO: 52685 - DNA, 1562 bp, Homo sapiens
gggaggcagccacttctaggatttgaatgctatgtctgatgtgacctagctgtgtggcctttgggctagttgcttaacctctctgagccttagtttctttatctgtaaaatttacacaagaatgttgacttgcaagtttgctgtaaatattaggcaataaaacgtatagaatgtttccaaaaaagtacctggcacacagtaggtacacggccaacagcacctaatgggagtagaacgcaaaagaacacagaatatgtggagttcatattggtgacacactgtaaccactagggggtgctcaaaaacccctttcactctgtcccgaaggaaaaatatctcatctttgtgagactaagatcccaattggacattgcctaggagataaagtcttcagtggaaggaatagaagagtttaaaccttctatgtcaaagcttccatgtcaagagatctgtgtcagatctctcttttgggtgtcttttctcgattccctcccatatggctggagtagtgagagacccagcgcagtggtgtgctacggaccaaggactgttaaattttcagctattattaaatactaaatcatagaaatttacaagtaagtaaatcattataaacaagagtaataaatactcaaaaatcattattatttcactgtgttttactgtcagctctgatgttgaggtcacgcgtattgtatctttaaggtggaaatattacataatcgtgtgctactgcgtgtcttcccagcccaatattcagtggggtcatgttggcaacttgaaattggccatggtgggagtatttgtaccacagaaattggcaaacactacaaaccagggcttgatttattgttctgttgattatctagggcaggggccaacaaactacattccgtgggccaaatttggcccactgcctgttttgtagagccaactgtgaaatcacaggctagcactgtgagctgcagagactaagctggacatccaccccgctctgctctatttcccctttgctcccagcacctgcctctctggctggtgaccgcacatcatcactgcccaggatctatgctggttgccatctacacattggagactgctactggcaactgctgagcacgatgcaagtagaatctcaggctgggagttggtaacttagcgagtcaccccacctctgatcagttgtgcaagctgagaagaatgggctctctgaaagaagaaaagggaaaactgggatctggatgtcactagggcagacagtaagattgatcttggcagtcagcatgagctgctgcccttgttgtgggcaaagtccttgtggagaagcattgctcctgtgttggaggatggcctctggctgggagaaacatggtccaacagtgactacagttggttttctgaagctctgagagcagctcaggctagcaggctgataaattgtaaccaagttagtgagtgctattagggactcccaaggagctgtgaaagtacacacaagggaactaaaacacagcctggggtgaggaggggccagagaagatgtcttgagaagaactctcagc

SEQ ID NO: 52686 - DNA, 1433 bp, Homo sapiens
cattcctctgtggttttctgttcaggcaaataccagtctcttgtgggtttgtttagcttaaagctattggctgttggggctaaggctctacatccttgatttccaagtccctgattggccaagtttaaaggaagggatgatcaagttgttggctactgggaaggacataaagcttcggagagcagttgaggaaaccctactaatttccccccgacctgaggtacaacccggcctggaaatgcattctgtcctgctcataatacaacacaagcgtgtgaggtttcagggtaggcagtgagcctgtgtcctctcacatgtctaatgcaacatcttcttggggagaatattgactcttccaagtggaaagctggcctggagcctcctaggaaaggtggcagatggagcttggttgattcatgataccatagcgtcttgtccgtttgttggattgagtatcccctgaagaactttccacacccaaacctgccctgggacattcagttcaaccctctgcagtgaactttggcccaaatagcaagagatttgcttccaccagggcttggccacagaccagccgtgtgactctgagataattctcactctgtgactcaatttcctcagctactcttgagataattttcaacaccgaaaagaacaactattgctgtagccagaaataaaaactagatattagttatgctagatattaaatgccatccaagagacagtaaatttaagggccccaaagtggtttcaggtctctgagaggaatttactccccagctttggagaagaagctaagtgctgtccttctatttctgtcctgcattcaaaaagtcataaatagttaactgtgtgagtccttttttaaaacctcccagaagcatctaaaaatagcctctgggggctcaatgcatatttcctcaggtcctcctcttaatctttcagtataggtggtgacgatttattgttactgtcacctatggatttacagaaacaaaagcagctaggctggaaggcaaagagaggaagcttttcgtgtgggaagggtctcttgggaagtggaacctagcatcaatacagggatgagacatgtcacctctcctttccttggtttccctgctagtaaaaggggagagaaggagaagtctgtctccccagggtgcagtaagaatctaccctcaagtaggaagcttcaacagacaaagcagaacctgccaacagccaaatgctattatgacaagtcaagtccacactcattacatgcctttgcagtgcatgtcacccctgccgtttcctatctccaggcccaagtggggccccttctgccagttttccagcccagtggcatgaccggaggctgactgtccatcatgagcttgatggacaagggacaggaacagccaagcccagctcagctacctgcctgttct

SEQ ID NO: 52687 - DNA, 3267 bp, Homo sapiens
aatcagctcccagacacatccagccgtaatgtgattacgccatttaccaaaatgcaaagagagatacttgaggcgtttctgattagggctgacattatccctctaatgggacaccgcattaatcaaagctgttgctatgactatggcgatggtggggaaataaccccagcttgattctgggcctacccaatgccgccaaggaagaggtcagcttttgttagggacatagcagaagaattgcttcttcctgcttaagaagggctttctattgaaatcgcaccagcagccagaaagacaggcctctgttttctttcattacactgggattttctggtgccattgctcaagatgactcgatagcattgttctgggagggactgggatgtgcgtgtgttgggggtggggatatggaggctgatttgtggggctgtcagagccttctgctctccagaactgtatcttaattgctgggtggccccctgggaatcatgtagggcatgagaacctgggggcgggggagaaggatgatctgtggaaaagcccagcttttcccatggcataaacactctgggcttctgctgctttctccattccagagccactaaagcatttggcagagacaagcctgcaccacacaccctatgacaaggcagatggaaaaacaggcgggaatgaaatggatctgaaaagcctgtgtggaaaaccccctggcctctactccgggctgtggagaacccatgaactacaggggagggcagggggagaccaggtgatgggggctggggatggggtcatcagaaccccatgatggctagatagaggtaaactgttccaaacacccaaggcagccttcgctccggtgcagatactgaaagggaaatagaggtcagtgatgtggcatagctcctccccccaggacagggatagagcagtggagaagaatcaaggaatctggttctagttcaagtcctttctggaattttctctgagcttggttttcccatcatcagagtggggtcaatgaaatctactctgctgtcctcatagaggtgtaaaggtcggtcagaccacttcctctgggggaaagtgatttgtgaactctggagcacagatattcaaacttggctgcatttgggagtcacctgaagaggtttttgaagttctgaagccggggccccagcatcagacgttctggtttcattggtcagagaggcggcagggtgtggggatttttcaaagctccaggggatcctcatgcacagcccaggttgagaatcactgctcacaagtgctgtagggagccgtgccctgcctttgagcctcatttcctatattttttaatgagaataaaaattttttaaagtaaaaggctttcatgggaataaaaggaaaaaaaaatgtatgtgaaaatgcataaagtcgtatatcctggattcctaattaatgttcagttccctcattagaggccattgcctctgtttcaggggagtctcgtccccagggtgagaccctggacagcaccttccctcttagctgtgtgactgtgttcaactgactgaataacagcaagcatttacagcacctgaagcctttcacatgcttgatctcacttaattatagcaataacctggggaggcgggcagagatcattgttaccaccctgtgaagcaacatcataggtgactcaggcagtcagtggtggagctgggattttagcccaaatttgtcttgttccgaaaccggagttctttccatgacctccttggttagaactgacctgagtcaattttgtcattcactatgtagatgtaagaggtcttggggccgtaggtctctgcatgttgtaatgaaagcaggtgtcagatagaattctgcgatacagactttcatttattagcaaagcaggtgcaaaaacaggcatgtggcttgctctgtgagctcaatgacatcctgaatcattgtccttttaggtgccccagtagatcctcgcatgaaagcttcactcagggcagaggtgacatttttcagcaccacgattcagctaaccttgtcattgagtcatgagaaaaaaattagctgataatcagtctaacaaacacagaatccattggagtcataaacttatggcactgttccatttaataaacacagggagacaagtcagaaggctaccagaacattctagcccagagttgacaaaggcctttcccaatggctatggagaggtaggaaaggggtaggatcattcactgagtcaaccaaatatgttgagcactgtactagtttcctataacaaagtaccaaaatgaagtaccacaaaatcggtggcttacaacagaaatttattttcttattctggaggctagaagtctgaaattaagatgtcagaagggccatgctccctctgacacctctagggaaggatcctttcttgcctctctcctggcttcctggtttctggtgggtgcagcaatccttcgtgttccttgactcattaatctccctctctgccatcacatcacatggctttctccctgtgtatgtctgcacctctgcatcctttcgtcttctaataaggacatcagtcatattggatttagggcctgttctaattcaatatgatcttaactaattatatcttcgaaaccctattttcaaataaggtcacattctgaggttatgcatagacataagtttggggcgacattattcaacccagtacgggcacctacattacgccaagtgctgtgaagaaagaaggtaaaggtgaataagcatttttctgcacttaggttgctcagcccccagagagggagacaagcaggttggtgcctattctgagagcagtaaacacacgttgctggtacagagcagatgaagcatctcaccccaaattaacagggtcatggaagcaaccactgagctgaattctgaaggcctggcaggaggtagccaaggcaaggaggtcagaaaggcaacagagacagagggagggacatgtaggtccaagggtctggttgtagagggagcaggatgagtgcattgaggcaagaatgtggggtctgagatggacaagtggtgatgtgtgaagccaaactgttaggcaagggcaggtcaggaagcatctcatgtgcctgtctaagaattttttctgtggaccacagggagccattggcatagtttaagcaagggaatattgtagtcatatttgcatgttagaataatcactctgaagcaatgaaaagggtaaattggaaaggttaagaa

SEQ ID NO: 52688 - DNA, 4317 bp, Homo sapiens
ccaagtatatgaaaaaacattcagcatcagtaatcatcagggaaatgcaaatcaaaactaaaatgagatatcatctcaccctggttagaattgttattatcaaaaagattaaaaataagatgagtgtggtggcttatgcctggagtctcagacacttgggaggctgaggcaggagaattacatgagtccaggaattcgagaccagcctgggcaacatagtgagaccccatctcaaaaaaagagataaaaaaaataaccaatgctgctgaggatatagagaaaagggaattcttatacactgttgattggaatgtaaattagaacagccattatggaaaacagtatggtggttcctcaaaaaactaagaactttcaaatgatccagcaaccccactgttggatatttatctaaaggaaaagaaacctgcactcccatgtttattgcagtactattcacaatggccacaatatggaatcgatctaagtgactatcgacaaatgaatggagaaagaaaatgtgatatatatatatacacaacggaatattatttggccattaaaaagaatgagttcatgtcatttgcagcaacctggatggaaccagaggttattgtgttaagtaagccaggcatagaaagacaattatagcatgatctcacttatatgtgggagctaagaagggttgagctcatagaagtagagagtagatcatagttattagaggctgggaagggtagtggggagagaaaattgggagggggtctagtgagaggttggttaatggatacaatattatagctagataggaggaataagttctagtgttctatagcactgtagggtgactacagtttataatgtatactttcaaatagagaagaggattttgaatgttcccaacacacagaaataataaatgtttcaggtgaagaatatgctaattttcataatttgataattatacattatatatgtatatcaataaatcactctgtaccccataatatatacataccccataaatatatataattattggctgacaattaaaaataaatatttatcactggatttaggacccactgaggtcatccaagatgatctcatctcaagatcctttagttaatcacatctacaaaggccctttttccaaataaggccatgttcacaggttctgagggttagaacttaggcatatcttttggaagctacaatttaattcactacacatccattaaaataatctgagtcaattttcttttcttctgtgttgcaaggagcaaagagaaacccctaccctgacatagagcccaccttcccttcgtcccagctgtacatgagcagaaaagccattgatagcttttctccacatatggttgtctgtactgcttaatcccttggctaaggggtaattaggaagggatacttaaatccagctttctctcagcaggtcaaaccatatgtctggtcagcactgcatacactggaaaaaaataagcaatttttttcttcccacaaagatgctgctcacttcccatgcagtgtgcccactcaaagggggttcctttttctgatttgcataaagacaatgtataggctaggagagactctcaccatcgacattcatgacctcaactgtgtttgccggtgcccaattagaggtgatggtataaagtacctgctaaagttgttaggaccatgcaaaatttgccagatactaaaagagatggagaagggactgataaaaagcagcggtgacacaaggaaggaaacaaggggaacagcaggtagtgagttaaagggagtttctagaagcagagggagggacggagtggatgtagaagtccaccagacttggacagccttatgtgagcacacccccatgctcaccaaccccaccacaagcagcaaggacttgtcccttttgtgataggaaggagcaatataacctaggctgagacctgttccccaaacccacctagctctgccccctgctctgtaagacattgaaggaactatcagagcccccatagtaaagacctgcttgaattttcagtgggatctaatatgcctttgctgtactgtggtatctcagccacatggagaagggcagctggatcctcactggaaccagctatgtctccagcaacagacacccacaggtaatgacccacctggaggaagacccaatcccccaagacgacctgccagagacaggccagacatccatcttgtagaagaagaggatgagaaaaagctagccatgccctccactgacactgaaatcccttaggtatgtacaaccccaaaagcccttctatatccacaattttgttgaattcttacaacaatatcccatgacaagcccattttacaaacctagaaactgagtttcacagaggtgaaggtcttgctgtgatacgggactctctactcatggtcgctttttgccattcaaagtggtggattttagttttgctttttccatgtgagacatactgggaatctgaaggctgggttgtcatctagacttcctcgtgctggaatctcaggcgtgccactttaccccaaagtggtgttttttctgtaaataaaaaagaataataattatcttccccatgatgtcactgtggaacagtcaataaaaattattaaaaagcagttgccaacaattgaagtcaaacacataataggagagtaaattgctgtgttctactagcttctgcgggaatttagatataatttttttaaaaagaccaatccctggatatctatgcaagttagagggagtcattagtaggatggaaagaaaagttgttttattttcttggtagttttattaataagaaaaagagtagatgtgtattgtttctcaaaaaaaatgagattttcaggagcatatggcaaattaatcattaagactctcttatggctcagacccacttaatatgttctctgtggtgtgtgtacaacaaacctgcaaaattacattacagtgactactaaatgattcaccagggtcacttccccagtagatttagaatctggtgcttattcatgcttttccctcggtaagctttattatctcaattgtgtttgccagtggctaattagaggtgatggtacaagctaattgctaaaatttttcagaaccatcaaagtatttattttgagagcaggggaaaattacagttccatctttggcagcagaagggatgcattgtgattttaacaaatggtgtgtctgctggtccttaagagttcagtagcagtttaatatgcaaagtgattgggtgacagtgtgaacctggagctgagatgctactattgctcccagtacccaggagtactctggctacagctgggctcatgcttcatggcttgaaattcccacagcctgggtttggtctataaagactctccccctcccccaccccttttgcagctcttaaccatagcaagattgggaaaactgtgggggtgacaaattgaatcaggctcacaagggatgtcaggggaggccagagcagataagctccaggtgataagcaaaagtgcagtctgatagggaaacggcagacttcaaagagcagaggaaaattgtttgccagtagggcacaaagacacggatcagggagaagcaatgcttagtaactcaggctggcagccctgagaagtctgacaaccaatagccaagtcatgaaccctagaatgaggtcaggaaggagactggcccctagggagaaagaaggtgaaagccagagaaagagaagaatcaaggctgggtctcaaacacaaagcctagaggcaagaaggataaggctgagtcccagagaacaggggttagataactcacttttgatcctgggagtgatgttggttctctcagaaatcaattattggccccagctcatcagacagctacaacactttcaccttcatgatactttgagatcaagcagcacccaactcacctagtattcatttccgcttctcgtgtgccttcccatcgtgtgtgtgttggggggcggggcagggggcagagggcgggtgttagtgggagctggaaaggggaattacaatttcttggcttacttgtggctagagtttgccatgcaaattaaatgcactcatgccagatctgaatgtgggaagtggagaccatttccctgttttttaccatttctccaggtaagaaaagtcatgaggatatagggctgtggcagccatgacaatgcacctctcacttctgcactgcaaggactggggttgacaacagtcttgctactgcagtctgaaatccatgctcacatttac

SEQ ID NO: 52689 - DNA, 975 bp, Homo sapiens
tagttctctgaagttccttcctgtgccctctgccctactcaccttcactcagcatccaacacaatgcgggtggatcacatgtgtccaaagataaacttagcaggctcactatacattgcatgatatgctacatactgtatgttaaactaaaatgtgcttcatttgggaacacccctttttttatgagtgtacatcaaaaatgcaaactatgaaaggcaaatatttcttacggtttcgtaattcttaacaaaaaaagaaaaagaaatgctagctatgaggtcttttggaagaattgggctattttgtttgctagaataggagacagggctttttcaataggttatttctcacgctgcatggatgcgttaagcgagggctctcaccttctagtggctgccccaagaacgatgtggttcattagtgtgttcaagccctttccttggttctggtactttacatgagtcaacaccattaccctctgagtcatttcctgtaaccctggttcacaggcttccacatcacaagttgtgttatttctgcttctcttcaacaagtgccgttgcatacacccaatccaggcccctccaaatcacttttctcctagatttctgccccaggcatcacaaattcctttccctctggtttctgagaatgatcttactatgcaccatctttagtgagctcctttcaatagtttccactcgtggttaagcactttctcccctcagctaaaccaactgtgtatccttccattgaaatgtcccactagtagaacaaactggcttttcattcatcactctcaacacatgatgttcttaaattgttttttaaaatgcatgtgtggccgggtgcggtggctcatgcctgtaatcccagcactttgggaggccgaggtgggcagatcacctgaggtcaggagttcgagaccagcctgtccaacatggcaaaaccctgtctctactaaaaatgaaaaaa

SEQ ID NO: 52690 - DNA, 1245 bp, Homo sapiens
ccctttcaataagagttcttaaaaacacttgaccaaactagggaacttggttatgcattacagatttttctctctacacaagccaccatttttaagcaaagaaggagtcagtgcaattgtcagaaaagtgtcaaccattctctccaatttatttgatataaaaaaaatctggtttaggatatgtattcagaatacagactatttgtgaggcatgatgctggtacctggtaaagacaggatttctttcttttttgtttgtttgttttttactgaaatggccattgggatgttgctcagagttttttagtgtggggaggctgagaggctctcaggctctttggaatgaacttatttttggaaaattaccaagattgatcacatagttacataagtataaagcaagtacccatttcttgtccttggcgacagcagtgaagtcaccataaatctgaatgctgatggtgcagattaagatgccaactcttttggccagtgatgtaagtacgtatctttagccaggaccatgcccttgaagagggggagaaatgttttgcccaaatgtgaatctagggcattggtatttaagtggtatttgaagagtaaatgataacaaccttgtggaatgtactttcaacaatttgggtactttcaactttttttgaagcacagtttttaaagactttttaaaagatattttacattttacattgtattccagtaaacacacgcaacaaatatcttaacagtaacaaaatttcattaagcaatacttatctttattatatgtaatgctttctgctatgtctatatattcctatttcattgtttttaatgttggtcatgtcccatttaattgatactacaacctgttaatggttcgtaatttgtagtttgtaaaacactgaactattgtgattgctttatctggatccagtggtcaaccacattctgtgaaggggagtggttaagaaatgagtaagccttccactgagcagaggagcaccttctccagtctgtggagtccaggaggtttggggccttagactttaaggtttgaggacctgtagtgatgacagcaaggtactataaaatacttcaacatagacagtgagatactacatatgtgccagttagttgcagctttaattaggagcggccaggggtggtcagctggcactttcaccttgagtccgcccaccagtgcttctgttgtctgcatctcaatcaatagtcaaagcttcacca

SEQ ID NO: 52691 - DNA, 932 bp, Homo sapiens
taatttattgttacaccttattcactcgtgcttgcttcaagggctgtaattagaacctggagagccatccaggggcacatggccataggttggccatattgctccaagagactttctaaatttttattatggacatgaattttcaaacataccccaaattagagagaatagcacaatgaaccaacatgtacccaacactcagctttgataattatcaattcatgacttttcatgatctcaccacctttccattcactcaatcatgttttagattccagagaggctttcaaaggaagtcgtggaatcttctgtggcaataacaaccattcacattcactcccggagatgtagactttcttgtggccttacagattgatcacagccatcaaaggaggaatgaacacgtttcctgaggcactctatttacatactcagggtttttcatcaatcatgtaaaagagagttacattttcaggtcaaagtgactcatcaagccagaggggtgagtcatggaagacatatgacgctttccagtttaacctgctgtgcgactatgaacacctgtaacagtcatcttgccataaatctctccctgacctttctgtgacaagagaaactgctaccaaatcctgaatcctacctgtatagtaagaaatgatttcagtgtttattgcagaaatcttctatttggagaatttaaatttaaatcaaattcagaggcaaattcatatcttactttagaagtaaagcaaatcattggaaaaagcactgggggagagagattgagatagagaaagagagagattctctttcaatcagcaattctgtgtctattagtttttcttgaaataagcaagtcttgaaagatgtatgtactgggtgtttattgcagtagattgaatattacgaaaatattgaaaattatccaaaaa

SEQ ID NO: 52692 - DNA, 1754 bp, Homo sapiens
ggctcaagcggttcacctgcctcagcctcccaagtagctgggactacaggcacgtgccaccacacccagctaattttggtatttttagtagagacggggtttcaccatgttggccaggatggtctcgatctcttgacttgtgatccgtccacctcagcctcccaaagtgctgggattacatgcatgagccaccatgctcagccattagccctttttaaaagaagaaaaaccgactggcaaatttattttattctaatccctttattctcaatatgtacatgtaataatcataacgtttacacaattgagccccttttatatgttagatattgtacatacaaatagcaaatagaccttggaaaacaagtgttattatcactttacagatgaggaaattatgtcctaacgtgtttaagtaacttgctcggggtcacaaagtgactgagccagttgtcggatgccaaggcccttgctctttccattacaatttccctcccttccctttatctttcctccacccccattcttccaatcttcctttctcttctctctcttgccctctcttctgccgagccctgtatgactaccattcctcattgccacattttctagccctttaacatgtcagaaaattgaagaagcatttgaaacctcagatatttcagtatatttaaaaatatctacaaaatcttaccccagcagctgggcccctaagaagcctggcagcaagcagtaggaaaactgtggctgtgtttttaatatcctcctcaggtttctcaggaggaatgtccagcatcccattcgaggtcctgggggagaaggtcacaaagaaaccagtacatacagagagagaggccacaggacttcatcaagctggggtctgcccaggcatgacctgggagctgggccctgtgtgaaaaatgcagcctttcctcagatggaatgtgtgcccgtcacctctgaatcaaggtttctttccctggggtcaatagttgtgtaaatagctcagggactgagcaaacagtttagcaattacttggggaatgactgagagaagaagaaaatatgtacatatcatgcattctcaatcaggtagtattgcccccaatggggtgaaaattggttcttgagaactcaaaaaaatacacagtatatctatgatattaaaatttcatagaggggttgattaagaaaaacatgtcttaaccggctccttaggagagcaatgatttttttaatggttgaaaaacatagatgaatataaagaacttaacatagcatgtgacacatagtaggtattcaatacatgagaaatgtagttgctattatagtcattagtcgttattatgattgttctacaaactcattagagaaatcatccagacccatcatagttagggcagagaaggttgtgctgtgccaagttcacagatgaagctagcttttggcggattttgcctgagctagaggtcagaactgcccagggttctagaaaacagaaagattcttgcacactgctgggatgagcagaaacatttgtgtacacagtgttaaaataaaatttaaaaagtggggcatggcatgaatgtttaggctgtgttcagactttcacaatgcctgctatcatcctctggggaaaggacatgattaaggcatgaatgtagggttggggaaaatgctgggcaacttctcatacatgctgcatgtgctctgcaggtttgtaaaaacctaaatatctaatgaatattgttttt

SEQ ID NO: 52693 - DNA, 1194 bp, Homo sapiens
gactacacgtgtgtgccaccactcctgactaatttttgtgtttttagtagagatagggtttcaccatgttggccagcctggtcttgaactcctgacctcaattgatccacccgcctcagcctcccaaagtgctgggattataggcgtgagccaccgtacccagacggagtgcatttccaaatgtgtatttattgaccacttgtatttttcatttgtttgttgtctgtccatataatttggcaagtttagggcactcaattttttttactgatttgtaatcacactctattaattgaacatagcacatggtttatctttgtctttattttaatttttcatagctggaatatttgacccacctataactggccgaatttctgcattaggaacttgctattattggagcatccattcttttcccactgatttgaaatgtcacttttatcgccttgtgtttataactctaagatcaggctgctgccattcatacaccacaaacctctttaccacggttttctataaggttgtgagtgaactggaacagtggcctttaacacatggtaaatggcatataagtgatagctcttattattgcactggctaaaagatctctccctttgtggttttgtttgtttccacttccccctttatttggtgagaacaacaagctcagtaaggctcaacctttgctctttgaatcggttcagttactcacctccctagaggcagtttagaaactccctcgagcagaataaatgaagctctcctaattctttgttttgatgtttctgcccacacccacactcctgacactgtcaaatattccagcctctgactttgggatcctaagagatgctgtgggatttaactgcggaggtgacacattcaatgtataatggtaacctgaaggggcactgatcccactgaactccttagctcccagcttaggaactgactgtggcaaatttcagttagcaagtacatctagcacagtgaaggctagcaatttctgaagtccttcagttcacttcccagcccctagttctgtgaattgcctcagggctggctcctaacagctgtgcctgggctctgagcttggaattttcttctttgaactcatacagaaaaatttacgtgttttcttttttttctgtcaatctatttccagatgctttatagctttcagaactatag

SEQ ID NO: 52694 - DNA, 2609 bp, Homo sapiens
attttctcttccttatgatttacttaacatttcttgtcctctattctttgttgtgagaatacagtatataatacatttgacatattaaatatgtgttaaccttttatgttatccataaggcttccaatcaacagtaggctgttagtagttaagttctgggggattcaaaagttatatgcacatttttaacggtgtgggagtcagcaaccttaacccatgttatttaataatacacaggtggtttaattataaacccctgtgtttataatacatagtgtaacagctctgcaaaacacaggcaagcttgtattgcaaaattacaaatataataagcatgggtccataagaaggaacccatttaaagtttttttaagtacatttaaagtttttttttgttctttgtttttttgtctgtttttttgagagagtctcgctctgtcacccagactggagtgcagtggcaggatctcggctcactgcaaactctgcctcccgggttcaagcaattctcctgcctcagcttcccaagtagctgggattacagacgcccaccatcacgcccagctaatttttgtatttttagtaaagacagggtttcaccatgttggccaagatggtcacaaacccgcctgccttggcctcccaaagtgctgggattacaggcgtgagccaccgctcccagtcataaagttgtttgtttgtttgtttttaatgtagtactctacataaagttcttccaacaagaagcccacataactgtactaatttactcagaatttattttgtgagaagatagtattctaatgctaatacaattttcagagcacgtatccaaaacatttactagacaaccagctgtaaaagtaggatatagggagagctggaaagatgatgagtcccttgtccacatcccaccccacccagagcctatcaggtctcacaagctttctggaacattccttagtcccggtacataacacaggtttttatttatctctcttggtagggctcctcaggtcagagattcaaagactcacccaacatagggcctgacatgtcaccacatcccaagaaacattggagaataaatgataataagtttattaacaaataaacacaatttcaacaaaaggccagccatgatttttagctccaaagatatgccaggaatacttgaaatatatcatgtattaaaatcagctttagctgaaaatttaaaaaaaaatgagaaaaagaatgttagggagaaaaaaactatttaaacatattgaactttagcaaaagatctatttcacaatttattgtgaacaacttttctactctctcttgcaaaactactgagaaaatcagttcaaatgagaaaaaggaatgttgagttgcgtaaacggtgttgtttaaacataaaaaatgtgaatgccagacttttgccccagtagctcgctgactgcaccataaaaccaattttccaaatcatagttaggtagctaagatgagaatggcttagttttagggctattcatgtataattggcaagactttggtgtgtacaagaattaaaattctggaagttaaaaaccacctgtacggctaagtggctttccaaatgcttgtaacaagtgtaaactcatcagaaaactatgaaaacaccatttcaatccacttttgatattattgcaggttattaagtcttgattgtttaatttttttatataacaatatcatcgtgtttcagtttgctttgttttgatggctaagttttcctttcattattaattgagctcattctctgcttcacttctgtacttcactaagtacacttcctggtgcttaaagaatgtgacaaagatctctgtcttctaacaggggaggtgacactacacaataaatataataaataaatgatgtagtgtgttagaagataagtttaaagggagggaaaagaaaagcaggctaaggggcattggagaaagctgcactgggaagtgttgggcattttgttgtatgaaataagggctcagggtagggttcattgagaaggtgggatgtgaacaaagattaggacaagttaaggagagggcagataactgcagggggggttggcatggtgcaagtggcatccccatgacagctagggaagtgaactgctcagactgcacttccaaagaaacaaaaaagcaaaacttagctgtgagaagcacaattaactggcagctctttcagggcagcccctagctactgagcatggtgacaacaccagaatctggcagttttgtccactgactgctgggatgggcagtgttgactccagacctgcccattaggttggttgaaactgtctgatctacatcacagtctgactctctctctctgcccaattgtgcttcctttctactttcctttcaaaggaaatattatcaccattgtctaaaggctttccttaccaaatcctgcttcctcccttctatttttcacaactgataaccatcaaaaaaaaaaagactactattcctaactgttttggtgtctgcttcccaggtacctgaacttacacagtgactgaacaacaaataagagatttacaaggatgagaaacttgagctgtaagcagc

SEQ ID NO: 52695 - DNA, 844 bp, Homo sapiens
cacttggctaatttttaaattttttgtagagatggcgtcttgctctgttgtccaagatagtctcaaactcggggcttcaagcaatcctcccacctcagcctcccaaagtgctgggattacagccatgagccacagcacccggccgggggggatgttttaattaagcccaaggtgatagggtacaactgggtttcaaacaacttatgtcaagcctaaaaatggacgccaagactacaactatattaaataaatttatgcagtgtgtgttctgcctacaagaagcggttaagtgaaacacttattttccttaataggatccagaatcaaactttgcctattatcgtatttctgacacaatgcctggtacagaataggtgctcagagaatatttgctggatagattgatgtctgcagaacactgtgagtcagggtagacagatgtgagtgaggaggatcagaaaatgcctaggaagtttcctaacatgaacgtgcattccatgagcctctttctctcacataccacatcaattccatcagcaaagcctgtcagctgtagtttcaataaatccagaacccaaccgcttcttaccgcttgtacagcttccaccctgatatgagtcaccactctcttctgaattattgcaataacctcctaactggcttctttccatccatccttgccttcctctagggaattctccatacagtaatcagagcaattctttcaaaacataagtcagatcatgtcacttctctgtcttaaaccctccaatgactttctatgttactcagaactaaaaccgaagcctttacaatggctctcagcccactgtcccacctcccc

SEQ ID NO: 52696 - DNA, 5621 bp, Homo sapiens
atggattagcttagggctgtagaagtagaaacggtgaaaaaaggctgacttggggatatactttggagaataaggttgacagggcttgataatgaattgcatgtggtggttgggagtgggtgagtgagggaagagagttatcagggatgaagaccagatttttggtctgagcacctgggtagactgtgaggccataaactaagatgggggaaaactgggagaggggcagtttgcaggggggaaggaggtccagagagaaatcaattgttctctttggccacattaagtttcagaggcttgttacatattcaggtgaagatattgcttaggcaattggctaactctatagctaaggggaaaggtccaggctggaggtatttcaaaacaagggccaagatgaaaccacctggtgactacgagtagatacaggaagacagagggcagaagattgcatatttaattactatgaagggagttatgtgttgtgaaaggggaaatatcaggttagtggagggagaagctggtcaaggaaagtttcttgaaaacattaaacccaagctccttgaagccactgaaaaccaagcagtgacattgtattagtgaggatgctgtcccagagaagtaatttgtaattggtcatagagctagtggcctgactagaactgtgttttatacttgaactaaatcaaatgtgccacaggcacagtataaaacagaggagaatagctgggagcgatggctcacatataatcccagcactttgggactccgaagcaggaggattacttgagcccaggagttcaagaccagccctggcaacatagggagaacatatctgtacaaaaaaataaaatatcagctgggaagcagtggtgtgtgtctgtggtcccagctactcaagaggctgaggtggaaggatctcttgagctcaggaggttgacgctgcagtgagccgtgtttgtgctacagcgctccagcgtggatgacagtcagacgctttaaaaaaataagaataatctttaaaacaaaaaacaggggaatagtggcacaccctgggacacagactctggagtcattctgtctgaggtcacattgtggatttgccatttactactggctgggttattccaggtgcattactcaacatctctgtacttcagttttctatctgtaaacggactttctactaatagctaactgcttacagactgtttatcatgattttacatacaatattcaacttccccctccaataatcaatgagtgacattattattctcattctactgctgaggatccagaagcacattcacccattccacaaatatttaccgtgcacctgcaatgtgccaggcatgttcatgggtgaacacagcaaaatctttgcctctgtgcagcttcagtctggggttcacaggaaaaggagaaagatgataaacaagagatacgtacattacagggtaattataaagggatacccgctatacaagaaaacagagcaggataacagagataggaagttgggattttaagtaaggcagccagaacagacctcaccaagaaggcaatatctgagcaaggatgttaagggagccgggggcaacctagaatccaccagtggggagagtaaggcgactcggagaaaggcgaggggctaatgcatccgttctaataactctgactttaactcggggctagatggggaaacactggacagttctaccccgaggtgtgacagaacttgaccttcattttaaatcggtccatctgtttaggctagtgagaaaaaacaatatttgaactcgggcagtccagctcaggagtctgtgctgtcgggattaaagaatcagtcgacacccccagggctgagccccgcagcaagcgccccgcgggtgctggcccccagactgtggttaccgccatcctttcacttaaactccgccccgattactcccccgctccagggctccgcatccactctgccgggtctccacgaagcgcttcccgggctacacattgcgtaacttcggcagccgggcggagcctgcacagaggcggagccgcggcagccggagagaacgccccagcaatagtcgctaggaggaagccccaggagcccttgccgcccacggaacgcgcctgcgtaatccgggtccaggccgccgacattccaggaccgccttccgccccgcccccaattctggggcggagtcctcggccgcgccggcgcaaagcgtcgccgcaccccacgcctgcgcgcttcgcccgcccggccccatccccccaggtttttcgcgtgggggagggggcacgtctcggcgagtcacgatgatggcggccaccatcctgtggtgagctagcggattccctgcttgtctcgccgaccccctcgcgccttctgcagactccgtggctggcgctcggcgcgtgaggaagcacggcggcccgagttcgcggggaaggccgcagtcgcggaggcagcggcgcggtccggggcacgggctgggggagaggccgctccgctgggcgaatgtgacaagcccccacccccaccgccttcctccccagagcgcgaggagcgcgggcgaccccggggccccgccaggccacagaccccgcccagcggccagcacccggcgcaggcccggcagccgagctgcgcggcggcaccatgcaggtcaccctgaagaccctccagcagcagaccttcaagatagacattgaccccgaggagacggtatgcgcgcgggccgggggcaggggcagccgcgtgcgggccgcggggagcgccaggagctcgtggggccgggcggcgcgctccagcgggggaagccccggagggcgcgatgagggccctgggtcctggtgccggccctggcggcgtacagcggagccgatcctcctgtcttggccgtgggctttgtggcaggagaatggggaagcagtggccggacgccgaaggcctggtggcagatggcgtggagcgcacgcccgcgggcctgggcctaggagctcgtgctagcggggccggagggggatgggaaggtccaggccgtctcagccgtagagcctggctttctggtatgggtgcacaggtgggggagggagacgtaggcgtcgccactacccctgtgtggacctggttagccgcttagttcccagagttggtaacccgagaagatgagccttaagaaaaaaaaaagtatcaggttccgtttgccgccgagaggtgagtggtggtgaaaatgaatttgcccctttcccctcagaattgtttacccttttatttgcaaatgaatcgttctgctgccttcctcccgccaccaaacccacacccttgcgtagattgcactttgaggcctctttggtgatggttttagctgttagagctcttcacagccatccaggctcaaactaaacttcagatttaacgggttttctgtgttagaaatcttggaattgtaggagttggaacgctgcagccaccctcccccgatgccccaaacagtagcagttcaagggggaaaaaagaaaaaaaaaacaaaaaacaacaactttgaatcctttctgcagttaaagccttaaacatttcagaagtccacattatacatttttctgtatttgtgactgcataaagagacactgttgaggtcagtacaactttatgccaagaatctaaaaacgctgtgagtgtaaatttactgcttatgttcggaaatacaccgccaagattgtcataatactaagtttaaaccagcagctttctgcccaactctatttttaaaagtagttgattctattttgggtggagatcaggggctttggtgttaagtagacctgagttccatttgtggttttgtaacttatttgctatgaccttgggcaaattacggttagtttcattctctgtataatagggataatacctgccttgcagagatgtgaagattagatggtatgtatttacttggtggtcagtaaatggaatcgattatttaaacaatggattcctttgagtggagatacagtgttacgttttacttatctcatttaatcttaagttttgtacatctttaattttttaagaaacagcctttttgggattttggtacaaaattatttgatttcagaatatttatatgtgggtgtatgctgtgtgattaacttcttaaaagtacaggagatctcagttatacatgagaaacttttcagtgtcctcagaagtaattgacaataccctgtggactgacagtactaatagaatctaatttctcttgaatatttctttactgcttaatgtgcattaataagttgaagggtgaaagttaaaatggagtttgtttgatgatttcagacaaactacgtaaaatgcctatttgactttggttctttgtggtaacaaatgttggtgccccagtaacttaatcggcttataatactcagttaatttcagaattattgaaagctaaagaaatattgtggctttttggtaaatatgtgtgggtgtattgaagttatgcagtgactctgtcaacagctccactgaagtatttacgttctgtaagatttgtttagcgttttaggcactttacgcatactgttaactgagagtcaatgctgtacctgtgtttgtgtgaattcttaactatttttgctgttttccagtttatttccaaggaaaagtaatatgttatacgtctggaagtatatttttgaaaagcccattgttagggagcggtttctacagctttcgctgctatttatataaatataattttgttgctgttagtataaaaaaactaatactgttagtccggggcaagaaattaaagcatttcctctgggatatatggaacgtttgcatttaatgacttgtcagtttttattttaatgactttaggaaatatttttcatgacaactgtttcaattctatgtttgtagtgggttttaattagtatgtgtttttgatacgacaccttagaattccagtaagaaaataaacaatgaaaattatgttttctagggcaacgctaagtgtcctgtttctaagttgttgtgagaacgaggtaaccaaggatattagaaatagatctaaaataagataggatcttattgagacctgtttttggtctggtcacagatttgtccttgtttaatttttacctagaaggaaccaaggaaattaagtaacttacgtagccagtatagcaactcttgtgagcttgagatgagcatgagcaaaaatggaagaaaggactgtgagataagtggaatcatgggaatgattcatttgttgaacaagtaaatgtttagtgagctttgctggcaggactggaggagtacagggacctgtagaacgtggtctggggcttctgggagccttattgacttagtcaaagctcattggctatagagtagggggatatacaaaatggaaagagcaagataatttgttttaaggtgtttttatttgccctagttttaacaaaactttcttagacttattaggcattttgtaccatttacttgactattactgtgatacattacatgaccactgcctttagtgttaatctttgcaaagatctttttgtttctacaattgtaatgcaagccttct

SEQ ID NO: 52697 - DNA, 730 bp, Homo sapiens
tttgatattagaaagaaggtgataggagcaatgatagtgaagattgaaatgaaagtagagactctagggaccaagtcttaaggagattcaagagcaagtatagtgaacagttaactaagagctggtaggaacaggagattggtcacttataattttaaacatggagtggtttttagatgacaaaattcagcctgtagggttctgtaagtatagattggattgtaagtaaagatcactgttttgttcaaggtaaggaacaatgccagaattttagacaggtcagtgcacctggttccaaagtctggttcagttattttctttgaagtgatactgttgggtcaaatccccgtgccttcccccaccaccttaaaaatgttgaagcatcttggcatgttgccctcaaaaattttgatcatttgatactttaattcttattctgagaatgtatttcttcactttcaatgccaagaattattcaaaacaatctttccagtgtgatagtctattggattaataacatgaggcatcaaaatttatgtctttggttactaatgaggttgagcttttctgtgctgtgactgtgtaattgtgaattgcctgcccaatcatttgtccaatttttttattagtgcaaaaacagttttgtgccttgtctctctctctttttttttttctttttcttgagacagtctcattctgtcacccaggctagagtgcagtggcatgatct

SEQ ID NO: 52698 - DNA, 788 bp, Homo sapiens
aacatggtgaaacccccgtctctactattagctgggcatggtggcagcgcctgtggtcccagctactcgggaggctgaggcaggagaatcgcttgaaaccaaacaacgttacaggctctgtgaaggctttcctgccccagagtcagcagaggattgttcccttgttccactccctgaacatgtggtacacaaacggtgcgtatctgaccatagctattgatttgcacatttgtttcatggacattggtctcaaaaccaaaagcaaaactggccttgtcggcagtagtgggagttcagcacctatagctgacaagggaactaaaaggaagtttgcttgaagtctttgaaggatagagggtgggagaggagggagagtctgtctcacattgtagggaggaagtaaaacaaaaagtccaagtgagtgatggaaaaagccaggacctgacatgcagcaggctgaacacctggagggcaagtgctgtctgccatgcgccggcacgcccccttgtggtgagggagagccgtgtagtttcaggggaggagcacaaagtgggaaagacccagcatccgtgggtcgctgaaaagctgtgggaaatcgggtcgctggaggaagggaagacgctggtctagagacccagctcatacttgcctctattgccgaaactacaggggaaagaggaagagaactaaacccctataacttcaggtaccaagagctctatctgcattgactcaggccattctaagaagtgtcaggcccgggcctggtggctcacgcctgtaatccc

SEQ ID NO: 52699 - DNA, 1093 bp, Homo sapiens
acatgtgtctcctcaactgtaaaatggagatggtgaggtccactcccaggatcttgtaagagtatcatgaagccctggatttctaagtatctatggtggtcatatatcatggtatgaccagaatagtcccagtgcatatctgatgtcctagtgtcctgtttagcaatttggctctaatttggataataaagtataaacttaaaaactttaaagagctgtgcgaataccaagcagtgtacattgtatttatgggtggaagctattgctgctaactgtaaactaagtcaggaaaagaaaggagttaaaatggttttcttctcacccaaaatacttaactgggcccccttttccaacccttgcattgtgggtacaagaggaaacccaaggagtttggatggctgaagggagcctcaggagcagggaaatcccagcagaggggcacactcccagttcttcctccacctgtgtccaccatcagccacccactccctcccaaccctgccctttggccactgactcattcccattcaggcctagacctgtgctcggtgcatagtctccactctccctctgccagtgaggatggcaaatattgtcctgagaatgtgaaacccacatgggcctctcagaggcccgatcctggctcggtctcctggattgctcaagcattcctcctcttcctccccctctcctccttcttctctctctctctctctcacctcttatggaagctatttggtgattgagcaatgctctggaataactaggtcaagtcaggcctgtgcagggaggaggagacaattggactgtgtaggtggctgtgtatcaagcagcagccaatacaccattaaccaaacaggaaaatctagaacatccacacactgactactcagtggcctgttacttgctgggtcaagcccaactccactcagaaattgtacctttccttaccacgtccctctaactccttcattgcatctccctccactccccagcatgaccctagtctccaatcccactggacttcccagtgcccgtgactctgtgccttttccatgctgttctttttcctggcaggtttctctccctttct

SEQ ID NO: 52700 - DNA, 777 bp, Homo sapiens
ctactaaatcttcaaagtctggtgtgggtaggagcacatttcaagcgctcagtggccacatgcaggtacctagtggctagcattgggcaggccagtgtgggtggtcctaggagccttgggagggttttaagtcaggggtcagaactaatggattctaatgattcagaacatcccagctagttcttggaatctcagaggcgaaagctctccttgtactctttggcgacgctgcctcctggcgcaggtcgctgcacacagaagggaaagcccccagctctccttcccggcggaggcttcttccctccccccagagtctggttcagaggaagccaacgcctgtgcacgtgggaaagcagcgtggctggccctgggcctggagccacctcccgggcccactctgccaggccccattctagatgccagcaggccggccccgccccttggacacggttttggttttcgggtgcaaacagtctacattcctctgaagaggcccgctccggcctcatcagagctggcgaaatcaacgagagaaacaggggacgtcggcccgcagttcccgcgagcgccacgaggggcgcacgcagatgaggctcgcagcgttggctgccgctgaagctcctggaagtcccccttgtcctcttccccgtggagaccccaggcgtaccaccacgatgttccttccaccagcctcaccctgaacccagtaaactctccctcgagcgatgacttaggttctccagggtcccaggccttgtgggaaagtgcccgcagagc

SEQ ID NO: 52701 - DNA, 526 bp, Homo sapiens
cgtctctactaaaaatgcaaaattagcctggcgtgttggtgcttgcctgtagtcccagctactctggaggccgaggcaggagaatggcttgaacccaggtggcggagggttgcagtgagcagagattgcgccacagcactgcagcctgggcgacagagcaacgtctcaaaaaaaaaaaaaaaaaaaaaagaccaagtggagaaagacatttgggcgaatgattgcaacatgctgactcatctagggtgtcgagaagaccgaagcaatttaaaaaagtatattatatcaagggcaccgtggaaaacaattaaaaagatgggctccagatgcacatgactccagagaagcagtttgactaatatttcaaccccatgcacccgttcctccccagctaagttaactggctgtggtagccttgattccagcctgaaagatttttctgtgtatgctaacattttagcagttgctttccctctgttttgactgtgaccaggggagtaaagcaccaggttcttcaaatggattt

SEQ ID NO: 52702 - DNA, 3471 bp, Homo sapiens
tgacagtccctgctgctcagcacttcctcaagacccagggtcggggtagtcctgctggggagctgccgccccagggggaagtcgtgtgcagccggccggtggccattgctgagagggggtccagcgcccaagtgggtgcacgaagagaccgcctcctgcttgatcttggggcacgtgcgcggcggcccgccgttgtagggcgccaccaccaccgggtggctgccgtcagggctgcctttgctgacgctgatgaccgacgggctgccgtactcgctgccaggggcgctcagcgacgccttcagcacgaacttgcccatcagcccgccacctggcggctgcggctgctgcggcggaatgtacaccgggtccaattctggccgcaggagctcggccacgaagccgcccgaggggctcacgtcgttgatgtccgccaggttgaagggagccgtcggagggggagcggactccctgccatagaggaggcctccgcccgtgccgcccggcgccacgcccgggtcgttcccggcccggatcggataggtgaagctgcaggtggagggcgcgctggcagggccgctgctcgacggcgacgacgaagaggaggctgacgctgacgaggacacggtggcggccactgactccggaggatgggtcagcgaattggagagaataaagtccaggtccaggagatcgttgaactcctcggtctctctccgaggtaggggcgccaggttgctaccgccgcaagccgcaccggctccgccgctctccaggtctgtggccacggtcgccgccgccaggtcataggggcggccgggaagcactgggggaagtcgcttcatgtgggagagctcctcccgccagcgctgcggggacagggcgggagagacctgtcagtggtggtcccctgttgccacccgacatactgacgtgctggcgggccacgcgcgactgcaccgcccagacatggggactggtcaggcaggaagcacccgggaacccagggcgccagcgctgcaatctcggcccactcccgggtcgaagaagaggtgatgcgtctgtattgcgggtgttatgtcctgtctgcccaattgcgtgtgagcgagcgccgcggctggtccctccccctccaggtcccgtggacgtccccggaattggcacaccgaggctctctcggtgcgctctcgccacggggccgcctacgcgctaaactcactctggcccagccagtgtctggggacgcggccacctcccgcccggtggcccgagagcgcccgccctaccgacagcgcgcccggggactggtgaagacccggcttgcgccccaggcggctccgcagtgctcgcaccacgggcatacacagctgagccaaggacacggaagctatcccgggaaggttgcggagtccgcgcggtggccgctccttaccctcgttcagtggctcttggtgaccccaaggctccgcccgcccccaccacacccacgaaaacccaccgggcgttcccggcggcccggagcgatactcacgttattcggggcacctgcttgacgcagtgtcttctcccttcccgccgggccagacgcgaacgtggagaaagatgggagcagcgcgtcgctgacagccatgtcagactcgccaggtggctgcctgcgagcaaggcagggagcggagacaggagagtcaggggcggctttcggccgtcgttccggcgcgtcccaccggtcctcacccctccctgctcccagcgccgcgcgcctcacctacctcattaatgtgggggcccagaaggtcctcggcagcccgaagcagctggggcacctgaaccccaaagtcaacgaagagaagaaacgaagccaaaacccaaaaccccaaattggccgagatccttcttctttggattaaatataacttggaagcgtcttttttaaaaagttcctttgtatacaaaagttcttagaaaagttgtaaacgcaaaaatagacaatcagcaaggcgagtaagtaggtccggtggccgggctgcgctctcttccactcagcagcgtcccccaccactgtcgcggtcgcctcgagtgctgccgtgggcgcaggggctgtggccggggcggtgggcgggcggtgccgccaggtgagactggctgccgtggcgcggagctgcgaactggtcggcggcgcaaggcgcggactccggtgagttgtgtggagcgcgcgcggccatgggcgcgggccacgggcgggtgggagggtggggggccagaggggcgggggagggtcactcggcggctcccggtgccgccgccgcccgccaccgcctctgctccccgcgcgcccgcagacacgttcgttctctctggtcgggaaactgccggccgccggcgcgcgttccttacttataacttccttcgctacagccttttcctccgccttctcccatgccccgcccctccctttcttctctccgccccccccgaggctcccttccatcgttgctatggcagctaaatcaacaaactcggcgcacgtgggggcgggggaggggaaggaggggcgcgggcggggctgggccgggccgtgacgccagccaggcagctggcgggctggagccgagctgacgccggcggcagtggtgtcggcggcggcggcggcgtccgccccagcgcggggcgcgaggaaccgggcgcaggttcggtcgctgcgcgaccagggccgtactcaccgccattgtcggctccctgggttcgaagcccgcgaagactggtggggtcagcgggcggcacggtcacgcgtccgcacccctgctagcatacgcgcttgccgcgctgtctgcgcgctggagaagagcgcgattatccgcgtgactcatccagccctccatctccccctccctctctgcgctcgcaggagtccgctctcgtcgctcagcgccagtgccggtggcggtgccggcgctcggcctgacctcgcacggttcctcgcgggcccttctgctgaggggtggggggcgctaggggtgtggagaggaggcagtgcccagcactgtgcagcgtgaactgggagcctcaagagaaggccagaggagtgttccgccgggaacaggcggaaagaggcacgaatggggagttatggttttgatactttaaatagcgagaaagggagtgaaagggctcaagatttactcagaggcataagggagagaagagggactgtgaggcgcggagacagttttcaaccagccatctcgaagccctttcctttttttttctttcttttttttttttttgtgagacagagtctcgctgtgtcgcccaagctggaatgcagtggcacgatctcagctcagtgcaacctccgcctcctgcgtccaagcgattctcctgcgtcagcctcccgagtagcggggattacaggcgtgcgccacgacgccggctaatttttgtatttttcgtggagacggggtttcaccatgttgg

SEQ ID NO: 52703 - DNA, 1406 bp, Homo sapiens
attttattaatttttagagtcaaggtctcactccattgcctaggctggagtgcagtggcatgatcatagctcactgcaacctcaaatacctaggctcaagtgatcctcccctttcagcttcctgagcaactaggacttcaggaagccaccattaagcctggctactttcaaaaagttttttgtagagatggggtctcgcagtgttgctcaggctggtctcaaactcctggcctcaagcaatccttctacctcagcctcccaaagtgctgagatcacaggcgtgattcactgtgcctggcctaaagtttattaattctatcacacagaggaggaaatgaaagaactggagatgaaattgatcaaattagtaatctccagccagtcctgaggagatttagcactgggcagtgttcgagttggatttaagaagaggcagagtggtaccaccagtttgccccacgtgggtaagggagagattttctggcaagactgaagacattctgataccctcctctcccctaacatacacttactcaggtgtaagagtaattcaggcataagagtcagcaaaaacactttctcaagacgctgtctagctgtctcaggatcttgtcctgctcagggttgagcacaaggagaacacaatccttgctggccgggccctgttctggaatgactgagctgtccagcatggccagtgtgtaaatgtcaagtaaacaccaaattcaagtgcaatctaactattgtgctgggactgtttgttttagatataatagtcagcaggaagggagaaggggagggagggggaaagtatatatcacttcacaaggcaaaattatgactatcgtgagccctcccttggtcaacttgaatgtcaagaaaccaatatcaaataaataaagagcctgcactccatgctgcaaaaataagcatgtccatttgcttgaaaaaaagattttttcagatgagggaacattttccagtcaatcaccctgcagcaaagtcatcctgttgaatttgtgactcacagcctctctgtgtcaatagacagagtcagcccagagttatgacttcacagaaagatgaagcaaaagctgggagacgaggcaggaccagctttaaaagaaggctgtaagctcagacaacaagtagcaaaagaaacactgaccactcacaggctgggtaattgcattcgttgcttctttttatttcttgctcgtctcctagaaaagaacaactctgactttgacttcatcctttcattgcattaacattgacgggggacatggtcattgtcagggctatgactttgcctggtgctccatatacattgttatctcattctgttctcatagcaattctataaggtaggtggtatttgtattattttattttatttccttttt

SEQ ID NO: 52704 - DNA, 2819 bp, Homo sapiens
taaccattgcgtatagatgaggaaactgagttctagagactacacagagctagtaagtgacacagtaagaattacagtcttaccgtgaattatgaatccaagtttaatccatgctttttccagtacaccatgcctttacccccctccctgacaaaaaatagctatgaaacattcagcaaccctgaaattgttgatttactgtagtgctccctcctaggataatgcaccttatagatctgttttccaggcaccatttgagcatctggcaaatgggaggatctttcctcatggcagctggaaaccagcaagtaaaacatttaccaggttattgacataatgagtctgggtgtttgtttaggtatcaggcagttattgattgctttttaacactgttttgaaatgaaaataaatgtgagaataagcccctaaatggccctaatagaatgtcaagactaatcaatacttgagtatgataaatttataatcctgggagggactgctgaggggaaccattagttctgtctgactgcataatggggttgggggcttacaggatgggaaggcttttaggaggcctctgaggaggaaccagaggagggggcaagggcaggggttagtcagtagatgaagaatcaggaacttcttgcggatggtctcatgtcagttacaggactctttgttgttgatacccaagggcaacagcatattttagccactttaaatgaggttgccttctaagaaaggaactatcaactaggatgaaaccagagatatgcaaatctctggtaaagacagaacagctgactagatcaaggccctccacaattttagcatttctaaagaaagattgcgtccatctaatggaggctggagtcattcctggaattttggaaaataggaactattattgatggggacttggagtctttctctattaaagtactaatttttagatcacatgaccataacataggacccttcaagactgtaatgtggcttctcaagggccggtctgtctacagggagaacttctcccagtcctgcccatgggggccaggagcctgctgaagctgggaacctgtgggagcagttagtgggcaagaaaagctcgggaggacgaagtgagcatcagctgtaaggaggaaggaggaaggaaaccagactgacaactgggtttgatcaaccaaagatcacagtgaccttgttaagaactgttttgggagtaggatgggcctgatgccagttttgaagctgtgcagggagagctaaggccataactggaggggaagtcgggtgaaaggattacttattttttaatttttcagtgtgagaaacctgggcatgtttggatgttgacaggaagggctggtggaaagagttgattgcagacaccttagggagaggagttgttggttagtgtgatgctcctgggcagatggatggggaggtggcagacttaggtgaaaggaagaagggaggcaggcccagaagtgtggatgaggaacactgggactgtaggatggggtcttctttgctcagggtgaatgagcctgtttggggtgcatgaggctgttagtttgaggaaggggtggaggggcttagaacccattgttgagagaaatgtgaggaagtgtctccaacaggggagagaaaaaggcttcctaaagtacgtttcaggcccagcatgagccccctctccccagttcatctgtaagggccagcctctgccaagaaacacaatgtctctctgtcatcaatgatgcaaccgtgagtaagaggcactgaatcctgtttccgacataaaaatgaaagtgatataagacacagagccattgtgaaatctagacaaatctttaactatttgtcatttagcacattgctttgctcaccctgtgtcttcgttttcccaaaggtggacaactcactgagggccctcagcccttcctcagctcacaagcgggacctcaggtctataaacagtttcaggaggaaagggaagcagaatgaggaaacgaggctccaatgccaagcattggggagcccggaaagaccacatttccaagaattccaggcccggaagtaggagctggtgagcgcttctttaagtcaacccattaggtatcaataagatgaacaggacaattactctggggtcagttactccccttccagaaggaatcttcactgtggcttactcattgctagcaggaatcctttaaatgccaagcttcctagtgcgtttcattaggattttaatgttcacaaacacaattccaggatcatctcctgggcataattaacagggccaattggatgagccacttttcttggaggtagcttgagactggaatagggttcttatgcctagagatgtagaggaagaactttttttgaactagaaactcccttctctaacaggtggatttgtgaccttccccttcccaagacttgctttgggcttgggtagaaggagagcagattcccagagatggtcctggtttatggaaaaggcatgagcacagtccaggaatggatactgttggtgacagcaaattagaaatcctagctggagggtgagctgtggtagcaagaggaagttgtacattttatttagactggatttgtgacatgctggcagcatgtgaaaaataacagataacgtagatttgtacatgccatctcgggggctggcattgcagtggagaagggagggccaaaatgccaggatcccagttccaccagttttgacagtgtaacttttggctattgtttctctcatctgggaaaggtcataataataccctgagggtcactccaaa

SEQ ID NO: 52705 - DNA, 1117 bp, Homo sapiens
cagtctgttaaccaggtccttgttattctagataattcttattgattccaaaattgttttttctgagagttccttcagaacgaggtcatacgagctttacatttctctttctcccatatcacacggggctcgctaagtagtaggcacacaattaaactttgcaaaaggactgaaagtttgacacatgattctttcttctccaggagaaagggttactgagagatcatattcacaaatcaacgtgcaatagtgaaaaaagatggcaacactgaagaaccttactgaataacccagtatggaccacgtattgtaataggcacttaatttctctcaatcctttcgatatctccttgaaataggtactattagccctcaatttacagataagaaaactgaggctgaggtttacacagccagtgagtggggcagacaggcttttaatctattagtatatctgtctgactccacaacctctgacctttccacggggcaggagaggcgccagatgaatgactcaggaaatagggtcataggtttccctctctgaggcaagtgtactttcatgccaggcagctaatcaaaggtccctgttttatttattattgtctggctatcttctgttctgcattccatgagccagtaagctcgtaaagggtaaggcattttctttctttcttctaataacagtacattggcacctctctgcccaattagaggattgagttctattccttagtctacatgctgatgtctgtgcctgaccaacataatccctcccctgaacaatataaaacagaccaggggctgggcgccatggctcaagcctgtaatcccagcactttagaagcccaaggtgggcctgattgcttaagcccaggagttcgggacaacctgggcaacgtggtgaaaccccatctctacaaataatataaaaattacccaggcatggtggcacacacctgtagtcccagctactcaggagactgaggtcagaggatctcttgatcctgagaggtggaggctgcaatgagccgtgattgtaccactgcactccagcctgggtgacagagtccaaccccgtgtcaaaaaaaaataaaataaagcaaaaaacaaaaag

SEQ ID NO: 52706 - DNA, 1534 bp, Homo sapiens
caggatagttagagatgtaaataaatgaatttaccttgtctaaaggatctggagatagaattaaggtgagaggagtaatttacaggtgaataattacttggaaacctcagcagagagactgctggcgttctctaattatttctcttctcccaattttctcttctttgaactgccagcacgggggtgtacaggggtggcatggggggctggagatgttattctggatttccccttgtgattgtgaaattccttctggggagggccttgccaggatgtagggttgtgacttgcatggcactttcacaccatgacttcattcagatcctctgtgagcgctctaggtggatggtatggctagccacatttatggatggagaaattgaggttcctatatgtgaagtcattccccacaagccacaccacggatcagttgcgtattgtggctcagacccaggtttctgacactccccccgccctacagctgcctatagggcttcctcacctgccaggctgccttctcccttccccaggcagacccttgacccctcccaaacaccccaggccgcgtggagccaaaacgttctttggcgaacaacctgctccgtcttccctgtaagctagtggccgcgccccttccttacgcagctcattttccattttaagatttcctgtttgaactaaagggcaaagatctcagcagtatcagcctggagccgggcttctgtgtgtataaaggggagccctggtccctgccctctgtttgtccactggccttatcgacggagcccaagtcccaagttcagaggcttcagttccttcccgatttgctgggtaaagtccggcccttccgtgcgggcggccagggcgggtggccagcctggagccagcggtcatttatggccgggcagcgcttccgtcctgcctggcaagccactggctgccgctgacagacggacggacgatggagagacaagggctcttgggggtgctttctctttcccgtccttccctttgtcctcggctgagggctgaactcctctggggctctgctggcctggcagccatatgtccctgtaaatagggacagacagggaggaggtctgggttccctgaagcctccttgaaattacatcttcttatggggtcgatttggctctccaggccagcatatacactcacactcacacacatattcatgctcaagcacacactcccggataaaaaccgaggctctctatagctgagtcctttctcagagacactgagctggtgccatttttatgggggataataagaactgtatcttgggaagaacagcacgttagttccaaggtcctttcatctcctatgtctcatctgatctggaggaaaatcaggagtcatccagatagttatcacctgcattttacagatgagagaaactgagaatcggtgccttcatttaatcatccctttattcaacgggagttcctagggagcttgcatccaccaggtgctaaggattaagaggtgaagtaggtacagtccctcttca

SEQ ID NO: 52707 - DNA, 1000 bp, Homo sapiens
ggtcccaaggccagtggttttggggaacactggttgggcagctcatccatggggcacccaggcggcaacttttcagctaagtcagcaagaaggctcacaccagtctgagcttggagaaacacagatttctttcttccttttttaaaaaaattcatccttctctctctctttttttaaacataagccaggctgggaggagcctcaacaaggaaggaaatcaataggaaatgcctttagaaaatgagatttttttgaaagcatgtcatgtcttcatttttgatgcaaagtattgggccctgcaatttgaaacaggaaacagcagaaagcaaaggcagccaatgtgaggacatgctgaggtccctcctttcagaagccagctgtaacgacagggctggcagcagtggatacggggccaagtcacatggaggccagttgaggaaacagtgggtgttggcctggagaagagcagtcttgggcaggacataagagttttatttgcacaactaaagggctgtcatagggcagtgggagcaggtatgttctgacggggtccaaggtgaggaactaaaaccattggtctggctatatcacagggaagcaatagaagaaaatagttaaaggctgtagagccaggggctcaaatctcaacttcaccactggttagtattattaaatttttagagacagggtcttgctgtgttatcaggctaatctcaaactcctgacctcaaacaatcatctgacctttgccccagggattacaggcaatgccagtgctgtattacgggcatgagccacctcacctagccaatttcaccacttattcacttggacagattatttaagctctctgggcttctgcttcttcatctgtaaaatggagctaacagtaatacatttctcatggagttattgagaggattagatgtatgtatagatataaaattaaatttgcccaattctctctattatagtcatatataactatctgatacttttt

SEQ ID NO: 52708 - DNA, 1060 bp, Homo sapiens
tgaatcaattcattaaaagcacttaaaacaatgagaaaaaccctttgctggtttgtttccatcaagaatgggcatcacatgttgcctcatcacatctttcaacccagtgacccaggtctcctcctcgttgctagaatcacagtcttcacatttctcaggatgcgtccggaacttggtgacccttacggatgtactatgtgttatcactagggtggtgaatcatgccagatgtagattttacccccgctgttctccagggagtactatgatagagagttcttagaatcctaaggctattgcatcatagctgtgggatttggggcatattttcttaataacttgtataggaagtatacaagtataggagtatatggactcagttttcatgcctatgaaaattgtgaaatatgacctacctcaaagagcttctatgaagaatcaatgaaatactgtgtaaatgcttgggataaagtagattctaagtaaatgttttcctccaactttcctttttctgcatcagaggtcaacaaactatggccgactggtcaaatctgaccacctaccagtttttgcaaatgaagttttattggaacatagccacacccattcatctctgtatcctctatggctgcttttgtgtacaatggcagagtgtacggctgtgacagagaccagatgagtcatctgtccacaaagccaaaaatatttactgtatcatcctttacaggatatctttgccaacccctgttctacatagtagccttatctctgtgtccttttccttccaaaatttctctttatcagactaaatgccactggtgacttaggccaccactcctatgtcaaagtgtttagtccctctggttgttgtccgaatgcaatcctattgattgcaagtccttggccgggcgcagtggctcacgcctgtgatactagcactttgggaggccaaggcgggaggatcatgaggtcaggagatcgagaccatcctggctaacacggtgaaacttcatctctactaaaaaaaaaatacaaaaaatacaaaaaattagctggcatg

SEQ ID NO: 52709 - DNA, 793 bp, Homo sapiens
actctgagatcctcagcacttccctctccacctctttgaagatctgagctgaaaacaacacttggcccccaacactaataacacccatctctctctgtttgagaatctctaattagctaggcacttcccatgtattatgtcatttaacaacactctgaggtaagggtgcttattcccatgttagaaatggggaaacggaggctcaggagttccttgccattggtcaaacagttggtaagtggtaggcctgggatgtgaacacaggtgtgtcctttcccctacacgcagttcccataatagagagtgatccaggaagtaatgaagccaattgcatcccgtgtgagggaagagcatctgctgaacagatgcccggatatactggccgagtgccatgaggacatagctttttcttggcgatgagggcaatatcaagagactgctccatggcagaaatgcttttaccatgagtcaccccattactccatttggagagtttatagctaaggagctacagcaattcacctgtgtctcctacatgtttaagccccagcaatccagaagagcaattctattaagcaatatcctcccagcaacgtatggagagtataagaaatcatgtgacttatgttaatcagcactcaggtcaaattcagctgtttatgggatcatgtagactgatttaccaacatctccagataatgtttgttttttttttttttaatctaagagctacaccattaatttcttctcctcattcactttcaagtttgaaatccaaactcctgataaaggc

SEQ ID NO: 52710 - DNA, 1329 bp, Homo sapiens
gaggttcagttgtccccataacaagtaagtttcagagccgaggtttgaactaatgcggtctccctcccacatcagagttctggaccttggcagtggattatctcacttcctgcaccctgtcaagggttaattcttgccttgtgccaggagcactggcagatttctggcagtgtgtattcatccctttgcggccttggcacagattcccattcccttctgctgactgatctctcttaaaagaaagtcatttttgacagagacatgcatggaaaggtccagtttatatgagtttagtcaaggaatttccagtcctattgacaactgagttgtagcttgcaggaccccactattactcaggaaaaaggctgtgaccgaatggtttctgtcctctctgccggccagcattttgcaatgttggtagggccaggcattatgacagggaatccagttgttgttgtgcatatttctgaagacacacgattctgacatctgtaaccctgcagtcagtcaaggtttgtaccagcgttgtaatctgtttcagggctgccaaatagttcttttgaaaaacttactggcagcttacccgttttctgctgttgtgttttgaacaagtgtttcccaaaactatttcctaacagcaccaaagggttggaggaggaaggaaaataaaacaggatagtagaatttactggggaggaaaaacacaaagtgaaaccaccaccaccatttaccagcgtcactcctaagcctggactgtggctctgtgctcttcataatttgaaatcagagcttctgagcaggcgccctttctctggcaaaggtgatctctgtttttatttaggttcagagaggggtttctcttcacccctttggaagttttcagttggcaactgtgacttccgggagagaagttgcaggcagtggatgattggaaaatacccagtcgtagaagaggccagatgcaaagatgttgatgacctgtgggtttcaagggcaggaactccttgttctgcatggtgactggtgtcacgtgtgtccagctcaggcctgctgacggagcccgctgctcataccatcttgagttgaacagactggaccagaggccactggaagcacagctcctaaaaaataccaacagtgatttttggctttttcccagcaaccagggaatcagattggagctaggtcagggttgtgagcacccattgctctcctgcacattgtccttccttttggggttttggaatacacatggatatatttaactagatatattacatatattttaaagatatatacttagcgtatatatttaacatagatatttct

SEQ ID NO: 52711 - DNA, 4303 bp, Homo sapiens
ttacccaactctagcgctaaccagctcttcagagtcctttctctccaatagtcatctttgtgtaaagagccaaaaagcaaatgttccaattaatgaaaaggctcttctataataggatttgtatgagatcaaaagggtttctaactgggacagacctgcaagcttggagtgctgtgcttttccagcatgtgctgtaattaatacatacactgaacattacatataatctgcatattattgacccaatgcacaattcatatggtaatgccattaattgcatattacctaggcggcttaatgaacattacataggtttttaatggatgtagttactataattgagttcaattatatccctgccatgcatatgaggtcaatagactagctcgaccccacagggtctgggagaaaggaaacaggtgtttgtagtgagggcaatttgtgagctggagcagagagaagggagaggccaagggccagagatgacttgcttggctgggccctttttagggcccggatagtggtacacaaagctgggtaaacagcaggcagtctatgcacaaaggcaggatctcctgcttgcccctctgctgtgggtttggaacagggcaccagactggagccctgaagccagccacgcccacgctgtaacaggacactttcttctacgctgacccaaagccaatgggcagttgcatcacttcctctggcagagtggaggccacatgattctagcatctgggcttgccagggatgcaggggagccctgcctgtccatgatgctggcgcagaaggccctgagcctggtgttgcttcttttctccaaattctatgtctggagtggaagaggcaaagctgctgctcccatattctgggtgctcacaccctctaaaagagataaccccatgtggacagagaactagggagtgaagaggcatcagagttcctcatacttcccttcctaaaaaagagaaaggtgactcagagatgacaaacacctgccataaactaggcactgctgatgttacctactttaccctccactggatttctcccatttggttaaagtgatactaaatcttcagagaggttagaaattttcccaaggacacacacacacacacacacacacatacacatgcacacacaacacaacacaacacaacacacacagaacttgttgaaggtggggtcagaatttgaactcaggtcagtctcaccccaaagtttacagcacccaattactccaggctgctttgttgcaactttgctgtgttcctagttttgaaggccactccagaaggggtaaaataatgatgaaaaggaaagtttgatgcagatatcaggatagaaagaaaagaagaaaatgaatgattttttttaaaatcacagagagagaatttgatttttccagtaaccttcttgcaaagtatacatttgcatgtctctttttctgcctgtctttccactctcattgaccgctgatttgctaagttgggctggccaggaatacactttctatttagaaagcaaatgcggccagatttgggccccggcctaggagctgactcacttttgctgggatgacacattcactgcgcatgtttcacaattttcagaaacaccagatttatttctgtcaatacccagagccccacttcgctgtccacctaaggccacacactgaggcgttgctatttttttccctggggcctaaatggatgggaagacttcccatgcctgaaacatcaccctcatttgtaaggagagaaagtctggccaagaattgcagtgtttttaaccagaatttggctggctttcaatagctttatgccaaagctgtaccagccagagagatggctgtgagtgtgtgtgtgtgtgtgtgtgtggaggcggggggggggggggtgaggcttgaaaacaaggcaaaaaaggaaggaaaaaaaaacacgcagacagcagagaggaaaggagagaataggagagaatgagggttgattaagtttggcaaggaagaaaagagaaggaagagagggagtttaaaaagagaaaggcagcaagagaaataacaaaggaagaatcaggagagagaaggagagattaacttactttaactaatcaactactatgagaatgccaagcattgttggggatgcttctgcacaccacctcatctaattctcacaaccaccttgtgggtacacataatgaagcttcattgttattaataaagaagtagggggctcaggaagttggaaccctttgccctgaggctatactgataatacagggcagagggatttggacctcccatctctgacttttaaaagcttggaggactctgcttgccatcagggagcttcatgggaggccctgtgatctggatggtccgtgacagtctcctctaagggggttgtttacacacttagacactaagagcttaagacttgaagggactgctacatatacaaagctctggattcagagctatctggaaactttctccagggtaaataaaaacaaccacttcaacaatgttgccaatgaatctctctccaaaaaagaaaaggaaaggaaaagggaaagtgatgctattttttccccctccaaagtaaaggttacaacaacattttctttgagctgatgtgagagcagccagcagacatttctttggtaaccatctccatgtgtctgtgtggaaagtaccttgcagtgactaagcgttcgttgaggtgattcacttgtcactgcgcttggggactttggactagtcctggcagctgcaaagttattttcatcggcttctgacccaggccctccctgcagggcacaggtgcctgagaatgtacccctgtctctgctcacaaggtgagcaaggggggctggaagacaagctctctctggactcctggcaagacttctagaaagtcctagctgctaatttccttggcagcctaggagtcaagggtctgaggcagcactcagggcttgaaatgaaatgaagctcatttactgagcatctaggatatgccagaagttttctcttcatttgtctcattcttcctcacagtaatccaaataaatgttttcttttgtcattgaaacggagaccctaacagagcaagaggcctgaccttcacacctatgtaacccaaggtcacagaaatgctgaggggccatgtgactccagtgaagcaggagtatccatccagccacagagatgggacctgtccaaatgggacctgtctgttccaaaggttattctgcttggtaagtctgtttagattgcaatattttattaaaattatatacacatagaaaagggcacctagaagtatacaggttgataaatgttcacaacctgaatagagcctataattaacacccaaatcaaaaagcagaacattccctctggtcacctgtctccaagatgactgccatcagttcatttcctccaagtatattaatgtccttttcctggagaagtggaattcttcctcttttccccttgaatttggactggctttaatgacttctttgaccatagaatgaagcggaaatgttgctagggctagatcataaaaaaccttgcagcttctccctgggtctcttggaaaccctctccaggagctctgaaatactacataagaggtccagctactctgagactgccatgttggagaggccacatataggcactcctgttgacagttccagtggaacccagacttctggtgatccctgacaaagcaggaaatttgttaggagagttttcttggaccctgcaaagcagcccatttgccagctaaagaccactgagtgacccctgtcaaaaccacatggagcaaaagaatcacccacctgagccctgaccaaacttctgacccacaaaatcatgagatataatgaaatgattgttgttttaagcccctaagttttgggggtaatttattaggcagtgataagaaaagtaaatataatccaccagcgcagaagcccccagttgaccctttccagttattatgctcccttcaatggtaaccatgtgtcaacttcctctaccatagattggttctgcctgtttttatggcttctatcaatggaatcatacaatatcttctttttttgtgagcctggcttctttggctcaatattattttataaaattcttccctaatgttgcatgtagctgcagattctcattctcatcattgtagtccaatgtgtgactatattaatttatccattctattattgatagacatttgagttgtttccagcttttggctattatgaataacat

SEQ ID NO: 52712 - DNA, 1347 bp, Homo sapiens
cacacatatatataggtcttctagggtatgtgtacacacacacacacacacacacattacttacaaagttataagtactttattccctagcaattcctctcctacggtgtgtgtgtgtatatatacacaggttttcaaaattgttgtacttggtttatatgcttctcaaccgtgtttgatggttgctccatattctccttagaactagctgttttctgtctttttcttttgttttcttttctttttcttttttttgagacggagtttcactcttgttgcccaggctggagtgcaatggcatgatctcagctcactgcaacctttccctcccaggttctagcagttcccctgcctcagcctccccagtagctgggattacaggcatgcgccaccacacccggctaattttgtatttttagtagagacggggtttctccatgttggtcaggctggtctcaaactcctgacctcaggtgatctgtctgcctcggcctcccaaagtgctgggattgcaggcgtgagccactgtgcccaaactgtctttttcattttgcgtttgaggatcttgtacaattagctagcacacaacaaataacagggctgtccacctgccaacatggcatctgagacatgcaagctaaatgcagaaaaattgagttcccttgacacagatgggctccttccatgaaagggaaagaatattataattatttgttcatatccaagaagaaggtagctgggttcagctttcactgccttattcttctggagagtttctgttttgtaagtcaggctcactgaagatgtgatagaggaagtgattgagattctgattattttcttcattcttgggccctgagtcatctccaggccatggggcatttgggaaaaggtgaggcggaacatggcagttgggtttattttagggcaatcagatggctgggtcataaaaacctgttcaggggacttgaaaattcactctgccgcatgctccatgactcatacatttttgcttcctaattgatgtgacaagacatccgggcacactaaactcaatattacaaggaaaaaaacaagagcgtgactgatttgggtagatgtattgagcttatggcagctgaaaaaagtactgtcctcgtgtgactaaattttcttaaatccagtcgaatcacagattttgaaaaatggcagaaacttggcatgatggttagttttttgtgtcagctcagttatttaagcaaacactaatctagacgttgctgtgaaggtattttgaagaggtaaaggaaatcacttgtccttaagtaaaggaaagaactgggcctcatttaatcagttgaaggcgtt

SEQ ID NO: 52713 - DNA, 626 bp, Homo sapiens
acatcctcattgtctgtgaagctcacaatttgtatcgttctatcactgtggttaccaatagcagagagctcctacttcgcatccattgagcattcctgttgaaccctggggatccagggataaatggtgaagtttcctacccctgggggccacagcctggcggggtgggtgggagaacagactccctagagagcctgagcctgctctttctcttttctgtgacaaggaattaagtctcaaggggtggcttggggtgaaattgttctttttctctctgaagttctgggaagagctgagctctgagctccactggagcgcagggatcaaggtacagaggttcctgtcacagggccaaacccgaggccaaactctgtgtgtgtgtgtgtgtgtgtgtgtgtgtgtgtgtgtgtgtgtgacggacagtacatttttagatggtggagaatctgaaaagggagtgcagggagagctaatgggggtgcctggctccgagccattgtcactgcccagggaaaggggctggctacagggcagcctgaggggaataggccatgtcctgtcccaggctgggctcatgagaagtgatgagacacccagcagggccttggcttcccctgtgagctctc

SEQ ID NO: 52714 - DNA, 825 bp, Homo sapiens
ggaaaacttcataatctccacaaaccagcattttaattctaatagtcttggagtcctgagtcactctggagggttgggggttggcttcaacatttctcccaggaggccatagcatgtttttgcaaatagactctcgaagagcatctcagatgttccagactttttcaagggggttgcaggaattcccctgtgctgcaataatgtaatagaactcaccagggcttagtcaggccaaactaccatagtttcatgaattcatcgtacagtttcatgccgctccacctttaaacatgttttccctctgcttagaggaattattcctccccctgctttcctgcgcttccctattcatcctttaaaacctcatctcaaagttcctctgtgaagacattcctaatttttaccctccctctattccatcaacagacttggcttcaaatctcaggacgtggcccatttaatgagttctcaagaaatgattattgttttctcaaattcttggagttgacctggtttcttctccagcctctgacagtcagaccaaatgcaatgcaggcggctagaaatcaactatgcagttgtgaaacctgcaatttgaagcaagattcttgattgctcaaatgagagttatgtaagctttgtttgcatggtgcaatgggcaggaggacctcactgtgagcagagttttggaggctatttctggtgtgacagcacctctgcttcatttccaccaaaaccatcatatctcccagccccagtagaattcctggttcaaagcaagcactcaacacagatctgctgtttcagggagatgataaaacaagc

SEQ ID NO: 52715 - DNA, 4187 bp, Homo sapiens
acagagcagtagtgtgatcttcccaaggtctcatgaccaggaagaagaggtgagacctggatctgaaaccaggcttcctggatctttctctatttctaatgtggggttgaaatcatgtccttggtgcccccaagataacatatataagcttctaacacatagcagctacccatttggcgctattttcctctctttctcctctgatctctttctatcaaaccatgctgttgctcccaaagttcctccagccagtactttcctgaggagttcctggattactctgtgcctttatagaaaaacaagaatggtaaatacacttcttgcagcccagacaatgtctctaattgctctgagcgtacatctcatgtccgtcaggataaagttcagaaccttaacctggcatcaaggtattccacatgcactccagcctctctaattctgccttctctttgaaaccattctgaaagcactgggcagagttccttgtcctctcagttatagctctacagttaaagcacttaaaccctcaaagttattgtctatttgggaaactgtacccaccccaagactgtgctgcttgagagtcagataagccttatttacatcattttcctctatgaatcagcacagagcctggcacaggtaagtactcagtaaatatttgttgaattaatgccacaatcgatgtatacataaatcagtgactcaatgaatgagggtagtgatacctgcccttcatgaacttgcagagttagtgtggtacagatgcaagatgtataactataaggttccagacagatacagagcattattcccatgggtttataagatggaccttgaagagttagcatgtgtgctcacataacctgtattggctgctgtaggtgctgctcttcgggtagcagggccaaggagaaccttgcaaagtaacctcatgtatctttatggaaggaaccatgttgtagtttctgaatggagcttggcatagacaaagcatgcagttcatagttagtatcaatagtggcagattcaaaccatggggcagtgtgtattccatgcagtgagtcacctggaaattccaaaaagctcaaattgatcttatcttcctaacttcactcaaattttctgagtctcagttttctcagctctaaatggagccataatagggaccacctcccagagtgattgcgtaagaattatgcagattacacaatgtatggctgtggctcccaaaagttcctccagttaatgctttcctgaggagttcctggattactctgttcctttacagaaaaccaaaaattgtatatagactcaagcattgcctgtgtacaatctttagagtatctaatgccatttttcagttattactgcctttcagccccaattttctcctctttcattcagggtgaaactggtccacagagcagtagagtgatcttcccacggtcttcctagtgacaactggttggagcaatgttcgctctctagctagtatctagacatagagtaatgagcatcaaccaagtatgtgcccaggcttgagaatctgccctatagaagtacacaatattacattaaatatttacaaagatctcactttccaacttgggcctggcagagtggctcccgcaaagaagggtggtgagaagaaaaagggccattctgccatcaatgaagcagtgaccggagaatacaccaacatcattcacaagcacatccatgaagtgggcttcaagaaacatcccccttggacattcaaagagatctggaaatttgccatgaaggagatgggaattccagatgtgtgcattgatactaggttcaacagacctgtctgggccaaaggaataaagaatgtcccatacagtatctatgtgcagttgtccagaaaacgtaatgaggatgaagatcctcattaagtaagttgtatactttggttgcctatgtacctgctaccgctctcaagaatctacagacagtcaacgtggatgagaactaaccagtgattgtcaaatatatcaaagttataaaattgccaaaaaaaaaaaaaaaaaagacctacaggaagctgctctgaagaggagagccatgggccacatgtcttcattccttcagtctgcatggttgattctggtcttgtcgggtttagaaaacagcttcatttattaacagaagggcatagggctgagaatgggccctctggaagaaggcaatttgaaagagataggtcctcaagaccccagccaagaaacctaaggtgtcagaccaggcacttgtcaaagcaggaaatgagacttgtgtcaggagtgagggggaggctggggtatcaatgagtacatcttgtcctagatggaggtgttctgtagcagcccaggggcagagagctgactcaccagacaacagacacagtagcagtgaccagcacatgactgctctcagagaggagacggtattggactatgcttctaaattatgtaccacactgctgcattgattcaggtaaggcagggtagggctggacttgtaagctgaaggccttgtgggttgctggagatttggcctggggaaagtaggagctgacagctgcagtctcactttttgtacagacacaggttagatatattctctgcttgactcgaagctattgtgttggcaaagaccctgtcccagtctttggttttctctgtattagtggaactaagcatgatgccaggcacatgggaggtgttcagtaaatcactgcagaatttaggaataaacatgtagagctggggaatgtgtgttttagggtgggggaaggtggacacgttgtcctaagaaaagtataactctaggatttgaaatcttatcctcttcaacctgagaccttctcaggtaatcgtagacaggattcatgaacacacttccagggcaaacacatttcatgttgatgcagagtatctgggacttggaagaaacaactccttatctgaaggataatttagcaattaggagctgaggcctaacagaaggttacctaacatgtctgtgtctgctttctcatctgtaaaacaaggggctaatgcctgttcatggggtaactgaggagttggtgagatgatgtgtgagaaattagcagtccacagcacagcttgataaatgtttgttgaatggcaaatgccattctggtgactaaagttcaccatggctcagttctgctttctgccttgactcatcctccttgttgtctgccaaaaatcattctgtgcccaacctggttccttctcaaactaagaggtccattcacaacactagctggcatcaggtaggaagccacccttggtcatctgctgctcatcctcgggggacagacagtgatggacaggcagactctgaaagtggagctgagtcttgagcactgagcatgtcatccatcattgaagccacttcgagaggagaggaaagtagtcagtagtgtcacctactgactggcactgctggtagcagggggtcttattttagcaatgcctctgagctcatgcaagtatcattgggaagcaggattaggtttgctaaatatataattaaataagatgaaatatcagagaagaggtacagatgaagattatggagttataaaacaatagattgggaaaaggccatgatggtttctttatatattccctaagaaaaataacaaagcagcaaatttcaactgtagagagcacatgtagaaacccacagggagaatcattagtgggttgaaggctgggatgcatcactgaagagagaaagagaggagaatctgcatttattggctgcatggtctgagccaggcccttcccatgtacactgtagtcctacatgggaaagattactatttctgttttagtgaaatggaaactaatgctcaggtttgttaagtaactcgcacacacccatgatatttgtgagtgtcagagcttggccttgtatgtccaaagggcattgttctatggagtcacactgtccaatagcccttctggtttataaagaaactttaaatcttgtctaattgtttcagcaaagatcagagaaggacttcagggtgaaccttttacttaaagagggtgtttggaacactttaatcaaatttccattgtagtctatcaatcatctaccactctatgtatgtttttgacatgttcccataatggcctagttgc

SEQ ID NO: 52716 - DNA, 1783 bp, Homo sapiens
tctcttctcttttaattatctcatgctgtattagtgctaagtcaaactcattttataaaaaataaaaagagaagaggagggagcgtcatcaatattgccctttccaggaatttctacataagctgacagcagtttccttggggttctcttttctgtggttatcaattgttaaacggcccaggatctctcagagctcatccaggtatgtgcatagagccctgaaatgctgatattgccttagggggttatttgttttttatagccccacaggccatagctggtgcatttgcctgagcttcctcatcctttgtacatatacccagggaggagaaggtgaatagataagatctttcagcctgcagatttccagtaataaaagcaaatgctttctgttgagacccagctgagactggaggtggtgaataagggctgtatgtgtaagcactgtaggcttctggccagtaaagaatccagacacagcctgcaccctcctggcctcctggaactctaagagcacagaaggacagggtacagacctatggagtatgacacttattccagggactttgacctgctacatttacaggtcatgacagctttgatgctgcctctggggaagggccaccattcaacttgccaagagaagaaccaaaggaacaaaggcatgaagctctgggatcatggctgggccaagttactgacagtactatttgcatagttctggtcactttccaaattacctctcactcagcctcaccacagcccttatccacagagccacctggggtggaatgggaggggcttttcttatccccatccaacagatgaggagactgtgactcagagaggtgaatgacttgggcaaagtctaacaacagtaaccacagagtaatgatttctaagctactaattaactttctaaccatctacccataaggaattggcctgtaggttgaaaaggcattcctgagtctctgtataccacacaccaaggattaatattccaagtaatcattttagaatttaaaagtgcaatagttaaaataaagaaaataagatactggacacgtctattaaagaaaaacatcagaataaacacatcagaagactgactcattgggcgtggggatcagattccttctaaaagtcatcatgaaggagagtggagaaacattaaggaatatggaagatagaaatggaactgccaatatttgaataacagaagttcaagaaatagagaagtagaggcagcaacaaagggaggaaaatacttggaaaaaatattaaagatagattttctaaaagaagaaacaaaggaaatacggaagagagactttggaatcaaagtgtcaaataggatttcaaaccccaaataaatgtgatttaatggaatttgaaaacatcatagagaaaattctatgagcttccagaggaaaagaacttatcactttgcaaaaggacaagactcagagattaaccactggtataagaagatgatggaacaatatttttaaagtattaaatgactataactttaatgctagaattttataacctccaaaattttcacttaaatgtgatgggacagtaaagatattttcaggcattcaaaacctcagtagttttaccacacaaaacttcactttgaaaaccctccgtgcttcatttgatcctcacaggtctgtgatgtgatggtggttaatactgtccttaaaggcaagattaaaatggtggaatcacctatccatggtcacacacttgggactcacagccaggtcagaac

SEQ ID NO: 52717 - DNA, 1182 bp, Homo sapiens
agtcctttcgttactctacagccagaatgataatagcattgcttaaccggttcgtatctctgagtttcattgtctgtctctcttaggatttaaattagttttggcagtagcatctctttcttgacaaacactgtaaacatcataaccatcttctgcagtcatcataatactaactcctcattgcctgatgacaatagtaatcataatcatgatttaggtataaatgtgctttccatggaatgtatcaacttgctatcttcagtagatttctatggcccctttagaattttgtgtctcagtgagtgtgtttacagtgatgcttatgaaaaagagttcaccaattccagccccaaatagttacatttctgtctgattattcacattttttctgtcttctaggaaagtgcatggtcagatttatcttgtttgctcttctggaagccaaatttaggagaatgtgtatttgaaagatagctgatcaaatgctgagtcatctaaaatacattgtcagagacatctgagttttggctttagctggaagttcttcacattggtctgtcttcccacacaaagacaagttaaaaatgggcctgatcatttaggctgacaaatataatggcctgaaaaatagcacttactctattccaaatattgtaccaagactattgtaaacatcatcatgctttcccccacaacgactatgtccattttatagatgatgctgttgaggctctgagagatgaactgcccaaggcagctgctaattatggagccaggatttgaagtctagagtctactctcttcatttaacagaatgagttctccctgactctgcacttggtacattcctctagcagagtcagtctcacaatggactttcattgtttacttaagctttgcctcctctaccaggtttgctaatttcttgaccatcagtggggactcagtaaatatttgtgcaaaaatggaacgaatgcatgaaggaaaaaatgagtatatgaatgcaagacaaaacacataaaataaatggatatttttttcctagattcttctgtgactctttccttagactttttctgatttgcctctccttagatgtaatggatactatgcatcatcatttatacaatttagtgaacctttacagaatggaattctgtgcaagtccttttgatgcaaaac

SEQ ID NO: 52718 - DNA, 1585 bp, Homo sapiens
tgtttttgtttctttggggaggggaaacaatgataaaatggaaaataaattttaaataatcacccaagatgctgatataaaatgtattatttattttatatttaaacatttctaaatgactttaggatggattacatatactttttccaagtccttgatgaaaagagtaactgctttgtgatttatctttgtgtaagtacagtcttccacgtagcagatttgtttagaataaaattcaggctggtagcaaatccttcctgggcttccctgtggctcctagcacatttctctgtgcaatgtcacagaaagagccagactggaataagcagctctctcttccaaagaagcacttataaaagtatatatacaacatggaccgtcatgactatcatcagccttcctacaaaagatgcaaaacttccttatagaaaaatctaccacacattgagagctttgtgttagtcagatacaatgcaaagtcctgaatataatttttatttttatataaccttacaacaacctctgtgactaggtactcatattctcacttgacagtggaggaaattgaaactaaaagaagttcagtaagcagcctgtgatcagagggcacacaagtgttggaattgggatataaacccaagtgttccaagttccaaagccattttggatgtggtcactgctttagaagcaaagagcatggtcatgccactgtcatctgcaggcacaccaccagggccaaagtccaacaatcccggatgtcagttttcacagaattggacttgatcctaggagagagcttagtgagttccaaagaatggcagattggcatgtacttcagaatagtcatctactttgtaatcactctcccagcatcattttaatgtcactcccttctctatttctgcctttagtttttatactgagaggttaacccaaaatatactgtgttatcttgcagggagacagtgtgggaaggcagtaagaacgtgcactcactctgtggaaagtaataaggataacaacagtgactagctatgaggcactgtcctggggcgtcattgatgcattctcttctaatcttcagctattccatggtgtatttatcatctcctcacataacagattaggaacttgagctcggaggaacttccggagtttggctccaggctccttcactcactccccgaatgaccttgagtagcttggtcaagctactcaacctcctgaagcctcagtttatcatctataccaaactcatggaactactgcaaatatatagagtaatcttgacacacaaaggctgtttgtcttactctgttcaatacatcttttcaacatctaacagagtgccttaaagtagtagtgaggtaggagaccagcaggactttttttcctagtccagacaggatgaagtggaaaaaacagccagaaccagcaggtggcgctgaaagagattgctagttgccctcattgctcattagcataatatattcccaccagtgccatgacagtttacaaatgccatggcaatgacccgaaagttacctcctgtttccatgacaatgacttcaaagttactactcct

SEQ ID NO: 52719 - DNA, 668 bp, Homo sapiens
tacaacacactcgaggaattaatttcgccttattcctctctgtatccacagcagatgccccagagtctggcccgggatacttcttgtacagctgaaaaaaaataaaatggggtgagatcagagttcccttaaccttgacctccgcagtagaccataaagcaagtatatgttccccagggcgtcgacgcctttatcctcggctccctttctgtttctgctttaagtattaacaaactcaacacggctgtggtttgccttccacggcaatggaaactagattgggttagaattattttaatactgaaaataggaagaacactggtgagtcatcctccttagtcaccatggggccaaagtttaggacaaaccaagagggaactctgcccttaaccacatctgaaatggaaaatgtccactggctctcatccccaccatcctttaccatgattcttggactgggttccataggaagtgttatagagctgttttccattggcatcgaggtgaagcatgggtggaatgtaccacagtgacgaaaaggcaagcagtgagggtgcaacacaaggtcctagagtcacagccctattgtcagccgtcttttcctggtgtttctgtggcctgtctctaaaggtaccaaatgcttagaaggctgagttgtaaccaccaac

SEQ ID NO: 52720 - DNA, 1180 bp, Homo sapiens
ttctgctggatgggacccccgggtcctcttcaaagtctatgaactcctgggaatcaaacacaagaaaagagaggggatgtcttgagtcttgaggtgacctagttcacaatcaaaagcaacatatcttaatgattttatagtatcaaggatgataagggggaggggagcacaacatcaagaaagggttaactggaagaacacaggttggacactttacaaattgagagaagaggtgcccagacactgctgcgggcacacgataggtacttgctaggaccagggccaggacagattgttggcttaacaccgagtcatcctcaggttacctaaggccggcctggaatgagggagtggtggctgttctccaaagacatttgtgttgaccagtcttgagcacagataatcagcagcagcaacttttggctgtgataaggaagaaatttttaaaaagctgtctgcgtgtctgcatgtttttttgttttggtttggtttgcttttttgcaaaacctgggtcctgttgccttttacaatcatgtagtgcctttgtcaagacagtctgattccttgtttgttttctttggattactccaccctgctgtgggaaaattaactctttggcatgcccacacgtatacatccatgtagacatccacccccagcaacgaatcctcaggagccccaccaaggctaccaggttaaaggaagagcttaaagtccaattaaagtctaatgagctctgctaattgagattattcttgcaaattggttaaaattctaatgagttggccttaaacggaacctccagtggatgtttactctggctctgccccagcaaatttgtaagacaaatgcaatatccctgtcctcaccagcctcagtgagaacgggggataacattactgaatgccagatagtcacaagcattaatcatcatcttagactgctaaaatgctgtcagctactgatacaaaaactgagattgaacacaatgggtgttttctaggaaagatgcatctgccatctgctaggcactgagctaggggcttttggaacttagagcacactcagatagacacttgcctgatttgattagaattcccaaagtaatcctgtgttggggaaaagggagtcaagaaagagggatagcaggggggagggagggagagttagccaactattc

SEQ ID NO: 52721 - DNA, 586 bp, Homo sapiens
cttgctacactctgcctccactgcactgcaggatcgagaggacagggaggatgcctgagtcatactacgtcccccagcacctgggagaagtcctgatgaatggcagacctcagtaatgtttggttagttaattaattaattaggtaattttaaagaaccttagactgggaacaaaagggttagttggaagccagctctgacagtaataagccacatggatttgagccaggtacttcccctatgggccttggccttcccatttgaacagtgaagcagctggactagatgacctctgatggtacctgattcagggtcttgccccaagttcacccagccaggcaacgtcaaaagtctgcctcctcatctcccaccccacatccaagtccacgttcacaaaaacaggcccttagcctgacaacatgttggcccaagccccagtgagtcatatgtcaagctaagcaggtacgtaggcgtgtctatgagttactgctaaaaacgcaaggctgttgactgtctactaaagggaagaacagttagcacaaccagaaaccagcgttctcttcaagcccaggaatggaaaggaaga

SEQ ID NO: 52722 - DNA, 707 bp, Homo sapiens
gatgagattagagtaactctcctatggtgatatgccttttgcttcatgtagcagtggctgaatccttggtctgttgagttgggattttttttttcatcctctgccaatttacccaaagatgttctgaaattgtgcaattggcaaactgtaatagcctgcacccagggagcggcaggggagtgacacagtgagtcacagaccacaacaaagcccttcctggcatgtcgggctctcttggcaaacccagaggatgtaaaattgacagtaagacaaggagcatcattgttatttgtcaacaaattgcaatgaccattgcaaggtcttggcagccccacacagggaagcctagaggcaaggaatgggggagcaagtcaacaaaatgatggaaaacccctgtctcccaatgagcaagtgtcagacaggtgtgtcaataagaatattttttctgaccccagtgacctatttctctgtcatgttcaacaaaacagaagggtgctgctttagtggcagtgggaacctcagatgcacatgaataattaactggccttgaaataaaaagacttaaatatccgaccctattagctaccagctgtgtgactctgggcaagtcgtgtgatatctgagcatttggttccatatgtctgcaaaattccagtatcgtcaaccccacccaactcatgagattgttgtaaatatcaagcaagata

SEQ ID NO: 52723 - DNA, 573 bp, Homo sapiens
ccccctgcctgccaagccctgtgctgggcactggtccctacccttgctgcacccatagtctggtggacttgagaccaagcgacagctgcctcaaggattagaaacaagccagcaataatcttttccttttcatgtcagccctcccccgatttgtaatgatatttctcatttaatgcactcttatccaatgtgtcactgattaacagtgtaattttggcaagcagacagtcctgagaacccaatgtttgcataagggctgatgcaatttaaagaccatgggctccaccatcagaaagacatggaatccaatcccagctctgcctcttggtggctgtttgccctagaacaatgtgttaacctcttttgagactcattttctcatctaaaaattaaggactataatatctacctataaaactctttgaaggaatgaagtaggacaggagaagtagagttcttagaatactgcctggctcaaagtaggtgctcaataaatggaaacaactgtattaccattatttaaatcttgctgcagtgattcctaaatttggaccaaggggagacaaagatctc

SEQ ID NO: 52724 - DNA, 1087 bp, Homo sapiens
tcattctcacaaaatggtgccataatggttaaagcttaatgtcttgctaatgatcaagatgtatacacaacataaaataaatagaattgcttgttgtctgctgaagttcttggcaatgctaaggtaagttatcattttactctttccagttctcaatagccagccctcaaagagcaaggggtggtaggacaacaggaatgagtggaaatggtcttctctgtcggatccctcctaactgcagtcactcagtctagcaggctcagcttccactgggttcttctgttgatctttggtggtataaaaagctcagcatctaaaagcaagaaaggaagggaaattgtgacagacatactcttgttggagggcgctgaggcagtaactctaaactaaacaaactaggcaggtggagtttgcagcaataagaccatcagagccagagttcatgtgtctgctacccctgcaacctccaggtcagagcaaacacaacctggaggccccgccctgagaggagggactgcatttcaacctcaggcatgctcacccagtgattcaaagtggaagaatgttctgtatttcaaactggtgggaggggtggtggcagcagtcacatggctgtatacatttattaaaactcatcaaattgtacacctgaaatctctgcatttcactatatgtaaagtctagctcaatttttaaggaatagcaaaatgtgatagcacatattcagtaagtgaagttaatggacaggaactactttatgatgaaacttcgacaaacatgttgatcaataaagatgcccctgctttaaaaaaagtgaatggagagagagggttaggaaaagattctgtcattgtaacctaaaactcccaggcactctttcacttagatttgttaagtttcttttctaaccaggaatcatatactgcaagcagagataggagaaaatatgtatatataaggattttctttttcagcattatttatgataaacttccagcagtaaatctgtacatatgagccatgcaggcatgaaaaattacagttgatccttgaatgtagggttatgggtgcggacccccctgcacag

SEQ ID NO: 52725 - DNA, 1853 bp, Homo sapiens
aaacacttcataccaataaatctgacaatttagatgaaatgaacaaattacttgaaagacataaactaccaatgctcattccagaagacacagataaacttgaataggctaatgtctactaaagtaactgaactaatagtggaaaagctttcattaaagaaaactcctggccgagatggccttactggtatattctactaaacatttaaagaaaaaaatatctcccaagagctgggagaaagagctgagctgtcaggtgttggagtagctgatcaaagcaacaagtcaaaaatgaattaagccttcaggcattgcattggtataagcaagaggctaaaaccagggaaagcaccaactctctctgttccattttttcccaaggaacaactcactagtcaagagtcagctggatccacacagacatgagggttggttcactgttgaaggagcttggaaaaaaaggctttagcagtttgatggatcttgggggtatgggtgcaaaggaagggggctaagggtggaaaagtactgggtagtgagtcacagtggaaaaaaatgtcaaggtttttccactccttcttgcataaacaggccttggcagaggtgcctgaagaagaccttggcccatggcctcagatagagagacctaagaatgaaagtgccaggactctcaatgcaaatactgttacaagagcatgactaacagggggccctgagtccttgactgcaactccctttagaaactgtaatgcattggcagtacgccaagtctggtgtagggagggcagcttttccccatgtggcctcctaggtaaagtctgtaattgtttatggtcaggtctgaaacatcacacataggtttttaaccataagctagactctcataccaattctacatgaaatcctccagaaaacagaagtgtaaaggacaccacccctcatttttgtcacccctcaatgacagcagcattatcctgatacccaaaacatggcaaagacacgaaaaaactacaatatccctcatgaacacaaacacaaaaatcctcaagaaaattttagtagatctaatctgccacaagagaaaaagggtaataaatctataataccaagtggggttgaacccagagatgcaaggttggtttaacagtagaaaatcaatcacctagtcccccatatcactcgtctaaaaacaaaacccttcatagttgaaaatgcatttgacaaaatttaacacccattcatgatacaaactctcagaacaaggaacagaagggaatttcctcaaaccaagagggcaggaattggcaaatttttcctgtaaaagattagacagtaaatataggccttatgggccaaactatctgtgtcacaactctaactctgctgctgtagtgttaaagcagccatacacaagatgtaaactaatgagcatggctatgctccaataaagctttatttacaaaaacaggtggcatgctggatttgtcacaggttgtagtttgccaactctgcaatagagagcattaaaaaaaaaaaaaaaagcaaatatcaggccaggcacggaggctcatgcctgtaatcccagcactttgggaggctgagacaggcgaattgcttgaatccaacagttcaagaccagcctgggcaacatggcaaaaccccatccctacaaaaaatacaaaaattagccaggcatggtggcatgttcctgcagtcccagctactcaggaggctgaggtgggaggatcgcttgagcctaggaggtcaaggttgtagtgagctgagatcacaccactgcactccagcctgggtgacagagcaagactctgtctcaaaaataaaataatatagaa

SEQ ID NO: 52726 - DNA, 2328 bp, Homo sapiens
tcccttgctccttcgactatccacctcttggctagacatcacatgcatgattacatataccaggtagatcaccaatacgctgattaggcctaaatgcctagccctgactgaattagcccaaacttaccactaaacccacattttcaacctcctgatagaatcacaagcatgtctcacatgcacatcaaatgcgacctggaaagcaaagaacttgctattcttcccccaaatgacagttcccactatttggggacagaccatttctactctatgtccccaagctgaaaaactgtctttgctgcctttttgcttactcttcatacggatctattcattgattagttccgtggctgtcaatatacagttgaattctttacgatccggtttgtggcctacatccaacaccgactgagcacttgctaagtactgggatctgaagattactcagccactgtctccacggagatcatcgttaacgggagagaaagccacgtaaaacaccacgttagatggagaagcacagaggacaccacctccacgaaaaagtctcacacgcgagaaaggacccgcaccacagcacccgagcctctattaaccgccgccttccatcgtgaattaatactctcgctttcagcgttattatcaaccccctgcaagcaatcaagaggctgggttaagtccggctggaggggcagcaggcatccctgggctgtcgcgcctcccagcgcccccgatggagcaggtggcaaggctgcaaaaagaatttaaggctctaggaaagaggtggtgcagcccgcactccagtccccggcccgcagcaggcagaggaggctccgggtctccttcacccggacaccgccggcggagaggtccactcccgtgcccctaccctggatggatcgcttacctgaggacccccaaacagaggtgcgtccggcctcgcctccccagccacgcgcagccggctacccagagtcagctcccacagtccgcacccagagtcggctccgaattgcgcacgcgtctctgtccgcggctcccgctctctctccgacggcactaggcctccaaggatggaggcgccctccaggggaaaacgctgaagcgctgcaaagaagccagcgactcaatgggtgcgtcaactaggcagccgcagcactgggagtgcggcgcgggagtgacgtcaccaggcggagggggcgaggccgggcccgcttctggtcacttacggcggccggccttctttgtaggcctggcaccgtagaggtagaggagctacattggccgcgtcccctgtccctctgccctcttgcccatctgcccaaacttttgtatttgatctctgttttgatgtcgaaccccaaagcactgtaattggggggggcgggggggggggtggaacctgcggacctgagagcagcgcgcgtgcgcacgacacgcgctgtgcgccggaagagcacgcccagtccgggctgcgcggaggaagcgctggggtcccggagggcgggggtggcggcgccggaggtcgccatggctaccgagcccgaagccgcggagccggtggtgccttcgctcgtggatcgatacttcactcgctggtacaaaccgggtaagtgcggagtgatgttgatccctccttggccgcactggcctaatgctgtgtagactatgttgacagatcataagccacgcgcgctctccctggctctccgtccccacgtcagaaggcactggacttctgtgttccgtctagccccagggaatggcatttgcaaagacctggtggcctgaaatacttcagggcgcattctggggccggcgattgcagtgcgagctctagggtgttgctcgcagtaagatgagtactctaaacggaggccccaaaggtaggcggagggctaggttgcaacagtccttaagtgcctggagggattgaggggctcactctcacagggagtagcgatacataaaattatttaaatgatcagatcgaaactaaggtagaggcagtagggatggcgagaagagggtgggttagattagagacatttagaaagaagaagaatctatacatttaccttaagagacgccatctgccacttagaagtaggtattctttttgtactgttttgtgtaagcagaaccagtggtgggagcatcgttggggactctcctttcttcctttcattcagtgataatggttatactcagtttaaaaaatatatattgtagcatattttctgttggccaaacatagggtgaccaacctgtcctagttcacccatgactgaggggtttcccagaatgtcggacttgcaccaacatcag

SEQ ID NO: 52727 - DNA, 597 bp, Homo sapiens
gtctttaaactagaaaatactataaactctgtagtaatttgaagccattgaagggttttttaaacaggaaagtgatataatctccgcagtggtttgaaatcactgaaggttttttaagcaggaaagtgatataatctctgtagtggttttaaaacatgtccacaaattctcccctcaagagggagagcctcatttctctccacatgagtgtggactggacttggtgactcacttctaataaatggaataaagtgaaaataatggagtgcttctaagagtaggtcatagaacacatagtgactttcatcttactcactcactcactctctgcaggatcaatcacagtgggagcaagccaactgccacataatggaaggcactcaagcaaccctatggagagtcccacaaggtaactgaaggttctggccaaaagatagtgaagaactgaggcttcatgtcaacagctgagtgagtgaacttgagagcagattctccagccccagtcaagcctttggattactgcaggcttggtcaatcatctttattttgattttatgagagacctcactcctgaaccaccaggtaagccactctaga

SEQ ID NO: 52728 - DNA, 2456 bp, Homo sapiens
acagcatagtgtagcaaagagaaccttctggagccagggtacctggattcaaatcccagtttggcacttattgaaagccctaacaacaaattatttaacctcagtattcctcagtttcctctcccataccacgagaatatataccaacttcacatgattgttatgagaattaatgagttaatatttacaaagtgcttagaacctggcctaccacatagtaagcattacataggtgttatttaaaaaatggataaaatactatcaacttgaactccatcactctcttatctctctgcctcttaaaactgctccagtgtttctcgttttggttgtgttgtgctagtggagataggcgaggagcggagggtctgacattactgagggatcccagtgccccttcccactggtcagagcctcaatgagacacaggaaaagggaaggagagtgtcagatatattcatcactgctccgttagccatgcgaaggtgaagaaaatagggatgtttatttaaccagcataacaggaatccagggacatgtgtaactgctgttttcaaatatgcgcagggctgggcaggagaagagataatagcatttagaattctatgcaacagctacaggctccccttcactgaacatgtttaagcagggtactggtggccaggtgtcaaggatgctaaagaaagaatttttagtcagataatctttaagatttcttctacctctaaaatcttggtaatcctagtatgagtcacgaagtggttacaacctagatgtgagtcacacatcgccaacgcgctcccgaaggcacagaattcactccccacagtgcttggcatcttaccacagacctaagtgaggaattctagccctgaagctgcatataacccagctcagagaaacaaaaactttcctaaaactcagggcgtcggttagctgattggcaaatacagtaacgcacacatcccaaacgggacttggcaaaacggtgtgcatctggattaactgtcatacagtctccacgtcactcttccacgaggccggacagaagcgggcagaagtgagcagcagcaggttcaggggaaggggtagggtggccgggatgaatgggaggccagcgaactgacctacggcggggagggacaaaggatcagggagcgcacgctgggcggggaggccgggaggaataccccaggcggaggagccgggctcgggaccaggctgcgaactggtgacaaagtcggttatcgtggagggccctaagtaccagcgaggggccccgcgggggtcctctctgcctcgggagctgggctcaaccactcgccccgcggagggggcatcgcccggccgggggcacccgggagccgcagacccgaggcaggtactgggggcaaaggcccaggccggcacccccgccccgcagcctcccctgctgccgagtccactcaaccctgccgccggagtttggattatccagtctctcgccgcccgggccgaggcccgtcccggagccccacacaggcggtccgacaagaacgccgcagtgccggcgcggaaagtggggcagcggctgcctcccgtccggtcgtgcgagcggcggccgccatcgcgggccgcggcgggaaggagaagaggggccgcgccaggcgccactttacctgagaaaccagcgggagtagcgtctgctccaccgagcgagttttgatctccagtcccgagtcgagggcgaagcccgaagagccggagccgtagactgctccggcgccgccaacgccggcgggtccgggagaggcggccatggccctcggtctatcccgcagccgggactccgcgccgcggcgagcctgccgccagtcagcccacccgcccgaggcggcggcgacaggacactcgcgccaaccgagaccccgcccccaggggcccgcccccccagggctccgccgccaaccctgcgtccccgacgcccgtcaccgtatgtccccgcccacccccggcctctgccccgcccgcgcagtccagcctggtgtgggctccctgcaaccccaccccctaagccgggtcccgcccccacatggccccgcccttatctcttctcagaccccttccatgggttccaggcaccttctcgccagggtggcgaggagaaacaaaacacatctgtcacacagccacatggcctcctcttacttggacagacaagcgtccccagcaaagcttcccgtcctctcgataggtgactcgtcctaaatcagctctgaattcccgcaaagacttctggaagctgtgctggggttgaaactggtagaccaaaaccagaatcaagtctgttgggaggggcctttcccctgggacgggaattccagtggtaatgtcttcctggggcttctccggaaggtccaatttccactccaccctgctcattctttcaccatgtatttctcacaaacactttgagc

SEQ ID NO: 52729 - DNA, 2748 bp, Homo sapiens
agtaaaaatacaaaaattagccgggtgtggtggtgcacgcctgtaatcccagctactcaggaggctgaggcaggagaatggcttgaacctgggaggcgaaggttgcagtgaggcgagattgcaccactgcactccagcctgggtgatagagggagactctgtctcaaaaaaaaaaaaaaaaaaaaaaaaagacagtgtttctttaattccagctgtaaaccttaatataaaatttacagcaaagtttaaagaaataaaagcacttaagtattaatcatacttattcctgctcaaatgtcaactgtgacacactagttaaccacactatgatgttcagctttttaattttctctctcaagttttaatgtgactgagaactggcttgatatacttaatgcaatttctaaaagagatgtcaaaacctataaaaacagacatttatttattgtattatatggctaaagtgttgattctgacttagatttaacctgtatttatcatagaaccattccaattatatctttagagagctctgcttgccagaaattaacttgctgagatttggtttcacatggatatcctcagacatacaatctaacaacattttctccaaaaccaaagaagagataaaaataatcattaactgttcactgtacttaaaatatttgatgtacatctggtcataattcttttctaggttaaatgtcactaaatcaagagaaaattattcacaatttggttttaacccaggacatcatatatattataaatattacatatgtaataagaaaatattggctgggcatggtggttcattcccgtaatcctagtgccttgggaagttcaaggcaggaggactgcttgagcctaggagttcaaggttcaaggctgccatgagccatgactgcaccctgcactctagcagtctgagtgaaagagatattgtctcaaaaaaaaaaaaaaaaaaaagttgctctggaactctggggcaacaacaaccaaaaaaaaaaaaaaaaaccccaaaatatcatgccttgtaaacaatactattttcaatgaaaatttcatttgtgggaacacaaaaggctatttcactgaaaattcctactaccagttcttttgtatacccccaggagaaaaaaatcctcctttaaaaaaaaaaaaacggaaatgcctggatgattcactaataagaaattctgtggcttacttaccctgatatgtcagagtagattgcagtatctacaaagtatgttggcaagagatgaaaaatcaacagtaaaatggccttgcatcctaacccttgtgtcagccacaggtcaagaactgcaggtactgctgcccagtatgtccccaggaatggcactgctccaaggattgctgctaatgctgaaaaaagagtaaaagaaaaacaacttaacatcatcagcaaaacactaacaaagcaaaagaatctaagcagtagctcctcctcaacaacttccaacaaaacaagttaaatactcacaaactcaaatattagggaaatgatatgccctatctaactgaattttctagctaagtaaaggctcaatatcttaaaatgtgatactaaaaatctttctaagtgtgtgtcttatttatggatctcttcttaagcaataaaattcaagggttctgtagttgctactatcaatcaatagttaatatacggtcctataaatacacctacagaacatgtgtcaaaacttgtactgagtccaaagcccaatcagaaattagtttctaaacctcagcataataaaaataaacagaaaaaatcctgagttgaaggaccctgcttcaaggtcattcccttccagagcagtatgttcaagcactcttcctccatctggcttctctccaagttaagagtaaagcaaatgtagtttctagttctggtcctaccagaagccaggtacatgaccttggaaaactggtctctcatctatatgacaagtctaccatcccgcctcacagggtgcttgcaggtcagagggtaggtttgtggacatcacagtagagaagaacgtgaatgaacttgacaatgtagaaggaagcacagacaaatagggaaagggggggatgtggtagaggcaaatgtggaaggcagagatatttaggaaaacaagcagccatagaaataaaggaaggaaaagtagaagaagcaccacaacagatcttaagaggtatggaggcagcttatgtgccctcagaagcattcatcttgccctgggatgtaatccctcatggacaaagctattttgacaacaagttgctccctgccaatcagttcaattcaaacgttactgagagccaattatgtcctaggtgttatgctaagtgctagaacattcattcattgaacaaacatgtagggcaactgatacgggtttggatctgtgtccccaccaaaatcccatgtcaaattgtaatccccaatgttggaggtaaaacctggtgagaggtgactggatcatggcgggtggatttcacccctaggtgctgttctcatgatagtgaatgaatgagttatcgtgagatctggttgtttaaaactgtggtagcacctctcccctctcttcctcctgctccagccatgtaagacatgcctgcttcccccttactttccaccactattataagtttcctgaggcctcccccaaagcaggagccactatgcttcttgtacagcctgcagaaccgtgagccaattaaacctcttcttta

SEQ ID NO: 52730 - DNA, 1156 bp, Homo sapiens
gaacccgggaggcagaggttgcggtgagccgagaacgcgccattgcactccagcctgggcaacaagagcgtaaatccatccccaaaacaaaacaaaacaaaaacaccacaactacaaacctcctcccaagttatggagccacagccctaatcatagcctcaagcagcaactgcttcaggtccttaaattatccacttaattctaatgtgaaaaccattctctttgtcatatggcaacttagagtcaacatttttatattcaaagtctttaactgagaaaactaagcactagaaactttcctctccttgtttcttgctgccaggcaagcagaaacaaacctagaaatgtgtttaaaagtagaacggtgtcagcagtgaatggctgactaacgtccactgctgaagagcctcttgtgatgtgtaaaatagaacatcgtgaaatcttagaaattgttcaagccaacccctcactttatgcaattgggactgaatgtcccagaggagggccctggtctgcccaaggtcacaaagttagttactggcagagccaagtttagaacttcaggtgtttttatctttcagccactactctctccacctcctgcttctttaaaaagatgggaacaatgggatcagagaccacagaaaaaacaaatctattactactgcaaaaaactaaatggtcttcaaattctccaccaagtctaaattaacagaatgaggaagatcagaatgccccccaacagagaggaatggtggagcagggcacgccatcagctttttcaaatttaccttgcacagctccaccatgggaagatgccaagaactgagtaacatgtgaacctggtgcaacagctgattttttttttaggtgttctgaaatcacttactaagtcagtgcaatctcctaacatatttgaaactgctgaaaaagaattactcatcccataaatgattagtgtttcacttgtaagaagcacggagttttaggagactgaagaaatctacaagtgacatgaagaggaactgaactggaaagaaaaactagtgacgaagaaaaacataggtccaggccaggcgcagtagctcatgcctgtaatcccagcactttgggaggccaaggaaggtggatcacctgaggtcaggagttcaagacc

SEQ ID NO: 52731 - DNA, 3204 bp, Homo sapiens
gttgggattacaggtgcccaccaccacacccagctaatttttttttttttgtatttttggtagagacggggtttcaccatgttggccaggctggtcttgaactcctaacctcaggtgatccacccgcctcgacctcccaaagtgctgggattacaggcgtgagccaccgcgcccggccaatttcaagcttttaaaaaatcattaattagtttgaccttctttctcccactcccaggtctaatcagtgttggcccctacttctcttccactcatccacaacccacaaatgaaatacaaagatgagggtttatcttcagtaaaaagatactcaaaggtatacgccgagctgtggatgtttctttacaagtgctcaactctttccactgagtatctgagagagactggtagaaatgcctcataatcatgccaaattacttaggtattcaacttcttactctagcatgaaaatatactatttacatgtggcaggcctttcttttctactttcctatagtttgatggatatgctccttgagcagtatcaacagtcaaaaatgttagcagaatctataaatgtgtctttgacaaaactgaatttcttcaggaaaataaccaagcttatttttcttagaacatagtgttctgccttctagctaagaagcattcgatccacttaactgaattgtgaaactgcaagataaaggataaagagcgctgaactgggcctccataaaagtgaaccacagatttgctcatgagctgtgtgactttggaccaatcacattctctgggcctgtggcccacaacggatgagtcatgaacatttatctgtatgtctgtcatctccattagaatatgttcatataggattatatgtaccgtgaagacgggacctgtatcttagtccttttttaaacctctcacaaagcccaacacctaacatatgctcgatcaactttaaacatgaaccaagaggtggtattgagggaacaagagaagaagggtgttttgggtcattcatcactctgccaataacctcaggcaagccaaaacaccgctagacagataaggggaattaatattttccaacttaatgacgtcaaggtacactgaactttatttcactgacaaaagaagtgaatcaatttgtaaatggtactgtttatgaatcaattggcattcttacgcactaaatctccacttgtttttaacagtctccagttaaatatgtggataattaactagtccacaatatagtctgagttaggaattgtgtcactagattacctttgaaatctttccaattctaaagctccctggttttgtaagagtaagctcaggttaatccaagcatcacaaatctacgtctctccccttcacgcggtcagctgctttactccaggcgggaggaggtgtgctgtggtacaccagtccctgcacaacaaaagcagttacctaaaagtaaagcgtggagaggaagaagcacaggcagctcagcacccagtgccttgcacaaattatacaggaatcacctgaactgagaggcagcaccagccagtgaagcaagctttgttttaggacttgtaagaaatctaagacacccaaacccctctttgtccctaagtagccctagcctggtaagaggtcacctttcctatctgcaggatggcaagttggcctagaatctctaaggtcccttccagctctgacattcagatgcgcagaactgagggtggccgaagcacccccgccctctccaaccagaagtaaaaccaagccccactgccatgctctgaggcctctctctgcaaagcgaaataacgattctcaatccagggcactgtccccctaagagggcctattaggattgaaacaaggcgaaaagcagggaggctgtttcaaatcacgcccgccccctttttggaagaatgtccgccaaattcctgaggtgtgagaaggaaagcggagacggacggtcactgcagcacaggtgtggcccctcgtcgcccctgcaccgggaggaacagctgcaggattgcaccccagagcgccgggaccacgggcgggggacgggggcggactgccgctcactcacccacaggctgctgaagtagtccagcccgcggcagatgagcgtggcagcgtgcaccagcagcacctgcacgcccaagtagctgccgaggcagtagaggccgtacaggagcgggccgccggcgccgagcagcaggagcaggcggcggcggcgcagcgcctgctcgcccagggcctcgacgccgtagtcgacgaagcagagcggcaggagcagcgcggccaggacgatgggcgtgtgcgcgcggtgcaggcgctgcagccagtggcggcccaggcgcgtcagcgagctcttgaaggggtgcagaaaagtgccgcatagcacggcccagagcagcggccgcaggaaggcctccaggatgaagtagaccagcaccgcggcgccgcagcacaggcacacgaacagcacggccccggtgttgtagaaggcctgcttaatgggcttgtcgaagcgcagcgccagcgccgcggtccgcggggtctccccgccaccgccactcggcccgaccgcgcgcgggacccgcggcgccggcccgggagagctccgcaggcttggcgcgtccttagggccgccgccgtcggccatcgttcctccgccacagccgcccccgaggggcggtaatgggagtcgggctagaaacgcgggcgggaggcagggcgggaggcgcgcgagattgtgggagttgtagttccccgctggtttacagacccaccaagcgcttgcaggaaactacaactcccgaaggggaaatggggaaaacgcctccgcctccttggtgtccgcaaggtcctgctaacaagtttgcagggtctatatcttcctggagggggggggggggggaagctcctttcactcattcgttaatgtcaatttctcgcgaggcgagatcccaaaaggcgccacattcagatattaaaacccaagctgcatactagaataccgtgggggagtacttttaaagaaccaatgccccgattctgttttactgatttatttaacagatatttttaaagtgttttctttggtgtatctgacaggattttaaatagagattaccatataacaggccctattctaagtggctcactcctattaactcatttaatccttagaac

SEQ ID NO: 52732 - DNA, 1401 bp, Homo sapiens
tcaagggactcatgttccctaggcctaaaacacactttgaccaaaagctgcctcacttgaatgccactaaggggctgtgtgtggccacccagaaacttaaacatatgtccctgatgcttgccagttgacaaggttaagaaaaacaggcagttcagatggccaagaagtggcaggggtcagaaggaaagggctcttctcttaccattttctcaaaaaaacaaatattgttattattttctcaaaatctgattacaaatatgatgactgctcattatggaaaatttagaaactttacaaaaacctttttttaaattttatttttaaaattttccttctttaaagaaaacctttaaaagcagtatcttacctggtaattatggacttctggatttgttttagagctaaacaaacaaacaaacaaaaaacagaaaaaaaaagaaaaataggttgtagagtggcattattaatgatttatttaacaatcatgaactattcctatgtgctacatactctaataggaacttccacataatgacttttttttggttattggctgtttaaaatgaacatataacaaggaaaaccccagacagcaactttcacttgtccttttagagctcacaaacagaaacagtaggaaatattccagaatgcagtctcaatgtcatattttggtgacaaaaatgaggtcctgtttcagttgggcaaaccaagtaattttactcccatttcaggcctgccctggcattgctgggagacctcacagcaccggcaccagaagctccagtgatgcgcagagcctcttcccacggcagggggaggcaccgatccctcctgagcatctcccactgggtactgtggtgggagccacatgtgggtccccttgctattaaaaccactgtcaataatctggccaccactttggaatgttctctccagacaagactctgtactgggaacttcacatctgttattatttaatccacacgacaaggctatgaggtcaacaaatgtgaccacctcgttttacagataaaggaacagttgcctaacagagagttgggaaacctgctcagggtcgcctggctggtcagtgggagccagggctagaatcaacatctgcagaatcctaaagcctgtcttctttctgctaaaccaacttggctcttagagggactgagaaaaggctcagggctcctcatcatgatcctatttcgatggaatctttttgtttgttttaagagatgagatctcacatgttgcccgggctggtcctgaactcctgggctcaagcaatcctccagcctcaacctcccaaagtgttgggattataggcatgagccactgtgcttggctgatgagatcttaaatgctaaatatatatatataggccgggcgtgg

SEQ ID NO: 52733 - DNA, 5496 bp, Homo sapiens
tttgccaactgtcctgactgatagtgcatggcacagtcaagctgtgcccatctcaaagaccaccctctcagccgccttgagacctgcgcctgggatgactgagagcctaatgaacctggcctacctaccagcggctgcagttcagaccaaaggtccaaacaatgcaagtctgtggttctctcacatgacagcttgtctactcaacaagccaaaactcacataagacaggcagttgtttcagagagagcaagagcggtatatgccgggcagactcacctgggcagctttaaaaacaagctatatgggtcccaccctgagagactgattcaatgcgcctggggtgtggctgcggaggatgtttcagataattatgctcaccagatcattctactatacaggcaagaccctggacacctgtgccagggaagaggcctgcaaaaactataccccttgggccaaatctggtccactgatatttataagtaaagttttattggaatgcagtcacgttcgctcatttacatattttccacagcggctctctagctacaacagcagaggtgagtagctgtgaaagacacagcagagcctgcaaagtctcaaacatggactatgtggccctttacagaaaatgtttgctgaatcctgtgctggcaattttcactcttgtgataagttcattttcctgcaggaatttcagtaaaggtgtttaatgtcttctatgatgtaaaacctgcacgtcactgagcaaatctagcatctgctctcgtccagcttttgctcgcgagcaaggccttcctctcccagcactgcctgccacgccatgagcacagtgtgctgcgcacaggcctctacctttcccacccactgttatcataaacaaagcacacagctactcaaacaaagcagctgtgtttgccaaaaaaaccaaactgtcttggaacattatattgtgtacttattgaaagccatgagcatggaatagccaggcagcagaaaaaggggaaaaaaattaccagatgacacacttcctgatttcactgtagtaaggaaaaagtcaacattgcaaataaatacgatccttagagaggagagctgtgctctagagctcaaggacactcaccagagctgggctgctatcactgggttgcttgctataaaggaaaaacagaaagttatgacatcttagagaactttatcgctttcaccatgcaatgacagataatggccatgcgagacttctaccatcacagagcctttccaactccaacccaggcagaactgcatggtggctacttctcctttcctcagggagagtaaactacccctccctctgattcactcagcaaccatccactcagcaggttcccagggctgggcgctctgggaggcagggacaaagagacacagtctctgctctcaagaagttccctgtctagagacagagaaaggcagatacagagaagtgggtaaaagggaaaacagcacacggtgatcagggatgcaatataagcatgggtctggactgaggggcctcggggacgccgtgagggcctgcatggacagagccctgggaatgaggtacagcttagccgcttacactccattttgtttttaaaaggatagatgtggcagggaaaatcattaaaagcttgacaaagaagatgctagaactctggctggaaaaaagtcagtgaaataagggagagaaaagagggagggggaaaagaatcacagaccctggggcccagatctctaaagccatctggtggggtcaaaccacaggacgtccacttccctctgtgacagccacaccagggggtccctccctttgtgctgtatacacctgtaggggctgggaacgcactgctatcttgagacagctcttttgatctttggaaaattgttccttacactgagctatttctggacaactctgaaccagtggactacacacaccagcataatcctcctcatggaacagaacagagagcgttctggccccttcctcccgggcgctgtggccacccttcatcaacccatcgcccttctctggacacgctcccatcccctggcctctctcgaagggcaggactatttcctgtgctgtgggcattttccctccactaaagcagctgggagtgactaagaatttcaggtagtcatgctgttgcaccatcggttcataaaggaaagaatggtggggaacacaaagttacagattccagaagggaacaagtagaggtaccaagtcccatggaggcccactaagtcctgagccaagaaaaatgcatggagtggccacaaggaaatcatgtacagaaggggccaggaggctgggagtgcagaggctctgccataaaagagcaaacactgagtacaaactgggcgtcctaagtcggggagcaacctagtgtagagaaagaagagctacaagatgggatctggaggctgggatccaacagaaatgagcctggcttgctcattcactgactgagttgtactgtgttccgggcctcatacaggtatgaggccccagctgtaactgatggacaaggttgaaggggtttggaaaggggaagggggcaggcattctagggcctggctaaatttaagggtgaggaaagtttggactgactgtgggacttgagccgaatatctaaaagttcttcatgtacttgtacgtggtcagaattccagttagcatgggcctgatgtccacacttaaaattgcaagatgatggagatacagtatcttctataggcaagaaaggtgtttccctgtgatattcctgaggtaccggggcttgagcccaggtctaaaagaagcaaagaggcacatggaaagaaatatggagaaaggggagaaataaatgaacacatccacggcaaacactaatgacagagggatggcggaagtggccaggtcccgttaaaagaacaccactgggattatttttccaaaagctccagactggagaactgcgggtactttcttcataagctgcttgaccaagctcctcgagggcttaaatgactcaagcataatgtaaaattccaagaaagaatgaaaaacacacaacctttgaacgttgaatgtctccgggatggataacgtttactaggcttcctctcaaaggtgctggttcttcgtaacctggagccatgtgtagcttgatattctgtccgcccactgggaagtaaatattttctcgtgtgttatcaatatcagaatctcagtacattacctgtttttgaaagtgcacttttatttccaagagctccaacgtacgtttcaacttagcctgaactcacttgggtaaagaaacacaaagtttaaccttccatttggaaataaaatctcctttgccaagtccaggctacagtccaggggcagatatttccaccaaagggcaaaacctgcaatttaggtaccagccacttggctgcacaaaccaagcaggtttgatacatctcattaagagaacattgattttcacataaaataacctttcacagaacacactgcatagacatttaacccatcttttagaagactgttatcaatacccacttaactaggtctcagctttctttgctatgccaaggcaaacattactgatttcactaaggctttttgggtttcaaccaacgtgacacccggctgcagattccaggaggttgctggtttcgtctgatgtactcctcaactgcttcattccagttgctcttagtcaccatttgtcacctgctctgtgtgcctctaagggcaacctcttctcctccaaactcccttccttcttacacttccagaggagcagaaaggaacatggtctgggactaagcctggggcagtttcctcccaggagagaaaagcctgccttggcaactgccctgactgtccttcccgcctcactccactccgagtagacaccagcattctgtggagtgtctccggtaacctctgcatcctccacaggaccctgggatttgattgtttctcaaaaagagcttggtcttccccccaccccgcccccgaccccttggagcatttaaaacaaaataattctttaaacagaagttcatagctatttcctcacacagtagaaacatttgaaatgagcaaatcttttggcatttaaatagagttcagggatgtgccatgtgtgggtagaggttatgaaaccatgtgaagttttagatatcgtaactgagattctcaaatgtaaataggcctcaaaaaccctgggagcacattttaaatgcgtactgccaggccttacacatacacacacatgcatacccacagattctgactgcaaaggtctcagatgaggttgttgtcctcatttttaacaaacaccaagaaagttttcacacactttgagaaaaatggtcttaggatgataagcaaaaatatatcagaataagctcttgatgttttcaggctcttttcagattcaaatatctactcatcctaccttgggttacacattgatatctgctctcattcttaattaccccaaatttctggacattggcatgcaaaaggcaatacagtagcagttagaaatttaacagccagagttcacagggttgaatctccgctctaccacttactggctgtgtgtgattttaagcgtaatgcctctggccctggtttccttatctgtaaaatggggttaatcaacctaccttattaagggtgtgtgaacagttctggcacagtgctggccaacagaactttccaaaatgatcctgtgtcctgtgtctatattgtctaatatggtagccactagccacatgtggcttcttggccgcttgaaatatgactagcgatactgaagaattacattgtaaaatttatttcatattcattaacttaaattgccacgtgtggctagtgcctactgtattgaacagcacagctctgactaaatgtcagttattaacaattttgttattagttccattttatcaatgaccaggtgggggtcaaaagagcttcagttactcaccttaagaaacgtggggatgggacacacaacctaagtttctggactcaaatccactactctattcgcatacaagaaagaaatcacagttgccctccttcagaagacgtgatccgtgttgcagaaatggctccctacctgaatctgaagcgagagcccagcctgataaagtcggatctattggatttgctgtttcctggcgtccgcagtcggaagaatgcgtggtgctcaactgcacacttccaaaggtgtttgcaggtcctggcactgtctaaccggaacacaaacgtgtgctcttgctcacgtcccttaaagaggaagcacaagggcctcgagtgggcgtttgcaaccccaacacaggattttcacagcaagggggaagaaatgggagccaggcctacctgatcatcatcctcgaccaccacgagtgtcaatttgctctttttaaaatccattttggtaattttaggcctagtcagac

SEQ ID NO: 52734 - DNA, 1480 bp, Homo sapiens
tggagtcacagacttggctttctgggaatctgagtggctaatgaggggtcacttggggatgaggacatgctgccaaggtaacaggcataggttctaagggcagaaatgaaagatacctcctcctttctaactagagaacgcatttgcagcagacatgccaacgtcccctttagactcagaatgactgaacattagaagtgtaagttttcttggagaacaggtccaagtaccccattttacagatgagaaaacagaggccagaggagcaaggcagcctatctaaagcctaccaaatgagtcagaggcagagccaggaacaaggtccagtctgacttctagttcagggccacagatattctgaagccaaaaataccacacgctttaagacacacaggagaaggcagaatcaagaagagttccagggaagaagagggctggagagtggcaggtgctggaaacaggtggaggatgctggggacagagagaaccctaaatatggcattcaggaagcaagtggaaataggcctgccgctccaggtgtagagagtagattgagaagtagacatgcaaaaaaaaaaaaaaaaaagatggacagacagaatcggaagtgtaggggaagaaaattcaaggaattttagctgaacgacctcggtcttctcagcaggtgaggcaactgctggaacaaagcctccgtggggactggactaaaggtctgtgctcagatccagacatggacctgtcgggtggccaagagtcaatctggggctactgaggctcagggagcagctcgggagcttggactctgctgaacctgtgatcggtgctgatgccagaaggcacagaccgtggctctctccagcaacgcctggcaggctgggacaagccacagaggaaacagatgggcctgcgtgtcaaggggaggccaggggacagtcacgggggcaggagaatcaaaggccaagtgaggacacaggtgaggtggccgaggcctggctggggctgggaggaaggccagggcaggagaaggctgggaggggacaaagggcagaaggagaccgctgtgggccaagcccagagggaggggaactgggaaaatggaaggaatcaagggaagttatcctggaatggggactggcagaattctggatcttggagtgcaggtggtgacaggacacacgagaatctatgtgggtcttgtcaatctgctcaaatgaagcttaaatgacaggaaacagtgtccagaatatgtaggagggccagtaacttcagtcctgaggctacccagaggaagagaaaaactgagacaccaaaggcctcgagggatgcgaaggacagtcatgaggtcagagggtaggacactggtcggcccaacctcaaaggaagcggaattggactcagaggtggaaagaggaaaagttgttctgcccttctcccgggtccggtggacggagtgagagtctctggctgagaaatgagaagg

SEQ ID NO: 52735 - DNA, 676 bp, Homo sapiens
ttaagaggaacttcatcgcttttagaataaagctaaatacctctggacttcaaagcaaaataaatcccatagctctagaatactgaggtatcctaaacaaatacctccgaccttaaatttcctgctctcccattacaatatcccatatcccagacctcctttctcaggtttcatcctggagtgtcccattggatgtgtcactgctggctgtgtgcatgacctgggccagttccaagccagcttgggcccctccctggactttaaccagccattcttgctaccatcaaagcagtgctgatgccactcaatacagattgtaaccgactgagcagaggtgatatgggccttgggtctcaggccccagcaggcaagagcaataaaaggactccagtcggtgaaatgccatggaatgggctgtcaagagtgcgctgcaggttaataactaaccccggtaggcttttacagtctaccggccttccctggatgatgcccacatccatcacatgggcaggagagctggagaaagccccagctctcatgtgccagggttgagaaccctggtcgctttcagaagagatggcagagtctcagaggggcaaagaggctcgctggatgtcgctcataagcgctggggggctacgtgcaggaagctacacttgttacacccttgttactg

SEQ ID NO: 52736 - DNA, 1249 bp, Homo sapiens
agtgtaagggctcagtaagcctttgctgactgaagaaaacatattgtgagcaaacaaaaacattttggaaaacaatttaaaataaaccagaaattaaaatcaggtgggactagtaaaattaatctagctctagagagaggccacagaggctgcagaaggagtgagattagagggattagggtggtgggggggcacaccaggatgctgcccggctccagccccactctgccaggtcagctctggctggtagcagagtcacaggcatcctgggctggcgagagtcgagactgccccatagcagctgctttcagatgcaaggggactctgaggtcacatcaacaagacctttaacctgccagcaagagaaagtaattgtggtgaggagggtcagagtgccaggcagcttgcttcctaccaagggaggggcagcaggcagcacacagcgcagatggctaacaagcactgggggctccccaccccagctaagagtcccaggaaatgtagagaggagagccgagggcctcaccctaaagagatacaagctccaagtcgaccatccttattcaactgtgctgaggtgggagtagacagagacttccatcaacccacttaagttcatcattttaaaaacatgtttatatctgaatatgaaataaagcacagatgaatgcgcacccctattttaacagtgtttaatgaaactgtagatgttgttccaacctttgtgtattttcaaatgggtcttcgatgaatgcattgtaaacgagaaatgaaaggagagcacacacacgaacctggaaaacacacccagatgaatcagcagctgaccctgccctcaggcagcagccacgggctacaggtggaaactggagtgcagttcccactggaggagaaggctccaggcagggcagagagaggcccggggaggagcccactcccagccggccaaaggaagtcaagcagtgggcaaggatggaacacgtgttttgaggacaaatggtaggcggaggatttctgtggttgccaggctggatttttttctaagtccccacgcaagaatttaagggaaggccccacccccatcgaccttctgctatttcaaaacgaaacagacctgtgccttcatccactgcagggtactaggaacagaattcaatgagattatgcacgtgaaagtgcttagcaagttaatatttgttcagagccctgtaccagtgtagggtcatgttaccggcactggagaggctag

SEQ ID NO: 52737 - DNA, 942 bp, Homo sapiens
caaagtagaggaaggagaggtttctaagattacaacctactagcaacctttcagcactctgttgcaccatgaggccttcccgtcaccaaatcctcccaacatccccatttgaaagatcaggaagtcaatggctcagagagctgcaattgcccaaagctgcagagccagggtgcaatatgcaaaggtagatcttcgaattctgaaatcctccatgtttacactggaccacaatgagtcaatgttgagttccagatgcaggggaggcaagtgcaccaaatgcaacaatggcccatgggccgttccctccaaagcatggcgggagtgctaactggccgaccgcacatcctaacagctttccacactgagcacacagggcaacgggaggcggggctgagcaacagccacacgagcaaaagcgatgccagggatttagtcaacagagagctaatatgagtcaacagtgggtgccgctgccaagcacactaatgggatcttcagctgcattaatagaaggaaagcgtctagggcaggccgagggagggagtcctgccctgctctgaccagaccacacctgagggttgggcagggctgagctaggctaaggagagggaggtgctgtcgaaggcagggccagggtttctgaagaggactggctcaggctggcactctggttggtagggcgagcaagggctcatctggaagttgggtttgtacagcaagtccactttagactgcatgttatagatttttttaaaaagatccttttattcacattttattttatcaaagactggaaagctgctgactatccatagcaaagactaagaacacccaggggccaagcgcagtggctcatgcctgtaatcccaacactgttaggggctgaggcaggaggatcgcttgagcctacacgtttgagaccagccagggcaatacagtgag

SEQ ID NO: 52738 - DNA, 1743 bp, Homo sapiens
tcccatctgagacccttttcacatgttcctagttctctcatgaagtccaaacatttctcccacccgggaaggcctatatacttccttggaagtccgggtatgttatttcttcccttgacatcctcgagatgatctgtaacattcatctaaagctcaattaccgctgtgtcctcagtcacacccagaaattcccgaaggcaccgtctgccgcagcgccgggtgcacagtgggcgcccgattaatgtgtggtttgatttgatctgatctggccccttcagccaggaagactcactggtaactggacgccctgcagcggaccgcagcgccggcccagctctcagctggcgcggggcgggggtgcaaccacctgtgggcgggtgcccgggacgcaggcccaggcgccgccgccctgaggtgccccgccgaccccacgcacggtgcccaagggagaaagtcaggcgcgcctggccccccgggcaccccggggtcgactcccagcgccccagcaaagggctctgccggtgcaaggcaggcaggtctgagacagccgactctagagttagctcccaagtcaccctacccgctgcgaggaggctgcggggcagatggggctcagggaatgggaatggggtgtatccagaagggatcagcagagagcagaaatggtctaacccccgcctcccaaacttggggcgcctgccgagcagcaagcgaggggatctcctctctgctgtctcatcaaggcctgatggcgagtttgaggggggacaagctggacaccccaggacggcctcacattgatttgagattttctacccaataacccagtatcaggaagacccctgctggaagctagggacggaaggggagcgccggccacccacaccagggggggcggggtctcgggacttggggaccgtgtgtactggggagggggcgaggccccaaggactaggtgggcgccagagaaatcgcaaccccgcggcgcaatgtgccaaggagggggcacgggccaaaggtggggccccggaagagaccgggacggggtggcccaagaagaaaaagggttgaggagtgctcggagaagaggatgggggaggggatccccagggaggtgcaagggaagcgcccccgatgcaagcactgggggagggggagctgcctccaggggcgcgaggtgccagtgccccagactggccccgtcactcaccggcaggtccacgctcacttcggtcccgtcgagcaggaagacgcggcagtagagggtggccttggcggcgccggcggcggagatgtgcacggccgcgccgccggtgagcaggggcccgccgcccgccgggaacacgctgcccccgggcgcggcgggcagcgccgaggaggaggcggcggcggccgggcccccccgtggccccccatcgcgctcgtcccccagcccggcggccccgcgccccgccgcgccccgcgcgtagcgctgcatggagcggcggccaaaggtccggcgcaggaaccgcagcatcctggctgggggcgccccctgcctccgccccctgcgctgccgctgccgctgccgctgccgctgcgccgccgcccgggagcgtcccgcgacgccgtcagtgccctcggccgcccgcgccgcctctcgcgggctacggcccggggcaagcccgcgccgaggccgaggccgcgctctagccgcctgcggggcgcgccggcccggccagcgccggctgcgagtggccgcag

SEQ ID NO: 52739 - DNA, 1169 bp, Homo sapiens
cctgcgcgggctgccgaggggctgctccggacgggcggctgcgggctgccagggggctgccgggggcgcgggaggcgggctgcgggctgctcccgcgccgcgcgccggccgagggccagccggagcagggcgcctgcgtggtcctggcgcgctcgctcccactcgccgcgccgcgcccggggcccgaggaggccccgccgagcgcccgctcccaaggcgccttttcctgcgcccgcagcccccgcctcccacctgggaggctgcacctccagccgccgccgccgccgccgccgccgctgccgccgggactgcagcacgccctcctccctcggggctgcgccgggtaattgcaagccgggtctgtgctgccccctgccggcccgagcgccccctgctgctgtaggtgtgctcacgtgtgtacacgtaggtgagcacacacgtgtttccggcgcccagagccctggaggcgccgagtgcccctttgcaccgataggaaaacaaggccgcgtgccctctgggaagcgttgccccggagaccaggcagaatagcactacgttttcccccatgaaaaaatagcactgtttcctcttctggaaaaggagaggggtggactaggtaatcaacacggtaatctacaaggtccttgctacttaagttctgtcaatttaagatctcagagctggaaggacttttttagtcattccagtccagtggactcattccacataaggaacttgaggcccggcgaggagaggaagtatttttccaatatgctacgcaagaaaacacctttcctcaagatctcaggtccagtattgagataaaggcctggataaataacagagaaggctagtgaagttgaaaattactgagaagcagagtagatctgaggctctgagaatgaatagtgtaggacacactgagaatattggagagagacggaattgtttctaagcagtggccctccagtatacaagttcaaggtccgcttcgagtgaagagggttgaccagtgctgctaaatgaggaatgtggaagaggatgaagctgaaaggaggtcaggcctcttgggaagaataacactactatttatcattcccttaatcttgtgccaaacaccgtgctaagccctttccattcatcatctcaatccccacaacagcctggtt

SEQ ID NO: 52740 - DNA, 1230 bp, Homo sapiens
ctgctggccatttgatggcagcaatcatgtccccaaaggccaaccaaatgctgtaaatgacttttcctgatcctcaaggtggagtcctatgaacctttactctgttggtttcattagctcatggagatcctcctggatcccaataaggttatccatcataccagttaacagtcccatccctggtatcattctgcaaacatgaacagcaaggttctctctttaggcaagttgctgacaaatgttctgagcttcgaacacaaccaatgagcctccctgtggggtggttttccctttaaatcctaagcggccactctgtgcaaagctctgtgctaaccactagggggaaacaaagttaaacagtgataaacatttgcaaaacactgggcggtttcacatcgatttcaatgatgtcatcccacttgttactcatggtaaccctgtgatataggcaatgctttttatccccactaaacacataaggaaacagacccaaaggggtctgccactgttgctcagctgctaatttggaggctagactctgaccatagtccctgctcttacctacttactatactatatgctccaaactcctaagtaatccattttcctatctgtgagaaagcaacacatgcaaaagctaattatagcaaacaaaaaaggaagtgcttatgtgggaaataccttgtcattttaagttccatgctttcttctggttgataatattttatgttttgcagcaaagagagggtatatcccaggttccaaagtacagcatttcaagctgcccggctgttgtacttggaaagacttttacctgctattcattcaactccaacctgatcttagaggcggttctcaggggtcattcctaggacgttttcccagatgctctcccctctccctaagcaggatgaagtgcacccctggtggccatctccactgctagtatcatccacatctgcctccctacaggctgtagactccttggggagagcagtgtgttttatccatctgtgcaccctgaggctggtacagacctctatgtggcacaggtgcagggaacattctggaataaacatatattccaaaaaatatactttattctttgagcctcataaagccttggcaggccattaacaattttccatcattgtatatttttgggtactttacctgaagatcacttttttttttttaagagatggggttgctctgttgctcaggctggtg

SEQ ID NO: 52741 - DNA, 2197 bp, Homo sapiens
tctcaaaaaaaaaaaaaaaaaaaaaggaaataaaacagaatagaaaacttcagagtacctggtacttactatagttttataaaacgtttgcttcagtaatttatatatgtgtactgtattctgaaacaaaatatatttttactttggagttgtgatttttaaaaaacccactggttagaaccacacacacgtacacatgtacatacatacataatcacacacattatatataatatatataaaagacacatatacatgtaaacacacacatattatgttgtttttaagacatcccttcaacagagccttttttttttttctgcaacagggtctcagtcgatcacttaggctggagtacatggcttgatcatggctcactgcagccttgaacttctgggctcaagtgatcctcctagttagcctcctgagatgctgacacatgcaccaccacacctgactacttttttatttttatttttgtagaggcagggtcttgctatgtggcccaggctggtttcaaactcctggcctcaagtgaccctcccgccttgggttcctgaagtgctgggaagctcacaagtatgagccaccatgcctggcccagagtgtgttatttagtactggcctgaggaaaccttggtagggtcatttcaaacacattcttatagatttcatcaccagctctgtgtccgtcagcttatgaagtaacctgctgggctgagtgtttctatcctatccccagtttaccagcataaagagctggtatggggaaaactcagaggacagggcatgcttctgtgtggtcaccggatgtgtcataccagacaccttggacattggcttaaaaagtaataaaaaatacagtcaaattcccagtgtctgctatagtagagggaggaggtgcacaaagaaggcaaaatacagtaacagattaatatttggcctttcaacatattacaagttaaaatgtgatgtaattactgctaaaaaaaattaacaaggcaacactctgtgtctgagttaatgctgcctccttgattatgtcttttggccacgatgaatgtaaaacaggattcaatactaagcatctattgctttttttctatagcttccctccctaagaaaaataaatggatcaataataaaagggcttaacgttgccacaggggagggaaagtttgtttgtgcagtctgtgttaaaacagcaacaactttcttgtgctacactctcctactccattccaattactctgtccctcacacctagaaaaaccccagtaccagcccagggttgggagagactccaagccctgaggggtaaacaactcctatcacagccctctttcccttatctggttcacatatttcctgtacttgctgattcactgagaagacaagctgaatccagcctgctctcctttctaactcttgcaaactggggatctgatagaaaattcttataacaaagctggcctggtgactcatgcctataatcccagcaccttgggaggctgaggcaggcagatcacttgaggtcaggagtttgagaccagcctggacgacatggaaaccccatctccgttaaaaaaaaaaaaaaaaaaaattagccaggcatggtggtacctgcctgtaatcctagctactcgggaggctgaggtgggaggatcgcttgaacctgggaggcggaggttgcagtgagccaagctcgcacctctgcgctccagccagggtgaagagagagactccgtctcaaaacaaaaaaaaagaaagaaaattcttataacaagagatgtcttgttatcttcaagagccttgattttagctcttcagagacatcatgctatttgacctgtggatgactattttacaaatttgtcttctacatcctgcctacattggtagaaaatgactttttgtcctttgagcacagtgtgttcagcaggcaggagaggccagggaggtggaaggaggtgggagaggtaggaggtggcagatgggagtatgctgggaatggcagcaaatcaggagataagagaagcaggcccaagactgaaaactcattaggtgattaaaatgtcagtatgtgcaccccagatttttacttggatcatcattgttggtgtagttacacccaaatgaagttatttggccatagtaataaaatgaagagtacatttttagtggttactcattttta

SEQ ID NO: 52742 - DNA, 4286 bp, Homo sapiens
ctacctaaaattaagctactgatctcatttcattttccctccgagtagttccactaggccccagacagactggaaatcaggatggaatacatttactccacagggacatgaatcaagttgcataaaccttacaaaaatactctgctaatatttgctctcaggcacagacacgcccatttgggtgtcagtccacgatatttctatcttaggctctggcccccacccctttacagccaaaagcagcagaagccttcagaaaagaaaacagctaaagtcactttgaaaggtttgagatgtgctaatcacagtgcataccagccaagaagctggaatctcacaaccggaccatcctgccagcctctgttcccgccaaggagtctgaagccagtggtagtccggccagagaaacccaatcctcaccaccagtgtccctcgccataattttatctcaaggaaacagagaaaaatactctccacttacccccacgaagcatcatcttatttgtctctgatcagccaggtgactcgcgaagtcactaactcacttttctctggctcggtttcccaggttagagccctctaaagctttttccagctttaaaatcctctgcctgtaaggttttaatccagggggccatctcaggttatattaggttcggtaaccctgctggttgccagtgtgcccctagaaaccataaaatatttttatgcagcctattcagatttccagggctttgtaccctgataaaatggggtcagcaaattaatgaaactctttaaaaagacttctaaaaggcatgccaaaatgcaaatcaggagaacaacatttaggaacaaatgaatgaaatgtatatgtttatcaaaataacaagttgtaaaccttaaaaaaaaaaacagtaaaaagtaaacaaaaggaatgtataattgctactaaaaaataaaaggtaaagaaaaaaaggaaataatatatgtcattgctgctgttgatgcatttatctgtactgaggccttccacatgctgggagctgagaatacagagataaagacaaccctctcactgatttcaagagtggtccgtgactggaccaagaagatctttgcttgggagtactctgggacaggaggggtcttgccaggccagagtccactggaggtttgaaggaatagccagacctgggttctagtctctgctctgccactcccaagtggacatgaacctgaacaaattaatgttttgtcttagtttcctcccctgtgaataactatagggagcagagatttcattcttaacgcagcacagggcctggcccgccacagccactcaacaccagctctgtgaatgctgcctatgcattcttgcccttcccacctgccttctttctcagtccctgggccattccctttcctgtttctgggcttcctgtgctacagggcttcagcgatttccaagtatttttacacccctcactcctgactgattgattttgactgggcctggaaggtagcactgctgttaaccattttacaagattgggagactcgactcagaaccacgcacaggtcacacaggcagacttcaaacaaggtgatgatcccaagctcaggtgggggcatcacacaccacccactctgagtccactgatccacgtgactgggaggcagacgaattacaggtgattcactggaggtggtaaacggagccccacacttagtcactattgtctctgtaacttactaaataaggtatgttcttacccttttgagataatcttttataaacactccccgaggctctcatgttggtaaatttcctcttacaagggaaatggcccagaaaaccttcttgccccctaattaactctgcaacattagaaacttgagtaatgatctgggtatttatcaccatattacctctgctctaagatgacacacctgatgtaacaggtgtttcagcaaagttattttaaagaaacagtacatccaaggtaccctgtgactgtgaaggtcacggtgatttcagaagcattaaagtgtggccaacgcacctttcagaattgaggaaatgtagtaaatgacttcctcccacttttgcaaaaggcctggactggagtgtgtcacatgatgtctaaaggcccttccagcctcacaggcagccgtccctgggttaattattagcagcagcgggagggcagaaacaggccatctcatttcctgaggccaggctctgggtttggcctggggccgctcctacctgatgaccagctctccttccggacctcagtgaggtggccagccctggccccagtcagtctctcctcccactgcacctgcctccagggatctcggaactgccaggactccttccggcccatgggaagctgagcttctcagcaaactagagctccataagactcttgctcactcacctttcggggcacatgcactggctctgagccaaggatctcatgaggacagtcatggggcaggagtaactgataaacaagggggcggcaacctgggtgtagcaggggcctggatctctggaggatccaggacagcctcacggtgtctgaaccctgagcttctttcaacctgccaggagagaggctcaggtagcaagaaataaccctgggtggctgtgaaaaagggggatctgaccacagatggtagtgaaccttggaggggaaggagagggcggctcagaccagtggctacaaagggcgtggactctgatgtgctcaggttgaacaaaacaagccaaccaacaattttgtttgtgttttttaaaaagttgaacttgtaatgtctatgcaatcatatattccactctttctcatgatcactatccaacattcgtccaggtatttcaaacacttccctgaccccttctgttatgactctacgatattccaccacgtgggtgtacataactgtggctgggtgttcagatgacttctcactagcagagctcagatgtcagaaagaatccacagtaaacccagaaaaggaagaggaagcatgtgaccaaggacaggcaccaatgccaaggaagtgggggtcccgaagagccctgagttagggcaaaaacaccaaagaaaggaggaacgagatgacagacaggggctgggccaccacctagaggaggatggctaaacatgagcaaggtaactgatgatgatttgcgcaaaatcgccaagttaactgtgttctgtcttttctaccaggtagaacaatcttttacaatggaaaagatgaaattaaaggggatgggaagccattccctgagcaactcccatgacccaggagagagcccacactcaccatcttactggactctcacatcaaaagaggggaccaggcttcgcccatgaggttaccacatgtgtttctgaggtgacccagcggcagggcagaatccaaaccggtggctcctgccaaagacgtgctcctcccactacctcttctggtcttttctttttcttttctttttttctgttcttttaaatctccggtaaacaagcgttttttttttttttaattgtaaaatatataggacctaacgcttgccattttagccatttttaagtgtacaattcagtggctttaattatattcacaatgttgtgcaaacattaccactatttccagaaatttttcatcatcccaaacagaaactctgtacccattaggcaataactccccattcacccctcctccaactcctggccacctctaatctactttctgcctctacgaatttgcctagtctagatacatcagtggaaccacatagtatttgtctatttgagtctggcttatttcacttagcatgtttttaaggttcctccatattttagcatgtatcagaactttatttctttttatgactgaatgatattccattttgtttatcaattcatctgtcattggacatttgggttgtttctgccttctggctattgtgaatggtgttgcaatgcttaaattttatcatttcagcatacaagtatctgtccgagtccactttcaattctttcaggtatatacgtaggagtaggattgctgggtcacatggtagttctatctatagctttttaaaatttttttgagacacagtcttcctctgttgcccaggctggagtgcaaaggcaccatctcagcttactgcagcctcctccgcctcccaggctcaatggatcttcccatctcagcttccctagtagctgggactacaagtgtgtgccaccacgcccagctaagcttttgtacttttggtagactgggtt

SEQ ID NO: 52743 - DNA, 1767 bp, Homo sapiens
ggccaagggggagcccaacttgaacggaggtctccagtttccaagtcacaagctctttccaccagcttggaaaacccaggtgtcaagttgtctcaacttcccatgaatttttaaggcaaccgcaacttctcagtaagtttaggtagctgaaaatgggaatttcgggggggctgggcactctcacatacactcccccatctgcagctgtctcaccgcaggtacctgataaatcattccatatcgtccgcggaacggggaggatttattggctctggagtttcgtgccaggcccaggaaatgccatctttgaaagccgagaggcggattcgccctgggagccgagcgctggcagccgctctcggctagctccccgcgggctgtgtgccccctcggagccccgagccggggtcgcggcggcacggggtcctccggaggtgccggacgcacgggctccgcgggttgcgcccgcccctgcccggctggagcgcacgcccacgctccggcgccgcgtcccggccgccagcccgccccggccgagccccacccggcgccccgcccgcgccctcccgccccggccccgccaggtgagcgcagcggggcgccccctccccgccccgacgtggtgcggggatcccggtgcagccgcacccgccagcccgcccgcgcgtccgccgcgcgccccagggacgggtgggggcggggtggcgccgagcgcgaccccggcccccggcagccccgcaccctgcccccggcccgctggggtcgcacgggcccgtacctgcagcatccgggggcgcggagcgcccaggtaggtcgcgcgtgcgggcggcgcggaagctcgctcgcggcgcgacctggccgccgtctgagcatgcccagtgccgcccgcgggcggttcccgccggccgggctggccgcgacgggcccgcgcgccgggcggggggcgggcgtccgggctggcctgcggtgttctcccgcccccgccccgggctggcgcgccccgacgcatctcctaggggcaccggggctctccgccgagctccgggcaggtcctgagttccctcgcgcatgcatgcagccattcgttccacagccatgactgggcacctactgtgtgccaggccctcagtgatttcatgcctagggaaggcaagaagtcggcgcccaaagaaactttgaaatgaggagtcttgcacgacgggtgcgcggttgagctgaggtcccgctgacttccagtccagtgctcgtcccttggcactagtaagcttccctggttaaacctccccaaggctcgtgggacccctacctgatctgtgctcctgcttcccacctccgtctcatctcacacctgccttcctgcggatcctagagcgcctttctgtccatcaaacactcgaacttcactaacctcaggacattggcgcccgcctttccctctgtgggacgttcttgcccagcttttcacgtggccggcgccttctcattgtacataggtcccctcctcagagaggcctttcctgaccaccttcctcgattagccctctgctcctgaccactccgtgtactctgttttcttcatagcatttaacagtgatttatccattttcagcaaatatttattgagcacctattctggtttttctcgcgtggggaacaaatagacaaaaattctgtcccccagtggagtttggggaaagagggacaggtaacagataaacagcaaattagcaaactatgcattatattagaaagtgataagttctaaga

SEQ ID NO: 52744 - DNA, 1314 bp, Homo sapiens
tggacggtctgattgggtgacactgagaaggtgatagtggtatttcagccacgcagataagcagggaagagcattcctggccgagggaacagccagtgccaagacccaaaagagcgccggaccgcttagggaacggcaaggaggcagaggagcagatgaggttggtcactttggcttttcctccgatttgtttaattctcatgttgtatttccctcctaaatgtcagctttggggctgtagctctgcttgtctttactgcagtgacccccctgcaacactgtctggcacacactaggcgctcaaacattatttgttgaatatgtgaacgaagggatgcagagatggttggaaccctccagtcgggcctgggtgccaggtcctgggggcagtcgttccagggatagactgaggcctcggcagcccctggaacctcatttcggtccttgtcccggagtcgcacgtcccgggatagcgccgctgcagcgggtgccgcccgtgcatcgcgtcggggggatttccgacggagcccggagtccaggggcaggaccgcccgcgccccgcccggcccggcccggcctcgagtcgccagcaaaacctggagccgcggcgcccgctcagcaccactcggacgggcggggagcgcactgggcatgctcggagccgggcggggccggagcccccggaaggaggagccccctggaggggcaggcgacgccccccgcagagctccacccagcgcccccgggctcagcaggaggcattctctgtcctttccccactgccttatcctctctgtgcttcaaccattgtgaatacctacgcttcgatctgggcacccgagtggaagttgagtgaaataaggaacgtgaacgtgtttagaccaccttaaagatccatttcttgagtgcctaccaaaatcagccgtcatcctcatgccagtttgccaactgctgagatgaggaaaccgaggtcaacggaggatgtgtgaattttcgaagttgtcttaatctgctgacccctagactgaaattaccttttcttttcccacagctaacagctgttagcttaaacgatgccctcaactttgagctaggaacatgcttacacctaaaggaaagacctaaatattttaaaaatcatgcgttttaaatcaccataacagaagcaggaacaaaatgaaagaatactccccaaattggaaacaaactaagtactcaataacagagggatgattaattaggttatggtatattagttgaaataataactatcttacactaagttaaaaagaccatgttgcaacagggaaaaca

SEQ ID NO: 52745 - DNA, 484 bp, Homo sapiens
gcttcttaaaggaggtgcccatagaaaggggtagaaggagaggggaagaagagatgaagaaagggcatgccccaaccacatatacggaccctcagctctcaggctctctgctcttgaccttgggtctctgatgtcatccaccatgctctcctgggaccagaagcaagctaaccatgtgactggaaaggcagcagtaatagggatagtagtggtgatgtttgctaagagcagtggaccttaaaataaacacatcaaagtatgcaggatacacacaaaactgaaactggaaaggtcatcccctcccgaagaggaactgtatgagtggggcagaggagggatggaagtttacataaacctttttgtaccttctgaattttcttcctttatttttctttctttcatttctctccccttccttccttctttcctacctaccttctttccttccttccttctttccttccttcctccctccctcctttcc

SEQ ID NO: 52746 - DNA, 1797 bp, Homo sapiens
caggcaggagtgcagaggtacattctcagctcactgtggcttcaacctcccaggcttaagcaatcctcccaccccagccttccaagtagctgggactacaggtgcatgccacaagacttggctgatttttgtatttttggtagagatggggttttgcctttttgcccaggctggtgtcaaactcctgagctcaggcattcctcccgtcttggcttcccaaagtgctgggattataggcatgagccacagtgcccagtctgaattttctaccatgtgatgtataacctattttaaataaaaacattctcatttggaaaaaagtaatgaagcatgcctaatattttttcagaattgttttgttttccatcttggctgcctccaaattttgctgaccaagtgcaaagcccaggtttcttaacaagccaaggctctacgaccagggcacaacaatccataccttgcttgaaggaaacagctggaggtcaagaactctcactactactggaaattcatgtggctgagggatggaacagaagagagcttttggataaggataaaagaaaaggaaaaatggttttggtgacccagggatcaggaatgatgcctccctgatacaggtggtaacagaatggccagagaagtgagatggagaattccaactggtcagccctctgctggaagtcacatccatgaaaagacagttatctgaaaacctattcttgcttggcttaccatttcattgccgagaaactggaaacctgtcctgggcccaggagaacactgtgctccgaattcctggtgacattttaagaacgggggatgctattcagcctgcccagtgatctggtgcttctagtgttgcacggatgacacaccacaggatttcctcaactgcgccctggcgtcctgctaggatgtctttctcattttttccatggtacacacagtcattgcatcacagtccaaacggactgtccagcgatgcctttgtaaacatgagtcacatgtgaagttaaaggaatctgtgttcagccagggacagcagagttcctaaggcacatcgtcttcacataaggggtgcagattgataagggtcataggacttcctgctgagatgcccaagcagtgctccgggactcactttatgcagcagccactgaggcctccatccataacactcttcttcatccctatgaagttctccagctatcatatcagaaaacattactatttccccatttttcaccttcttgggtgtctctcagttgggtcctgaatgtcaccccctgtccagccttggtcatcccagcccaagcacaggcacaaacctctttcttgcttccccttgaaaaatgaaggtcacctatatcaacctcccgaaacaacacattcgactgtctctgcctgttgaaatcctggttaaggtccatctcagaaactgcctcttccccgattatctccactggctatgagctctctaatccctgcaccagagagtatttgatctgtttctctctctcttttttttttttttgagatggcgtttcgctctgtcacccaggctggagtgcagcggcgcgatcttggctcactgcaagctctgcctcccgggttcatgccattctcctgcctcagcgtcccaagtagctgggactacaggcgcctgccactatgcctggctaattttttgtatttttagtagagatggggtttcaccgtgttagccaggatggtctcaatctcctgaccttgtgatctgcctgcctcggcctcccaaagtgctgggattacaggctt

SEQ ID NO: 52747 - DNA, 653 bp, Homo sapiens
gaagctgggtaggatgagagagagggtggacattgagtctcctggccactccctgcaggctgtggtttggcaatgactgcatccatgatgcctgtcaagcaggtcctctctcctggctgcagctcttgccaaatccttcaccagctccctttcttttcccctgcaggcctaggggtggttacggcttcctgcagtggctggtctctgggtgcttcactatggtttcctttaaccctgctcaggtctctctaagtaatcccttcattacatactctccagttacctctttgttccctctgctcctgccaagacaggaaaacaaaaacattgactggaaagagtcaagaattctgggctcagttcaattcaattcagcaaacatttactgagtgaggtcctctcagccaggctctatgccaggagctgaggttacagaaaagaactcagacatggcacccacctcctgcagagttcacagcttcatgggatgctagagggcccctggtgtggctgcactggaggtggagtagaggctgagattgtcatgcctagtccaattggaggcagagagatgcagagaacctttggccataggatgctcccattggacaggtgctgatcagggtgacccagcctctaggtgatctgtgtgg

SEQ ID NO: 52748 - DNA, 773 bp, Homo sapiens
taagacatcagtgcctcctgaaattaagaaataaaacatcagtaatgatgggcttgtcaagtctgtttacaggctgaacttgcttaggatttctcagcattgtctaaagtctctcaatccttgtaataacaatggaatatgaagtcacatataagcaatatttttatttgctcaaactctgcctttgttctaagatattgaggcagctgaataatattgcctatatttgaggatacgttttgtgggctatcctgatacacctttcggatgcatttctattccaaagggtgtcatatgatcagcttattaaacaagctcaactttttctcactattgtccctttgaacttctctgttgactcatcctttcctgaccctggatgaaactttggaaagctccctgagctttttctgtcatgctcaggttaatacattgtctaaatttccaggcattaagcccagactggttgaatagcaaacttcaatctttcatcccctcctgcagcttggacccatatcaggcgggagactagcagtggggaagggggtcggggttggatcactcactattttctcagtcttccactctttctcttctgctttgttgcgctggcttctccagtattagggctcgaaaggcaaagagggtgaggggcagaaaatggctcctttgactgctatagttgttatttacattggtgccctctggggatggggcagtggaccaaagccagtccctcctctccagggcttgttcttgggttcctctgaggt

SEQ ID NO: 52749 - DNA, 514 bp, Homo sapiens
ctgataggattatactgagttaagtattaatggccttatatcaattaaacatcactgatgtcttctggctctcagcttaaccaatgtgcagcatatccagatgacattgcccttgcctctctctaatgtgtggttaaggggcagctattttcctcggcaaagtccccttgatgagtccatggtgtcactgggttatctctgagaggtcattgttcttcttccatcataggtcagacttggcagtggtgaaataaatgttcttgctacatctgtacacacataatcatgagctgttctgaacacatacgtcattttgtggatatgtgagtggattctcaaaacaaaaaacaaataggtcttttcagctttctgagctagaaaaaacaataagtatgctgcaacaaagaggatgatcccaggtcaagtgcagaagtttgtgttggctgtgggactaagtcacccccaggatccctccatcctcaatagactatgattccaagaattatccagagtc

SEQ ID NO: 52750 - DNA, 1152 bp, Homo sapiens
caggtggcttattaccgcggggccggggccgtggtaatttgggaaaccatagtcaatatagctattgttttcaaatagcagactagggaaactgaccctggacaatgtcttcctggcaggcgggaacacgcagaatttggagtgaaacggaaaggggcatggggtcgccaaggtggtgaaacgccgcattaaggcgcttcaagatagctggagttttgcttgggaaactcagagggatctcgcccggccggcacaatggcgtttctgaacccatgcccagcccactgggggcagtccttgctgcttgcagaggccagacgcttcttgcaacttctaagcggcgagagctgccaccttgccaatgactcaaccgtttgcctatgccctctgggctgtgccaccagccgcagccgccctgctcccccacccacccttctccccaggctccgcgccgcgccgccagtcccaggggagccgccggcgcacctggcgcctagggcgcacggcactgcgcgctggtgggcacctcacccgacgccagctgccagcgcgctccctccccgaaaccctgaagtggggtgtcttgtctagcgcccagcgaacaacattatccaattgcttcccgttttattcgcaggctgggagctgagagagcctgagcattcactttcaaccctccaggggaggagggggtgcgggtggggaggggagacggctcccagctccacctcgcgcgcggcgcggccagtgcactcggctccgggagaggcgagcagcgccggtgagccccgcagcagcgcacccggccgcggagccccgcgatggagtgagtatccccgagccgcgccgccagctgctctcctctcggcatgttgccatggtgaccgcggcggcaggcagatcccgctcgggtccgcgtccaggatgggtgtttaatttcagccccgtgtgtacgcctggtgtttctatagcagccgccgcggcggcaggaggcaaggggtgggagccccgggtggcgtggtttttgcggctgccccttggctagcagggcctggggggcgagtgaggggagtagatgatgttgctaaggacggaggcatattctaggctttcctatctctgccccaagcttccgcttatcggggagttggc

SEQ ID NO: 52751 - DNA, 537 bp, Homo sapiens
aaataaagttgaaaggctaaagatgacaacttgattgcagcacataggacatttttatgggcaagtcgtgcttaaaaataacagaacgacaaatgggcaaaaagaaaaatgggcaaagacacaaacagatgattcacaaagaatgatcacattaaatcaaacacaagataccattttcacccactgaactggcaaaatgttgtaactgtattaccttatgaagcaagaatgtagttgaaaagattcaacacagctgttagtagaattggtacctcttttctgatgcctgtctggtggacaatcaggcagtataaatcaaaagcttgaaactagttcttgccattggagtcataattccacttttcagaattttatattgagggaataatcagagatgtaaataaagatttttgtacaaggatgtttattgtagcattatttataattaggaaaaattgcaagcaatctattccaaaattagatgattaaatttgctgacaaaattataggccagaacattattccaccattaaaatc

SEQ ID NO: 52752 - DNA, 801 bp, Homo sapiens
ctactatgtgtcacttgtgtcccccacttcttcctgtgtcatctcctgtggttcagttcttagtgtttcagtctttgcttttgacccattcactccaagggcttccagaggatgttgaatgggacaaaatattgctatgtgacccacatttgagaagatccaatgacagttggatccaggcacctccctatgacttaccactgggaggcagaactacccagttaaggaaggtggtatttgtccttttccaaagatagcatagtggttaagtgcacagatatttggagtcagactacttgggtttgaatccagcctctgccacttactaactgtatgcttttagttgagtcacttaacctagttgaattatttaacttctctgtgcctctggtttctcatttgttaaatagagataataaaagtttcttactccataggtcaattgaattaactgaatccactattaagaacagcaattatgtcactataattccccaatccttctgccctgccccaagtcccactaagggaggagagaagaaaagaaggaatgaaccatgcttgcctctaacttcaagtctccccagcaagggatcaaaatcgtgtagaagggaaggggaggggaagaggtgagatttcaatcacatttgagatagaaacatttaactggtttgaaattttaataccttttcaaaaaacatgcctggaaagctatgagatatgttcaagatgtaattatgaactaaaaaggctgtattgcagttttttagaaaaataaaaatgatttcatttaaattcacc

SEQ ID NO: 52753 - DNA, 793 bp, Homo sapiens
tctccttgtttatggaatgacattcaaccagcctgagttcctttcaaggctgtcagtttataaccctatggcctatggcttttatctcccagacaagggaactctctctaaatgtaatttttccctcaattttaatcacagcatttaatgtaatcatttgggggaatcaatctgaaaatcatcagggattcttttttctttttactgctaccacgaatagtgattgtgcaacagagttggggaaagacttttgtttttgatgttgcaatagcaggaaatagaaagttgctgctgtcagccacttggtcagagttacatttcttttgcaccacaaaagaagacttgtaggagactggaatatggttccaggtaacccaactatacattcaatgatgaatgcaccactgcaaaggagaggtgtggccattgttgagtaatttgatgaaagaacaactaaaacagattctagatgatttaaccttgacttaaagtaagcccgagggggagaccataattataactaacttccatttttcttggcagagtctacagtccattttgttttcatttcatttaaagtattcccactactggattatctccattttagatcaataatcctcttcctccctttgcagtggctttaaatgttttaagaatttgtagtcattttttttttaagctatcctgaggaatcaatctagactatcacttaggaacaagaaatgcatcataactggcatcttgcagctagtataaagagagtaaattacaaattaaatattgaaactaa

SEQ ID NO: 52754 - DNA, 576 bp, Homo sapiens
tagttctgagtggccatgattttgtaatgcaagtgatgctagctcagaaactccatgcctggccctctctagacacccaagggaagggctgcagaacgtgggcaactcccagggcttttgaggccctggagcttcccacccggaacacaaaatacactgtcatgtgtcatcttgctttgtgacttctcatcttaaggtcttgtcaaagctggccacgtaggcctttgaaaatatcatagagttctttgaagtaggttgtttacttttcttgaaacacatctgtgattcatcttatttgcattttaaaatgtaagtgttttggccagcaatttgagggagaagtccaatagaaaatcagtataccagtccaatttgacagctttcatctaatctatcatcactttctattcatttgttcactcattcattcagcaactacctaatgggtatttactacatgccaggtactgttctagctgcttgggaaacagcagtgagcaaagcaaggtcaggaaggtttcattccagggaaaagggacagataataaacaaaggtataaattttttatgtgtcag

SEQ ID NO: 52755 - DNA, 1005 bp, Homo sapiens
agggcagtttgtaaaaaatgcagattctgattcagaaggtctcagggtgttgataatctgcatttcaaacaagctccaggtaatgctgctgctgctgtcacagaccacagtatgaggcatcaggttttaggggatgagtaaaacctcctgagcctgagatgcaatgcacaacatggtcggggacttggtatcaacccagtgaccaattgtgatggaggccacatggttcctggttatacccaggcctgtcatatgcagagtgtcacatgcctgccttctggaattcccccagctcctcactaatgtcccagggaggagaggcaggcaggctgtcttgggcttctctgataagatatgtcaagtgtacatgcattaccttccctactgtctggggagtcctttcggaaagcacttaaggacatgctatgcactgagcacttagctctttatattgtggagctcagggtcaacgttttgcccataaaagggccacttgtgtaggtcaaactgccgagtcaatgaccctgcccagtgggaatagtattgtcacccctgtttttggcacaaatgatttgagtgttttccaaacatcattaaatgccaaggtccctgaccctaaatgtggttcaggtgtagggactcagaggcccacagctagactgggcaagggaggggtagaagattaaaatgggaatgactgacaggcataggctattaattctcaaaggttggctctgcatcttcttgcagactcattgcgatttcctcaaagcaaggccttcactgcctggttgtgcatcatagagttcacagcattgtgaaatcacccttaaggcaaagctgacagcatctttatttattgtgcatggatttcatgttaacctcatcatccttttgctgcatgttgataaggcagaaatagtgagtcatttaaatagcggattacaaagactctgatgtagtaaatctaccctctaggttttcatttcataaagaatctgtgca

SEQ ID NO: 52756 - DNA, 3089 bp, Homo sapiens
tccagtccaggacctgtcacaaaagactcacattagtaccacatggtatcctgttttagtaaagaataggtgaaatattttagtgagtagatcctacttttcctttcagatgcaatgaacagaagaccctgaaaggatttcaatccagaatgtcacaggataataagagcagatgtctgtgatgccctttacaaagcacctttacatactgtctctcattcgtctctaatgacacctatgtgatcctccattttttcagatgaggaaactgaggttcagagtgattaagcgagttgcctgagatttcacagctaacacattgtgaaatctagtctagcacccaggactaaaaactctcggcttcttttaaggccacatatcgcctcaccagaagggtggcctctctggagatataccctaccctcggccgacttgatattgagaacttggtcatcttaagcatgtgggccacttgggcaaggcagcccttcccaaattgtaaatgtccccacgtggagctcaagcgtctggcttgagccagaaggtgccctgaacactcggtggccccagcccccacgtaacagcacgtgctcgggtcccacattcggtcagacgcccctctccactggcatctgcccggtggaggcgccactgcgctctgcctccgccccagcaagcgcgtgtccacgcgggcgcgccacgccagccgtgcgccccagcggctcgccgtgcgcccgcgccccaggtgcccactggctcgcgcgccctccgtctgcgccttggagacccgcggcggcgatcgctcggagccgccttggaccgcggcctcgggtccatcacactccaggggcggagcgaggcaccgagacgtcagggcggagaactagcgccgggctagcgcgccctcccggcggctgccggcgtcccacgtcctcggctggcgcggccggcggcggcggcgaccgggagatgcagtgagcggcggcgctggggcgcagccaggcggccgggagggcgggggccagaggctgagcccgggcgagcccgccgtgcgcacagctctgcccgccgcccctggagcggatccccagccgtccctgggcgttctcccgggttctagcaaagccccccggggtgcccatcagtttccttgggtgactacagcgtgtgttttttctttcctctttcccctgcctgtgtgcccttctccaggatggcagaggcggaattgcacaaggaaaggctgcaagccatagcagtaagtccactttcattttattttcttgctctattgtctggggtggaagggggcccccgagggtttcggggcaagcggcatgccagcacagtagccgcaggtcatatgttccaggggctaaaactctgtcagggctcagctaggctgccttttcttttctatgtctatagatggagacccccaagggcgcgctttggactgaggatttgaatgtggaagattggcttaaaaaaagatgcttgctgctgggctttggggaaggactaaacagaggcttggggtggggggacgactccaggaatattatgaccgaatgctcaggcatacgttggcttcatagcctggagaaccaagagaagggtgacctgaacggtggctgccatcctctctgcggaagctgtcctcctgttaagtggaaaaccaggagtcagcgactcagccagccacgcggtagaacctcctcccagaaaccgggaatgttagttttcccttctctgtttgatattgacaagggcactggcacaagccaccaccctggaggtctggggacttcatacaactgggtcctggttataatattccatgagagcctccttcttatggtgtggagtatctgaaaacctattttcagcctacaaaggagtagtcagttttggcaaagttcgtaggcactttcagaaaagtgtacccatgtgcatcttgggtttaaaaaagaactctctgagactgcctagatttgagcaatcttaacacagtgttgccaatgatccacagatgtggtatttttactggagccaccacagctggattatatatttccttcgaggatgagggaatgattactgctgccgtatgaaatagtaacaattaaaaaagaaggtccgttaacatattggcataaaagaatctccagacattcttccacctaaatacatttgtgtttttcagttcggaagttctctggaaacacatataaatttgttggagaaatagtgtgtaatgttttggaaccaaagtatattaaagcgttttccaaaacctttttggacagattcttcattgggaaaatgcacacagacccttccttttttagaagcatttgacatggtctccaaggctctgagaccctctttctcaaacgcctcaaatctgaaatgtcttggagacttcaccactgaagtgagagagatgtttgctggcaatattgaaatgccatggtttgcctattaggtaatctttgaacgtggtgctctgaactcagaaaggttgtttttttcttctttctctttccccctgtgcatgtgtattttgatggtttgtgaagttatttgtggtttctaaagttggtggcaaggcagcatggccagtgtgtcatgaacttgataagaatggtgatattgagttaatggtgccatgtagctggtgggtgttttgtgtgaactggataataggctgctttaactgttgatgcagtggctgttcccattggctgctgctgaaggcttccaacagttgtcacattttctgcctttgcacaaccagctttactggatgcctgaggaacagctgaactccatgaaaggacttgctttccaaacatggagccagtagctgctaacactggggtacccttttccaagtgcggttgagtaatcccagcagaggccaagtcgattttccaagaaagatctaggcaaatctttgggaattctcttgagcatataagaatacacacaaatactcacttgtgcctcttcagttattgaagaattgagtttgtcctgtgtatctggggagctgttgattattctcatgaatgtgcacctaatac

SEQ ID NO: 52757 - DNA, 5429 bp, Homo sapiens
ttatccaggtaagcaaaagcatactctaggatagcagtgctcctgtaacctgcatggcctatttttcttttccaggtggtatgcaggcagtcttgttcatgaacattgatgtctgagcatgtgtgttcaaaattcagtgttgttaatcaaataaaactcaccacaaaacccgaaggatatttaacaatagatgagataggtttggcggagatgggtcagaagacagaggaggtcctggaggcagcagtagaatgtactttccaatcttactggtgactagagataagacactagtagcctgtttactccccatccttatttacactggagtgagaatgatatatgtcagatcagtattggatgcgatgagggagaatgaagagaaaatattgactctgaaaaatacagacaagaggaggcaaagttgaaagtaatgtaaactgcttaatcacctgcctttctctctttccaccgtcatctctttctacttgacatgttcctgcttttgcctctggatggttctatctctcatcccctctcagcctgggtccacagagaaaagcaggaagcagcctggcatggcagtggagggagccttttccagccttcctccagcagaagtgcgccctctcccctatagggagatagggcaccccaggcttcagaaagcaagggaaagatggtacttcatcatgtagcttttcttaaggggttggagggaagggctcccagttccggagagggtccatgtgccagccaccctgctgaatgccttatgttaggggggtgagatctcagatgtgcacaggtaccaggttgacttggctgagcttttgggactgtggtagccaagagagggcagactcctgaggggacagagagtgctcaactccaactgatgggcactgtgtgggaatttgagcccagggtctcctgcttttccaagagaacctggaaatccaattttgaaggaagtctgttgatgtttaaatgctcacaacagtttaaatactgtatgggccaaaccaaacataacacagattttaacacagtgtaggctggatttgttccctgtctcaatgaccctccccctctacccccagcctgggccaccagttttccacgtctgcatgtcacaacctattttatttaattacaaaaccaatagtatgtgggaatgggggctggggggttggtacagtataaagctatgtgagttgtagatacacttatgtatgttgggcaccttggtgggatccataccctataagaaaaccatagtcttgggtcagagtcagggctgctacttaaatcagttccttatccagcatgctggatgaactcatcagttctctgtaagaagtaaaaactacaagcactctttaaaaaaaatgaaaatgaatgaagagaaaaatagacttattaaattctttaatttggaagactgggtctcgctatgttgctcaggttggtcctgaactcttgggctcaagcgatccttccacctcagcttcctaagtagctgggattataggcatgtgccattgctcccagcactaaaattgactttcttgatgtacagctctctcaatttgaacacatgcgtagatttgtgcaatcactggtatactcaggcaacagaacagttccatcacccccaaaagtctcccaggaaggctgattttaaaactctaactggaatctaagtcattctgcttggggctaccttataccctgactttgaagaccctaaaaatcagttgagggtgggagggttgaccagaacatgaaacttgggttcccagccattggtggggaactgtttcataatgagcaccctaccatacctatataacaagtttttgcttcttcctaatacataccttctgctccagcctgggtcgtcttttcactatcccctactagggttgttccatttagcaactaaatgtataggatgcccagtgattccatggggacatatttatattaaaatattatttgttgttgatctgaaattcacatttaacaggacattccatattttatctggcaagcccatcctcttcacattcatgccacattctcatgtaagttcaaaacctactttctctgtgtttcaccaaagggtgaaaatactctttgaaaatactctttgattttattacacttaatcttagccaaaggccaagaagcgattgtatgctttgattttaaatagtagcatgtttatagggagatagggcaagtgttggaaggataagagtgctttctatacacataaatggattttcaagaaatgttttgtgaccaactggttttatcctttccagagaacaagaaatgatctaatatgtgctcaaggaaggaggacaactggatttcagaaattggttcatgttacagcccctcctctaccctttttctctggcctgacctttgaataatataagtctgaaaagactaaacaaagagattgctcaaactggatgagtttaaaaataacattggaatgctagccttcagcaagccatatatcttatactgcactgagcaggacagtgccctgtggtgggtagaagatgagtcacacagtgatcacaaccagatccttcccagcctggatactttggtggagagtggtgtgatggctgatttatttgtcttgtttgtttgttgtttcatttttccattttactagtgtgatttcagaatcacaaggaggcaaggaggaaaattgattttagatagcagcttcagaatgaaaaatgagtggaaattccacttttcggtctagaccagggaccagcaaacaatagcccgtgggccaaattcagcctgcagcctcttttcataaggcctatgagcagtgcctggtttttatatttttacaaatttgaaaaaattcaaaaaaggatcttttatgactcatgagatttgtatgaaattcaaatgtcagcatccataaataaacttttaccagagcataaccatgcccattcatgtatgtgttgtctatggctaagtttgtgctataatggcagaggtgaataattaaaacagagactctatggcctgtaaagccaaaaatatttactatctgaccatttggagaaaaactttgccaacccctgctttctacatggcgtatttcaatggctgtatttgcgatgaaggctccaggagccttttatctaaagaaatcactattgcctcattgcttacagtccagaacaataaagcatctcagacatccttttcactgttttctgggcttaccatgatgagaggttttgtttaccgaagctggcatgtgagttttgccgctgtggaattttctcattatatcctttgctatctaagccaactgcatgttgttgttgttgttgttgttgttttttgaaaaccagaaaatctgatctcttagggttaacagtttggcccatctgaaataagtccatacaattaaaaacatttctttctattgacagggactgagggttgagggaaagcactgcagattttccaggtgtatttttttttttttttgctccctggattttgcctgaaccctcacttttctctttcagggaactttaagcacacttagtgaaagactaaaggtcagagagcacaccagccacattccctgagtccaagcagggagccagagaggagtggtttctggccagccttccctgttcagttacctcatggaacccttgggaccagggccttgatttacaaatagagtggccactaggtaaaagttgcccatggccagtggtagcaggatcgaccctagtgtctctgaatcattaagtacttcctttctgccctcttccatttcttactcaaaaacaccagctacaattttgagtctggtctgcctggaaatttccaaagggactttggtgccttaataaatattttcaaattgctcaaggttttggaagatagcagagccataattgtgaaatcgggttaaagaatgattgctgcagtacttgcgtcggccctgtggccatgctgaagtggacagggttgtggacactcacaattgctcactgcagatggacagcctttgcttttctggtcatacatatgcttgatcctgaaattctctagatgggctacttctgagcagctgcttggagaatgggaagccaaccctatagtgtaaggtttcttaactgaagtaccattaacactttgggatagataattttctgctgtctgtggggccgatcttttgcattataggatgttagtggcatccttggtctctatccattaaatgctagtagcacaccccactcttcattgtgacaatcaagaaggtctccagacattgccaaatatcctttggggaaaaaaataacccctttgaaaatcactgatgtagtataacataaaggttacctgaccaaatgtacttcccattcttttaccattagggatttatccctttaagtcttcactctcatcattagggattaatttctttaaatgtcaaagtcttttttattttctagaatccctcacgacaatattgatttaactaacctgcacgttgtgcacgtgtaccctaaaacttaaagtataataaaaaataaaattaaaaaaatggtaaatccttaagcttgggatggcagatggttttcagctcctatgtgaactctaactgatagaaagtgtccatctatagtgccgccgtgggaagatctttgaagctgcattttaggtgttggagaaaggacattaagacagattagagctgtcttccatgggcaagagatgagggagttggcatacacgtgtaaggaaccttcttacctaacatttctgcggagattcactatagtcaggccttaggctggtgctgtagttcagccttactgctgagccctgtgccagggcactgttcacacaaggtccctgtagccttgtgtatttgttagggcaattttccagcaggttttgaggaaagggcaccttttctagatcacagagtgccatatgggcgagcagaggtgctgtactctgttgatgggaatagaagtcagggaacaaaaagagaggggcaaagaatataacttcctgtctgtctctcctgcctgactgtaaacttcttgaggccaatgactatgtcatattcaccattatctactctccgcctgtcacaacacattttgcatagtgtcaaagcaagtttagtgacttttagcagagttcttgttctgtatcttggactccttagcagtcttgtggaacctatgggtcgcttttcagaatagtgcttaaatgcacaaaataaaatatttaggattaaaaatataaccaatgaaatttatatatagtcagcaaaatattagaaaactgtgatagataatgtgctttgattgattgatgtacagtcagcaaaatat

SEQ ID NO: 52758 - DNA, 911 bp, Homo sapiens
tagggaagaataatttatgaataaactattgaatatatactatgtttgtatagtttgtagtacagagacttggttgtgctggggagggggataccttcatagaatgttcaagaaaaaccttactaataagctagtgttggagctgtgataaaaaacaaagagtgagccatgtggatatctgggggaaacacacttctggtggaaggaacagcaagtgctggcctgagctgagatcatacttagtgtgttcaaaaagcaaaaggaaagcctagtgtggcaggtggggagtgggtgaaggagagtggtaggtgatgtgaccaaagaggtggtggctggggctggattatgaaggcatctatataccgtggtaaggatgttggcctttacttgacatgagatcagaatccagtggaagatttggagcacaagaattgcacaatctgacctattttttaaaaagattactctggctgatgtggtgagctgagttagtaaggaagtgggcaagcgtggaagcagggagactagttgggaggatattgtggtaattcagagggaaaagagatacatgtgggccaagctagcagcagaggagatggggaatcctggattgatgttgatagtatagttcaggggatttttctcatccagtagatctaagtggaatgtgagagagagaaaaaaaagtccagaatgtgccaaaggttttgaggtaagcaactagaaggatggagtttcactggaatgaaatggggatcaccatgggaaggcctgctgtgaagggaaaataggaattcaattctggacatgttaagttcaatttttggagatgttggtctgatacctaggtggaagtgttgagtggtcagtgtcttagcctgttagtgctgctgtaacaaaatgccatagac

SEQ ID NO: 52759 - DNA, 7349 bp, Homo sapiens
taagtagctgtgactacaggtgtgtgccaccatgcctggctaattaaaaaaaattattttagagacggtggcttgctatgttgctgaagctggtctcaaactcctggcctcaagccatcctcctacctcagcctcccaaatagctgagattataggcatgagccactgtacccaggtatattgtattttcttaaagcaagtcatggtatacctgaaagaaaccaaatataaggcactgtagatgaatcccagtgctgttggcagaagggacagggaggccacatgtgaaccaggggtcactggccctgccccaaaggctggacttgaatatgcagctggtgccactggctaacagagccacagtctcggtcacaataatagaactgttgacccatgaggtttctggtcataggggcagaaactgccaacagggagagggcagctggccatctgaagccaggatctgtcccatccaggaaaggagaattggcaggagttggggacatcttgccatgggtgaatactcctctgagaagggagaagggaggaggcagcttacagacagaaccatgagggagggacaacatggagcccaaagccctgctcctgagttgctgggtctggatctcggggtcagggttgtttgtgagattggagaggcagcagaagtagcccagatgaaagggaagaacctgggttggtctctttgctgggcaaactctttgcaccacagtctgggctggctcaggcattggataggagtgagcctgagggtgggggtactgacccatccagcggcacaatttgggaaaggaaggggcagaagaagcaaggcgcggctgatgaggaacatctgctctcttcccacagtgcagatggaaggcctaaatgccagcacaccgtttatttcactttggcaaaatccatgtttatttcatccctcacctcattgtctagacttaacataaatcaggacagtgcaaatggaaaccacaggtccttctcttggccttgccagctttattcttccctagggcaggtgcgcatgttgcattagtgtcataaggtggcatgagactgtaccaggccattagtcctgattctgatccagcagcatcactgccttgctccgtgatcttcccatgtttgagtcacctcatccttgatatggaaggggcagtacctgttctctcagtagcataagataagaggtagggaagtgcttgggaaaatgcaataaaagacactgctggaagccttcagcagtaggttgggttacagaggtcttggccttgcaaaatgaagtgaggtcagcacagattaagcagaccaaatcaaatctttgatggttgagtgatttttaaaaatgattgcaggtctgcacaatttaacaagactgcccatagcagctgaaaacatttccagagcagatcagataaagccaagttagaaattggtcattgctgtaaatcaagtggcagactatcaatgacctagattaccccagttttcccacaggaagtgaaaggaaaaccactgtgtggctgctgaggcttgatttgtcaagagctgagagagctacacaacattaaaagattgcccatttctcagcttgccctaatgaattgggactcatttaattcagaagctgatgagatgtctaaatcacatctatagaataagtggtcagatttaaactccagttgccaacaatctgtaacggcctctggttgcgttgttcatctcttagttaataaatgcttggctttttgctgaagctgccgctttttaatgtctaacaccatgacgtcagcatttttcccattttctgccctccctttaaggaggtagggatgagaaatggtaagaagatagggcttgttatgggtcttgacttggaagacccagagcatgggtcttgaagtagaaccttgatggctcttttctgtctgtgctgcaggtttaggggcctgcatttagactggcccataactatgggagctgctcccagccatcctagacttctcaagaagcccataactcttaggaagaactaagagcctaactcgtgttgtcctggacttttcaagaagccgataactcctaggtagaaccaggaacccaactctactcgtctgtcctacgtagggtctacaaggcagtgtaacacaccacgccctgcaccctaactgatcatagtcagccgtggtgaccacaggatggttcatccttcttgctggttcccagcatccttcttgctggttcgcatgtgctcttttggcacttatcactcccacattctggactcctggccctgcagttgactttgaccctacctttggccctttgaatttgtgcaaataccactgctgagctgacttgactcattctccagctcccactaccgtttgcagtgaaggtttgtaatgcccttgatgagaatgaagctcccagtttcacattgggacacagtgggtaagcaaatgccacacaaaagaaggcacatagtgcacacttgtaccatcatctaacgtctgcatggttctattgcagggctatactttcttatcggtagatacatggaaatggaaatgcacctgcttttaaatatatacttaatgcacaagtgtcaatgatatagttttcacctgaagaaaatctagagccatcaaagtacagggcgagacatactatatgagcctgaacgattgtggcaggattctaagaatctggatgatgaatctgaagaactctgtaacaaacagatgcaaagatgccatatttagacctcagaggaagtgagcctcctgtcactgggagaatccattcattctcctgattcactcatatgcagaataagtgttgatggccttctgtgtgctagggattcaaggacagtgcagtggaaaagatgggctagtacggaggatttagaaggtggtgtgggacaataagtactctgatagagaagcatgtggtgctctcagaagtaacttgtccatgatcacaaaccagtaagtggcaatttaattttgaacacatgtatatctgacaccaagactcatctatcaaccattaagctatatcattgcataagcagttccctgtaactggattggaaggtttgagataatggtgagaatggtgagaaagaatgatggagagatggactgtcttgtatgccattttaggtagagtttggattttatcctgtgggtcatgggaatctctcaggaagtgatctagttggatatgcatttttgagagagtactccactgtagtatatgaagtaatttgaattgggagggatggggagtgggcagtaagaccactcagaggtggctatcttgatactgatccaagaatgaaatagggatagactgacatgagagagtggctgtggagatggtgaagaaggcatggatttgatagttatgtggttgaattgctggaacttggtactgattgagtaaagggtgagaggtatggagaaataaagttgatagccatgtttccagcatagacaaggggatggttgatgttgaacatggaaagagggacatattttggggaaaagtgatgagtttattttggacatgttgagatcataataccttcggaatatacatgtgagatgcctgataggaaataacatgtaggtatggaattcaggaaggagatctggttttggggacttcagtaaatctgcatcaaatagtaactttagccatggatgtgaatgaggctatccagggaaagaatgcaaaatataaggtcaacctggtgactcactgtgctgagggaagccagggaagcagaaggggagtcagggtagacagaaacaggggggtaggtgaagatgaaagaactttccaggaaggagggagtgatgcatggtgccaaatgccactgacaggcaatggtacacattctaaaaagtgtccattgaacataccaactagaaggtaactggtggccctcacaagaatggaaaagcaggttcagtgaggttgtggagtgtggagttcagctgagaggaagttggggattaaatgaagtctttgtctccctaagtggtgtggctgtgaaggaaagaagagaagtaagtcttagctagagagggcataggatttgcatggattgttttaagaagaggaagtctaaattcttaggtgaaggagttaggagaaaatagtgaaagaggtgaaatgcaggtgagtggaggataaatgatggtatggggtccctgagaggtcagggcatgatggaattcaaggtactggttattagcctttttatgtacaaacaaaaaagatattgatgttctatttatgctaagtatgggcttgtcctggggagaaagtatctttaactgaagctagagagttgacaaggaacatgtacaaagatccctggacagtgttgagagctcagataaggttggagaccacagatttgtagtgtcgttctcctacactccagggcaccttatgtaggtgtttgatcttgggaaatgagactgtgcttagctctcatttgggatttttgccagatacctggatgtagccaaaggacgaggaggcaagattgttgaggatataggaagacagtgcagtgattggaatggattgttcacatgatcttaggcgaaaagacataaaaatgaagacaggagggctatgatggactgggataagatagaggaagctggagattagaagatttgaaaagacccaagagcagaggtgtgaggacaagccagtgagagacagggaaagaggcgaggctgtggttggagtctgggccgctgcacctaaacagttccacatttagtgatgaggccagatttcagccctgagtgcagatcgttgaggagagtgaagatcaaggtcatcagagttgaggttttcaggaaactgtgggaatagggttgaatgagtcatgaacacaaacactgaagtcaccccggatgatggtgggatttcatatagctcctgtgagccaaggaatgaagtcatcagtggatgtacggaagtgaccagaagatcagctggggacagagttaaggagagagggaacaagggaacagatgagactttttccatgagggcagaggagtcatggtctggaaatgacatgaaggagaaagaaaagtgccaaacccacttcctgatcctaatgccatctggcttaagagcccatattcattgagtctgaaatgcaacggacaactaccagtttgtctggaggcggtacaaatactcttctaatatttttttaaaaactataggatgtagtctattttcaactttattcaaccagatttatttacccctaccgagttttctaaatcagtgaatcagtattttaaggaataaatcttaggcacataaaatgataggaataaaatatgtattataaagcttctttaatcaatacaagctattcttataagtctattggttaatgtctagattgccgtgcccacttaaaatgggaaaacattccagttggcactttgtggatgttgagttgctacttggacacagttactggccttttggtctgatcagaggccaattttgagctaggagtttcccatgcatatgcatgatgtcctactatctgtgatacatgctgggcatctgagcctgcctggtatgctaatgatcagaccagggaaatgcacatcactgtgagtcacaagggtagcacgtctaatctaaaaaattcaaacccctataattagagttcagatgtcttcatagctctattcctcagatttttttgatctgaaaaacaaaagcaaacaacaaacaattgtgtaaaaatagacagtctaggcttgtgtaaatttgcagtggaaatctgcctctctgatgagccatacagtgtctatgggttgaaaaacgaaattcagaaagcaaatagttggtcaccttagagcccagagggatgctcagaattccctaacctcacagcggtgactactgaaagtttcattctgttttatgacttgacttgcagcgaggaaggtagcacagctgtaaaccagctgtattttatttacgcttggaaacagggcccctttgttccaaatgttcctggccccctccctcaatttcatggatttaggttgttagtggaaaagtagttgttgaaatatcagttcactcttggaacctgccactcaccaggacttctggcaaccagtgagcctttttgtgatatgcagcaaggtaaagaagtcgttaagtggatctcccacatgttcctctgtgacttcattcatagaaatgcgctgataactgagttacattaagcgcagtcttcccagctgtctgaggacataagggatgtagcgcctcctagtggagggaatttcttagcatgtgttcaaccccgcacatatttttggaatgaggcaaggtatttaaaaatagtgtacgctaatgaatgtatttattatatctgggtagcagcgaaacagaaaaggtataaataagcctttcgaaaaatgtacttgctacacaatctctttttttttgacaagtcagcccttgaatacaaataatcttttaatggtgaaaaaaatgactgaatcatagcatcttataaacataggagctatgggtatcaataacatggaaactgaagctgtggttatttttgagtggaagaagagggattaaaattggcgtggggcacatggagaggcttctggaagtggctagcaatttctatttatttttaactgggtggtgattacaaaggtgtttgccttataaaaattcatttagctaaacattggttttatgatgcttctgtatctgtattgataagaaggtaaaaaacataaaaacttttcattaaacatactacctgctaaatttgctttttaaggaaaaacctcaaaaatgctaagccatgtatactttttatttttagagatggagtctcactgtgttgcccaggctgaactcaaactcctgggattaagggtttctcttgagtagttgggactacgggcgtgcctggcatggttttgacactttatttcactgtactttcgaaataagacttaggtaccagtgaacacctacattgacaggcctggtaatatcattaaaacttgagcttttatgttgtctgtggcacagactctcttctttctagttcttcagagaactccaaattcagtatttcacttggaacatccagttgccatagaaatgaccatgtaggttacaagttcatttttgtaaccagtcaaaaggagaaactaagaatgacacgaaggcatctttccattggaaaaaaatcctttgcagagtcccaatttgagaaa

SEQ ID NO: 52760 - DNA, 1995 bp, Homo sapiens
taaatcttaatcaagttaatatatgtaaagtgtctcatcagtgcctagcgcatagtgagttcccagcttctatagcaccctttcatctttctctccttacagcatcagagagcttgtcctctgtggctcccgtttctctctggccagaggcagagcctccatgggagcatgggagggatataatcagaacagcagcattctttcattatgacgtcaattcagccatccctcaatttactgagcccctgaaaggccatacagtgagccatcattgtaatgaagtaaaagtagctggatactccaggaagcccttctagtggcactttgttaggtgagatgtgtcagcattgacttcttttgtaagtgctacttctgttgaattcaatgcgttgaaaggtggaatgcattgatgaatgtattcagtgccttggccacttctcagttagcttttagagtagaggacctcatggccacatgacagagtctaactgtcagtttccagacatttactgtgcccttggccctgcttggactttggaaatccaaagatacatatgaccgacgcctgctctgggaggaattccctgtccatgtggaacacatctatgcccttctggtccaagtgagaagagaacatgaaggagcaagtgtgcatgcccataagtgccggtccctactcagttctcactcagtcccacagatacccaggtctactttatgtaggtccttgtgttggtttctggcattgctgagatgacagaggccccagtctctggagcctcagagatttcatggacacctttttctgcttgagctcatgagccagatatcactcctggcccaggtcactgggttaccagatgcacgggtgaaagagctgctcttgagcaaagggcctgggacacacatgccggagaagcatggtgagccagccgcagggaggaagagcactttgcaggagcatgctgtgcggggtcttgctgctgcttttcagaagcaggagagccatgagccttggggttcacatcagcaccgagactggcctttggtggcagggaggatatgcgtaccgggaggggttggccatactggaccacagggccactggttgggttgttcataattgatctttggggacacttactgcaacccatttattaggtgccccctctaaagtgatgatctcaatgaagatggttcacataggcccactacttctagaaggcccgaatccctggaccttcccaaccactttttctccctgttcctgggttacatggcttagctggatatttttgcacacagcattaagggcaagtgcactgttcctttgaaaacaacaagggaacaaggagttcagtgttgtggacatttaatgaactttctcctcctaagtacacaataccaaatcagcagaatcacagctgtctcctcccagctttacctaaattcccacatgtgctacctcagttagggaactatgacttcacctgccactagatggccctccatgtgcacataagccgctcccacatagcgaacttgcatcagattttctggatttttttttttttttttacatgtagacacacatgtgcatacacaatcttaacttttaccatccttgaagccaataatcaacactttagttttccttctggcattcaaatgatagaatgtattctcattctctggaaaatcagtttaacatcagaatctacagatattcctgaatattgtgggccacaaagcacatattaagatgaatttgaatttattctattaaatagtatgctttggtttatcttataaatgctgtatttaacagacttgtttctaaattaaatttttttaaagcactggaagagaaaggaagcacaaacatttgaatagtacttgctccatggaggcgggcagtgttctgaggtattttaaacattagctcatttaagcttcataactttgatgtaggtattccatatgcatcattataac

SEQ ID NO: 52761 - DNA, 1710 bp, Homo sapiens
gtcctacagaggtcctcattcactcacttgagcctgccttgcacatttctgcatcaaagcccctttgtccatgttatcatcctagcttgaaatgctgtctgaacacctctatgccttgatcatttttctcttcaagatcctactgacatgttccaacctcctgaaatcctgccctgcctccccacaagcagagttactcagactctcttctttgcattcctgcagcattttggtcttgcaatttgagctctactgtgcactgcattgtaactattcatatagcttcctccctcatgagatgatgaatttctcaaaagtagagactgggcagctgttactgaatatagcccaacacttgcttgataatgctcgataaacatgaatgagtgacccagaacatttcaaacttcccttccaagacctgaaagactcatatttctgggtgttttaagctctgtgatttctgctctggtcacctgggccaggaactgcctgcctctattttcatttcaggcctttctctctctgccagatgccttgatctctgagccgagtataccttgacccaaagccatgatgcagccctcagcttctgagaggaaggggtagggttcagtagttgcgcctctgagaacatgacagagaacaatagcaggaagcagccaagcgggaaacaatcagcccggcacaacccatgtggaggagcttcctgattggcttgatctggtgggagcaggaactcttacaataactctggaattatcccagtgggatgacaaatttctccactgaggagaagctgtcacctggtaatgtcaagcacggaaaacacagttagcaaaaaacaaaacaaaacccaagacaaagttctcttgaggaagagcagtttggatcagttggaagcctcccagccactgccatagcaccccatgccgacctccttcctagtctctgtttcaggtacaattaagtcgtcatctctaccttccggatagatatcattctgccgtccatggctcaaaggtcagaggtgctgtttattctttggtgtccttttgggtagtttagggaaatccatgctgtaggtgaccacaagagagaatgttcccttttagaactatattgattgagcacaggctgtgtgcaaatactcttctaggcactgtggatgccatagcaatacatgctgtttctgctttcatagagcagtgatttccaaatcctgtgtatcctatggaaagaccaagccaggcaaggggtggagtgacaggagctcccagtcagctttctccttaaaccacagcagctccctttgatcaagatgttggaaaagaaaaatctaccccaaaaagaggaaatgctgaaaacatttggattgggagtggtttcatttgctcttaggcaggacacactgcagggtagcagttaatattctaggctctagctacaagcagacctgggtttgaatcccagctctgccacttactggtggaaggtcataagttgcttgaactctctcaacctcaagttcttcatctgtcaagtgcgaataacagtagtagatattttaccaagtgcaaagaattgaataatgcttacaaaccatttagcatatcatctggcattgtctattacagtaaatgctcagtaaatgtgaactattttacccctgttgtttgacgttaattttttttcaatgaatgactcatt

SEQ ID NO: 52762 - DNA, 1776 bp, Homo sapiens
gttcaggagagatgctgaagatatagtttggatagatttaagcatgttcggtaggaattaaagcatgaggctggacatgagtagccaagaattaaatgttaatcaataagaacaataaaacaaataaacctttagtggtagagtaggagaagaggtgcccatatggagaacatggcgtcatggtctcttcatcatggaggaagagtgatcaaatatgtttttaaaaacgaagaagtcaaacagatccacaccaaagagggtccgctggacgtggcagtcatggacttgactaggagcagacgcagcagggcatgagggcagagggactgaggctgaggcatggacttgactaaaagcagatgcagcagggcggtgagggcagagggactgaggctgaggcatggacttgactaggagcagacgcagcagggcggtgagtgcagagggactgaggctgaggaggggtcaggatgtgaggatgttgaggcagtaagagatgactggccttggggaagtctggaagagggattcagcagcaactagaacaggatgcagggtcaagagaagttcacttatttttagtatggaaagagataattcttgtttattgactagcaggaaggaggcatcttggagagaggtgaagacacaggggagaggggatagttaatggggtatcctcccagatcagtctgcacaagctcaggtgcaggggtggaggcgctggccttcaacagacagtctgagtcagaggctggaggtcagaaggtgtggctggatgggactttttctcttcctagaaaaaagggacatttttagggggaaaaggagggggtttaagctattgagaaaagtactgctttgaaatgaaataatctcactttcctgtaatcaaaactctttatttctgatgaaacagactcaaataagaatcacaacaaagaaatcagtgctcagctcaagcctggaaatgatttcctacacggaaatccacttgcacagattctgatagtgtgagtcatgtgattccagatggagtaaatacacatgaaaaggagagaaaagctggtgtctccatgggctgaagcacacttatggagagagaaattttcatttatttgtatttgggcttcaatatgattacatcaccatcaataatgaaaagtgctgccatgtcccagctgtatacttagatcaagatataaatcagtccaatattgttcttttttctcactgaatatctaaatttgtatatttgaggggaaagtagaaaaaccaagccaagattttaaaaattacatttactatcaccatctccaagttacattcactatagaatcctttagaagcatgttcttgggtagctttgctttttatgcactcaacaaatatttattgagcatctgtatgtacagggaagaatgtgaggtacagtaacacaaaatatatagtcctatctcttaataagcctgcacttgggagaaggtatagatagggttgggaaggataaatatatttttaacactctaatacaaggcagagtgtaccaaaagttagaaatgctgtggagaatcagaatgaatgaacataccaggctgggttggggggctgggggaattatggaaaacattcctaaagagatgtaatttgatttgggcttttattatgatatctgttttcagacaatggagttgagagtggggagtccttcctggctttgtcaggagcagtttgaggtcttggctgaagacaggaaggcataaggctggaaagggg

SEQ ID NO: 52763 - DNA, 2507 bp, Homo sapiens
taatatatggtagacttgataagacttctgataaaacaaaataatgtgctaagaaatgttcagagggaagcgatgttatttcctggcagtgaaatctgtgaacacctcatgacaggtggcatctgagctgagacttcaagaatggttgggagtttgagttgagtttcctagaggaggaaaagacatggggtacatgtgggcaaataagagtggctctatttgactaatgcatgaagtgaaataggcatgttgttagagtggagctgataggtactgggaggctagataccatggggacttataagctgtaggacttctacttttaccctgagtgaaatgacaaatatttcagagctgtgttcatttggaggaggttaatttggatatagggcttgccttcataacccaaagtaattgctgcaaagattatccctccagaggtcacttttctgacacccaggaaggaaacagaaaggccatctgaggggcacagtatgtcgctaaataaattcatgcctggatcttggtgttccttacctttcagaaaaccccactctgaactccttattttaggtctaagtctaatggccagttcccgagagcagattaaaagatggaaaaagagggccaggcacggtggctcacgcctgtagtctcagcactttgggagcctgaggcaggaggattgcttaagcccaggagttcaagacccacgcaggcaacatagtaagacctcacctctacaaaaaaaaattaaaaattagctgggcatggtggtgtgtgcctttagtcccagctccttgggaagctgaggtgggaggattgcttgagcccaagaggtagaggctgcagtgagctatgatcgtaccactacactccagcctgggtgacagagtgagactctatctcaaaaaaaaaaaaaaaaaaaaaaaaaaaaaaaaaaaagatggaaaaggaggaaggcaagggaggggacttatataggcagacacagactcagcagcaaagcttccagcacaacagaggggaaagagaccaaaagaaaaaatgaatgaatgagtgattgaatgaatgaaccaatgaataaattcagatcaaataattcaagaggcacagcaatctagagttttagcaagagaacatttatcccttcattcttcctgaagacattgctgcatatcagtgccatcctactctgccaatatatgtaatgtttaacaaggtgggggatgtggagaacactttagatcccatgtggtaagagttgctcaatggttaggaacagggtctagagtcagagcacctggcttgaatccttgcttcaaggctctgtggcactaaagcctgctttactaggttacttcaccttgccaagccctactgatctcatcggtaaaatggggattccctactcacagggtcattgggaagtttggataaaataatccacatgaattcttagctcagttcctggcacagaataagtgctcagtaaatactggtggtaattattatcatttcactgaaagaatatggctgttgagactttccccaaatcatagctgcagctgctattctggaatatttccagagtctcctggcagtgctgaaatttcccttttataaaatacataggatggctgtgaaaattgaggaaagttccaaaaggcaggggcagttgcatctgtcttcttcatttcccttctttttggcagtagaatccagaccacagagggagaggacaccaggctcccaagggtactggccaccagctatttcttggcaacatacttcctttgagcaagaatggccctttactttttgaccaacctgagagagcacttactctgagccggtcaggagaatatgaagctattttccttctgatgttatgtcctatgctatgtaaatataatctccctccaaataagaaaggtgcacatgcatggtgttggcagggaaacatcgaaacatattgcatagtggtggctgtgaaccagtggaggcagtgctgtgttgatttcccttgaccaatgtctgcccagtggcagagctggaaacacaagatgctgtgtaatgtaaaaccttggcctggctcctcagcgtaatgtaaaacaaaggctgccaggaaggtacaaatcgcccaacaggaaggagctgctctcttgcccgtggatggcaggacaataaagtaacttgtcctttgtttgtgtgttttccaggctggagcaagaaatacaaacgctagaaagtgaagagtcccagatatctgccaaagagcaaatcatcctagagaaactgaaggaaacagaaaaatccttcaaggactttcagaaggtgaagaaaaccaaaacgatttctcaaagttatttccatggggaagtagggcctagcaaaatggtgctaactgggaaacaggccagtgggcattgatgagaaatctgagccacgaactctatgaaatgaggggcagatgtgtgaggaccaggggccatcctgaagctaag

SEQ ID NO: 52764 - DNA, 1759 bp, Homo sapiens
gaggtccacattccaagccttccctgcctctcttcttcaggaactatctcttggctcactgtttctcctcttacaaaattggcctggctcttctccttcccattagtcccaacactcactgcttgggcctctcttgaaaggtacccagcaaagaagagtactaacatcaggacctggtcccttgtagggatgagcccatttgtcttggtggttaggtcctcaggttgaaacatacgtgagaagtttaagaaatttggggaaaatatttggtgtttgggaaacctttctacagcctctggattttctttgctttctctctctctctctctgatcagacaactgtcgtttctttcatagaaacagggctgggcaaaaacttccctccctgtgtgggatagttggttcagagcataggaaggtaggagtggggtcctggcttcctggtggcaagagcaggtctttcaccttctctaccttccctacctttcctctgtcctctcctctccttacctggactgtggggatgaacttgagattgtgtacttctcacccttcaccttgctccctatcctcagctgcaaacccatgattcctactttcatttggccctcagctagacctgctttacaatgcagggacttgttggaaagaccagatattgtctgctcccctggctcttagaaagtcacattctagggctgggtgtggtggctcaggtctgtactgccagcactttggaagactgatgtgggaggatcccttgagcccagaagttcaaggctgcagtgagctatggtcacaccagtgcactccagtctgggtgatagcaaggtcttgtattaaaaacaaacaaaaaaggtcaacctctagactaggaagatgatcaggagccaggataagaattggcatcagtgttttcccagcgtcatttggaaatatacggggaaaggtttaaaaatgtgtttctctggattagtcaaaggtatttgcatgaaggatagttctgactttggcaaaacaaacaaacaaacaaacaaacctgtgatttttaatttttttttcccctagcaagagacctggattttgtctccccaggtgatctttaggaaggtactaaattaaacttcatgctctgagtacatgtaggcagggccaagtcatgtccaagctagcaaggactctaggaaaagcggacctacaatacttctaggaagtctctatggtgtgaccaagtcagggcacttgttctgtgctttgggggtggggcacggattgaggaagtggccttggggaattgtgggtacagcatggggaggatggcaggcttccctgagtctgggaagacctgaggcatgccacacaattagcaataatacagtgcatgtcaggctgggatgaagtgtgggacactgacccatgaacacctacccaaagagtgcatgtcggccttttatgctttcactttttttttcccttcccttctcaaatcaggaatttccctagacatctctctgatacttagggaagggaaagaccctgtatgtcatgttcctgaggagtctgtgtggggcatggagacctgtcatactctgtgacttgttaacaagcaaaaatgcagccgcatcataaactctcaccacctctttcatttttacctcaaacttctttcattttcttctgcattgcttcccattgttttcacttatccacctaagccatttgtagaggtggtaagaagcctagtcataactgaaaagag

SEQ ID NO: 52765 - DNA, 715 bp, Homo sapiens
ctcattttcatatagatgttgtcattcagtaaacattgataaagcatctactatgtgcctggcgctgtgctgggcattggaaacacagtgatgtgcaagacagacactcttcctactctcatggagtttagagtccaaaggaagagagaggcagacaggacacatgtaaagtatgactggtatgtgcttctatgagggagatgcagactaaagcaagagtccatggagagagcatgcaaccagactcagagcataagaaatggacatgtctctgatgactgcacagaatgtaagagctggaggactgggtcacatggctgttgtcaaggccctgcctggcagggtgagtgccaagggcagtttctgattcagaattctaaagggcactcacaagagttcaatgccgatgggcatatgcccagcctgttgctaacgggactggacaaaccagtggctgtgtggcaggaacctaccatgtgcttccgactagtgagtctgacccaaagcccttttcaggcttcttctgggagtgttgcctctgccttacctacactcagagccatgcatgctgaaaaaaaaaacccaaagacccagagatgtcaacaacaacctgagagagaaagagaaacccagatttgatctgattttgaatcggcagagtgacacatgttgcttagactgccaacgcacgccactctcacttccctgaatggtt

SEQ ID NO: 52766 - DNA, 1249 bp, Homo sapiens
atctgaaaacatttaaccttaggctgtggttcaaggtgcaaagaaagctaatatctaataaagccttggtatagtgtgttccttgagtcaacgtttgagaaactgaatgacatagagctgcgtgaaagtttagggggtaaaagtgtatttgattgaatgtaattaatgtgtttttctgaatgattttcttacagttcacaatgaaccttccaattttacagtaattttcttggccttgattttctgatctgtcttaatttagctgtcaatactatgagtaacaaaattcagtttcattggtgatccttgaaagagaaattccaaaaataaagggctataagcacctcctatgaaaagattcatgcagctgtttcatctaatatggatctgataggtttcctttatgtccagttcttcctttctcaacattttctctgattttcaggcagatgcaaatagaattttcagtgctacggcttctctgacttaaattttctgtttcccttgtgtttgtgccaattaaaacaagactcagtctgtgcttgtgacatatttttggaaattcattgtgtaagaaatattgacattctcttgtattattttctctgagtctttacccacttcatcacaattcttgcctttcttttccttgaagtctgtgtgtttcatatgttttgaaaacttctgtcacatattttagttattataatggataactgcattgaggagaaagctctaaatcataggcttggaatgactagttctagaagcatttcctaaagcacatgcccctcctcaatagacatttctctgccatttattttgtgcagcagttcatatttgtggcctgatgctatctcttttctcagaaatttcagtaagtgtttcaacttgagtaatcatttacagaaacataatgtagtggacattcaataataaactattgccatgacattgaattgtcttatgatctttggtggaagctgtgtgaatatttacattgtcaggatcatgcacctacccgttatgttctgccttcctttctctattcttttcttttcttttttttgagacagagtcttgctctgttgcccaggctggagtacattggcatggtctcagctcactacaacctccacctcctggattcaagtgactcttctgcctcagcctcctgagtagctgggactacaggtgtgcgccaccacacctggcttatttttgtatttttagtagagagggggtttca

SEQ ID NO: 52767 - DNA, 2552 bp, Homo sapiens
tggggcctccctgtgttgcctaggctggtctagaactcctggactcaagcaatcctcctatcttggcctcccaaggtgtaaggattacaggcgtgagccaccacacttagccaccacacttggccaccacgtctttaagattatgaataaaaaggtgtcactttcgaagattctcaaagggagtaactcctccccctaatactgagctgcagtccatcttaagccttgctggtatacatctcaaagaagaagatattgaggatagcttgtgcaacgtagctctggtggccgctaaggaaagagcaaacagctctatggctgcagacatcaggctttaaatgacaccaggatggtgaatgacctaggaacataaacaaagggatgtctcagctgggacataatcgcatcctggaagcttgaaggctgttttgtagaggaagaatagacgtgtgtttgactccagaagaccatgctaggaccagtagttacataaaattaaattctagctcagtgtcgagaagaacattctgacctgaaagttgctaaaaatggaatgggctgtgtattggtttcctaggactgccatagcaaagtaccacatattgggtggcttgaaacaaccttgttttttttctgggttgaaattaatttcttctctcacagttctggagcctagaagtccaaaatcaaggtgttggtagggctatactctctctgaaggtctaggggtgcttccgggcctctctcagcttctgctccccgaagcattgcttggcttgtggtagcataactgtcatctctgcctctgtcttcatgtaaccatcttcttggctgtcagtctctcttcttattaaggactcccagttatattggattaaggcccaccttgatgacctcatcttaacttggctacatctgcaaagatcctatttccacataaggtcatattttgaggtactaggggttaagatttcaaaatatctttttaattttatttactttgtttatttattttgagacagggtctacttctgtcgcccaggctggagtgcagtggtgtgatcatgactcactgcagccttcctgggctcaagtgattctcctatctcagcctcctgagtagttgggactgcaggcatgcaccaacacaaccagctaatttttgtattcaaagtatctttttgaggaacacaattcaatccataacaggctgcctttatgaaagtgagttccttatccctggaagtgtgcaaatgtaatcagagtttttcaaaatacttgaagaggtgtaagcgctaaagagagaatgcaactagatgacttctagcatctcttctgaccatagcatttcctaatgctatgagtcctgtagtaaatgactctactaaatcctgggaccacacttgggaagaccacacagtcttggtgaaatgtcacatgcacggaagcatagtctagcttccaaaaaccattgaaaggagtttcaatcttttcttttaaattcatatatatgtatatatatatatatagagagagagagagagagagagagcagagagagtttatttgggccaagcctggggactgcaacccaggagcatagattcaagttgccctaaatatacactccctccttttaattcttaaagaacatcaatgaagatccctttttctgtcccctgcagctgctcctcttggagtctctctgttcagtactcttttggtcacacatgacagaatcctaattcaaagtgccttaaaaaaaaaaaaaaagataatatcttcttgcaaatttgaaaagtccaggagttgttgttttgggttggactccatttcccagctttgccttcctctctgtgggctttctcttctgcatagtgtttccactaagaggtggccaccagggttcccaggtgttatttagcaattgagcaatttagcaaactcattgagaagagtttccttcttccagcattctaagggaagtcccagggctggctctcattgggccaactctgtcacgtgcatttatcacatgcccatccctaaacttgtcagtaggacactgaccacctcctgaggaagaaaacttaggaatggaggcacctctatgtgagttgcataaactaggaatagaagagggtagcagcccaaagggaaattggagtgctattaacataataagggggagtccgtgttgggagggccaaaggccaaaaccatcactgtctactctgattcctcccctcacaccactattctctcttccttcctctcctcattctccctccccttcctctctccctttcttctctccctctgtttttctctctctcctttcctctctctctccctcttctttttcactctctttctctctgtctccctttcttctcctcctctctcttttactctctccccctctttttctcccctcacatctctcttcatctctccctgtctctcaccctcttcctcctctccctcaagtctaggcagctcagcctctctcttttttctcctttctttttcctcctgcctctccagcttat

SEQ ID NO: 52768 - DNA, 1722 bp, Homo sapiens
aacaagagtgcaacttggtctcaataaataaataaataaacaaacaaataaataaaaatgaaaagaagaagacgaagagttcatcccagcctcttctccaccctgggctaggaatagctctctataagatataggatttagacaatggatcctaaattggagattaggtaaaaacaaaagaagtgctccaggactacacttctgaaaggaagttttcctagcccagtaactgcaagataggtatagagctataggtcatcatcagctccctttacaagtcacatgggattgtaatctgagcaataacaactgtgtatccatgtcagctgaatgacttggctcaaatggcacttcttttttttctttcaggagtcgggtgggagaatgtgctgctaaaggaaggtgagtcagcctcgaacgccacagaaacatccggcccagacatgactatcaaggtaagggattctcttcaggttgattctcaaagtgtatctctagagtaaaggcagccgatggcaggtttttctgggggcaaaatgaacactaccaatccaccttgctagagttctctctctactcactgaggtcttagggaggcaaccgtacataagattttctgaaatttgggatctggtctacagccgtaccaccctgaatatgcccgacctcgtctgaaacttgggatctggattaggaaactgcttgaaaaccagaatctaagatgtgatttccaatgggcctgtcgtagggtcttcagtgaatatctacacgtaagctatttgtaaatggtaaccccagtgggcacagtggagcaaatctgaaaattctgatctgagaattcaggccccactgtgcattgtgaggaaaggtcagagaggcataaagtagctttgatcttggctcaagatttccactgatgtcagcaggaaggcagcacatggcccactccagctgaaacactaatggccaaaggtttacaaaatgagtcatctagaaatccacttaactatcactgttcaaattaaatgcatcaatttgtaagcactggccagaataaagaatctgtagcaaaagttatcagaggtgccaccatttcccctctgttacgggattaaacacaaaggaatgatcttcctctcttagaactctgctaacatattagttaacaaaggatgggggtgggagggctttctaacattcttgcttgaatgattataatttgaatatatgctacttatgaatttttctttgaaaaataagaagtaatgtcttattttatatagagctgtaactggagatatttctttttttttgagacggagtctctctcttttgcccaggccggagtgcagtggtgcgatctcggctcactgcaagctccgcctcccgggttcatgccattctcctgcctcagcctcctgagtagctgggactacaggcgccagccaccgtgcctggctaattttttgtatttttagtagagacggggtttcaccgtgttagccaggatggtctcgatctcctgacctcgagatccgcctgccttggcctcccaaagtgctgggattacaggcatgagccaaactggagatatttctctcctggatctattagtagaagttgtacaaaagaatatacagcatggatttattcaagttttcttttgtaatgtgaaggctaaacttgtgttgtctatgttacaaatggtagagaaagcaagca

SEQ ID NO: 52769 - DNA, 8236 bp, Homo sapiens
gctcaagtgatcctcgttcctcagcctcccaaagtgtgagattacaggtgtaagccatcacacccagcgattatctctcttttctattttcccttcacatcttagccttttttctttaatttttttattagcctaatcaatgctattttttattgtggtaaaacagatataacatttaccattttaagcacttttaaagggtacccgtctgtggcgttaggtacattcaaagtgttctgtaaccatcatcgtcatccatccttctccagaactttttcaacatcttcttcaaccaaaactctctacccattaaataccagccccccattctctcctactccagctcctgtcaaccacctaaatgttgcattttacacctaaaatgtattactatttaattgccttctcaaagggatttttaatacattatgttaatagtaaaaagccagtaaggccaggcgtggtggctcactactgtaatcccagcactttgggaggccaaggcaggtggatcacttgaggtcaggaattcaagaccagccttgccaaatggtgaaaccccgtctctactaaaaatacaaaaattagctgggtgtggtggcacacacctgtaatctcagccactctggaggctgaggcacgagaatcgcttgaacccaggaggtagaggttgcagtgagccgagatcgcgccactgcactccagcctgggtaatagagcgagatgcagtctcaaaaacaaaaacaaaaacagaaaagccagtaagatggctacccctcagaaataaagtaggaagctgctacaagctagatttttaaagatattgctggttacaaaagttcctttcttctgtggcgtgaactgtccaggaccctcatactggaaatgtcttggccttatccagctggtgccttgctgcaagtcccaaatcacacctgcttggctgtgcatcattttcttgaattttgtttatccaacgactggataaaatgacatcaagtaatccatgttaaagaagtatctctaggataaaaattttgtgatttggctgtcatttccatcaaatacaccaactaaatcgtagatgctctctttatcttgccctcttgtccatatatactaagactaaaaactaagtgtttgcaaaaaagaatacaaaaaattttagcacagcagaattttcctcagaatgaagtctggtattcttatttacatgttcaatatttctcatttatgcttgaacaagaaacaaggttggtagcccttaggcaaactagagattctggctgtaaaaccgtttgaaaagggtacatttctattcaaggacatgggaaagccacatttaaaaaaggatgttgcttctctacacgtaaaacttgttggaagacagattatcctcctagaagagcagatgttctctattacaaaagaggaaaagcatttagactcttccggtggtgaatagaggccacaggttacagctttctttggcctttgcttttaaaaaaacattctgctgaaggccttttgttgccagtggtgtccagccggttgccctttgtatttgatgatgacgacattgaaaggattgttttgtgcagggactctggacaaaaaagagacatttgggacagaaaacctttctacattgtgtatatacataaagatcgctctaaatttggttccttgccaaaggaaatattttcgaagattttttaaaaatccttgaaactattcagggtagtggatctcagagggggtttggcattggtgagtaggaggcatatcggtactatatgggtcagtttttataatacatgtctttgagaatcattgtcttgaattttctttaaaatgaatatgaagagctctgttgtaaactgtaataaactatattattaatggttatttattgttcctgtgtgctactccctatttgtcaaataaaataaatgtgaaagaaatgaagtcacaaccattgacagctttcaataatctatgtgtagataaggaatattcgtggcaagtgaataatctcaggtaccttcttctttgccgttttatttcttcgctgtgttctcttgccaacaataatagctaacatgggttgaacgtttgctttgagctgagtactgtgctacacatacaccatctcgtgtaatcctccagatgactctgctaaggagaaactgttattaatcccattctacagatgtggtggctgtggcacagtaaagtaacttacccaagatctcaaagtgagtgtgtggtggagccaagctttgaacccagatggaaggacactttgtagcctctctgtttgggttttaataagtgcaggtttatttttttttaattagctaaagcaggggagctccaatgacagggcaagggtagcttagccagataaaatattagatgtccagttcgatttgaattaaattgcatgggacatacttatattaaaaaattatttgttgtttacctaaaattcagattttactgggtgttctgtatttttatttgccaagtccagtggccctaggcaagaggagtgttgcaaaggaaatgaagggaaccgcgtaatgtgttttgattattgtcctttgggattatttgtggttttgggttctttttgaaaaaaaaaaaaaaagacttttttcattttaaacatgacaatgtattttattaagctttaaaccagacagatgtatattttaaggacttgtaatatgctgataacctatcaagggacatcccttgatatgcttctttgctaggaatccaaatctgatccatgccaagatttgtacctcattggtttctctatgaagtgaaactatgagaaacactaccctctatttgtttgtttgattgttttttcttttgaacaacagcaacaacaaaaaccctttacctcaatctgggtatatcatgactttttggaagccttattctaggatcttctttttagttgggatatcagtgttagcctaatttcattttctgcagatagcttcatcatcccaatttttaaaatgttgatgaaatactcttgtgcttttatcaactcctacttggtaaaatcccctatctctgagtggtcaccctaaaatacatgacatgggcatggatattcccagcaaaagttctgacacattcacaaatgcttcctgaggacatctgtctgtttccttctatgcacattttgaacattccagcagtgagaatgactaatgatgctaaagctctagaaactgtcacgtgttgctgttcagtatgtcagagcctgtctgcagataagcctcatttcttaagaataatctgtcccaatcaagctagttttgcaacaaggctcatttgcaagtaccaaagtctatgacttgtgaaagaaccaagccacgcaaaccaaacacagaacccagtgacagaaactattggtctttagtgcgactggaaggtagccaacctggttcccatttaggcagggaaccagtttgtctctccagttaatgtctgaataaattaccattcatgtccctgagggtttggaatgattgcaaattatttctgaaatcctgggtagaactcatgtggccacttacgataagccttgtccttctgcaactggtcaggtatcagagaggtctcataaatcaagattgtagttatcaggaaaagttgttggattcatagagtaggggccaagggaaaactttccctttgccctctgaaatttcgttgaaaaatcaattgacactagacagattaacgggagaaatggcatagaagtttactaatgtgcaaagagagaaaattacacacaatggggtacagatggttatatacccttcttcttagaggaaacggagataggaagtgtggagataggaagtggggggaagggcagtaaatgatttttacttgaagaaccaacagtgacctgggacaaagtctgttgggcccacagaacagacaacaatttgtgacagaagtctgttcagatgtgttgacagacttcattcagtctttcttcctgctatatgagttgctaatggcaactcaaggaagagaccagaagtaattgttttcttctctggagggtaagattttaggtagataagggaacttcacagaaccatttcatcctgtgcgtaggggagagacagaagattgagagacaggagtgaggggaggtcagagagaccttgagccttcttcaggttcagaatatcaaagcatcatatttggggatataggtttctgagccctaacaatgggaagaatgatctttctgtatcatatgaatactgaagattgttgaagtgagcatctagtgctcctatctcgataaattatccaatgcctttcccatctctttctcctacccattctctagtggcctgcccccttgccctttttattgtagtgaaaacttagtagtaaaaaatacacttggtaaaaatcatgacatcatgtaaattgtatgtaaaaagatgacatgctcatacaagatgcttgattcattgcctagcagagcaggccactggtaggtctgcataccacgagctggtctgtttcgaggtcacttatgcttactatcattgcaacaactacttcttcctcagaaattagtcagtggagatgtgacatttattttatctcagaatttttatgtctgtttctgaaaagaaaaaggtaccagcagctgcagttcccactccgtctcccaaagggatctgggctagagggtagggtattggatttgtcatcatattttccatctgctcacagattgtgaggtttattattgtttctgttattgttttttgagacagggtctcaccttgttgcccaggctggagtgcagtggcgccatcttggctcactgcaacctccacctcccaggttcaagtatttcttgtgccttagcctctagcctccctggtagctgggattacaggtgtgcgccaccaggcctggctaatttttgtatttttagtagagacagggtttcaccatgttggccaggctggtctcgaactcctgacctcaactgatccgcccacctcagcttcccaatgtgctgggattacaggtgtgagccactgcaccccaccagagtgtgagttttgatctccaacagtatgcattttctagtgaaattcggtttaataaaatgaataatgagataatagctaacatatattgagaacttcccatgtgtcaggtagtgctctgggtgtttagggtattctattatttaattcttaccacaaccctatgaggtgggtactaggatatctccagtttacagagaaaacaaggtgcagagagattaagtaacttgtctaaggtcacacagacaaggagtgctggagcctaggtctaagccagacagcactagatcttcatgactttgtcacagtgcttcaccttggagaataatgagatgatgctggtatgtagacatgctaaggaggtcttccttgcctcacagtcctgatcaatatggaggcttttatgtagttctgtttgcgttcattcttccaatgcaaagctggagtttacctagtgggataagatttgattttcatccttgagaatgagttgttcttcaggctggcccatgagtcttcatcctgtcagcattctgattacatttctcattatcattctcctgcagtgattcatgagtatgataaaaccgaacagccttctcagtaaataagcaaagcttagcttacggggaaaaaaaaaaaaaaaaaaaagtagagctttccttgaatctggagaaattaagcacacaggtgtcctgcaatattagttaagagactactgcacccatcatactgtagcttaagacagtttcttcttttagttttttctaaaatgtctccatgtctgtgttatgccacaaataacacagccttggttaacttttggactaaaaaaaatcaacttattggccaagcatggtggcttacacctatgattgtagcactttgggaggctgaggcaggaggattgcttgaactcaggagtttgagaccagcctgggcaacttggccagacatcatctctacttaaagaaaaaaaaccgccgggtgcggtggcttacgcctgtaatcccagcactttgggaggctgaggcgggcagatcacgaggtcaggagtttgagactatcctggccaatatggtgaaaccccatctctactaaaaatacaaaaattagctgggcatggtggcgcgtgcctgtagtcccagccactcgggaggctgaggcagaagaatcgcttgaccccaggaggaggcggctgcagtgagctgagattgtgccactgcactccagcctgggtgacagagtgagattctgtctcaaaataaataaataaataaataaataaataaataaataaataaataaataaaataaaaaataaaaaaacaaaaaaaataaaaaaataaaaaaacaaacaaactagccaggtgtggtgtgcgcatgtcgtctcagctactcaggagacaggtgggagaatcacttgagcctgggaggatgaggctgcagtaagccacaatcctaccactgcactgtagcctgggtgacagaaggagaccctatttctattataaataaataaatttattgaatgtcgtattatatgtagcataccatatttaagcagggtcaaatttttggtctgacttttcaaattaatgtgaataagtcactttgaaattttggagacaaaaccttatttaagttgagaaatagacaaacattcatccactaagaattattctttttattatttttagtgtgtttgagttggttcttgcaaagaaaatataaacaaatcccaaatatgaaaaagtttctaagtttatattaagtgtatcccatgagtgacacaggaaaatcccttttaagagaaatggtattgcaaaagacacagcaaatctttttctcttttaaataaaaatatgcattctgtgtctaagcattttccaaacctttctcctttgtgtggcttttactaaaccttcaatcctataacagtcattgacttcttcctactttcttttcctctctttccttctctcccttcactccctttctttttcccagtgtttactgtgggctaggcactgtgttaaacactttacctgcatttctctctttaacactcaaaatgacaccatgagataggtaccattttttgtcccattgtgcagatgaagaaatcaacactttgagaaggtaaagactttataaggtcacaaattctggaagagcagagtcagaattcaattccaggtttgtcatatttcagagcccacagtttattgctttctgtgtaatgagtaaatatttcttttagaatcaaaaaatattttaattaaaatgtaatgacaggaaaatagttttgatcctgggagcaagaattagtcaagaatggacctgatctaagaccactgtagttttttggacaggctatgagccagtggactggcacagatgaatacaaataacacatagctaatactaattgagaatctaaaaggtgtattctgtggcctttataagcatgaacttatccaatgagttccatgaactcatgatatagatactatacacttgttcttattttaaagactaggaatctgaggcacagggagataaagtaacctatggaaggtcctgctcagaatcagtggaagaatgaggattctgccttcattcctagcattcttcatgtggttagcatagtcccctaaccacagtgccagggcacctcttgcctgtgatccctaagtgctcttctgcaggtttctttctttcctttttttctattgtttttttgagatggagtttcactcctgttgcccaggctggagtgcaacggcgtgatcttggctcaccacaacctctgcctcctgggctcaagcaattctcctgcctcagtctcctaagtagctgggatttacaggcatgtgccaccacgcccggctaattttgtatttttagtagagacagggtttctccatgttgttcaggctggcctcaaactcccgacctcaggtgacctgctcgcctcggcctcccaaagttctgggattacaggcgtgaaccaccacacccagcctcttttgcatgtttcttggggaatgcagagccagttaactttacaactagccattcacttggaattcacatccacagcatagaaaaga

SEQ ID NO: 52770 - DNA, 2843 bp, Homo sapiens
atagtgacagagtgagaccctctctcaataaataaataattttaaaaagaaaattcataatatacaatctatcctcttaaagtgttcatttagtacagtattattaactgtgagcacaagaaaaattttttttgatagaagaaatcacagcatatttgataaagtgaaagaaaattcatgttttgggaaggataaaattgctggaacaatgtcctagaggagataagaagggagggatggcgaggctgagcgattttcctaaggtcacatagccagtaagtgacaggtcaggattccaatccaggtcttctggctctctgttttttactgacattttgctataccgtaaaatgagaaaaatggcttgggcaacatgtaactttcctcctagttctaactttcatgtctctaacattttgatatgccttcacccatcccaagcatgtaaagaaaattccgaagtcaaacatagtagcagcagcagcagcagcagcacctatctgaacccacagttctcgtctaggtgctcacctatctcatctcaaccactctatgaattgcttagcagtcagcacttggactcatcaacgcctgagccctctgtgggaatcacaaactgtttctgatacctggcagctttactcatttatgttatctgtctggcttcctaaggtatttgagtttgcaatgcttgctcctaaaattaactaggcagtggtctaacaagaaaaggaaggaagggagggagggaaggaaggaatgaaggaaggagagaaggaaggaagacaggagaatacaaagaaaggaagtacaaatgaaggaaggaaggagaggagaagagaggagagggagagggagctataaagaaggtatttacttaatgagttggaaaatcttcaaaaacaatatgggtataggtactttagttgattgtattataagctattgtggtttctaaagtgattttatgttggccatggtcccaatccaacagaggcttttaatatgctatagaagctattattattctccgtatttaaatgatcttaacaccttataatcgtaatagttacttagagaagtaattaatttattctgtgtatataaacataatatgccttcataatattgtcccatcatcttcagtgaagtttacgttaatgctaggaaagccatttaatatgttcagtatactagaaggaaaaagcccatttctcagtggatagttctcaatactaaaacatttgacaagcaaatcaagactaccgcaaagactatctctgagagaatcagaattcttaaaacttaaaatctcaagatttggtctttttccccctaatatgactggaaaatcttatggttcttcccttaaattaacagcctgtgcttaaaagttctgagggaaacacttgcaaattactaggaaaatgttacagtcgtattttttttaacaaaaactaagaaataatttcctgttttatccaaaattgaaaagaagttaagcaccactggaaaagaaaaatacatttgcatctaaaacacaggtccctaatgagaagaaattcgcttggttgactcagtaagagctgtcttctgggactccacactattggcactgttttccagcattctatctgtgaacaagctgtgtacattccaagtatattaggcatattttatgttttcagtgccatgcttaaagagtaccttgttgtatgctgtctctctattacagcatgaactctggagtgtttactagattttttaaatgcttcagttgctaaatgagataaaagtctcagccaagaaccaaagaacttggacctcataggactttgctcctgtttattatcaaagtgatacatggctacattcatgtcattattccacaagatttgaggcctctggaatcaaggtgccatcttgctttcttcaccaggggactctgtcctctgggctctttctcatttcccaactctgtgtttctcctacatagatacccacttttcactctttccaacacaggtcttcccatgctgcttttttgttgttgaagattttagttttgaatagtgttttttttttttattagtatactggtgccatttacatgtatattacaatgggcaatttgggtggtacaatgttatgtcaatgtcgagaaggcacagcccagctacagtctggaacacagtgtaaacaattccatggggaaatgttgcttgggttttggaatgtttcttatgggtgttttaaaatgtcttttaaagaggctcaagcagctgcggtgaatataatcaggtcaccatttccttatgtttaagggtttggcggaggagaggccaagtgcgaggatgcagggaaaggaaataaatgtggaacaggcaggaaagaaacttacttgggcacaggaagccagagaccctggagaggaaataaaggaaaagcaggaaccacaaactaggctaagaaccacagtaaacacagtctgagagccaagtgttctcttatgacaccatccctgtttctgtgtttggttctctgtcctttcttcaagtaagggcgactgtgtccacctccggtggttcccaaatcaggctgtcacagaatcagatggaaagcttaagcaaacacagattcctgtgctctggatcacctagagaaaggaacctggaaattttcttttcttgttttccagctactcccaatgtaagccaacttggaaacaactaatttataacatcttaaaagctgaccaccttatcttagggagaggtcaaccccttggagaagagatggtttagaagggtgtttttaattgtataaaacacaactataagtca

SEQ ID NO: 52771 - DNA, 1634 bp, Homo sapiens
tcacttgattttcatcattcccttgccaaaaatacatatttgtattttatatatttactcatattgtaggcaaaaaaaaattagtccaatattttacttgcacttttttaattatgaagagtttgagtatctcttcacaagttcaagggtcatttttacttatttatctgtaaactacgttttttttggtgttttttttttttttttttttttggagacagtctctcactctgtcaccctgctggagtgcagtggcacgatcatggctaactgtagccttgacctcctgggtccaagcaatcctcccatctcagcctcccaagcagctgggatcacaagcatgtcaccacaccccgctcattttttaattttttgtagagatggggtctcaccatgttgcccaggctggtctcaaatttctgggctcaagtcatcctcccaccttggcttcccaaagtgttgggattacaggtgtgagccaccacatccagcccaggtttgttttttctattaaggagttggtagttttcttcaattttcttattgatttgcaaaaactcttcacatatgaggagtagtaactcattgtcatatatgttgcaaatatttcccccagtttgtttcttctctgaaattttcagtggtgcatctgatcccatgaggatccccctgggcttgggattactgctagcttttcagtgaggtcacccactgtttggtgggaaagccccagggacatagagctatttgtttagtgtgagcgagtctttttgtttctgttgttgtttgcttttcctgctttttctttttctttctttctttttttttttttttttttttttttgagatgaagtctccctctgtcgcccaggctgaagtgtagtggcctgatctcagctcactacaacttctgcctccagggttcaagtgattctcctgcctcagcctcccaagtagctgggattacaggcacctgtcaccacacccagctaatttttgtatttttagtagagacggggttgcaccatgttggccaggctggtctcaaactactgacctcaggtgatccacccgcttcggcctcccaaagtgttgggattacaggcgtgccaccacacccggccttccctctttttcttacttttttttttttttaaattttcagccaacttttattttctgtaggacatatttagcacttgtgaattactcccagctgatactttttggtctttcgccttgctaggaggaggaaatagtaaattcccttttatgatgcactgtcttgcccccaccttctggttttcagatcagttctctgagacacttctaagtctatttttcagcttctactgttctctaagtttgggggcatgtgtctactgctagaccattattatttgctggatttagttcattttgctcagtttggggagagagggagaagagcttctctcaacctgtatctaggctaacttcctccccagaaagctgttctttactttgtgtgtttttctagaaagaacattctacttcttgggtcccctggctcaggggtgtagtttaaagtgggccagcagcatgggagaggcaaagtgagtaaaaatgtacacttaggccacagtgaaagaaat

SEQ ID NO: 52772 - DNA, 3813 bp, Homo sapiens
gcagccgttccttctagctcgcgaggaaggcgcgggtcctgccttttgggtggcagagccgggggcattttcgcaagtcctgaacttttcagagagactgaagtcagggagggccgggccccggccccggtcccggccccagccagagtctttcgggatagggtccagggagctgaactcaggagatgatgcaggaggagccagcagcctcttctgccctgggagggagaacgcggtccgggtccgagctgagccagaagtttggcctgaggctgggacctcagcagttagaatgtggtatcttatccgagataaagccggagtttgcgtctctgtgggcccttcttggggacactctggggtatgggaagagcagaccgtgggggagagcactgggcaagccgtacctgtaatgtccgtggaggcgacgcgcctgcaagaaccagagcaaggagacactggtggccccaagaaatcccagagaaacggagtggataggaggggagtaaaacggagcccgggagagccggaagcccgcagcagggagctgtggcgctggtggccgggtgaggactgaaggcaaagggcgaggcggcgtgcagccgggctgccgagctctccaacgcggatgccaggcgctcgccagcctgagggatccctcctgacccacaaagagggcgtctgggaggtgactcgtttagagagatggtggattccctttccagacccaggaaagcccgtttcccgtgtggggtagcatgggtttggctctgataggctgcgtggtcagatcagactttgacatatcactacccttccccgtagcagttttaaatgcagcacaggtgatttgggaagacttcctaaatgtataatatttctttttgaaaagaaacttcacctactcatacgtctatacacctctctctgtattgcatcttggaatctgtgaacaagcccatgtctcccgggaagcgctcttctatcccaactcccgtttcacaggctcctggagactgcatgaatacaaactcctctcaccattgggatcccagggaatttgcttccttgtcttttgttctgattagagttcatttaagcatcacacttttctttctggaaatgttcttaatttaaatttaactaagcttccctttcttccagtctggcagcttccccaacattcatgaatacaatttcataataatatgtctagaaatgaggagtatccagcaaggagttttactctgtttctttaaacataaagacttggcctaaagagtgttttaagcaatgctccgctgccggttgtctcctccccagttttgacccttggccctttctctgtttttcttttcttttctttttttttcttttcttttctttcgaagttttgctcttgttgcccaggctggagtgcaatggcatgatcttggctcactacaacctctacctcatgggttcaagcaattctcctgcatcagcctcccgaatacctgggattacaggcacccaccaccacacccggctaatttttatatttttagtagagatggggttttgccatgttggccaggctggtcttgaactcctgaccttaggtgattcacctgcctcggcctcccaaagtgctgggattacaggcatgagccaccacacccggcctggccctttccttaaagggcatcttctcctttgagtggaggcacaccaagtttcctgcaattatcttggacagcaccaacaaaattagtcctgagccagggacaacaaaagtaaggctgcctgtctcccagtctttacttaaccaactctgctggagagttcatttcactttctttctgggatgctgagatgctaggatgagaggaatagctgggctttgagatgggacaaacattttgaaatactcattatctcatagttctggcatgacagttggcaccacttcctgcctgcagagtctgaagttatttcactttcataagtggcttattctgactcagtagcctcaggacctctggctaataaagtgaagtaggttgtcttaacttcgttgtcaaatgaagggagaatgaatccactggctttatttctgaaagtttgaatattttcttatagaactaacattaaatattacttccaaaaatgcaaacactttggtctttctagtcattgtaattattgtctagataattacaataatccaaacaataaccattacggatttggtgagctcttaaaatacccatgtcccagatttctgtcacggttattaccagtctctgcttattaaggtaatgagaaatgtttcaaatgaagatgaaattgaatttggatggaggttgtgttgagggattttaacagttgaaacaggagcatgctaaaaagttacttctgaagaccaaggatagactgtttagttccagtctttagctttatacatgactcaacgccagtagaattgatgctgtatcttgaatcagcttttggaatgattgttttttgatcttaagaaacatagtactcactgcttagattgttgatcagggattctgtgtcagctattggaagtttgaagtaattgattagtatcttgatgagcttcaacaatttcagtaagtttgggtagcaaattgcacccttttttttttttttgaaatggagtctttctctgttgcttgggctggaatgcagtggcgcgatctcggctcactgcaagctccgcttccccggttcacatcattctcctgcctcagcctcccaaatagctgagactacaggtgcccaccaccacgcccagctaattttttgtatttttagtagagacagggtttcaccatgttagctaggatgatctcgatctcctgacctcgtgatctgcccgcctcggcctcccaaaatgctgggattacaggcatgagccatcatgcccggcccaccattttctttatactgtgcaaactcaacacccagaggcagaatttctgtaaagctaaaaataaaggaacaacttcaacttcagtttctctcattggcatgagcctcacccagcagcacttcgggtagcttgggcctcagggaagaatgttaccatggaccatgatgggagttaaggtaatccatatacatgtatatcttactttgtaaaataatcccctctatgaacatgtaagactactgttcacaatttggacattttcctttcaaacacatttttcatgaatatattataggaaagttaaaaccatctctattctaaaaggaaaatctaccatttggctcagagagaaagttactgagtttgtctatgtgattttaagtagtatttgattagagtattaaagaaatggggtacttcaagtaacataacacctgatatttaaatctaagttttaaaaatgtatttcacccattgttaatgaaagtgtttctaagatgtaacccctggttagctattccgtcttcttgccttgatgggttgactggtggtgaatgtgctgttgtcattccattgacagttcgggattttgtggtggtctcagcatattagcatagatgtgagttgtaattttataggattatggaactgtaattgtggaactcctgcagggcagactctggaggctagctttttagaaaactgaaacctccagtataaacttaatttctgtcatttgccccattttcttgaaagttaagtgccagaaaagaaaaggatcgagtctctcttttctttctacaataaaacagaatatactttctccagggtttggtggtgggttcctttttcctgttgaggtggattctgag

SEQ ID NO: 52773 - DNA, 924 bp, Homo sapiens
ccgtctgcctcggcctcccaaagtgctgggattacaggtgtgagccaccgcgcccagccgatggaaaatgttttgaagtgaaattatatccaataaagagctcctgtcattcatccagttgtgagagtccctttgagagttgccagaaatgtctgctgtcttgtttttactcttaaattaacttgctctttctcgaagtacagaattctaaaacagagttggtgtttttgttgttgttctattatgtcctcctgctttctttagttgttggtactagaatagtcattttctactactttttcatggacattatccttgaaataggttattctagacaagttttggaacccaaactggatttaagaccaaggcattccaagaaaaataaaatctttttgcaatttctatgcatcatctttttataactttcattctcctttgcaaaggaaatgtggggctgtggatgtgaaaggaggtgggggcagtgaccggccagctgcagaacattcaagcctggcctttggactcagagactagggcagaagaagccagagtgctaggcttctggccagagtggaatgtgtcttcccaggagtgggaagcctgtgtttttccaccttaccatctgatctgctccagagggctctgcattagaaaaatagggagctatggggaatgactagggggtggagatcatgagagcagtgtctatggaggattatcagttatgctcagaaagggaagatttggcacctggtcatcgatttttagtacagtaattgtcttgagaaaagtatttgagaatcaatattagaaacaatttttaaaatatatcagtcttaaaggtacataaatgagaggaagaaaatcagagatcagggtgtctgcaagatggtctactaggctttttattattgtaatttg

SEQ ID NO: 52774 - DNA, 681 bp, Homo sapiens
agctgagaattgccatggctgaaacagcttttatagggtgttttacatggacacttgacactctttggatcacattgtgtgtgatccagactcaagccagggttagcctagcttgttgttttatctcagttaaaagccttttgttaagagaacaaacaagaaagttcagataggtcaagaaagccagctctgaggatatatctagagggcaagtcatatttatttttcaaagtttccccaggaattaaaggttgcacatctaaatgtcaccacttctgtgacttttgcagataaacattagatttacctttggcaaactgcagtgtctacattatgggatttccctccccagagtcttttctctggggaagttctgaaaaattgtttcagggatactatagttcttaaatataactaacaaacatattatgaaatgctgttagtttttttctggaggctgaatattgattgctacttagtataccttttttaatgattatattgtcccaccaggatatttacacagcttcatgtgtcttcccacaaaatacacatgaattgcaaagggaatatagtaacttggcagtagagaaacttggcagataccaccctaatcaaataatcaaatctaacaccattagtaattggacaaattggcagtgtgcaccatttgatgagatg

SEQ ID NO: 52775 - DNA, 1724 bp, Homo sapiens
cttgtagagagtggcatccgtttgctgcatgagatgggagaaaaattagcggccctggctcgagtcttcattgccccttggctgcctgccgtgtcctatttctcatcaggccagtgtccccagtgcctgtcctgatccagaattaccacttaaccctagtggagcaggactctcagactgaccatctggactttcctcgagttctcttttcctgccagagtgtgtcagagtgaattggattagagttctgtttgctgcacagcctggcttcacatgaggctttgtgcttttgaagaaacttgagacaagactattcatgagttcccagagtgggtggcaattcacagtgatgctgatatccacgatcgtgggggtggttctgtgcagggatctctaaaccttttagaaccttccaccagtttccctgcaatcaataggtagctgattccatcagatcaaaccattttcctgttggaaagtggtaggtccttttgttaagtgttcttagaactcaccaatgatttcatcgaaaaagcatctctgatggtttttctttctcctctggcattgtgaacattgtcttggagaagtgaaggtttgccatgtaacacctgcctttgagcagggaagaacatggtgggtaaatctacgagagagacctgttctgttccctggactcagctcccatagagtccaccactgaccttagaccctcaggctccaccggatggataggaattgagtaacagaagggtaggaatcccatacataatcagtatggaatttgggattgcctaagtgcagagttacattctgttccaagccccagcattcactttaaacattaataagagatatggtgctttttgcctatggaagactagattgaacaaacccaaaatattatttttaaaactactcaaaattttaaaatactaaaagaaaaaatgggactcaaatttaatgagcccgtgtgtgcgtgtgtgtgtgcgtgtgtgtgtgtgcgcatgtgtgtgcgtgtgcgtgtgcgcgtgcacgcgcaccttgtaggtaggtgaggagattactagattgactctcctgtacatttaagttaaatggaacaaaaaaaaatgactattgcttagaataatggataagccggcctcctattttttgttctctacttgactgatcagtccttgggaaattcttcaatgggattttcctatgacatattctgtctgtgacatagttcatgaaattctacgacatttgattcccaagggggaatctggttactcacagcgtgtttcacaacttttctgggaacaggcagctcttggaaggaaaatgtctatgtatagcagtgagccaataactcatcttcagtgaaaacggaaggtgatattgtcatacagctgtgtagagtgagagtactcctaaacagataataaattacagccagaaagcaaaacctcctcaagagatggccaagttttggtacacatttgttcactgtggctctatgaaagacctcactttttaatatgtggatggaaaatggagatcagaggtgctgtaaaacctaacaagtagatgagccctggccgtttaaaagtctaaatgtatttaaagcttgaatttgtaactttttaatttatgtatgatactctcaatccttgcttttccaattacaatactaatacatgctcagtcatatgcatctttgtttgtttttgttt

SEQ ID NO: 52776 - DNA, 4740 bp, Homo sapiens
ctggattctactctggtcatttctctccagagactccactgtcatcaagtgtgggatggctctgtttatgcttttgcagcctcagcctagcttgctggtttttcatgtctccctctgcctctgagtataatccacttttctggagtacctaactgtgactttgccatagagtatttatctaacctcaaccctatttttgcagcttgggttgaggggagactcaggcaactgtgtgaatgtgtgtgtttttgtgtgcatgcacaaatacaaatgcatgggtgtgtatgtgtgagtatatagattagtttgttagggttgccatgacaaggtatcacacattggtggggggaggcttaaacaacagaaatttatagtcttacagttgggaggctagaagcacaaaatcctcagcagagttggttcctttggagggctgtgagggaaggatctgttccaggcccctctccttggcttataagtagttgtgttccctctatgcacatctctgtgtctacatttcctcttattctaaagaccctagtcatactggattagggcccaccctggtgacctcacttaaatgtgattacctctgtaaagactgatctccaaataaggtcacattctgaggtccttggtgttaggagttcaacataagaacttgtggagatgactcaagtcaacacacaacagtgtgcctgtgtgtgggtggagcatatgtgtgtttgtgtgtgtagtggactctggcgtctctgagacaccaggtcatttgcaaacctactccttggaaaatagtactttaagagcacatacagttgtctcttgtgaatagggcagatttaaaacctttttctaaaacaaatcttcccatgggtgtggaggggcaggtgtggtaatggagtgggtcccgggtgcccctcttgcatcgctggtcgagggcacttcataatggaaagtccttccctggttcttcattctcaagcagagcaatgccattggcatgtgatttctgcctcattttacttcagatgactaagtagcatcttgaagtgcctttggctacacaacagaacattccaattattccacagggcagcataaattcggagttcccttggagctccctggtgacttgataccaccaagtcagtcattgaggaactccccaatatttctaaataaatttggaaaatgtttttagcatatggaaaatgttgtttagatgctgtaaatagttgtaaagtctacttttagcctccttttcaaaagagccttcctgggctccatctactctgattatcccttccttgactcgtgtgcttgggagggtcccaggaggactgctatgctggctggtgtgcagaccacaggtgaaccctgttgcatctttcagctgctcaccaggacaaactgctctaaaactgaccccaaatgagctggccccacagaaccatgtgtagcgtttgtcatctttcccccagtttactgtaaatctcagttctctttgacctctaaaatcttactgaaaaagtgagtacttcatggtactgaactgacctggaattctgactgactttctagttctgcccgtaagttatgccctaaattttccaggtcaatgtagagttccagggaacgaggtggacggaatctggaggcagagttgagccagtgggtgttatcaggcagggggcactgataaacacgccaactccctgttagacttagtgtagtgctgggggccctattctgaggtgacactgatgtctctactcaaggcaaatgcacatctgttttcttgatggcagaggactgttgttagccatgggatggtgcagccacttcctccagatattccttgaaattagagcactcatctcagacttcagatgcatctgtccactttggcatggactataatgtagccacttaaaacatatcttacaagggccattaaataacataaaaagtgcttgtgaaatgatatgagtaaaaaaaaagttggcacagaattgcatttactgtctggtctcaatgatattaaatatgtatttctgagaagatgacaatggaatgaaataaaatattaactttttttctgattggaggggtaatgaatattttttattttctaaatgttctgtggtgagcatttgttatcacacacagacacacgcacacatgcacataccacatgcatgtacacacgcacaagcacacaccacaggctgtcctgaaaagtctgtctaactggagatttctccagggtctttcagattttttgctgcctcaatacccctgggatatcaattccctgcttgtcccagggcccacctctgaattgccgagaagacagtggtagctgattcacatcaatgctaactgattcacctcaacgccgccagctcctgcctccctgctcagccttgagcgtgacaggagcaggccgggcctgctctggctgggaatgccgctgccctccagctccggccagccagggaggggccaggcctctccgaaggaggttaaagtccttctttgtgtgaatggccttttagggagcagagggagggcccacggtgacatcacagtcttccgtcaggaggctcaggaggaatttgtccagcttgagccagggtgcacgcaggaatctgtctggaaaaaggcagttctcactgaggaggtttgaggcgcgcgctctgggcagggtaagccaagtctgctgacttatcttcgtgtccttttctttctaatttgaaaggacaggggtctttttttgaggccagtgtctttatggaggaggttttctgagtgtgtcatgtgctgtggagtcctttcttgctggagagtaggcagccgagctcagactggtgtcttgcttctctctctcttttttttttttttgcaaatcttgtaaaactctcagcttttgtgctaagaggcaaagaggacgctcagtcctgcacatatagtgcaaagctatatgagtcgtctgtggcagatcacgctttgaagatggtgcaagtgtgtctgtgagaatctgtgtgcccttttccagaacaaaaccaagtgactcggtgattctgtcgcctcgtttcttagccatctagcatttgttcaagagactcagtcttgtggtctacagctagccttctgtttccatgctgtggaactcaccacattcacagggtggcctgggggaatatggttttggggggaatgtgtggtgcttgtctcttggaggtcccatgggtatggaaggagaccctcgccagctttgttcataggcacagaatcatctgtagacagagggttaaccacaaatgcatctggcactgttttctcttttcttggggctctgcctcaatatagtggattctgctggtccacagtggtgtttggcttttgatctctgccatgacctgctcaccaggcgtgaacccaagatctggaactatttttaaaccaagagggacacagcaaatttataaagaactgaaaaactaggcttgcttttgtctttagcagaatcggttaccctagaaatctcaccttgcaggagccagagttccctctgtggccttgagcttggtttattctggggtagggactaccttgcaaaataatctccagtgaaaagggcctttggtgagaagagcctccgagggctccttgatagggcgctcagtatccctcattgaggaaaacatgaaactcacatctctccttattcacgggaaacccggaagcctctcagtcactcctgtaagaagtgggtctccaagtaacggaaagaaacaaccctttcatcagctgctgcagaaaaggcaacagcagcttccttcctttcctcccctccccgctgctgacccccaccacacacactgtcttcagtttctttcacagaaagcccaagctgtaaatatattcatcaaataacaccttaacattttccagatgtgattggagccactgacttttcagcagggctaagaggaggattgttcataggctaagctatggtgctgggggagactccgttctatgagaaattgaccagtctccttcactaggaatgtgggtcaagacacagggaagccttgtttccagtgaaggggtggggagttccagaagtattttcatcccgtcttcagacctgtacctgaggcataagacagagagaatagcagaacagtgattactcttttgaccaataccgtagaagctctcagaaaaaaaggctggacctgcaggagcaggaacaggactcctggcctccaaagggttgagttttctttttagaactgccctagtcacattgagctgtaatggcttcatggcaggagatccatggaggcaaaccaagaagtgtttttagtatctgccccttttaaggcccacagcattgacccgagcctgccgggtccaaatttagcctgcgtttgccccaggagtgcttgaggtctggagtctggccggctgtcttccatcagccaggaggggaggctctagcctctttagggagtggcttagttcccagtttcccacaatcaacacgggcccctagttccacaggccggaagaagctctgctcgggggatggaagaggaaagcctgcacaggactggaatgtggcccaggttatcacccggggcctctcctctcctccacttcccgcttataggctcggcttagaggcccaagtctaaccctcgcagcaagcagttcccagactttcct

SEQ ID NO: 52777 - DNA, 2694 bp, Homo sapiens
attacacacatctctcttgaaaaccatgagtttgccctgatgctttttaattcttatttaataaaaagttcattcatactttctccctttccatatttgtgaccaccttcttgacaaaagatacttagtttttattatctgtaatatgtttattatttaactagccctccttcccccacactccagtataaccagtctcctgttttcctcaccaaacttgggctccgacatcattttccaggtggccactgccacgacccttcaccaacaccctccttaccctccctgggctccaacactacagcaggtaccatcttattcagcctggcctagtgacttttggactgagttgtttgggaaggaaaggaaagggaggaagaagaggaagagtgcagtgactttcttaatatatgccatcaaattggtgataaagtttcaacaaatgaataatgggggggcgggcacaaacattcagaccgtagcatgagtattttcaggcttctctgtctctatctcttaatcgaacccctcaccatattacctccaactttatttctagcacataaacaactgtctaatataaagacatttcaatgctttctcctgattcccccaccggctgttgtccatcaggcttccccaccaggaccgaggttgccttaaacaagtcagcatcctaaggcttgccactggcatcccagcaacccagtatcaatctccccagtacttccctctatgctaatgctgatctcttctcccatatcccacccccataggattgatttctggtccctacaaggggatggtaattcatccgtgcaagtctgttccaatcttgatgtcgtattgagtacaatcatgataatgatatgcatacatgtcattccttcatgtttatctctagaacatttaaagcaggcacccgggcttcccagaattacaacatgagttgaaagaaacggaatgtaaaatacaattttcttcctgttcatgcctggaaatctttggagtattgcttggctggccaacctccaagttcatgatcggggagaaggctgacacgtgactctgagcagccaaactagacaattcatggctagggtcagaactcctggcttcagtggttttgtgaatggaggtgttaccaagttcctgcggcacatttcatatttcatgccagaagaagtgactccactagtttgttgtgtgactcagattgatgattggatactaggtgatgaaaaatataatttttaacttctctggtagaaatcatgctggtggcatgctggaatcctaaaaccttaaagcaaataaaatccactgagagccaagatgtggtaaggaaggagaaatcttctaattctttccatacaaaagttatctagacagaaaccccatccccctggtgtggaaatgctatttgtttttgcttttagtgcttttgcttttaaaagatggacaatgaatgatagaagttctgttttgaaaaggatatagtcattgttaatgaccgggtatctagaaattatcttgttggttcttattttactttttttttttttttttttttgaggcagagtcttgctctgtctcccaggctggagtgcaatggggcaaactcggctcactgcaacctccacctcccaggttcaagtgattctcctgcctcagcctcctgaatagctgggattacaggtgtccatcaccatgcccagctaaattttttgtttgtttgttttttgtatttttagtagagacagagtttcatcatgttggccaggctggtctccaactcctgatccgcctcaggtgatccgcccgccttggcctcccaaagtgctaggattacaggcatgagccactgcacctggcccttatttgacttttaaaggaagaagctccacttaaatagaatttgagtgacatttgtttatacagaggtgaataaaaatgtatagtccctgctctcagggaacttaatggttcagtaagagaaacaacattaaacaaatgaggcaattttatgacagagaagcacagagacctgtaggagcacaaacaaggaagaccatatcatttggaggataaagaaagtcttccttccttaggaaattactgtctaagctgagaactgaaggggtaaagttgggctcagggtgtaggggagaaggaagggcacctaagagaggctcaaaaggaatagagaacttggcacatttgagatatttaagagtaagttaatggaagagatttaaaacaaaacagaaatagatttggagccagacaaccaagagctctatcaatcatgttaagggttgtagactttagagtttaccctatggtcagtgagaagccagtgagagtttttaaaggagtaattatctgaacacaaccccaagctgtcctgccttcactgtgagttgatggactaaatgtcttcctattgtaatgcatccatttcataggcttggattgagctcttcctgcttatgagcacttccgaaggcaggcgccatcttggtgaacaccctgtatgttatgtgaggggccatgctcccaatagtgtgtgcatgtgtgccctctgctgatggcacttagaattagagactaaaaggaagaaggccaggggtggtggtgcatgcctgtaatcccagcacttttggaggtggaggcaagaggattgcttaagtt

SEQ ID NO: 52778 - DNA, 686 bp, Homo sapiens
aaactttcaaatacaataaaaaaaaaaaaaaaaagaattgcagatgcttctctcaaaacccaagaaagccaagtaaaaattaatgtttttcaaatatgaaagatcaaaacagggaccagacatcaagtattgctctgagacgggcctgaatcaatttatgagttaatttttccaaggttaaggatatgcccagaaggaaaaatacggaatcacagacacagtccgtgtggtctgtgcctttctccaaagatgacttccaggacttcactatttaaaggggaaaagctgctggaggggaaaaagggagggtctggaaatccacaagttgcaagggaaaaggagaaggtaggggaatagtcaattatggatttgttttgcaatcagtaactcagtgtttacataagataaggcgaaagtggagtagctgcctgtggagatatttaaccttttatctgtgctatctgtttaggaacaaaaggaaaggcagtttcattgtatgactcagcttttagccgtttttttgtttgtttgttttttttttttttttgagaagagtctggctctgtcgcccaggctggagtgcagtggcgcaatctcagctcactgcaggccattctcctgcctcagcctccctagtagctgggactacaggcgcccgccaccacgcccggctaattttttgtatt

SEQ ID NO: 52779 - DNA, 1025 bp, Homo sapiens
gctgggactacagttgcgtggcaccacacccggctaatttttgtatttttagtagagatggggtttcactatgttggccaggctggtcttgaactcctgacctcaggtgatccacctgcctcggcctaagtgctgggattacaggcgtgagccaccacacccggcctaagatgtcctctcttagcagtatgcctttgggccagttacttaacttcactgtgcctgcagatagagcgattaccaaagagagggagccggcttgagctgagcaaacaagcaaaacggacttcatcaagcattgccttccaggtgctaggcacgtgacaatattgcgcatgtgttgactcatttaatctgtttaactctataaagtagatgccaaattattattattatcatccccattttccagatgggaaacttgaaactcagcaagggactttccaactccaaatgcttttcctctccggagcgtcactgctctatgccagttacatacagagtaatatattggaatgctatttgcctggggacagtaaagtcccacctccagccttgatcaggatccaggtgtagtcaacagatcccagtctggctaatttaagcagaaagagatttcacatggggaattggtgctggtaaaattattagcagagcaggaagagcaacattaggcctccagaccactcttcctctacccttgtagtttttccaaagatggataaacactatctttcatctcatataccctttggcaactgagcttgccattccctcatcaagaggtggagcctgtatcactttcttaagtgtgagttggttgagtggtatcatttggctaacagaatgtggtagaaatgactctgtgtctgttcctggtgtagccctaactgcggcttctggcagcttctgattcctgctgtttggaatgctgactgttgggatgtgcctcctctgagcctggacaccacgtcatgggcagcctgaacaacacagtgaggtgtgtcacggtaggtgcgtcagcc

SEQ ID NO: 52780 - DNA, 881 bp, Homo sapiens
gccactgcaacctctgcctcccggattcaagcgattctcctgcctcaacctcccgagtagctgggattacaggtgcgcaccactatgcgcagctaatttttgtatttttagtagaggcagggtttcagcatgctggccaggcttgtctcgaactcctgacctcgtgatccacccacctcggcctcccaaagtgctgggatcacaggcgtgagccactgctcccggcccagagaaacttttttttctgttcatggtcctggctggtctgtttgcagaaatgcatttatactggagaagtagtgggaggggggaagggctctgctttcagtctccatcttcctagattcccggctctgagttctctgccctgtcgtcacataggtagatgtgtaccctctgcactgctccttgaactttgaacttgtcacacagattcagaaaagagtagtgaatccagtttcacagattttcaacctggactttacccatagctatctgaactgtaaatttgccctgccttgttactcaggctgtgagcttctgcctaggctattatcccagtgtgggcctctgctctgttgctcacctacactggacgcatctgaagagcatgttaatttgtgcacaaatctacatgtgtgcactacacttcagagaaattaaaaagtcctactagtttccgttttggtttttatcaacgatttcagctgcatctgtgtcttttggagaataaattttgggtcccaagaggtttcgttaatgactcctggacttctagaaattacccaacttgaactagacaggtaaaagttgttcagtttggcatactttccctcttgggtttcggcatttaatttggccctttctgatattctaattgg

SEQ ID NO: 52781 - DNA, 647 bp, Homo sapiens
atggtgaaacctcatctctactaaaaatacaaaaattagctgggcatggtggcgggtgcctgtaatcccagctactcaggaggctgaggcaggagaatggcttgaccctgggaggcggaggttgcagtgagctgagattgcgccattgcactccagcctggctgacaagagcgaaactccatctcaaaaaacaaacaaaaaagcctaactggttttccactttttagtttccgttttctatacaggtgccaaaataacttgttaacaaagcatgtaccctgacttacccttcgatggtttctcatccgttctagaacaaataacgccctggctgacctggccctgccactctatcgagctttatttcatgctcctctgatgattctacaaggtaccaagctctttcttgactcaagcctttgtgtctgtcattctctctgcttgaaagctgattccctggctctcagcaggttggagtactttttatccaacagctctgtttacagtcacctcaaagaacccaggtccaaccacctgatgcacagctggttcccctattcttctcattactgcgcccagtttttggttttgccttgtagaatataccagtctattattcacctgtttgtctctgcttctagaatgta

SEQ ID NO: 52782 - DNA, 3925 bp, Homo sapiens
gggcaaaactccatctcgaaaaacaaactaacagacaaataacaatcaaattagtgtaactttcgatcaatgactttggattgttattttgaggattaattgattatcagggcctttgggccccaggctgtagtgctttttttaaagttcctgtcacccttgtacacctttgtcactggtagaggaggaaggtgctctgacatgctctgacaactgggaggactaaactgtgtgctccagaaatcctaatcaactttgtttgtagtgtctggattttgggacaactaacatagaccactcaaaggtcttctggctcagtggagggggttcttagcagttgggttatactgaggttgccagaccctggagaacagaatcccagccccactcccttccccaggaatggattaataatttgtcacacaataggtgcttggaaaaaaagtatatgaaagacaattcactactaaggatcttttcaacacatgagggctgctaaaatgagaatcccactaagaaaaaactgattgagaggaagataaaagatgacagtggcaatcaacatatgaggaaaaaacactgagagtcaataataatcaaaggaacaaaaggatcggggacacattgcagacacacttctgtttccgaagcccacccggcaccaaacaggtcagggcacccgaggcgggcgaggacccgccctcctctgcttcccgcaggtagggaggggtaatcgcagggtaggcgctggcgaggggtcttctaccgttcgagcagtatcaatttcctccactcacttttctgacgctgcatttaacaaatatttctggagtggctacattggactagacactgcgcgttaggctctgggtttcccagtctacaaggttttaggcttgcaataactttcaaacatgggaaggctgtttcgccttgggcatttttaagaggacaaaacaacgatcgggataccgataggtcggcgagcaggcagcagggcgcggctgctcccaggaggaaccctggctccagcaaaacccaccgactgagggtgaatcatggacgggcagggcagccgaggcccccgggcccaaccttggggactcagtcattccaaagccactgctgccggaaacgcgccctgcgccacaggagtcccgtgggcgcggcccggacctcacttcctcgcggtcacctggggccctcgggcctcctggacagacctgcacgtgccagggggtctccagccgcaatccgcccccttagtgcggatacagcacgcgtcacctttggggtcgggcatgggtggaggcaggcgggggtctccggcctagacccgctcccaaagggagatcactacccccgctgcgggtggatcacttcacatacggaaaggcagcggcggccaccgacccgtgccttctgcaagggccctccctatccttgcctggggcctgaatctggatacagatggggggccaagggcggaccccttccattccctcatcttcctccagtcggggctgcccggacgggagggtgcaggaggcgcagcgtggggactcctcacgctgtctgcgctctcacatcccccggacgctccccgcgtgcgtgcaatcccccgaggaacagggtgcgagaaacgctgggcaccgccactccgccctccaggggaccctcgtccttctcctcccttcctccagggcaggctccaccgcctcgggcgcgcccaggccgctgcttcccgcagtcccaggccgagacgccgcgtccctttcccctggcgatgcggaggggcggcctccgcacctcccgccaccgccttccccacctcccgccaccgccttccccagttacagaggccgcgcgcggcgccggcaccctggccttccccggtagcgcgtaccttgctctcgatctgcttcaccatcttggctgctggagtctgacgagcggctgtaaggaccgatggaaatggatccaaagcaccaaacagagcttcaagactcgctgcttgctctctccctttataaactggcacgcccggcgtgcgtgtggcgggggcgcgcgcgcccggccggacctccgcgcccgtcgctgcgccccggccacgccccgcccctggagcctgcgagccgggatcggggcggggctggcgcaagcgtggggcggagctccagggcttcggctcctgtaaccccaagcccagctcgcactccagctggaagtggggatcagcactgcgcgtgacggtgggaggcggggagacggacagtcacccccagagacacaaggtccctcccgggtcacctggggatgcgtccgccgggcctgaatcgaacacgcccacgctcgagatggggaccgcccaggcagggctggattcctcgaaaagggccgccacgccccggcccccccagccacgtgaaccccacaaagtgctgagtaacggtgaccgggaagtatctcggtgtgtacgtccttgcctcctctccggaatttaccgtgaccgttctcttctctgtaacctccttctgttctttcattttcactgctgagcccgctgctccagcttgacacagcggtttagtgcggtagaaacgaccgggggactggttgggctcttgaccatcagacagctgcgtgtgagatggaagtgccactgggttgagctctgcaacttagttacgcagttgtgaccctggaaaggtcctgacctcctgaagtctcagtgtttccttctgtagaacgggaatcatgatggtctcaatctcacggtggtggtattttgagggttaatagtgcttgcaaaggacggtgcttggcacatagtaaacactccatagatagttcttactgttcggtgtcttgcagggactgattgggcctggccaccttatacagcatttacaatggcacagcacgcacacttgtgtgagattcttctaacagaggcagactcctggaacagaagtcggagtttgcattgatccaggaatgcctgttgcaggttatgtctggcagggctggggattgtggaaggtgggtatgttagctggccttgtggagccaggagggcctgtcagcggctggaagtggaggttgaaaagctgctcacaggaacgagagctagaaggctgggagggagagtcccaggtctgtgttttcagagctgagctgttcccgatgaagctgcaactaggtgtgattgcctaggggtggtgatactgctgcctggctgccccctgaaatccctggcttccttctttcactctttcagacagaggaagggaggaaaccagaggttttgaatctattgtgcaaagtttctagggggctgaggagcacggagcatgaatatggatataggcaagggacacattctaaagacagcccatagggagggaagacagactgccctgaatgcagcaatgttcccaaagagagggaggttattggggcagagaggaaggagctgtatggagcacccagagcagaatctataacctgcttttctgctgctgggttttcagttcagctgcatcccagcttcctgacttttatctgtttgttggtgaatttgcatgggtgataacaacaaatcattgagttccaggaaggggcaatgcaggccatcctcagctgacttctctccaaagaccttccaaatgtccagtgactcagtgaaggaggtactccctctctcccacctccacagcaccaatgcagagtagatgtggaggatggtacagttataaggaactgggaggccagtctggactctgcaatttgactccgttgtcctcatccctactctaccacttcatgactgggtaactctaggcaagtctaaatagcctttttgtgcctcagtttccttatgtgagaagtgggcgtaataatagcttgtgctattataagggtt

SEQ ID NO: 52783 - DNA, 408 bp, Homo sapiens
gcaagcacgaactaagtccaaacacctgctacttttttttgttgttgttgttcactgttgccaggtgatccatgatgagccttggatcaataagtaattataattgacatagtatataattaattatgtaatttcaacttactaagtttatttccactaagattgtcccataaaactgggatattttaaaggcttccatggaaaaggagagactaaagatcaaagacttttttacatttgactcagctatgaatcatatcctctacagtgtgaattatctcagcccaccattattaactctagcaaatataatgaaattattctatcattcattcaactttatgcagttggtgccaagtgccagccacacttctgggcactgaggatatgacagtgaataagcaggtg

SEQ ID NO: 52784 - DNA, 638 bp, Homo sapiens
gcttcatcgtacttgaataaaaacattaattcaatcaaaacgtttttataccccagatttaagaagtaaatagatctgtggtaatgtttgtggaatgtattagaaggccagcacttgattctcttttcaatgttcctgaaatagtttacatcatctgctagcctttgtgagacatttaagaaacagaattttttggtccagaatactgaatgagacaaaccctctgctgccaaagaaaaactcaacatggactttgtatggcaaaaggttatcaccatctgtattgtatcaagcctccgattagcttgtataaatatctggcaggaaagtaagcttcccttgtccagcaacagtcattagaatgacaaaaatgcagggttgtgtaatattgttctaacacccgagatccatcaccattacacaagacggcacccccactccatgtcaggctgcaagagaactgttttgaaaaatggtcttgaaagaaaaagagaggtcacagcagatctggcatggggacagtgtttgctcttgggctgcattaattaaactacgtgccgatatcataccaactgcaacacaaccttaattgcaattacccattgtgaccagccttcactgaaaatactaactagaga

SEQ ID NO: 52785 - DNA, 3397 bp, Homo sapiens
agacagatagatggacaaggaaatgtgatatatacatacaagggaatatcattcaacctttaaaaggaaaagaaattctgacacacgcaacaacatggatgaaccttgaggacattatgctaaataaagataaaaccagtcacaaattctgtatgattccattcacacgaggtaggaagaatactcaaaatcacagggacagaaagtacaatgatggtcgccaggggccgaagggaggagggaatgaggatttgttgtttaatgggtatcaagtttccgttttacaagacgaagagttctggaaatggatggtggtgatgattacacaacagtgtgaatgtactcaatcccactgaactgtacacttaaaaaatggctaggacgggaaattttatggtatgtgtacttttcttccaattaaaacaaaacatggaactgatctcagaaggcctggtggtgcttccacgtggaaccgacagaagagcaatctgtagcccgcttctctctctaatcgcaccatgagaccttgtctcctccgactctccaatctgctcaggatcacaccaagtgtttacttcagcttcaaaaaaagcaaacagtactcctgctccaccagttctgtgtcaaagcagcaaggaacttaatctctccaaacctgcctcctctttaaaacaaggataattcctacctatctgcctcacaaggttgctatgagggcaaaagtgagatcatgtatataaaagtggctttaaactgacaagcaccagaaaaacatacattacgtgtataactactttcatatggaaattcagaagcggctttaacaacgtaagcttcataaagcttgcaacacctcacccatgctttattccatttaaaacccacatcatcttcaaataacacctttcttgtttttgccataaactgaagggcagcattgggagaaaaaaaaaaagggaaagaaagaaaacccttgggggggagaacactcaaaacgcaatcagaaattatctcacatgtcctatgtcctatgaaacttcggtatttatgaccccagcgtgggtccgcggcgccccggaactacacttcccacaaagcattgaggcgaaccccggcggcgggcggggcggcctgggattcagggtgaccaccgctctccccagacagggaccgccgtccccgggaaggctgcaccgcgtacgatcgagggggcactaactctcctttctgaaagcgctgtcaccccgtggtttctcctgcggttcgaccggcgaccctctccgccctccctgctccatctgagggtcaccgcctattcgtgacctttcggctgattactagagtgtcacaaaaaggcaccttctcccccttcccgaaagctccatttctataactcaaccagccgtcggggacccggggccaggcggggtcagacgggacgggcggacactgcccgtcaccccggggctccggccctcccgccagccgaggctcagtgggcagggggctgggctcccccgaccccgggccagggcggatcgcgggcagaggtggctccgcccggggctccggtttcaatttcgcaacgtgacggtgcaaacctgaggcctacaaacgccagcggcgacggtccgcgccccgcccgtccgccaggcccgggctccccagctccccgtacgccgcggccgccgcccgcccaccgggcctggcgccccagccctcatgcggccgccggcccccggcaccgcgcggcgcccgttccggctcgcggccgcaggttcggccgcggcacttactcagctcatcctgggaggcggaggcggcggccgcagccatgttgcgccggggagggaacgagggaggggctgggggggcagggcgcggccggggggctcgcggctcgcggtgcggcaggggccgcgagccgcctccgttcactcggcgcggaccgcgctgtgccccgaggcccgcccgccgccgccgcctgcgtcctccgcgtcgcgagcgtcgcccttcgctgcccccgcgagctcgcgactcgggcgctcccgcagcctcgcgcctctgcggagccgctgccgctgccgccgccgccgtctgtgcggccgaatccccgtgcgccaggcccgcgcggcggctctgcgactccgcgccgcgctcgcccaactcacgccggttttatatttagaaagagctgagccatcctcccagcggcccccccgccgggcccctcgcgcgcccgcccgccctcgctcgctcgcggctcgtcctgcccacctgtcgccgcccgccccgcgtgcgctccccgcgcggactcgacacgcggcggcctgtgcgggcggcccggcctaaccgcgccgccgcgcgcgcagggccagtcccccgcggcccgggggcgggcctctgacctgagtcggagccggtctccatgccgcggacgctgcgctcggcgccgcgaggtgagggctgtagagcgaggcgttcggcgggccgggccccggggagccgcgcgccgcagtccgtgaggggctgggccgagcgggcccgggctgccctagcggccgggggaaatcctcgaggcggggccggagcgcccttttccgaggtctgcggctgtcacgttggctgggcccgacctggggaaacacgcctgtccaaaggaagagacgtggactcagaaaagtagagccgggctcggagtcggcgggaggaagccccgccctgcgcctcccgccgaacttctcggccccggcgctgactcagtcccggacgagcccctgcgccgcagcggcccccgacagcccagttctggtgtggaggtggctggtgctcccaaaacggctagcgggagcagggggtccactcagccctgcaaaagttagataaggcaagattcctaaagttcacatggaagtatctatgcctatgtgagctctgagattttgttcagataccctatgttcttttcggtaactagagtgatttattttcgatatgctgattttaactttctgccttcgctttgtccgtgaggtcatgtacacttgcaaaatgaaattcaaattcaggggttgcataattgctgtactttaagtgatggtactgtcataacaaattagatacaagatcagatactttttttatataagaagaaatcaagtcttaaatagattgaaattgcatttattccttaaagcagaaatctataaagccctaagtaatgtcttaaaaatggaatatatgtcattcctgttgtaacataggccaagtacaaggtacaacactgaagacatttttatttcctttattgtttttgttatagaaattatacatgatcttgggccgggcgcggtggctcacgcctgtaatcccagctctttcggaggcttaggcgggt

SEQ ID NO: 52786 - DNA, 2093 bp, Homo sapiens
cagagcaaaactctgtctcggaaaaaaaaactatggaagtactccattcctcatcaagttttcagtgtattcaggtatttgtctcagtacggactcatggtttccctttttaattcaatagtatataatctgtaattatcattatctacatggagctcaaattttccatgatttgtctagtgggagccctttcaaattggctgtgttctttcaacatgacttcattattctttgagcacttctttgatttatggtataagatgctccaggctgggcatggtggcacatgcctgttgtctcagctagttgggaggttgaggtaagaggatctctttagcctgggagtttgaagtcagcctggacaacatagcaagaatcctcttaaaaaaagaaaactgaaaatgttgcaagctcatcttgtatcttccctaccccagccccagaacaaaccatttctggttccttttagtagagaataatatataaaatccacaatctggaatttagataagttcattgctattggagtgtcactactttcaggccctcttagtgggcagagttatatatatatgtgcacacacactcatttatatgtgtgtctatgtacatatgatatatacacacatacctatttttttgtctcatacacattgaaattcatgagttcataccaatacctccaattccaatctaacaccacaaggttcttcccatgtttgtaactcccttctctgacagtgagaaactctggcttcccttatctttaatttacttgtttgatcaaaccttctgtatgtaaccatcttctatcaccaccactaccccctctcctgcagatgctcctccattcctctcaagctctgacatcctgcagctcctggcccctactcttgcctccccatgtggttagtctttccttcccaaagctctgtctgctcatgctgggccatgctgccaggtagaagctcccctcaggctctgacctccctgccaagctatccatgcatcagcacctcctcagcctccttgggatccaaccgcccataccaggtcactcactcgcacgtgataccctcctacctctgctagggatcacatacttcacaccaggccaccccttcacgtgcacaccttccttactttgggcccttaaactccatgccaagctgcccccaggcacgatgccctccatactgtgtggactttgactcctcacaccaggcagccctgcgattccaatgcccttctcaccctacttggactctgacaccctcaatcaggccctgctgcccctgccctacccacacggatgacttcactgttgttgggctctgatacaccatctgggaaaccctgctatgactcaagccatgttcattttgcttgggctccaactcccctcatcaggccacaacacactgcccaacccctccttcttcctgctcaccagtgtccacacacacacactcacacacacacatatacaacatacatatataacacacacacacatacagcacacacacacacagctctgggctttgactccctgtgccaggcagccagcctcggtgcatgacctctttgctctgctgtgggccatagaggttctcccaccccaaaccccagcagacagtcaccttgcttggctccttctaatgtctttaggattgaatagtttggtaagaaaagaggacacgggcagtgacttttttttctcttatccctgtccttcaggcattccttagttatcttccttgaagacaaaccatattagaagtgtattacatctttccagagtttttgtacagacactcttctccccattgtttcattgtactacaatttatttaaccccttatctctatgatggcagaattgatcaatagaattgacatctttctgactgatactgaatcttctggccgggcatggtggcttatgcctcccaaagtgcctcatcccagcactttgggaggcctaggtgggtggatcacctgaggtcaggaggtcgagaccagcctggccaacatggcaatacccatcactactaaaaatacaaaaatcaggctgggcatggtggctcacgc

SEQ ID NO: 52787 - DNA, 1002 bp, Homo sapiens
tgttcaagtcttcttttgtgttcatcagtaatgttgcttttgttgttgttttgtttttaattttttttagacacagggtcttactctgctgcccatgctggagtgcagtggtacagtcacaggtcactgcaacctcagactcctggtctcaagtgatcctcctgcctcagcctcccaagtagctgggactataggcacacaccatgcccagctaatttgaaaattttttgcagatgtggggtattgtccagtctggtctcaaactcctggactcaaatgatctcaccttagcctcccaaagagctgggattacaggtgtgagccactatgcctggcccttcagtaatgttttaagtttttcttcatataaatcttgcacatttttgtagatgtatagacattcctgtgtgttatcttttgtgcagctctgtgaatgacagattccttctttggtgtgttgaataattagactcatctgtagaggaccagtatggactggccctaagacccctatatgcctgcagtgattatttcttctggcataatcacaagcaataggggtggtaatcttaagacttcaaaatcactgatatcggcagggaggtagctaacacttacctaatatatgccaggcattatgctgttgtttttttgttttgttttgttttgtttttttctgagatggagttttgctcttgttgcccaggctggagtgcaatggcacaatatcggctcactgcaacgtctgcctcctgggctcaagcgattttcctgcctcagcctcttgagtagctgggattacaggcacccgctaccatgcccagctaatttttgtatttttagtagagacagggtcttgccatgttggccaggctggtcttgaactcctgacctcgcctccgcctccaaaagtgctgggattacaaacgtgagccaccgcgcccggcctatgctggtgttttaaataaatgtataacatgtatatgaaagatgttattatcc

SEQ ID NO: 52788 - DNA, 1360 bp, Homo sapiens
agaaggtattaattttagtaaacattaattactaaaatgtttattcatgccgggcatggtgggtctaactgaaattttgtatcctttgaccaacatctccccaacccttcagcctcccggcccctgataactatcattctactctctaattctatgagttcaactttgttagattccacactgaagtgaaataatgtggtatttgcctttctgtgcctggcttatttcacttaacataaagtcctccaatgttgtcacaaatgacaagattttcttcttttttaaggctggatagtattctgctatgtatatagaccacgttttctttatccattcacccattgatggacacttaggttgatctgccatcttggtcctgccctcttctctgatcagcccctgagcctatcatgcatcaaatatcttcctgttgaccaagttctgaacaaaccattttggaaaatcagagtgtcagacattcaaacaaatggaatatatccatgaaactcaccctggcatgccaactgtccccagagccaaagacagtggtattgtgtctggccactctgtcagcagcttttccagatctttcccatcagaaatggagtgcgttgtccagcctggagaagccagtacaatagttccttttggtagggctacatttttactttccacaactctgaaagataaagcacattaaggcattaaggcatgtgacatgtcttccctttcaagggagtcaggatgctgtgtggttagtgttgacaaaagtgcactgaggttgatattccacaactgatagtccaccacccctctccatcttaattcttagccatcggcataggggtcaccagagaactctcaactggcccagccacttgaggaaggagtggctcatggggtgaggagcgcctgttctcacccacatctcttccttttaagcaagaggcctctgtcctgtggctcaaggtgacctggacactagccttctcttcttcaggtgtcgctctctttcccttagccttccactttccagaatcgttgagattttcctctctactgtccctttcactcaaaatataagcatgctcaagtctgccatcttataatcccatccctcccctagctccttgccccttcgtcttcctttttcagccaaacttcttcacttcccattcatgtgctaacccgctgcaacctgccttccacccctactactccactaaggtcacaacaacctcctgagcacaaaatccagtggatattccttaatcattgtctgattttacttttccactctctctctctctctctctctatatatatatatatatgcatactttttttttttaagatggag

SEQ ID NO: 52789 - DNA, 877 bp, Homo sapiens
cacccacctcagcctcccaaagtactgagattacaggcgtgagccactgtgcccagacttttttgtatttttttgtagagacggggtttaccacgttgtccagggtggtctcaaactcctagatccacccacctcgacctcctgaagtgctgggattataggaatgagcgactgcacctggctcaatactgttgccttagtcaggatttctataaatggtattactaggtcaaagagtattaaaacatttgtaactcttgctgcatattgccaaattcccaaattcctttctagaaggttgtgccaacttccacttccaccatcaatgtatgagtgtattatctccattactattatattttcaaaaatagtttgccaatccagcaaacacaaatacatgttcatttctttaattattagcaagaaacgtataagacctatatgaagaaaactgttaatgggatataagacaaaatgaataaatggagaagcataccttgtgtttggagagagaaattgtaaagatgtcagtttcctctaaataaatctgtaaggtcactgaaattccagtaaagatccatagacgatttctaccaatggtattataataactggctagtcattgagacacaaaatttaaaaaaataaagaatgagatgtttggtttttttaagagacagggttttgccatgtttcccaggctggtcttgaactcctgaattcaagcaatccatccaccttggcctcccaaagtgttaggattacaggcgtgagccactgaagctgcccccactcattattctaatataaaagctaaatgactcaaaatttttgtcataaaaaattaaagtataaaatacagaaaacatgaatactt

SEQ ID NO: 52790 - DNA, 6605 bp, Homo sapiens
aaaagagaaagtgcttgcacattggagcttgccaactactgctgctctagatctatggggccactataagaatagagctcaagctagcctgctagaaaggccacatagatgagaactaaggcatgcaccccaacagaaagcctgctaatcagcagacatgtgagcaaggcccatcctaaattaaccatttaccccagatgagacctaagaagaaccacccagcttaactcagcccaaattgccaacccaaagaattgtgaactaataaaccgttgttgcttaaagtcactaaactttggggtagtttgttatgcagcaaaagctaactgatacagtcccttccaactctgaaatatttttagtatgacttacctccattttttaagggtgggagctcagctgtcttcaactcaaagtcactattagtaggatagccaacaaagtgcttcttcagggtccatgtcttagtacgaaccatcctgaagctcctagaacacagtaaatatgtagtcaactgccatgaagtgactgcattctaacagttctctagccgtcaaactgagaccagacagcacaattacaatatcctcaaatcccatcattatcatatcatgccaaccacattcatttaacatttactatgtttctggtgctgtgctaagcacttcatatagattacctcattttatccttataacttccctataagatagacattagtatcattgccagtgtacggatgaggaaactgaggtttaaagaaatcttcaagacaaggaaaaaatataaaacaacaaagaaattcttcccagccactgctaggctagagtttctctacggcactgaacagttaccggaagtgcgaatattccattccgtttctcatctcacatggagtgaattctaagaaaaagcatcaaacacaaagaacccaatagatagaagtccatgcacctctttcagatggaaacagccacgcatttcaaggcagtctcagaactcctgaaaaccaccggagggcgccgctgctccgccccattttcaggtgcgttttttttttttttaaatacttttttttctctcttttcttgtagagaggagcctcactgtgttgcctaggcgatccgcccgcctcggtctcccaaagtgctgggattacaggtgtgaaccacttgcactcagccatcgggtgcgaattttctttggcccagtagggatttgagtttaaactccacaccaaaccgattttgagctgaaacgctgcaccaaagcaagggaagatgatgaaggctgccccgagctgggggttcaggatgttctgcttggactgaactctgccgaatcacttgggacctgcgccttcccgcgggtgcatccgctacaaacaatccagttacgaaaccatttggagctgccagtgatctccccagctcccctaccggtgccgcgggaggggacacggtgacctggagggagcactcccgcattgcgagggagccaggggggcggtctgatctgcagcccggggttgttccttcttttctttttttaaaattaagactttttttgtgacggagtctcgctctgtcgcccaggctgaagtgcaatggcgcgatctcagctcactgcaacctccgtctcccgggttcaagcggttctcctgtctcagcctcctgagtagctgggattacaggcgcccgccaccacgcccagctaatttttgtacttttagtagagacggggtttccccatgttggccagactggtctagaactcctgagctcaaatgattcgcccgcctcgaccttccatagtgctgggattacaggcgtgagccaccgcgccaggccctacgtatcatttttacggtgagacatttgcagtttactctgttatttcgaaatacacattattggctctagtcactctgctgtgcaacagatctcagaacctactcctctcgtctctgaacttcgtaccctttggccaacaagcccccattcccccccgaacccgctcccagcctctggcaaccatcattctagtcgttatttctatgagttcaacttctttagagttcacacatctttgtccctttccccaaaaaagcaaccgctgggcttccaaactcgctacaagtccagaagccctcctggaaagggtctggccgcagaggggccaggtcccgggaaagtctcgcccgcccgaggagggggcctggcgcggcgcccggcctttgcccgctcgccctttgctcccaccctcgcctcccgccgcccgccgcccgcttgcccattcccgaatccccaccccgatctttcttcttctaccctcccccagttgtgcagtccagcaagttccctggccagccccctcccgggtgcaggaagctaccgggtgtcccgggttgtaaccaagctttcctattccctccggcgcgcggctccaagctctccaaggaactgcgggggcgggaggcgtcgggacgtcggctcccaagatcctccgagtgcaagacccagcggtcatttcgacgtaaggggaggaggtctaagagcaaacctcctccactggggcgtctagaaacttggcaggaagaaagcaagggggttagaggagggagaaaagggaaggaaagaaagcaggaggtctacttacaggagcccgaaggttccactgcctggggaaggcggctgggactgcgcagccgggcgcccggggtccgacttatgacaggtcccaagagagggtggggccaccccagggcggggctgcttctttagggtgagagcccggccccgaaagggtcacaggaggaaaaccagggtccgggaaatctgagtgcgtttgtgtgtgtgtgtgcgcgtatctctgtgtgcctatgtgcatgtgcgcgcgcgtatgtgtgcatgtgtgcgtgtgtgtgcgtgcgcgcccgcgcgcccgtgtgtgtgcgtgtagggggttagggactcctgataggaaaattcctaacagagctttgtccagctgacactggacctccgcctggggtcctaagttggagcccggcggaaatatgccccgtgggggaaccaaccgtggcatctgccaagcaggccggaagggtccaaaggcagggcctggggcggccgcagccctaataagcccccggtgctggctccgatccctgggctccccgtcagccctgccgcttgcccgcagtgcaagctttcgcccagggctgcggtgcagacaccctgcctgtctgtccccagtccgcctgctgaacacctactcgccttccaccagccaattcaaggtcacctctgtgaacccttgccagactcccccaggcaggagtgagcactcttgccactgaggcaccccacccatcacaccctagcaaacatcaggccttgacctggcttctgcaaggagaggtggtctcaggcaggggttgaacgtgaagctaagtcgttggtattagacgactgcaggttcgaagcctgcacctgccacttactagtggtgtagctttcaaagacttacttaccttctccttgcctcactcagttcagccatctgcaagatggggataagaagaatgcctaacttccagtcattgtgaagattcaatgtctttaatttatttatttaattttaattattttgaggtcttgctctgtcacccaggctggagtgcaatggtgggcatcatagctcattgcagccttgaactcctggactcaggtgatcctccttcagcctccctagaagctgggattacaggcccaccaccacacctggctcaatgtctctccttgtaaggatacccgccatattggattagagccccacttgtcagcctccgtttaacttaaacacgtctttgaaggccttgtcttcaaatactgtcaaatggattagggctcactaatatggcctcatgtaaccttaattacctctttaaaggccctatctacaaatacagttacattctgagtactgggacttggggattttaacacatgaaattggggaagacacagttcagcccataacagagtgtgtggaccaagcgtggtggacgcatgccacaggatatacacagcatcagaagcactgggttccatgtacataaagcaacttggatggaccctaaaaacacaatgccgagagttgaattcttcacactaatcagagttggtggcactttatccccactggtctgccaaattctttctttctcactctctcccttctcattaatttatgtaacttaatataaaacaaaactccattcccaggctgggtgctgtggctcatgcctgtaatcctagcacttttggagtctgagacaaaaggaccacttgaggccaagcattcaagacttgcgtgggcaacatagctttaacctgggaggtggaggctgcagcgagctgcgatcgtggcactgcactctagactgggtgtctaagtgagatcccgtctcaaaagaaaaccaaaaaaactcaatttcctgcttttctcctcctactataggtaactactgtgatgtatttgatttgcatacagtttttttttccatgttcttacataatgtgcactgtggtcatatacatttaatttatagaaacggtattgggttacatatcgcattctgcttctctcttttttttttcttttaagataacttgttacagaatcactgtttcttttggatattagaagtgttaataaaattgcaggcataaaaagtctttgcaaagtaagaataagagaaaaaagtgccagaaacacagagtggctcacatatttactcacttgtccttaaattgaagatacagataagattgggccgcaccaggtcaaacaaaatctgtttcccaaacttgatgactcagtcagtctcaaaggctgcagcttgtcaagtcatggtgattaagttaaatcacggctgttacatactcgcacacagagagttagaatatggaataaaggatcaaggaaaaagattttcctttgctttaccccaagacaaaactctactcaattcagttctctgatcttaggtttcaatgagttctgatctaactgtggagggaacagttcacttaaaacaataaagcagtaacaaacaagtaattaaaaaatgcttttttatcaaataattcagatgatacagatgtgtacgctataaaaagcaaaagtcattgttatctgtttggtggaaatttcttttggattttttttttgtacttcaaaaacagacagacttagtcaggggtggtggctcatgcctataatcccagcactttgggaggccaaggcgggtggatcacttgatgtcagaagttcgagaccagcctggccaacatggtgaaaccccatccctactaaaactacaaaaattagctgggcatggtggcgggcgtctgtagtcccagctccttgggaggctgaggctggagaatcacttgaatacaggaggtggaggttgcagtgaggcaagatcatgccactgcactccagcctgggcgacagagcaagactctttctcaaaaacaaacaaacaaacaaacaaaaacagacagatttgtcccccacttttttctctacaacttccatttcattggtctggtgggataatgcttgagaaataattataacaacaaacagtaatatttgtctcataattgcaggaattcctgaatatatgtgggacactgcgtttgaagagatagtgattatcctctctgcacagcacagaggagatgcaatcttgcactagaatagcccttggtatccagtatttctagtcctcatgatgacccaaggaggggtcatcaacaggtttgcatgcccactgcatagtatagaccaattacactaagacagcagggatgcagcaaagaaagagtttaatgatcacaggccacccagcaaggaagtggaaggaaaccctcaaatctgtctcccaagaagttctggcctggggctttaagaggattgtggagagtgaggggctggaaaattggggttgctggtcggttggggcaagggggataaaatcatcgcaaagtggaaactgtattttttgatgaggtagctcctcggggagtccttcaggacagctgcatcagtgtggtccttcagctgacatcagtagtttcttccatatcaggacctgaaggaatatctcaaagtgaaaacaacatttcataatgttcgagttgctatttaaagagcagttaaggtgaactataatcttgtaactgggtctagtgattctagaacaataggcaccaaagtgtgaggaagcagatgggagagtgtgccgagttaatcatgaatgctgaacctgctgccagcttggtttgtttttgtttctccctccctcccttctttcctgattaattttatgtattttttgagatggagtcttgctctgtctcccaggctggggtgcagtggcatgattttggctcactgcaacctctacctcccgggttcaaggaattctcctgtctcagcctcctgagtagctgggcctacaggcacacaccaccacgccaggctaatttttgtatttttagtagagacagagtttcactatattggtc

SEQ ID NO: 52791 - DNA, 1958 bp, Homo sapiens
ctttctattttccctaagcgtcggccggtctgagaaataaagagaaagagtacaaagagtacaaaagagcccggcgccagggagtgatatccctcagcaaagcttttggtggcagggcagtgtgagtttgcccacatcctgcattcatgataaacaatttgctgtttgatcatatagcctccagcggaatgctgagttggtcatgtcccacgggccttcggccccctgcactttcagctttccagtacaggtgaagtagattccttttgtaggtaagaacaaacttagggaaggttactaatgagatttctgtaaacccctatcagcgatgtcatttctggcatgcaaacatgctgcacgtcttggaatgtcatctcatcctagcttccccttccagcctctccttctaccctcctgtctccacttgggtagcgtctgctgtaattctgtggtgggacttctgcctcttgatggatggctgggctgagacaagggcaacgaaagtacaaaaaaaccctgaaacatccttttgcgtcagtcagtaagaaagtgtgcaaaatatgatggaaacacgaaagagtaagggatgtgtcaaaaggaacacagaaaccaccttaaaggagcttccattggccaaatctaagacaatctgcacataaaaaccggcaataaaattagcattttattattgtagcaccctacaattaacgatagcaattaacatgttaatggttaacccttaatagtttaaggtaaaaatcaatcaatcaataagtaacagaaaatatgttaatggatgaacatattttatcacccctaaaataagttaccaagagttcataaacacagaagtaagaaaaggagggctgggctcagtggctcaacgcctgcaatcccaggactttgggaggccaaggtgggtggatcacttgaggccaggagtccaacaccaccctggccaacatgacgaaaccccatctcttctataaacacaaaagttagcctggcatggtggcacacagctatagtcccagctactatggaggctaaggcacgagaatcgcttgggcctgagaggcggaggttgcagtgagctgagatcgcatcgctgcactccagcctgggtcacagagtgagagagaccctgtctcaaggaaaaaaaaaaaaaaaaaaaattcctgacagtagaatgccacagttttgaaaccatttattaataattgactcaggcaagaatcatgaaagctaaaagaaggtgaaagtttaataaggaacagagtgtctacatgttctaagcgtatctcttcacagattgtttattaaaggggaaaaaggtaactttacggtggaaaaacctgacagataagaggtcaaagtcaatatcatcaatgagaccaacagatattatctgtgctttctcatattatgccttgagaaggacacaacatcaattctgtggtttcctgactgaaatacataatctggatttagccatgaggaaacagcagacaaactcaaattgggggaccttctacaaaacagctagtttgtaagtttcaaaagtgtcaaggtcatggagtcaaagaaagattgaggaactgttaaagagatatgataacgagatgaagctgaattacatggctggggagaggcgcagataattataaagatcatggttgaaacaacgggtaaaatctgaatatgaactaaagattagatcaggagttggcaaactggccaaatccagcctactgcctatttttgtacagcctgcaaggtaataatggtttttacattttaaaaatattatagtaggctaggtgcggtggctcaaggctgtcatcccagcactttgggaggctgaagcacgcggatcacgaggtcaggagatggagaccatcctggctaacatggtgaaaccccgtctctactaaaaataaaaaaaaaataaaaaaaaa

SEQ ID NO: 52792 - DNA, 964 bp, Homo sapiens
ctgatactggtccctttgcctatccccttgcctcctttcagtcttttcagcatctagcagctagaaggagcttttaaaatgcaaactgggcatcagtactggcagatactaaaacttccaggaaggacatgaactgctttgcctaagagagagagagaaaaaaaatttggaactccccaatttagaatgaaaaattaagaaaatggaactccccattttagaaggaaaaattaagaaaagagtagagagaatggctctgggttacataatggattccttaatcactggctaagaaataaaaaaggaacctctgaatattggaatgaattaattttcttgtggaaattggtgaaggggctaaatatcctaatgatcttggaacaaaatagagctcacatttaaaaatagctagcaggacgcaggaggaggcaagcccagggagctcacaggcattgtgggagaactttggactatcatggaacatagaacttggatttgttccaatttaatcagacctcggaagggcagaggagccacccacagatggctttgggttatgtttgggttttacttgccagcttgggggcattgtttagatatcagctgttggtcatgctgaactgtgaaacaggcgtcattccttatttgaggtcttattaccttggtttgtgaattatgtgggaagggtaagggtgagtaggacctgctgatttggattacttacctggatttataaccagatgcatccatctggtggcgcttaggaggaactttttagcaactctcagtggtgtcctaattttttcattcaaaagaatctgaaaacaagcctgggcaatataatgagaccccatctctactaaacttaaaaaaaaaatgagtggggcatggtggtgcatgcctgtagtcatagatactcaggaggctgaagcagaaggattgcttgaacccaggagttggaggc

SEQ ID NO: 52793 - DNA, 1736 bp, Homo sapiens
aaaaaaaaaatccctttcacatccatccttataggaagtatgccagaggaacaggtattggagctttttttagttttccccatttgtctatgcaaccaatcatacagatttattttcctttcttgggttcttggttttaaaaaggtgcttcattcatgaattctgaggatagctagggaaaatttaaaccattataaactggggaatttagcttttagacatctccaacaggctgtgcagaagtgggtagcatcctctggtggacagttttggaaccggtatggtctctgatgggtgcactggaaccagttggggagatacagatccagggtgaatcctctccaaaatctctcctcagcatttttctgtggctctctgatggtcagcaagtaaacggctgctttgtatccctgatgacctagcaggtccagtattaaacccactatgagtggtttgtgtgagccatgtgagttttctgcttgccccaaataagaatgccagaggaatgggagaattgtaaaatgagtttctccacaaaagtgactgagtgggctgaacagtaaagggcagtggatgtggaaaacaaaaaaagggagtgaatacaggcagaatccacccatcctctgactccctgccattcttcaagtggacagattttaggagaggtaaggaagaaacagatattaattgccttaagtaattaattaattttatttttaaattttttgtagaggcagggttttgccatgttgcccaggctggtctcgaactcccggacaggctcaagccatccacccgccttggccctcccaaagtgctgggattacaagcatgtgccaccacacctggctcagatattaactctcaacaacaacaaaaatatagacatacaccaagaaggcagaagagaaactatagtcatacaagcctgacaaaattagagatggagttggcaatgaaattggtggcattccaatgccatgaaccgtgactcacactagtgggttgcgacactggtagtccacttgcagtgagaaggacagatttgtaaatgtcatcaaaggaagttcaaaggcaatgctggttttgaattagctttttaaactgtaatattattttttaaatgtatatgcattaagtacatatgcattgaagcatttctttctccactttgaaaggaaggtgtattcatctgttctcatgctgctataaggacatacccgagactgggtaatttataaaggaaagaggtttaattgactcacagttccacatggctggggaggccacaggaaacttacaatcatggctgaaggggaagggaacacatccctcttcacatggcgacaggagaaagaagtgccgaacaaaggggaaaaagcccattgtaaaaccatcagatcttgtgagaactcactcactatcattagaacagcatggggctaacagcccccatgattcaattacctcccaccaggtccctcccactgggtctctcccatgacacgtggggattatgggaactacaattcaagatgagatttggctggggacacagccaaaccgtatcagaaggattttaattttgagacttcctgtgatgtgcgtgaattccctacaatttgcaaatgtgcctattcatcaagacttctattttggaataagtatgggtactctgtctttgacaagttatcatcaaaggaaacaatgaaaattaagtttatggaagtcacaag

SEQ ID NO: 52794 - DNA, 1425 bp, Homo sapiens
ataaaatacacataacatagaatatactgttttaaccattttaaaatatacattttaaaggatatccagtacctgtcaagcatgcatttactacttcttttgctctgaggggagagtatggttgccctaggagcatgctgcctgctttcgtggggaagaaactggcctctgttgagagctaacagctgccaccaacctggtgacaaagtaactgactcaagctgcattagtgtcctagggctgttgtaacaaacaaagtaccacacactagatggcttaaagcagctagaaatttattttctcacagttctgggggtgggaagtctaaaatcaaggtattagcagggttggatccttctggggcctctgagggaggaggggttccacgcctctccccaggctcctggtggttgccagcaatccttggcattctccggtttgtggtagcataaccccagcctctgcctctgtcttctgtggtcatcttctcttgtgcctctgttttctcttcttttgatgacatgaggccgggcggtggctcacgcctgtaaacccagcactttgggaggccgaggcaggcgaatcacctgaggtcaggagtttgagaccagcctggccaacatggtaaaaccccgtctccactgaaaatacaaacattagctggtgtggtggtgcatgcctgtaatcccaattagtcaggagcctgaggcagaatgatcacttgaacccaggaggcagaggttgcactgagcagagattgcaccactgcactccggcctgggcaacacagcaagacttgtctaaaaaaaaaaaaaaaaaagacaccgtcattggattagggtccaccctaagccagagtgacttcactaatttacatttacaaagaccctatttccaaataaggtcatattcacaggcaccaggatttaggacttgaacatatatttttggggggacataattcaacccacaacaagagccatccccaatgtggcagcaaataaactggtgctgaacagggaaacctgcacatcgatctgtttgctttgagaagaaaatatccctttctttttccacgtttgtagtgtccttcaagtaccctctactggcagagtttaacatccagccagctggcaaaggggaatggactttgcatcgttccctggggcaaggaaggatgggttcaaagctcagaggcaataaattaataactgccatatcaggggaccaaagttctctctgctttgaagtgagcttcagctagcctcattcgatcttcttcattttattttattgtggtcacaacacttaacatgagatctaccctccgaacacatttattttttttcttttctatggctgaaatagaactcgttgttgttgtttgagacagtgttttgctctgtcgcggaggctggagttccc

SEQ ID NO: 52795 - DNA, 2577 bp, Homo sapiens
tgaagttgagcttcttgtttactttgctcaccactgtatccccagtgcctaagtaacagtgcccggctcagagtagagactcaataaacatttaccagatgaatgatagaaacagattttttgaggcaaagtttttcatgttgccatatagtcccatgcaatattttggacatacttatactaaaaaattattatctgaaattcaaatgtaggccgggcacggtggctcacgcctgtaatcctagcattttggaaggatcgcttgatccttccagcaggttgtcccgggaacgcgcagcccaaggtggacgcacagacccgcgtacagagattttttattgtcatgactgggggtggtggcactactggcatttagtgtggagaggccagatatgctgctaaacatcttacaatgcaaagggcagcccctcaaaggcaaagaattatctggtctaaaatgtcaatagcgtggaggctgagaaaaactgaactagatggctatgaactttcagggtccctacctagtacacaggcagcgcctagaattgctaagttcatcttccgtttggaaaggcagcatggggttagtgagaggaaggcgcccggggctggtggctggctttaaaggcctacgtgcaaatcttcttgacgctgataacgggatgcgagagagccaggtaggttacctattgcagcaggtcaagtgatgatgtcgaaaaggatgcgtgtgccggacactgtggaaggtaaagcgctccgcacagcccgcctaagtgcgcccgggacagagccatcccccaggtgctaccaaacaaatcctccagctgctggtacggggaaggtgttcagtgacacaccggaagcagcctagtggctgaggcgtccttctccctaccaacgggttgcgaaggaagtagttgctgtagccgcgccctgtgcgcctgcgcggaggcgtcggctgctgacgtgtagctggggccagacgggactagccgggcgcgcggctgagtgctgcagaatcgctggggtggcagagccgccagcgaggctggggatgggggcgccgctgctctctcccggctggggagccggggctgccggccggcgctggtggatgctgctggcgcccctgctgccggcgctgctgctggtgcggcccgcgggggccctggtggaggggctctactgcggcacgcgggactgctacgaggtgctgggcgtgagccgctcggcgggcaaggcggagatcgcgcgggcctaccgccagctggcccggcgctaccaccctgaccgctaccggccccagcccggagacgagggccccgggcggacgccgcagagcgccgaggaggctttcctgctggtggcaaccgcctacgagacactcaaggtgaggcctgcgggcgtggaggggcttcgaagactggccgcgggaagcccacggcgccttccgaccccggtccgcggagcgtgggcctctgtgaccccgaaactgagcacagccaccaccgcgacctttaagatactcacgtttcccacgtggccctgtgaaagagccgagtcggccccacggggccttggggggcacagctagcctccttgccctcttcctttttgtgacattgttatgcaaaactttggccatcttacgatttcgtgaaaatattttaataacgtgcatttcacattcgaaaagcagggtgatcattattagtaggatctggggtagcccacaacagggaaagtctcgaatatcaagtgacaactgtgatcgcatcagtttgatatgacagaaaattggtttctggaaatagtgttaatggtgacgcttagtttgggtttaaggaactaagaaaacactgagaagaacaatgaacaccagtcaaaaggctggatgtgagtctttgctgtgacacccctgtatgaccttggatagtgacttattatgttgaaatagctgtttcttcatatgcaaaattaaggccatgatacctcctctcagagttattatggggattaaatgataagtgtgcgaaccgcccccctttccataggatccataaataggtgcttaatgacttgggtacaaaactctgagaatttctagtaggaaatattttgtgaatatgtatttgtatttcatttgacaggttttattgagtcttgtggggatgagagatttagcccgatgctgttttcttctactactgcaaaaaatcaaaccatctaggacatcacgaagtataaatcgtacttgatggtggtattactgcttgaagggccccatcatactaatgcgtcagcgattgtagttgtaaagtatttcttttctagcctttttttttttttcccgaggcaaaattttctatgttgccaggtagcctgcttttaatgattgtactttgagtggatataattttaccttggattgttcctccagattgtttttccagagctgaaaatagtcaaggagctaacaactttattgatgccttccagagcagtttggataatttggagtcataaaatgagtggtggaggggcgggccctgaactaggtaaactaggtgaattgaa

SEQ ID NO: 52796 - DNA, 921 bp, Homo sapiens
aaagtgatggaaaaaagactccagaaaaaataggaaagaactctccatccaaggcacttcagcatatgaagctccaacctctgttccttgtagtcagccagaagccctgctggtgcgtgagggagccctggaccagtgtgtgaaatcataatgggatttactagggatagtaaaattgataggattagggatgttaatcatgttaatttgtttcaggcgcgagatggtaataaggttgtggtgcttgaatttaggttgagtgtcaggaatgcagtagttgttaggatgatatagataattaggttaaagatagtgatatttggattgtatatcagttatcccattatgatttcacacactgctttataaactaagaccatgcaatagtatttagtgtgtttgacttttggggatttagggagtttatggactttggaagttaaacaagtggacgcttaccctctgtgtcaacccatcttctggaagatggagaacttccagaagagagggcagcagaaacactgccagctgttgccttctgctgggctttgtaggagtggagatgagtagttttggcatgagaatggtgagcatgttggtaagaactttgaaaacaagtgccatgattagagggtagaaatagtgatggtagagattcctgctgggagggccaccaggagagactgatcagtgcccccatcccggaactgatctgatgaatctatatggttgcctctaaaggtttctacccctaaagtttaccactcattgtcagctaatgaaaagctagataaaataagtgatccactcaagatcaaggaacgtttaggcagttaaagaccagtatgtctggagtaggtaacacttgtactcttgactctgacgggtttgtgatagctacaaatatcttggaacagggga

SEQ ID NO: 52797 - DNA, 735 bp, Homo sapiens
taggtggtggtggttaaaaaataagtacactaacatgacttaaatacagttggtaagacaagaagatatgacatttgatcatcactattttagcaaaaagattttacctgtgcatggagaaatggaggaaaaccaaaaaaaaagaagtgtgggtaataatggaaggcaaaggcactggcctcatgctttcaccaagtcatgcttagttcagattcccaaataaattacagttccagatctcagcaaaacttcaaaccattatgatttcacacactgctttataaactaagaccatgcagttgtatttagtgtgtttgacttttggggatttagggagtttatggactttggaagttaaacaagtggacacttaccctctgtgtcaacattggatctcatgaggtagaataatctggtcccacttacatgtttttaaagtggctatagcacttatcacactgcatttaagtactgagtaggtctctctttcctactaaaccatgctcctcattttttgtgcgtatatccatagcacctagcacagtgtctggcacatcagagcattaatgttataaaaactcttatctggaggcattcagatagaatggaaatggaaagtggatttctggcattttgacattggtatgtgcaacgccctctgccatttcactcaaattaattgcagttttaaagagtggtatagataagtaaattggacggttatgagtgaaaaat

SEQ ID NO: 52798 - DNA, 441 bp, Homo sapiens
aggagttggtatcggtaaggaagatctatatgttacctcatttgtgacctgggctggacaacatattatagtgatgaagtactacatgtttgtaacatgtttttgtataatgtttgttatttgatattcacaacaacagggattgttagctctttttgtgaatgaagaaggaggaggctcagagaggctaaatattttatctaaggtcataaagctagactttgaccgttgggctgcatgggtgtctcagtgtttctttgggatgggcataattcagttttgtaggcacagactggcttcacctagtttttgcttttagcagaaaactatctatacaaggctgggacgtgattgtgaatatatacaagaaataagcattaaaaaaaaatcaacagttaagagtagttgtgaacaggcttttattagcaccaagcatcagct

SEQ ID NO: 52799 - DNA, 1433 bp, Homo sapiens
cctatgaactctccttggttccccggtgatactgtctggcaaggccccttatctctccaactcatgtcacaccttggctccagttctcatttctcaggggtgcgtgtttgctgccgcccactccatcctcgcgtcccacgccctcgcgattcctgctcatcctaggggcgccagcttcgctggaggacgccgcgctctgcgggtccccgcctcggttccaggcccagctgcaggtgccacccaggtttcaggcgctgaggagcggagagcactgccagctcgctggggtccccgctgtctctggcaagcggctccgcgccgggtgggctggggcggcggggcgggcgcagctgcttccccgccccggggcggcacccgcgctcggggctggcggctcctccccgcccggccgggcccagcagcccctaggagcccagcgccgccgccatgtcctccggggctagcgcgagcgccctgcagcgcttggtagagcagctcaagttggaggctggcgtggagaggatcaaggtgcgggccccgggtacccacgctccggtccttccgcccgcggggcgtgagaagaggaggccggcggcccggaccgggcgccagcgggggactcggtggcggcggcgaggcctcggcggggcgcgggggcggtggggtccgcggtgagggagggcgcggggcaagccgggggcccgggcctgacgggaggaagccgcgcctggggggccccgcggtcgtggtcggtcccggtccctgggggtgcgcccactccagaaggcggccgtggtcagttcctcggagggcgcaagggatgccggcgacgcgcgggccgggagggtggacccagggctggggaggccaccgcagggcggcgaattggtgatggattggtaggatgagagcgagagggaggagagccaggatgctcgggtttctgtcgtcgtgacagggtggacggcgctgccacccgccgaggtagagaggagggggaacaggtttggggaaatgatgagttcggctgcggacctggggactccggggagtcatccgggaggtatttgtcctcatggcctgaagctcagcgcccagggctgaaagaggtcattcaagtgcattggggcgaaaaagcctcttctatgaagagcagagctcagagcctgggacccggggaccagccacaccgatggccggtggccgagagaagaggaaataagagacagcaaggtttccgagcaaggcctagagaagaggaaataagagacagcaaggtttccgagcaaggaagtagggatttccaaaaactgggggctcagtcaacatgtccagcgtttagtcagttggctaaaaggcgtctgttgtagagctgtgtttagctacgagtgcagcattatttgcagaagatctgtaagaaggaacacaaccag

SEQ ID NO: 52800 - DNA, 870 bp, Homo sapiens
caatttaatttccccacaaaatttaatcctgtctcaattacccttttgttgcctctcatctccaaagtcatacttcattggttttgtgaaaatggatctggatcctttaaatatcttttctttgccaactggcataatgctgatttgttcatagaaggtgttggagagatattccaggaggaaggaatgggtatgtcttcctgggtctaacgtggttttctccaatgctaggcaaagcgcagctttttttagctcttcatgaaggcagtagtgctatagctgggagcctcagacaatgtggctctgagtcttagcccattctgctgctcctcataccctatcctcagcgcctcatgcgtacttgctggggccctgcagtgatggccatttagcaagccagccaactgacctttgctctgcaccaaagcccagagctttccaagcccaagctatacacagaagtgtgttaggtttcgacagagggcagtctgtttatctcctggtttcagcaatgcccacagtggtgccacaactctctccatgtcccccacctccatcaactctggctctcctgtgtgcaaaaggttttttccccacagccctcctgtcatgaacatcgtgtgctccaggccttatcgggcctaccagccttggcttgccaatgccccaaagggttgttcttgttttcccagcaattatggaccaattctggcttcaaataaaataaaatttctttcttgtccagtgggctacaaccacaccttcttcaaagaggtcttcaaataggtgaccaggtttgtctttcttttgggctctccctcaactttagggtacccttagagttctcattcacagcttaaaaatttttta

SEQ ID NO: 52801 - DNA, 629 bp, Homo sapiens
gcacgcacctgtaatcctagctacttgggaggctgaggcaagagaatcacttgaactctggggggcagaggttacagtgagcgagatcatgccactgcactccagcctgggtgacagagtgagactctgtctcaaaaaaaaaaaaagaaaaaaaagaaaagaaaaaaagctaaattttttttagcactcattatgtgccaagcactattctaaacactttgcaacaactcataagctagataaatttacaaatattacaaactccagtttacataagagaaacctggggcattgaccacttaagtctcttatccaagatgagcttgaaagtatgagacagagttgcaaatccaagtagcatgacttcagagcccaaactctgaatgagatcatacactctctaaaaggaatatttgctcttgagtcatccatgttttgtaaatgttttgtgtttattttggtgaatttctaaagatagttttctttctatatttacagataattttatcatatccaaatcatgtttttttcttagtagataatgtttctgcatcattatttctaaaattgtgcatatgatgagaatcttagaacaactgcttttccctataagttttaattcaccatta

SEQ ID NO: 52802 - DNA, 3103 bp, Homo sapiens
gttaccttactacccaaagtgacatttcttcccattttagagctgtgctgtccacacgtacaattaaaattttctagtagctagccaaagtatttaaaaagagaaattaacttaataatttacctaatttaatgtagtatgtccaaaatattaccttttcaacatgcaatcaatataaaatttactaacgagatggtcttccacatctggtgtactgtttactccacagagtggcaagctgcctttccaaccctcacttagccacatgcggctaccgtattggatggcagtcttagggaatttcaatatcaactgattctttaattctgaatttgagaatttctttttataatacacacggtcgctaaggcgcttagagatctgtgaggcgcatggagattattttactctccggtcccttttgatccaagatcccacagcattaaaagcagtaagagggaaggcaatgggcatcccttgcgcccaggaacgtggcctggagggcctggctgctccgagcagtagcagtgcccggcggggaggctgcagacgcggcgttggaagttggatttctagacaagctccggcagctgcccggaacccgtgtctttttctggggcacccaggaacagcagggccagacggagagagagcagcctccagccaggcacagggtcccgagctgccaccgacaccgagggagcccggcccagggctgcagcgctttccgcctaggtgggcggcagcgggagcgaggagccggaggaagcccggcctgcgtcctgcgggcagcaggacacgatctccccggcgcgctctcgccggcgccgcagcgggcgcgcgggcgacagggtgggcgtggaccgatgggggcaccgcccctgggagaggcgggcgccgcggttccgggggcgggacgcgccgaggagtggggcgcgagccgccggttttgattagtgcgcggagctgcggcggtggagctgctcggccgggagcccggcggcgagacggagaggcggcggaggtgcccgcgcgcagggtctggtgggcggccgcgaggctcgggagaggcgaaccggagcgcgggaccgcggtcgccccgaccagagccgggagaccgcagcacccgcagccgcccgcgagcgcgccgaagacagcgcgcaggcgagagcgcgcgggcgggggcgcgcaggccctgcccgccccttccgtccccacccccctccgccctttcctctccccaccttcctctcgcctcccgcgcccccgcaccgggcgcccaccctgtcctcctcctgcgggagcgttgtccgtgttggcggccgcagcgggccgggccggtccggcgggccgggggatggcgctgctggacctggccttggagggaatggccgtcttcgggttcgtcctcttcttggtgctgtggctgatgcatttcatggctatcatctacacgtgagtgagggaccgcaggaggggctcggggcaggggtccgggcctcggagacaggcgagaatgggaaacgtttgcgctttgaaggggactgggctcgggcgggggtggagaaagctgatcgtcaggctgttccccccgttccctcgcccctcggaccggcggtggcggtggtctttgcgagggaaaagtgttgggcgtgggaagggtttgctgggttgcaggcgactgcccagccaggctaaaggagactgctcttacgtgtcaggctgaaggtggtggcttggtttgattgtgctggggattcgtgtaatttttcatctgggccgagatgtatggtgtattgtttttttctcccgacctgggccacgtttctgttagggtggtgattgtgtccacttttctgggagctgctcacagctatctggacacctctctgtggattttcttcttcctggaagggctctatgcgcttagataggtgtgaagcacctgtccaccctgaaaaatgtccaccaaacctccgagctggcatgatagctttgagtcctgtcagcttgtacatctcagcgtggttttctttccttttttcagttcctcgttttattgttttatgtagatttgtactctccccgtgccggccacatcttttcatttttgtttaacaaatacttcttgaggcctactagataccattcactgttattggccaggggacatggtggtgagcaggacagaattcctgtcctcatgagtcttacattctagaaggaaggagcagataaaatctaaataaggttatgagattgtgacgaagcgtgtaagtaaaatagaactgggtgatggcgtgaatagagacatgggttatgtggctagtttggtatatccactgtttaaggtgaaatctgcctctgtaaagaaatgaaaaaattatatagagcacattactgatatcgattcacttggatttttagtctggggggagaaaagagcaattgtatatagtaatcgttaccatgaactagaatagagtgtatgttagtggaagagactttaagaaattagttacttttagttttttggttttttttttttcctttttactgcggaaaaagtgtgcctttgcttttggaaacactgtattttattagtatagtgtggcatttcctggtactgagaaagatgatgctggtacaggttatactgatatttctttgaaagtgaaagaaaacatgccacttggatattgttgactttagtttttggagttggtgagcttagtcacagcacattctggagttcatttaaaatatgtgagttctttttctttaaaaaaattgttactttttaccgtcataaaaataaaaaatgcttactgtgtaaggaatttatgcaatagagagagatggagaaaattaaaatatgcacacaccaaaactacattaccttgttaaccttttgtgactatccttccaatctgtgtgtgtgtgtgagagagagagaaggagggaggggaagagggaagagagaaaaggactatattatgattattgttctgtaacctgctttaaagttcatctgtttaataaatgtttattgaaaagccgttttgtgcaaggcactgttctagttgctggaagagtgaagaac

SEQ ID NO: 52803 - DNA, 1302 bp, Homo sapiens
tttagaatgatctcaagagctcttgttttcacttagagtagtagctctttttccatttagttatatcatttaagtgggttgaggagaaagctattttgacattcattgtaagatgaagaatagcatctgcagattattttattctttgttagtacagaattttattttctaattataaacttatatttagctgtataaatagaaagtttggaaagcagaggagaagtgcaaagtacctgcaatctaagggaaatatttgatttcacagcattttatttacttggtgaaaaccaaatacaatggcaaatgttccacaggagactaaagttaaaccactgaaatcacgcatatctgagcatgaacagacaaggcatttgtgtcaccaagaagtcaaggagacccaaaataaacatttacgtgactgccaggcgcagtgccctttcatatttgcattttgcctggtgtgaacatcgttttaccagagtatggaaatgttttcattttggacataactttctcttctaatattcgattgggactatcataggccatttgggggaaaataataaaacatatcttcaagttttaaaattttacttaattttggacatgtgcaagaaaatttactgctactggtacttgctctgaatttctaggtttcaattttggtgagactagactagttgctctgaaagatctctgcgctgtattcatcttacaagtctacttttatactgatactcattccttgggaagacataaaagaatgaaaaggtgatgcagttcattttccacagcattgaacactcatttgtcaccagcgtagaagggatttggggagagattaagcagtagcagtaatagtcaataatctgcgtctaaagtggcttgctggctttacttcagtaaattctggccatgtgaagaatacctaaatcaactatcagagttcttaacagtgaacctgtcataactatgatttttttttcttttttgcaattatagaattgattttttttttccttttgaggcagagtcttgctctgtcacctgtgctggagtacaatgccacaatctcggctcactgccacttccgcctcccgggttcaagcaattctcccgtgtcagcctcccgagaagttgggattacaggcgcatgccactaccgctggctaatttttatatttttagtagagagaggatttcatcatgttggccaggctggtcttgaactcctgacctcagttgattcccctgcctccgcctcttaaagtgctgggattgcaggtgtgagccaccgtg

SEQ ID NO: 52804 - DNA, 3718 bp, Homo sapiens
agtgattctcccacctcagccttctaagtaactgggattacaggctcctgccatcatgccaggctaatttttgtatttttagtagaaacggggtttcaccatgttggccaggctggtctccaactccttacctcaggtgatccgcccgcctcagcctcccaaagtgctgggattacagacgtaagccactgctcccggcctcactgtgggttttttttaactagtgtgtagtacagccctttttcagtcactttcagcatttcattatgatgtctttacaaagttttgaggttggtgaattccaagacaatgttagaatcttctagaaaaataaagataagtaccgccttttaccaatttcttaccattgtttgtgccacacattacaacagctcttcatttaaggtgggggaggatacgatattgagttgaaacatcatggcagtttctgttttatgttggacaagccttctgtgcattgtcttgtctgtagtgccaatttttatggttcgatggtgtatttacagacatgacaataatggtggtggtgggatggaacagaataatgttgggttctggagtgcctggatagcagggaaataattcagacagaaaaatagcaaggccaaaaataaattgtgcacttgagaggctgaaagagaatgagatatgaatccctgactgtaattgtagttgtgttcactgtgaggacaggtgtttgccctctgataataagtagactttaatcctaggtgtgagtgctagccactgtcaacaggggtggctccagataaatccaaagtaattgcccaagacacaacatcagcccacaaccaaattctcacactggagagttacatgactggtggatacagctcattaggtaatagtcaaggcactggttcttcccagtcaacaaacatcctctaaatgcttcaggagccagcaaggcaagctgttccagccatggagaggtgtggctctggtgtgcggtgacacactgtgaacacccaagctatgcagtgctgattagttgggtaatggatgaatgagtcaaagatcacgcttcccagtttgtcagctgcttggtagctcccagggactggctccagtctgtcactggctccatgcaagcaagcaatcctggggctgattgtgagccacagagtcactgtcaagaccggagtttcagtgtagtaggtggagaggaaggataaagaaccatctgactcgcaaccttcagtctagagaggaggattcggtcagaggctacgttttcctgagcatcttccttttcttcagggcattgtgaatatgtgatgacagcccaaggcaagaagcaaagcaagagtctgatcccatgcactaggtatcccaaggctagagggggaggtcttcagcctgagtcatcagctcaggcaatgtatgaagtcttgcctataagacatgaccaccactgttgagacttgtcacattgccaatcaaaagttctgggatggggggttggcaggtggcgagctttccttccaatccccagtgttccaggaagaacaaaggaatcatatactctcagctttaaatcctggctaaatttctcaataattgaatgactacagacaaagaattaatatgtgagtctcaatttcttatctgtaaatataatatccacattgtagggctgttctgaatattacattaaattagatacataaagctcccaacacagtagctagtacaagtagaagctccataaatgacaatttctatctctgggactagtgaatctcagagttagaaaaatgtaaaaagtcatccaagaaaaccttccttcaattagccgggcatggtggcacgtgtctgtagtcccagctactcaggaggctgaggcaagagaatggcttgaacctgggagacagaggttgcagtgagccaagattgcgtcactgcactccagcctgtgcgacagagtgagactctgtctcaaaaaaaacaaacaaacaagcaaacaaaaaaaacaaacaaaaaaaaaaaaatacaaaccccaaaccaaaccaaacaaaaaaccctccttcagaatttctgttgtcagaatttcctatgccacctctaagacatgggccattcagcctctgttttgaatccatcgaaggcaagagggatcttcttcagcagttctgagggtcttgccgaaattgagctgaaacataattctcaggggcttctactatttgaaatagtgataccttgccatatgcaggacaagtgctttcagttgtacagactgcacattgctcagctgtgggcgtctgctgcttttcacgtagactactgtgtaaacagtgtccctggagttgggcagtgtgatggccctatcaatgtgataatcattcaaatatttggggtcaacctcacactcatttgagtcttctccaatgaaaacactcataattcctctgtcaagcctcatctggcaagttttggttttccatcactctagtgactcttctttgaatgctcaactgtgtgacacctggatctgggcacaatgcattaatcatcttctggccagtttggaatagtgagattcacttttcacacctcatgctgctatgttctcctacctccaccccaccctgcattttataatttgctttgttactttagttctcatttaatccaagaacaggactttacattggcaaagattactcaagactcacaggaccaagggcagagttttttttttttttttccagtcttagaaaattccctccaacttgacattgattcttttttctttatttcttttcttttctttttgtttgtttgtttttaaaattttcattgcgctagcatgcagctaagatgtctctatcttgaccccaattttattacgggagactctgtttagttttttggtcaagttatttatttcttcagccaacattcattgagcacctgctgtgtcttggcactgtaccagatacttgccgtagatgccgtgttgtggcggtaagtgttttaacagctgactacccagaagaaaaaaaaaccctagtttgtttgtaatgtttgctgatttccatggcataactacttcctaccatggcagatttcaaactaccaaggtgatgtcattgaacacagagttggaaagagatgtatatgcataaacagctcttgtgagccagcatgaggcgaccccagcacaccactgataatttacagatgagccacataattctgccttaggaaagctccatgaggttcttataatctggtgatgcacagagtccatctctcctctaaatctaccatggagaaaccatgtcaaaggaggaaataacatttgtctgacatgatttgttctcagagcacctgtactgtttcataattgcaaaggattcttttacgtgcttgggaaccattcctttcatatttcatttgaaattattttcaggccgggcacggtggctcatgcctgtcataccatcactttgggaggctgaggtggctggatcacctgatgtcaggagttcgaggccagcctggccaacatggcaaaaccccttctgtactaaatatacaaaaattagccaggcgtggtggtggacgcctgtaatcccagctacttgggtggctgaggcaggagaatcgcttgaacctgggagacagaggttgcagtgagccaagatcatgccactgcaccccagcctgg

SEQ ID NO: 52805 - DNA, 3277 bp, Homo sapiens
tgactaacatggtgaaaccccatctctaccaaaattacaaaattagcagggcgtggtggcacatgcctgcaatcccagctacttgggtaactgaggcaggagaattgcttgaacttgggaggtggaggttgcagtgagccgagattgtgccattgcactccaacttgggcagcaagagtgaaactccctctcaaaaataaataaataaataaaaatacattagtgttgttttcagaggaaaaaaacccaccttattacagcaaaagtgcatttttgtttcctaatccccataaagaaattaacccctcagtacctcaagccatagtttctttctcttatgattcttatgcatttaacttccttttttgatcagtattgcttctctacctttcctctcacaaccaccataaagctgtcggcaaagcaaagcgaggagtttgccacaggctctggttttatgtgtatgaaaatttcagtggagtgtggactgtttatgtacttccatatcattctttacttccctccagctaggagtgtagtggcgtgatctcggctcaccacaacctctgccttgcaggttcaatctattctcctgccccagcctcccgagtagctgggattagaggcatgcaccatcatgcccggctactttttgtatttttagcagagacggagtttcactatgttggcgaggctggtctcgaactcctgacctcatgatccgcccacctcggcctcccaaagtgctgggattacaggcatgagccaccgcgcctggccaagactgcatttcttgtccaccaggacagtacttgtgttgttcttccttttagccttactatatgccctctgtatctctggcctaaggtgattgatttccatccaccataaatattcccttgaagggttctgttctcttccatctctgtgttccattcttaagtttcatgcctcagagtctcagcaactgaggtcactcagtttcttactcatgctctgaacttaggtacacactctttgttactcattaatatgttctaggtgccatggggaaatccaagatgcttcatgtgacaggaatcctgccttgtggttcacagtccagttgagagatgattatttaaccactaggagaaaaagaagtagtgcctgctcaaagaaagggattgataaaatgcaatgggtggtcagagggggacagagggcacttctaatttaaagacagacctcaaggaggagggacttctaagccagacccggagaagtataaacaacttaaaggtggccgggcgtggtggctcacgctgtaatcccagcactttgggaggtggaggggggcggatcacttgaggtcaggagtttgagaccatcctggccaacaatggtgaaaccccgtctctactaaaaatacaaaaattagctgggtgtggtggcacgtgcctgtaatcccagctactcaggaggctgaggcaggagaatagcttgaaccagggagtcaaaggttgaggtgagccgagatcgcgccactgcactccagcctggtgacagaacaagactctgtctcaaaaaaaaaaaaaagaaagaaagaaaattagccagcatggttgtgcgcacctgtaatcccagctactcagttggttgagccaggagaattgcttgaacccgggaggcagaggttgtagtgaaccgagatcgcaccaccgcactcccgcctgggtgacagagcgagactcgtctcaaaacaacaaacaaaaaacttaaagatatgaagaaaggggtgggtgtcattgcaggcagaggagactgtcatgtgtatgaaacgtgcagaggtgtgataaggctggtgtgtccatggagaagaatgaagttcagcttgaacaggcacaggctggtgtgcaggggtggtggtggcgggaacaccttgatcttggactgccagactgggcgacatagtgagaccccatctctaccaaaacattttttaaactgccagcagcagctggatgtggtagctcaagcctgaaatcccagcactttgggaggccggggtgggtggatcacttggggtcaggagttcaagaccagcctggccaacatgatgaaaccccatctctactaaaaatacaaaaaatagctgggtgtggtggctcatgcctgtagccccagctactgggaggctgaggcaggagaatcacttggacccaggaggcagaggttgcagtgagccaggatcgtgccactgcactccagcctgggcaactggcaatactccatctcaaacaaacaaacaaaaaaactgccagcagcttgatcttggcatcacttatcaccactgatgggcaacacagagctgagaaaatggcagtggagctgagaaaatggcagtggagccaagaataaaggcaagagtaaggctcagaaggaaggggaggtagggagctccccaaggtcttgcaacacagcctggctatgagtgagtccccctccctcccccagcagatcctgcagagaagacatcatctctttcctggtgacagtgcctatcttccaggacacagctgcctcttcaaagctaaggcaaatcttgtgctggaaccaaagccccatctgttggactcctctacccagaccatttgccaaaatgatggaatagggccaggcctgccaagaggtcctcagagggtatctaggtgaagcccctctctctaccaaagagggaagttaggcctatggatagggagggatttgcccaaggtcatttatctagcaagtagctgcagtaaaacttgatgccagcccttcttacacaagatgtaggttaagagagcattagccttaagccagactacacgggtccaaatcctggctgcttctgtgtcggctgagaggtttgaccaacttcgttaaactctttcagattcagctgcccttttactttttaatctttattttattttgtttgtttgtttgtttgttttttgagacagggtcttgctctgtcacccaggctggaatgcaatggcacgaccatggctgactgcagccttgaccccctgggctcaagtaatcctcctacctcagcctccagagtagctaggactacaggcacatgccaccatgcccgactaatttttaaaaaattttggtagagatggggtctcactatgttgcccagtctggtcttgaactcctgggctcaagtgatcctccagcctcaacctcccaaagcactgtttcccaattaaatgaaataataaatgaaaatcacttaacataa

SEQ ID NO: 52806 - DNA, 2466 bp, Homo sapiens
cagctctctgtcacaaccactcaactctaccattgttgcttaaaagcagccgtagacagtaggaaaatgaatgaacttgactgtatcccaggaagactttatttatggacactgaaatttgaatttcatataattgcatgggtcataaaatatgattttttttcccaaacactttaaaatgtcaccattctaagctcataggttatacaaaaacagacgacggcccagatttgacctatgggccaaccccttatctacgaggtttccaccaagttgcctgctggccaagcttatagagtgaagttggacatccctgttgttcccctggaaatctttgccagagctgagagcctccatacccagagtcagaaagacctttctaggctcaacatgcagtcatggctcccggacaccctgtcatcttcctgagattctatggagggtgggccacagagccccattattttaaaaactgtgcatatcctttccttcccttggggaataatcttaaggactgtgtctctcaaaaacactctaccacttcttctcctagcgcagcatgctcaaatccctcagagtgaaggaggaaaaagtcaggacggaaagtgatgtgcaggcttcttctttgggccctgaaagctcaaagtcctggctacctgccctgaaggctgagtaatgtacaaagaaaacaaagacaaataactcagtaaattatccggcctaggatcagagctttctagccccagagcaagctcaggcctcaacattctaagcttaagaggtcaggctgtccctccatatttcaatgggtacaggtcttgagtttcctcagaaaacctctgaagggaggtcacagttatggggacaaagaaggaaagtgttggattcaggacaccaggctccactgaaggtgactcatggttttggcttgcaagcaacgttgctgatcactttgaccaaccacaggtccctgccagctgcactcctctccaggagcactcctatttttatatgtgtggtacaaagaactcctaccagctaatttccacttcccccacaaaagcctgttttacttctgctttgagtaaaaagctttcctctttctggtctcaaagcacacactcaacagtgcctgtaattcacagtcatctggtacccttggcttatctcaggcccctgtagtaacaactggctccaagcatgtctcctacagccacaagctccagtggggtagccaggttcactggaagagaatgttccctacacaagggaatctgagacagaaaaagtcatcctcagaaagtagggactggtggacatgtgagcctgggaaatgagaacaatttgtgctgggaagttgctcatgtaaagagttcacagagcaggtatctgctgcccaggcttaaactctcaagtggaaaatggaaaccatcattccagattggcttcttaccctgtatctgtgcattcatcaacctttgacaataaggtcatttcttagccccacacatagcatataggaaagatttatccaagccctgctattatagatgaataaatgaaacacattcaggaggttgcccatacagtatttgcctcattttccccacagctctagagaaaggacattttataagttctgtcattccacagagctgtacaaagccgcctggcttaactgacttaatttctttttttttttttttttagagacaggatcttgctctgtcacccaggctggagtgcaatggtgcagtcataactcactccagcctgcagctcctgggctccagcaatccttccaccttggccttccaaagcactaggattacaggtatgagccaccatacccggccttcacttttttttttaacttgacaaaatggttcttaagttcaagatggttagcatacatctgctttcaagacagaaagagggggaaaaagaaggaacagccacagttgttcacggtatcagcgaagtaaaaactttcccagaaactcccctagtagacctcacttctgcttaattaactggaactgtactttctgtctgcccagagcaacaaaggagattgggaacttgagtgttcagcttcttcagcccctagtgaggaagaggagagggatttggatggtatagaaggagtcagtctgaattctgcttcaaatagctaaacaattttgaaaactaaaagcccaacagggaaaactagctctgctctctattaaaattataaaattatagaactatgggatatagtttcatacaatatcataaaactataagaataaaatcaaagttgaacacacaggatttggcagagattaataggagagacaaattagcccagaaacagatcctaatactcaatataagggtttttctgtttgttttgttttgtttgtttgtttgttttttgagacagagcttcactctgttgcccagactggagtgcagtggcgt

SEQ ID NO: 52807 - DNA, 2588 bp, Homo sapiens
aaaaagaaaaaaaaaaaaaaaaaagaaactgggacatgtgcatttttaccaggtctggtgtgaagaaatatcagggacaggcaacgaagatgccttcagatgacagagcgtattctctgtgagccagtttacttagaatgtcctttcaggaaaatgccattgataccttgaattggggtattttccagtctgctaaaggatacccagggggtttctaacatggccaagaattagtaaagcacaagagtgcagagtggggttctttagtagttgtgcagaaaaaaatgaaaataaaaatttaaatatcacgagacatgaaagagaagctacttccagtatgcagtcgagtgtgaaaattcaattacaagaagcaagaaagtaagccggtggctcacgcctgtaatcccagcactttgggaggtcgaggcagcaggatggtttgaggccaggagttcaagaccagcctgggcaacatagcaagtccctgtctctacaaaaaaaaaaaaaactttttaaagaaaaatacaaaaaagaaagaaagtagtcattcatttagtagtttcctaggaggcaaaattatttacttctcaactctgccagtagttataataatgtttaaaccggctgccaggaggcatttaaaaattaactatcctacaaattgttttgacatacaggcacctacgacacatattctcatccaccctaaaatcaaagtttgcaagactgggaatatgtttagcaggaaacaaagtgaatcatactgaaacttgaaaaatagcacactaatgtgtcacctttacattgagaagcaaagtgaatcatttgctaatgtttgatttttagtaccagaggtcaggtaatttttatctgaggtcagtctttttttgatctcttaactagaaaatagcaagttgagtttaccacccagaggatcttttaataatgaagcaaatttctgccttcacgtaatttttttgttgtttttttttgagacagagtttcactcttgttgcccaggctggagtacaatggcatgatctcggctcactgcaacctccgccacccaggttcaagcggttctcctgcctcagcctcccgagaagctgggattacagacgtgcatcaccatgcccagctactttttgtatttttagtagaggcagggtttctttcaccatgttggccaggctggtctaactcctgacctcgggtgatccacccgcctcggcctcccaaagtgctgagattacaggcaggaaccacggagcccagcctcatataattctgtatacacataaactttccaagctcaggttgtagggcacaaagccttaggttagaagccctgggttgggatcctagctctgctaggtactggtaggtgaccctggataatgacttaacctccctacacctcagttttatcaagtttaatataggattgatgatggtggtggtgatgataatgatgatgatgaagataattgtttccaaagtacttagctctattcctgccataggtaaacattcaatagatgataatcattcctctagccatattctctttataaattgcctaaaagactcaaagaaagggcaggcatgttggcttatgcctgtaaccccagcactttgggaggcaaggggatcacttgagcccaggaatttgagaccaacctgggcaacatggagaaaccccgtctctacaaaaaatgcaaaaattagctggatatggtggtgtgtgcctgtagtcccagctactcaggaggctgaagtgagaggattatctaagcctgggaggttgaggctgctgagagccatgatcacgcctctgcactctaccctgggtgacagaccaagaacctgtctcaaaaaaaagacccaaagaaatatccctgcttatgatcacttgttatgtaaagattgcatagaaatagattaaatgtttgggcattaatttaaaaacatgtggtttcatttggaaatgcactattctgaatcttaattcttgattttgatccctcagctgggcctgctctccttccaaagttggactcctctctctcagttactctcgtgccctttctctggtaaaaaattaaaaatacacagagtaaacagagtacaaattattggtttatttttaaactttacaggttccctcggagacataatcatttcccgtaagcatgtcagctcaagcttgcttttcctggctctctgctgccaccaccattcccacaatccaagctccttggaacctcacacttccccattttcagtgccatcgggggctgccctctgggacagtcattatttcagttccatttctcagtctttctgtctgcctcctactcctccatcaattcgtggtgctgacatttcaaatagttttgtacatgtccaaatacagggaggccccctcgttagtaaattttattttatgttttttgtttgtttgtttgtttgtttgagacggagtctcgctctgtcgcccaggctggagtacagtggcgtgatctccactcactgcaagctccacctcccgggttcatgccattctcctgcctcagccttccgagtag

SEQ ID NO: 52808 - DNA, 761 bp, Homo sapiens
aagaaactacttagaaggacaactataattccgttgaatatctagtatgttttggggaagtctcattagagttacggtttgtctagaagatgtttttttaaatgttgttttgaaagacttcataagcaaattgtccccttcctttacccacttccttgcaccgccccccaacagtcagccaatccaatgcactgtcaaattctttatttttattttgataacatctccttttcattagaaccttcctctctagtccctctatttcaatctttaatgttgttctttgtgctgtttcatgcctttgtttacattcttacacacacacaccccattcctggaatttccctcctagtcgtctctgcctgaaaaaaaaccctactaaccctttgaggccagctcagacttcacctgtgtggcccttgctggcctcttgtacttaatcactctgttgttatgcttgtcactctgaaccactgtgtagtataaaaactccatcactgaaggagctgggtaaggtgttgctggatgttgtgaaatgaaggttaaactgatttctcaatcacaggggaaattcagcatcaaaattaaagcaaatgatatcagtttatttctgtcagaggtccaatctgctaataaataatgctacattaacaacaggaaggactgaattttatgcttccagtctcactcctttgaaaccatactgggaggcttcctggatacactcaatatagagaatacacatctagttctcctttgag

SEQ ID NO: 52809 - DNA, 966 bp, Homo sapiens
ctcacttttttgtgttatggatgactaaaaaacaagttttctttctttataagcattagttttattaaagcagttgtaaatggttctataaccacccttgcaatggggctcctgagggacttccttgaaattagattggaaattcactgagatcagaggacattggagctttccagttggaaaacacttgaaagttcagtctggctgggcatcctctcttttggacccaatctccggttctcatttcacttggaaagtacctgcttaaaagtttactttcttgttgctcaatttagaccatttattttcctttcagctcaccagaaagcagcatgatgggtgaccaagctagcgatcatgcaaagcagaagtcatagagtaaaaatggtcaatgcgtttgaaaagtgtttatttgagtttcccaaaagtcaggttaacatgcaacagcaaactacaggtggtaccaaccatatctttttgggaaattagtgaggccccaggattgagggcaaactgaacaagttgggtgggaaatcaagggccagttggcaacctagttgcaggcagggactgaggacgatgacctggttagccttagaaagctaagcgtgtgatacaatcaatacagaccatcacaggtcaagtgtagagtaaacatggttagctctcccaggcacacaatcaactgcccagagctgttcaacaatatgtatctctccaataaaggcagactgcctcattccctccagaagtggcttttcatttattttatctcatgcggtgacaaactttagtcattctatgcctagctctcctaagattcacaagctctccaagctagatctcctaggtgggtttcagctctgcatctagctccacccccatctgagtagcatctctacagaagcctacaagggtctgaggcagggcagcagcagcctgcaggttgaaagagaggaagccaca

SEQ ID NO: 52810 - DNA, 1807 bp, Homo sapiens
ctcagggatagccaccatcttaaatccaggaatggggcccagctgggaatggagaaagttgcaggcccacatgctccctggacggaagtcacacggagcctctgtgcgggcacctgagaagctgccagaacacctgcccagcagcagtgcatcctccccactcagtgtccatctgccatctagacatggaggaggaaaagaaaagagacaaatatgaacacactttggttttcccactgtgcatctctatgcacagctcacacgcacacccatgggaggaggcgagggggagcagcatggaagctcagccacccctctgtgtgtggccagggcagccatcactggtcctgctcttttcctgggaaggcatcccccatgctacctggaggtacagggttagtcatgcctttcaccgctgagtgtgctctgctgagccaaggacaacctccacccacactccctttgactcccctcatccccagctgttcttcgtgactctgacccatcctcccctccattccagtcatttctcaaaaatgacaccctcacataccacaccgctgagaaggagaggaatgtgagaatgatcacaacagccagggaacccagtccaacacccgccatctgcagcagcatgagtgacgaatctgtgggacaaaaccacaggcttagcccagagtgcacggcatcaccacctcccaggaggcacacaccccactgtgctcaatccattttaacccagagcttggccccatttaacaaagaatcccaagaatgcccaacatgcctgtgtgtcccctgagttggccctgtggatatgcagcctcaggaaattacagttacaaggtatttctgaaaaggaagtgtaaagccagaccatgttaaagttacaagggagaaaacagctaatcttgttgagcacacaaatactatgcaacgtgttacattttttgttggtcctctcacaatcaattacatttgatagatttttatgggccgttttcttttgcatggagggacaagtcattatgatattatttgaatttggtttccaaaactgatagccctgatggtcagatagagcaaaggaatatcctttgttgagtcacctgtcattttctccatacctcaacaagggtcatacttccctgctcaggtcagcaggtttactgagaggataaaagtactttgaaagacatactttctatttggggaccatcacatgccaactccagggagatccccgattataaactaaaaaacactcacagttgagttgcacatgtgggccaagtgactgacttagagaatcatgttctagattagagcaaaaatttcattttaatttgcaaacacttacttagcacttactatgtgccagacactgttccaagcacctcacaaatattcactcatttaggcttctaaccagccttcacattgggtactattattattcccttaaggaaccaaggtgggagtggctaagtacaactcaggtctttacagccaggttaagaggagtgcatttctattggaaactcagtacagtacctggcactagtaaaaccagccatagaatacaccttgtgttaaacagccctgcagaacttgaaaccgcctttttaaaaattataaccgagaaaattataaccgtgaaaaagatctgacctgactgactccatcttgcttctaacctccaagttgcccctgttcattcctgggcgtaggctgaactaactttgggaggaactcagtttatagtttaactttgaaacaaagacgataatagccctttccccaaaca

SEQ ID NO: 52811 - DNA, 2047 bp, Homo sapiens
tgaacacagaaatgaaaatcagagaggcgtgcccaaggtgctaaatgtgggctgaaagagaaaaaggagtagtcccgaataactcagaggtttcatgcttacgactggagaatgttccccgattacagcttattatcatctcacatatatcaaatgaccttgctttgtgactcaagaaatcacagactcataatactctgtggctggaaagcatctcagagatcccagagagagggcgactgagaactggccaagttaaatactatttcaaagacacttggctgattagtagcagaagactcaggcaagtaagcccaggcctctgcatcttccatcaaaccgactgctggtttcctgatcatctttacaaagctcttctaggggcaatatgcaaaaggtaaatagcataatttgtcactgggcaaaggccagaatggggctgagccttggcacgagtgaactggcacgatttcaggactaatttagatctcggttctctgcaaattactttctgaaatggcagtctccaaacttttttgaaaaagtagactgcccaagatgggtgcacaacacaggtaaatgttatacataaaaaagtattgctagaattgccttcagaatttccacagaacagtgtttttcctattatcttccagagatttccagtggtttaatttcaaaggctcaaactctccttcaatattggttctcaagctgaggggaaaccagagcactgccaaagccacttagatattttcaaagcaaaatcctccctgttaatttaatcatagcagaatgactgcagccagctctttggcgatttcttctacccagtttgaatgtcttccaatcatagcaaacagctgctgagtagagtggattctggaagctattatttttgtgtctggaagctttgtcatcttaattattctgataaaagcatctcttttcctcgtgagaacgccatgcccaatcctagagcttcaggggatggactggcaaaaaaaaatttatgaatgttggaatgtgtggcctttattaaagtcctacaagtaaagggacttggcccatctgcacacagaaacaggacagcacccatctttgtcaagaggggccctcactgcctggtcatcagcaatccaagatggctgacagtcaggtaacccgccttgcaccctgctgaaaagccaagtcctctacccttgttgcagttggtttgagcagaggtaaaaagatgaaaataagatcaggagagaagcagacaaatggaggaagcctaattccccaggcccctcccagatatttcctgcacagtattctctactgacaggataaaaaattccccattaaaaagtgctatccagtggaatccttagggaagcaagtttatgctggcacttcctcaccatgccagttgattgttttatgctgctctgaggcggggagaggaggtaaagggttaaactgatactgtgggctaagggcagaacttgacagcctgttgctaggacccacaaaccacacggaaaaggtccagattccaaggtcataaactcaacaagatttctggtattagctacaaactaatggaattcctgggaatcaaatccactggctggctgcctgttggttttaaagaaatgtactgtactgccagggaaatcccgagcctggaaaacaaagacctgtgattgctcaaaccctaaggcaatttccccgcctggataactcttccaaggcaaaggtttaagctatacagcgctcagcagaaatgttcccactgcatctctaaggaaaggctttggaggaaatggacaaggggtcccatcaggcagacccaaactgaccacccaagtgacccattctgctgccagggcaggggatgcttgcttgtcctgcccagcaagaggtgatcactgctacagggccccctgaccactgtacattgctttatcttttcctcctttctaaatgagcgtatttattgtgctattcagttttccctctcatattatgtattatggtttgagattggttaaatttgcca

SEQ ID NO: 52812 - DNA, 3768 bp, Homo sapiens
tcagacccttgcatggggagttcattcattcattcatatttattgagcacctgctatgagacaaacctctttctttgtttttttgttttttgttttttttgagatggagtcttgctctgtcactaggctggagtacagtggtgcaatctcggctcactgcaacctccatctcccaggttcaagcaattctcctgcctcagcctcccaagtagctgggactacaggtgcatgccaccacgcccaactaacttttgtatttttagtagagatggggtttcaccatgttggccaggcttgtctcgatctcttgacctcatgatccacccgcctcggcctcccagagtgctgggattacaggcgtgagccactgcgcccagctgaaataagcctctttctaggcactggagacacgacactaggcaagaaaaagtccgggcccatgtgggatttacagtctgatggctccaaccatcatggaattccagtttgaacctaaagggttaatgccagacgacacagggcaagggacctctccaagttctggctgcagagagatgccaagtacatcctctttcgctgggagaagttgttgcaagtatcactgccctgtgtgtgtgtcataaaattgacctgatcagtgattttcacgtgggcaaataaagcccaactgtggaaagggttagcagtcacatggagaccgagtgcctaccacagtgaatgtactaagtccggaaaaaaggctgcagacagtcatgcggtgacctgaaacagaactcatgtgatttacatcccctacagttcatgggctgataccaaagttcatgtgaaataaatgagacgccaagagtgcagagtcaccatgagttaatctagtctgacaacaccctgaaacagccagaacagtaatatgtcatgtatgcactgtaaaaactgttccccaattgtggacagaaaaacacactaacaaatgggtattgtttttgttatgtgtttcattatttgtcccatcaaatagaaagcctggcagtgaaaggacgtgtgagaataaaaatgcactgagaatgaatcacacttcccttctattcccatctatctggtacttagctcctgcctctagtaccatgttgagcatctgctgtctctgtcaggcttgatagcagggatctgaacgactgacttgtattcttgcaaatccttgcacagttctttggaaatgatagctccccaacccccgccctgccccgcccctccgccaccagcaatgaatgattcttgagttgaaatttcggaaaagaggaaaagcatacatcagcgtgaaatataattagggtaatttccaaaactcattaggccatgtaattctattttaccagtaaatttgaacttcctgcttcacatgtcaaacgccctatctcctgcttcctaagagcccatgaatcactaggttaagaagagggagccctcctccacagtgggtgttggatatggaaagtctccccccaccaggttcccaaacatcctaggtatcctcagggccctgattttctttcttttcttttcttttttaagaagggagtcttgctctgctgcccaggctggagtgcagtggtgtgatctcagctcactgcaacctttacctcccaggttcaagcgattcttctgcttcagcctcctgagtagccaagactacaggcactcgccactatgcccggttaattttttttgtatttttagtagagatggtgttccaccatgttggccaggctggtcttgaactcctgacctctttagctgggggaagttgttgcacgtatcactgccctgtgtgcccacctctgcctcccaatgggctgggattacaggcgtaagccactgtgcctggcccagggtcctgattttcataaagtcttggctcactttcagccaagggctttctacaaaagagataaagtaaaacccacagggcaataagttgtcaccaccagtaaacatttattaagcatccactgcctatggggaacacctgtaacaacaaacttgccgggagacttgaagacatccctacatcatagccacaggtaagaaagtaaatgttgcagcacctccatgcggtccataagtacatctttaaatccctctcatctttccatgcaggtggtggtggtcaagagcaaggtcgaggctcacctgtgcccatttggttccgtacattgctcactagaggcatcatcgacagagtatgaatcagctccccaattagcctgaccgtaatcacctgtgttgcttgattattatacaaattccccgacctcataccgacctactgaatcgaaatctctaggagtagattctgggaatctgtatcgctggtaaagctcccaggtgattcctataatctggcaatgtgggagacacgagcattaagggaacccagcaacaggctccatcctctgcctaacatcagcaacctcagcagagacttggtcccagggaccttgctccattatgtaccccaagacactgtccctaaatggtgcacaaagcagactcaggcctgtctcacacactggcaaagctgctgccccccagctcaaaccaggtagtcaggcttaggaaaaccaccctgcctgctggtaattagccatgtgatgttaaagaagcagctgtggctgtttggaatatgactgttctggaaggacttttctcctctttttcaccaccacactccctcgaatgactcacagttctccacttcctgttttggaggcgctggccggcatatagccacaagggtaagctgtcatttggcttttcttttgcattatgtcattatttgacataaatatcacatttgttcttgcaaatgctctcaggaagtgacatcacaacttctgttctctttataatgacagaattacaatgccttctggtaacttgtcaagaatcagaacaatttatacaatgtccatccctggaaagatctttgcacatttactgaacttaaatgaatataaaagcaggaaaaccctaagttttattataaatggatatacagataatatcgccagactttcttttttgtaattttataatatctcacttttttttttttaaccttgattttaccgaagggtcagcagagacaaaggcaatgttggtgaggccatgtacattttcatctccttgagctggtactgtgagcaagctgttcatctctccacgccaacctcaatcttcctctctaaaaaagggactgatgctactttcctaatcctgccatgacctttgcaaataaaacacttaactgaacacactgtagtcctccaactgaggtaaattaattccatcctaatgccatctggaatcccagaagcagtcattaattatacagtgtcttgcctgtaactcaatacatgaaaagacaaaaagatttacctaaatgatcttttcagaaaccactgcacaccccccaagatcaaccttacataaagggcaacatattctgcctttgggaaatgaaacgatgcccctgacccaccatccataaaggatgtactatgagacatgagtgcaaaggacaatcctgacatgtcctaacatgcaaccgacgtttacccagggaccaaaggaatggatgtaatttcttgagctaaactgcccaaatgcttgtatatagggtcctttagaagtctctctatgtggccgggtgtggtggttcaagcctgtaatcctagcactttgggaggttgaggctggtggatcacctga

SEQ ID NO: 52813 - DNA, 2926 bp, Homo sapiens
ccagcctgggtgacagagtgagactctgtctcagaaaaaaaaaaaaaaaaagaagcctcagacccaaaccagttttaccagcaataaaactgattactttgatccctttctaacgcttatgtatcttcttcaatttccctaatctcagaggtggaacaagtacagttattatctcagaaaaactcattttatagatgaggaaattgatacatgacagattgttacttgtccaaaggccacacgattagcaagtcgtagagtcagaatgtgaactcacgctctgcttacacacccctctcattcaccttggggtatcttaaacatttggttctaccaattgatctggcaaattttcatcccctttgagtgaactaacaaactctactttaaaaacaccggccagggacagtggctcatgcctgtaatcccagcactttgggaggcagaggtgggcggatcacttgaggtcaggagtttgagactagcctgggcaacatggtgaaatcccatctctagtaaaaaaatacaaaaattagccaggcatggtggcacacctctgtaatcccagctactcaggagtctgaggcaggtgaattgcttgaagctgggaggcagaggttgcagtgagccgagattgtgccactgcactccagcctgggcgaaaaagtgagactctgtctcaaaaagtaaaaataaaaacactgaatccccaaagattttacaaacacatcagctccaataaaatgatccacttgccacaattactgcagagttagaggtctacccagtgtggctcacatcagagaagctagactacagttaaactgcagaaataatacgatgtagtgggtaggaacacaggacttgggttgctatcctggttctatcacttatacctccagcagcctcatctgttaaataggggtagaaacaacctctacctgttaggcctgttgagggaattaatgagccaattcataatgattaacaataatagttaatgagtcaacacaagtaaagagaataaaacagtgcctggaacacagcagccgtcagcgcctgttggcacctgtatgatatcacttgagctactagttgccaattctatgctaggaactttgcctctgctgtttcaacaaatactcacagcagctctgcgtgacaatcatctctatcttatcagtgaggaaatcaaggctcaggcaggccgagtcacaccactagaagacggccggccgagccaagtgtggaactcagtaatttgactccaaagtctccttcgctacattgccaggccatgacaatgcttgcgttcactttacctgagattaaaccatgacctagaagtagaaacctggaattacaaatccctgaggaatgagagacctctgtgcctgagaccgtaaggaacagagcttgggggtcctggggtgtcaaacaccaaggatctcttaattagcaagttcaaagggaagggatgaatagaaaagaaaaaactcagaaatgaccccaggagggagaccatagggacaggtttagctccttcccagcttgagtacacaggaaatgtcattcagggaactgtgacttgtaatatagaaagagggttccttacagcacagagagtggcaacagaagccaggcgaaataggcagtgttcctaagtcaggtctggagtggcattctgctgaatgaacggggcttgaaagaaaacaaacctggaagagaccatggaaagctgcaaccctgtaatcgcgaaactcccaaagatgggacaccttgtgcctgagattctccgagtccgtacgtgttgtcttttcatatgttacatactttatatgtaagtgctcagcatccctttttctgtggagagcggcccttctccttcccatatggttcttatggggccagcattcccagtactccaaatccccactggcccagggcccagtgattatggattgccattccccagtcagaagatggctcaaaaagagcaatctgtttaggagattggaggttttattttttgttgtttatctgtttttttgagatggagtctcactctgtcacccaggctggagtacagtggcatgatcttggctcactgcaatctctgcctcccaggttcaagctcttcttctacctcagcctcccgagtagctgggactacaaggcatacaccaccatgcacagctaatttttgtatttttagtagagatggggtttcaccatgttggccaggctggtctcaacactcctcacctcaggtgatccgcccacctctgcctcccaaagtgctgggattacaggcgtgagccaccacaccaggcctagaagattggagggttttattcttcttcttagattgtagctgtaagtaccaggtaggccaatagtacaatgtccatcctcccaggtctggctggaagaatttggcagaaagagggcctcatggctggaagagcaacgggcctgtggtgacaccacgtgtgactgaagcttgctgtctccaaacaagatccatcctgggccttcccagttctgtgatcccacagattccacatgcttaagctggttggagttgggtttctgtcacttgcaaccaaaagagccctgactatagaatgcatccagcgccttggtattctgtggaaaggcagaaccctcagctgtgtactggcaggaactctggtgctaggccaagtgaacacggtagggaagtggtccttatgcatttgtgcaagaagaattgctgtgaattccaggcaaatgctaaaccccttgggtggtggagacagtgaggacagcaggaagaactgccttaagaatcccctttagaccctggactaaaccacccctccttcaaagtctatcactgcatcagctcagtagggcaagggaggaagggcatgatggaaggaaa

SEQ ID NO: 52814 - DNA, 2420 bp, Homo sapiens
agtgagccaagattgcaccactgcactccagcctgggcaacagctagaccctgtctcaaaaaaaaaaaaaaaaaatatttttagccgttctgcacttcaaaaatacaacttagagagctgatcaaaggatgaatagaaaaagggcaaaaatacaggttgtccaataatccaggtcggaagtgctcgaggtctgctgcaagtgagagcactgagaatggagaagagggaacaaacggaaaccttgctcaggggagagacggcaggaatctggcaaccaagtcagcagtgatgtcatttaccaagtctgggggaagacgagaagcagctcacttctaggtctgttcaggttgaagtgtataaggaatcctccagcaggcagttagaaacataggtctggagcctaggagcaaaccccatggtggagatacagaggcagctcacagggaggagtgaacgtggccaccagggagccagtatcaaagtatgtgaggagagatgggggccaagggcggaccaccgagaaacccaggctctaagaccaggtggaagagtaagagaactctgtggcctttatgaaacagtgttaggtctagaatttctcccagagtctcttagacactgcaatatagatcatgtttttcctaaacctgcggcattgccaggtgtcccaggaggtcacctggaaaagcctctgcttagagtctaggcctcacatcactcatttgttgaaatgaaggtctatgctattttcaagagcagtccagagagagattctgtaggatacagctgagaagacaacagctggattcctgtggcagtgatggaggagagaggaaaagcccacacatgtcccctgggaacgtaccccttcccctttgagatcgaactgccctcaggccctttgctatcaccgaaatgccctttcacttgtgacgttttgttgtcacagtaaaattaactttttttattacgtgtctcctcttctcagccaaggtggagattaactggtcactcttttctgtgtgagaactccgccccaccccaccccgccccgcccccaccagctctttactccaagagtaataattctagttcctctaatctcttggctaacattttaaaaccacacaggagaagcagaacaaagtactcactgagctcagaagaggcaactgcagaccgagcaggaaggccatccccctgcttggtccaggtgatgtcactctttcccaatctagagtcacagttttcaaggcaccacagtcatctggttcaatcaacatgtgactttgagaccattttctgctctgtttgcctaaggtctccctgccctatattttattttatttgtttttgtttttgtttttgcttttgctttttgagatggagtttcgctcttgtcgcccaggctggagtgcaatggtgtgatctcagctcactgcagcctccgcctcccgggctcaagcaattctcctgccacagcctcccgagtagctgggattacaggcatgcaccaccacacacggctgatttttgtatttttagtagagacggggtttctccatgttggccaggctggtcccgaactcctgaccccaggtgattccacctgcctcggcctcccaaagtgctggcattacaggcatgagccaccacgcccagccgctgccttatattttaaacagtctactttttctctccaatgtacaagcctaagcctcgtcaggctggttctcagccacatttcgaggtggaacaaacttgactttcagctgaattttccaaggtgctcttccttgtctcccaaactgatgtcctgggtagacctgctctcctttccatcaacctcgttactgatttaaactgatttagacccaaggcaagaaatgggtcctgcctgtgctggaaaatatagctctttcaccttgggtgtgtgagatgggagaggaaccagaacagagaccttcattaccatcctcggatgtcaggaatatccctcctctgctagaagcaaatggcaaaagaaatcctcacatggagggaaatgtggggaaaagtaatgaaggagaatttgctctgcaaaaaaaaatattaaatgtatcataaaattacagcaattgaaatagtaaagtacacgcacaggacagacaaacagtgaaaaaaagctagacagtctggaaagagacccaaagaaatgcaccaggtggcatggatggtcagtagttccaaaggtgatagggaactggcttacagctggggagaaaaattacaatgtaaatttagcctcatatcagacatcaaaataaattccaaatgaacctaagtggttttgttttggttttgtttgtttgtttgttgtagaaaagtggtctcactgtgtcgcccaggctggggtgcactggcatgatcatagttcactg

SEQ ID NO: 52815 - DNA, 707 bp, Homo sapiens
gtctgcagcctatcagccaagagtcagaaacaccgtgaggccacagctccatctcacccaccccctcgccagcccctgctttcctgcattcaccgaaacacttgcctctgtccctcaacattcctagaaccttcactgtcctctgaggtcagcgatgtatttaaagcacttgttttcatcctgttcccatcagtaagatttaacgtaagacactcagaagggaaattccactctctttccttctgggaaatgagcagctacattgtccagacccaaatccttagcctaacacatctgccaaaattcaaaagttcatgattttaccgaaataaggccacacacttcttaggaaaccacgagtatctctgcacatcaacacataagcttctcttttttcctccttttataaaagaaaggggttggtttttttttttttttaactctttcataagatcaaagcaacttgatttttttatgcttctttaaaattacgagtcctttaaagtgggtagagttggaaaataggcatctcaatgaacattaaacagctcaacaatgtcccctggtggccatgagcacagagagagggaacttgagccactaaagctctattcagcctaccaaacaaggagtaagtgtctcatcaagatgaaaccccctcccctttactcaaaaaaatatgcaacggtccttcaaaccagaaaagc

SEQ ID NO: 52816 - DNA, 1929 bp, Homo sapiens
gacggggtttcaccatgttggccaggctggtctcaaattcctgacctcaggtgatccacccttctcggcctcccaaagtgctgggattacaggcgtgagccaccgcgcccagccaggaatacatttttatctgttcgttatgtatcagtttttgtgtatatcagaaaaatacacctacttcatcaaactcatgagatcacatatattgtccttaataaatttgaattataaatttaaggttaggttgtttaaggaaacactctaagtaaataatactcttattatggcaaacattgtgtcagggtggtatacaaataattcaagcttggaagacactgatgtaggagaaagaatgtggtctttctgggcttacaggcctcagttcaaatcctggctctaccatttgctaattattgagtgaccatgtaaaagtcacttaacctttatgagtctcagattacttatctatgaaatgaaaataacaaagcttacttcaaaagggttttaagaggatgaaatgaaatcgagcattaaggtccctagctgagccctgggtgtgtacgttcatgctcagccagcagtagctataatgcttgatggtccaaacctcattcacatattccaatacatccggccatgtggctatttatgtaaatgtatccatttattccggctgacctttctgttccatctgaaatgtgtgtggctgcaactgagcacccagtgggctggagaagagggtcaccagccaaacagaagggacagaggccaacaggagtcctggaggcatcagagcagtgcccagagcagtttagaggcacagaaaggatcctagcgataaacagcctctgttccagcagagatgttacccttctgagagcgtggagtgagtgagcgtcagccttataatcattaactcagattctaaacatgaaaagccaaatggcctgtgcagaatggaagccagggaaagtcttatcaagaatgaatcagtctctttgatcttgaggtaaaccgactcattaacatcaagcttccacctggggtttttccagacacgaaagtgattgcctaattcccagctgtctggagtttccagtccaaactggcctggcggggaaggagggggcaggaaaaaataagtcccaccagcttgatagagctcacaccccattaaaagcacatacgatttgtgctactaatcccaaagactagtggcttccttacaaacaacccaggtaaagataaattattctacccagtttggaactaaacaggaagatgaacagtgaaaacaggacagaggtaggaggcattcagagagaagcagaaaagtagaaaaagatgagaggggaagccaaacgtgaacacgaagacagggaaatataaaatacacagaggcaggaggatggcttgaggctagcagtttgagaccggcctgggcaacatagtgagacacccgtctctacaaaaaacatttttaaaatttagccatgcgtggtgggtcatgtctgtagtcccagctgcttgggaggctgaggcagaaggatcgcttgagcccaggagttggaggctgtggtgagctgtgatcactgcacttcaacctgggtgacagagtgagactccatctccaacaacaacaacaaaatacacagagacagttgggatgaggggagtgaagaaataggtaacaagtgaaaaacagggaaaagaaaaaagaagaggggtagctgagcaagagccatggtaatcagcagctctcactacattaccagaagcctctcctacctacccacccagagatcatctgcactgtaccatgaattaatcagcatgtaaatcatcccctttatctgcggaaattgaatttagctgccaatcctgattgagggcataaaggcctcctcacagaaagatcacagctctcag

SEQ ID NO: 52817 - DNA, 715 bp, Homo sapiens
gcttgggctgttgcaggactccagagttatttccaggagggaggtttcccagagcaggatctcatctaatttccaaccctgtctatctctcatgtcccatgtttgcccacagagctttggttcccttttcatgcatattcaccagacacaagaccccttggccctcatcatgttttcccagcatcaaacctttagacgtatttaatggcccaaggcattccaagaatgaatatatttgtgtgtacacaagcaaccaaccaaagagatggttaatgtttcataagactgcctagtcacattgttgacatctgaaacatcttctaatttaagacagagttcagttacagcaggaagtagaggggacatcactaaagaggttggaggtatagattcatgtacactgaaggtggaaggttaaagtgctcagtggagaagtctgggagggaacccagtgacaagtcattggattaggagagaagcacaagtacaaaagggataaaagtacaaaagataactagattggcttccatcttggacgtgaccaagaataatggaaggcatgatgactttggttgggactgcaagattttaaaaaaaaattaataccaaatatcacccaattgataagaaatcagtaacttgttctctagggattaaggctcaaaggctcaggtggatgcccctttaggaagcagcttggacctgtggctctgtg

SEQ ID NO: 52818 - DNA, 1613 bp, Homo sapiens
aggaaaaacaactccctcgattgcttggaaatagaacatttgctggtctaaatcctccagacaatgagctccacgagggcccgcactgcccgccctcatcgcgcacagggaagctgttcaagggccatctgttgaatgaatgagtgaattaatggcttcactcctgtactcttccttacgcgtctttctcaccatatttagcatccggctctctaacaacgtgaaaaaattaaaagtggtaagaaaattgcttcgggtcaaaaatgtgtcatgcaaaagccaccgcagagccggaagcgtgacagcgccgcagaacgccctggcctccccgcccttccccgggcgccgccctgcccgggtccgcgctcgcgcccagcccccaccccgcctcctgggcagtggaggtccctgggggcccggccaggccgccttaaaaccggcgtcccccggcgtcgcggggtcgggcgggggcagggaagcccggcggggagccccccgcttctctgagctcctccttgccgatctccaacggccggcgcgggccccacctgcgccccacgcctcggcaccgcgccggcccggcccaggggcggggaagcgtccgtgcgcccagagtcctcgaggcccagccgggggccccgccggccgcccgtgcccgtcccagcccgcactcaccgtcggggcccggcgctcccgcggcgccgcgggccaggccgagcagcagcaacagcggcagcaggcggcgagacgggcccgcatcccagggcccccggcccatgccgccgccggtccctcccggcgcgcccgcgcctcctcccggggccctcagggtgcagagataaggctacaggcgccgcggggaggggaccagccggcggcttccggcgccgccgagggaagcggggggcgctgcggggtccccgggaggccgcagagcgcgggtccttcctcttgtcggggcctgggcttaggacacgcccgttccgcgtccgtctctggctccgcacttgctgccctctcgccgctcacattcgcaaagggggacagacactcatcggataatgacacagctggacgcagagccccggagagtgctggggaggaaatgttgcggaggattcaagccactcgagggctcagggaggcacccccggggagaggggtgaggggagcaaggggcggaaatcttccaggacgtgaaagggagctggatgaggtgaccacagcgcaaggcccagatgagaggtcggaagacgcagacccaggccacccaggggcgacacacttgaccaggtgacacctggtcaccgggagtgagagagagtagggctgtgatggagggaggggctggcatcagtccccgctgctctgaggacacccggcttgggacgcgctgatgccagcccctacctccatcacagccgtactcatcccaagggaaggagtaaaccaagacccaaggatgagaaggacgttggggaggaatctaagcgggagtttgttgtagaaatggggaatggggacctagagtgagagcagagggttggagaggggcgttgagctgcagagggaagttagccctcctaacccaagtgatggaggtcgccgggaag

SEQ ID NO: 52819 - DNA, 1099 bp, Homo sapiens
actaaaatcacacacaaaaaattagccaggtgtggtggcaggtgcctgtaatcctaggttctcaagaggctgaggcagcagtatcacttgaacctgggaggcagaagttgcagtgaggtcaagatcacaccagtgaactccagtgtactccagcctgggcaacagagcaagactccgcttcaagaaagaaaaaaaagaaaaagaaaaagaaaatagtttataatcttcaaatacagaatattttttaaaaataagggacaaaggatcaattattcaaattatggaaatctgagaacttcctaccctgagtcaatattgatttaagtcattcaagtgatttgatatctgtagtcactgtactaatagtagatacctgaagaatgactcaggaaaaactgagctggcaaaagccccttgacatttatattttatagtatacatagtttcctcttaacaggaataagatacttacaaagctttaaggtggtagattttgtcccccatctcactctttttattttttattttttttttgagacagagtctcactacactggaccgcagtggcgtgatctcagctcactgcaacgtccacttcctgggctcaagcaatcctcccatctcagcctcccaagtggctgggactacaggtgggtgccgccacacttggctaattttttacaatttttgtagcaatgaggtctcactatactgcccaggctgggtcttgaactcctgagctcaagtaatcctcctgcctcagcctcccaaagtggtgggattacaggcatgaaccactgtgcccagcctttgtcgccctattttaatgattagttataaactatagacattaaccgttctgagtcctcaaaatactggtaagaacatctcaaatttaaaacgcaggaaccactcctgatccaaatcaacacaaatttctagttagacaattcaattctttttttactacagaagaacatatttatttattcatccatccatccatctatccatccatccatttttttaacagataggggtcttgatatgttgcctgggctgaaatgcagtgcctattcacaggcacgatcccactact

SEQ ID NO: 52820 - DNA, 1029 bp, Homo sapiens
acctagataacattaaaattaacaattttatttaacaaaagacatcattaggagaataaacagacaagtcatggaataagaagatatctgcgatatgtaaaaccaacaaagggtttatatccagcacgtactaagaaaaagaaaaaaggaaaaacaaaacactagaaatcagtaagaaaaacccaagataacagaaaaatgacaagagactttaacagccatctcacaaagtggtggactatgtcactgttccagagtatttgtaccctctccttttcctgaacaagaattattcatccccatccatggccatgtgacttgcaatgcctccagtgggaagagtataactccctccccccattgacaacacagttttgtaatatcctttggcaaatggaacatgaatggacatgacctatacttaatccaaacagtaacttcaaaaatcagtcatttctgccagttttttctctttccctctgaaataagagcatatctcaaataggaggtactctttcagcctgattctcagaataacaagtgtagctccataacagctaccaccattgtaagtgaacaagaaataaatgtttttttaaacaatttataaatgactaataccatatccaatcaaactaaagatatttgaccgcatcctcattggtcatcagggaaatgcaagttaaaaccacaatgaaatactgtaaaattaaaaagatggacaatatcatgttagtaataatgtggggtgacaaaaactcttatatgggagttaagtataatttagtgagagtgtaaattggtaccacttggaaaactgtctgatccaatctattaaagtcaaatatatgaatatcctaggatccttacatagtctactccgatgcataaaccccaagatattgcctgcttgtgtgcacctagacatataagattgtcttcagcagcattatttgtactcgtcaaactggaaacaactaaatgccatcaactgcagaataactgagtaaatgtttgtaaatgcatgca

SEQ ID NO: 52821 - DNA, 2898 bp, Homo sapiens
atctgcattcaaatgaatcaatccgaaatgtcatatacacttaatattgtgaaactaaaataaatgaaatctaatgaggtcaaaagctgttggaagatttcatcttcaaatagcatatcatcaactgtatggcaacatgtgaacgacttttactgttctagcaagttgcatatattccacaacctcacagaaatcttgtcatcaaaagtaggtaacaagctaaaaaaaacctcaaatacataatgggaataaaccgagttggagatttttttttaatccgtaggtacagatactacaaccttcaattaattcaccaaaatcctaacatagttgttactttaattaccaaaatatgtcaagtcccaccccatatccctgagtccccagagaacagtttatatacatagactctaaatctttttattttggtcacggacccccattaaatttttgagcatttgaaatgcccccgaaaatcgctcgtacatcatattttacatacacgggcagataattcattaagtttcttggggagagagaaaggtgagggggaagcgtccatggtcactaagtccagacccctggtgtcgagaaagcgttaacgtatctcacagcacaagtcgggagacctcggccaagtcccgcggcggccctgggaccccgcgtgggaccatggcttgcgaccaggtcgccgcccagacgtgtaccgacgcgtgcacccgccgtcggccgctcgccccacctcgccggtaaacagcaactcccccggcaggaggacgcccgccccgcgcgccgcctccgcctcccccagcgccgcgcaccattttctgagaggaagtgtcgggaggccgagctgggctccccggactcggggcgcggagggcggacctcggcaccgcggccggaccgggctttcctctgctcccgggtgtgtcgagtaaggctaggaagcagcggacgtgtccggggcgccgcgtggggaaaggagagcctgcggcggacggcaactccgcgattccgggatccccaccgagacgcccggaagccccgccgtcgggcttggccggggccgctcctccggccgccggcgccgcgcactgctccccagcccttacgcgtcccgcggagagccgggtggaagcggcgccaaggcaacccggtgcggccgccgcgccgcctagtacttacccatccatggcccagatggaggcgcgcacagagcagggactgacgggctaaccgcgagcagaggaagcaggcggcggcagcagggcggttccggggacaagcgagctttggctctgcggagccccggccggtccgaggtggaaggagagtgggaacaggggcggggaccgggcacgctcccgccaccgccgcgcccccgccttccccaccccgcgagcgcgtccccgcctagcccgaccccgccccctcaccgtccccgccctccctcggggcccgcccctgcgctcgcgcccaccctcgccccgctggcagccggcctccggctcagctctggggcgccctcttcccgcggtcgctgtaagaccccgcctctcggcccctcggcccggcgcgcgcgcgcgcccccagcctccctcctgcgttcgcgggagcgcgcgccttgtgcttcccgctccgccgcgcaccccgcccgccctcccgcggccccgcgggccttccggcttcgcagaccgggcctgccaggtttgaatgcctccctctgccggcaggaaaagctatggggacctgactcccaagagtaggaaggaatgtcccacaaggaccccagaaacgaggtggaattgccccgggtgcgcgaggctgtagatgacacgtccagggaccagcctctggcagcccggcgctggagtcgaccgctgggaccgacaccagccccataggtgtggctgggacgatgaatgaggtgaaagaggctgcccggactggaatttgtatacaatttaagtatctgagtgcatttcgacctaaccgtctagtattgaatttatatgaaaaattcattgtacaaacatggaatggctatattcccagcattttttaaaagtttactcattattcccttttttcagatgaaaatacatatacaaagagagtgatttgctcacagtttcacaaccaggaaacgtttgcaccagagcccttccctctggtctgagcaaaaagtatatatataatataacgagtgacaacacgcttgcttttttccctttttagtgagaaattgagtactttttcaactcacagatcaccaaaatgtaaccccctaaactgttaagccaaattcttaacctactgagtaaaaaagagcggggctcctccccgtggcttcgtcatttgaaaagcaactaacaagaacctcaaacatctatccttgctaatttcctgctttcagatcagtaggtgctgctaaaaagatctaaactgtggactcattcatcattcagtcagtattaacctactatgtgccgggcactgcatgaatacacaagaaaatcaggttccagccgtcactgttgaatggattcttcagtccgtttatgtatatttttgacatacaacttttcaaataggtagagtaattcggtgaggtaattcttaaagtcctgtatctaacctcagtccccttccaaaatgtcaaatacattttgttttgtatattaaatctaaatattaagttgcatttgtaaacattgccagatggaaatgtagaatatcaacaagataagtagctgatgcagtctttctatcactgtatttgggatatattctgttgatgaaatttccttaaccctttttttagctacacaagtaatatcagcataaatgctcattttggaaaattcaagcactataaaatattgaaaagttatc

SEQ ID NO: 52822 - DNA, 1466 bp, Homo sapiens
aactgtttggcatttcctaaatactcaatgtccagctttacaacagaagcctagatataagaaaacagaaaacagtttacaacaaaaaaggtgaagccttaactctttcccctgccccttggttctaaattcaaagaactttttgtttgtttgtttgtttgtttggaatcagaggcttgctctctcacccaggctggagtgcagtagcgcgatctcagctcactgcaacctctgcctcccaggttcaagcaattctcctgccttagcctccctggtagctgggattagaagcgtgcaccaccacacctagccaatttttgtatttttcatagagatggggtttcactgtgttggccaggctggtctcaaactcctggcctcaagtgatctgcttgcctccacctcccaaagtgctgggattacaggcgtgagccaccgtgcctggccaattcaaagaacttatagattaagctccatgggtttgtgagtcactttgattcaaaaatagtaggtagcatagagtttagctcctcaagaaccactttgagaaacctaactgttcccatagcctacatgatgtggaagagccacagctttctatcatctccacagaagtttctggaatcagatatctcagatatcacctacatgacctggtttgacctgaaactgatgggttctatatactggcttcttgatagtgaagagagttacattttctctatttgctaattgctctgtgctttgaaaaggaagacagatacaaataatttagtttataatttttctaacattttctcttgtgtttttgttctgatttgactaagaaattcccctgacacacctttttctgatgagagacaccacccccatcacgattatctttggacaacatgtaacctttgaacacttgccttaaggcattccagtaggcagtggttagttaacatttaaccaacataaccctatttctgtttacaggtaagacttcttaatatataaaataatacaaagatgccaaataagtcagaaataataccagctattaggtgaatctaggaagctggacattttaatatcattctatcccatgacaaatacaaaatcatcataattaacattgcatttcccaaaacagaaacatctgaaattatactaaatgaaaaaagccaatctcaaaaggttacatgctgtatgattccatttctataacatcctcaaaatgacaaaattatagagatggagaacagattagtggttaccaaggattaggaagagggtgggagcagatggaagaggatacagacaactgtgactacaagggagtaagaacggggatatttgtggtaataaaacagttctgtgtcttgattatggggtggttatacaaatctacacatgataaaattgcatagaactttagataaacacatgcatgaaaaagtgacaaaatctgaagagaagtt

SEQ ID NO: 52823 - DNA, 1532 bp, Homo sapiens
gtttttgttttggtttggatttcttgtggggttttttgtttttgtttttgtttttggcaagatctctgctagaatttgttttgttttgtttgttgagtcagggtctgtctcaagtcgcccagactagagtgcagtggtgtgagctcggcccactgcaacctccacctcctgggttcaagtgattctcctgcctcagcctcccgagtagctgggattacaggtgcacaccaccatgcctggctaatttttgtatttttagtagagatggtgtttcaccatgttggccaggctagtctcgaactcctgacttccagtgatccgcctgcctcggcctcttgaagtgctgggattacaggcatgagccaccatgcctggcctctggtagaattttattcccttgtttgtatccggcaagaaaagtgtttttgtttttcgttgggtgtgtgtgtgtgtgttgttgttgtttttgtttttgttttgaatgatggcagtactactttgatctgcagcttactaaagaatagtgtgagttgagggctcacaaatctcatctcagcttttctgtgcgttattgattttttttgtttttgtttttaagtcacttgtaggtctagatatcaatggtttatattcttgtttcatctttcaattacttggtggggatggtgaagtgggaagtgactgtgaagtgactccaataagtagatagccatcaagtaaggtgtgctttctctcagaaacttcacaaaattctttacatagttctgctaaatatccacatttggtttggtttgttttccctgaattcctttagaatgactaggtccctgtgatggctaattttaggtgtcaacttgcctgctttaagagacaacaagatagctggtaaggcattatttctgggtgtgctgtgagggtgtttctggaagagattggcatttgcatcagtggactgaatgaggaagatctgccctcacccaatgtgggcaggcatcatccaattggctgagggcctggatagaaaaaaaaggcagaggaaaggcaagttttctctcttctggagctgggacactgttcttttcctgcccttagacataagaactccaagttctccagcctttggactccaggacttgcaccagcagccttctagtttctcaggcctttggatttggacttagacagagccgcattactggcttcttgggttctccagcttgccgatggcctatcatggaacttggcctccataagtctcctctcatatgtctctgcgtgtgtgtgtatcccattggttctgtctctctagagaacactgactaatacagtcgtcttcacagaagcctgaatatactctataacatataatataagaggttagactggacacagtggctcacgcctgtaatcccaacactttgggaggccgaagtgggcggatcacttgaggtcaggagttcgagaccagcctggccaacatggtgaaacccatctctgctaaatatacaaaaagtagtcgagcatggtggcac

SEQ ID NO: 52824 - DNA, 2428 bp, Homo sapiens
ataatgttaataatcaagcacaactaggcaaaactcatcaatatattgtgtgtgtatgtgtatctatacataaatacatatacatatgtatagacacacaattttataaaacatgacaagggattaatacaaaactcagcatagtggttacttcaggggaggaggcagggagatggaatcaagagaagcacaggatttcatcatctctagtcctttagctggttgttggtttcacaggtgtttactattctgcctcataatttatatatattacacatattttgaatgtatcaagtattatgcacacacatatccacaaaatttagcctatttttgtcagcactgacgtaggttccaagacctcatgcctcagaatagggtttctcaacctcagcaccactgacatttttaattctttgtcatggaggggagggacttcccagtgaattattggatgtttagtagacagtgtattattgcatatttagactctattcactagatgctagtactgttagagtaggtagttaggcaggcatgagcagggcaggagacggtgtcccgtccaaggaatgtcgggcggccatcagatggtcaggcagttggtaaattatttctctaaaatgataattggccgcagccagcgccaggaaaaggtagtttcccaaaagacagaaaacacctaaaactggtgatcagcagcttcccgattagatatctggagttgggccagtggcctcgagcatgtgcactaagagacaaaatggcggagcttaactggtatatgatgacctttctctaccaacaatgaactggtaagggaaaaaaatgcctcagatgagcatgtgcacaagttcggtaaacacacagagcatgtggcccctcccaagtgttagcaagccactgcgcatgcgcacagcccactccgaaggaagaatcgggagagcggaggcaaccgcccggaagcatcacaagttataaaaccccaagtcaaagatcaaatcatacacctgaatctctcaagtacccggcttggccctcttccaagtgtactttacttcgtttcattcctgctctaaaacttgcctccgtctctccctatgccttatgcccttctttcaaatccttttttctgaggaggcaagaattaagttgctgcagatccgctaacaataccaccccccctcccagatgtgacaactaaaaaggtctccagacattcgcaaacatctccagggcagcaaactccactcacgggttgagaatattgccttaggggatttcccttattttcttccaaattcattcaatcatttaaaatggtgttgtggtataagaaatatatttagtctttgtccctggttcctgtcacggacttcctaaaaccctgggaatttcctgaaggagaggagtgtcttttgttatttatcatgagtctctttcataacctctgggtttatgctaatagggtgatttagggtagatcctctaggtagcctcagtatggtgtcagtaggaaaggagggggctggatattaagctctataaaaactcttgaacaatcagatttgatgagcttccgggttgctagacatatggaggcgctgggaggttggcatgcccagagagggtatggaagttctgtaccaccactcctcatatcttgccctatgcatctcttccatccgagtgttcctgagttgtgttcgtataataaactggtaaatgtaagtaaagtgttttcctgaattctgtgagccattccagcaaactatctaacctgaagagggaatcacaggaaccccccaattattataaccagttggtcagaagcatggggacttgcgatcggtgtctcaaacagggctgtgttatgggacttgaacccttaacctgtggaatttgacactatctctacatatagtgtgcaatttaccaggcgcggtggctcacactagtaatcccagcactttgggtggctgaggcgggtggatcacctgaggtcaggagttcaggaccagcctggccaacatggtgaaaccctgtctctaccaaaaatacaacaattagtcaggtgtggtggcaggcggggcgcctgtaatcccagctactcggcaggctgaggcacgagaatcgcttgaatctgggagatgaaggttgcggtgaaccgagattgcgccactgcactccagcctgggtgacagagtgagactctgtctcaaaaaaaaaaaaaaaaaaaaaaaaaagaattcagttgaattacaggacacccagttggaaattgcctgttggagaattgtttgtctgtggggaaaaacccccacacatctggtcacagaagtggtctgtgttttatgaaagtgtagagaatatgagtgtgttttcctcagatggttttttttttaaatttatgtaccatttaaagatt

SEQ ID NO: 52825 - DNA, 3260 bp, Homo sapiens
ctgccttagttcaggttactacttttcttacacattacattactatgggcttttaaatggcttctgtgcctttatctactcacaaactattcttcatgctgcagtcagaagtgttctaagccaaaattattcaccttccaaaatgaagatctaattatgttcacaagtcctctccttcacccattcctcacctctagcattaatctaacactaggttaatcaaggtaatggggtagaaggtcatgggtaactccaaatcacactttaaatgaactctagtcaaagtactgaatacaatggatttaaacttgcttggtaaaactacctctaataatttaggaatatatttgccttctgtgaaagccatcgcaaagtataaaaatagtgtaagtacaggtatttaggctcacaaaatatcgttatgactgaaaaattggcaaaggttttttgtttgctttgcctcttcgttgagctctctttccgtaacaaatggaaatagaagcacacaaattcaagaaaggaggctctaacagactgaagatattgtggctttcaaaaaggagagaacattttagatgatatgaaggaaatgtcaccccgttactaagaattcactctattcgacagatatatacacgcttcagcaagtgctcctaaggatgagaggagagtaagttattttcatctaacagtctctatcaacactcttcttaaaacacctaatgcttaacaacagtctaaagaacacactggctactcatacctcccataggcagagaccttgtcctttttgagctgctgtatctcaggtaatcagcaatcacttagtggatgataataatttgcaaattcctctggagcctctaaagaccgtatcatgaatcatcaattcaaatgcctacaggagtcgggcaggtgatatgcaggaggaaatagagtcatttagggcccataacaaaggggagagaggccgggcgcggaggctcacgcctgtaatcccagcactttggaaggccgaggcgggccaatcatttgaggtcaggagctcgagaccagccagcccaacatggcgaaaccccgtctctactaaaaacacaaaaaaattagccaggcgtggtgatgcatgcctgtagtcccagctactccggaggctgagggaggagaatcacttgaacccgggaggcggaggttacaatgagccgagatccgcgccactgcacttcagcgtgggcgacagcgagactccgtctcaaaaaacaaaacaaaaacaaaggagagagtacataagccatctccaggctagtttctttaactagtcttcatataataatctcctcaaggtcctgttctatccctacaaaatacaaaacagttcctcgtgtcttccttcaaatatactacagtctttagctcatcagagtagctgagttagtccaaggcataatcccaaaagcgaaactgaatgtcagaattgatctcatttcaacactcattccagaagtagaaacttctgcaagttcagcttttgactatgaattcttcagcgcgacttttgcagagagctctgttccaagaagctggcgccttaacacaagctatctaccgatgcacaagggaaggctggcttgggtccagattcggcgggagagtggaaacgcgacgctggccgacttcagccacaaaggcaatttctgcccagggctagcgttcctaagagggggccgagagaacgccaggctcgggcgtaggggcaagaagacccagagctaacgcacctctcggagggcccaagctcagggctcagtcaccctcccagctcggagccggcgctggaacacagcggcgcgaggagaaacccctagagacagggaaaaggtggacgtagcggctgacgctgcccagacgctaggcgccgacaggagcctgattgtcaccgtacgaccagtgagggggcggggcggagctgtgcctcaaagcgcctgcgcggagagcctgcaatcagggaccaggcttgggaggcgacgaagaggaacgctgggcgcaggaggcccactgcatacgcaggcgcactcggcgatcccggcttttccgcgcgcagttcccgcacaggcatcggggggggcaggggcggggcaggggcggggataaatgcggagggacggtccagctttagctctctgctcgccgccgccgctgtcgccgccacctcctctgatctacgaaagtcatgttacccaacaccgggtaagggggtaggggcggcgcggggagagaccctgtcgggcgaaggacgcgtctcggtggggccgccgcggatcgcccgggctggccggcccggctgtgggaggtcaaggatactgcctgggcacgctctgagctctggtccgcgctgggcactgtgcaccgagaatctgcggtaacgtgtgaaaaggaacacaaacttttgtattacaggatggcagcagtgtagaaaccttttccacgggtaaagggccgagggggagtcaccacgccgcccccagtgccggccctccctgagtttagcaggagtgcgtgcctggccgaatgcgtgtgagttctaggtgaaaggtcgcaggagcagctccagagtttaaagagttttcacttgttcctgacgctcaattctagagtaataatggagtgtttaaaaaatgatttccaaattagaaactaaaccgatcttaaaacatgggtatctttgggggatttttttttcaccttaaaaaattgtgttaaaatacgtacaaaatctgccatcttaaccgttttttaagtgtacacttcagtagtgttaagtagattcatatcgttgtgcagtcaatctccagaacttttttcatctgcaagctgaaactctatccatgaaacaactcctcttccccacctccgctcgtacattggcaaccaccattctactttctggtttatgtaaggtctgggtatcttgagttgagtgacgtgttgtcagattttgtaatttgcctgaaacatgcaggcatatagccaaagacttaaaacagttcaaagagtatagggtaaaaagtgagtctccccatccctaaaatctagttccccagttacttacgtttctatttcgtgcatgtatgaacataatttgtatacatccggatacacacacacacacacacacacacacacataccctttcttaaaaatagcagcagactctattcttggtcttgctacttttagttggtatgtcttgggacattctttct

SEQ ID NO: 52826 - DNA, 2017 bp, Homo sapiens
aactgtgggcacacagcaagtactacgaaagtgttaggtaaaataaaggtggaccaagcctggtagcacctagcaagtccagcttcatctttgctgtgctgagtcgtgtaggtggtgttcttgtgtctctggtttgctggaggacctagttttagtgtattttaggtatcattaagcatccccgctccctcgatgggataggggtgtgtgtgttacaggtggttgttgggcaccttcacggggcagcggtgactatgggctgtacgtagtatctcggtagaaagtgttaatgcacatccctgggcggagaggtaactctactcaatgcgttataagggaaatcacacacctcacggatggtgtaggttctgtctgctccttgcgtttcagtggaggtgcacagagctccggggggcatcggggaccgcgggcccaggacgtgtagtagggagcagtgctgtacacttcctcggaccatagcggggacggcgggttccacacctgtcggggcagtagggactgagctcgtgcgcgcggaggatggattgctccaacctctcggtccagcgcgccggccgccgcgtgcgaacgtgtgtgcggcaggaggctcgatctacacctcctcggggcagcaacgactgcgagctcggtgcgtgccgtaggaggtgtcgttacacacttcctgtgggtctcgccgaccacggcgcgtttccggtgccggctggagcccggggtccgagcccccgccccgctcgccggccccgccccggcccgcccgcgccccgccccctgcccgcccgccgcgctccgagccgggcgcgcggagctcggggcgcacggagcggcgcgcggcggtcggccgagccaggctggcgcccccgccccccgccccgctcctcggtccgccgcccgccgggcgccttccccgctccacttacctttggtgcccggccctctggccgctctcctcccgccctcgcgccccttcggcccgtcccgtccagcccgggctgcccggctctcgcaggcccccccgcgccgaccgcgttcctatggacagacgcacagacacctgcaggtgggtgagagcccgcgcgcggggcggggacgagtgcgccgacgccgcgacccaggcggggagcccctttgtgtggggggcggccgcgccggggtcgactctgcttccccgtcagcggccgcgcggtgacccggctgaaccttccttttgtctcctctcgggggagcgaggccggagcgagggcagggacccgggcggccgctcgtcggcagcgccgggcttgggggtgcgaggcgcagagacccccggtggcggctccggtccgcctgccccgggccgccccgccgcccggcagctcgggtctcagcggcggctgcaggcgcagtgcgtggggctggcgcccccgctcctgctcttgggtctgtcggaggtgggaaggagggcgggaaggaggaggaaaaggtctgtcctcttagtttccaagtcttgagatgcttatggagaaagagaggtggttcagggctctgccccactagttttcctcctcgggtggctcgccgaggtgcgtttggggcgtgtgtgaaggaacgtgcatggcttcgctcccttatttattgtttctaacggaggagggctttctccaaaaggctcttccgcccccccacccccatctgaggctgcgcacagtgatttgtgtttgttatcaaatatatcgagaaatgtattcccctgggtaggaggaggttggactgaacaacgtcaaaccaaaatcaaagaatgtttttggttccttcaagtctttttttttctttaaggttttagattgggactttaaaaaaaatgaacgtggctgtgatttttacaattatatgtatttagtgtgtgtgcgtgtgtgtgtgtgtgtgtgtgtgtgtgttttgaagtttaggagtaaagttttgttttttcccgaactcgttaggattcgcaagacggaatcctctcccgacgaaataaaca

SEQ ID NO: 52827 - DNA, 1459 bp, Homo sapiens
aggttgtggtgagacgagatcacgccattgcactccagcctgggcaacaagagtaaactccatctcaaaaaaataaaaaataaataaataaaaggaaaccaactgtgatcctaataagtacgaataaaagactagagggaaaaataccacagtgttaacagagactatctattaagtcatatgacactgcttttctgttattttccaattataaataaaaataaattggcttgtgttacttgtttaataaggaaaatggagacttttttacaatgtagaaaaggaagctaaattgtttattccattttagatactgaaggttaaaaggtcttttgaagacatagtccataattcaggttgtttttcttcactgatgaactagtgaaccggttcctattttgataattacaaccctttaaagtttacagaattgttcatgtatcttatttcgtattttaaaaaatctgtatcagttggattttcactttatccacacgaatggatcaaagtccaaaggttaacgctcatgttgatgtattgaaaccatgacttcattaatgtctgatcaactggagcagagttggagaccgaggaccctaaagctcttggagcaaagcttgtgcactggaactgctgctgccatggctggggttgctgtcagacctcaatttgagggaccgcttcacattcctctcataggagactgatgacctcaatagataccttggggagcctgtttggattaaaaatacctaacactgtctagctgcttctaattttttttagcttctggtggtgagggggaggtgaattgagttcatgattcaggcttggaagttgcagagtagcttttgtaggctgatgtctgtgggtgtcctctggatgggtcatatatggaagattatagtttacaaaagatatattccagtcttcaaataatttgcaagagtagcacaatgaaagggagatgcattttaaatcttttattaaatcttttattttttaagtaaaataaatgatacttttcttttcagtttaacatttagagatacattcaaagggacttctttttgtccttaaaccagaggaaaactctttttttctattatggcccttatccctagggtagtggccagtgccctgcctctttcctttctatcactaggaaatatcattgcatgcaagagaatagggactggagtgatcctttctttgactgtttcctggagggagactgttgtaatagaaggttctgatgtgtgtataaaacagtagtgggattaccacagcactggtagtccagctctggagttaggattgcaacatcaaaaactgggccagcattcaagtcgtctcatttcatggtgttactgggattagttcctccagtttgttagtgtactgctgtgtgtggtataagctagtgtacctttcagcagactgcccatgaattcttcat

SEQ ID NO: 52828 - DNA, 869 bp, Homo sapiens
atcacttgaaaacctgggagacagagattgcagtgagccaagatcgcaccattgcacactccagcctgggggacaagagtgaaactctgtctccaaaaaaaaagcttcacttcttaaaaccgcaatggggattagtttcaacgtgaattttggaggggatacattcaaaccatagcaccaagtgaagtttaaaatactgcatgacatcttgcatcttccttaagtagacctcagctggctgtcaatttctgtccctgttacctgcaaggttgactcagctttcggtttctctctaccacgcctccatacccagggcaaagtctgctgcctgcacacaggtagctactggctgagttctttgaagggcactggggttcggtttgaaagttttgctaccaaatacacatgccctttcatattcacatcactcctacttaattcacaagctttgctctccacttttgttgtaaattgtatatagtacagccctctcttcacttagacttctttgtaaaaattataattttttgtagagatagggtcttactgtgttgcccaggctgttctccacctcctgtcctcaagcaatcttcctgtctcagcctcccaaagtgctggaattacaggcgtgagccactgagtccagcccacttaggtttctttagtgaactaggcaaaagattgtacaggctttctgagtcagtttgattgcaatgaaaacgatgcatacttgttgaaagattttaatctagggagtgttgcagttggattgttgacccctcccctctctgaatcattgctatgcttaatgtaatcctgaatgggcaggagtgccctctgttcttgtcagattgggctgggggtagtgg

SEQ ID NO: 52829 - DNA, 866 bp, Homo sapiens
cagcccttttgcaagggaacatttcgtagtctcttctgttgtgttgtaaggaatacagtaagaaggaatgatacttggctttgccagtaccaaatctgtattagtcaagattctccagagagacagaactaatagaatatgcatatatacatgagagggcatttattaggggaattggctcatgcgattatgtggctgagaagtcttacaacaggctgtctgctagctggaaaccctgggatgctggtatagtggttcagtccaaatccaaaggcctcagaaccagggaagctaatgatgtgactctcagcctgaggctgaaaggccgggacctgggaactgctggcgtaagtcccagagtccaaaggctggaggcctccagttctgatgtccaaggcagcgaaaaagaagcctatgctagctctcagagagagaacaattcaccttctgtatttgttctgtctggggccccagctgattagatggtgcccgccaatattcaggcgagatcttcacataatccactcagactcacacactaatctctcctggaaacagccttacagacacacccccaaataatgctttactaggtttctaagtcttccttaatccagtcaaattgacacctgaatttaagtccacaagttcaccccatgtcagtttatcactcatatgcatttccttaaaccatacttaatttccaaataaagacaataacaaggtaatagttccacctaacatgatgtagctatcctatgattgtgattttggggatgttagactttagggattttgatctttcgggatttcaacatttggaactatggcgttcagaattttgtctttcaggattatgatgcgaa

SEQ ID NO: 52830 - DNA, 1469 bp, Homo sapiens
atgttcataccatttagcattactgtctttaataaacgtcattaggttgtatttaccaaatatatcaaccaattgatagagtcaatataatcatggtgctaggaagaaaaatcattcatctatggtgtctctgcattcgtctaaaacacatacccaaaaactactgtgtacactgaaagctaaaaaaggtaaaggagtactgtatctgctctgcaccatacactgtgtaacatgctcgaaattagttcctttatttatttatcaccattttatagatgaggaaaccgtacccagggtcatagagctagtaggaattatttgggctgctggtttccaaacttcgtgctttcgtactaaatcctggggagatccaagatgagcaagaccctaatcctgctttcagaagggaaaataaagtcttattcaagcaaccatactattaattaaaaaaaaaaaaagcttaacaaacccgctctttaaaaggtgggcacagtgccggaggcaaagaattgatttcattggcagcaaagagtgatgccttagtctagggagcccgggaaagacacaagggatagaaaacagacaccggtttttagtaaatgaatcgttaggtgtctccagcggctgaaacacagagcgagcaatgcggggttaggactggaggacaacagggccatcttgtgacagggtagactggcgtgccagaaaggtccctgcctacggatgtgcagagccggctgggcccgggctgtgaacgagacgaaggaagcaagtaggagccagaaatgttaggtggcaaggtcggaagggaggtcgctgcctgtagcaacaaagacggcggcgacaggttagcaccggagccacacttttctattgcccggtgcctccagactgtcgtacttacctgggacccgaggacaccgggaccgcctctccttacaatcgctgctcttaaagggggcgcgaccacttaggcaagaggagctcaactcgcggcactacaaccttcccgcccccgctgcgcttccgcctcctgactgacgtgcgccccagggagcggaaaccccgcctcccgccgggacccaacggccaccgcccgtcgtgattcgcactttagcggccacctcagtgcagacgtcacttttttttccaaagagtgacagtcgaagaggctcacgggagatgcaaacggtacttttgggggctgggccagggtggggcgtggcccggggcgggggaggggcggggctgccaggcaggggcgggacggagaacacctgggtccctagcaccaagactggctttttattcattgccaccgcctggccggtcttgcgacggtgcgagtccacctcggctgggcctcggaggaggggcgactctagaagctaaactcgctttcgagctttaacaaccatctcggattgcgcatccgcacacacacacacacacacacacacacacacaca

SEQ ID NO: 52831 - DNA, 918 bp, Homo sapiens
tgcttgcctatatcactgcatgccccatggtacctcagttctcccaccagattcctctattcaaaagattataaactcttcatttatatagcacagtatgaagtcatttgggcttcattaggctcagtattgcccatagacctaagcaaacaggagggactcttgccgccacattttagaggatccagtacacacacgcgagcacataaatttgttaaaggacagatgagaacttctgtgcttgggatctggcatttggctctggcacagaacaacctggaactttgaacgtctgcttctgtgactaacaccatttataccctgtggaaacacctcttgccctgtgttcttgaaagaaaggcggctgggttggactgctgtgaaggtttacgagttatgcctctgtcgaggtcagaaatggacagtgcattttagtgccgggaattgttgagcagcagaacttaggtaagagaaaaggcaaattattaacttccaaatacctcctctcagatcagaggaattcagtggaattgtgcacaaccgagaattgtttccctttagtgagagtccattttcctgttttccttattctcatttgtgattctggagctcgtcagaattagttcactattcacaacagttgcactgttggctaaggaactatttctgcaatattaaatatttgataattcctgttatatttgtgtgtatatatatataggtttataagtaacataagtgaagcttgatactgattctctagtaacaaatatattgtattaagataatacaatttgcaatacatataatttatgacaaagttaaaaatatcctactattctgtgataattgatcttatgtattatggactgaatgtgtatgggatctttggggtgtcaattttctggccagaaacct

SEQ ID NO: 52832 - DNA, 2189 bp, Homo sapiens
cctccctacccattactttgctagagggactgaaaaccctttaaagacttggccttggaaacagaagatctagggacaggtaaggtggaaaaaggaggtgaacctacaccccaaagggctggaagtaacaccttgactatttgcaccacgccagcaaataaagctgagaatcagctcagcccaaggcctggaaaggaagcacaaatgcatgaagaataacttgaacctcatggttctttcaaaagtctcttcggccaaagtgtgagttgaagagtcgcatatcatttgagactctctactcatgctcgctgttctgaggtttgactttacacaaatccagctcagctgcagaagcaagccacaatggggacctcagagtgagcctgaagactccccacaccgcctctttgaagtcccttccaggttccccacccgatgtcctctagctcatttgagccttgtcgccctttatgctattcttccgatatgggtcgtaattccgtctatctagggttcttcctgcgcgtgccttagaggccagaagaccctgactcacgtgcgtgtcctcaaagcccccagccccaagcgtggctgctggtgggcgcatcagtaaacgcgggtggaacggaacaggctcctccaacctcttttccacctctgatttccgttagacatttgctccgcacggcggcctccgcgaggcaacgttggacactgggaggacagccgcagaggcccagggcgcacttcctgccgggcgggggcggggccgcgcctcctccctccctccctccgtccttccttccccacgtgccccttccccgccctccccgccccctcccgggcggccgcggcgcctcgggggcggggccggagcgggtgggcggtgtggctgtgtgggctgggcgccgcggccgtgctgccagcggacccgcggcgggctcgggcgcggagcgggggcgcgcggcgcggagcggagcgtctgagcgccggcagagaccagccggcgggtggcggcggcccccagcacggccggtgcaaggcctcgggttaagcggcggccgagcggggctcggcccggggtgctcggggagctcgccgcggcgggcagcaggaggaagcggcggcggcgcgtcccgagcggtgcgcgccatggcgggcgggccccccaaggccctgccgtccacggggccccactccctgcgcgacatgccgcacccgctggccggctccagcagcgaggaggccgtgggtggtgacagcacgcccagcccggacctgctgatggcccgcagcttcggtgacaaggtggggcgcctggggccggggagtgggaggcttatttcgctccccgtgggggggatgatggatccggagccttcgtgggcctggggccgcgcccaccctgccgccccttcccgggggacgggcgtgtcctggccccggagccctcggcgaagcgtctcctctgccgcctccgcggggtcgcagccgcagagggacaggcttcgctgcctgtgactggtcgcaagcaccggtgacagctggtggggaggggtccagcctgcgtgttggagcgggaggcgtgtgttcagggcagggcgcctgtgtcctcggatggggttccgagttcctccaggtgcatccctgcaggctgagctgctgcataacttgtagctcctccagtttccgagactgcacagaaagcaggagttcctggctttccgtgctgggaccgggcagccctgggcttacagcgagagtcttcttccccctagtcagtcatgtggggagtgatctttgtttaggtttgctgtttgtcctgaggagtcacctgactcagaccccagccggcggcgggaggagagcctcgttgtggttttctgtctggggctccattcacctccgacggcctaccactctgtttaggtttggcagaggctggttttgtggttgatggaaagaaagctcgccctttgaccttctttgtacggagggaggctccagattttcttagagcagcacaaccctcctgctgcttggagagacagcagagtccaggcaggggtaagggacgacctcctccctacccccatggccatttcagctgtgaaggagacttgagcagtgattgtatccccgctcctgccgtcacttagtcactaactgcagaaattagaattgttctc

SEQ ID NO: 52833 - DNA, 780 bp, Homo sapiens
agttccagggttgtggtttggcagaatgtggcaaattaagcaaaaccttttctattttcatctaatctgcccccgaaatgagcagtgatctattatctttactttttgtttatttcctctttggcaaaacttgtcagcatatttagcagaaggtggagacaatttcttttcacagatttggatttagtagcaatatcctaagtggattttttctgctaaaagaaattgttagagttaagcttggaggaaatgaatcaaatgtttctaaacaattctgggggatagttgaattctatttcctgacggtagggaaaaaaaaaaaaactggcttttttttttttttttttttttttttttttgagacggagtctcgctctgtcacccaggctggagtgcagtggtgcaatctcggaaaactggcatttttattccagctcgttgaatttttaactgggctaagtgtcccagactggtctattctgtgttggtaaactctgccatttggctgttgtgtttggtggaaggaaaatatgatcttgcctagtttggttattctaagagcttttttccttcccttcagccaagatatgctattcccttatgcttatttttttccattctcttctttgcagagtactcgggtggagtttgacctgccagaatattctgttcgtcgaagataccaggattttgactggttgaggagcaaactggaagaatcccagcccactcatctcattcccgtaggtagtaagtcactacagcttgtttctcacttgt

SEQ ID NO: 52834 - DNA, 756 bp, Homo sapiens
tgctgccataggtgactacttagatacatttgcactcaaactgggaaccattgatcgaatagcccagcggatcatcaaagaagaaataggtgagctgtctgttgaggtctcgattatgccctgcagccacattggcagaaatgccattcatgtgtgctacagagaatcaaactgcaaaatgctggagtgacagaactaggccatcttttgcttatcaaagaaatacaaggaggggaggagttacttgtgactggaatgtcactttgcaccccgtcctttgtcctgctgtgtcagccttgtgtttgcttttcccatggccagcactgctgattcgccaggtgtttcctcttttatgctctcttaactttagctttaaaagtggagacatagactcaactgcccttcatccatagggaacaataatttagtaaacaaacttagataccttttctggcagaaagatggttcagaaagatagcatggagacctgtgtttgccaaagttatgaccctgatgaatcttcagacttgtaattgactcacccaccccaccgtggttcattttaaacccactcctgcatgggggagttgccagggcctgtattgatccttcctcgtttttgcctccacttccttcccacccctctcggggccacctgctttgccacatcccataatgttgggatcttttatctccttacatatgcatggggcggacagacgtgagcagtgtaaatgatcgcactggcatgggaag

SEQ ID NO: 52835 - DNA, 1536 bp, Homo sapiens
aagatactgctaatcaaacttccacagacatcaccgtcactgactcccaagccccaatctctgatgctcccagatgctcccaatcactgaatttcccaaatcctaacactgaccctctttgataacccaggctctaaccaccacaggcacccataatcgctggctcccatagacatcccaaaccgccaacccccacggtccttccctatctctgacacatcacaaagcctccatttctgatctccttccaaactccgacactcggtgactgccacagacgcctccccatcattgtctctgcagatccctcctaatactgatatcctaaagccaaatcattaaccccacagataactcagaacaccgacctcccaaaagaccatctagcatcgattccaccaattcccaaatcacctatcgtcacagactactccaatcactgccccgcaagtacaccatctctgaccgccaaaacaccctgtctcatcacagctctcaccgcggcgctggcctcgggctcggacacagccatctccagtggtcgcccggcctctttggtcgtttccgcacttctcctccggtccacggtctctggctttgtcagaatctggacgccgctggagaccgacatggcggctacccggagggcggccttagcgggtccggcagccgcgatggcggcgcccttcggtaatagcgcacgggcgcggccatcttggcaaacactcagccgtacagcggaagtgcggggacttctgggacaattagatcgggaggtggaagctggcgagggcgttacttgcaggatgcaggagtgatgcgatcagagccagccggaaccgagttccgttacgcactacaggactgacctgggcctgacaacccactgccggagttcggatcgcatcactgccggaagatattttacagaatttggaattgcttttccgaatacatgtcagtgcggccagcggctagaagtccgggaatcacaacgcttagtgcggactttagaaaggcaggatgcgagaaattggaagcataacggagaaaagcctgatcgaacaaataacattattttatagggagaggacgttaatctttgagatatacgataaatcttttcatatatagtataagaacaataagaaaaactgaaacagaaacttaagtaaacacaccactcctccgtgagagcccgggtttggtgaagatatttcaccagaataatcaagcacttggagaaataattccttaatgcgccatttcatgcattaattgcattcattgaatatgtgcaggttaggtgctgcgctatgcaaggtactggaaaaagagtggagaggggtagggatgatgtaagtccagagtccaaaggccagaaaaccagggtctccaatgtcaaaaggcagaagatgaatgtcccagctcaagaaaaaagaaaaggtgggagggaagtggggatacttaacgggtttttaaaaaaaaagaaaagaaagaaggaataagacctagtatttgatagcactacaggtg

SEQ ID NO: 52836 - DNA, 836 bp, Homo sapiens
ttgtcaagatgatctttgcacaaccctctgagatcatttctctcctttgctcagagatatttaatgcaggaattgctgctcttttcttttttgtgaatctgattaaaattatggatcctctcgagagagagaagtgcccctgcactgacgcacataaagttttgcatataacttctgtggctgttttacacccggaagtctatgaatccaggttgcaaaaatccagaaaaggaatgtttgaactctgaagcatctcagaagccaagattatgatccttgattacactggccaagccagtctagacagtgccagtagcctgccctgtctctcaacttctggttcatctccagggaatgttcagttcagacctaccaaagttgacagtccaggcaaaatctgcctttgaatagcagttccctcaccctcgctgctcctcggacactctcagctgccctcaatgcatggcactggtgtgggaataggtacaatggtgaagcagtcagaggcaggtggagaccttgtggtgatgaaatcagagctggcttccagctctgctctgccaccagtactgcttggtccttggcaggtcaggtcccttgatcccaggccagcgctcctccctccctctgctgtaccactgacctaggctcatctgcagagccacgcctggaaagtcacacttgaggaaacaggctgcctcctaggagagatcccagcttgaataaaggctcccactaaatccaagaacctcagagaagggcaacagtgcaggtgtggagctcacactgtgctttctttcatagagcataacagatgttctgtactgtccctaaaa

SEQ ID NO: 52837 - DNA, 1735 bp, Homo sapiens
tggaaaatatttttctaaaaagaaaaatgtaattatcttgtaatgactacactaaaaatctagggcataattgacttaatttactccaaatgtgttgctattgcgtccatagcacggacttgcccatttcaactcaatatatgttacgcttggggtagtttattacaatgagcaataaacattctcataatcgccaagacaagccaagtgcaaaacaggaagggcgaagacagagggcagcaggtggtccctctcgctcgcgactccgggaacgccaagcctcagcccttgggaacctggggcgaggcgcctgggtctcggccagggggcgcgcccgaggacgccgaagtagggcgcgtgtggggaccacaactcccaggcgcccgcgcgccgcctcgcccggaccacgtgatccgtgcggccagggtagctatcgcggcggcggcggcggcggcggttgaactgactcggagcgaggagacccgagcgagcagacgcggccctggcgcccgccctgcgcactcaccatggcggtaagggccgggcgctacggtgaagagggtgggcggttggggcggggtctcctggagctgccatctcggcaccccgaatcctcgctgccgctggcccggggctggtgaagggtgtgttggcagcattgccaacagctggaacagggttgggggacgcggcaggtataggttgcggtggctctgtggttttcctctttatttgtccctcctgctgggaggcagtccggctaggcgagcagttaccgagcgcccgcggtggcgcggcttgagagtgggggcgcggtggctgaagacagctgggtccggggcccccggccccggacctctggccggcgccccagggcggagagcagcgccttgggagattccaggaaggcttccacgaaagggaaacccccggcgcatttcagcccgcagccccgcgcgcacaccgagcgcacatccccggccctgctcttgtcaagtttgtagcctgattcttcggggaataaaacagaaccagctactttccagcttccctacactttcagtcagaaaacagcgtttcagacaagctgtttttcttggtagggttcacctgggctggagagaacgacagcttgcaagactcgttcgtctttgaagaagtcatatcattttcttcatcccatgaagaatgtcatagaatttaagatacaggaagctcagcctgggcaacatagctagaccccgtctctacaaaaattagccacaagtggtggcaggcgcctgtaatcccagctactcggaggctgaggcaggatgaggaggattgcttgagcccagaagttccaggctgcagtgagccatgaccttcggcctgggcaacagaacaagacgtcctcaaacaaacaaaacaaaaaaaaaaagatataggaagtgtatgtaggccatttagtgaaatgatcagccgtcctttaaaaagggaaatagatggaaagcacttgcaaaagttccccagccagtcagcctagcaactgggaccttcatctccttcccaacccttgtttacaaataaggaagcttttctcaaagtgtaagtaaccccaaatgaagaaatatagaagaaaacaagttccagggattgctccctccttcaccacagccccaccctgaaaaaagcacaaatcagttaaactttcagaggccaagattcatcccaagtaggaaaacaagattggggc

SEQ ID NO: 52838 - DNA, 670 bp, Homo sapiens
ctctggccagggcaggtgtctctcaggcggcttggtccccagcacccccagggagcctccactgtgcctccctttctctgacctacaacctgttgtaattatttgctcacttaaatgtcccccctcatagacaggtagctccctaagggccaaagacttgtcccattcatctctgtatcgccagggtctgcacagacctagcacaacaaaaagaaatctttcaaattactcttactgttctgtgggtgttcaggtctatggcaaaacatgtctgggctgttttgggctcctaagataactggcccaggcccaaggatgatagaaggaaaccagttatggcaactccctgactgattaattagccactagggacattccattcataccatctgctttaccaaatggactcagagaaggggtgatgggtgtcacccctacctctacctggcagagatggtgctagaggcttctgctgaggatgaggccatctccggtgtaaatggagtttcacagtattgtttgtacctgtttggttttgtatatcaatcttgcgtaaacattttgctgtgtcaaaatgttttttttttttttgaaagcctaacaggagagatctctgagtagtaagactcaaaatgattttttactttcttttcggtactgtgtcagcttt

SEQ ID NO: 52839 - DNA, 2849 bp, Homo sapiens
aactgaagaaagtgtatcttaggtcactacccagtcatctggtgagataattaagcagggattcattccccattatcaggcctattgtctaagaagtttttagattaataaactctgcttagcttccattgagtttaaagaagaagtgctcactgagattccaaaccaaatctgccaatttccaaggatgcctctcccctgctagattctgaagctaatccacgagaccaagagctctcatgttcctttgagtctcggtcacctcaactgtaagaggaagataataatatcacttcatagggctgttctgtggactaaatgaagtgagataggtaaagttctgaaaagctagtaagttacaggcctgacagatagtaagcgcttaataaacagcagcttttattttaatgaggatggtaattcttccttgaaataaggaagtctagctcatttccagggatagatataactacgcatccacttaaaaaaaattcttagtctacagcatagtaattctccatggaggagaggagggatggggagaaagagggcaacagtgggactttttccagtttcgagactccccatgttaatgaggcatagcctatccaccatcattcccacacctccattaagcatcacaaggagtgagcagctgttcccagtgacagtatgccttatccaccaagtgtgttgaggcagaagaaagggtctgctacccctggcaaacaggctgctgccattgttttctgtgataacaggaaaaaggccttctttaagaaaagtttactagatagcagagtcaagctacattttccacatggttccacttttaaaccataccattctgctgaatatactgcagaatgttagcctgccaacttttagtagaaaagaatacagaagaacgcgaatatacacgcttcaactggatatgtgtgaaaagaaaaggaaacaaacattgattgcatctttactacgttgtactaggggctctacttgttcttgcatttaatctttatgacactggaacgtaggttatcctttgcctggtttagagatgagaaagtggtaaccaaggaagggaaaaaaattacaaactctgactttggggaactgctactgtatgaaatgtacaggaagaagaaaagagactgactagaaccacagcaaattataggatataattaatacggttataaaatgttacctgaaaggattgggcatttccagatacagctgagtgggaatcgagagatgacacttgcattaaggcagcagaaggtgcctggagcccagtaacagatggctgaggtgctaagataaagggagacattttcactgttatccacccttgcttcttggtgtgagtctagactagcaccttacatactatcatgcttcagactcaactattttccttgcctagtctccctacactcagctctactgcaatctcaggaatgagccagtggaaggaaactgggtgctctcatgtgcttctgactcagccctaggatcccacccgacaggaagtgcagaacacacccagggagatgtctcaatagctgagtgcagatttccaaaactgacagtgcaacacagcagaagtcacaaccagcagccaggtccatctctgggtatgaaaatgccttacccagggacaaactgacaagcgtcacactcttacatttacactttagtcctcagtactgaaacaatgcagcctaacagtttaaggaacagtgacgataattttcatgctgacccagttcaaggccacagagcctcagagaggttccttaccctgtgaggtcatctgtggtaacgctggatgggccggatgaagagagggctggacggacggagtcaccacaggctgcccacctccttgcagagtgttcacatcctgaaacaggaacaagcgtttgggttactctgtacggggtccctcattgaagactgaggctgactgtctgccctaaacctgcttccaacacaggatttctaggcaaagaagaggaaggaaaggtaagcggaaggccaagagttgagggtgtgggttgtggagaaaaagcactctgctatgcaataaagtaagagtccttctccctataatcatattgaataagtaaatatagttaatttccacaaatattctcagaggttgatgttctattgtctgaagcagctaaactaaccactcttcagaatgtatcattttccaagccagtaactgccttaagacaaatctaatctattcccacaaaaaaagtggtcttttgcaagaaataatccagcctcttcgcttcttacaaatcatccccatagtcctcaaggtactcaatgaaaatcagataacgtaggattcactgcacctgattaacatgctgtttttggataatatagttttaggatgtttttccaacattctttattttcataaaaccaaagcttttcataaaatcaaagctataactctaaacaaagttattctacctcctgcttcatataagaaacagaaaatcttgaggcacaatatacagtgactgtaatctgctatgctatagttcaaagaccaaagtttcagacattcttttactttagaacttcaccttgtccccttatattctcttctagaaaaacatcccagttttagatttctacagctcttaaccaacctaaatgtctaataacagagtgaaaggaattataataaaatgatataatggaacactgggtttcctttaaaccactttatttacttaaatcatttatgttaatgtaaatgtttatgatacaacattaggtttaaaaatcaggttacaaagcaatatataaagatgaat

SEQ ID NO: 52840 - DNA, 3178 bp, Homo sapiens
tcatttttccagtacattcttcagcacgcacaaaatttgttaagcatatgttcaaagaaaagctctgcaatgatcagagcttggtagctcacaagtttggaggaagtcaagctgtccactggcacaacacaatggaaaaggctaaactgactactaaaagagacaaaacccttcctctctttaaagatttctattccaggctggtatatattaatataatgcttggggaaactggagaatgacagaagtctgttacgttggttttaagctttaagctttacaaagtgcaatttcgcagctattattcattcaacagccacttcctgagcactcactatgtgctaggtaccatgctgcatgctagacagaaatgaacaccataagcagtccctgtccggtgaggactcataatctaataggtgcggggtataagaatagaggcaaacacacctagctgcaggaataaggaagagaaagcaattcattctgcctgaggttgcagaaggaaaagcatccaaaacgtgacatccgagctgggccttgaagaatgctagagctgacccaccaaggcctggttctaaagtgtcttcgccttctccatggagaaaagaagtctcacatcagccccagctgactcctataaaaattctgaggcaggaagtctcatcagcaatcattcccatttcaccggagaaattgtgacccagaatgcaaaaggcaaacccagggctatcttcccgccaagagagatgccgggtcccgaacctcagatcggcagggtcagcacagttgcaagttctgcccagattctgagaggtgtagagcaccggaatgtggcaagggtctccccccggaagttgggaaaaggcctgagaagagatcgacccccctccaacaatccgccggtatctctcagccacgccctccagcgcatacttctcagtcactcacccgccgctcggcgagaggaaatcggtgtcgtcctcgtcccccgcaccgaacattgcgttggctttcaccgggttgcggggaggaagctgggtattcccagagtcccagggcctgtcaccgccgacgtcgtaaaatgccgcggcggcgtgctgctttccggcagggcgaactccagcacggtctctggaccgaaagtagactgggctctggagaaggtggggcaaaggcaaatgagaggctcgcgcgggcacgagcgccgagtgacgtcaggcctctccagcccgcagcggggcggagcttcacagccccttgcagggattggtcggtaatgctagggggcgggagggggcgggaaatcctcggcctcggtggcggtggtggacacgtcgagccgggtagaagtggaggggccgttcgaagagtcgtgagggggtgacgggttaagattcggagagagaggtgctagtggctggacttgacctggaaaggtaaggcttctctcggcccctctttcgcacccctgtgcatgggtaccgtccttttcccagcgggacaaggaccttcctcgccgctttcctcagctccgcggaaggagaaagagctcgggactggagggttaaagactggggcttcggcccggcccctgcagtggcatagccagagtgaccttgggccggggtgctcggtgcctcagtttccccgtgtatgcaaccggccatttgtccagttcttccatgtgcctgctggtccagaagattttagagctcagaggccatggatttcaatcccggcctcctcgtaatctcagaatttacagatagggagacgaaggaactaagcacccgggtgactagtccgaggtcacaaagagtaaagggcagactgagactggattcctcgtcctttgattcaggacatagtgagctagtgggtgaacaagaaccttatcagcccttaagcactgtgtgcccttacagagtgactattgaaagactgtagcatacacctcgaggaaagtcccctttctagagtccacctgtattctacgcggatgaggtgcagaagagctaagatattctggcggtgggtgatggaaaggaggatactttggaggcagacacatccccaccccaactttggcgtgggtttccctgggtcttcctgcgacagccctaaatcaacatcaattgtggcggactcctctgcctccagtttccaccctatctgtatcttacataagtatttctttggttaacctggtatcattctcgaaacaatcctggggtagtcctggcttagacaaggtgtggctaaggagatagtgtcccagcgtagcgtccacagactcactggagttcttgggcttcccctcacagtcaggttggtactacaggtgtcccttacgtgaatgtttcaatctgtcagtatgaaattgaaatgaaatgattggtagctccctcccagagaactttgcacctcctggcaaagatgttaaagcagcgaaggctcacagttggaatgatgcaactggaatctaagcactagaaccggaactggaactagaatctaaggactagcactagaactgttgcagtagctctgtttagtgtgtgaacttggctacctcttggaggtgttgggggagtaactggattaagtaccatggcactttctaatccctctccccaacaccggtcactgtgattgcagcactgaaacatctaaatgtttaacagaaagagcttgctagcccctggcttacattatctatggtatttttaacatggaatgaatacttaaagtcacttgcaaagcagtctcactgcagaatctttctaggtgtttatgacatgtccttccagccttttctttaaaaaaaaaaaatggccaagggaatatttgaactcttatcttgtattcttgggtggagctgattttatcctggatgtttaagtagcttttgtaggtactcaggaatcctaaaatcaatagcctttttggtgattggaacatcacgaacatgcatacgcagattatcactgtagaaacacagctgctgattctcattagcagtatgaggaggaggaagatgatggtgagtcttgccaggctttgaactgcaggactgggtgcacctaaaaaaaaaaaaaaagaaagccactgtcttcctaaattcgtgtatcttcagattggtaatactggactaggaatcaggaaatctgaattc

SEQ ID NO: 52841 - DNA, 1154 bp, Homo sapiens
gatacacaagacagctcagacaacaaagaattatccagtccaaaatgttgttaatactgaggttgaaaccctgagataggtgtttccccaaaagaactcaaagtgatagagtcggaaccagaatccacatctttgactcactctagtgtgttttcactatgtctaaagcagggcattaaaatctggattttaaggctgggtgcggtggttcacaccttaaatcccagcactttgaggggccgaggcaggtggatcacctgaggtcaggagctcaagaccagcctggccaacatgatgaaaccctgtttctactaaaaatacaaaaagtagccgggtatggtggcacacgcctgtaatcccgcctacttggaaggctgaggcacaggaattgcttgaacctgggaggcagaggttgcagagatcgtgacactgcactcaagcctgggcgacagactgtgactctgcctcagaatcctttttaaattaaaaaataagtaaataaaatctggagttcacaagtcttagattaatcactaatgttttgatgaggtatgagtgacaagtcgagtttgtttagatcactgttgaaggtgtatagtatagattatgtagtctattaaacacttgctgtgtgtctcacagtctgctgcccatgtccctcccagaggctagttcaccttcatcgtatttattgattttttattgagcaagtaccaaatttgaatcatttgaccaaaatgctgttgaaatctggacacgatccctgtagcaatctctatgcgtaggacctgttgccaaactaaaaacccatgggacttttacaggaaatgtcaccaggagactcagctagaaattagtagagccgggatttgaataccttctgactccagacttttttttttttaactcctacccctagacctagactcttaacaatagtctgtaagatcaaatgtcacctgcaaagggtggcatgtgacttttagaagctcttaaaatccaggaataaattcttcttactaattcttgtagaatagtcttaagttgtgcccctcaaaccattttatgcccagaaattagatgattcttctcatcttcctaaagttttaacagatgccattctggatcctggaaaattaaacagctgtagccat

SEQ ID NO: 52842 - DNA, 1177 bp, Homo sapiens
gctttaagctaaggaaatattgcctggtgggttggctgcctggtattgggcatggaaatttgaattgctgattggtagatggtgtgtctggacttaactcacgtagtaaatactgctgatcaatacctaatcattccacatttattgagctccacctgtgtgtatgtgtacccaagcacacatgtgtgaagggctatagccaaagtatttttactagcctgtatgaaatcactagtccttatttttaaaggtctatggtttcttggaagtagtttgattgttgagagagacctttgatctgcagtgtaaatctaccagtcatgggccagaagggcaaaagcccagctttctctttggaaagactcaggctgtggtttgttgatggccaggttttcctcaggctccaacaactgtgcttataccaagcagatcctcatcctccatataatcatctttgttattcgtgggggtttaattacattacaagtggccaaaacccctgttctcagtgaagaaccacattggatttgtattctgttcagttgtagtctacactgcagtcttattcctggttcaaactacctctttaaattgatttgtcttgtgctggtctgttaaatcctgccctccttggtgctagatccagttgtgcctcagggcagaggaaacaaaacacagctatcctgttggcctgtgttgtggttttgaagtttgtactttctctgtgggtgccagttaaatattggagagcaaggaatgtggacttgtatggctttgaaccaagagagggttatgagcctactggattgaggttaaaatccaagaaccaacatttagagctttgtgcttttctctcattccatcactttgtaatgatgatacttaacatgagcagggtgaatgacaggtactgacgaagtccaacacaaaggtataatacagcctgttgtctaaagccaaggagtcataaaaccatgagaaataaataggaatcaatagttagtagtgacattggtgctctctagaaatctcagcatgagctgctatagaataccctcccagcaacaaaacctaatcagtaaggccagctagacccaatggctcatgcctgtaatcccaacactttgggaggccaaggtgggaggatggcttgtgtccagaagttcgagaccagcct

SEQ ID NO: 52843 - DNA, 2270 bp, Homo sapiens
tcccatgaagcttaggatactacaggtgatattatcaacacaaaacactggcacattacatttcaaattcctttgtactaaatcaggcattatcttctaccagattccaatgcagacaaatggtagagaaagccaaagttccaaagagggaaagagagggatagggatacctaaaagggggaaaaaaaaatctatacattttaccttttctgcaaactgcaaaaaactggccactagggagcagtatagattaacagttaaaagtgctggctgtagaggttaaagggcacaggttttaatcccactacaccaccgatcctgaacaattcgtttcatttctcactagaccttagttccctcatctgtatcctactctgctgttgtaggaagtcaataacgtaatacagagtaagctcttggaatattatttggcatttaataaatgttcaataaataacatctattattgctgtaattgttctagggggttgcatgaggatctggccagctagggaaacgtcaatattttgaggatctcccaccgcccatgtggggataaaaaccttatcctgttcgtctctaatgccccagcatccagcagggcagagagacgtacagagttacctgacaccttcctatccatcatcttactctcaatctgatacaaagaccaggctgaagacaaatcaacaaaatcaggccgaagctcctccgccgggtctttatttgactttggcactagcgggctcttctagcttaatctcccgccgcagcccaaatccaccgccgagccatcaagctcagagggggagcctgggaagacttccggaccatggaggagaacagtcctcgtcccctagctccaggcctgtacctcggagcccaggcaagggtttctatggtaacatggtcctcggctccaagaagacgtaaacgcccccgtacgcccggggggcacagcggaccccggaagcccttgactcgctccagagttcagccccgagccgcgcgagtcgactcacctacctcttttcaagccggcctagccccttcccggaacctcggctcccccccaacgaaactactgctaagccaactggactacacttcccagactgcttggagcctctctctccgcagaacctcgtcttccgcgagcttttcctggaggttctaggagggatgcccctcaatgccacgacgccatttcctactacgacttccatcatgctccgcgccgctccgggggcggtgacccctcttggcccacgtcttgtcagtgacgcacttcctgtcagtgacgcacttcccctctgctgggcgcgcggtggacggtctgaaagggagtgttcgggtttcgctggggcctcgcggctccagagcccagcatggcttcctcgcgagcctcttccacggtacagagcccgggatcccagctcactctggcagggagcgctaagggggaaggggatctctgcgggaaggggccgttaaggagcgggagaaggcggtggagggctgaggaggaaggctgcgggactcagcggtgtcctacacagcggaccaccgttttcctgatccctaagcgctttcgtggactgtagcttatttgcacctctcccactacagccccaaagggcaagcatctcttccgactcatccagtaacggtgctctgaaatagggaagtgtcttggccaaggtttatgcctttggcagatctcagaattttaatgagacctactaactcctactacctcacgtctaggaacgtttgaaatgtatacacttgtaatgttgtaacttgttatcctttagcaccgcgttggttatttcatctatccttagtatttccccagtgataagcagtaatccgggaagcataaaacacgagattgaacacttccaacggaatgaagtaaacagatttcagagcaaacctttcataggaaaatacccgagagaacctcactagttttattaatcccatcaaccaaagtgagggactgaaacaccctcaccctaccttcacctcctcaaatcaatgaagagcgtcttaagtagtgtccaatttgtcctttcaattacagaggaaacaggactgtgaaactcagggtgagcttcatcctctggtgaagtccggtaaattgccaagattaaaccttagtttaatgcagatctttgatttagcaggcaaccaaaactaaagcacccgacgacttagttgctccggtcgtgaagaaaccacacatctattatggaagtttggaa

SEQ ID NO: 52844 - DNA, 677 bp, Homo sapiens
gcgcccggcctaaagcttattttttatgtgtatgtggaaagcggggagaagagtccccgaagatgggaacctagcgccacccagcccaaggttggccctcataaccgctctccgcttcgaccaaagggcgagggttgcccgctcctagtctgccgctatgcccctttctcccacctcaggctcagtacccaccggtgggctgcggggctggagctggggccggcgggaacgcggagcctgggggtgggaacagcctccgagccctcccgcgcctccgcccctagcagcaggcgcacgttgctagggcgggagtgctggagaaaagcctccgggcaccctcgcaggccgccgaaccgcagttccgttcgcctaaagctgggacgggaactgagcgcccggcgctactctcttcgtgatcaggtccagaggagaggacgcttgtgcccaggactccgctgccagaagaatctagacaatccaagcaaaacgggtacctttgtaatagctatggagaaagcacttaataaaggtcatcttttaaattattggtcgctcagacatacgtgttgccgtatttctttggagtttccctgatttcgactagaaattcctcctttggacactcccccagctccccactcctctattcctttcgttttttttttttcattgaacca

SEQ ID NO: 52845 - DNA, 703 bp, Homo sapiens
ctattgttatgaaggctacagtttatagagcacttacatgctgggcactttacatgtatgattctgtttaattctcgtgatcacccagtgagaagtcctattttgacccccgttttgcagacaaggctcagagagagtaaatggcttatatgaggtcaccatgctagtgagtggtgaggaaccttttgctacctggcaggaccaggttagggcaggggtgggccctcggcaactctgagaattctttctggcaggcacagaggacatacggatcgatgagaggacagtcagccccttcctgcaattgtcagatgatcgaaagaccctgaccttcagcaccaagaagtcaaaggcctgtgcagatggcccggagcgcttcgaccactggcccaatgccctggctgccacctccttccagaatgggctccatgcctggatggtgaatgtccagaacagttgtgcctataaggtgggcgtggcttcaggccacctgccccgcaagggttctggcagtgactgccgtctgggccacaatgccttctcctgggtcttctctcgctatgatcaggagtttcgtttctcacacaatgggcagcacgagcccctggggctgctgcggggcccagcccagctgggtgtagtgctggacttgcaggttcaggagctgctcttctatgagccagcctccggcacagtgctctgt

SEQ ID NO: 52846 - DNA, 2922 bp, Homo sapiens
cccaggctcagtcaatcctcctgctttagcctccctagtagctggggctacaggcacgtgccaccatgcccggctaatttttgaactttttgtagagatgtggggtggtggggcggggtgggtctcactatgttgcccaggctgctctccaacccctggactcaagtgatcccccagccttggccacccaaagtactgggattacaggcatgagccatcactcccagccctgcaagtcaagtttcaatggagatcagaagaatgaatgtgcaagaagcagaggtaggtgagtgctcccgtcagtggaaatagcaagtgcaaaggccctgaggcagggcaagtagacagaggccagctgtctggcacacaggacacaattattatgattgctattatcattattagggatgtcaaagacagaaggggccttgcagagcatatgaacgatatcttggctgctgggcagagtagactgagccagaaaggggcaggtacttacccaaggtcacagtgagtcagtggcacagccaggaccagaacccaaacttccagactctctggccagttcttccactgtaccatgagatatatttggattttaaaaattggtgaacctgtacagcacaggagaaaagacaggacacagcaggctgtctgtctctagccctctctgaaccccaacttttccatctttactggaggtaataacactggcctaggaggagagctgatgagagaactgactcaaggcacaagaaacaagtgactcagcctgctatccagaggctggtgcagcttctttccccagacagagctgatcccagacaaggccgtccccttgaaacctgaggggccagagttcaaagtacggctaagttgatacttagggaagggcgtcactggtaaatctgggggagccttggaggaagtttgtccaggaaatgaattaaggagactcatccaaagatcctctcattttgcaggtgggtagacagagacccagtgaggggcagtaatttacccccaaatcacacagggagtcacattggcacagctaagactagagcagagggctctggctcctgacccacggcttttttttttttttttttttttttttgaggcggagtttcgttcttgttgcccaggctgaagtgcaatggcgcgatctcggctcactgcaacctccgcctcccaggttcaagcgattctcctgcctcagcctcccaagtagctgggattacaggcatgcgccaccatccccggctccttttttttttgtatttttagtagagacggggtttctccatgttggccaggctggtctcgaactcccgacctcagcctcccaaagtgttaggattacaggcgtgagccactatacccggccggctttttttctttttttttttttttgagacagagtctcactctgtcacccaggtgtacagtggtgcgatctcggctcactgcaacttccgcctcccggattcaagcgattctccttccttagcctccagagtagctgggactacaggcgcgcgccaccacacctggctaatttttgtatttttagtggagacggggtttcaactatgttagccaggctggtctcgaactcccgaactcgtgatcctcccccgccccaccccgccccccggcctcccaaagtgctgggattacggtaaaggcgtgagccaccgcgcccggcagggctttttcgatttctaaaaccgcgggtttggggctctgcgctgcaggcacgaactgctcaccttttctccccacctccagggctcgggaaaggcgaagtccaggagcccggacctgacgcagaatgtctatagctgccgtcggcagcgtgagctggggcggcggtcctaggggccttggccgcggccgaccccttgggtccccttctcagctgtagggcgtccacggctccgggccggttcctgggcccaggacccacctgactcacaaggaagcagattgaaaacgcagccgcaaggcccgcgagctcgggcggaggtgcgcaagcgccgggcggtggggcggggatcgcgcgggccgcccctccctaccatcccgacccgcctctgtccccgccccgtccccgcccttatccccctcaccttcgccctctcccgccccatctcccgtcgccctcgccgtcccctctccctccttcgtctcactgtgcacctctctgcgcccctgtcacccgccttcactgcgcgcctccgttaccctgcaccatctacgccccttattccctccccgcaccctctgaggttccccagcccgcacccttccgctccgcagcccccgttaccagcaccttctccgccctgtctgcgcaccccctgcccgccacaccgccgctcctcaccgctgtctccgctccccatccccaaccccggctcctggcctcctttggatcgggaaacccccgagaagtacccaggttgagtgggaggaggggagttgggacccagcctggcttgcttagtgttgtgtgaacctgggcaaggcccagcccctctctggtctcagggtccccagttggtattggagggaattgctttcagttggaaacttgttaaatccaagataacttggtgagggtagagtccgctgcagtaacctgcttttttattctttctctttttttttttttgagacggagtctccctctgtcgctcaggctggagtgcagtggcgcgatagcccactgcaacccccgcctcccagtttcttgcgattctcctgcctcagactccccagtagctgggattacaggtgtgtgccaccacacccaactaatttttgtatttttagtagagacagggtttcgccgtgttggcctggctagtcttgaactcctgacctcaggtgatccgcccacctcagcctcccaaa

SEQ ID NO: 52847 - DNA, 628 bp, Homo sapiens
tgtgcccgggtaattttttgtatttttagtagagacgaggtttcgccgtgtagccagactggtctagaactcctgacctcaactgatccacccaccttggcctcccaaagtgccgggattataggcatgagccactgtgcctggcctaattttcttcctttcaactcttaaaaacaaaaaaacaaaactttctcctatgttccaagttggtctgttcactgggttcaggcctgggaagaaacacaaagtgcagagtcacagactttggacctgcaagagagagcccgactcacttgcaaaactggttttgtgttataagcatgaagcagaagtgggggtgggaagggcaactgggagaccagaggttcaactgcatttcacagaatccaagaatgtctgatactgtctacttttcagggtcaccgaaaacctaaccccttaggttctgatcccagctctgccatctgtctgtctgtgagctctccattcaattgtttttctctctgagcctcagtatcccaatatgcaaaatgtgaattttcccaaagtgaacatacccatgcaaccagcacccagaccaagaaaaagaacaatttccagaaccctccacagcctgtccacttccagt

SEQ ID NO: 52848 - DNA, 762 bp, Homo sapiens
tccccaattctctttgtataatttctatgaagagataagctgaggtctgtcctgctgtattcccaggacccagcactgaacctaggaacagagcagagattctcaaaaagtatctcctgaataaaaagtgtttgtggtggtggcacctctagcagtcaggaactccctctttgcctctgagttttgatcctcaggcagtatttatgctggttaatgagtaattcttctctgggtttatggttcagagtagaataggagacctcaggcagcctggcaacctctggcctcgtgggaaatgccttccagtggaattgcggcaaatttcaactctaacccagggatatcgatctaggcctcattcccacacccagctctgctgccagaagcgttccaaggcttctcaggccccaagatcccactgctctcttcttcccctaatgctccaagaccctctcccagccaggccccaaaggctgtgcccccgactccaggttgctttcaagctgaagccacaccagaggaaagagctgagggtggcaaaggtgggcctcacggctgacccaggggaggggcggggaagcttgggagagctcataggatgcagctgcgagttacaagagttagcatgctggcaaaaccacccagggctgctgggccccgctagcatgtgagcaggaagagggcatgagggcacagttctaaaagcagcatttactttggttttcacttgtctgaggccccgggaacgttttaaagttctag

SEQ ID NO: 52849 - DNA, 618 bp, Homo sapiens
gggtgaggacactgaggttcagagaagtggcttgcccacgttctcacaaccaaaaatgaagggctctgcttgcttcaccgggccgtgttctatgctgcagttccatatctcttcctcagtgtgtgtctgtttagatcactagtaattcccggaataagatcccaagctctcaggacgtcgttccccaatctaggcagagtgcttatcagtccctgtggcgcaggtcaaaacaccccacccttgcctgcctacctgctctgcggaaggcagtcatggcctccagtacggcagccttgagatcaaatgccccggcctgggctccatgccacagcatggcaaactctccagagacgtggtacacggcgagagggaggtcagggtgctgcagggaagcagacagggagacaggctgaaatggagggtggatgtggctctggaagcgtcccttcccccctgctcaatctgtgaccatcttgagccccgtgtcctgggttactgcggctggcagcctggcccactcttgaactgttaaagcagggctgtttgaggctcgtgcaagccccgacatagaaggccacgatggttcctgggcagggaaggggaggagaggatgcatgc

SEQ ID NO: 52850 - DNA, 790 bp, Homo sapiens
ggacatggattttttgttaggtacaatgcacaccaataggagaaaatagtaccattcatgttagatagacagacagacacatacactgtatagagtgccaccaaatcttttctagcccaaggagtttcctgggctccacgagcacaagctacaccttcttgctttcctaaccttgtccctttacctgaaaggctgtgctctccccacagcctccccgcacccaaatctacagggttctccttccctctcccactgaggctgtcttgtccagattgcagtctctcttatgtaagttatctgtggacctgtcttacctcatgccagtagacagagcttctgcagggcaaggtccagagttggttcatttttgcctcccctacagtgctctgtcacacactgaccttggcacacagtaaatatttaattacgtgaagtacaaaaatatgctccaaatgccaaattagtggacacaagacagaaggaagctggggcattaacatttgtttcttgagcacctactgtgtgccagaccatgcctggcattttcacaggtgatttctcatcaagtgggcactacagtcctggcaggcagggctgattgagtgcatggagcctgaccagaagtgagccatggctccaatgggagtgaggaggtcagaagaggcatattagaagaagacaggcgccaggcgtagtggctcacacctgtaaccccagcactttgggaggctgaggcgggtggatcacttgaggtctggagtttgagaccaggctggccaatgtggtgaaa

SEQ ID NO: 52851 - DNA, 1212 bp, Homo sapiens
caccgcacctggccgagagaatatttttgcatattgagagaattaccaaaatgtaagccagttgcccaagaccacatagctacttagtgactgagccagaatttgaatttgttctggactccaaatgctgggttttatatactgtatttcataatactgataaacacctgattcagtaggcgtctctctgcccatactgtttctgctttgggtgctggagagacagaagaaacaaaagaaaaacatactgagtgtattcgttctgtgctgggcacagcactgaagtacttggtagtagtatctcatttcattgcaagaattgtcctaacttttagtgataaggaaacagaggctctgagcggttcagtgacttgcttaatgccattctagagtctagtcagatgttgaagagaggtctaatctctctgactcacttcccacaaacaatctctgttgttttctggcttctgaatccaaagctgcattccactggcctcaactccccatcgcttttaggaggctgagggaacaactggctcctgcttagcagaaaccctggggcaggactgcctaggagcctgagaccggggcagggttagagtaaagggaacagtctcactacagcagtccactttgatctgtttttgaattttaagattcagagacagatttgatttgagaaacggctgtcagtgctgaaaatattaaaagcttgaaaattgccaatcctgtttaatcccttacactttaatgtggaaaatggggtataaagaggcaacgggacttttggagatcacagtgagtgacatacagagctataaactgaccctgcagctcctggcttctatttcagtgccctgatacctacaccatagagtcattccattgtaagaggtacttaataagtggagtttcccactccattctgtgagtgggaaaacaccccctgaatcacatattggcagagccaaatgcagggtgggttttgctttgcaaaaaggcccttagagtttgggagaatttcacagactgggagggcacttctcccaaatcaagcgagcttgcaaaccacaatttaaatgcctgtgacattaccacactgaagacaggagcgagccgccaggaggtccagcacctctgcccaaccacatcagacaggttagctttgctgggacgcagagtatagggcggtgcagaaagatccatgtttca

SEQ ID NO: 52852 - DNA, 1004 bp, Homo sapiens
ctccgtctcaaaaataaataaataaataaaataaatgaatggtcaatgcacgcaacgcttagtacaaaacggctgttattgttttcacctccctacccccccaccaaccaccacccgcacctcgggttctgcatcgatggagtctgcccaggcggtatccgagagggtgaaccccagagaagaggtgcggagccccgaacccgggcccccaacctcggctgcagcgggataatccagcccaaacaaacgctccacgggactccgtgcacggctgcaccgccagggcttcaggcgcacagcacaatctggggacgcaggactcttggtgccacagtccccgcctcgccctggagccgccctccaggcccgctatctccccgcatccagcccccgctcacctgcctccctaagggctcccggccgctgctcctgtcaccgctgtctcccgctccggtctcccacagaccgcgtaagagcggggggggctcacccggaagcagcttccccacggtccgccccctccacagtccaggccacgccccctgaaggcggtcttctggggggctcctccgctccagccgcggccccgcccacacgcaacgaggcctggccaattgggtgtgtcgagggcctggagggcccgcccgtccccgctccgggccctgcgcttgtgcagcgaactgcaggagggaggccacgagggggcgcaggaaccgcttgggagggtccctgggtgtgagccggcctcggaggcggttacagcccaggtttcacttcacagcattcctttgcccagcctagggcaaacttggctctggttaatggcttggtgaaagaataattggatgtcaaagccgttaaaacagcaccattatgcctaacacagtattagctaagtccatttttgcggactaagctaaagttgttgagttcagcgccaggcttccaagttttcagagaaaatttgtaccagcttcatttatttctcagggtacggcaatgct

SEQ ID NO: 52853 - DNA, 2381 bp, Homo sapiens
gcaagactccgtctcaaaaaaaaaaaaaaaaaaacaaaaacaagaaaagcaagacaaaaacaaaaacggaggcagagaaggaaaaataacttgctcagcattacaaaacagatctgaggtggtgcccaccgaactgggtcgagtcacatcaagtgctggcttactggacttaaagggacccgcgctgagaaggctcagggcctggtgaacaggtcacacaggatgaccatcttctatgtggtttagaagacaagaggctcgttaccttccagagcttctttcaatggggtaacgaaccgctggaactccatctcttccatggctgagagcacatcactggcattcagcgtcttccgctttcctttcattgcaaagttgttagcactgagagaagagaaaggctgtcagactccctcttgtttgtaaggcgtgagtgggaaaaggagcacccagaggtggaacgggaaagcctgcctcttacatgtatggattttggtgtgacagggataagtccttcccttctctgcacaaaaaagctaaagcaaagtgattttgttgtgttattttgcttcagaacttgtaaaaactggcagaggactgtgaacatgtccccaccgagggagaacacaatcgttggggtttgtaggctcccagccagcaactcccagccaggtatccccgcgcctcccttatgcctctgtcccgctcaccaggatgtggcgtacagcacgaagacgctggcggcgcgggagatggcgctccgggcctccttggagatgttgacaccgtccgggagctgcgaggagaccgggggtgagcaaagctgccgttccagcacctgcttccctcctgcccgttcgtccgccccccccgagctgctcaccgcctccttgatgatcctggtgatcacggcattgggcaggtttaggtcctcgggcctctccgccattgccgccgctggggcttaaactccccttcgcctccgcttcagggagctactgcgtccggacttcccgcgtcgctacggtctgaccctgcgaggtttccgttccgccccacgtggcctacagtgtcccacagtgctctgagcgccatagcctccctcctccccccacagccccgcctccgcctcaaataccggcgcatccggattttgaagccgcagtggttttggcccgccaaggcttccatccaaccctaccgcaccccgcacgcccctccccaggtccatttctctgcttctcgccatcgccgcgtcgggaaccttctcaccaacttatttggctcaatggagcttccgtccgtttcccatggtgccctgcgccgctgctgggtgacggcgcggccgggcgcagcgcgtgggagacgaaggcgtggctgactcggcggggcggatccctttaggacccgaggcaggctctgggcccgccgggtccgttaatctcaccgcgccgcaaggggccacgttttaccacttgatttagcaaccctaagcggtttggaatctgctttgctctcacaggacctcagcccgtcgtgatcagattctcccactttcttttttctttcctggaatggagtgggcagtctttttccatctctaccgaagttgatgttcatttttaatcttttcgcccctcacgcttttgtaataatggtactaagactgagtgttatttagattttattgttgttgtttgtgtttaacgcgaactatttaggcagcccagggataatgctggccatatagagatgcgcctgattaggtctcaggagtcaattcggactgggcaggtaacgaaagggcgagaagcagccttttcactgtatgaagaatgcaacgtcacattcgctttcaaaaacaaaccgtgttaaaattgtatttatttttcagttaaattgttcatcatacattttttccagttaaaaccattctcaaggttttgcaatggcgtttctttttttttttttttgagacagtctcactctgtcgcccaggttggagtgcagtggcgccgatttcggctcactgcaagctccgcctcccgggttcacgccattctcctacctcagcctccttagtagctgggactacagacgcccgccaccacgcccggctaatttttttgtatttttagtagagacagggtttcaccgtgttagccaagatggtctcgatctcctgacctcgtgatccgcccgcctcggtctcccaaagtgcagggattacaggcgccagtcaccgcgcccggcgcaatggtgttttaagttgtttttaagttatttttatattaagttcgtagaaattctcactcccactgattttatttattttttaatttttaaaatttcttgacagggtctcactccgtcccccaggc

SEQ ID NO: 52854 - DNA, 1404 bp, Homo sapiens
gattattccccacaactgagggaagacccttctgagtattctatctaatacctcctaaggaattagaaggtctttccactctggttgatgagcttaagaactattcctggccctgtgtgagctttaaagattgttccctgtaattctttggtggttctttccccagccttgggatactttcctcaaacccatgagctcattagcacttagctgaagttgtgagtggggactctctggagacctctggggccctctctttgtgtgactgtctcctctctggtactctgccttggaactctagctgccttggcctcccgaacttctcagttcagggatttggagttggcctgagttccctctcccttttggaaagtctctcccgggaataagctgggctgatcacagggcacagcttgtctcttttctgtttctcagggatcactgtccttcgttgcctgatgtacaatatcttaaaaaccattgtttcatatattttgtccagtcttttagttgtttcaggtgaagggaaaatccagttcctgttattccatcttggctggaaacagaagtctatattgttttttaattttgaaaaactgagggcctctggaatgtaggattatgccaggccaagttgctcattatcaggccaggaaaagcagctcttgaagaggctgaaagggcttccagcctaactgcgagggtgctgagtcattctagcagagaccaggcactctgcttttctggctcttatcaagtctttagcttttatctttggactcaacttactagttcacattcctttggtggtgaaggtttggtctcttccactttgaagcagtatctctccgcttacacttgaaatcttgaatcttttacttggttctctttagtccctgtttgtgtatttaggtcactagaggcttctacatctggggcacattaaagttcctcagtggtatttacagcaaccagcatctgtttctgtagagaacaattaacccaaagataccaccttgttctaccttgaagatgaattacagagacacttttaaaaggcaaatccttcatttcaagggtgaataaaataccacttaacaaagcattccagctggttaaatttaggacatgaaaaaaacctgacccaagaatatcgtctggctttgagtccagggtgtttttccttttagagtaaatttggtaccttttcattcatgtgaagttgttgccccccagcattttattctgggatgaaaggtcaacagggactgtcttgttgctaaatctaatggacacttctcagttattaaacctactggacctcttaacaatatttgacactgttgactattatttccttcttaatacatcccctgacttttccttcccctttcaggcctttct

SEQ ID NO: 52855 - DNA, 781 bp, Homo sapiens
accgggagcgcggtgctggggccgggatacccggggtggccgcaccgtcctgctggctccttgggtggctgccgtcgctgctcagcgcgggtcggcggcgccgcctcccccaccccggcccagctctgctccggcaggtggaactctccccattcaaacccgcgcgggccaatcagggccgggcgcgccctggccgttccaacgcttggggcagccctacctcccgctcgcgctcctcccgccctggagactccggttactggggagcaacacagccgcctcgggttgcagacgctcctgtccgggtcgcagtgggacgccatggagcgctccctgcaccgcgtctccctcgggagccggcgtgcccacccggacttgtccttctacctcaccacctttggtaagtgcccgctggggctggcggcaggggctgcttcaccctgctcccagcgcccagaaacgcagcccctcgtggtgacaggggaggctgggagcaggtgctctttctatctaggggcaccttctctggcccctttctcctgtgactgcccaggaggggctcagggcacaggctcagtccaagcaagctgctggacaccacctgctgcccggccatgagtgccaactgcggttggttctgcctcacttggctggaataatcacgctctggttaatctttcagagacctgggttgtcaccacggagtttctcattagcaagcagctcaggttaaatcaaggtcttgttatagcaactggagatctcattcacccactttcct

SEQ ID NO: 52856 - DNA, 1466 bp, Homo sapiens
atcctcctgtgtgtgggacactgccaggctgtcctccctgcattagcctctgctgagttcctaccatgtgccaagcatggcgtccatagtcggagcataaaggactgagaatggcccagtcctcctgcttttctttagtgcccgctgtgccctgcttcactctggagaggtttgtgtaccctcgtgctcctctgggaaccagagaccaaggctgcatgcctctgtatgtccacagagcctggcatgctgtaggagctcaataattgtgtgccagtttgaaaagagcatccagatggcaaggccctctcatggacttctgaaagtaggagttgtggacctgtcaagcacatgggcctcagcaggcacatgagtcagtggctagttcaggttcagccaggaagcctatctgtgaccttacctgggagtcctcatgggatgccttggggccctggccacagattggcccccagaacctcagctctcttcctctgacccttggcctgagatggagtgagtgtgtcccagtgtttcctcccctgtgctctgggagggcagtgaccaggctggccttgactttgggcccttagcacagggcccgccccaggctaacgctctgtgaacctctgtgagaaaggaagaagggagccaggaaaacagtggatcaaaggtgaggctgagtcatgcagtgctggtgggcccttggatcaagggctggggctgctggggctcaggatggcaaagtttgcttttccaagaccttgtccatcccaggccctccccacatcagcctgggtttacttgctgagctttgggccttcctgcttggcccacaacccagtgctcaagttgtctgggctgagatagggacactgaggggctggctagctcctttgtgcctccagttcccttggagaggagggtggctcttggcaggggtgggctgtgggcttcctgaccttggggtagaggcaagagcctccagcttctggcagtgaccgggcagggctgtgtcctagatcaccatcccgaggggaaaggacggctttggcttcaccatctgctgcgactctccagttcgagtccaggccgtggattccggtaagttattgacagggggatgccaaccccacttgcccaccacacatgtgggctttgcaaacatagtctggaactaaaaggggagccccaaactggagcaaagtgtcctggcttttcaaaatgaaaagaataatatttttaagtgaccgtagatgaaactgccatttatgaaaatatgcccactttttttttgttgtttttatcaaaatgaaaataggtttttatattttgtttcccaatcagtttgaacaggaactaaacctatattttcagcaatggctgcaagggaaaatgagagtcatttgtgaactctatttgaagctgttttgtatcctatccagagcctgatcagcacttaaaaagagcca

SEQ ID NO: 52857 - DNA, 842 bp, Homo sapiens
ccagggatcaagtctttgtagctcacaattttaggattcagaggaaagggtgaaattcagggcacacaatttcccttaaacacacttgggattgtccagaggttaaggctgtcaccagggtgctggcttcttagtccccctcctctggctgggctgccaagagatagcccttcaggagtgttgggtcatcctgagttgaataggagggagagttaagccatcctgagttgaatagggtctggtgcccttccggagcccagagtgcctgcccggctgtggttggcatgtttcccagggctgctggtgcccttggcattgtccctgccctgtaaaggtgacctggcctcagattcgccactgccagggcagggtggctgccagggctcgcctcagaatctgggagcaaagccctgtaattactgtatttggtcggtgaagcaggtgttggaggagaaaagggtgatatgggggtttggaccagacatcggtagcaggtgggaagtaaatgagtttgccttcacagagctcagtaactgggttgcaagctgtactgttctaaaaaaaaaaaaaaatcagttttacagagccactcccactagccacatattatccaggggtgggtggagattgggcacaagggcatgactgctgcataggttgggttaatcctgccttgtataatttactagccaaatgaccagtcaccctaccattccagacctcagtttccttgtctacaaaatggggctgagccgacttttcctctctgaaggcagaattatgtgttgggtacttcaggtgaggcccttggtgaggattctgtgacagccctgggcccctgg

SEQ ID NO: 52858 - DNA, 1316 bp, Homo sapiens
aaataaatattaatgtattcctttttgttgaagtatgatggcaaccaaacatgtagatctgggcatcctgtcatattactcacaccaaaaaaaaaaaaaaaaaaaaattcaaagggatttggataaattcatgaaatctcagcattggttaggctttcaggagtcatccatgctaattgcttccttgtaactttccagttaaatggttttctgattggtgcttgaatcttctagggcagcccattagagcagtggtttttttttttactgggaagggctaaattgtagagcattctcccttacactcaacagaaatctttatttgtggaatgttcctccttggttctttgtcccatcacttctctgggcatgctcaagtttgctaacatctgtgagctgatccagtcccgcaccgtgaactaccctcatcacagccccttccagaagtaatagacttgattaatgtgccctgaggtctatggccctgtgcgaggttctgggaataccatgaagcacaagacagacacaccctccctttacacactgactcatggagtttaccattaactaaggcaccaaagtctttttggtaaactctgctcttaggtcagattcccaagaagaagcttagttagggccacttgggagaagccaccctccaagtggtaaggacccccttaccaagtgatccctcaactctgaccctttggaaaatcagatgtgtccttggagcaagtgtggggaagacactgggtgacccccgtggcctgtggaaggcgacaggtgattgggccatggagatgggcatcactctcccatgggctgccgtggcccctgctggtgctggtgagatgggggagtccacatgccctccccggcacgcttgcccctctgctctgcctccagctgtgtgccagctctggcctttccctgacccaacctttgggaaatttttcatttatgccttaatcacttcctgtctagaccatattctcagccctgggaatctgagccagagtggtggcctgggccttttctcaccttgctcatggttcttccccagttgctggtggctcctcctacttgccctacttccacccctctctgggcctgggctgttttttttttttttttttttttaaactttctaggctcctgacagattgtcggctccagcccttcccctgccagcctccctctgggtctggaggtgactaccagatttcccttgagtcagcgacacgttttgtgggaccctgagggtttgctttgtgtttctggctagtttagagccttctttccattgctcggacttt

SEQ ID NO: 52859 - DNA, 802 bp, Homo sapiens
ttgtcctaagtgttagtgtgtttctgttttggttgaagtctattattgctatatggttttctactgtttctacttgatggaagactattaagggttaagtaggctggcctaggaagctgaccaccatttataacatacttttgagtgggaaaatgcattcagaggcctgtaatcaatacttaggtggactttgggaatatagtatttattttatgagtgactagaatattggtagaaccatagaaactttgaatgtggagctggaaagcctcctccttcccccactgagatcaattgattaacaagctaggttgtagaaaccaagtgaaagaggcaaaaacttggccaagggcatgtagtcggggacttctgaagattctgctgggctgggggcaggaaaggggtcacagacggtcttagggttgtctcactcagcaactcactgtgttggccttgggaaatgtaagtcactgtgttgggctgtaatggaaatattgagaaagcagctcagctagtggcgtggggagaggttgtctagtcctctggcttatctgtaaattcctggcatgtgcttgttggagcagaatgaatggggctgctgtgttttacctgcagctaggagcatggctggagtggtggagacactccctgtggtctgttctaaaaatagcagtgggaacagagctgaggggaagaggagggggctccttcgggagctgggtggggaggcctcacccccttcctcttcctgccaggcccgatgtgaggaagtcccatggagtcacataattccatctgggag

SEQ ID NO: 52860 - DNA, 750 bp, Homo sapiens
aacaagcagcctgtgaacccatatgattttgcagaccacattttgagtggactgatctagttcaaccccagtgcattttagagacagggaaactgaggcttggaggtggtgggggggattggccttgccccagggttcgcagaaggcagcagcaaagttagcatttcagtctttcccccactgaccctttgttttgatggcttgggctcaagcccaacagtccaaacagtgggtggacccaggggagtgtgtggagaactgtttccagcaaccaaggtcacaggcctggcctccccgtagctgagtcagtggctctgtgctgaacacttcccaggaacatgggctgacaggacacagcctggccctggagctggcacaagcacagtgggtcgaggattgctcccaaaagcccgaagtctccggccagcatgtggctggttggaccggagccaggaagggagacagtcatggctcccagccatcctgagctgctacagctgcccaaggtcagactgatactgctgaggtgactgcaaggcgtgccccaggatggaggcagaagccagccagcagcaggcctctgggctagctctgtagggggacatttggtctcctggcttttgctgcgtgtgggcttctccttgctgggttgggagccaccgtttccattagcaggttgggaatcatccattgcggtctcaagttgctgagaaagaggcagatagcaagggggagacatttggggaataa

SEQ ID NO: 52861 - DNA, 582 bp, Homo sapiens
tgatggcaagattcatcaataatattgtatcaagctttattttgtttattcttgttgctctgtggtatttccttgtatgaatataccgccacagtttatctaatctactgctgatgaacatttgtgttgtttacagtttgaggctataatgaatggtgctgctatgaatattcttgtacttatcttttgatatactatgtttgcttctgttaggtgaatacctaagttttgcaattgctgagtcatagagttgtagagagttagctttagtaaataccatgatattattttccaaagtgtgacaggaatatactccctttaagctgtacatgaaagagcctattattccatgtctgtaccaacattattggtattagatattgtgatatctaattgtggctttaatttgaatttccttgatgtctggtgaggtcgagtccctttttcatgtgttgattagccatttggatgacctcttttgaaaagtgcctgttcaagtctttcccccattttcctattggatttttttttctgattaacttgtaggagcttaaacgatattgtagatatgtgtttattgtt

SEQ ID NO: 52862 - DNA, 2154 bp, Homo sapiens
tctacagccctctgaggtccccaaacacttgtgtgtaaggctccaaggaaacagggagagaccctgggcaggagatatgagttctaatcctgcatcagcctctcattcttaggtaattcctttaccctctgggaccccaggtttcttatctctaaaataagaccactgatagctcccattgtatcaaaagcttttccagggccaggcactgtgaggagactcaaatagtcctgtgagtccagtatgatatcactgggctcaattccagatgaggaaacggaggctctgaggtgttgagaggcttggccagagttgcacagctaaaaagtggccccattgggatcaaaatcagcctggctcgggtatctgagcacataaccactgggccctctgagaacccttccatcttggttagtttctcggctgatctctctgggtaggtgccctctgggggcagtacccctgcctgagtggcacttcccctcctggctttgtttggtttggcctcgatttagaacagggttggcagaggcaggctgacttgcatttctggttttgggtttgttgctgcactttccccaaggggtgggcgggctctgactgacagtcaccactgggacaggcctgggccccaccctcaccacccaggaaaggggaaatgcggcccgctccccactcagtgccactctgtgccactccgtgccaggccctgagggcacccggttgctgcttccttccgtctttccccaaggactatcagaggcaggtggctgggccagggggtgggtcggggggaggtctggccatgtggtagggtgataggactgaggggccccagggagctggctgcagggcagtttgtttctcctgatggagaatgctccctggtgggtggggcgatgggctggggactggtttgttcatggggacagagatcagaagtgggcttgagaagaacagggccagaaggcctggactctggccccagcctagcccctaatttgtgcagggtggctttgggcaagtcactaagtcactgtctagactgggccctcagccttcctgtctacccaatggagggtctttctgtccacctgggaacagcctgataggactgaagcacagcccttagtttccagatgagaattctggactggaggccctgacattacaattgccaacactgactctggtgtttggcaaaatttggtgtatgtgggaaacacgtgcctctggttgaggtccttaacttcagaatttccctctagatcaatgctttttaaagcactaactccaacaccaccatcttctgtaggagctttcgagctttccagcttttccagcatacgctcctgatctgttactcaggcatgctggttatcccatttcatacgtggacaccttgaggcctaaaggttggtgactggctctacctgacacctctgtgtgattctaggttgccccttgctcctctctgggcctcagcctttctgtctatgcagtggggatttcggatcgctgttgtttcagagtctgaggctatgaggtctgagagggcccttgtgtggagtcacctctgagctgcaggcaggatttccagggcaagaaggccacagcatcagcaggcacctgtctttggcctgtgagccatagcctaaggcgtgcccttcccgaccttggccagatcacgctagagtcctccaaggcctcccctcccttgcccagccaccttctctgctctgcagggctccactttcactttcacactcccaggctgtggctcttacccgtgccgagctttcacatccgctcacatctgtgctcccagatgccagcgtgacccctgacacgtgtgtgcagcagcctgcagctgccccaagccatggctgaacactgactcccagctgtggggcttcaccattacagactccccagggcttcaaagacttctcagcttcgagcatggcttttggctgtcagggcagctgtacaatagtgggtaagtcaccggcctttgggctcagttttctcatccatcaaatggacattaatgatttctacaatgagagctcttaacccatgttctgggggtacttacccctgaagttttctgccagtgtgcgcgtgtgcccgcaggtgcacacattcccaagc

SEQ ID NO: 52863 - DNA, 2408 bp, Homo sapiens
atgcaggtgactgaggctgagaggccggctggcaggagccattctctgggaggtgccctgtacagggggtctagggaaaagaggggcgaacatgagcaagaggcatttaactcctttcttgccagcagtttcacccagtgctgaattctgctgcctccttggggaccggcaaggctaaaaatggttcttggctaaaaatagccagtcctgccaccccggtggtgggcagtgcctcccctggctccctccttccctttcagcaatttgctgacttgtcccccaccccccaccactgtctccctgctgccatggtaacgaggaggccagtcacaaatagctgggactggcttcctgccggggcggccccagaggctgtcccttgcagacacatgcccctttcacggctccctctcagggttggccagaaggaatttttttttccgctccccctcctggtccctcccatttcctggctcctcctgtctgagtcccagccccggcttgtgcctgggagtccagtcatcaggccaggattccagagagcgtgtgtggctgcagcctgcaccgttgctgcccgctgcccaggacgcggggtgggggacaggagccagagtggtgcctcctacagaccaatctgcggccccaaggtggggggccctacagagatgctccgaggcatgtacctcactcgcaacgggaacctgcagaggcgacacacgatgaaggagtaggtgccctcgacccagctctcccgactctggatttgcaggggcgagtgggccaggctgagcaaccctcttttctgcttctgtccccagagccaaggacatgaagaacaagctggggatcttcagacggcggaatgagtcccctggagcccctcccgcgggcaaggcagacaaaatgatgaagtcattcaagtaggtcctccctggcaccctgggaccctttggggaactcactggctccccggggagtaggactgagtggtagggttgaggggaaggggcttgccggcttgatccagctctgggggagacaggctttcacagagggagctgggtacctggcaagcagctaccctcacagggagcagctgccctagggggaaggctaggtggggtggagatgggggctggaagggaccctggccccgggaaagagggtgggcctccttcctgggcgccccagctgggctcagctgcagactgggcccagggcagtaaacaaaggccgcctggcccagcttcccccaaggttcccaagcctctcagtgccctcactgtgtttcctccctcacccctcaggcccacctcagaggaagccctcaagtggggcgagtccttggagaagctgctggttcacaaatgtaagttgggcctgcctgcccactccctgtgccctctctccctctccccttcgcccccatccagaccctgtgtagctggtgctagagaggccgccttccctctcctcggccgtcagggtgtccttgctgttgcggaggggctgagcccaagctgaggcccttggtctggccttggagccagcttctgccagcccctccccgtccatgtgagctggcactgcctgccggaggcccgtgggacctgtgtgctcagatccatattcccagaataagaataaacatttctacgtactgagggctttcacggcgccaaatgtgcctgccatctcatgggcagggtcccatcggctcctcccagggctccgggagacagaatcgatagtccccatttcacagatgaagacactgaggcatagagagggggagaccccactgagaccctgaaagaggcagtggcagggctggggccacatcccagggctcctggctgtcggggacgggcattgtactcagctcccagcacgcccatctttaaagtcctgtaggggtaagctgaggcatcttaagggcaggagaggctgagtttgcctcttaccccaggatccgttctcctcacagacgggttagcagtgttccaagccttccttcgcactgagttcagtgaggagaatctggagttctggttggcttgtgaggacttcaagaaggtcaagtcacagtccaagatggcatccaaggccaagaagatctttgctgaatacatcgcgatccaggcatgcaaggaggtaggacctcagggcagaccctccgctcctccaatccccagggcccagtggcccttcagctgcaaggtggcagccagcagcacaggaaggggagaggccagaatgactccatgagcccaggtacccagcagggaagatgcaagctaggatcaggggaagaacagaatcccagttagtaataaaaatggccaccaccaaggcactgccgcatgccaggcatgtgctgagccctttatgtatgcgttctcatgttt

SEQ ID NO: 52864 - DNA, 1118 bp, Homo sapiens
tctccgagcctctgttgttttaactatgaaatgggaataataattccacctcctgggactcgcgtggacttggcaggtttacgaatatgtgtgaaccctcagcacaaggccaggcacagagggagtgtgccctgcggggcagagggagggaggctggtccaggaggcactgtcgggccaagccccaaccagctgtgcaggaggaagctgcccccgcatctgctccaaggcagtgactcaatgacacgacatgggcagggccccaagggggcggggtttgggccctaggttccacatgggctcagcggggtcctgcctgcctgctgtttcaaaggcaaccaaatagcatctgcctcatcaggtagctggcctggcagtcaggagttctgggctttgagctcagatctgtcccaaacctctgtgtgaccctggatgaggcccctctctgctctggtccttggcttcttctcttgacacacaaggagaatccagcttttcctcctgcgtgaggaccttcggaaggggcagatggtgctctgtgggggtgtggggggctgggatccaggccaagctgcctctgtacgcggcggggtgtgtgtgcacgtgcgtgcgtatgcacaagtgtatgtgagctgtgtattcgagttgctagggctctttttagctgcttcccaggggactggaaggcctacttggatggagcagtctgtttatcaaggagctccacagtctacagggttcatgcccctggggacactgccctctgtgtcctccagccaggctggggacctgatctgctggtttttcacaagctcctgcccttgaggcaaagtccatccccactttttacccccagcacacacaaacacagcacctgctggagccacccctctcaggggattcagctcagtttgctatccccagggagatataaaaaagaagggcctgaacaaggcacagccgatgcccgcccccagactggaggggaatacagcctccagtctgggaatataagtccagttccactgccgatctgtctgtggcaagtccctttcctcgctgggcctcactttccccatcttaaaaatgggtggggcgtgttcaaagtgctctctagga

SEQ ID NO: 52865 - DNA, 1260 bp, Homo sapiens
ataaataaataaataaataaataaataaataaatcaggcagagtgagtcttcccattttattcttttttttttttttttgtaaagtcttgccaggcattcagggtccttctggagtgagcctgggcctccccttgaagacaccccctcctgctctgccaaatagccctcctgcagcctctcattatcacacctagcctcctcctcatcccttgcttctgctgtcgctgccacctgggataccttcactgtctctgtttgcctcgccaattccagcctgttcttccagcctgttctcccaatccttggcaggctgagacccgccccacctctgaaccctgaactccctctgaaaatctgtgccaaggctctgtccctgggagaatcgtagcagctcttgaattttccattaaatattttgcgggtgtgagtttgggctctccagtcagggtgatctggcagttggccaagctggccttcacccagagtagtgaccaggaagatcgcgggcacctcttgacccccagactgagagaagcagctggacccaaacacccggtggggctatttttagttgctggttcccggcaggcctggcctggtttgagcctggatggagaacaatgagccattgaaccttatcgagtccctgggccctgtaaggccaggagaagggtaaatgatagagcgagtgggggcagtgctcagaggtggacagaggttgcctggccacctcccccatgccgaccggcaggaaaagcttctacccaagctctttgttagacttcccgtggggccaggtgcggagccggcaagtattttgggaatgctgtgtttgttagcagcggcggcagcctttccaacatttcttgagcccgtctcgtgggtcagacacggtgctgagcactgcgtgtcctctcatatttatcagcctcattgttcacatgtggaaactgaggcccagttaaaagaggccaggaacctgctcacacacagcaaataagaggaggagtcgggattcaaacccaggccctctctgtctccttccagagtgtggacactgcagagccacccaaaccagcctgccacctctcaggcccccccgggactggtgggcttcagtctctcctctttaacaactctgactccatgaatgacctcaggcaagtcacttgtcttccctggccttggtttactcattggtaaaatgtgggggagcctttcattcagggcggtatgggatggtgcttcacagctgggga

SEQ ID NO: 52866 - DNA, 527 bp, Homo sapiens
tgtgtgtgtgtgtgcacatttgtgtttgtatgtgtgtcggcgagggaggcgggcatcgtgccggcagcctctcactctgccctaactatgagctcacaaaccgccatcctgaaggatccccctgcagagaaacttcccggccagctccacccagaagagagagcagatggaaaattggagcaagccctcatcttgggtcagggaagaaaagattctttttttccccttctctctaaaaatatgctcagggcttttttgagccttgatgcaatagaaaccagctgtggcccagaacgcccccgcagccactgcccagggaaaaggaaaacagaaacagccattggaggcgggatcaatgcctgtgtttgggctccaggcccagcctctagccacctctggcctggaattgtgtcccaaatgggcaccaaacagtccctgtttattcgtcctgttgtgggctcagggccccaggagtcacttagcccttcctctttcaattcttggcgcagaggatgagaagatgacaa

SEQ ID NO: 52867 - DNA, 2605 bp, Homo sapiens
ggaaggcgctgcccgacaggatgggggaccctgggagagggatgcagccacatccaaactgtggcccagaagagggagtgggaaaagtcctcgacctctctgtcttcctgctgtcttccaatatcctacctgggtgaggtcagcctcctggggatcagagcagggcagggaggggtgagaatgaatccactggtggtgggggcaaggggcaaatagaatcacccaaaaaagaggtatatgttgctgactccattttacagtcggggaaactgagagtcatgtttggcacagtttagagggacttggaccaagatttggactttgctctaggtgatgccagcctgattattctaacctgtaagctacaccaccttctggcagtgggcagtgcccaatgggggagggtgcgggggcagtgcccttcccgccagatgccacccctcccttgagcttggtcgagggtgatctgccttctccttccttcctcttccatttagaaagcaacgggtctgaaaggtaattctgttcttgatgagggtgcaggcagcagagggaattgtcatcctgctgaagacacacagctcttccatgctctaccctatgtgtaatttgttcttatctgctcctggagccaccacctgctacagtgtaaagagaccccacagactctctggatcaaactactcactgtccagaaggagaaaatgaggtcctatgtctgtggctagaacccaggcctctggggagcaacccagggctccatccagggtgacctgagcctgctctgctcatcagagccagtctttaccacccttcatatcccgggagcccacaggtagaaagatgggcattgcaggtcaccgtggttcccccactgaagcaagttccctggctcgcgattagccagtgctctgctggttcatgatgcgctccaaatgctagaccaagaaagaaactgggtcggtgggcaggacacaggaccagcgctctgggaggagagctgttctcaagcagtttggtggcatcagagcctctgtgtggtcagtcaagcagggcagccaatttcctctcctttcagccctaactctggactcctgtacctggaggggctccctttgtgctcctgcagcccagaagccctccgaggcttgacatgaaagagtcgcgggatcttggactgttccggtggaagggctcctagcaaaacccagatgttttctcttcttgtatggatgggaggaccgaagtccagagaagtggaataacttgcccagggttgtgctgagatttgtgaaggtgccggatgctggtgtgctggtggctggcatgctctgagcccttccttcccgctgtttccctggagttctgcttggcaaccacccgcctgcatttttgcaaagtgatgtcatctgcagataatggtttttccgttcctggtggagcaggagttccagatacagtgcttcgggggaggggctcaagagagctgattgtgcactcctcaggcaagtgggggctgcatagaccccctcccctctgacagtcacatctcagttgtaaggcaaggcaccgtctcaggcttcctggactccggaacctggaatgaccaaaatggcagaggccccagagacaagcctcccctgcctcctccttgtagagttgggaatctgaggcccagagagggcagagccttgcccaagctcacacagcatttacaggcaaaaccttgactcacatcccgactcctaacatctgtggccacttgcccgtggttgggggtttttcaccctcaacaccgttgacattttgggccaaggagttttgttgtgggggcagtccctttcatggcaggatgtttggcagcatccctggcctcgacctcctacaggccagtagcacccctctccagttctcaaatccagacactgccaaatgtctttcacctaagttggggtgggagaaagtaaccctccagctcctaagacctttatccactgccataggcaggagaggtttcttgagtccaagcccaaagggtgctttgtctgaggctctgacttaacgtcaggcaccttcaggatgggaggcaggcctggagggggctatgaggggctggagatggtccaggccctccttctggttaggaacactgcttcctctgatcacttttcttggagcaaaactgccgatttattttcctggggaaataaaaataaatgctggctgttgtaatctcatccctgatcccatctggaaaaagcaggctcatgaatcttggccgcctgagctctgaggactgtgtctggcggaacctggagttacaatgggccttcgaacatcggaacagtcacggctgacatttcctttcccgttacatggctccttggaatgtgagccccagggggccgtccgtgggcaggcggaatttggtggaaagaagtgctgcacgggccggaggccagctcagcttctgacttgctgtgtgactttgggccacttttctgttcgtttctgggccttgatttctccatctgcagaatgaggggagccacgttcctcaacaaggggtccatggaccaccttgtatcagaaccatttagggaat

SEQ ID NO: 52868 - DNA, 2099 bp, Homo sapiens
tttccagatgagatttattttttctgttaaaaacttaaaactgttctttttttttttttaaatggcagtctttcgccatgtgttacctatttataccaccttaagtgaaggtcaggaaatgcaattttacttattctcaatgctccagggttgtcattgtgagttttaactactgtatgcattgatgtaaattttagggactccaaaactcactgtgcctgaactatgaatgtcccccaagctgcttagcccttgtgtctgcttttaaaagttctgctttgcttctatatttttaaagatttcttcctcatgagatatcagcagttacttctcaccacgttatcatgactcctttggatgaaaaaccaataaccagtgtgtatcaggattgtctgtagtgtaagagttcataatcaatgaatgagaggactctctgatgagtcagggatgtggatttttgacatttgttttggcagctgagaataaggggtagtttttttctttctaattttcaccccaatagcagctgctttctgagagttttctagataaatgtgaaatgagtgtagatcgatttttccatgtaactaatttacattctgggtgaactcattttgcttctgacttagaggtgctttcatttccttctcatctgcaccctgttcttggagaagctgctccacccctagcccatgatacatgatgcatgacccagcccactgggccccctgatgccacctgggccaatcagattttccagtcaggaaatttgcaattgagattcagagctggaaagagtcacctgctctgatgggagctgcatttgtggactgtgactcagaggctgaggccccagggagccgaccccatgggccctgggcaagcccagagtgaatgtggaagccgggctgtggaggttccctgagcagacagtccgggtgtgtgtgcgtgtgtttgtctgtgtgtgtgcgcacatgctggaggatggggcagaacgtagggtcccaagcccctgagggaggggcttgtcctaatcaagtcacagaaatcagggcagggagagcatgaaagagtcttgttcccctctctgcatttgggagattcaggccccggggagaggagagactgacccatgatcatccagaggggacttggttaagctggtcctgagctctgccatgcatgttctgttttcctaccctggcagctggctcagagcatggataggccttgtctctcttttctttctttctgccaaattcttttctgttgggaatctgaacagcgggtagatgcagtcatggcatgatttgctccaaatatctccccaacaggtggtcacggtgtctacaattccatcaccagatcttccatttccaggagtaaccctgggcaggtgtataccatgtgtcttgtttacagtggggattaatagttcaaggagcccaaggtaaggaaacccatatttgatgaatctccagacaatttatacccaccacacagccttatgaagatagcccaatcacgcctattttacagaggggaaaactgaagttctgagaggtgagctgacttgcccaaggtcacatagcacgtcaaaatcggggctcacatctgcatccagagtccaggctctttgccctaaagcaagctcatctgatctgggagctggggataggctgaggaggcgagcgggtgacaaaatgaacttgtcccatggagtcattcagtgggaaaagttgtggtttgggaattagggccaaatggctccttaaccttgggcatcatggtgggcctcaatttccttacctctgcaggagggaaggaccggatgtactctgcaatcccagaaaactcaatgggctgaggcaggaggacctactggccattgaagactgtccactcctggtccagattccaagtgaccaggcagaaagagcatggactttggagtttgattgcctggctttaaatccccctgctccactcgctactgtggtgtggactcaagtaggttaattaactgctccagctgcagttttctcatctataaaatggggataataatagtatctacctcatagtaatgattaaataag

SEQ ID NO: 52869 - DNA, 1242 bp, Homo sapiens
gaactgagattgggagccctgagttcaagtctggaatctgcctctgacatgctttgtgacattcggcaagctgcttcccctctctgagcttcctttttttccatctgcaaaatggggataattgtatcccaatgtcttctgggatagcaagagtacactttgaaaatctagtccctcatccatttcttgagggtgtccaaaatcagccctttgaggtgggaggagcaatattctcactgcctggaagggaatggacagctcagagaggtgaagtgacttgctcagacacacagcatccgtggatcaatgctgtggggttggaagggtttcctgattcctagttctgtggtcatctcctctccgtgagacctgatgtcctctgccagaccacatagagacagcagacatggccttcggtggggtcctccaccacccctcatggagaagccgaaaatgagggcaagggccaaagcattgagacttgcttcacctattggaatggggtcctgaggatcgatgcgacacatggcctgcaagttgcctgcagcatgcctgttggagggtgaggtcagccagtctctgcttgcatagctctcggacaggaagcttactatttgctcaggcagcctgtctcatcccagcgactgtgagaaagcatcctcggcctgggctgaaacctgactcctcttcaaggtcactcctgttccccaacccccaaactgtgcacattctgctccccagcctggggtggcccacaggccctaaaaatgggcgagcctggggctgcctggattcgagaacttacagctctcccagtctccccttcctctcacttgacccctgatgcggaacagcctcctttcctgaggctctgattaccctggagcaggcaggcggaacctttctcctccacccctggcaacactgctgggcaagcacaccacatcctgctcgtcctactggaagatgcctccctctgcattggggaagggatgagacttccgggccaggccagcaggaagactcactggtccagaagtcagaacacctgagtcacttgacatgcactctcagatgagctgctgcactgctctgtgcctcagccgctttcatctgtagaatgggatggtcatgatgcctggccagcagggcccatggagcttgtataaaacctgatgggaggggaggttgcagtaaaagccttggagatgaaaacactggacacaggtgaggattgtgtgg

SEQ ID NO: 52870 - DNA, 2234 bp, Homo sapiens
gggtccctctctgctggaaacttcacaaatccctggggcccagggctgctttggggagggacaaagccgtgggatgaatagggtaggaaattgatgttctcctgatggcagtttaaaacatttttaaaatattgaaacaaacatggatttatgatgaaacaggagaatttgacatgaatttggaagtgaacacatgaggctgaggagacttaacgcaattgcaggcttttgcctcactgtgctctgccacacaccctgcctcctgttccctcccatcccctctgtccctgctccttcccacccaccccctggtgtgggctattctctttctgcagtacagaaactttaggaagacggtctgtgtggccctgtgatggaacaggtcaacccaacccatcacatttctgattaatgacccccaggccctctcctctacaaattctacccttcttattgattacaaacatactcttcaaaaaccttggtgaaatgtccaagctcgttttccttccttagaaatggcagttgttgttgctgttgtcatcataaccttcatcaccttcttgtgtaggcgggtattagaatctgcttttctgaaaaacatgggcctgagcctgtttgactcatggtctcaaccttgaaaggctcaaattcagagaggcttatggggttcctcaggccacctcttaccggactctgttcacttgcacacaggtcccctggagtcattggaatgcaggttcctactcggaggcctgggtttccaacaatctcccaggtgagtcagtgctgctggttctgagaccaacttgggccccaaaggcagttggtgatggagctgggcctggcgccagcctcctctaccatgatagcctgcccaccctcctaccacctgccatcagggtgacctggaaagcactggggggccatagacaagtctcagatagttctgcatcagaagaaccaggcctcctcttgctatctgtgtaaataattattgggaggccgaggtgggaggatcactggaggccaggagttggagactagcccggacaatatagcaagaccccatctctaagaaaaaaaattaaaaattagctgggtgtggtggctcacacctgtagtctcagttgctggggtggctgaggcaggatgacttgagcctaggaatttgaggctgcagtgagctatgattgtgtcactgcactccagcctggacaacagaacaagaccctgtcttaaaaaaattagaaaatcaacattcataacctccaatgtgatgagtgattcaggtgagaatcatcagtgcatgtgaagagatcatggaatgccagtggttggggaacaagatattcacaattttgaagtatcactccagagattttgtattccctgcagacggggtgtgcattgagcatggcagggccgggcagccagcacctccccaaagcagtcaggctggcccttgtccatgtgatgtgggctgacaggatgtgctgcccttgctggaaaagttcggcctgaagctaacctgggaatcgtgggatattatgcaggacatgtggcctggattgttcaaaagatttagtgtcatgaggagcagagtgagggggtacacaccagccaaatgccaaatgccatgcatgacacttgacaggatcctggattggaaaaataaatagcagcatgttttggagcaactggtggaatgcgagtgtggactttgtgttgggtgatgttgcccaatgctgattatccctggtgtggcactggtgtgagattgcgtaggaggatgaccttggtcctgagagatggagaggtatctgggggtgaagtatcatgatgtctgcagcttaattttggatggtttggcaaaagagcgggaggaagaagagaaatagagagagagagagagctcgatggaggggatacagtaagatgttaatggtggatctcagataggggtattctttcaactattctgtgcattagaaaaccttccaaattagaaaaacacacacacacacacacacacacacacaaatgcaaataggctgggcatggtggctcacgcctgtaatcccagcactttgggaggccaagacgggcagatcaggaggtcaggagttcaagaccagtctggccaacatggcgaaaccccatctctactaaaaatacaaaaaaaaaaaaaaaaagctgggcagggtggtatgtgcctgtaatcccagctactc

SEQ ID NO: 52871 - DNA, 419 bp, Homo sapiens
aaacttgaagacctgctgccttcagcgcagacagcttcctttaattgtgtcgagagactgtctccttgctaggctcagagctccacaagagtgagaatctgtctgtttacctctctgtgactcaattaaggcttgctgaaggaacgagtgaggtgcatcaatctgctccacgagagcctacagctccctggcacttggcaggagctgcaagagggcccccctcgtctcttttctgctccctcttcctgcttgctggcgggttggaaatccttggcaaggattaagtgtgtcctgagtgacttggccctttgctgcctcctggcgtccacttccaagatagccgtccccagatgcttctcccactcgtggaggaaaactgagtgtggcttccatgtgctgtgatctcgttcatttccaac

SEQ ID NO: 52872 - DNA, 650 bp, Homo sapiens
atcttcaaaaagcaaaaatacattaatttttttaaaggtaggatccatatgagattggatcttcatcttctaacactttggagaacagaaaagtggtatttggagatataatcttcataagaattgtggcactgaataaaagagcactggaagaggaaagaaacataaaggaaagaaaggaaaagaaaagaccaaaagaaaagcaaggctccacttgcaaatgagagagcaacttggaaaacctgccactcactaccactgatgcccacaagagggcgtctcagggtcatccggaaggcaaaactcaagtccaagatccgcttcccagcagctggaaatgaccaatgagtaggttctggaatatcagcaatgaccctggctctccagcactttacagtttacattagactctcctccccgacgtcatttgcacctcccaaggccagttctcccggtggtttccagccctggggcgtttgtggttctctctgcctagtgggatgcaactggcatttagtgtttgtccgtatgtgggtgtggctggggagggcagagaggcaaacagccccgcacaagctgtacagtccccctcatcaagatgtggcactccctctttgccaatagcaactcctttttgaaacactgggcct

SEQ ID NO: 52873 - DNA, 948 bp, Homo sapiens
gacattttaaatactaactttggggctcttgtcttaaaggaggaattaagttcaaactgtggctctttagaaatacataagacataagctgggcttttaatggaaaagtcaccttctcataagctctgccaggcatgactgggacaggctgatataatcccctccctttttcaaaatcaagagcaaatattggtttacccacaaccaagatgaccttgggcccatttctgttgcagtaaaactgcagtaggtgctcagatgcaaaatggagcaatggctgagcctctggtttggggtcatctacctgtagctagttaggcaaataaacactttccatttaaagtggacttttcacaggaaggaacccttcagccaaaggaaggaacctggaggtgtggaatttcaggaatctggggagtccttgaaggcagagacctctgttacatgtttgtgtgttcagcactgggctgactgcataaggaaatggacggctgaatgatttagattgctacataatttacccaatacatttcagaaggtccctcaaaagtgaatcctctggaggacacaggttaactggctgtctgtttagaaacaaatattgacattctgattggatgaaaccaggcgagatgccagcttggtgggagggcagagaccctggggatcaggctgcctggcttccaagctggcctctgccattcacatctgaatgggtagacagagtaaagccaatggccctccccaatgtgagtaggcctcactcaatagttgaaggcccaaaaagaacagaaatgttgaccctccaactggtaacaggaaactcttcctgcctgactaccttgagctggggcatcagtcttttcctgcctttagacttgaaccgaaacattagttcttggttctcaatcctgccggccttcagacaggaacttataccaggccttt

SEQ ID NO: 52874 - DNA, 727 bp, Homo sapiens
ccaccttgacattgcttacctgccctcaacataggggccttctctgttccctgcacttcctggattgaggaatgcctacggtggtcatcagtgctttaggggtagactttgatgggggtggggcagtgggttggatctccaagctgggacagaccctcacagctggcttaagtggtgaaggtcagaaacagcagagatggccctgaccctggaaggtcactgaatcttgagccaggctttgggcttgtgcagctccccccttcacctcctttcaatggtaaaaccaagtttactccaaggaagaagggagtacccatctgacctctgagttacactggaatatccacagtaataacaatcatatctatgtaatcaaatccttgaacgtgccaggcattgagccaagaactctacatgtatccttctacttaatgctcagagtgaacctcatgaaaaacgaagtccagagtttaaataacttgtctgagtcatagaacatgtcagtagagagaacaggttcaagtgttgccaaaatgacttcagagctggccctcttaggcatgacagtgaacttgagccaggtctgtgaatgactagatagtcaatggtacaaaaacagaaagccagaaacaggtgtgaaggtgtgatttcatacatatctatatacaatttgtatataataactaccatttcaaaggatagggtattactgaaaccaacaggctac

SEQ ID NO: 52875 - DNA, 569 bp, Homo sapiens
gaagctattgaagtataagagatactggagataaatatttacaaagagaaaacttgagtttggagagaaggacattaatcaagaatgtaaaacgaatcaacgactgtgccagaataggaacctaggtcttccatttcccagctgagggtctttgtgcatcacccacttgctttcttttggaagaggactggggataaaaatattcctcatccctcctccaccccacctccatcatgaccttactggtatgaggaaaaagcccaagtcaaagggcaatagaccattggcactccctgcccctagagggtgctactctttctataacatggacacaggttgcctagaaaggtgatttaagtgtgaaagcatttttgattatggcaattgcatacattctttcaatcgaattctagctggattaacctgtctttagtatatggctatgaataatttatattattatctttcataatataattctgtttaaagtgtccattaacattgctttttctcagggactttccctcaactcctgagttttagttgtagtttgtagcagcctgttgaag

SEQ ID NO: 52876 - DNA, 2368 bp, Homo sapiens
actgtaggaccagtttttcaaacttttatttagaaatacatatatatattttaatttggcaaggataggcagaaacagccgcttcactggcatttcacataaaagcggctcctcaagtatttattttaaaaatcagtctggctggggggctagagtccccttaaccactcttgtcggacatggggccagtccttcaaacttttattttattacattagtttttttgggaggagtggcagggcaatagaatattcccaataagccttccagtcttccagcaagccagctcttgaaaacttttatttcaaaaatcaatctggtttttttttggcgggggggtacagcggggtacagagttcccattaacctcttgcgttccgccgagagccggctccctgaactttttttccagcgtgaaaatgacatttccgaggggctgggggactgggggagggcagaagggagccggggagcgggcgcggggggcgcggggagggcagggcgcggcgcgggaaagtttgggggggcgggtgtgccgcggcactggggctggcggacgggagggcgggcgcgcccctggaccggccggctttgtgtgccacgcggaggccggcagcgcggaggccgaggccgaggccccgagctcgcgggccgcacggcgaggccggcccgggggcgggcagggcggcggggggcggcggcggccccgcgaggggcggctcggcggcagcggctgccgcggcgcggccggtgcgggccgggggtgggggcgagggccggcgccccccccgcgcgcccccagcgcccccgcccccccggcctgagcggggcgggcggaggagggagcggcggcggcggcggcggcggcggcggcggcattgtgcgcgcaccagcagcccggcccgggaggagcaggacgcgccggggccgcctcctcccgcacggacccatgaaccagccgggcggcgcggcggctccgcaggtacgacggggggccgggggcatgcaccgcgcgggggaccccggggggccggggcccggggcgctgcgccacttcattgcaagatttgcaaaatgcaaagtgcctgggcacgtttgcgggctttttgtgggcgcaatcgggagggtcggggtccggagagcacccccccgggcgctgcggggtgcgaggagggtgggggtgacgagggggtcttttggggcccccacccagcgccccctccggccccgggctcggaccggagcccagaaaacaaagcggcgagagaacagagcagccatttcagtttggacaattcacattttgcaaaaatgcaaccccttccagctctgccccctcccccccaaatttgcaattttcccctgaccctctctgcgctcggggtccccgatgaccccccgggaggtctttccccccaggtcccccatttttgcaacaatctttttttttaggccatattttcctttctcaattttttttttctaatttttcttcaaacggtagttttttcccattaaaacgacgccacctagaggatactattttgtaaataaaaaagaaattaaaattgaaaagaaatattttttatttcttattttttcaaaagtttgcactaccaggcagtggaggggtaagagattctttttttttcttttttcgggtgaaaattttcactttgatctttccagaagcatggagacaatttttatttctgaagccaaatccagataatatgtaaatgaaaattaagctggaatttgaatgaatttagttcttggaggggagaaagcaaaaaacctcctaaaagcaaagtcagtttgggtacccaactcattttagtttgagaaaaaaactaattggaataaagaaaggagggaaattgttgagtttagggaaaactgagagaattggctttatgaagcaattagaaattgtacttcattgtaatttggaacttgtttagctcagcgggcaaaaaaagactaatttctctatatggcaatatttaaagtttttctatttccacgaacgaaggatttaaaagagaaaatagaacctaaaatgttggctttggacacacccaaaaattgtagttttttttttttaattttgcatttacattttactgcatttaaatcctaagattctaaagaaaacagaaactagaaaagttacagtgaaatcctttctttctttttttctgtatttgttgggttttgtgtgtgtgtgtgttttttttgttttgatggaataattaagactgttttctgattttgtttcctgaaaggtctaggcatttcttttttgttgttgttttatccagaaaatgtcaggaaccttttttgagcaatattaagtggaaaaaat

SEQ ID NO: 52877 - DNA, 1860 bp, Homo sapiens
cctctcttagggtgttttgcccagtgttgcctgttatccagtgtctaaaaatcattgtttgatatatttcgatcagtttcttagttgtttaaggtgggtggtgaatctggtccttcttactccgtcatgactagaagccaccagtgcttcttgtatcagtattattttgcattgatgagagtagttttggaagatagcataccagaagaggcattgtggggtcatagactctgtgcatttcaaagatattaccaaattggcccttgtcaaggctgcgctgttttatatttctgagggtctcattctcttagcaggggttgtggggatagatgatgaatatgaaactgctttgagctccataaagtgctgggaagatgccagaggttatggctctgaagaaagggcttctcctggctgttcctcctttggcttagggtttctgatgggcatttcgctcttccatgctatagtcaggttgtagggtcgttttagtcactgccatcatgtaggactgttatttccttagcaagtgggggtggctggggaggaggcttcctttagactgctgctttctttcctgacatctactgaacctacaaatgccacataatgttccaagtgctccgtggagtcattgtgatgtaatttaattctgcaccacaagctagagagtttgagatgaaatggaaactgagagagctggtgtggtttgcttaaggttaagcagctaattcctagcaaagtgaggattctttctgcctttaaaccaaacctgccagtttatacaacaaaccatccattatagtcaggacgccttaggttttaagtgacagaaactcatctcaaacttgcttaatccaaaaggggacgtgtattggcatgcctactgaaaagtccaggggttagccaattttaggcatggctggcccacatatgcagatgatgtcatcggaaatgtgctcttctccatctctcagctcttgtttccttgtggtgacttcttcaggcaggccctctccaagtggtggcagaaatggctgtagcagcaccatgcttatttttcacccccagtggagtagtcctggaggaaagagagcatctcttttccaagggctttaacggaagtcccaaggaaggctctcattggcccaatgagggccataggctcatccctaagccgatcacagtgcgaggatggtgtgttgttattattggatggccctgggttatttgattctcttgttggagttgggggctggggatagcccattgacaccacttaggttgtggggacctgaagggatgagatagttctgtactgtaagatgggatgctgaggaggcagaaacaaaactgtccactgtatcccctttggcctctagagcaagctcacccactctggcccttgcagctccaattgttcatggtgttcacaggtctgcttggcccctgccctggtgagttttttcctcgcctggcttgacagtggcattctgccctcccacttgctggccgttcactgttctcttgccaccccgggcagggactttcccaggcaatgaggcttcctggatcttgttcccttttgctgaatccttatccaataatcagaaccaagaaacccaggcccagcaggctgaggacacctccacaccacctctttcatcatgagtaggcaagcgctttccagagggttgtccaggacccccccgcatgagaggcccctggggccacctgtagactggtgtttctgcatcgctgggaggtacagttgaatgtctaaccaactccccaggcaatgcttccacacggaaggttgagagccacagttagatgactgtcctcaaatgagctggggtt

SEQ ID NO: 52878 - DNA, 546 bp, Homo sapiens
gaactcaccactccccgcctggctgccccttatccctgctatactaaatggctctcctagatacaccttgattttccacctccccactttgctcatgctgtctctcctgctgaggcagttggtgccatggcctcccagaccacagaaagagagtagggtgcaggatgagtctccatttctggcctctaagtaggggagcctcctgaccagccagcttctaattccaggtctgtgtttgttcacctggttcctgctcttcactctgtaattattgattcctgccgagtccacttagctcgagccagctggggtggacctgcagcccagcatcagcttccggggcttagaagttcctggaaacagtgacttattattggcctaataacgagcgtgttcctgccagccaggtgtgttcaggtgtgcgcggctgctgtgaaggacgtcttcatgggcatgcatttattttcctttcgcttggatctggctcctcagggttgtttcctcttccaccattacatttttacttcagtaatttgtccaattatc

SEQ ID NO: 52879 - DNA, 1449 bp, Homo sapiens
ctcaggtgcagagaaaggaacgagcttgtctgaggttcaaaatgagactcagagccagggaaacaagctacatccttaaggagcacacagtccagtggcggaagatggtggaacaacagcagctgcagtgggagtttccattacctgagtaatgactatgtataccagggctgcgcttagtactttagtgacattactgtcattctggctgcaccgttggagaaggccttcgggctgtgtggtctggtggccactcatgagatgccgacttgcagcttgggattcggggaaggccttgaggcagaagacccatggtccaccccaggctggctctgcgactcgttcatcttatacatatcattctgtttttctgtgcctcagtttcctagacccaataaatagtggcctctataactatagggttgtcagtgattattttcattattatagccaagcactcactaagtacttttacatgctattacatgttttaccttatttaagctatctcaagtcccaagccagtcccgtgaagtaggtcctgtgatgagcatcttgccattttgcagagggagaaatcgaggccttggaaatacgtgtgacttgctgaagatcgcagagctagaaaacggcaaaaccaggccttgaactccgatgttctaactctaaactctgttctcttaagcttcggttcaaattgagactcaggtcagtttgcacagggtacagatgagtttgctgtttaggttgaatcatatgaaactgctggtgttagaacattttggcctcagcacatggcaatgtcagaggttcagcttaatccacttggaaggaatggctgtgatgtatttgtaaggacagaccacaccggcctggcgtgtatggaactccaccctgggagttggtgttcccaacacagtggactttggctctgtcgtcatggtgtagctggactcggccaggcccacacgctgtgattgccaggtgctgtgatactgacacatgtgtcttggacatctcccactgaatccattgtccatccatattccaatgaagcaactctcatctgccaccatctgaacatcccacaccctgcccaggtagaactctcctctagttgccccagtttcccagcagcaccacctgagtctctgcaaaagtatttgacaattctttgaatatttttagcactttctctttgttttatgaaaatgggtggaaaacagaaatgcatgcagctaccagtaacacgaagctgaagtatcattcactcaataaaagagaaacaaaggtggagattattaggcatgctgaaaacagagactcttatcccacactctgtcacgtgtttgctgcacttgagctggtcaactctgtgtgaaattgtgaaggaaaaggacaaaaatgacaactttaaaagtgtgtgtgacaagctaaaaatacacgcac

SEQ ID NO: 52880 - DNA, 866 bp, Homo sapiens
tctggcctgggccaggcccagaggagctctgtggaaactcacatcttagcaacaatttctctccctccggtctccagcatgcaccagggatacccctcaggggccccctgcactgctgccaggttcacagactcaaatgcccatgaggcccaacaaatatgtttatttagcataaatagagatgagccaacaggacaggtggtggggaccatgtccagttagagaaggcacgccgcgtgtgtggagggcggctgctgctcagctgctgcactgacggttgctgggtggggatacggctcagcgttgccacatctctggacaaatcacacgccagaaatgaacattttgatgggaattcttttggctttaaatgttgcaaccaattgaccttttgaaatctgccaaacaaaacatgtctgtgggtcagagtccctgtgggcacaagtttgcaacccctggtctgtgacataaagtcctcattcctggcgtggaggccttgcctggtctggctccagatttctgcttccctccactccctactccatgtttccaaggctcagtgtgttcttagaagtgctgctgctgtccaagcctctgctgccttcctggtccagctctggctcacctcctactgacttccaagcacctccatcttcctggcgcacatcctgtatgcggcaccatggcctcgtttctgcaagtttagactcaagtcctggtgccttttcttcccagttgttgagaatcatccttaaactccctttgccagctgttccctgctggttgtggccatctcagccccacctgggtcatggcagcatcctgctaacagccatgcttttgcagcttgcctgccccctgccctg

SEQ ID NO: 52881 - DNA, 1126 bp, Homo sapiens
aggctcagaggaagctggcttggcctcatcaccaggaaagaaaggcatttaaaaacaaaatcagtgttagagttgaaccttttggactcctctcatctcaagatggcaagtagattttgtgggttaagtccaagcagttgctactggctgtaaggagttctctgttgaggattctaaagggtggcatgattgattgttggtgtctgccctggatgtagaagtgggcagtggagctatgcatgctgtcaatttggtacccatgacctccttattttatagaggggcagacaaggcctgaggaaaggatgagagttgcccagggtcacccaggaagttggtgacattttctttcgtgttatgaagggcctaccacaacacctacctcctacctgcttctgaaagtgtatgaaggagggaaagctctcccagggacctggctggggtggggtgctggttagagcttgcttttaagtgagcccctgctgcagtgtgcattcgttgtcctggtcaccgggcatgggggagttaacgtgttcctggggcacttggcggggagtgctgggtgctgtggtgcccagggcctcctgagtacttcgctaacccagcctcgctccgggctcagagacgggctctgttgctgagtagaagagtgttcctgttcagtcacccagtgctgcgccatgagggagcctccccgagtccacactggccctttaatagccatcagacaaacaatgttcccagtgacacaaacatcatccaaggcacttcccgtgggggagcccgggtcatggacacacagatggcatttggcagcttctcctgctggagtcaggaggggcatcagtgcccaggaggctggctgccaagttcgcaatggttgctgctgcttccctgctgcccagagaattccctgtgctgagaagggtgtctctcactccgagaaagaaagtcactgccattggagctggtgcagggtttgggggcaagaccaagagcttccttttatagtaagaagagcagagatgatagatactaaacttaataactttgctggataaaagcagaaatgaaagaaaggaagttaacagacgcctgcacccatctgacaggctgcaggaacagc

SEQ ID NO: 52882 - DNA, 2786 bp, Homo sapiens
ccgatggccaggttgtaccacttcccatagatctaggaggcaggtgagctctgggggtctgcatcagtctcagacctcaaagcagacctggctgacatctgctccccaccctccacctcctcctcttcctcctccttctcctcaaaatgacttatccttttaagggataatgtcttacaactaatcagaggccacacaccttcaagggaggccagatccctaagagtggcgtttcaggcatcacagcgaacccaggaagcaggtgtgcggctggggtcccaacctgccctgcagaagggctaactctctcaagatgtgggatctgtccatagctccatcaaccactgctccccaagagctggagtcctgtcttttactcctccaatgatggggtgctccccaccttgcaaggcagcccacagccccatgttaggaattatttcaaaagtataatgaacatgatggggtcattcaggataggcctgcttcctcttcctcctgaaagtgcacgggacagctgaaggagccctcaggctcctacggaacaggccaatgtgccccacaccctttgcgtcccagactgccacagggacctgctcctcattgcccctctgccacgacctttccttgtccctaaaagtaaacaaaacccacatgacaccacagctagaaggttctgagacccttcatacagacatggagacagccccaggtgggcaagggtattctcaaagccaccccgggatttagggcagagtgggggctggaaggcagctctggcactccacactcacaggagagtgtcctgccccagtccaggtctctccttgtgcccaagcctctgaatgtctcccaaccctaatctctgtcctgcttcacctcttcccataagccccacatgcccaacccaaaagctgctggccacatgcccacgctgtgccaccccaggtgtctgtccacagtcaggccaggatgtgggcaggggacacaggaagagctaagggaaagatgccacagagagaggggagtcattagagaaggaagggctgggaggtctgggcaaagctaggtgtctgcacgggggctgcagggcagtggcaggcaggacaaagccttctctggagcaggttcccattaacacaagggttccccttggagcccacgaggacagtgcagaaggtgaggatgtttgactcatagaatgtcagccaagagacccacggaatggcaggggatagagctgtaccttcaaaggatcccataatcccagatgatctgagtggaagcctgagaccccgagacaggccgcacttgcccagcagggcccatctgcctggactccccatcaccacatccaccctaccacagagagcggcagccttacccgagagatattgaagttttcctgcacttggatgttgtcgggcggcgttggcacagggccagcgctcaccgccaggcaggcgctcagcagcaagagcagggccccgaggctcctcatggctatgggctcctctgccttggtatatcccacaggctcggtctagcaacagaagggccaccgcctccctgcaacagggcagctgtgaactgaggctggggaaggggcctgtggcttgtagttgacctcagtgtttgccctgctcagctggggccaattacagccccaaggacagctccaatcgatccctgtagcctggctggggtcagcagtaccaagaggccgggatggctgcttcagaagaggcattggccaagcacaatagggccctggagcaccaggattgggctccgccccccaaaagtcccccacagagggcatgcgaggatggggagcgacctggcctttctgctgagtcatgccatctggacctcacagctctgtgagccagcaggtcaagcctgattgggcccatttctcacaggaaaaaactgaggcccaaggagaggaagtgacttgccagagacctcagggaagtctatgggcagagccaagaccagaacccaggtatcctgtctccagagttccttctccagcccccaggcttgccctagcctttgcaaataatagagacattaacaatgatgactgttacgagcttccgttcactgagcacctgctatgtgctggctgtgtaccaggcactttacacgtgccacaggtgtccagtaaatccccacaacaagcttacgaagtaggtgctatttgtcccctttacaggcagaggagttgagtctccaagaagtgaagtgacttgcccagaatccctcagccgggagtggagtagctgggaaaggcgtggtagagaccatggacgtgggagccaggcagcctacagtggcactcactgctgtgtgaccttgggcaagtcactttacctttcagtgccttggtttcctcatctgtaaatggggataataatagttcctagctcctagcattgttgagtgagcacctgcaatgcgctaggacagtacccagcatagagtaagagctgagtgtttgtggtgggttgaacagtgccccctccagaatccatgtgcaccccgaaccgcagaatgaacctgatttgcagatgtgattagttagatgaggttgaactggatgacaggggttttaaatccaatgaccggtatctttataagagaatggtgagggagactcagacacagggacacagagagaagcacggggaagatgtggcgtgacgccgaaggcagagatgggagggatgcagtgacacgtcaaaaatcaccaaggattgatggcagccaccaaaagctag

SEQ ID NO: 52883 - DNA, 3203 bp, Homo sapiens
ctcagcctcccgagtagctgagattacaggtgcccaccaccatgcctggctaatttttgtatttttagtagagacagcgtttcaccatattggccagactggtctctaactcctgacctcaggtgatcctctcacctcagcctcccaaagtgctgggattacaggcgtaagccactgcgctcagcctaaatttaagattttaaatgagaattttttaaaacccaggtccgttgtctgtgagctcacactcttgccagcaataccaaaggcctctctatgaatttcccttctccagtggttaaatctactgtccttacttcctccctgctcttggcatggaacattccatactctcagccacctctctgttagagctgggaatgaccccttcgggcaggcagtcccaagattaagacccctgcttatgtgagaatcaaaggattcccccatgtagtcagtgcagaaacaaatggtgtatcatgtcccttctgtaagattcagtcagtacatccctctttcactggtatccagaacaagtgtgcttctattcataaatgtgtttcctttgctccgtcaccctaaccttggccagtgattatattcccttcttgctttggctgctaggaagctcaaagccatgatgtaagtttaagcacagttactgtcttggtttagctttctgggacagttatcttcgtgttccttgtgttcacaaagtttctcaatctttgatgttttagttaatgatggtaatgaggaggtggtagcccccaacttctccttgttctgcatgatattggaggtggctttccctcgctaaagaccactttccgtatctgtgaacggaagaaaacagttcttgttctgtctgtcaagaggccaagagagacaatgtgtgaggaagtgaactgtaaactgtccactgccttacctgtgtggtggctcaggggtgtctgccattggaggaggcaggcctggtataagaataaataaataacaatgaatcattaataggaataaaatcatcctactaagcccgcttacagtgcaccaagatggctcgctgaccttcatgttgggcctgcgtgactacagttatcaaccccatggtccagatgggaagcctgagacgcgcaggggtggagaagccccagtcctagcctctcttggacagggctgttcattcagttgcacagcctctcctgggggtggggagaggcccagaggataagtccaggatgttgatttcttctcctgcctccaggaatgtttgtgctcctgagattattaaccagagcaaacagagagagtaaatgctgccaagggccacttggacttttgactgctttttaaaaattaacctggggacacaagttgcaagaccaacagtggtcagacagctgctgccccctcctccccttctggctgctggggtgggaggatggaggctctggggtccctgccctcctagggggcccaggggtctaagagtccatgggaattgctaggttctgaaaccatttggttgtgggggagggtcttgcccctcacaggaggcctcagagcctcaggggtacccagtgcaatgtggaatagaggcctcgattttcagatgcacatactggggctcagggaggggatgggacttggtcaaggtcacccagtgtgtggccgagtcggggccagataggcctgactgtggcacccaggctctcccctcatcatttattcttgtgtctacttgttcttttgccaaatacacactccatgcttggtgctgaggacaggatgggcatatgacaggcctcccagagctcccttgaggcctggggttggggaacagacgaggtgagaaggtgataagacaggatggttgctgcagtgatcagggaagcagaggccgggacaggggagtcagactccaagagtaggagtgagctagacaacagtgcagtgggatgggtgcatgggggaggggagtgggttccatgcacagggaacagcaattgcaaaggcttagggaagaaaatagaaaattatttttatttttatccaaaaaatacaaataaatccacaggtctggagcttggggacagaagggagtggtgagagtgaggctggggaggtggctgaggtccagtaggtgggatcgtgttgccgtcccaaggggtgttgcttgggagtgcacaggggcactggtgggttttcagaagtcaaggtcaaccagattagtaatcgggagagatcaatcaggaggtaacgtaagctggagacccaggaaagcaactccttaggagattttccaggaagaaggaaggggccgggccagggcactaggacccagtgactggacccacagggacatcagggacattgactgggagtcagaccagagggtgtggtcaacctttgagtcctcctctgccaatggtggaatgataaggtgactttctccgtgacaggaggccttgcctccaatgtctgaccttgctcaatttccatggcctcgtgccacagcctgtccactcagggtcctcatggcatagctggaggtgcacagcacccataactccatgactggtgatgtggaggggtgttctcactgccctgtgatttctaggcattgttactcatccctacacctccaacccaaagagcaagtccacccagagacttgagtcctagtccttgtggcttgctgcgggacaatggggcagtcatttccctccatggcttcagagctgacataataactgaatgagggtcacttgtgaaaatgcaccccaagtgtgtagatacgtaggacccctgtcatcatgggcgcttggtaccgcatgtgctccagctaaggactccatacatagctgcaactgcactaaggtgtgaacttcccttgtccaccagggggcagcagagaacttcccgaaagaaccaccggagtttgctcacagattgttctgtacagatggagacagaggccaggagcaaaggctcaaagagctacaatgcgggctcgtgtccaggcttccttgccccaagcctacttaaaatcccctggtgagtgtaaaacatttagcgtctaccttgcccatccctaccctgctagagagcttgatgcttggttggggcccttaaaaaaaatagttttgctggggaaccagaattgggtgcagttgttgcagaccacgaaggctactataact

SEQ ID NO: 52884 - DNA, 1446 bp, Homo sapiens
gcaccttgggtgggcgggcactcagaaggggcggggcactcgcaggggttggcgcggcgcaccctggcggagggctgggcatcctggaagggaggggcactctggggagggcggggcacctgggagaggaccactccgggggagcgcggggcctagggcaaagttgcctgggggaagggatctggcgtccccgggattttttattggggagatagagagaggggttcctcacctgcagagtccgggtccctgagcagtgcagcacgctctgctgccctcgacgcagctcggccgcgctcatgggacgtaccctggggtccgacagaagggcagatggtacatcctgatgtcttcctcgatccttgtctcgcccaggtgcctcctagccaatttatacccacctgagcaccacctggatgggcgtttccggcccctctggcccttgctccaggctccgcgcgagatccctgtgggcagcaatgcgacttatcatacctgcacctagcggctgttcaggactcctcgaacctgtctgaagatctgcttacccgtcgggtgacccgcgttcttccatgtcctgctctgcacacggagttagctccgcccgcgtctcctttatttaccccccaccaataccctcccttctccacaacactgggactgtctacacacatcttgcattcccaccccatcccccatcccaggcagccatccatccggaaagactccagctgcccagggctagctcgttaaagatttacccttcctcacccctgcggtggagaaagtctctcccaagctaggggacccctagctagggggttctggagtctgaggatcccttgctcttggccagtcctcacaagaggaacccgtgggaccacccagaccggcctcctttgtgcccagttggggatacctaagcagataggaaggactcaaccaaggccacagagctagcctgcacaggaccaagcttttcccaccctctccacataccccccactcccacccccagcagctcagctcagggcccaaggagtggcacaggtctcagtcagctctagggacgacctggctggattgaatctctgagctgacctgagaacaggtttccaagcatctggtaaaacactggggcacctgcctctctaatgccaaagttaatcctaggccagcatgattgtttaaccctctcctggtctggcttatgagaacagcagagatgtctgtgaatgtgcagggatggggcaatcacttattctgtaccagtctccatgctgggcaccagggcagaggaaccccatgcagcccctgacccttcccagctcacagtgtgtctggggagatggataagtacaacccagcagcgtgtagggcctttagggggagtacagaggcctgtaggagccagtgggggtggggaggaggtgagggtattccagg

SEQ ID NO: 52885 - DNA, 638 bp, Homo sapiens
atcacatcccaatgcccagaacagggcctgatgcagagccgcatcctctaaatgtctgtttggtgatgggatgatggtccaacaagaggaaatgaaacatcctaaagcctggttttgtcttttagtaaagacaagcctctatggatggttgggaaatcaaaagactccagggttgttgaaactccctgtcatttccaggatctagctcttcttctaggaatatacatagctttcccctgagtcaatgtctgcctaccattcgcccgggaatgacttacctatgaactggatattttcctctaaaaatggtaagtcactatgtaaaaatgtcaagggccattaaagtccatctcttgcacaatgatgccttcatgtatctggaaccttctgggtcagaggatgggaattaatatttattgaacaatgggcacttctttacttcattttaactaatagtcaaagtctgggcctgacaccatgattgtcctcattttacagatgaggaaacgggctcagagatgttcagtaacttgccctaagtccagaaccactttgggcaggtaggcaagtggcagagcggggatctttctcttgccagtccctagcttccatcctctcctttctgcagcctgcttcct

SEQ ID NO: 52886 - DNA, 916 bp, Homo sapiens
agcaaggtagagactcaactgacaaaagaagacagtgaagcctagagcaagtcagggacttgcctcgggtcactggtcaggcagcaggagctgagaagggacggcctacctccgcgggccagggctctggaattcgtggggcaggctgggctgagtatgcctttgtgaggcatggcatacctggactcacccgagctgcccgtccctgcccatgaatagtgggcctctttccttcctgcataaggcttggcgggcgcaagcccacggccgccccctcccctgcacacacacttacacacactcacacacccctgccggctcagctgccctccctgtttggggaaagtcaacaagagcatttgaaaagtctttctgtgtggagaatctgtttgtatagggggaggaaacggagagctggccaataggtagaaatattaatgaagcttgttataaagggcccattcacggctctccgagtaaatagggctcttgtcgggctgccacgttatctgccaagttcaagaatgtggtttgaaaaaatagaatttaaaggggtgaggtggagccttcaatggctggcctgctggagctggagccaactccaggaggagcctgtgctgtggggggctgtggctggggacactggaggtgctgggtcttgtggtgaaggctgcctgggaagaggggctggtgaggagccgctggagttccgacttagagagaattcctgtccaccggtgtggaatgccccgtgccattccttcctccccttggtgcctggcacagggcttgcagatcctctgcttagccccccaacccagtctaccttaactctcctgcctggggatttgcctcttgggatgttggtggaggggatctctatatggtaggaggagggctttgtagtaattcttag

SEQ ID NO: 52887 - DNA, 766 bp, Homo sapiens
acagggtctgcatggtaccaagtatgcaactaaaaaaacatcagttatgattgaagagggagttctcaaccttagggggccgtggacttctgaaaaccggaggaaagcccacggcccctctcccctgaagaatgcacaaacatgctcaatttgtgcacagtttgggggtgttcctgcactccctggggttcgtgcacatggaagttaagaactctggttcaacattgggggtgcgggggtggcgggggtggttccacgcgccggccagcagcctgccagttccccagtcccgcgactggcctccctcctggcagccatgggtgctctgccctctgcaggaagcagcgcacagctatgcagctcccccaacccccctacctcccctctctcggcttgggacttttcctaaagtttgttgaaaccagacaccttgctcgaccgagcccgcgtgcagccagggtttaaaaggccgccttcagcgccccctccccgcccccagcggagacttcaaaaggcccggcgggcgccgccgccccagcacctatgagccgcccccagctctcggagcccgcgccggagcccgtggacgcagagctgccgaagttcgagcgcaggcggaccgggtcggcggcgcagtcccgcgcgcccatgcccctcccggtgccgctgcgctccgcgcgcccgcgccccgtttagggaaggggacctcgccccccgcccccgcgcccacggctgcggggacccatgaatacaaatgccgttaggc

SEQ ID NO: 52888 - DNA, 2071 bp, Homo sapiens
gaggtgcgtggttagtggtggtggtggggtgcggttagattccaattgctgacagaagggagagagagggtggcaaacccttaacaagcccaccctatatgttctccagggcgctccgagtctgggagcgcaaacttttggtgggcggtggggatcacgatactggttgtcgtgggcgtctggacaccaagttctggtcctagctccgtccctgaaactgtgggtttcttccaggagtagaatttggcccttctcccctaccccaaccccccattggaggacccccagcctcaccagtcagaagttcctaatctcagaacggtgatcaaatcaccgtgaagccctgggcagccccttcctctctgtgaatctgtttccccatctatacaaggaggaggggggcgggtgtcccatcggggctgtagtgggccagctgaggctgtacccttggctccggccggcagggggcagcagggggcagcagagggcggccgggagcggggaggagggaaggtggagagccaccgcgggccgagactttaaatcgccttcatttcccccaaatccttccttttcctctcctcccccaggccggcggggaggcagcttccaccgccctccgcgcgccctcacccggccttgctctgcctccggggaccgccagcagcccgcctccaaaagtttgatcatctctctctctctttttcttgcttcttcttcctttttggtggaagcagaaaaggaccgaggcaggggcgagcgcggcgcccggactcctgggaccatgggcctggcgcgggcgcccgcggggccccagccgcgctgcctgcctgctcgggcgcccctgggcgcggggctgcgctgggggcgcgggggccgcgcgctctaagccggcctggcgcggcggggcggggggctggcggccccatggggcgcgcccacacttgccccccgggctcgggagcatgaagtaggggcctgccatgggagcgggatcggcgcggggggcccgaggcacagcggcggcggcggcggcgcgcggggggtgagtacgaactcggggacgccccctccctagcttcctgctgctccaatctcggggagggccggggttccccgccatgcggtcgcttccagcggaacgtcagcttcctgccccttcctgcgcccccgcgaggcgggacgccaagggttaataggggctgcgcccccggccgggcgagagttggcgaacgctgcccgccctgccgcgcctggcccggctgcccgatcccgttggggcgggggcagagccagcccgggggtcgggggtgggggtgggtggtggcgcctggagcggccggcggggtgcggaggggggctttttggatgcttgggggaggaggggggtctccgtttggggccgtctcggtgtgttccggtgtctcagtgtctgcaggtcccaagcctgtacgtctccgtttctatctgttcttgtgaaattgtccgcaagtttctaggtcaccaggtctcgggttctgctcctgtctccgtgtctgtgtggctctgcacgtccccgcgtttctggaaatctccgcgtgtttgtgttagtcggcctgggtctgtgtgtctgtgtttcctgcttctcggttcctgtccctttcacgtgtgtaagagagaaaaagtgagagccagcatgtcagagcagaaagggccctgggcgatcactgtgcggaacccctcagtgtacagatcgggagacagggccggagaggggcagggactctcccaggagcggctgcgcggagctggggcccagaggctgggattcccagcgtgtggagtaggagttgtaagagagagtgagcctgtgctggagccggcgcagcgtgtgggtgtgtgtgggagccagcagcatgcaagcagcccgttggggcctgtggacggcgctcctctctttccatcctgcccccaggacaccaggacactccccagaggctgttagggctgtagctgggccctgccccctttgagctggagtccgcgggatgacaccccctcctttcttccccatgtcttggaaaaagctggc

SEQ ID NO: 52889 - DNA, 1706 bp, Homo sapiens
gtgtgcccagatcacgccactgcactccagcctggcaagagagcgagactccgtctcaaaaaaaaaaagaatcgcatttgaagtttttgtaaaagggtaggaaggactctgtgcagaaatgtggaagggtgattcttgtgttcctttctggggcaaaatttgagtaagttactccggttttaagcctcagttgtccctgtttgtccaatgagtgctctaagaactgctaaaaaaaaaaaaaaggcattaagcattaactctcatggcccaagcctgggatcccatcttcctcttcccgtgagatcctacttttccctgctatccctgaggggctgtccagggggccggggcagcgatgggctggcttcacatctgcccagggaaactgaaacctctcccacatctgtttgtcaagcagccgcatgcctctgaaaatagctgcccttcccccgccttcacgcccagcccgtgtgctggggcaggcagcccggcacgccgggagtccctgtggcctgacctggccactcggcagggattgggcccctgggagggcagggctgtgcccggaagagacttctgctgcccagcaacattttgtgcaaatgtcatattttccaagcttgctgtttcccccacaaagtaggtgaacagctgtccagagtcctgagtcagtcactggggcggggggcggggggagaggctggagctgtgtggagccaggtttatgtaatgaagggatcttgtgggggccagctggcaggctccttctatcttggcgttgggctgaattcattcccctgtcccccatctcttcacccttgatggggtgctggatgtgtctccaccctgctttccgacaagcctgggaggccccaggcagaatagcatcatggctaagcacaaagaccccagagtcaggtggcctgggttcaaaccttggctgtgccttttttaagctgcaagttattccctctgactcttctgagccccctctataaagtgaggataataaagagtacctgctccatagattgctgagagaatcaagtgagatcatgcctgtaaagtatttggtatctagtaagtgctcaacaagtattagtttttcttattgctgttaattagttacctgaaaagtttgggcaagaacagccctttcctatgccctgcagggctcacagtggtctgactcatagcagctctgtgctggtcacatttgccaggtgtcagggcttgagactttgccctttagctgcagatggtctttgggggacacctggagactgctggttgtcagcttagaaacccacccagtggataggggaaacctcacccatgctgcctggcccagccagttgtgactctctttgggtgagtgcaggttagccctaaattccatgtgtggagaaagatgtgagcaggcctgaggggccctccgggggttgttgagcagggactaaaggaaggaccaagtggcttcctgcccttacctcttgtccaaccaaatggctcctcccattctaagtcccagtctatagtgaataatagtgaatagtatttcatgataataagagggtttcagtgactaaaacatataccactaagagaatccttaatcagtagtttattttagcttagaacctgaggacagacagatgggagaaaggatgggaaagaggagtttgaaatgaaatgaaagccccttg

SEQ ID NO: 52890 - DNA, 3182 bp, Homo sapiens
gccaccatgcctggctaattttttgtatttttagtagagacaaggcttcactatgttagccaggatggtctcgatctcctgacctccaggcagggcccagactcactggggagagttaaaggaacagactatttacggaggggtggacagcatcaagggaaccagcagaggcaggtgaaacacaaggggcctggaaactgcaggaaattgttaccacacccagaccagaaggtcccagggaaagatgttcccagaacccaataagagttaaaaccttgagcaggggtctcctcacagaagcaggggccatgggcgaatacagctgcagccaaattatagcacagcagagagggcacagggagagaaatataccctgtcctcccttctgtgcactctcttcctggggtctcccattggccaaacccagctggaagccagaggtcaaggaaggccggggtataatctgtagaagtcagcttcccagggcacggcacagatctggggagtaaatggagaagaaccagcatgcatatgccatctcagaatatgggtattacattcccatttcacagctggacaaactaaggcccggaggcccagggagattaagtaacttgctcaaggtcatacagagctgtactgatgccaagaagctctgttccagcaggtccttcccaggacagaggctagggaagtctgggtgccctgtgtgaattcttaggaataatcatgagctcagatggtcagagatgggagagccctttgaggccccctatctacccccaacaggttacagacacagagtcgaggcctagagatcaaaaggacattgctcagggtcacatggtaggtagcagcacacctaggatcggactttggtctcctaaaccccaggcttgtaaaacctctcattgcttggcaggcagaggctcttccagctggacacaacggtggacttgttccgtaggatggggttcccctagatctggctgtcagaggccaggacccttgggggaagccccgaggggtctgcttggttgtttccatggctctgtttgcgtacgcctggagcccaggcctcctccacctcccccaggcaggcctgagcccccgctctgctccccctcagctccaggccctctcagaggccccgttgtttgcaacgcaaagtggaaaatcccaccccggcctcgtgaatcatcccagagtcacccgctcaggcttcaggccctggaaagaaatggcagcgtttttccactgcggagagaacaggcagggtctcggatcaggggagaggggccagggggcacccgtgctcgccacgagcaaagtgggcactgagtaggggagggtccagcccgtggctagcactgggcagccggcggtccccacccaggttgaaggtggagtgaagggattggccaggcccgaagctggggccgccccgtcaaggagtccgcctgtgggctgacatcaccaggctggaccctgggtcctgagtggcactcagagtctgctctgcagatgtggtggatgaggtcagactctatcctggatgcccctatttctggggcagaagacatgccaagagggagtgtccaggcctctgcagctgcagccccaccagggtccatgaaggagctgcacccacggagcctgttcctccccggagtcctggacaagcccttcaccctgctgggtctttgccttctctgtgagatgggaagaatctcgcttttcctcttcacttgataatgtagcagaggaaattacccccaccttggctttccgcaactcaggaaatgccagtgccaggaagtttccaggatcttcatttcacagatgtccagagaagagaagggacttactcaaggccatatacctagttagagtcacactcaaccaagattgtgtggcagctgcccagggtaggagaacaggtccagtggtcctgggtttgaatccaggctctgcctcttgttagctgtgtggcactgggcaagtcacttttcctctctgaacctctctctggtttcttacctgttgaaacggcatggtatacctacagtatgcttcgtctcagccccctgctttttctttaattctgggtccacctgggacagttgggtcaaggagggccttctaagaagggacatcttttgctgtcccctagaaacagatgtgaaggaggatggcttaaaattttgagttgaggacgttccagaagcttgcttcacagaaataacagctaacattttttttgagcattaattgggtgccagacaccaggattagcacttgttatagattatctgtcggctaggtgctattattaacctcattttacagtaatagaaaaaaggcttggagcctggaaatagctttgctcaaagccacccagatagtaggtgggtgggggggggtgccctatgtgaacccaggcccgtggtgttacaccatactctactgcccagagacagctggagaggagaagtgggtaagactggcacccagagtccagaacccacaaaaccagacaacccctctacccacccctggaactctgccgccaatttggccagaggtctctggatgctcagaggtagctgggacttgcccgaggtcacaaaacagaccctcctccttctgctcagggctcttgcccagtgaccttggtacccatatctgcctgtctggatctctcctctgatttttattcatggacgagcaagcacgtggtgttcacaggccagaactgtgagccgagactgcccagcatgagatctggattaattaccagccaaaccagactgggttttcaacaccgattttaactctgggcaggaaatctggaatctcattgatggttatttgaaacaaatgaattccccaggcctcacacatcctcgaaagcctggcttccttcaaaggctgcaggcacagttcttcacatcaggcgcttagttaatcctcatttactccttcgaggtaaatgcagtggtagctattggacccatcttaacggggagcatctgagactcagataagtgggaggaactgcaggaagtgtgcagctattaagtggtaaagccaggatttgaacaaagatcagctcatccttcagtaagtctgctcggctgcctcccttcctgtgtaaagagaaaagagatgaggacacacag

SEQ ID NO: 52891 - DNA, 540 bp, Homo sapiens
gctggctaaagacttgtgcattttgtcagcggcaggcagggatctgaacccaggcatgtctgattcaaaaacccatgccatgctctgtgtgctgtgctgcctgtttgtggggcagagatacttggtgtgaccttggccaagtcccttctctgttctgattctgcagagaatttggctgagctctgaggtttctggctgttttattttatcaaacgtttggctgagccctggggataggcagatgactcatatccccttagttcctttgaggagactgtcatctgatgggagacacaggcttctaagcagataattccccaagtaagatagcggtctttaaaatagaggaaaagaagggactttgtccaacttggggaaggttttctggagaaggtgacaccctaagttagctgggtgataaatgatgagggcgtcagtgactgaatagtagctatgaaagcccaaaagccccaaagagcatgaatttctcagggcagggacctcaggggactcctcctcttagccgcggactatccatgc

SEQ ID NO: 52892 - DNA, 1834 bp, Homo sapiens
ctatacacgaggaggtgggaggcgatctgacctgactccatccaggtggtgtaggcctcgaggagtggttctagccaaagccagggcccctgctgcgctttcagtggaatgagtgttaaccttgggcccagccgcaggggccagtgagaggtcagagcctgggaaatgacactccaagtgtccccataatctgatgccccctccgccctgtccattgggtcattcctcatggggtttgagtttgggggcccgtggagggacacaagtaaactatctgctagcttgacaaatgagcttccagctttaccactccagcaactgtactgagaaattctgctcagagggaggctggaggaggtccctgagggaggcagggaaccccatcgctcagggaaggccagtcctgggaagaaggcccagatgtccccgtggccatctgtgcctgctcaggtgagtgggagcagaacctgggtggggtgggcaggaggtgagagctctctgtgtctgaatcctgactttgctacctcctgactgaacttcaccttggcctcacttccctgagcctcagggatcccctctgtgaaatgggatcattgtatccactcttattagaaccacagaaacacacagtccattccagtccagtggctaagagaacagtttctggaaccagaccacctaggttcaaatcctagctctaccactcatgtaatcacaatcctgagcaaaatttttaaccaccctatgcctcggtttcttcatctgtaaaatgggaacaatagtggtacctaacttggaggattgttgtgagtgaggatgtagataaattaatatgtgaagtgcctagtatgtagtaagcactcaagaagtactagttatgataataatagctattgttggtgttattatattacacacacgtgatattttacacctggtagcagctatccgggttactgaattgacaaaaatttcacagtcacattggaacttggtgggagagagtgctgcaattgataagtgatgtctgccttggctggggttgaggaagtgtcaacacatgagtcataaatttgtcatccctgatgtccattcagtaggactttgctgagcaccttctttggcacaaggcattgacctaaatgctttggaaaaagaaatatctgccatgggaattcgagaactctctagaagtcttctaatctgaccctctctaagcccaacaggaatcccttctggagcatcttggtcatatggtgattaaactccaaattgaacacctccagtgcaaaaagtccctccctctgtgggagcctagtccattctacagagctctctttgtttggagttttcctgtggatggagcccgagtcgtcctcactgtccctgagtgaggctgtttgaggtgtaaaatggtctttgtctgtgcttcccagggctccttcttcaggctaaacaattcccatcccaaagcctttctgaagggatgtttacatatcctgtctgtcatccttggcacatgttcctatttgtcatcatcccagcgttcactaggttgggtcctgagaggagcaagaatattgcttagtggaataaacacagattgtggggttttggactatagcatcatagccctcctggttcttttttttttttttttttttttgagacagggtctcactgtgtcttccaggctggagttcagtggtgcagtcttggctcactgcagcctctgcctcttgggctcaagtgatcctcccacctcagcctcccaagtagctgggacaacaggtgtgtaccatgatgcccagctaattttagtattttctttttg

SEQ ID NO: 52893 - DNA, 870 bp, Homo sapiens
cccactccgctctgttctcctattccccagcagaggagagagctccgagacaggaagggaagtgttgcaggccacacggctggtcctttgcaagccgggatgtgaatccagctgtctgagctccctgacttcctgcaggatcctacagctcaagggcgtctggagggcacaaagcactgttctgtgttccacagtcctggttccacaccagcctgagtctggctcagacacacctacccttccctctctagtttgtgtccccatctgtaaccctaagcaggctagaattcatctctgacgaagcgctttccgtctggaattccccacattccccaggagcaggcggtttgccctaaagctggttctgtgtccacagggggagcagggcgaggacggcaaggctgaggggccccctgggccacctggagatcgggtaagccccctccctcccctggaccatgtggcgtcctaggtggaatctgagcctcccgctgcatggagaggggtgggccgatcaggggccaggtccctgagagctccgcagaggtcgcggccaacagggcccagggctggcatccttggcacctggtggcccaaattttgctgttgtctttgtcattcagggccctgtgggtgatcgaggagaccgcggggaaccgggagaccctgggtaccctgtaagtatcagagctcctacctgctggcaggatcgggcatgtcagggagaggggggatgacacatgtctagaaagaacaagaacttcccaggcttctgtgctgcctcccagccctctgcaggatgggcccccctcacctgtctctctttggcttccagggacaggagggtgtgcaaggcctccgtggaaagcc

SEQ ID NO: 52894 - DNA, 2010 bp, Homo sapiens
ggccctaggaggagccctaggcctcgaagaatccattcaactaggtgatcccccaaacccttgtgcaagtgacccagcctctctcaatgtcagttgtcttctctgtaaaatggatacatcccagtagcaacataggcaagtacttagccatgtgacccctcctctgggggctctgccagttgtgagctctgcccagaaggtttccttccatctcggttggaggaatcccttttctgctcacccaccctgacttcatgctcacctggggctcggcaggtcacaagatgcagggtccatctacagaaccaaggaatgggctcatcccccagatacatacatcacctccatcccacgctgcctgcaggtacctactgggtggatccaaaccttggctgctcctctgacaccatcgaggtctcctgcaacttcactcatggtggacagacgtgtctcaagcccatcacggcctccaaggtacccatcagctcccacactgcccaccaggctgtctgcctctatccccagcctgccctgggccacaaccaacccaggttctgttctgagctgtgcctgtcttactgcatgcccttgggaaagttatcgcctccttccgagactcagtttccttatctataaattgggagtgagtaggactaatttgtaaccacaaaccctttcgagtcatatgatgctgatgattctttcttcaaatagaatcttctgcctaatatctaaagcagagcagttggccaagctggcctggcttgtggaactatgaatcatcagcatgaaataaaagagaaaactagcatgatgctcatctgaagcatgttgtgtgaattatgtatgcgaatacttaactcatgttcaatgcctgcgtaccacgtgcctgtttctgggttgagcattttaggtggtacagggccactcaacaacaaaccaaggcaggtggcagcatgagacctgacagctccctcgcccagggatcctcagtggattgtgggtctgtagttccactaagccttccgaatttgggggcaatttatgccacagtgagaagctgctccgactgcgggggaaaggaaccctcccatttcatcagccacatcccctaggagatgccttgtgctgactgggtcagactggcagtttgagaatctctaggagaggcagccagccagtagccaggtctttgttgggtccctatcatgtgccaggccctgagccaggacggggaggtcagactcgaaactcccctgcggccagagctcacagtccagcagggacttggtgacctccacaggctctcttccctggtgactcgaaggttttgggatcacgcagcaaacctgcctagcagaggggtgaggctggagttggcgcctgggttggtggcatgaatgcccaactgggtcaccttctccatcagaaacaatggcagggagaggccctggctctgtgtgggaaagtgctgaagccacaaatcctgccgtgttgtttgctctcaggtctgccatttccggcagcaccccatcgcacctcacagggatcttgggacttaggaagggtctcgaaaacacctctcatttcctctgcattccatgagcctcttagtcttgggcaaaaccctctccctcgctgagctcctggatcctagctcagcccaaagaccccccatacagtaagggagtggatcagatggcaccaagatctttgaagctctggctctggagtcaggcaggcccttcccacttacgcagccaagaacctgtaagaccagctcacgcagacctcagtttccccgtctatcaagtgggcacatgtctgggagcatatcaggaaatgcttgccaggaaggggcctatccctgttccctccatagagaggcagggaaccctcggtgtggggggtgtggggggcagcctgagccgctcactgccgttgcttctctataggtcgagtttgccatcagccgggtccagatgaatttcctgcacctgctaagctccg

SEQ ID NO: 52895 - DNA, 3111 bp, Homo sapiens
gagcttgcagtgagctgagatggcgccactgcactccatattaagggatttattatatgaaattggctcatgcaatgatggaagctgacaaatcttaagattggctgctggcagctttgagacccaggaaaacccaacggttcagttcaagtccaaaggcagggaaaaaacctgtcccagcttgaaggcagtcaggcagaaggaattcgctcgtactcagcctgtttgttctattcaggccttcaactgattggatgaagcccagccacattggggagggccatctgctttactcagtctcccatgggattacccaaatgttaatcccatccaaaaacaccttcacagacacacccagaatagtgtttggccaaatatctgggcaccctgtggcccagtcaaggtgatacataaaattaaccatcacactcctcaagctgaggttgaaagagaaggaatagaagtgagccagatggggaagggcacttggggtagagggaacagtgcctgccaaggcccagaggtaaaggtagcactttgcatttgggaacggtaagtgttcccatgtggggctgcaggaaagggtgaggaagcctgcggtatggagctgggaacatgacaagtcacaggtttgcacagatgagcagaggtctgagttggcaagttgggtttgactgccatggggccctggagcagagccatccaggaggcagctgcctgcgctgcgaggaaaggagagaggtctgcactgcactcagagctctggaggcatcagcagtttctgctaggcctggaagacatgggtagagattgaaaaagccagccagaagggccagagggggaaagcaagaagagccatgttagaactgtgacactcacgactctcggcctggtctccaatcccaggtgggccagtgaggatgctggagctgggccagctcattcccagcaggggcagataggaggttgttggggacagaaggaaacttttcctaaactggcagtacccacagttcccaatctcctgttgcacaactgagtgtcaggaaacagtcaggtggacttcccaggctgggccaactccaggggaaagcccaggccagcctgtttgccctgttcacaatgaatcaaaccctagctatggtcacaacccataatggccggcagcccaggattggaaaaatgaggaaaagaagagcgagaaaaagagaggctggcaggcagattccagttcctgactgggacatggccctgggtaggtcattctttctctctaggcctcagtttctctctctgcaaaatggggccgatatgctctgcctttcttgccagccacagaaaggactattgttcaataatagtagagtgaacggtatgaaatagaataatatccaatgcttttggacctgcaaaacccagtttcatatggttcaacccaagaatagcaccattcagaagaataatggctacaatttcttgtgcatggacggcacaccaggtggcatgctcggtgcgatctcatgcgcatgtgcatgtgatcccacattttcatctcatacacaatctcgtgggacacatgttgtaaccctggcttttcagatgaggaaactgaagttcaaagaggtttcttaagttgcccaagatcacaaaacaggatttgaacttgagaaaatctttttgggtctttcctcagcccagtcacagagttccccatgaggacaatttgctcagcctatgtattctcatgtggaagcaggtcacaggttggtcttacacagaccttggctctggccttgatgaagaagggtggaatgtgactttttcaggaaatgaagtgtttcaaacaggtgcatttccctgatgacttccagctcacctgctgtgtgacgtttcccacactgcctcgcctctctgggccacttttttcctcatctatataatggggggaatgtcttattttcttgagcctaggatagacacgttttcatgttttgatatctttaaaagagagatgtagcttgcaatcactgaagtacatatgcaatgcagaaatttttcttccctcctcaccccagcttgtctgggggatggttaaactgacagcgatagttattataatcagaagacccttaggagcaaatttattttatttaacaagcattttatgggtgtggtagctcatgcctgtaaacccagcactttgggaggctgaagtgggaggatcacttgagcccgggagttcgagaccagcctgggcaacatagtgagacctcccatccctaccaaaaaattttaagaactttaaaaaaccaagcattacaactatgtaccaatttaatcttcataacaacccaatgaagtaggtaccactattattctcattttacaggtagagatactgaggcacagagaagttcaccaacttgcgcttcaccaccagcctgtactgcctgccctgaggccttttctctctcttttgttcctgcctaacttcttttgacatcctgccagggccagatggaggatagggccagacgagctagaaggactacttaaagcctcagtctttagaggcattcatgcatacctgaaatgttaggagacagagaaaattgtactgtggtagggtaggtgccagatgagcttggaggaattacttggatagtctaaggtggagagtgagacccccaagcggcagcctgagggacagtgaggacactgaagaccacttactcctgccaaggagaggcactcggaagcgcctctgtactgcattcacagtgcacagctccgctttgaatggtggtagctctccttattcacccttcccctacacaggctgcgcctgggatctctacactcgagcagacggagaccccagaccccattggcctaagtgcctgaacgttataaatcaaaagtattttaaatgaagctgacatgtttacatttaagttttagaaatttaattaattatcccagcactttgggaggctgaggcgggtggatcacaaggtcaggagatcgagaccatcctggctaacccggtgaaaccctgtctctactaaaaaaatacaaaaaaatattagccgggcatggtggcgggcgcct

SEQ ID NO: 52896 - DNA, 1451 bp, Homo sapiens
gtgaacccaggaggtggagcttgcagtgagctgagattgtgccactgcactccagcctgggcaacagagcgagactctgtctcgaaaaaaaaaaaaaaagaaatttaattaattaattaaatcatgtccaaaagatttgtacaactgaaaattattcacgaggctagcatgcagcctctacatgcccatgtcaagaaccagattcaattgtcctgatgcagtgactcacaactgtaatcccagcactttgggaggtcgaggcaggcagatcatttgaggtcaggagtttgagacgagcctggccaacatgatgaaaccccgtctgtactaaaaatacaaaaattagccaggtgtggtggcaggcgcctgtaatcccagttattcaggaggctgaggccggagaatttcttgaacctgggagatggaggttgcagtaagccaagattgtgccactgcactccaacctgggtgacagagccagactctgtctcaagaaaataaagagaaaaagaactagattcaggctgtatgtgggcaccatctacagacatcagacacacacatttaggagtaataatgatgcaatattgccaaatgtttctcagcaaccatgtgcaactgttgcatgtactgtttatttctaactcaggaggatctctctaaccacacattgcaagaaaatagactttcagtgtttctggcaaaacaaagagtttttttgttggcatttatgctgaaagggaagagttaaaatgttaatttgtcttttttcttacctccaagttcactcaaatcctctcttgaagcagtgtctgtctcctatgtctgcggtggcatcatccacgaagtatcaggacatttgacctgttgttttcagagtcgagtgccacatgtagagattgtttcctggggcctaaacagtgttggttgtgaaagagaataatcagtgatgtgggtcccactgtgccagtaccaggcaccagatcccaaaggacagaggtgcttatctgttatttaataaactgttgtgtgtgggtgggtgtgtgggtgggtgtgatatgtggggctctctaaatccctgggccccaatagtccaggtctaatggtggtgctgtccccaacaatgctcagcttctcctcaaaatacatggtatctgggctgggcacggtggcttacacctgaaatcccagcactttggaaggccgaggcgggtggatcacttgaggtcaggagttcaagatcagcctggccaacatggcgaaaccctgtccgtaccaaaaatacaaaagaaattagccaggtgtggtagtgacacctgtaatcccagctactagggaggctggataggagaattgctggaactcgggaggcggaggctgcagtgaactgagatcgtgccactgcactccagcctgggcgacagagtgaaaccttgtctcagatagataga

SEQ ID NO: 52897 - DNA, 1893 bp, Homo sapiens
ggagccctgaggtggagccaagcccgaggcacagcccactcagtggcacaagccacgaagggccggcctcacccagacctgggggctcatgattgacagcctcttgttacgtgagggaagcagcactcctcccgtggcagaaaagttgggcctgagttgttccatctattccgtatgtgcagctgcgtacaccatacagggtgataagaccatgagcctgaggctctgacaccccagggtccagtcctgtgtcctcaggcaccactcccctttgtacctcctgtcccaacagccaagctccacagggccaagactacagcatcctttgctcagcacccaaaccactgctgtgcccacagcacggaggctggggacaccgagctgatgtcctcagaaggcaagtggacaggacagcctctggggtcccacagtggcctggaactgaaggctcagaacctaaaagaagtttccccatttcaatgttactttcagtaagacaccattttcaaccatactgaggaggatccgctgaaaaatgaaacagaaatgagtcgtgatgggcagggcagggagaagcaagggagacgagaagtggggaacatggaaggaaaagccacgtgaggaagaaaccagaggtcaagagaaaaagaatcatggaggtagaggaagcaaaaaacacacataacaaagaatgtggactttggagtcaaactaatgtgagtccaaacccaggctctctcccaaaccagtttgggcagatggcccagtggaacctcactctcctcatcagtaaaaagggggcagagtgagggtcctgagagctagtacagggactgtgtgaagtagacaatgcccagtgtttagcgtaagaatcagggtccagctggtgctccctaaacagcagctgctgttcactgttgaaaggcgctctggaaggccaggcgcggtggctcatgcttgtaatcccagcactgtgggaggccgaggtgggcggatcacctgaggtagggagttcgagaccagcctgaccaacgtggagaaaccccatctctcctaaaaatacaaaattagccaggcgtggtagcacatacctgtaatcccagcgactcgggaggctgaggcaagagaattgcttgaaaccagcaggggaggttgtggtgagccaagatcgagccattgcactccagcctgggcaacaagagcaaaatggcgaaactccatctccgagaaaaaaaaaaaaaagaatactttctgaaagtatttattcatacaaataaagacttgacccataaggtaggaacgcaaatgggccacggaatcactcattccacagtatacaccgagtgcccttgaagtgctgggcactgctccaggattgggggcatattggtgaaagagaagcaagctgcctgctcagatggcagggaatggggaaaaacagggagacagtttcctgtttgagatgttgggagatgcttcgagtagtatatttactggaaatagacattcaacttggatgtccctttttggaaatgtgcctgcgtccagggctgggttggggccccaatgaactttggctctgacatagctgttgccacactcagtggaactgaatccatgtttgccttcacccggcatccttcaccccaactctccccgccacaacatacatcccatgccagcctggggaccctcaaaggtgcttcatcattaggtttgtggctgggtcctactgaagtaagtcttggcactcagagggataggaattgaatgaagacatgagattcctctgcgggaggcctctctaggaaatctgtggactcacacgtttactaatgttgctgcagccccgcacccaccttggccttgggcagccatactctagggcttttg

SEQ ID NO: 52898 - DNA, 1643 bp, Homo sapiens
cggagcagaataaagcgctgtgagtggagagcggacagggagacacctcgatgcttcctagcaccacctgaaccgggagggctgactaagagcaggctggaagctgtctgcaagactatagtaaatcctggtgaaacccccaacatggtccaacctccagccaccagcactgagggagtaaatcctgtctgtgtttctctccaatcagtccctgcatcttcagggtcttgttttgtgggcattgctgacaccgcagcagacaatcctacccagatacccctccccacaagaccccctcaaccacggagcagcgttagagccaggctcagcaaagccaccctccaggcggatgcaggctccacatctacttggtctggcttctggggtgggaattcccactggggccgttcttgcctggtggcccctggactcctgggtgagtatcccctggtgccgcctccagcagacatgagcgctcagatgactgtgtcagaaggagtggaggcctcttcctggctgtgccccagcgctgagtgtgtgtgtctgagggcagtgggttcccttggtaatccccagggagacgcttgctggtgtttctgaggcaaagccacgagggcaagtgtgggcggtggctactggagagtgacatctccccacccccagttaactcctgaaatggagagctccgcctcctagtcagaaggcactaaaaaaaaagacttaccaggccgggggcgtgagtcagccacttgggtatctcagtctctctgatgtaactctttagtttcttactgagtgccagcaggcacttaacattcatctttctctgcaaacttacttccctgtctctgcacatggcagcagcatctacctgactagccagacagaactctgagtcactctagatcccctccttccctgaacatccctgaagttaattagttaccaagtctcatgggcccaacttccaaaatacctcttcccaaatgaatcccttcttcccctctgtaggggccctccccgagaacccagtccccatcatctctctcctggatgtggcagccttctcagcagtctcttggtctccgttctcaccctgccggtggccagagaactctaaaacataaacctgcctacgctacgtccctgcttaaaatccccttccctgtcctctcagcctttgtgcactcatggaatatgcagtgaatgtctccccttacccatggccttcaggccctgtaggatctcccataggtctctcctctctacccctctcttcctttactgctcaacactccaccccctcacactagaggatctggctgaccgtttagctcctccaaggtgatgggcactctctcacctttaggactttgcacatgccattccctccactgaagatactcttctatctctcttccttctgatgtctgctgagataccacttcctccaggaagccctccctgaagcctctaaccggaccagatgctccttcgctgtgctcccacagtcctttagtcctctgccatcatggtatttatcacaatggagggcactactgcctgtttctttgtctgttcatcctacaagatggtaagctttaagaggcctaggatagagtcttgtccactattgtattccc

SEQ ID NO: 52899 - DNA, 1122 bp, Homo sapiens
acagggtttccaaacttttggcaactattttgtaattttgtttaaaggcgataaaaaagaaaaggcctttttctgcttgctgagaggcaggataatttgtggaaagtagtgcagggcagtgattatgaccctggatttgaaagagagacagacctggctccaggttctcctgcctactagctgtggggcctttgagtcacccctctgagcttcagttccatcctggttaaatgagggtgataaatgtaactgcttcactgggttttgatgatgaccaaataaaataacatactctagggtttaccacagtccctgtacacaaccatccttgcttaataatgggtaactattgtgaaataatgatcgttatcatgggaagctactcaggaactgtttgctctaaaagagaccctgtgtctgggattctcttttctgtcttgcagcaaagaaggcttcagagacagagtcatgggagacagtggttgtctggcagttccatgggtggctcctgaattgggcagtaccttgacttggtcctggggcatgagacgtcctgcctgtatcagtctttcaaaggactccacctggacattgggaggggaaggaaatatgctccattaatccagtcctgtagactcccacacccagccacatctatgccttggtaagaggagctgggtccgtcctcaggatgtggggtttctgccaagcatggagacgtgggtgctgggaacagcttctaccaccagccccaggcatggtagccttgagaaaaattgaagtgaaacctgcaggaatttactgacaacaaagcaagtcactcatgtgcatcaagactaatgagtcaggatatttactgcagcatgaacagtagggaggggacaagaaattgcctaaatgcctgtcggtggaatagtattcagccatcaacaagaggaaggcacacgtgtatgttctgagctattaatgcctccaagacctatttttcagtgtcaaatcaaggtacagggcaatgtttacggtatgctaccatctgtatagaatatgtggagagtaaaaaggaaaacgataaatacattgcttatatacgatatactatctctagaggaattcaagaaacta

SEQ ID NO: 52900 - DNA, 576 bp, Homo sapiens
agaagagcagccgacggaggctggggaaagaggggatggggagtgactgcctaatacagatgaggtttcttagtgcgtgatgaaaatgttctaaaactgactgtggtgatagtggcagaactgcaaatatactaaaaaccgctgaagcaagcaaacactttaaatgagtcaaccgcatggtatgtgaattatatttcagtaaagcaagggaaagaaggagagatgggaggggagggaagaggagaggaggggaggggaggagagaagagaagaggagaggggaagggagaggagaggagaggagggaagggaagggaagaataaaatggtggtgcttctgaaagaatttgttttatgggcatggtagtgcatgtaactattgcatttctcttttggcattggcaactaggaagctcaaagctaaatgtgtgactctaatgtgcttagggtccaacagaacattttatttactcactccacgtattttatttttttctacccttacttcctctctgccccagttttctcacttctgttttcagaatgtggctaaaacgtatgtattttcataaggtg

SEQ ID NO: 52901 - DNA, 1794 bp, Homo sapiens
gagctcactgtagccttgaccacctgggctcaagcgatcctcccacctcggcctcctgagtagctaagaccacaggtatgcgccaccatgcctggctaattttaaaaatttttttttgtcgagatggggttttgccacgttgcccaggctggttttgaactccttgtttcaaatgatcctcctgcctcggcctccctatgtgctgggattacaagcatgagccacccacccagctggtcaactatattttaaatagaagctctaatccttgcttctcataccttctgcagggcctgtacccttcttggaaatccctgccagggatcttaagcttcagtgtgcttaagaatcctctaagcgtgcagtttcctgaaacaacctgcagagagcctgactcagtggccctgggatagggcccaggaatctgcattttaaaccagggcctcaggcagggcctgccctttgaagttcactaggcctcctggctcctgctgttatggcaggtggagaagaggctacaatttagctgttgcttttctgattctgaagcctctgctgaggaaggggccgggggaggtgtgcggttttttgactttttaaagggctttttttctagctctgccacagagcagcctgcccaatcacagagccctctgggtgcacaaagaggaacatcctgtcttctgggatgactcagtcgtggcagaaatctcactgtaaccaggggaaggtgcacgtcagaggcagctgcagtgactgactagagtttcgcacttgcccccaggcgcctaaaccagtgagcctttcctgagccaggcctctgccttccatgcgagccatggccctcctcaccacaaagccccagaactggccagtcagctagtcagtcaacaaacacacgttagtgccaactacctgccaacctcaggctgggacgatgctgtgatagagaagcaggctgggcatcaggagacaggtgctagtcctggctgctgttactcactgtgtatagctgggcttgcattttcctcactgtaaaatagagaaagtaccacctgctcttgatatcgcaaggggatatcaccctgctagggtgggttgggaggcagggtatgggactcaaagagctttgaagtccctgattgactcagcttctaagggcaacagcctcagaactgttaacctctctcctcctccctgaggtcacatttcaaagtacaaagatacatactgagcacccagtgggcgcaaattaactttttaaaaaagccctatgacttcctactatataccaggcgctacgtaagatgcaaagaatatagaaaagagtaaaagtgttccaagattttaaacggtggggggtagtacaatacagaagtgttaccaaaggaagctttaaggtgggcttgagaaacaatgaggatttgggggagaagactggggagggcattccaggcagcgggaacagcacggaggcaaaggcacgtaggtctgaaagtatggcctgaccttgaaggagagctatgggcaggtgtccctgcatgccagataaaggcagagttgttccagccagccctcgttagggcagcagggctgctcctaaaaggcagtgagtggggtttggtgaagactccagcagtgtgagctggggagggctatggagttcagggtccccgccatccctggagaaactggccccacaaggaagtagcagccactgcaccctccttctgcacatctccttcttacacccaagccgccactgcccctgctctctcaagggtctaacagacc

SEQ ID NO: 52902 - DNA, 690 bp, Homo sapiens
tttgcccacccaggcagaaatgccatgcagacaggaggctgcagagcacaggtgttaaggcacatgggctttgtgggcaaacagagaactccatgttctcccttggaagctgtgtggccttgggcaagctgcttaacctctctgaatcccagattccacatctgtaacatggaccaataattattttactgggttcttgggatgacggatgagactatgtgccaaaagttcttggccccagtgcccagctggcacagaatgactgttcacaaataaatggccttgccttttccgtgaaacgccctacaacctgctccctgcaggactgagtttaattttcctcatccacagcttccacaatatcaaccccaggtctagcgatgagtcctggacacaaaaagggagaagcagttttcccaagtggagggaggtgctgacatttccctgtgaccctcttccctgcgacccttaaaccagttccagggctcactgacccagctagaaactctgtcctcactctgagtagttaaggagcagaacaaacagccccttctcagccaactgagataagggttatgaggagggtgtggccatattgaggaaaacacatacataaattcaaattcatgctcttttcaaagagtcaaacaaaccgtgcacgtgccaggaagggactgctaacagcaaaac

SEQ ID NO: 52903 - DNA, 1171 bp, Homo sapiens
gaagcaggtctttaaacataggtaatgatggactccaatccgtcatttctttcaacaaaagcccgggaaaggagctttggaagtgtcgtctaaggtcacgcagcaagcagactctggttctgcctgtgccagccccatcacactggggagagcccagctctgcgcctccctgctgtgcacccttgggccagtcgcgccccctctctggacctcattctcctccgcaggtgtaccaagagggaactggacttatttttgcagcccgttcagttcctaccattgtcagggctgcctacccgacactggcccttgttctaccttcccccccgcgacaaaaagaggaaaagaaacttgcgttaggcgtccgggaagcgcgcgcggctccgagggccgccaggctgcgcggattgttgctgggtgaacgaatctcacacaaatcccagacagaaagcctcacctccccagtaaccacagcaacccgggccacgcctccagcccaaacacagcccgaggccccgccaaggcccacccccgagctcccccgggacccctcccctccctgccaccagccccagctggaaagagaaaaagccaacgcccccattgtgcagaggtggagactgaggccggagggtggagactgaggaaccccgcggccggcacggtttggactggggcccataccgcccgtccagggctccctcccattcccggagcggtgatgcgtctccttccccgtgcgcgtggggtttccacgtggaaaagaccgaaagcagcgccgtcccagtggaacggagcccactggcgctgtccactctccctccccattctcccgacggagaaactgagtcccaacgagggacagggaccaccccggacgccccgcgagcccctccccgagtctcacctgctggcggccgccgagcgcgggtggtttcctggagttgagcggcaaacaaaggcctccaatccgggcgcggggcggggcggtggctcctttgcataatccctgaggcccgcccgcgacagcagggggcggcccggggggggcggggcctctgggagcgcaccaatcaccgaaaggccgccgccacggcccgcccccaggaactcggacatagggagcgcaaaccctgctgcaggatgaaaatctcagacctgggaggctgtg

SEQ ID NO: 52904 - DNA, 870 bp, Homo sapiens
aaaaaaaaaaagtgggggtgggggggtggggagaaaaaacgttttatttaacagcctagacaaattcctctattccatttgtttcctatgaccaaacaaaatgcccctttaacttgtccagtctgtgacagcagagttaatgaccaccagcctttcacatgaggcccaggagagagaccctcctctcatccttgaagtgtgctgatcaggcagtgtagacaaattcagagactccaccattcaatgagataatttcacaagtcaccagttatctatcagggaatttccacagacaacgtacaaaataaaaacctgacaaaggtcaaggcatggtgagagagataagagagaggaaaaaggaaaaaaacaaaaaggaaaaagtgcccaatgccacctctgtccctgaaatctagtcaataaaatgcatacagtgtgcccaggggagaacagggaagctgcagcctaggttttctcatcaaatagctacaaagccatttccacaaggaaaaaactcagggaggaaacgcacatttactgaactcctgctcttgccagcaccacgctgggctgtatgccgtgcttctccgttagcagccagccgagagccctggcaatgagcatgcactttggaggccagaatacctgggttcaaatcctagtcccaccacccctgactgtgtgcccctgactgtgtgcccgtgatgggtcacctcctcttccaattctcagagtcctctcccgggggggtatggtgaagtgtcagtgggggatttacatgaaacccacacagagcttgtgatgtcacagaagattcccagtggtggtgatattttttagtgcgctaagtactgtaaacatcttgtgcgtgtt

SEQ ID NO: 52905 - DNA, 1177 bp, Homo sapiens
gagctcaccgacaggccgtccagcggcgcgttcatctccacgccgaggcccggccgggctctgagcgcgcggggtgtgggcggtgccgctgtcctcgcgggtactggcgcgacagctggatccccgggagcgcggagacgacggctggagcctgggtttggggagcacgggtacagtggctggatcctagggggtcgcggagaccgctgctagagtcccggaggcgcgaagacggcgggggtcgcgaacctggaatccgggggacgcggagacgtcggcgggttcctgagagacacaagagttggctgctggagcccggaggtggcggagactgctgctggagtccggggggcgcggggtcagcagctacattctggagggcacggagacgacgggtggctggagtttgggggcgccgcaaagctgacctgactgccccgtcacaccatgcccggggctcccccagccgggcgcccgttcctctagggctgggggaccccaaagtcagaagttggggcggagggcgctctagtcccagagcactccggggagtggcagccggtgaagcggcgcgggcgtccgacaaggggtgcggggcatgtccggggcagccccgggatgcagccgcccggggagcctccgcgcctctgcgccgcccggccgcaagcccggactttgcgaactgttgagccacccgggccgagtcttccagcgagttccgacgccgtctcgttgccagcccggcccgggccccgccccctcgtccctcctcctgcccgccccctccccacgggctcctcaggaaatgacgtcccgcccggtgcgcctggccgttgcctggagacggggtgaaacagtccagccccagggaagaaaggggtgaacgcggcggtaggggtgggaggagcccccgcgtcccctaccccgccggcagagccgggagcggggctcagaaacagcgctcttcggcggtcgcagcgagtgccgacaccaggatcgctttggagtaattagccggctagctaattcacaattcggggggaaatcgtcaagttttttgtttgtttgatttttgcttccaaaatactgggcacttcagtctcggttttcttccttacaatgtggcgctcccctcctgcacgcgccctgacatgacaaattccagggtttatgtgga

SEQ ID NO: 52906 - DNA, 3257 bp, Homo sapiens
tgtcgccctggctgcagtgcagcgtcacgatctcggctcactgcagcctccgcctcccgggttcaagcgattctcgtgcctcagcctactgagtagctgcgattacaggcgcgcgccaccacgcccggctaatttttgtatttttagtaaagacggggtttcaccacgtcggccaggctggtctcgaactcctcacctgaagtgatccacccgcctcggcctctcaaagtgctgggattacaggctcgtgagccactgcgcctggccttcagatcttaaacaccacttccttggtacagcattcagagacacctccatattcctctccccttactaaaggttccttcttacggcaccctgcatttttccttcatgactttatcacagtttgtaattgtctatttattttaattaatctgtctgtgtccataaactgtgagctccgccgggaccttgtttgccctgctctctgctatgtcctcaatatcaacagtggactaggatcacagcaggctttcatcaaatatttatgggaaacagtccagtccattcctgaactcgggttcagaaaaggatagcgacctgtccaaaatcacacaggttagcggcagacttgatcccgagtctcctaactggcaacccaagactctatccccggaactggcaagaatcttcctgaactaccccgataaaattttgagtgccaaagaaagtcccagaaagggagtgagtagagcagtgtggagagtaggaggaaagtgatttgacttggcccctcctctcttgacgttgagcatactgcaaacagacactatacgtggcagggcggctacagagtgaaccagcgacagggtagccattaaaagaggccagggagcggacagaggagtagagggcagtactgcgcagtagactgcacaggcgcagtcgaggagctccgctcctttctcctcagccccgccccgccccatttctgccgaatcacagaagttcaagagcggtcagctgatgctacgctgtgcggtcacgtgacaacgggggcgaagcgcaggcgcaaggagcaagcgcagattgtgggcggctgtgtcagctgacccaaggggccttcgaggtgccttaggccgcttgccttgctctcagaatcgctgccgccatggctagtcagtctcaggggattcagcagctgctgcaggccgagaagcgggcagccgagaaggtgtccgaggcccgcaaaagtgagtttcagggtggggctgcccggcgtggcgcgagtcgaagaaagaccgctgggcctcaggtggtgggtagattaggcccgaaaaactgcggggtgcgggcgtgcgtatagtcgcggaaggttgtgtgtttcgaagctttgaggagctgaggctctggaaggcttgcggatcgcctggaagccacgatgtgagatggtaaattgggcgtggaaacaataatgggttaccgtccttggggcctggaggcatgtgaaatgggctctccaaacggagctctttgttcttcttctctcccacttaaccgctctggggtggtcagtctcggtgaagggagccagcatccacacagttgcttggtctagaaacctggagtcctgcttgcctcttctccctccctcatttagtcagtcgccaaggcttgcgtatctttcactttttcccccatgtctactaccagcgtcttagtccaggacaccagtttctctaaaggtactgtagttgtctaaatcgttggcgtgtgtgcgtgtgtgtgtttctgatatgtggcaagcgcagtgtgtgtgtgtttctaacatgtggcaagcgcagtgtgtgtgtgtgtgtgtgtgtgtgtgtgtttctgtctaatatgtggcaagcgcagtgcccagtgcatcagttgtctcccctaacgtggcattcagtgtcgcagtgaaggaagcaggtattgggtcagttaattaattgcaggagagatgagggctggagtggagaaatgtaaggttgctaaagaatttaacaggtgagtttaatctagactggggagtggaagaacccgttctggtcccctccagtcaatccattctcctctctgcaatcagtcatccttctaaaatgcaaatatgtgacttcctgctggtaaggaacaaaataaataaataagtgcagatatgatttccctaccgcctttgtagtcagacgtttagttcctgcagaagaaagctcaaattccttaatgaagttggggaggctcttgtgggtcaggcctggtgctttcctccagctatactgaatcgttgtggtccctcagaagcagcatgatgtctttcacctgcaggtttttgcacacgctgtttcttctgacgtgagaagccttttccaattctcctcccctttgttctctgacccttagtcttccatcagacctcaatttaggaaacacttcttcccgggaagcctttcctgactcatgcttgtcccccggactaggcttggagtccctcccaagtgctgatttctgccactgccgtgcaataacctgtttgtttatatggctcagtcactagactaagcttctggagaacagaaactatgtctcatttaactttatgtatccagtttcccgtctggtgagaaagatgcttctatccctattttacagatagtaaaaatgaggctcagagagaaatgatttatccataccctgggaagcaacatagttgggactcagaagcctctttttccatgcaaggcgaagatactgatcttagtaattccttggtgtttctcctagtataggagttattctatctgacatccaactagatttcaagcatgtctcctctacttgtgcagttaggggttgtgtggtacttggaaagctttctttgagggtgttgggaatgagaagaagccttttgttcttgctccggtgactggaaagttctttgttcttcccagaatatttccagtcatgcccttgatagtgtatttccagaatgacttctcacagtttgtgttctgatggctcatcagtaacagaagttgtatctgtcgggagggataggagaatagattggggaagtgcaggaaaaaatgcttggaataggtaagaataattctgagtgccctagccaggtaggatttatgttttatacctttatcctgtcaagcctggtgcagggttttgtatatgtcaggtagctgtgaattggttttaaaaagtattaatttggctgggcgtggtggctcacgcctgta

SEQ ID NO: 52907 - DNA, 1265 bp, Homo sapiens
cgtggaccttaaaattttaaaaaagtttgtgttaatggcatatttcattggagtgaaacaaaacactggctcccatatgtaaggcccaagaagaacaagatttaagagaaatacgattttctgtttaaatatttttgatttttagaggcccctgtcaaaattgaatgttgaagatgtttgccaaaggcagtaaatggtattatcctgagttataaatgcagggagccatgggagttgggaggtgatgtcttgtgaaatcatgcggagctactgcataatgttcaggccatgagtgttatttatagattgttggtttcgaaagtatctttagctttgaaatacagcccattatagctgatgggaagatagcatgtgaaggattggggtacaggtggccgaagcagacagtagtaggccagaaataatactggagtgaatgtggacttgcagaaatagttcttggagttttgagagagagacctgttaattgtttcagactagcatcagggaatgttgatgtcatggggtcatttcattacaggtccaaagttctgttctgaatcaggatgtggaaggttaagttcattttcactcattcgcgtggactctagacagttggtatacaatgatgtacagtgttgtataacaaagcttaattttagatgcaggatgtcttttgctctcaaataaataggttgatggtctagaacctctctttttttttttttattggtgagcggagactcaaagcagagattatatgttggctgtccttgtggtctgttttcatgtagactctgaccaaacctagagattttttccagctgtatgttaagccactcacttctagaaaccaaaatacctgtgtctcctcttctctcagccacttgtgcagtcttactgtccagtactcctcattcagcattccttctcagtcaccactgtccttacttccttgtgacagggactgcttttagtttccagtgttacattatatagttggttcattagttacattatatgttgctgtcccttgcgagcttattagccttcttgctaagcatctgagtagggttgcacctttaatcagcagcatacttaaggtgtttacttctggagaagagttccctagatggttaatgttactcattttatgttggttcttaatagttgagattgagagaatattctgacacattctacaatttttttccatctttttaatgggctgtagttacagaaggtattcatttttgtcttgtcac

SEQ ID NO: 52908 - DNA, 1472 bp, Homo sapiens
gctacttgtgggggctaaagcaggaggatcgcttgaacctgggatgcagaggttgcagtgagccaagattgtgccactgcactcctgcctgggtaacaaagttgagatcctgtatcaaaaaacaaaaaagaaaagaaaataacttacaaagcaggatggcagcattctagatgctactgttgatgataagtttaggagagaaacaaggctggttgttcagagagcatgactgggttgtctacaattatcttaggtggtttttaaagatgaaaagaccgatagtctagttacctagttaaaaaagcccaattgccttcaactgcccttgcctcttctccacagccgctagaggggagttctccctcttctgactcttctgaccctggcacttgtctttctgttcatagtgtagaaacagatccctgacccctatctgccccggggggattgctggccttcctgataggaattcagaggattttttcttctgacttaggcccggtttcctgacaaacagcatgtgatctgtctgacttccagcacacctcctgccaagcacagctatgtatttagtcccaagctctcacgtacagttagtctacctctcccatagtggagtccgtcatttgaggatgtgacttccgggagctgaaatcaatgtaatggagccactagcaacggaacattctgtgggacacactttcggaaataatttctaaaatagctcacatttattaacatcaactttataccaggtggcattcaaggtactctatatacataatctaattttcctaccatctctatgaggtaggtattatcatttctattttgcagattaggaaactgaggctacagggtcacagagccaatttgtggtgaagtctggatttaaacccaggtctgtctgagttcccagcctgaattactaatactgcattctttggttcaatttgttcaggccatggcaatgttccaagtagtatgtctccatgaaaagtttaggaagttagtgaatctataactggcacatgagctccaaaagaaaaaaaaaaaaaccaaaaaacaccaagatgtaagttttgatcttttgatctttgccttttcacttactcatccagcagttctgaggttctctcagtaccatctgctgcaacactaaggttctgccaggctggaaaaaagttcattctcttacttcatccaagttatcaaacagtgttggcagctagccctcagccctgggtctgtaacccttacagacacaacaggacagatggagcaactgctgagtaagggtggctttggctggggtttgtggttatttggatttatctatagttgaggccctgatgatttcattcatatttattcattcactacttcatatgcatttaacaattactgaggacagggttaggggcagggggatagctatgaacatgggtagaaacagccctatgcccaaaagg

SEQ ID NO: 52909 - DNA, 1843 bp, Homo sapiens
ctttgaaattacgaaggatggcgatgggagtgagcccttgtgagtatagcaattgggaacacgagtgagtatgtgtctggtagctgtgaacatttcacacacactatctcattaaatcttcacacgacctcatgaagtagctataattatctgctttttacagaaaacgaaggcacaaagaggttaaataatttaccaaagacgataataagaagtggagagacccgaatcacagcctagtctgaccccaaaccaatgctcttaacaatacagcacatacacaattttccattagaaacaagtccccggccaggtgcggtggctcacgcctgtaatcccaacactttgggaggccaagcaagaggatcgcttgaggtcaggagtccgatagcagcctgggcaacacagcgaaacccccgactctaaaaacaacgacaaaaccaaccaaacaaaaaccaaacccaagtccccaataaacttctggtctcaaatactgcctcatccacgggttccgtgattgtgtgtgagggggctggacctctggagtaagccgctcctttacagtggggagacggcgggaacccgtgccccaagatgccgtgcacgtggtcggctccgcgcggaggctccttccggcgtcccgggggggcgctcggctgatgaaacgcggcctccagctccgctccgccgcgggcccgggaggcgcgttccctcttggccccaaagcgagtccggcgggcggctcctcggggttgggcgaccgagcggggccggccgggcggggggcgggcccgtgaaggcggcgcagcgcggcgcgggaggcgtgctgggcgcggggctgcggtgcccagaggctgcggcattaggggctcggcgcccccgaccttccgcgtcccggggtggcggcggcggcggcggcggcggcgcgggcggtgagtgtgcgcgggcccgggcgcgcgcccgtgtcctgcgatccgggcttggtgctgtggggctccggggccgggaagcagcctgggcgcctccgccttggcctgcgttcgggccagacggcctgggttcggcgcggcgggcagcctgcggggggtccttcgtgcgccctggggcccctcccccgcgtgccggccgtgggagcggctctgacaagcctcctgggggcccgcggttggggagggccagactgatttatggggagaaggagatcccccatcctcagccgacctggacagttccagagggcggagactgagactgggacgagacagctgcccaaggccaaggccgtgtatggcgagacagctccagctggcgtgaaggagcctgggtttcaattctggcccagtccaggactggctccttgaccttggatggtacactttcttttctgggtcttaacgtcctcacctgtaaaatggagagctcggactcattgtgtctcaaggtttttccgccccgaaacttctgtaacaggccctcttagggtctcgtgttgtgtttttcacaaacaaaacaaaacctgacttaggaaactgacgaatctcagtgctgcacatagttcccggggaggctgggcactcggtgtctgcagagctgggggcctttgcgcaataggacttaagagtatgttcctttgcagatgctctctacgggctgaaaaagaggggagttgaccttgtgcaagatggatatctggaagttctggttaaaatgcagaatcagcagaggagacccagagaagctctagttttcctgcttagttgcaggggcctcaaggctgtgctcactccccctgctctgcctccaccctgctgtctgtctgaccttctgtgttatcctcgggctg

SEQ ID NO: 52910 - DNA, 492 bp, Homo sapiens
cttttgcaaagcaacaggaagcgattgaaagttttctcaaggcattggtgtcatctgatctgcaccctggccactgtgtggaagatgcattgtagaagtaaaggtaggtttgcagcagaagccacttaggaggctactgcagagggccaagggagaggtgaggatgccaggagggcacagagtggacagatgttttgtttgcctagttggcagggcttggtgatacattgggggagcagggagagagagggtttggataggccaggaatttcctggaaagtggagtgagtcatttggctttgaagactcaagtactgttcagagctagactggggtgacaggagttttggatcagcagacaacacacttatgctttaatctcttctgtcctgcctcattgtctaagcagccgccatagagaatatgccaaaatatccagtcctcagcagtgcatggctgaaacctgggatcctagaatcccagggctggaat

SEQ ID NO: 52911 - DNA, 853 bp, Homo sapiens
tggaagcctcctgttaatcaccccagtgtgctcagttcttttcagcctccaggtttttgtcctgctgtttcctcccctggagccgccttctccctgctctgtgtgctggctcctcctggggagcctgtccacacctgcctccctgcgatggctgttgttctgtttcccctgctcactgccctgtcagtcacaatctgctcacacaggtttgcttgcttgttatccacgcccccactaagcttaaagcctcgcaagggcagcaactctgtagtcgtatttacagcgatgtctacatggactctgagcttgaaaaccacctggtgattgaaagaatgaaggactctgctttctagtaggtgaatgactctttgtcaaaggattacacaaaaaacaaacaatgatgcagtgaggtaactgctgtgaagggagtttacagtgtgcacgagggcacaacacactggggctgacctctgctgggtcttgcatggaggcacacacaaccctgtggggtaggagctggcgttgcttcctcagagaagcatccctgataccccagatgagtgcaggcctccctgtcatgtggcttgacagctccctgtactttccctacagcacttattgcaacgatacacatttatacaattagttttattttcattgtgctgaaacgtgcataaaatttgctatttgtgacgttcggtacattcacagtgttgctcaaccatcactgctatctagttccagaaattttcatcatctcaaaaggaaaccccatacactttaaacggtcactccccatcctccataccccgggaaacactcatctttctgtctctatgatttgcctattcta

SEQ ID NO: 52912 - DNA, 1375 bp, Homo sapiens
gcagagaggttggtagggactggatcaggaagggctttgaatgccaaatccaggagcttggatttccctctaaagatgataggaagctaccctggcctttcgaagaaggagagttctatgaactgtttttgtaatagcaagaccactgtagttgctgtagagcagatggacttcagtgggcttcacttggtgcagggagaccagtgaggaggctattgacataaagaaggaaagaaggggtctaatttgagactcaggagttggccttagtgagtgattaaatgtgagggatggggagagtggccagcctaagatgacccagggttctgtcttgggacacttggtgaaagatggtgatgcctcagaagtacaagtgcccatgggcagatggacagagtgtgacagtgtcctggagagaagggaagggcagatcccaaagcattcagacctcactcctcaattcctgcctttatcagactcgtaaacacagggatttatttttgctagactcgcagagtggggtctctctgacccttttgctcatggactgaacgcctaaggcagcatcatgggactagaagcatggtattggatttggtcagatctggctcagtccctttattcctatgaatatgatggcttcctttctgagccttgatttatctttttgtaaaatgggtattctcatccagaccatactttcctccccatggagctcttgaaagaagggacacatgctggtaattttccttatccttatgatgtcagatcatgtttgttagcacaagggcaaaaaccaggaaaacttcctggcacacaggaaagcaaagtctatttgggcgtcattcttgaaaaacagtagggagtgccaaggacaacgttggatcttcctgtagtggctgcaggagaaaagttttccattgagaggctggagtggagctctagggattggtggggttgtcaccagccataccagtgcattctaaggcacaagttgtttgctttggcccagaaacagctggcagttggccagtgcccagccaccttgtcctttgcccatgaaggctctagtaattagcaatattcaccgaatgaatcacagttgctatcagccagtaattgtgctatggagtcatgagtctaaatgttaactaaatcaaacacgctgtgcagagtggccttagagaggccttcactgaatcactgacttggaaattgggtcctatttttgttctttatctttacagcctgtttttctcctttagatcacttatcacaataagtttttgcacagtaattcctttattgtaaacctccccattcccctccaacttcaacccaatagcatggaagttttatgagtttagtagctatg

SEQ ID NO: 52913 - DNA, 1298 bp, Homo sapiens
tcagatgataatacctgtgttgatttattccattgactatattttctattcttatgctaacacccacagtattttgattacctttgctatatagttaagttgacatctgatagtaatgttactggcagtgaacccatgtaggtctatagaatcctcaattcttgcctcctcagaagaaagaattcaacagaggagcacaaggcaggagagactgaggaaagttttagagcaagagtaaaagtttattaagaaactttagagcaggaatgaaaggaaggaaagacagtacacttggaagaggaccaagcgggcgacttgaaagacaagtgtgcggtttgactttttgacgttgttttactttggcatactttggttttatgtttaactttggctttatatgttggcatacttccggggtcttgcgtcacttctcctttgattcttcccttgggttgggctgtctgcatgcacatgcttgagtccactttcccaactccaggaagctgctgatcactagtttcaggtgttttctatgtagcaggagatggcctttccctggcactggctgtgaccaattattattttagagagacagttaacaacggcctgaccattactgaccattacctgattgtcacctgacattcctgatgtgtgtgacaggaggtggggggggagtgtgaagtcggagagagccctcttctaccctgcttatgcctgatgagctacctactataacagtaagacttgcaatttgctcattttcttcaaacctattttggctatcctaggttctttgtatttccaaatagattttacaaacattttgtcattttccatacaaaaaaacctgtagtgattttaactgtgataacattgattccatggatcaatttggggaggatttacattattttatatttaatcttccaactcatgtgtgtgccatctctctccactaggtctctactttctctcagcaatattgtataattttcagtgtagagggttttacatttttcatcagatatattcctaggtatgtgatatttttgagtgctattgtaaatggtttatttttctaaattttattttctagttgtttgttgatagtataagaaatagaattaagcaaataacacaggaacagaaaacgaaataccacaaatttttacttataagtaggagctaaacattgagtccacattgacacaaaaaaagggaacaatgggcactggggcctacttgaaggtggagggtgggaggagagtgaggatctaaaaactacctttgcctag

SEQ ID NO: 52914 - DNA, 3632 bp, Homo sapiens
agtctatattttagagacattttgattaaaattattttcattattatgaagacattcaaatcctcacatgtctctggtttactggttgtaaagaaaaaaatcctcacatctctaacctccttattttaaaacatgatctttttggaagctattcctttctcactgcttttggtggatttgcctctgaggccttttcttttttaagtttactacttcttcatattgttggatagatattatcaagtccatggtcaaaaatcatgcattagcccatggaatcccttagcactcagaggcatgttctatacatgattccaacaaagttggtactcccctctcacagctgacaatattgaaaaggtcagatagacagtgatcatatggttctctttgtgggaaaatttatgatgtatgtgtgtgtgtgtgttgtaagtgtgtatatctaaacatacctggagtcaccagcaatatatagcaggtccatcagacattttctgtaaacagctcctggactctggggcagctactcaactctgccatcacagcataaaaccagccatagactgtacataaatgaatgaatgtggctgtgttccaataaaactttatttacaaaagtaggcagagtcgcctgaggttgtagtttagtgatctcagaatatagtatagttctagacaagaaatcagaataccaggtgctcccactctcagttctgcttcttcccagttgagtacacagcttagttctctcttgtactatttgaaagaatagtggtgtaaactttaaagcactatgcagacatctaagatggtattcatttaatctttcatttaatcaagaaatatatatcaaatgcctgctgtgtcaaaaactttcctagaacaacaaagtgattgtagataagaatgagtcacctaaacattggaaaaggtaccaataatgggctgttgcatgattgtcaggttggggtcatagggtaagatgacagcctgagaggtgggagtggggttttcccctgaagggaattgatgttcacacagtcatacattttgggaagtgattaattctgggaaggaaatgagttggcactttgagtagggggtggtcagacttttttctctctctggggccaggaagtattgggccacgattccaaatcatggacaggtctagatgattctgtttgtggggggtgaaccgtttcctggctatgtcggtttaggcccagagtgactggtaccatcaagttcatgactttccacttagcagtgacagtgacccagggtagaagcagttcttgtctgcagcaaccagcatcaaggttcagggttgtagagtttcaaggcagcagtgtcccttcccagagtccagggtagagtgtgaatggtggaggatcatgccacagtaatctggaagaaagaataactttactttgtagatatcggcaggagagatgtgatacattttgacgttgttgttactcagaagcccacagtttagcagggaggcaaatgtacaatcatgctgtcatagtgagtgtagtaaatttttagacagaagtgagaatatcaaggtccaggttgcatgtctaatttagcggaatggttcttgagcaataatgtctgagttgaaattttatgaatgaggtcaaattaacaagatgtgaatgaagggcaaggaccttgtggacaaaggaatcagcaggcaccaggtcaagtagcctcagggtagtgcagtgtagtgtggttagaaatatagctctggagccaaactgcagtggttacatcttagctcttcagctcatgagctgctgaaacttagacatacttaagcatttcttcgagcctctgtttcctcatctgcaacatgggaatggtcatctctatctcataagggtgagatgcagtagactacagtatttgaaggcttccatgtggtgcctgaaacctggcaagcaagcgttcagtaagtgatagtaattatatctatttacgtaacataaagcggtttaagtaaacacatcaaagtaatgaatgaggaggatgaaaagaccagatgcaattgaggactgtgtgagtgtatgaatgtaatgttggtggtagaaatgaagcctccttcagtgttttcttgctgtttactcatcccattgtattgatcctgtgatggattgtgacctttcttcccttgagtactgtgccatgcgctgactgcatcaggccagctggtaaaatgagactcattgtgagaacggaaggcatagtcagaatgtcaaggaggttaggtcatctgcgtccctagcaatggaaaggaaatgatgaaatacttcagctggtttttgtttggagcctcctggttgtgaaggaggatcagccttcaaatcagcttgttcctgactagtttagctgatatccctgcctggtaattccctcttcctgttgcaagtgaaatctaaacatttcctgagtgctgactttgtgtaggacactgatttgggtgctgggatttggagatggattcttcttgtcttctaagtgctcatttctaagtgagaaaagtgttcatttgcagtgcaatcagtgctgcttctagagaggcacagggagaggaccttgatactgcatctcgcaaacagtcagttggttatctagtccagttttccctgcaggatgaaaccatcctttgagagttggcctgacagagacctttgttgatccaatggctggcttttctgaatgcagatgggaataggcttcagtggatttgaggaactttcacttttctcaaacttgcattgattcattttttcctactcctctccccaaggtctaactccttcacagacactgaatatgataaaataccccaagagttgtacactttccaagcttattctatgtgtttgttctcccaacagcttcccattgtacagctgagaaaatttaagtttacaaagtccatgtgacttgccaaggtcatagagttagtaattgcttcagctcagattgaaactggcttccagttgccaaggccactattctttcccatctgccaccctcagacttgtttttttctctttccttggctatagggaaagtacagcccccatagaagtttctaaactgcatccaaagctttcaacatgttgtccagattattcctagtgttgcccaatattcccaagggagacagttggatcaaaagcagttgttaaaaattcagtggtgatcattacaaatgaataccatcacgttgacttgatggttttgtagtgtttagaccctcacatttgcataagcagcagacaaggaagaccaagccaattcatgaaagtccacttgggggaaacagagaaacataacggattaccagcaatcttctccacttaccagaaaaagtcaaccaactagtgttcttcagattgtaaggtgcacctgaatctcttggatcatattaaaatgcagattctgttccagtttttaggtatgtatgagatgcctgcatttttaacaagctctctggtgataccaggcaccaggacataacagcaaagatttaaaccactgactcttaatatttggcttaaatttgggagcttaaaataatcctgatgcctgggttctaaatccagaga

SEQ ID NO: 52915 - DNA, 1617 bp, Homo sapiens
acatgcattatttcatttaattctcacaataacacgataagagaggtaccataattaagtctatcttgtacataaggaaatggacccttttaaaggttaactgacttgttcacattcacacaggtagtcaggggtggagtagagatccaaactcaggctgcctgaccgctgcccgaatggattcctgactgctgtccgggagtttggggctttgcagtccccctaaacataccatttaggaatgttgatttatcattacaccttggcacttgctgggctctctacctggactgcctccttcaccaggcaagtttttccttgtttgaaacacagcctagcagtcagctcctccaggatacttcctttgcctatttgcccattctatcagacagtgaaccctcagggcagagactcctgtttataaacccccactgcccagtctagcagatgctctgtaaatatttgttgaattgaatcacctagttcatctttcttgtttccctctgtggatacagagtaagtacttaggacaacagtgaggtgaatcaggacgcttggcttgccttttgcctgagggctagaataacacagggcctcattctcccactggcattgcaggtcaggctagattagatgggaagataagattcatgccttgggctgaggccagcacaaaacatcaagaacaggctctgctcattggccgaaagccctcttacactgttctccttaccccttatggcaggtgagcctctgtaaacaggtggctggagaagtgcaagcccaggcttgcctctcacacgttctggttcttttgttgttttttcccctttgggttgacctcagttgtaattctgagaaacccgaggatggaaaaaaaaaacaccttattttgaaacatttgcatttcctgaagtcaaatggcatggtatattttagtttttctttaaaaatcatttagatggtttctagctaaagggaaaaacacaggcagcccttttaggaatgatgttgccagagctggttcagaaaggggctaaaagcaggacactagaggagctattgagggaatgggctgttaaacttggagaagaccccagagaagggcacagcctctgtcctttaatgcttgatgaggctgtcggcacaccgtggggcccaagcactaaacctccaagtggaagaggaaggagatgaagccctcagctaagagctaacactgctctaatccccatttctcagatgcagcaatggaaagacgtacactaaaaacacctatgtcacactgtgagtcacagtgctggcagctcacagagttgaccagtcagtgctgctcaaaaaagaggtgggctgctttggaggtcatgaggctcttatcaagagctagatgaacatttcatgggtcatcagccgtgtggcctgagtcttctcatcaccctgtgagtctatgatataactttcttttttggttaggaagacagaaaaacgtgacttataaatagtggcattacatgcagctgaaattctgcaatgtccctggaattctgaaggctgggagcagagggagcaaaaagtgatgcctggagaggtttagtttgaagaacagagcatcagagt

SEQ ID NO: 52916 - DNA, 753 bp, Homo sapiens
ccccttactgagcctcagctgccacatccattaagtgagaattaaaacaatcaacctaaatgtatggatgtcatgaagatgcaatgagaccgtggatgtcaagtgatcagtgtggcctgtggctagaggagacactcagtaaagtagattctttctgccttactcctcttttctttgttgttatagtggcacagtttagcaatgccacttagcagagtgaattggcagatgaaatgctcattaaaatgaagctcatgacattatttgatggacgggagcttctcaattaagtacctaagtgtttaaggctatctgatgcttccaggaatgtgtgctgaatcctctttacatttgttgaaaaatgttttaatccttccaagaaggaaagggattatcctaatgactctgcatctgccatgccctggcttcttcattccaggcttcagggacaatatccaggagagtcccaacagtgacatctagaggacagtctctcccctctggataaaatttggattcaaagtgagtccttaacctgagcaagggtcatttcaactattaggttggtgcaaaagtaattgaggcttttgaccaattccttgatatcactaagccaactagtaatagagagataaactgcaggatggaccatttgttaaacaaaggaccactaggtgaccctgatttccaaaaggatttggagaatgcccatatgaacacacttagtgctgactgagcacataggaagtgatc

SEQ ID NO: 52917 - DNA, 704 bp, Homo sapiens
tgcagtgatggccaagaccaagactttggatttagtcaaagagaggcccataggagcccaaggagagattgtaggaaatcttgcatccaaaattccaggagggattaagggaaagtagtgggtatgtataaggagcaaagtaggagtttacttgagaagaagaagctgtcacatagttgatgagagcaggcaatccctgagtagcacatggccacttccaaatccagcaaggacattggggaggtccccttgctggcttatgtctaagcttgacatgtcatcctacaggaaacacatacagtctggctccactttctgacagtacggtaacttcttttgttaggttatggactggaatctgtttataggcaaaaatcttaaaaggaagaaacatatgccaaatgttggtctcagtcttgcgacacattcttgtgtttatggcatcatccagtgactcagcgttgctttttggatagggtacaaatgcttcatggtctctttcctgctgtctttgcaagtttgctcctgagggcttctgcaggcacactctccccttcagctgatcgtaacgacttcagatcctttaagtcccaacggagctcgctctcacacccaagcctttgcacatgctggtccttctacctggaggcccattcccctaaactggctgactggctagctttcaagttctcagtttaaatgtc

SEQ ID NO: 52918 - DNA, 680 bp, Homo sapiens
agtgcttaagataaatgaagcaggtatccagaacagagggtggttcttgcttctactctgcttggggagctgccaggaaaagccacttcacaggacgctgcagtaatatcaggcagctcccccagagaacatggcggtgtagtgtctgccaatccaagaaagtctcagcagtttagctttctcaaactgttcttggttcctgtgtgccatggacaagacctagaagcagctgagagcttctagggagtatgatgctcattagagggtctcaccatagcagggccaaagtggctctgtagtgaaggctgcacagacaacaaaccatctgacctgaggctgaatggatccatggaaagtccccagaaaggtctggaagtagtgtggctgagttagccagggagcacctggactttgcccaaaaagagacagcagactccaagtttcatctgccaaagacttcggttgcaaacacgcaaacactagcagggcagatgcaaataggtcaacagtgttccttctgacaccagcattcaacaggctctgtgactcagggctccaacacacagaaggcaccaaggagaggagctggtgacggccggaagaaaaaccataaagattggacttttttttttttttttctagagagactaaaaagttcctaaagggactatttaaaatta

SEQ ID NO: 52919 - DNA, 3016 bp, Homo sapiens
aaatacgtctctaggactggaagcaggaaaccagactctcagggaaaactaagactactcccgtaattaatttgtgtgacctcaggcaaagcaaacatactttcattgtctattttccctttcccaaaatgggaccatctaaatgctataataataatgaacattgattgcatatgtcgtctgtgccagacactgctttttgtgtcttctgtggattatctcattgaatcctccccaagacttctgaggtagttgtctttatttttcacagtttatggaggagaaaactgaggctcacacagctcaagatcacatagctagaaacggggaacagaaatttaaatcaggtgaactgattcacttgttttaattatgttaaagggtggtttgcataactaaggtcggggtccagagaaactactggtaatgaaatatctttatgatctacaggcaggacaggaaaaactgcagaaaaatctgaaaaatagagatatgtctaacccccttaacttggctttaacttagctgtgtaactttaaacagcattttctaaagtgtaatctacaacacgttgataggtactaatctgagggaaaaagatttcctaattaaacacgtttggaaaatgttattttaaaccaaatatgattttaagccaaacaaattacacaactttctttacttcaggtttttccagggtgtttaataggttcatgctcgttggaaatctcgaagaaggggacagtttatagagtgtttcccaaatctacttgattattctgtttgaagtgagtcacaggattaggttggatggcacacgatgggggaagaactgatagagaacaaatcctagacccttactcctttcatttcttcctgtattagaaggaagtagagatatacctaactatgacctctctgggataaaatgtgaagctctatgttagaggatcttgagcaatttaaactaagagtgaagcaagtaggtcaatatttatactgtgcgtggcactttacaaatgctgtttaatcatgttaccaactctgggaattagggagcattgtttgtattttactggtaagagaactgaaggcttaagaaggttaagtaagtggcctagtcagcaattatttgaatcagaattaagaacagtcttataattccaaagtctatgctctttctgctatatcaagttacctttgaagtaagattcattgttcaagttaaagaattaatatttatctactaactatcagagagaaacacaatatcattaatatgaatagagttgttggatttgcaaaatggaacaaggtaggatggtgtttgggaattggggtttacataactattttatttactgttgtgaacttgaggggagggcataggccaggtggactataatatctgtgtcttaggcaaatctttaaagcccctggagaaaagcctgctctccttgagtctgacctgaagagaaggttaataagtgagaggaagatacagtgagaagtagcagatgggggagctaaaaatctatcatttctggaaaactgggcttcacactatgtactatctaaaaaacgtgtggtttccaagaaatcagtcaagatcagagagcgtttcagaggggctggaaattaccactttcagttttgaaagcatggacttctatgaacaaacaacttatttgtataagtaaggaaaggagggaaaattccttctaaataggatcatttaattcagcatatggcaggaaattcaagaaattagccagagagaaatactagtcagaggaaggcagaggcaaatgaagatgaatcatacaaatgaataacttttaatcattattctgaacttcttttaggtatagagtttggcattatgtttttggaggggaacttactagatgattttttttttctgcttcaatctctatatacacaagtatgataatatccaccttgttaggttaaggtgactggaaagtaagtataaaaatttagtaaggttgactggaagggatcagtaaacatttccttaaatgaccaaatagaaaatatgtaaagctttgcagttagatgatttcagtcacaactattcaactctgctattgtagaggcagcagctatagataatacacaaacaaatgagcatggctgtgttccaataaaactttatttacaaaaataggctgccaccctatggtttgctaacctctgctggaatatagtagttattcaataaatgacagcttctattatgaaactaaatacagattgaattgaacaataaggaaactaacattttgttgagtgcctattatatacatttttatgccaaatcttacactaaatgctttttattcatgctatcatttatcttgtcatttgtcatgacaacctggtgagttaggtattattatgcttatttgaaaattaatttgagactcagggagtttccatgactggcttaagaggcagagccagcttttgaatcctgatttatttgtggttctaaaatgtctgctttcaactacattgagctacactgggctgactcctaaaggaattttcttagttcagataaggtaaaaacttaaatttttactgctccataaagaaagagatcagcattcaagtggatgaactcactttccatttcctagaccttcagcagctctttggtggctgtgcacatgtaagcaccaaaatatttgacctctgtttttctcccagaacctctggctggatctcaagttttatgtacttcctttttggagaatacttaagccaaggtgtactgtttgcaaacacttattagccttgggtagatattggcgagtttccgttggcatcaaatgggcttccagaatctgctgaggcctggctgtgctcattgattgtctttgccaaaaagagctgctaattaggatgacatcctgcttgtctctacctctagagctaggttttccttcctgggcatgcctattttgtcccaagcagtatgtttggattt

SEQ ID NO: 52920 - DNA, 1477 bp, Homo sapiens
tacaattgtccattttggactgtgaatcttttgaagttgaaattaccttttcttaggttggcagtgtttctcacctggattatggcagtatcctcttatcttgcctctctgccctcagtctcagctgctccaatccattctatgcatagcagacaactataaagatatttcacttctgctgaaaatccttccattgctttatgctcttctgagacatctacttttttagactctctttagagaatctttaaatcctagcctctgatagtttctccaggcatatctctcaacacatctcttcctaccccactaatacagtcatgtgcattcccacagagaagcccaaaatcaatattggagtctctctgaaatacctgaatccttaatgaggtcccagcaccttggacctttgcatagttttggctagaacatctttgttcctgtgacttcccacttaggttcaactccaaaatatctctcagatttcaacttgaaagtcccttcacttcctctggggaatcttgcatgatattccttttttttctttttccttcctagctcattatcaaacctgacatctagtaattgtagttgctattaggcagtgtctgtttcatttttaggtggttactagactttgagctctttgaagacagggattgagtctcactcatattctcttttcttgaattctttcctttcttccataaatagtacgtgattttccactttgggccaggcacagtattcttaacgtgctcatatcttcatgcctaatatggtgcctggtacaaagcaagcaataaacatgaatgatggaatgagtcaaccagtgaatcaaaggtttagttcaaacaagttaagccctccctatggtctaggagcttcgagaggatcaacaccttttctaacttttgctttttaccatattctagttccttttttgtttcaccctctgacagagagaagctgagtgggaacaggctgccacatttttgtaggatatatcatccaactggtgaatcacccaggcccttgatttggcttactatttaacttttttttttttcttttttttttttagatgggctgtcactctgtcaacctaggctagagtgcagtggtgcaactttggcctgctgcagcttcaacctcatgtgctcaagcaatcctgctacctcagcctccagagtatgggactacaggtacagtccagcatggcaggataatttttatatattttgtagagacggggtctgtctttgttttccaggctggtctcgaattactgggttcaagcaatcctccggcctcagcctccaaaagtgctgggattataggcatgaaccaccatgctcggcctatttgaccattttaatgttcttattaacttgctctcctgggtggtaggaagatcatggcatggagtccaaggttctctcacttgcaagtgtcctttgtgcacttcgctgagtgt

SEQ ID NO: 52921 - DNA, 592 bp, Homo sapiens
tgatccattttcatttctatcaatttggtcagctaaactgtactttaattctgagattctttaactccgacagctggtccagactggcataggtcctgggggcaatgacagagtccagatgtccccatgggcatgacttgcaaattatgtactttgacagaatatggtgaggacaagaaccagaccatgcagcactattttcacgccagctgcagagtctaaatgtgtttcctgacacctcagaaccttcttgggggagggcattctgggctgggtgatgggacatgctgggattttgttgctctccttcccttgtgggtcttaatggaaaagctaagtcaccagcaacagagaaatagcggtgtcaggcattgttgaaactttccatgtattctcatgacacatcatttccagttataaaaaagagtggaggtgttgggctctgttgcctaatcgtggtaagaagtcccttttactagaatgcattttttcatcacagcatcatggtcaatgatcaaccatgtgaacttgtgtaagttgcataaacttttcagtatcttgacgtctctgtgggaaaagatggaggccatat

SEQ ID NO: 52922 - DNA, 6222 bp, Homo sapiens
catttttctgccttagacctttgctttagaatagctactatttattaaactctaactatggccaagtacattacatagcatcccacttaaacttacaacaggcttacaaagtaggtggtatttttccagtctttccaatgaggaaagagaaacaagcaaacaaacaaaagttattgtttcattgtcttcctgctgctagatgatagatctagtaattcaaatccagtcggtataactccaaagccctcacttctcaagtttgtctctctatataacagattcctaagagttaattttcaaatacgatttgatattttaacaattcctcatttgcctcaggcaattgttatcctgattattgacttcatggtgatgacaattattgctactatgaataacagctcttatcctctaagtgttatactgtgcattttatataccttgaatacaataacttcttgaggcaagtattattatctccttttataaatttgtaaactgagatgcaaaaggtttgttaacatttccatgatcacagagcactgaattaatgggaactgcaaatactaacaaaaaggaaaactttgtacatgccagcacttttgaaatatattttacatggttaactcatttaatccccacaacaaccctgtaaggtagatagcattatcatctgccttgcacaagtgaggaaactgaggcacagagaaataaaatgattattcaaggccacacaagataatcagtgaaagagctagagtgtgaatcagtatggccttgggtctgactcagagcttgttatcacagcaccatgctgcctaactatctgactgcaaagttcctctttgctctgggcaggtacctatgtgagtgaacttgaaactctatcactcattccaattcttttattcactggtgatctcactatgttgaaaggacaggatttgatgcatgccgtgtcagtggtgatcactgttattgagatagatttgcaccgatgtctgggagtttggactgaatgttaataacatacaaaggtgacctgcaataaatacacagctctgtcagaaagctagaggtctgcttggcagagagagtcatcatggattgtggcagattctccttctgtcaaggcttatctgaaggctaaataaatcatgctggaatcttctgggatgttggaagagaggaaaaagtgtgtattggatgggggtagggatgtggaggaggttcagatggaaatggaatattgattagaacaaaggtgaacttgatgtcagccagtgttctttttagaaatgaagggccaggaatggaagttaaaaaagagaaatattttctttaattgcaggcatagaaatagagaaatcaacatctgaagaaattctaagtgacacactgggctctagatagatgttactctatgtttgattctcaatttttttgatctaatgtttctgcaactatgaagatgtagctacactacagcataaagtgaactccttcacaatgaaaatttatttgacacatattaattgataactgacagctataaattcacatttagattgacttcaatataaaatattcacttaaattgctgtgtagtcacatttcttaactttcccaacttttcaagtataaatgatgcctgatgtttggcattagttttgaggattcccaagaacagctatctataccaacgtttaagaagcatcttcatagtgcagatttatagaaagatatcctccagcaatacagaggctatgtgaaaagcagtgtgaaggtgacagatatttgtcacctatgttatgtcaggcactgtgctaagtattatatatgtagcatctcatttaataataacaactgacatgcagagttgttattattaatccccattttatagacaaacatttccaggactctgagttatattgcacaaggctccttgatgttctcatcatgcagcagaatttgaaaaccagtctgtctgatttcaaaacttgtgttcttttaccagaacaccatacactgcctctcagagtaaaggagagataaatcagtgaggacagctaagttgggaggtcaggagactctctctcctggaagagaaacaccgaactaaaacaaaaccatgaagttcagtgttctaatttagaacaccaacctttgaagtcccatattctggcctttgctgggtatagaatacgagccatctcatgctctaagatggctggtaacctttatctctttcttccaggttagaaagttagctgtttctgaaggcattaatcttagtgagaaaatatatcatacattgtaattcattatgccacacagttcgttcattcattcaaaaatgttttctggtagattgactgaaaaaagtagctctggttttatttatttatttatttatttatttattttactcttcccatacccattgcaatgtgacattgcagattttatcaagaggtagtctatttcaccatgattttaatctgggctctccttgtatcttgttttgtccaaaagaaggtggcagaagtgacaatgtgccacttttgattgtagattatgagaggctttacatgcttctgtttctctcccctgctcttgcatccatcatgctatgggaacaaaatcaggccagaatacaggaggtgaagagagacacatgcacacagccacacacagaagcagagctgcctgattgaacacagctaacctcatgttcatgagggaacccagcagaaaccgaaagagccacctagctaagcctgctttaagttgctgacccaccgaattgtgagctaaataaatggttgtggcttcagccactaggttttgggctggtttgttctgcagcaccagataactgatatctattcactaaaatgcacttgggtgccaacattgtggcatgctgtggggacatagaggtgattaagttatgttccctgttctgaaagagccggcactccaaataggaagtcagacatgtaaacaaatgacaacatagcaagttatgggattaatcaaagtaactggtgaactccttttagtaggaatagttctatttcctctgtaaagaaaccactatgatagggagcacagtaccagttggttccaataattcttgtgatagtgtcatccaaacctcagactgcatcagtggtcactcagcaaggagccttgaagattacccaatgctatttatatctattatatgatcctcattaagtaacctcaaaggggaggcaggagcttggaaccagagctttttggaagaatttctttaaagggatagtattctgtgattaaattagaaatagcaagatacttgggagtactgattaaaaattttagtcttttggacttttaatgactgaaaaaattaatagagctctaggctccagaaatcaggaacttgctgagtatctcttttttttatttttcagagaggaaactatagcagctggcagatagattagtgtaaagaagctacacttgggtttgaatcccagctgagccactcagttacttgatcttttgctggtttctgaatctccatacattttgtggtgcttatgtctaaacagggataaagatatttactttataagtttatgatgaggactaaatgtaccaggcacataattaatgttaatactttccccattccttcatttttaattctcctttgctttctgttgccattttctacttttttcaaaagaatctgttggagccccaatacattaaccttcatgaaattgggtcctgaccatccgtgaaatggatgagtttgaacacttccccaatgtcggtctgtaaaagcacattttgaaagtggctttgaaggactgtttgaataataagatctattcatgatcacagagggccgagacaaaaggctgagacaagtctgtttggagaaaactctgtgtggaatgtcaatgcacatattagaacccagcctgtcaatttggtccacagagagaatggtggttttatgacattattggcaccacaatctaacaactctcaaccggctggggcattaaacatgacgaaggacacagatagactaccctagattttttttattcaaagggagcacatgtaatgttctcatgcaaaccagagaggaagtgagaattctttcatcttccttttctttgctattaacctcaatcacataactcttgggttaattttccttctataacgagaacaccaaacagaaaacacatgtgagaattaaataaacacagagtagaatgaaggctgaatctatggaatctatcaggacttgtttacagagaaggtaaattaacaatttcttggaggcacagttttcttacctgtatgataggaagaatcactgttggaataggcattagtgttagggatgcttctagaaagcctctctactagcatactttctagtctcaggacctttgcacatactggctctctatctagagatcccttccttgccgagatgtttttaggttaactcctcaaatttattctggcctttttccaaatgtcatcttctcacagggaacttccttaattatcttatccaaaattgtcatcctattaccgtctacctcctcattctggttgatttttacattggagcatctatctgatattgtatcatatatttacatgctgccttattaattgttcatctcctacaatcaagtgacagtctcacaaggtggggactttatctgctttgttcacttctgtgtccccaacacctataatagtacctgctacataggaaacactcaagcatttgctaaatgaatgaataagtaaataaacatgcaagattgttttggcaccaaaaattacagcatatagtaggcattctataactgttggcagaattaacgagtgtgcatatccatctgtgagcagaattagggaatcaccactctccagcaagccagtgtctctctcacttcacacccctgcagattgcataaggaatgtccagacactttctgtttccagaatgatgtaatgtggaaggagaagacctgcagaacatgttgctcacagacgagacagatgatctcatccccttcctgggcattcccaggctttgctattaaaaaaaaaaaaaaaagaaaagctgcaatgttcaattcacaggtggctgtttagtcctcagccgtttattggcaaaatactttaactcatctcttagctccctggtggctgggaggaggagaggaaagtcatgtcagatatcatctggcctatttcttcagccaaatggaatagatttaccctgagaaactaggacataaagggagagaagtgcactttagcatcagccacaggggacaagctgtgagcaaggggtgatgggggagtttaaaaaacaaagtaagccaagtgtttcattgacaccagagagctgagattgttcttgggattatttcaaaagtctagagcctgaagaaatgatgtacccaatatccctcacgtggctcatttttatttgaaaaatcctttagttttgatgtctgtgtatatattaaactgatcagaatttcaatttataggtatttattactctacggtttataacacatttcaatacacagatcttcacaaaagtcctgaaagtgaggggtatagaatgatccccctttatagttgaggaagctgagtttcagagaggggaggtaaattagccaagattgcacagctagagagcagcggagttgccattggaactcagatctagttatctttaagtgcaaatctccaaccaaatcttcaattcaagacttaaaaggtgacctgcttgtcagctacagtgtttgtatgcctcaaaggtttcccacatctcttttttccgtggttagctactagacaccttatttcagatctggggcagtttgggatggcaagtctgtgcacaaatcaagctgaagtccagttggatgtctcctgaacaattagtagttttgcaccgatttattaataagccaaatagtactgtcgactccaccctccaaactcgcccctcctctcttttctatccccttcccaccaagatgttttatttattttttttcagaagttggtgttagcagctggtcaagtcctaaatacaaaatcatcctttccacaaccatgtttcccatccaatccatgataaaattatccaattttcattgccaaaat

SEQ ID NO: 52923 - DNA, 975 bp, Homo sapiens
taggagtagtgtcctaactctacaatttctgctctttccactaaaccacggctgtactcccaatggtagggaatgaacaacagggctctcctaataattttattagccattctcaaattaatagctcctctgctggcccctcagaaagggggcttcatttagaagtctagcctcacaagtaagaacaactctggttccaggtacctattgggaagtggctgattgaagccagtgtcactccttgtcaggccccaattggcttgccccttccagtaggtcactcaacgtctgaccccagcagtgttttctagcaactctattctgcccatagataagggaaataaatggagaggcattcatagctggctggtgatgatttgtttgttgaaagaaagggtattggatgcaattctgagtgtactggtgccaggttctttcctccttggcatttaggtaactgccagggcttgtgtctgatcttcatattctccagtctaggcaggaaccagcttggtcaggttgttccctctgctgcttgacaccctgcttgacctctgctgactcatctaccaccctctcttagcatcctcataagttactaatggagttcagggggaagaacagctgccagaaatatgtgggcaaatgaaagtcctacattttaaagacaagttaaagctgaactgttccggataaaccagcagctttgtcttcctgtcggtcctctctaaatactcagtgtaaaaactgctgccttagtgagaactcttcctcactctggaaggagctttctctccttccacagagtctcgcccttggatagttacacgtagtcgtcctttctttttcattgttgatggggacagatgtcagagaaccggggtacaagtcaagacacccgactggaggacctactctagttaccaactcgtggcataaccttgggaaagtcatttcatctctttcaacattgat

SEQ ID NO: 52924 - DNA, 1851 bp, Homo sapiens
ggttgcaagttgggttacaaagagagcttgggtgcctgaaagtggtgtcaacaccaaaatggaaaagatttcaggagaagaaagttcagatttggaactttgtcctttagatgtcacctggacaaacaaatagacatccttcagaagaacgttcattcagagctaagcagaagtcagcattatttccagtgtgcaaagatattttgaagagaatgtatatctcctttaggatccttcaacagatacgccacctgtttgcctgcagcagtttcctgaggctgcaatttggaacaaatgcctctagtgacagggaacaaaaagagttgctttgtcctgaaaggaggttaagagtcatttgaggctgactattcaagacacacctgaatggggtgtgaattaagagaaaggagggccaggtgtggtggctcactcctgtaataccagcactttgggaggcctagatgggaggattgcttaagcctaggagtttgagacaagcctgggcaatatggtgagaccccatctctaaaaataaaagaaaaaggaaagaaaataaaacagaaaggaggaaaacggttatagaaaaaggagaggaacatcactaagcgaaaagctgaatggaggtgagtcactgggcatgactaagccatgactaagacctccagggtgatagatgaaggtctcaccaccaggagagtggagtaattattaatgcatgtttgcctggtgagttatttagttacaaaagccacagcagaggctcttcattgtaacagctcaacaatcatatatagagttcccgcaatgcagacactcactaaacactggggtcacacgggggaaagacacaagtccagcctcattttgaatcagtctttttgtgtgttttagtagcttcccaaacataactttgtcttatcactcatagatgtaatgaggtagcttgattctatttattcaacaaagacttattgatttcctacaacaaaccatgcactgttcttgctatggggaatatagtagtgaagaaaattggctaaacttactccttgccttcatggagctgacattctcatgtgggtgacaggaaataccatgataaataagtaaactacacagtaggatctgtggtgatatgttagagaaaaaaaataaagcagctttatcaatcaagagaggttaggcagccaacatgcaataattaacaaactggaatctcagtgacttttccactcgcctaattttcatcgtgggccagaaggggcctctgctcccacaacttcactgtcttccttgctctaggactctgactatagagcaacgaatatctgtgctattataggggaaaaaataaaaagagatttctgctgggtctcaccttggggaagcaatgctcagcctgaaattgatgcacattatttccacacatcattcattggaatgaactgattagttggattgacctaaaatatggaagcaggaagtacagttctatcatgtgttcagactgggggaaatcctgtaaatatggcaaacaaaaatagggtcatttaggtcacagtgaggactttggcttctcccatgagtaaaatgggaagccattggagactgtgaacagtcgagtgagtgcagaatgagacagacttttgttgagatcttggctctgtgacccagaacatgtgatctataaattggggcaacaaaacctaccttattagattggtagtaagattcactgagatatttgtgtaatgcctggcataaaataaattttggcaaaatgacaatgatatattgaatttcctataaacctatttgtttcatcaaatgaggatgaatttcccccaaagc

SEQ ID NO: 52925 - DNA, 1094 bp, Homo sapiens
gaagtatccagagaattatgaaagaagacttagataatcacaaggcaacttctccagaaatgagtgctcatcagtgaaaaccatagtgtacctctgtgtatggttccttgatcctggtgggagaaactgcgattcattatgactgtgtaaacactggtgcagaggaaggagacttgatctagggattggagttgtcaaatgttccagtgaccttctgtgtgaccttcagcaagttgtttttactctctgaacctctgtttccttatctacgatttttctgtaattcagtgatttatatacattgcctggaagagggaccggcacatgagaggtatttaacaagcatatgttttcattccgtgatatgcagccttatcatttgcaacaacttcctagtctgcttattgcaaggtatctgggattccctagataaagtatgcattgccaaggctcatgcttttattttgctctattctctcaggagtgctttcttcctatcttttctgcctaaaggattgtagataaaatgaagggctgccagtgtaatttgaacctcaaataaacaacagataaaactgtagtataagtatgtcccatatattgcacaacacgatctttttgtttgcctaatctggcaaagatattgacttaacacacactaatctgttgacaggtaggtgaaatatttgaacttctacgttgcttctctaatcctgtcctctcttccctttctcatggcgtttagtaatccttttccctgtgtgcttagtagtactttgtccagatttttactgtagtgcttatatgttgctgtgtctatctgtcacttcatcttctctttctctttcgctacctgccacaatacacagtgcatccctcaaactttcaaagatccgatctttcacctgtgttctgagtcccatcccttcatatctttctaaatacgccacactggcctggttttcctcttacctttacggctactttatctcattctctccacatataccactgccttcttcagagaatgcaggtcttttccagggcttctttattcctgctttattgctttctctctcccttattgttttctt

SEQ ID NO: 52926 - DNA, 621 bp, Homo sapiens
tttttcctctaacatatttcacaaaacacacttttgcaaagaccagaatacaagcacacctctgtattttatgtcgttgctgttgttgccatcatactcctctgagagtgtatggaggtccacacccaactttcttggtaaaacagcatcctatttttatctgttggattttcaattctaagattcaaatccaagcatcttcttgcttgtaggcaaagtgaccactagagggaagcaactgccaggcagagcaatttcttcacgccatgggtaatttgatccctgtgtgtcatactccaagggtttggacagaatacctagttctaacaggaagttagtagtcacggagcctggctactgccaagctctttcactgactttgatcaaaccacacttggggctgcgtgcagtggtttatatctgtaatcctagcacttaggaaggcctaggtgggaggattgctttagatcaggagtttgagaccagcctgggcaaaatagggagacgttatctctacaaaaaagtaaaataggcatggaggtgcacaactgtggccctagctactaaggaggatgaagtgggaggatcgcttgaacccagaagttaaaggttgcagtgagc

SEQ ID NO: 52927 - DNA, 598 bp, Homo sapiens
attcactcatcattaggagaagaaaacagagagggactttcccattcctgcgttatctatttccactttgtggagaaagccataatgtgtcagatacactaactcttgttcttcatatcccagccagcatagcccatgagacagaaatagcattcatcgaaagccgcaattacctcatttcactggcccgtttgtgtgagatgtgccttgcctcacagtgactgcatggggccaaaagtccagcaaacagagctgctgcttgtccaagaaatggccctgcaaacaggagaggacaacatgttccctgagcagattgggacccttggctgtttcacgagtgttttgtttttcaggccagaaacagtgtctgaaaactcctggggatttcccaagccccattcgtcaggcggccaggcttcctctgacatcatctctgagtgatggggtgcagagagggggtcacgcagaaggcagtccaggggaagctttagcacgattgcgggaaatcaaacagctagtgctagagtgatcagaaaaacaaggagagctttctgaaaacagtgtctggcacattatggacattcaagaagcaggtctt

SEQ ID NO: 52928 - DNA, 5927 bp, Homo sapiens
tgtttgggccataccttcctgtttcttagtgtgtttcacagcttcgtgttgaaaactggaatttttcataatctaatgtggcaactctggaaataagattcctcacttcccagggttttccactgttactgtttgttgttcctgctgtttgaagtttgtttggtgactttactcaacttattatttaaagtctgcactgtgttgtgtgtggccactgaagtctctgctgagttagcttagtggtcagggaatgattggataaaaatttgcatgaatgacttgaacccataggtctctcacactttaccatggagccctgagtggatgtgttggggcaccatttcaacactgccagttttcaactctgccttagctttcagttcctgtttatgcagatcctcagtgtcagccagcataagatattgggatcttctcaagtctttcccgagcattctcacagccctgcacatgtacatcattttctagatgcccttgaatatgttggagtcttttaaagccccctgtaaatgtttcatttttcagctttttcctttaagggtcttagctagcctcttatttgccctaattgatacaacttgtatcactgcttcaggcagcttcaatttaaatgatggacactgttcatttttcacaaacaccctggggatacagcatttccccagtgaatgagctctgagtcagttaaaataaagccagtctccatgaatggggctttccagggagttgtcaggcaggtcagatagtgatagttctctaggaatggacttttgggagatctctaaacactttctatcccatccagtagctgtaagactgctggttttcacaattaccatgctcgtgaggctgttggttttcactgctactgtgcaggaaaacagaaatagaaatagtgtgtgttaaaatgctacaaagctctttgctattcttacagaaattcagctatttttcttcaacaaacattcttcagattgttacaagcttttgattaagttttacagctctgtaaaagtttattttgtcaatttttttagtgttctttttgctgttatgaagtagattttcagaagtcttcactccagctttcagaaagtgttccttctcctaattatctctatctctctggctactcttggaaggtttaaaggcttttcttcttaatgcttatggcccataactggtttttgttgttgttgttagagttctatgttcgaggctctcccctgctctctcacctttaatcaagtccttggatatcctgattcactgctatggcttctggtagcatctttgtgaaggtgacttctcatttgtaactccagcacatgtgcttcttctgaactccacactgttttatctaagtatctgtagatatctcttgaaagactcacagacatcttaaatccaatctgttcaaaagtaaatgcatcacaaactttttcctccaaccccatatctgcattttgatgttccttatcacaatttatggcactactatatacatagtcaaaaaaatcaaccaacagcaacccttcatacttcctttctctatcccatacagcagctcaagtggtattgtatctgataatcccattttcctgcattttgataacattacttcccatttcttggccacttgctacatttacaaggaaattaaagtgctttaatgaaatctacaaagaacttcaagatttggattctgtcatgctctccaggatcatgtttttatactctgccagccaccttgaattttcattttcatatttaccttatctttagtatttgctgtcctgagagaaatctccatgtgcttatattagatctcacaaatttttgtgtatgctgccttgagttggattctgttacttgcaaccaaagaatcctaaataacaaaataagcttcacagcataactacagcattagttatcttgctttacccattgttctaatttttcttaccaatatatctactcttagctgagctgatgaggctgctgtcacacccagtgtggtccagactcttccagtctatcttcttgttatgttcttgacagatctcatcagcaaactctctcctcacagctcatattatgccaagagatcagccctacccattaatttagtctctgaatagaaagctgctgtctctctctcattttttttttctcttctcagacaaaatcccccttctgtcaggaagaaaaaaaaaatggtgtgtttactatttacaactagtatatgaactgttattgtcctaggagcaaaacccaactggacagttttctcttttctgtctccagtatatgtagattacataacccctttgagaactgtaaaatggcacacaatggttattatttattctaactgcagggaggcagatttaggttctgggattatcatttgtttaaattcatgttcattgatcatgggggcagtttaagatacaaattggtccttggctctgacaagcatgtgttgctaacctgtttcctcttactggctagttcctgactttgagatagtggttttaccattccatctccctttctttcctttttattctttttttaaaatttataaaatctggtaaagtccatcaaaacttgaggattgttaggagaattaactatgtgaatggacacaaaaagcctaatatgggatcttgtcagtgagccattcaatagatgacagcttagtttattgtcatcagcatggtcattcaccatgcaacctctgctgttaacagatttcagactgtaatcttttgtttcttctttctaatcctgcacttcctctgactgttccattttggttccgagcaagcaggccgcttgtgtctgaatctggccaatcctgaaatctctgcttggctttgtcagacaagttcaggcatgcacagacatgtccatgagtttctcagaaggttgactctgccaaagccagaacaccactcccccactttccactgggtcctgtgctccaagctattggacataagtttgtgctttcgaaacttcagtatttacacggaatctgtgcctctgatttacccagtgtccagctgctgatacttatcttgaaatttctaagtgcagggctgcaatcaaagcatcagggcacagaaatgaacaaataaagatgtttggggactgcctgcttttctcatgcgatttgcacatttttcttggcttgcgtaatctgaggaggctgggaccataggccccttcattccttggcccagtggcagcacatggcaatgttacaaatacgggagctggacattcaggaggggcctcacccctgctaggaaagcatccacctctgtgcctcccagacagcgttgacgcattcagacaagctggacaaagaacgtacagtctacattccctggcctttgaagggaagatgttgcaatgtacaggcagttggagtgttttgcctaattcatcaaaacattcacatttgctagtaatacaatgcatctatgatgagaaggacttaggggaaggcactgtggattaagggtaaaatggctcatgtcccctaatttctaccattcggctaagctttgaagcagcctcccttcattcatgaaagtgttgcagggttgttaaaaatgcatgggctttggaaccagatggatctgtggttcagacttgctagctgtgggatcttgggcaacataccctttctaaagcctctgctctcatctggaaagtcagggcagtaaaacaaaactcttagagcttttacaaggattctttgagataatgtatagtgattagcagggtaacacacacagtaagtgctataaatgaacttttatcattcacctactttttaagtgcctaccatgtgccaggcacccagccaggcacttagcatttctttgcacctcaatttgattggacattgcaatgggagttggaacacaaggagaagcatatttgaaagaggcaatgaagacttaactttagacccagtatcacctaaaatgaaaccatatggctttgggcaagagatatttctctagacctcagttacttcagctgaaaagcagagtaaccatttctgtcctaagaactaatgaggaaggcataacaattattattacaattataatagatggcattaatatagagcttatttgcttcttagcactttctaagcattttacatttactgatttatttactcttcacaactaccctaggagaattattacacagattcgactaacaaaggaattaagagaccaagaagttaaatggtttattcatagatagtaatcagaaatcagctagtctggctccagagtcttttccctcaatcatcacactttgtacttggtggacaataaaaccttgcataaatatgaagatttattactatgctggaaaattctacctaaaaaactagtattttgatctaatcattgtaggctccaatatggttatttttaagagatctgaatcaatttctctataatttattttttctcaggattttattataaaaattttcaaataaacagtatagtttaagtatttttatagtaaacatacatatacctaccactcagattctgtaactaacctttcactattaatataattgtcttatcacatacctctctctagatctcccccctctctctccatcaatctatcttatttgtgacatgtttaaaactaagttggaaggcatcactacatttcacccaattctccagtatgaatgtcattaattagaatttaatctactttatgatccattttgttcttttccaaaatgaattttaggtttcatatctgcaatgaagatttgtaaatctcagaaaatactaagaaattaatatttcttagtaagaaaatactcagaaattgataaattaacaacaaaccatgggacagtctacttttaatattgtaaattcattaatattatcattattattactattgtagttgattttcacacctgatttttcaatcctaacagccagtctgctattcagctgctatttttcctgttcagaccttccatttcatccccagacataatgactcctgctcaatttttcccatttccaccctcaccctcttgtgcccaaattcaaccacagtttgctctctgccagacctccatatatccagtgggattccaatgctgccacagaattccacatggtatccaagtatctgactgacccagccaattattacaatagcaccttatatttagttggtgctggttcattatttcattcagtaagtatttatcaagagcctatttaaccaggtgaccaggaagggggagggcaaagagtgagctaggagcattgagtaaataaagaattagatcaactaactcacatgtatgacgtaacttctgtgtacacaacattgccatcaaggagtcaagtcaggggaagaaaacaaatgcacatgaaacaattggagaccagctgtagagagagaaacaagcaaaatttcgtgtagtcatgtagaatggtttgtttgcatatctgccaaagagatgtagaataaaaatgcttgtaggattccacttccagagagaaatgagactgtaaattaatattggttcgacctaaggccatgtcctaatagacggaataaaaaagagtttttttaaaaaaatagaattattaaataaaatgtttttttaaaaaaataattatgttgggcaattgataaaatgtcttagaatatgtgaagaggccagccgcggtgccttacacctgtaatcccagcaatttgggaggccaaggtgggcagatcacctgaggtcaggagtttgagaccagcctggccaacatggtgaagccctgccgtctctactaaaaatacaaaaattacccaagtgtggcggcgagtgc

SEQ ID NO: 52929 - DNA, 549 bp, Homo sapiens
aatatagagaaaatccttatctcagtgcctaatacctagtattagatataaggggcaaaataaagggtaggtgatcataattttcatcatcattatcatctttgttatgggatagtgtaatgtactgaggctccttggaactgaactcacgtctttgactgcccaaagtcataaaaaatgtggtaaattttcttttagccattcagcaaatatttactgaccacactgttgcgcaatctctgggaagaagcagtgtacataacatgggcattgcccctccacccccaccttgcatgcaattaaacaattagtcatagaaactagcatacagttataaatggaaagtggtcgaccaagtgagagggagatgccaggttattgtgagaaaagatgtgtgtgtgtgtgtgtgtgtgtgtgtgtgtgtgtgtttaggtgaagcatgtattagaattaaccaggtttgagtaaggaagtgaacattccacatgaaaggaacagtaaatgtgaaagctcagagatataaaaagaccatagaaatgtgtctttctt

SEQ ID NO: 52930 - DNA, 800 bp, Homo sapiens
aatgtaatgaaaggcgtttttcctcaaatcaattctagaggctatcctctcaccccattcccgcagtcactggtatttggagacttgtggttgaacaggatctctggaatgaatatctcagtggatgccaggcacgatggtcctacataaaaaatttgctttgagggcttcctaacatcagaaatgggtgcttttccagattaattcacctttttaatctgtccatagagaggagtaatagttgcaaactgcttagtttcattagaaaagctttctcctgtttttaatggcacagggagtccaagaagggcctatttttaattgtttcatgttttactgatatcctggccttcagttatctatcattttctaaaaaccactataaaatttagaggctttgaacactattttatgtgttcacagttctatgagtcagcaatttttgttgggtgtttcttgtgctgggttcattttgggtcacttacaacgactgaggttagctggcaattcgagtagaactggatgatctcagttggcctcacccgcaggactggcagttggcagactactctctgggatgcctctcattcaggtgaacctgagctcctacaagttgtggtgtcaggatttcatcagaggcaagagtgcaaagtgtgatgcataaatacatttaaagtctctgccattgtcacacttgctaatattttttggaccaaagcaactcacaatttggccaagaccaaaatcaaagtggagggaagaaacctctactttttaataggaagggtggccaagacata

SEQ ID NO: 52931 - DNA, 616 bp, Homo sapiens
aaactccccccaaattaggtttcctcacaagccttgggcacataaatctttcatttatttatccattcagcaaatgtttattgaggacttatgtcctagccactatatggagggttctatatagtgatacagggtggtgatacaggctctatatagtgatacagggtggtgatagacatgtactgtctgttcttatgaggcttacagtcgagtgggggagagtaccattggaggttgacctcagaaatgagtcatactgtcaacagtgatcattgccatgaaaaaaaattagatcaacaactaaacaaccaaaaacagtattaggacctcagaaagactcaggagaaaagagaggctgtgccctcaacaactacatgtgggaactatcaagaaacagcccaagtgtcctgtggctggtacagaaagatggctgggtcaaagactgactacatctgtgccagatagcaggtgctcatcaacacttatacactgatggtggagactcatgaagactgaaggtctactggaagaagtaatactggtattgtcttgaagatcagaaaagagaaaaggacagggacaatagggagacatttctacctgtaggaaacagtgt

SEQ ID NO: 52932 - DNA, 418 bp, Homo sapiens
tgtgccatctcaggccagtgcatttaggaaatattttgttggcacttaccaacgagtgagatgcataaagaaaatattctaatgacagttgagttgagagagctttgatctccctccagaactgcactcatggctttgaaatgcagttctggcaaaggggtaaagtctgggcgccttggcaatcagggctgggctccctgaaatagacattccaggggacccgcaatctcaatagtgggatccaggtgcatgggttgtgtaggaagacaagagacactgagttaccactcttgagaggcggctcaggggaaagtttctaaatcaggagggacatttcaatctagccaacattttccaaactttgttgtttgtactgctgtttggtttttggcaaaggtggaagtgtgtaaggggaggg

SEQ ID NO: 52933 - DNA, 852 bp, Homo sapiens
agaaggctgggtaatgaggaagagacactgaaagctgagactgggagagccacgcagaggcagactgtcagtttaggttctttcccagcaggagaaaataggagaccaggatatggggggctcacattttctagttatgtgctgggactgtgctgagctgtcttatttaatcctgttgggatccgcatgagctaattgatactcagagacttaaacctacttgtccacagatataggtctatctgtccaattctgagtagcaaagcttctacgcagattaagccacacagattaagctacagattaatacacacacagcttaatctacagactaatacatgcacagagttggacagacaacttgcccatagatataggtctatctgtccaactctgcgtgagtctgggattttgattgatttttctgggaagtgagtaatgtttgtttgcttttggttttgttttaagagatggcctattgctctattgcccaagtgggagtacagtggtacaatcatagctcactgcagccttgaactcctgggcccaagcaatcctcctgtctcggcctccgaagtactgggactacaggcatgtgccaccatgcccagctaaattttttgaattttttgtaaagatgggatctccctgtgttgcccaagctgatctcaaactcctggcctcaagcattcctgccgccttggctgcccaaagtgctgggattacaagcatgagccaccatgcccagccctgacattttaaagtacatttgaccaatttacgatgtatacacagggacagccttcccaaaaattgcaaaatgtaagtcacatggccattttccttctctca

SEQ ID NO: 52934 - DNA, 5799 bp, Homo sapiens
aatggagaaactgagtctcagagatgtaagctgacttgcccaatgttgaacaactgataagtagcagagcctggataccttagtgagtcaggggctatgagttctaccctttctgttccagttgagtaatgtattgagttaagagataggcatgggtctgaattctgtcctaggagtgtgaagatggagtgacattgagagaactgcagaagaaagggacttggcatttatggagcatacacctgtaccatcatatcaaaatgcaacacagctattgcctcttggaacattataatagaatggggaaatcaagtatataaagaggtaaatagcatctagggtcatgagtcctataccagagatatgcacaggagcttgtttaatgattatagcaaccaggtaacagactttttactaaatttccaactctctgatgagaaaactgcgactctgagagtccaagtaaccagctcccaggtcatgcaatcaatacattgagggagcaggcgttgaactcttgtcactgactccaaagccctctttgtactttacccagctgcccgcagcttctatgagagtgtctgcaggcacgccggctggagggggtaggaataatattatttcatttatgttttatttatgtggtggtgtgatatttatctagcagctttcatctgggaaatgtgaagtgttttataaacaggttcttatttttttctccctccccttccactcctccacctgagtacttaagaaccaaagaggtttccagagaagaccaaggtcacaagggtggacagatgtatatgggatggtggttccccatgtgtggatgcagctgtgtttggtgataacagcaataatctcttagatttgtatatccctctgttgtttactaacctgtttcgtgtccaacttttatttgatacccacaccagtcatgtgaaattggcaagacaagcatcaatttacagaggaggaaactgaggtccagagagatcaattaaactgtctaaagtcacatggcctgacataaaagtagtggagagtcaaactcaggtctgctgattcatacaaaaacagtgttgtgtaatggctaagaggctgaactttggaatcaggctgaattgagtttgattctgatctcctctgtgccttcagggctatgtacctgcggtggtggacttcatctttccaatcctacttccttatctgtgaagtgggcaaaccaatcatttttaccccagagagctgtgaagaacctgtatcagttatacagaaagttaaagaacttatcgcagtgcctggtaggtggagatctctcaataaacagcagctataactaagatcccaaccaaggtctctttccactataaccagtgtctgagaggagggcttggagctcacatacacctgagagggtctatttgcaggcaggtcaaggcgcccggtttacctgagctgccccccaagctgaggttctgtgtcccattccctcccctccaggcatcagcctctgcgtggggtgcattctcaggcaggctgtctgaggcagcagctgcgggaggcatacactcccaactcacccccacacaccctgcccacctgtctccactccttgcctctggcagccccactttgcctaggagaaaagcagcaaacctgcgtcctcaggtgctctcctcttagctcccccaccccaggatgcagccaaagaaaaccaaagcactctgttttctaagccggagccaggagcgattcccgtaaggcactgcctggcttaatggggctgtgtctgggccttgcctctaagccaggctctggcagtcaggaggctgccctcctgcctggctccatcagaggccgtggcatttgcttaaggtgattcaaagtcgaggccaaggggacagagatggcaggaggcttggttctggttctgtctgtactgactcacagcatgactctggacatgaccctgaccagctccaggcctcagtgcctctgtctctctacctttactaaacggcagctgcttctatgtcagtaattctttaccctggctgcatatgagaatgacctgggggagggttttgttgttgttgttttgattttttgagactgagtttcactcttgttgcccaggctggagtgccatggcgtgatctcagctcattgcaacctctgcctcctgggttcaagtgattctcctgtctcagcctcctgagtatctgggattacaggtgccccccactatgctcggctaatttttggtacttttagtagatatggggtttcaccatgttggccaggttggtctcgaactcctgacctcaggtgatccaccggcctcagcctcccaaagtgctgggattataggtgttagccactgtgcccggcctggggaaggttttaaaaatgaacacctgtgccccatccccataaattaccattgaactggcttggtataggggtctgggcagcagtacttttcagaagctcaataggtgattcctgtaggcaaccagggtctagatccatgaccctaaataaatgctgagatccctgtaagcttttgcatttaaggattctatcaaagagataaaggagtaagaaacagagacttctagaaggagaaattctgatgggttttggtctttaaagtatcatcaaattaagttgtctcattggacagatgggaaaattggggccccaaactaagggatgagtttaaaaccacataatgagcggctggtggcctggtctagaacctgtgtcatctgaagcaaaccacaaaaatgtcagtaataaaaagatcagaggaggaggaggaggaagctgaaaataaagaaagaaggaaatgcaaaaaagggcaaataaaaaatgaaaaaaaaaaaacagaaggaagtaaaagaaaggaatgggaggtcagggaagagaaaggggtaaaacgtagagggacaaaaagaaataaaagccacaactgaggcacgagcaactcggatagtaccctgtgagtcagggcagctctgagccacacttggctgtacagttcgtatttggcaattgcaacccgggcaagagctctgatcccagctggggccccaggcccagggctggagcctgcgtggggacggtctgactcacagctgctacttcctcaccctgtttccagcctcttgctcaatccaggcaggaggcaggatagatgctcttttgcaaggtgatcccagcccagagggccctgcaacctttatgaaacgattctggttaggtgtaggaaacaaatggggcagcagaccctgtactcccaacatgctgaacagcaagatgactcccaaagcggccagccctttcctgcctccaggcctttgtttgatgcccatttccactggagtgcccttccccacagataccctgcctcacatggcatctgaggcctcccaagtctggccctgtaatatctctctactcatggttcccctccatgctttctacactacccataaagccatttattaaaagtaatggcaaaaaccacaattaccaaccttaagacatttactactcctcacctttgcttatgatgtgctcactctcctacgcaatggaacccacaggcatctttcaaatcccacaaacacacaaaaatcccacatgaaatgtccctgctttaattccatctttccaaatggctttctcttatcactacagtcaaaatcattctctctcttctacaactccacatcaagtgttcagtctgtcccctgtaatacttagcactctgactcttttatctcagaccacaaaattggaagttctacgtgaccagatttacatccatataacgtctctgggcataaactgtgaactgtgacagatctgggtttcaatctagcttccaccacctgctatctgtctgcttcaaagcacagtatcttcatctgcaatataaacctgtcaattttaccctgtattatagttttaagtattactagcaataatacaggaggagtatctggaacatagtgccagctttaaaaaacagttactttgctgttgtcatgagtcacctatgggattccctatgggatcctgtgctgggtctggcctggagtggtcttcagaaaatgtagcttacattactcaactgaagctcagttgctctctgaaaacagtgtgggcaaggtggggattgggagaggaaaagggagagaaaataagaatgcgtccaacagtgctgcaatataaggatgttgttctgctcttttactcgtgaaagaaatgaaggctggcagatctacagcaactttaacactcaaaaactcattccctcctcctaatatccctgagagataggcaggaattcctgtccctgacaaatgcagaaagatccaacctgatgcaggtgggttgggacaaggtaaagttagggcttaaactctcctgccctttagaggccttgctgtaagactctgctgcctgctaggagaggaagcagtcttggctcccgttatgaatagatgtcagccttttggcacaatgcaacccaactgtcagcctaaaggaagccgcatgtactcagggaaaccctgtctgctctgcctttcacaggaagccaggatgtggagccaggagagaaggggcattcaaagggcctgggagacccttggtgaaaacaatcagttggtttcaacatcccagagagattctcaatcagggtgagtctcaaatattagtagacataaaaatcacctggggagagtgtaaaaaaataaaaattcccagaaattctggttcagtcattttggggccaacctagtcatttgcattaatcagcatgcactccctgatgattctgatataaatgaatcacatgttgcaaaatgctttagcctgttccctaatctaaatcttatctctctcctctcagcctggtctacccctccttcagaattaccttttactgagaacactgagaaaatcaatgtgcatatcccattccctttattctgccatcacccataatttcttcctgtcctgtttcatctgggccgtatagactaggagagggatgtttgagagagtaacagcaaccttcaacctctataaaaccagctcctgcccttcctgactccttgggactcagttctatcagttactgtatttcctttcctctggaattgcttctcctccaatctttcccatttgggggactggccccaacattcagagtcagtggtcttggttaaaccctctgtgcctatatccgctctgcccactgtcttttcctccagcaccccctacaacacaaacacacatcactcataacccatggatcccacctctcagtacctccatcctcactgccatcattctagtttagtcttcatttctcccaaaaacactgtagttcaataaggctagaaaagacagtatgagagggtaagaaatcaagctggagagtgcgggagcaggaacttttagtctcagattctcaggaaataggaagaactgtgaagaattgtaggggaggtagagaaaaggaaaatgctatctagccaaatttgtagctctatccataatgatatgtccaaaagattctgaagtagcctgccacatatacatatacatatacatacacatatacatatacatacacatatacatatacttaattgcaataattttcagataaagcaaaggcatccatgaagactttgcttccttcttctagtagctcacagagaccaaagttggcacacagcactctcctaacactaaagactctacaactccttc

SEQ ID NO: 52935 - DNA, 3144 bp, Homo sapiens
cttttgaagatttttctgcctggaattcccatttcacccaatactgggctcattccaggatcagctcaatcctttgtttttctatgtagcctttactgacagcctccttagccatcatccccttacttttcacattatcctgaatatatctgtttacttgttaatctcctctgtatggggcccataaggtccagaactttattaatggaaatttctccatccccaggactcagaacagtgtttcacataggttaggtgcttagaaaatatttctaaaggtatatgtagtgacctggatcaacaggatttgatgtgtcaatacctgcagcggaattgattcaccatgcggaaatccaatggcagggggcttaactaatcaagagccctagtctgagtactctgaattttaaccctgcatctgcactgaggacacacttcctacaggctgttcctagccaacgactgggcatagcagggatactaaggcaagcccattctgggagatacaggaatcctcagatggcagactgtcttgaggattcccttaggctgggcagcagcctgggatgcttctgcacagccttccttcccactctccttcacacagggtcagactccccccaacctgatggctcccacccagccttcacagcaaactcccatcttctctcacataggcctttcccttaatacaatcctttgatgttttatcccatctcagcatctgcttctcagaggatccaagctaacacactatcctcaatgtacatatgaaggaaccaaggctgagagaggtcatgtgacttgtgaacaattgataagactgaggttcagttgagtgctggtaaatgtttaacaacttggctctctgtgggaagagaggaaaagtgccgattcatagcactggctgatttccaacatataaatacttccaccctggccaatttcacactaccactgtgatttacctgaacgtggacttgggaagatatgtgtgcagttgtcctcaggagccagacaagctggctgtagtgcacctctgtgaggctgcaagcctaggcttctgtctctctgggtggcacccttgacagccctccccagtttttccccactgagtgctcttctcagttggcggggtggggcgccaacagcctattctgggaagtctctgtccagtcagtgggctggaaaccttgtggacatgcagcttctccctgggttcagggggtggataggggctctcatgtccctaaaaatgtaggctctgccagatggggaatagtcacaggaggcttgtgacatcaaaatggccttggaggacccttctggctgtagcatggaagatggattgaaggagtgaaggcagaagacagcaagaccagtaagaggtggtttaaataagagacataaagtagtggtgtgggaactatttcacgaagaagatgaaggaaggacggttggcaggcagaaggcaggacagatcatactactagttattgaataactgctagttattgaaactgtactgcctgccaggctgtatgctaggcactttctcattttacacccctctcccaaaatgtcaaggtaagagttattatctctgcatcccagatatgaaaaccaagcctcagagagactgtgcctttaataataaccataatgaaacaggtagcaaaaatagtagctaacattcactgagcctctactgtatacatgaatattattatcacctcactgtaaagatgcgattaaacagctaacaaatggtggagctgaaactataattcaggtacttagtctcttggtaaaggcctaagtattcttctctagatgtcattaataattcagatgaagcccccaaatgtgggatatactctcatttctccttctcaccaggatattagaaaatgtataatgcaaaaaaaattaagaaatgattctgagatccatttagcaggtagaaaaccttcctattgggacaaggatgctttgcatttcaattcaatactgtactagtggactagcctatagtgagctcatcacatggaaagagttttggatatttttttaaatttttaaattttaatttttatctttttttaggagatgttaagtagatgaaagaccaagaaaagcgagggagaaaattcaatatatttgagaacaaaggcagccattaacctgtccatcttcagaacctgaatcggtagccaaatctcagcagacagagctacgtaatgccagataaatcttcttgctgaatgagagacccatcctaccagcataaacaacatttgaacactctagcccccagccttaccagccagctctccattctctacacacagagtctttgttgggacactccaggccagttatttcaccatcctgagtctggtccctctctgaggcccagggacatatattcagttcaggtttgaattaaggaaagatactactaccttgatgggggatcaggaccacaggaccaaattgaaccaggcaagactgaaggggccaagggatagaggatccccctcccgaaggagccaactggaaggcaacaattggatggcctgttaaagaagaaagaagcttaggacagggagaatgccactttccagtattacaaaaatatcctttaggcaaggtgaggcctttttttactctgacactatttttttttaaaccaaccctgaaagaaaaatgatagggtcaaggttggtccaaggaacagtaggtagggaagcagatgagaggttcagagctctggagtgtgagcaagatattcttcttctaggcacctgagttaccttctttctaaatcagggcgaaatgtcccttttcatgtttcctgagtagtcagggaagcaacgaaccaaagtcattgggaattagaactaagaatcagacgggcctcgtttgcatgccaatggtgtcactggctagccgtgcaacccatggcaagccactgcaagtctcagagctttggtttgcttgtgtgtgaaaatgacaaatatagtgcaggcctaacagaagcatggtgaacatctgatgatgcaatatgtgcaaagtgcttaacgtagttcctggcacaatattaagtacttcataaatgtttgctgttatgattatcaatca

SEQ ID NO: 52936 - DNA, 809 bp, Homo sapiens
aagaagtggcattgtacatccaaggtgagaggactgagtgagacctgggagaatcggggaaaacttcccaggggaagtgaattttagctatgctttgaaggatagaggaagcttagttagatcaaaggtcagcaacttttaaatatgaagtagctggtagtaaatattttctgccttgtgagccacacagtctctgttgcaagtgcttgacattgccatgtagtgtgaaaacagccatagataatatgtaaataaaaggacatggctgtgttccaataaaactttatctacaaaacagacagccagcccatgggtcctaacttgccaagccttaagtaagaaggaaaaaggtaggaaatgtggccttttttggctacaggaatcactttttaaaagatagtgagcagtatactcaaaggccagtgccaggccccagacctgctcataactgttccctttctgtctcccactccacccaaccccacttcaattgtgttctaagccctgagggtgagcttattgcagctatgcaaagagaaagctgcctgcatttgagataagctgaataaacagctcactgatcccagtggaaggtgcttgtgaacatgtgcctggatttagtctgttgggaaggcagagaaagacaacaaatctagtttcctcttgaaaaagagattggccttttctcctttcaataagtcaaggccaatggtaaaatgcttgcccgtttctaccgactgtgtgtggaccacctccccctttgcaggtagcaaagccaacgtgcagaagtcccagtttcatcagatgta

SEQ ID NO: 52937 - DNA, 1952 bp, Homo sapiens
ttgtttttgtttattgttttatcattgtgcagggtcacatagctaaggggaatttcaaatccaagtccatcctacttcaaactcctttgtgctcctaagctgtacagtatagtcaccttggagagtaggtgattggccccaaactacttcagggactgcaggtcgtggccagccagtcctgtatcagacctcgtccttgccagatgcctagtgccccagattccctcaaatctcaggccagatcacctcccacctggtaagattcctccaccttcacccgagcaaaactacacttggtttgggttcccgggtaccttcagtctgcagggacaggggctgcagagtgtactccccaagtctgcctctgctgtcggcctcccagctgagtaggcaaaacattcctttacagagcaatgtgttcatggataaacttgtctctagtgcagctctctgtcagagcacagaacatgaggccaaagcactgcccttcctagggagtcccggttctcgacttccccagaatggaagtttgatttttccgttggcccatttctcagatggaaaaacagattcagtaaggtgccaacgctttgctgaggactaccctggaggctaccgttttgtgaaggggtagacattgagactggagtcagatacgcattctggcttatctcctgacttactgagtgaacttgagcaggtccctttcgcccatgggcgtcggtttcttcatctgcaccaaggagacggaaaactggattacgtgtcgctaaggccccgggttctcagaggaaagctcacccctgcagggccgccttgccccgcgcgcttggggccagctgcacgacaagccccagcatgctggggaggcggggctcagtgacggacagggagctctgcgaattggcgcccggcaaggggtgctcaacggcgcgtgcgcagagggaggcaggcgggtgggctgccggcggtggactcgtcggagccgcgggcggtcaggtagggggcgggaaggagggttggggactggggaccgcggccggagtcgtgggccgtggctcagcggccaggcgggggaacgtgccggcgtgcagcggccgcgcccgaatggcagggtgtggggaccggatctggggggggcaggactagggtgggggtggggctgcgaggggcaggctcgggagggattcgtggggctgaggagatccgaggagatgcagctgggggaggggagcgaggggctctgaagagatttgcggttgcagcatctcgggaggtatgaggtaatgtcggggccctgaggaggaacggggtgtagcatgtgggagatgggagggaatcagggccctggagggacctgggtgcagaatttcagaaatatgaaggaactggggggccccgatgagatttgaggaaatctgggggcgctaggcatctggcaaggacagggtctgagatgataggagcaaggtctagggcgatcctaagtgctattgagaaagggttttcggagtgggctgagggtgagattgagggggtggggtgagttcttgagggactctatcttgttagcagaaagaagggagctggctgaggtgtgaaggcagcacatgacattcagtgcataagaggaaggagcagggtatgagggcagcacagtgcccgatggaatgcaggagatgggggctcagattgagggagagcagaaatctggggtgaggaattggggcgttgaactgaggtgcggggctgagtgtggcagagatttggaaatagggattaaacgatctgagtccgagggatttggggcatatgagtgaggaattgacgagggttgcaatatacagccccaaagattggaatttggaattgtaagagggttggggacagggtttggagaggattgaatcgtggggtggagatgtcctaactgggctataaaatcaaaggac

SEQ ID NO: 52938 - DNA, 1170 bp, Homo sapiens
tgtggtcacccttgctgaaaagctaatattcatttcatattcaccatagtcctctaatgtaggtgacttttctctttgttctgagtctctgaaaggtaaatcatgcccagggtcacatagcagatctgtctgttcgattctaaaaccctgggttaaggcacacatcagagacggggactcttgacactccagccacacaagagctgaccctagcggttgcttggctgtcaagccttttcctccccatcacattcccagccatcgtccttggcccggggagcttgggtggggtgtgatgactgtgctgccccagcagagggcagtgttgccatgcctgccaaggcggagggctacaggaaacgggagggagcctgggctacgcaggcctggtggccggtgccgcgtccctaaaacagccagccttatagggctgcctccaaaccagctgcttttctggctcccatcccctcaagcctcaccgtggataaacgtactgtccccctcacctgtctattggctcccatgatacaacacctgaacaaattgaagagctctgtgacacctggggtggaaaaagacccggggagggtttccagattggaaacaggaactgttgccattttcttgtttgctcagaattactccagagctgggagtgctgttgacatatgtgttaccacttaatctttcataagaaatccttttcatgggggagctgagctctggatccgcgccagtttagataattacattcccccagaagactgaagctgtgacggctgcattctttttctgctaagagttaggagtttcaagggtacaggttgggcaagggggctgggagtaggggtaggtgacatcgtggtccttaggaaaacgataaccggggtttggtgaggaaaagttaacttcaaagtgtcacccagtaacagttttttttttttttccttcccttggacttcattcagtgtgaaattcatttgtagtttttgtctgtaactagaattcaatttttgctcttttaaaagaaacctgatttacagagggtgtgaaacaaagcagaaaatgataagaggagggaaaaataacaattcagatgggaaaaaaaaaagagaaagaaaaaagtccttttaacaatttctctgatctaaagtggttgggacagcattt

SEQ ID NO: 52939 - DNA, 1076 bp, Homo sapiens
aatgagagtcagcacttctcagaggctcgtttaccctatctgatgtttgatagagaaagtctaatagacatgctaactatccattcatctccagtttttacctgaaaggcaatacctgagtcacattatctaagtccatagcagaaatgctttccctgagctacgacttaatatttttctctttgcctttatagagggttgatagaaaaactgcccagtagaaaaaagcatgtattttttagaaactgcgaataaagattacttccactatttaatgcaatggacctcaaattctctatatatgtgatacaatcttaaaattaaataatgggttgtaccatgaagctaagtaaggagtgtgtgatctatgttctaccgtgatgtccatgcccaaataaaaatatatggcagaatcaatgactgatgtgggctatgtctgacataaataaaacagagagacttaggacctgggaacaggcctgggtcacaaggtatttgttggacagaatgagaactcagaggtcactaatgcttatttgcctgtttaccttacttatcaccaggtatcaagggcgggagtccaaagagcattctacaatagccgtctgcaaactgtggcctatgagctggctgcctgtattataaacacaatgggacattactggaacacggctataaattcatttgtttatgtattgtttgtggctgttttcacacttcaatgacagagttgagtaggtgctatagtgatcttatggcctgcaaacctcaaatatttgctatttggccctttaagtttaacctcagcatcatgcaatataccatgtaacaaacctgcatgtgtactctcgaatccaaaataaaagttggaaagataagtttgtcatttccgtattgagccagagttaaaagactttagttagaatcaaagtttgtttgtgtttaatagtctctgtaccatctgagactcagtaccttcagctgtaaagcaggattcatagttttgtctatattataggtttttgcaagaataagaaaatatatgtataaatgactagcatggtgccataaagagc

SEQ ID NO: 52940 - DNA, 1225 bp, Homo sapiens
cttacctcgtcatctacctgaatggaccttagtgatttgtttaattcaatcctctctttatatagttgagaaaactaaggctcctagaggaaaaagtgactgactcaagggtacgcagctcccatgggtgtaacctaattctgattcctactccagggtttcttacctatatgctgcacagtgcccaacactgtgcagaaaagaggaaggaagaggtcatcagggcaagttaagcagggtagctaagaaattagtgagtcatttatttgctgtattttctccattcaatatatactttttaaagactcgttactatttgtgaggtgtgaaaaaaacagtctctgccatctgccagttcacttcctggtaggggagagaaatccacacacatttaatttgcatacagtttagaattttggtaagtgctacgatcacaataaataaaatgaaacgtgtttgaaggtcagagattaattgtgtttggtcctatgagcaagtttcttacattttagaacttagagtacacgagggaagaggcattccatgaaaaggggctagcggaggaacataagtgtaaaaggcctccaaatatagtttgcagcatataccagcagcaaagacaggaaagtaccccacttaggatctgctggaggttaatcctgatcttacgccacttcccatttaaggtttcattggttttcacgtaagtgtgcatggatgcagtgttagctctggccacatgatggcggtgcagggccacaaaagggtcgcaaagcctctgaactaattttgaaggttgtgtttgtaaaaaatgccgggaaggaagaagggtgccccagaccaggggtcagagcggcttggaggggcttctgggagaagacagcagccctcagatctggagaggcgggtgccattattctgaacctctggtctgttcagaaactccggaaataatttagatgttacataacctgtagccagtgaagaaagcagcccttttgaatagtacccatttaaaaaaataagaaggcttataataccccacctcccagtttccctgaatgctttccttctctgtcagggttgtgcctgtggtgccttgttgccactttggttgagtaaaatgagaggtagttatccaatgtgttgggaaaaggaataaattgtttcttaattacagtacccctcagacagtatacggagagggaaaggacactagtccaaa

SEQ ID NO: 52941 - DNA, 836 bp, Homo sapiens
tttccacacattggtatgtattccctcttccatggtaccttccatctgacctcctccagcctctgaatttctatttaataagaagctgagtggaaaatcagaccttcacccctggaaatccatttgcttctgcctgtgtttacaaaactgatgatgccttgcaacaaactcgatcttcttactgacttctagtcacagtgtatttgggggattaacaatgataatttagttctaagccctattctcttgatttaaacagttgcaccaacaactgtgagcttcatttctttcctaggtctgtctacctcccgatgtactacacctgtgaaataggtcttgagaagtaccttattaggcattggggtgatatactgcttaaacaggagaggtctgtcctagttgcttatgaatgcctgaattccttagctgagttctggagccacccacagatctgctatctacccctgtggagctgacttggaagccgtgagttgcagacattgatttgctgacccttaatctgggtgcaatcaaacagaacaccctggtatgtggcttatgcactcacttggttcagctaaggacaaggacctaagtccaggtcacttcccctggctctaacacatcataccctgatttacctgtaaaagcaagtgcttctagggcagcgacttacaaactaggtttctgaggaggtagctttgagttagcctgggcggaggcaggggaaggacttctttgggtcccacatgatctatcttaggcagaacagttttgattatatttatttgctatatatttggcttctcttaaaaagataatttaaaaaattattc

SEQ ID NO: 52942 - DNA, 579 bp, Homo sapiens
ttacatttttcttaaaaataaaattttgcagatctcaacttactccattttttttcagagagatttagcaattattacttggaactagggaaagagatggctcctttacaaggacaattttgattaggtagagaaggtaaggtttataaacttatgcaatccatgattttaggctccatccttcctgtggtttattcttgaatcacccagatttacttcaggcctctttcaaagacctcctcttacataatctcccttttgtgtttattaaatgattcaggtcaaaacattgaccaagatgattcaggtcaaacaaggatgtgttatgtccttgagccaagccccatcttctctttcctcctccacatttttgcctagaaatatctactgtgacctaggaagataaggtattcaaagaatgccctgaaatgactcatgaccactaagaaataaaaagccctaatatattaaaaattgcgatacaaaaaaaaaaggtctggtatacattggcatcaatagacattcaggacaaaataacttttgatttgctattagaaggaggaaagaaaatatggacat

SEQ ID NO: 52943 - DNA, 1128 bp, Homo sapiens
gcgctttttggcacaaattgtcctgtcctaatagtcttgattataattataaaataatgggtttctgaaaggctgcaagcagttctgggaatggcaataaaggtttagaaatgacgtgatgtttatgagagaagtgttttgttgaaaattaaactcacgtttaggagaaaggattgtgttgtatgctcctaggaaactatctcactatgtaattaaatcaaaaccagccagttaccaatttgagctcttgactcatactaacaacaccccatttcccatgggccaagcaaggcaggactgacctgaaataacccagcctgactctatccacagccaccccaggaccttgcccctccgtcttcctagggctcggccgtgagatgctagtgcatgacccttcctcttcctgggactgtccttgtctttccctttggactctgggaggtctgttctcctcctcagaaaggaataaacactctttctatttgtgggattccctaggagacactatataaaaatatagagttaaaaaaactatttaaaaaaaagacaacttcatgtctctactctgacttcattctttttaagatgggtaacaaagactctcttcaaggttagaaaattttattttaatttttatagatttagagagtgcaaatgcagttttgttacatgaatatattgcataatggtttagtctgggctgttagcgtaaccatcaactgaacagtgtactttgtacctattaggtactttctcatcccttaaccccttcccacctttctgagtcctcaatgtctgttatttcattctccatgtccatgtctacaaattatttagtttccactcataagtgagagcatggatggaactggagaagagtattttctatcccaagatcggttccttgatcttgtgtctccaaatcacttgctctctctcttacatcttttctatcttcttctagcctctttttgcaaacttcattttgacaaagaattccaggcagtctacagctgattttatttcaatacaacgattaaaatggaaaccatatatgaagatgacaaagttgagcaggtcccaaactctcacttttaaacaaatgcttggcttaagaatcactta

SEQ ID NO: 52944 - DNA, 3060 bp, Homo sapiens
tcatccttctccaatcctattttatattctatctttggttattttcccttgaccttcctttttcaagcttggtcccattttacctggattttcgacctttgcttagcttgcaagtctatattgctgtgctagccagttatgcagtcacatttgcttctttctatcttgtctcttttaatcagctgctccactaactagtagctggcataaagaattcgtgctaagtgcacatctgttcacatctggcacataaaggcctgtaggtcacatttgtacaggcagcacagctgacttcacagcagtctgagaaaagaaaaaaatagaaaactctggcctaaaaattttttgtatttgatcaaccacagtaattggggcatttccagctggcattcagcttggcacagggaacaatgaacgagacaggttaggatcagggagctggcagttgccaagatcttttcttcttttggttccttctggactccagtataagcagtgagagaggcttgtccatctcattctgtcttgcagtgtgccctctctcagtttgctgagaccagtcaatgtcagaccattgtttctaaacagcaaccctgactgtccccagcttgcaaacattagcaaatacaggcaatgttcttacaaataacagagattgtgattgtctttcctcactctggtcctgcatctaaagtaacagattggaaaagggaagtcaaagttctggatcctgttgggaaggtcagagcctccttctgatttattgggggactgctgctgagatcaagaggcaaggggacaccttgggaagtagccaggaaaacacaggctggtgtggatgaagtccaaaatgaactcaggtttttgcatacaaaaatgaaatgaaagttatttgcaaatgctcttctgggacaaattgttgaaggggccaaataagcattcaatgggggcctcaactagatgttctataaggcatttttaaatcttgatatttctttcatttttttccatcaacttaattatttctactccccatattatattgttctttaatttacatccagtaatactttctatgtacttctctatctcctgcttctcccagctggatttttccatagtcagaaggcagctgaactccataggatatgatgtgagcaagagcaggtaagccactcaaataccttcctcagacagccatcgtatctgacatttcaccatgaagaacttaaaaaaaaaacatagaaattttgatccttgagtccttgagtgttactgccacttagtatgataacatctgaagttaatactgataaatagtttgttggaaaaataatgattgctaatatttttcactgctggctagtcttccaaagagtttcatgtatgctacctcatttgacctgcacattaatcttgaagtataagtaggtaagtctttgagaactaacctcattaagctttattttctcatctcagtaatggaaataatgatgcattctatttgccaaatacttgggggagacatgaagcagagcagagaaatacatatttatatacaccacacattaaatgcaaagcagtctacaaaatttgaatttagtggctaaatatgtaactcctgaaatcaaactttttcctttagtaaattgttcacttgcagatgaggaaagtagggtacagggagggcaagtgatacatccaagatcacgcaacaattagtaattagaacgaggtcttcacacattacatctagtggggtttttttttcaccattttatcttccaactacactcacttcaagataattcagagccagtgaatccatcccagaaggatgatgacttcagcagacaagaattgttacgctctatcctcttgtttggttaaatgtgcagataaatgctgcctgaaccactgccatggagtaaacaaatcaatggaagacatgacctctgtgtttaaggtctacttatgaagctagagaatccgtgcatgaaaactaaccaataatataagtcataacagtgatataagtaaatgatgttacagaattctggacaagaataggaagatatccaaaaatacttcttggagaaggtggagtatgagatgaatcttgattacatttaaatagtaaggaaaagtttcagaaagctgatcgcatacacaggaatacaccaaggagcactcaaggagagagcgcttactttaaatgtggatgaacataagtatagaagttagaagatatgattcccaggactgacaccaccactttactgtctctgagaacgagcctcattaagctttcttttttaatctcaaaatggaaataatgatgcattctatttgctgagtattttgggaagacattaagcagaacagagaaagaaagaaatacatatgcacattaaatgcaaaacagtctacaaatgtcaacttagtggttaaatatgtaatccttggaatcatactgttccctttactaaaatatttttcaattgaactataaccgacatgtataaaaatgtataatgcacaacattaaatgtacaaacagatgcataaaaaccaactacatattaaggaaaaaataaagagaagttatcggataaataggaaaaaaagacttaaacaagcatctcaaaagaagaacatattcaacctcattagttgttagggaaatacatacccaaatcacaaagtgttatcactacacaggctccagtatatccaaaataaaaataacaagaacatacaatacaaaatattagcaaagatgtagagaaattagaacttgcctgcactgctgatgagagtgtacattgtttcaattactttgaaaaactgtcaaacagtgtttgctaaagctgttcaaataaacaccctatgacatggcaattccattcttaggaatatccaactgaaatgcatatatttgtgcactcccaaaaggcgtaaaaggatatttattcagcagaaatattttaaaccttaacacaacaaaaatagcaatggtagaatggataaagtacagtagattcatataacaggacacta

SEQ ID NO: 52945 - DNA, 2301 bp, Homo sapiens
atatatcactgaaagaaaacataacagagctggtgaaaagctaacaaccgtaatctgtagacatacgttgcctacacagaaaggaaaagtttctattaattttcacatcattagtatttagcagtttctagcacttagtgtagctcagtaactctgaaggattaaactccgtatttaacatcatgggaaaaaaatcttcaaaatatatttaaaatctgaccacctacatcacctccactgctactaccctgggttatgccatcacagtctctagtcttgtagtagccacccatagtccctctgatcatcacagcagcctgaacgatcttattaaaataaaactcagatcatgcagctacctcttcccaagccccactgtggcttccctttctgactaagggaaagccgataatctacaaagccatacataatatggctgccagtttctgctctgacttcatcagcaaatttgctctacttgcccactctgttgaagccacaagtcttccctgtgttgctgtcaagtacactaggcccatctgcaacacgacttacacctgctcttctctttacctggcatgttcttctctcagatcacatcacgtctcgctcaccaacttggggtctttattcattccacggaggctttctctgactattcatttagaattaccatgttcccaacgttcctgatatactttgccaacttatttatcccccacagcaactattgcctaccaacacttgtattttgactcatttgcttttttaaagttgtctagactgcaaacaatagactgattacagtctactgaagtagactgtaaactccataaaaagatggttttttggtccatttttactgttttgaggctctagtgtctaaaacaatgacttactcatgaaggatacatgataaatatattttcaataaatggatcaacggatggaaaaagggaagaaacagaagaaatgaatgctgaaggacaactagtgcctagaaataggactttgaattactccaagaaaagtaagctttgcctgggaacataaattgaaattcttattaggcttgtaccctgccagggcatgggcaattcactggagtcagaggttaagcaacttgcttggtatcactcagtgatttagtggcagagccgggcctggagccaagtcacaggctcctttaccaccacccacccatccaccccctcaggcacacagacttactatgaataatcatttgccagcttctagaattctttttttttcctctggatcatgactttgcattttagaagtaagaaattatggaaattcaagttatagagtttatgaatataaaataacaagtaaaacaaaaccttctatgtatatttttattcctttgctcctgatgactgaagggaccttttgatgcccctttctattagtaaccacattcaatagtgagttgacaaggatgttcagctactactgatcatgtgcctgcaactctaaggcatgacagaggatcaaaaagaactttgtggcatgtttcctgctgttcttatctcattgatgaaccaaaactaataatgaaaaacaaaaaaaaaagaacaaaatatgaggtacatgtgtttattacattaatcttgcaatgtatttctagcatataatagtttctcaaaaatacttttaagatgaatattacttagagggaggaatggaatggagagggactctctcttcatgttctctagggaatcaggtgacaggaaaagtgaaaataaaatatttgtagaaccattgcttattaataatgaaaagaactttggagctcccctcctctcctgccagtgactggtttaatatcacgcaccctatgggcaaactggggtatgaaacaaatcatgtgatctcagtttggaactagtcctcatttcttgcaatttttatacactgagctgcgtttatctaaaaaccaatatttaatgtcacattccaaaaaaagacagaattccaaaaaaagatagaagagaactaaaatttcaagtgacataactatatatacccaaggtaaagacatcaaactgtaaaaaggcaagaaaattagggcatattaagtgagaaagtgaggatttatacccaggttgtttgagtttaggaactatccttttctcattaactatattgcctccaaacctagaatttataaccatcatggatgttgatatttcagtaggaataattggatcataaaaccttaataaaggtgatcttgaaagggtatgaaataagttggggcgtttcatcctttca

SEQ ID NO: 52946 - DNA, 8199 bp, Homo sapiens
cagcatctggagaactggtgcaccagccaggcaacaggaatctgggtttgacatccatagcatctattaaatatcacaatacaaacttcctacgtctttaaccttatcccgtcttctccctcactttgccaagatttgaacttcctgcagatttttacagacactagacattcttttccgccctttttgaccacaacatgaactgaatatgaaaaggtccccttctgctcctattcttctcatttgaatgtatatatctttcaaggaaaagattttgtttgtctgtttgtgtgtttgttttggtttttgttgttttgttgttgagatagggtctcgctctgccacccaggctggaatgcaggaatgcaatcttggctcactgcagccttgctctcccaggctcaagcaatcctcccacctcggctcctggagtagcagggactacagggtttcactatgttgcccaagctggtctcgaactcctgggcttgagcgagtctcttgtcttggcctcccaatgtgctgggatagcaggcatgagcaacagcacctggccaagaaacggttcttgacctcccaaatctgtagtggctatccttccttctggagacagatgcctgaatttatttattgttgtatccctagagattggaacatccctgtatttctagcctggaatggagttgccaatgaatattttgccttcagatggaaagaaataatgaatattctaataatgtgaaaatatttttctccactcagccttagtgcttaaagttactgtgtgaagatagtggctctgtacaatgcaactctctattttctacaatatttagatcactgtttattacagggtgggtacttactattgattgatagcttatgattgttactactttttaccttggcttaggtgcagtctacatttttcagctaggaaagcaaatgtttaattatggtttttaattcaactcaaagtataaagtgatgaactttttgagttgaaagtcatcaaaataggccttgttcttaatgaaaaaattgtctctacagtttatcttgggtgtacctgtacagtgtctgctgcttgaaaccctatagctttgaagaactcactgcttccaaggagaggcttctctgtcatttaaagactcaggagttttagcagtttctcatattgaatcaatatttttccctttaccttatgggactctttggacaaaaattaacttcaggatgccatcagaaatgtagcggacagcaagctggcatttttctacttttgccagggtgtcctgccctccctgcaattctgactgagggatcatgggagaaactctgaacttgggactagttgggggcatagagggagtgtcaatgcttggctggaagttgtccctcagagcaatcattgcccagtgtttttggctttagctcaacctgcctacgtgacagtccgtcctcactgactcagccttctatgtccagacaaatgattcactcccagtgcatttttctgctcttactaaataggccctctaaccatccctctatctttcaattccagctaacagcttggacagcaggttttttttaaatattacgaagtaagcatgcttggctagagaaatcctgcgggcttctctctgcaaaagcttcctcacatcacccaggcccatagagattgctatcttctctaaactcatggcaaagcccatcttatacatactatttatttatctattgacaaattgtttactagcctctatcatttcttaatttttagctaaaacattttaagcactaattataggccaaacatagtgttaaacattttgcacacatcatctcatttaattttcacaaaatttttgaaattagtactattttaattcagatctcagagaggagaaaatagagacagaaagaacttaaatagtttgccaaaaaacatacagctagtaagtggaagaaacaaaattgtcctcagattacagggtctagcaggtaggtctcttacccgttattcttatgctaatgtataggttgatacctgcctttaacttatttcatgacatttgacatatcacctcatgtctcttggccttattttctttacattaaaaaataaaagaatatttgagttcaatgtttcccagtacaattaattgcatgtaacaactatattctttactataggtcatattaagtaggaaggtaagaagatgggatggaacacacaactctctccagtgggggatatgacggaataaaaaaacccactgatggcacctgctaaaatctttatgtgcttctgcaataggaaagccaagaaacaactcagaaaactgattctcactcatttgtatgtaccaacattctcaatgatgttatttatttcagttcttagactctcccatactctgaacttagaaataaattgagcacacttcaagtcattaaatccatttgggaacgaaggcgggaaaaggagagaaggcaaagtttaccatgtcactgtgtgtgtgtgtgtgtgtgtgtgtgtgtgtgtgtgtgtgtaataactttaaagataacttcaaaacttcccatgatggagacttccagttatctactacaacatccattttacactttcttattattgcctcctgaaacacaaatatcatgaaaaaagtaatgtaattggtttgtttgtaactcaaaggataaatgcttgaggggatggataccccattttccatgatatgtttctttcacattacctacctgcatcaaaacatctcatgcatcccataaatatatacacctaatatgaacccacaaaattgtcatttaaactctagcagttttcttggtcttaatgacgagggattaagggcagtgagctgcaggaagtagaattactgaggactttgtggctctcccatgccagttttggacagcctactttctgacatcttgtaacagataagccttaacttgtttagtccactaagctaccacaatttggatttttttttcatttaggctgctaaattagctaagatagggcataaaaggggaatttaaaactcagcactgagtttcctagtagctcaagtaaagagggaactagaagagtgtattagtgaaggttctccagagaaacagaaccaataggagatgatagatagatagatgacagatagatagatagatagatagatagatagatagatagatagatagatagatagagatagatagataaatgatagagagacagatagatagtaagaaagctagcagtgtaattcagtccaagtctgaatgactaagaaccaaggaagccaatagtgtaagtcctgaagttcaaaagtccaaaatccagaagggcagaagaggatgggtgtcatgcctcaagaaaacagataccgaaaattcactcttcctttaactttttgttctatcttggccctgaagggattggatgatgcccactcacgcaggtaaggacagatcttctttgctcagtctcctgattcaaatgctaatctcttccagaaacactctcatagacacacccagacataatgttttgtcagctttctgagcattgcttagctcagtcaagttgacatgtataagtaaccatcacaatgagtatcagaagatgagtcttgaatcatataaatctgatacaaaacaatatatcttcttttttaaatgaaaattaatgaggaattatataagagccacaaaagaagatttctataatcaataattctcaagcatctaatgtcccttatccaccattggtgactttcatgcttaagtgtagtgactacatgatgagtcacaaaggaaaattatctattacaaaagggggcacgcatacccctaatatttctcatagtcctgtctttatttgatttgtaatttgtcttatgggctaatttttccatggtcacaagagtctgaatctctaagaaacatcatatatttccattgacatctgattctcccacaacaggcaagaccacagactatctgtcctcttttccactctccgttagttattctttcaagtagaaatcatgttctttcatgaatagtggatgtacattgagaaggaaaatttaaaaaacaaaataaaacaaaatcaggatccccaacccaataggggtcataagtcagagattattgctacaggcacatgtgccccaagtgtgggtattccatcagaaatgaatggaaatattcttataacaggaaaggaaaaaggacatttttctgataatcattgaatgatttattttatttgttaaagattctcccctctactctcagcagaaacaaagtgtatgatcacagaaatctagatcttcagagctgcaaggacacttagagattctctggactatatcctacagttaagcattcagaaattgggcctgcatgacaaagagaagagtcaagttctaggaaatacataaattaaatagagagccaaaattaggaatcaggcctcctgaaacgtaatttcagaagggctgttataaaaggatcttcatatgtcacagataagtttttattcctgacacattgcctaaggatcatcatgggttctcattctatatttcacatttgtttcatcttctcttcttataaagtttagaaaaaatgtcagagaaataaatagttgtatttgatgaacacactgtaagatacggagggtcatttgttccacaggtcatcatagatatcccttcccatgagaggaaatgggactccttttaaaaaagcagggccatgtaatattaatacagtatcatggtttagagaaggggctcctatttaaaatctggttttgtacttattaataattaagaaatcttgattacattatggaatacctttgagcctcagttttctagtatgttaaaaaaaggattcaaactaccctgtatatcataggctttattgtaagaacaaagaagatatctgtaatatgtgcagcaagagtttttcatataagaacttgataattttagttagttgtttttatttaaacaatattctcatccttgggctgggtggtaagccttttccccagaaaaattcattaattcactcaaagattagagattaagggtaattagagctcaaatcttttggctgcggctcattcctggtacctcaagtaaagaatgtgagatacatttctgaatacacttcgacttcaaagaagatactgaagaaaggaaagttttcatggatgaaatggaatgtaagtaccaactccaagagcacataatttgaatggggaaaagaagaaaggttgttagcatgaaaaaatctcagactgacaatgtgtaaggcatttgaggggaacagagaagatgtagaatgtcatgaaaagatagcagtagggctttagttatgatttaattccacccattcatttgataaaggacaaacctgtcaccaggagaggtgacgagatatatccaataataaagtgtccagtctcttgatttctagctcattgtatgacagtatgctatggttactgacaaataatatatgttttttcattttcaaagcctcagcaaatattttacaccatttctggtgcagagagaatgctcaacaaatagggtgactatgtaatttattgttaaaatcagggttaaaggggtttctaattataattacgtcagagcaacttccataaactagtactatcacaggcaaactgagatgtgtgtttgttgtatgaataaatatctgtcaattaactacagattaattgctaattgtcctgctttttcttaatgatccaacttccatgtgattttctgagatttctttggtctgttgtttgtcaccaacaaaattttttttttccagaacagagcagatttttaacattcctaggtaactgacgcatgaggtagattaagcttggcattgattaatctttttgacctgagccaaggccactttccataagaccttttgccctctattactaaacccattgtaaaatgtttatccaattgactatttctccaccaattccctctacattaaccttatggattaacctttgacgtgcattgtatcaaaagtctactagaagtctaagtgaattatatgcatggtgactgtcacctcctttgaaaaattaatcaacttcattaagcaagtgttccctacggacatctattgttacaggtctctgcaaactgagagagacagaggaggccaactgctattgtgaaaagatctctggcttgaggatctaaacccctgcacagccgtagccagggctgtgaccttgagatatctgcacataatcttggtgaggctaaagaatgcaatgtaatgattgaaatgtgtgttctgaaatcacaaaaaacatgaaccctctactagatgtgggactttgagcaggctatttcatttgccaaaaccccagggtttacattagtaaactggagatgatagtggtaactccgtattatttaggatatgtgtgtgagaaagctcctaacattccatggtttaaataatatattggcattgatgtacacccctttccattatgttttttactagttgtttttcatgtgttgaattgtgtctcctcaaaagatgttgacgttctaatcccaagtacttatgaatgtaaccttatttggtaataaggtccttgcagatgatcgagttatgatgaggtcattagggtgatccataagacattttgattgatgtccctgtggaaaaaaaaaaagcagatgaggaatttggatatagagagagacatgcacagaggaaagatgatccaaagacagggagaaagccatctgaagccaaggaatgcctgaggccagcagaagctggaggaggaaaggaaagagtcttctcctaccctgatttctgacttctagcctccagaattgtgagacaataaaattctgctgttaagccaccaggttgtggtactttgttgcagcagcatcattagaaaactagtgcgttgtgctagagaatatacaatttaaggatatacaatatatattcttaaatttttatttaaaattttcctttttaaagttttaagattcagcttaaagttaccattgtaccactgtaagtaatatataagacactcaaaacagcagaaatctacttaaccatcctacactccttataatacagttctcatgtgccttatgatcacttatcataaggttaaaattattttaagtactcacatatattctaaagaagttaagagaacatttataatttataattatccatatagttaccattttcattccattttttcccccctgaagattcaagtttccatctgatattatttcctttcaagctgaagaatttcctttaggattctttctaatggtatcaaattctcaaaattttcttctatcttaaacattctttacttcacctttatttttgacactttttttggatatatcattagaggtttcagtgttgttttatttttctttcagttcttttaaaatgtcagttcattgtttctgataagtcagtgattatttaaatttttgttcctgtatatgctatgtgtcattattatttttgattggtttcaagattttccaattaattttaaggcctggtgcagtggctcatgcctatagtcccagaagtttgggaggccgaggcgggcagatcacgaggtcaggagttcgaaaccaccctggccaacatggtgaaaccccgtctctactaaaaatacaaaaattagccgggcatggtggtgtgcgcctgtagtctcagctactcaggaggctgagacaggagaaccgcttaaatccaggaggcggaggctgcagtgagctgagatcatgccactgcactccagcctgggtgacagagcgatactctgtctcagggaaaaaaaaaaaattccaattaattttgattttcattacaatcaatatgttgtgcttagacatggtttcctttttaggaaaaaattaaactgttacttcttcaaatacttatgctgccccattttctctccttgtcttctgagcccctacttatatttatattggagcattagatatttccccagaagactcaaagattctgtctacctccttaatatctttttatacatattggatgccacttattcatcttttattt

SEQ ID NO: 52947 - DNA, 2130 bp, Homo sapiens
acaaactttactggaaatcccaatgtccttggacatggtcaaagaagaagatccctttataagacagtgcgattattgcactcatagcttttctatgattttgttttctacttctatctttcacagtcatataaaatagaaacatgacttttacttcataatgtgtgcacttatacaacgtattttcaatatttctggaacattttcaacagttagacacttttatccccttttagaatttggtgttacatgtttattcctatgtttaccttctaggactagacccatatttgtcactctcagagaagcattgtatcatggttttttgtttgttttttttttttttttgtatttctgtacacagtttgtagaaacttgctctaaacgctgctctgagcttgtcctgaaacttgcctgtagatagattgccgtgaggtcaaatatctgcctcagtacctggagttctaaggaagctttctagattgttcaaggctgtgccctgttttcttctatggatatcttcctgacactttttaatgcacgcaccttttctaggtagccctgttggagctggaaattatttttatctgctattctggacttccttccatcatctggaaggattatcactcctggtgcacccctactttgaagagttgcatttattcattactgcaaatcaggtaaaataaaaccccttttaaccgttttctctctttttactctttttcccatgaagcataatgaggcttaattttcatttaatttaaaaaagaaagtcaacaatcacaccccttaaaaattataccagaagttagccgatagtaaccataataactaaaattttttgagggtttatcatatgacaaaccctactcagtgctttgtgactcttatttcctttaatgctcataataataccatgaagtacgtactttttctcattctttttccaattaaacaaacaaacaaacaaaactaccaaaacctgaagtttagtgagatcagatcaactgcttaaatttatattgtgaataagcaacagaactaggattggagtccaaagtccaagtctcttaatattagagcccagatgcctactcaccaaaactctctgcctcttgacccatttcggtggaatgtgtgttcacattgagtcatggaactacaatgttttgtagagcaggagaatgagcagaaagagagagagagagggaaaaagatctcctattgcctgcaacagaaaactaaacaacatcacaactcacaacatgaaatgatgttaattcattaggacattttttcattgctaagagctgtcagatttcagaaagtcatttaaaaaattaacttggaaacttttgtgacattcttcattttgtgcatgtgacttacctaacacatgtgtgcacttggcatctaatattcagtctcacatggccacttggatgtaggaactagcagcagttgtagagagggaaggtcatgaggatacttctgtgcggtaacatgataatttttggaccactctttcctcttctgtttcccctgcttccctcacatcttgtagctttgccagacccttggtttcaggagttccctgactgtacagtttgcaaacttgcaatttcacaccacatttatcaccatagcaacaacaacaaaaaaaaccctacaaagtggaaaatttgttgaatcagctgccagatttatgtcttgctggtgtccagtcaaacacatcactgcctcctgggctgtctgtgcaatggacgggtattattttcctaagagctataagcctgaccttcaattctcaactgtctcaattccttttttgctaatcttgttttcttctgatccacacttaatatgtggccaaaaagagtgtttactctttcacatttcaaatcttattttcagtaggtcttcctccggggtggaagaatacacttcagaatcaactaaagtttaagaagtggtgttgatcatcctctgtgttggtcaagtaattaacatggagaaaattgcatccaaatctgaatactatcatttaagagagacgtgtgtgaattttagtcaggcaggccctgagattgggtattaggaaccaacgagttaagctgtgtttca

SEQ ID NO: 52948 - DNA, 1090 bp, Homo sapiens
ataatctctgaatctctgcctgtttacagttaaaaggagtgtttactccatttacatttagtgtaattattgatattgctcataatatttgtgtttggttttttattctttatctttctttttattttcttccaattactgtgctcctattcttcattatcttttccttctttctttctttttcttttttcatttggattgagtattagctatttttctatgcttgcttgttttttattttcccaaataggtgctttagggattaagatattcaccctttagttttcagttttattttaatcaatatcagaatattttatatataatgtaaggaccatataacggaataattggacctaaattttctctcagcctttgtactgttattgccatatattttacttctacatatacgtcctgctatatgatttttttcttttttctttaaacattcaagtgacctttaaagatttttttaaaatgaaagataaaacattctctatatttacccacatgtttcacatgaccagtgttctcattccttcttgatgattcagattccaagaatgtattatttccttttcagcataagaaatttctttagctttacttgtagtgtggattgcttgatgatacattttctcagattttgtttatctgaaattatattttctttaactcaacatttttactaaagagaaaatatttggttgaaagttgtggggcattttgtttgctggttttgttctgtttttctttgtttcagtaatttaaaacatttttttgactttattatgtctgtctctttcttaatcattgtttctctttatgtaaagtttcttctttttttgcctcttttactatttttaagtttctctagttttaagcagtttcaacatgatgtggttaggtctagttttctcactgtttatcgcttttggaattcactgagattcttagatatgtaaattactgttttttgatgaactctggaaagtatttggctaatatctctgttaatatataatttttattccattttctctctcttctctttatgggtctccaattacaaatatgttatggtttg

SEQ ID NO: 52949 - DNA, 1697 bp, Homo sapiens
gtaatgatgtggccctgttacgtgcctgtctctatggtcctacttacattataaataatcactgccttgtgattctaacatcaagaagctacagtactacatggtggtattatgtttgacatcagacatggcccaacaggggagaagaatatgcttcaacagttagatgattatgttaatacaaactgggattttttattatgtttgtctctttcaagactgaatttgatgtgattgcttctgctgattcagtactaggtaatggaggctgaaatgtattcctcagaagatcctccgggaacagccacctgggactgacagagagagtcactgggtgtcactgttgagtcatacaaatgcactggccgcttgcttatagaagtctggctccttaaagaagctaggagaaggaggtttggggtggctgcctgtctcctcctggtctgtgtctcttcactagggtcaagatagagcatccctctcccagattttccctaagaagtattgagtcagatgtgcccatgtcagtgtgggctttagctgctgtttaatgagttgatccatccttgatctgcctgatggtgctgataggggtctgcttttatgtatgtatgtagtaagtgatcacacccccaccctagtcaaagaggtctcccccgcatacccaggacttgctgaaacttatagctctcttcagagcagataagcccttccattccactgtttgttccagattcagactgtgatttcagtctcagtcaagggtcagtggcacatttcaggttttttttttttttaatgggagtactgattttgatagaaataaagacaggtggaattgtaggcattagcactttgaagggcaaggagaaaaatagatcaaaggagagacgggccaaaggttactagatcaaaggtagatagatcaaaggttactagagacggctgagtgctctagtaaccttctatccaaaaactgaccctgttactaacccagcctgacccacacataggccatgaacttttgttacctcagtgactaaatatccttcatgagatggtcactcaggttcattggcaggtgttctcaatccctttaggtgaacgtcatgaaaatgcaaataccaaaataccacatccctaaaactttttctgatgtctgaggaaagccctaggcatcagtatatttataaaccccacatgtcactaaggaatttctaaagcacattcttccagtcgtgattgactgattctatgctttctgaagattgcacatcacattactttttttaaaatttttgcttcctctggaattcagtactgagttacatcccaagcaatccctccaaaatgcaaatatgattgaccctctgctctctccttttaaactcccgaatgtctaatcaccacacataagtcaagtgtaaagactgtgccctgttactcatgtgcttcctcattggcccctgcttattccaggacagaacagtttccatccacacactggtttaagccaggggctccccacttggctgcacactgaaactacctgtggagcttttgaaagcactgatgtctgagtcccatccccaggacttctgctttactggtagggaaagaagctcaggcatcgtgagctttcaaagctcctcaggtgattctaatggaacacaaagctttagaatcactattctttg

SEQ ID NO: 52950 - DNA, 1314 bp, Homo sapiens
aatggatgggaagtgcatatgggctgctatactctggggtgggggagtaggggtaggagggtaggtagtgggcgggagttttctgtgtcggtcctggattctcctactgcctttgaattcctgcaacaattctgcccatgcggttgagggtggagagacacagtggaatttggaataaaggaaagtgttgagtctaagaaataggtttgcctctctgtagcaccttaatatgcaaaaataagactgagctaggtaacttcagtgacccaagaccagtcaggaagtcgataattttactgaaggtgttcaccatacccagctagtcattagcactttgggtactacaaaataaagtgtaaaacagactttttttttttttctggctgacatctcagtctagttggagagacaaggccaacttggggagagctggattcacagaatgactcatctttagtatgggctgaactcccttgtccaggcatccaccaagaatctcattgataccatccttctcctctgccaagtccagtatcagtgcttccaggaaaacaactctgaaatcagacacccactgctccaaaactgaaaccctgattacagtgtccctattcagcaggaagcagccagataaccaacaacgcccctcttctttttatactaaagtagaaggcaagaatgttagtccaaattgcaccattttgtaagccccctgcaactctgcagaccgtggttcaaagtaaaacattccacggaggttcccgccatcagaaacatcctgcctaaccacctaactgtgaagcggacaaaggtccaactaaagaaacattcttacagcctactgggcaaaggcccaactaaaaaacatctctatcatattctgctgggagaaagtgcaaggaacaccacattccgctggaacaagggccagaaccatttcatcatgggaaaatctgatcaatctaatgggcagcaagccatatggcccagaccccttccatccatacctgtaagtacccaccagcctgtaagaggtggtggtctcttgcattaagctggtcccccacttctgcaggtgtctgcaatatgcctgcctttgctgttgagtcacaaaaacaaaaacagaaacatgcacctctgtgtattcataggccatagtttaagaccctctgaagtaggaccccatgtatacagagacttctcttgcttgtctgatcttattggccaatgcacagttcaggtgtcctgtgtgtagcacccttctggggtcctggctcccaacagtacagcaggtcacagagtgcctccctgtag

SEQ ID NO: 52951 - DNA, 1118 bp, Homo sapiens
acaattaataagcagaggcaggatttgaacccaatcttgactgattttagaactagcatgctttataattatgtcatatcttgcttttcatctaattaagaaaaagcaatgtattatctgatttagatttatactcttctttctcttctcaaaaaatatccatctttgactttgtgtgccccagatattgtcctcatcatactctctgagagctagttaagacttccttgaagttaatttttattttctctcctgtccatcatgggccttctgccaccagtggagttacatctccctcagaatttccaattgcaactagcacaggctagcacgcagggctctgggctctgcaggcccacaaactaaccttggcataatgaatgacctgcagctttggaatgcctctggaatgccaagtgaccacagctccctgcttgtggaatgtagagtggccccagcattagccaggtgaccaacagctgcatggcattggcatgaaaaatagattccagctcctagaatactaagtgcctgctcaagaacaagaaaacgaaacattaatggataagccttcctgctgaggaagaagaaatggtggtgattgacattgttactatgagataactctgttaatgctaataacacctgagtctgagccagggaaacttctttgaactgcccactgaaaaatatccaaccctcccccaaatcacagaatcagatctcttcccataggtagaaatgcactcccctcttttcgtgctttctatgctttacagaaagaagaaacagaaaatttgttcccaaaatccattctcccaatgcattagtctggacttacaaagctgtgtaatctctttagacagtgtcggcagctaccaagtcctgttctgagaacccaattccccagtgaggtagcctgaacccatcgtggaatttgactgtaaaggaaaaaaggtgtgaggatatttgcaacaatcatactcagtaactgggattttaatgattctcattcccccttttttcttcatctttttttttttttttacagtctccgtcccctgtgaattatttctttcttcctccctgtttttcattgcaattcaatgcattggttt

SEQ ID NO: 52952 - DNA, 3260 bp, Homo sapiens
aatagcgagcttcaacagcagccttgatcaaatgaaagaatctgaaaatgtgaatacaagtcttttagaattattcagtcagaggaggataaaaagaacaaaaagagtgaagaaaggctgtgggacttacgggacacaagcaaaccaatagataaattatgaaaatatatggaaattaaacacactcttgacagccaatgggtcaaagatgaaatcaaaagggaattaaaaatagtttgaggcaaacaataatggaaacacaatgtacaaaaacttataagatgcaacaaaagcaagggaagcttatagtgataaacatccatattaagataaataaaatattgcaaataaataacctaactttatagttcaagaaactagataaaggaaaactatggctaaagttagcagaatgaagggaataccaacaatcagagcataaatgaaacagatgaaggaacaccacagagcaaaagagccaaatagaatcctccagtgattgcaccctctgctggaacaccaaattgaacaactattcatacaagaaagcacctctgtaagaactaaaaatctagtgagtgatcacagtacctgattttagcatcctatcaagaaaagaggcattaaggtggttagaaaagacagtcttgaattgccaacatcaacactccctcatcctctggcaacagccacatggcatggagagagaatctatgttcttgagagagggacagcacagtgattgtggggctttgcgttggaactagatgttacccgtcacagtggaaagctgtactgggcagaattcaacctgtgcccactaaggtagcattaagccagccctagccagaggggaaatgtccctcccagcggtcagaacctgagttctggctagctgcactaccatgggctaaacaatctggggtccgaaatacacttggaaggcaatctaggccacaaagactgaaattcctgggcaaatcctagtactttgctgggctcagagccagtaggcttggcgtgtatgagacctagtgagatattttctgctggaggagagggaagaataaaaaagaatttttcttgcaatgtggataccagctcagccacgtagaataggacattagtcagagtcctaagtcccacattcaaggatctagctcctagatgacatttctagacacatcctaagccagaagtgaacccactttcttgaaaggaaggacctagttctggcaggatttatcaccactgactaaaaagcactttggccttgaataaacaccagcagtagccagacaatttttgccatggactttgggtgagactatgccgtgctggcttcagcatgacccagcacattcccagctgtagtggccatagtgagagactccttatccttgaggaaagcaaaggaaagattgggaagaactttgttttacagcttgggtgccaggtcagctgcagtaaaatagagcaccaagtagattcctgaggctcctcactccaggccctgcctcccagaccaggagaagagctcaccatcctaaagggaaggacacaagtctgtctggatttaccacctgttgagcaaagagcccttaggccttggatgaacatcagcagtagccaggcagtggtcacaacagaccttgggtgggacccagtactatactggcttcatgtctgacgcggcccagtctcagtggttgtgaccacaagggtgcttgtgttacccgtgctccagctccaaacagctcagcatggagatagagcctttgtttgtttgagaaaaagtaatagaagagaataagagtctctgcctggtaatccagggaaccctcccagatgttatctaagaccaccaagggagtacctttacaagttggcagaagttacagtgttactgggcttggggtgccttgtaatgcagatatggctgcagtgaccaaagttttagatcacaatactcagttccctttgaatatttggaaaaccttcttaaggatgagtagcaacaagcacagattgtgaatgctacaataaatacctaattcttcagtgctcagacactgatgaacatccatcagcatcaagaccattcaggaaaacatgacctcaccaaacaaactaaataagtcaccagtgaccaatgctggaatgatagagatatgagaccttccagaccaagaatttaaaataaccattttgagaaagctcaacaaaattcatgacaacacaaataaggaatttcggatcctatcagacaaatttaacaaagaaattggaatgatttcaaaaaatcaagcagaaattctgaagctgaaaaattaacttgacatactgaagaatgcatcagagtctctcaaaagcagacttgattaagaagaaagaattagtgagcttgaaaacaagctatttgaaaatacagtcagaagagataaaaggaaaatcataaatatgccatgaaaaaattgttagaactagtaaacaaatccagtaaagttgtaagatacaaaatcaacataaaaatcagttgtgcttctatatgctaggaatgatgtatctgaaaaataaattaagaaaattacctttacagtagcattaaaaacacttagaaatagatttaatttaggaggtgagagatctatagactgaaacttataaaatattgatgaaacaacttgaagaagacacaaataaatggaaagatttatgaactgtgtttatggattgaaagaattaatattgttaaaaagtccacactaaccaaaagatctgcagattcaatgcaatttctatcaaaatttcaatgctttttatgtaaatagaaaaaaaattcctaaatttatatgttgccacaaaaaaatcccaatagctaaagcaatctttagaaagataaacaaagctgggggcatcacatttcctaatttcaaagtatattaaggtatagtaatcaaaacagtgtagtgctagcataaaagcagacacatggtacaatggaacagaacagagagtccagaaataaacttaaacttataaagtcaactaattctttgaagagatgctaagaatacacaatggggaaaccatagtctcttcaataagtgatgttgggaaaactggatatccacatgcaaaagaataaaattggacctttctcttataccatacacaaaaaataaactcaaaaataattaaatatttaaatataagacctaaaatcataaaactactagaagaaaacatagggatctcag

SEQ ID NO: 52953 - DNA, 537 bp, Homo sapiens
ctcttcaaaaagagaaccaggagctctgggaggaaaccagtttagacacgtgttggttattgcttaataattagtcagactctgaggtccttaaaacaaaaacacgatgatgttgagatgattctggatgcttttacattttagttcctggcaaggccccttcctcgtatgcataggcaaaactgcttctttaaccaaggtcaggttaaatggactggacgtggacagctctgcatttggctgcaagccactcagagctcaataactattgcatttcgtcctgtgaactttgtgactgaggtcggtttcacatttctttatgagcgctctttctgcaaatgcctttcctcacaaagagcatttctaaaggttgaatatggtgattagtgacacatacacacttaatcttctccagtctttccctgtctgtggctcccctccgtgcttttagtccttcgagttttatgcctgtatcaaggaaatgttttcatctgtctcactgctattttcttttctgtcttataaatccttaaagaa

SEQ ID NO: 52954 - DNA, 1927 bp, Homo sapiens
ctaggcactgtggtaaaatgtttttgttccttacctcttaatacatacaccaactctgggaggaaggtgtttttattcccactctaccataaagaaactgaggcaagcagggttaagaaacatacccgaaatcacagcactaaccaaatctatggaattacaatttgaaaccagatttccctgacttcaaagcctataatctaaagttttgtctttttatgaaacatgatatgtgtgtgtgtatgtgtatagtactattaatataaaatatatgaaatatgtaagaggtgagaacatcagctttttgggaatatattggtgtagggattcattgaagtctgagctcatagactctcggaattacaagggacatcagatgaccttaaattaccctgcacacaaatatctgcactggacagtaatcagaaagggtgattccaagagcctatttcaactgtgggatgttattatcttaattattacatgatatcagttgctccttttcagattacagcatctatacctccaggggtgtgccaagaatcaatgttacaggataataagtattccaaaagctgtgttaaaacaaaaagagacatattgctcaatttaatgcaaagtttgcatgggatgttaacataaaacaggactttaaatccattttgtacctttagaattcatttcgagctacacttccttagattcctatgcatacatacttagggccttgtgtcataaaattttgtgggagaggagaagtgatgagcaagctctcaaatatcatctgactaaaattatttcactatcatttctaattcacagaatgtgtttccatattttgagttgagatctgcctttccttccatctctaaatattgaaagtccctctgttgtaaatgcccaatccttttactaaacataattttcagaataggatataattctctctttgtccagccaaagtcttgaagcagattttatctgggcagtcaagtggttcctcagtcatattcagatcatttgaccagtgcaactcgctactctgaaccatgtagaatccaaattacacaaccttcctggcacaaagccagcattccaccagttctgtgacccagggaaggccattccttttatggtgccccagtctccttttctggacagcatgaaaaatgcaaactggtcatatctaatgttgactgttctagttggtgaacagaagcccagagctatgacattttagagcacttgaccttgccctggaagtcagtgtcctacagcattcctgcgcctcttttaaaataatatagcatctgcaatctctgaaatgagccaggcctccaattccattatatctcctgcaggctaatattttttctgtttaattgttgtgagtaaatttcagaattgagcaactatgtacgagcagcatcctgagtaggatgaggcactgttctctccaataaaggataaagatctaaacaataagctagggatggttatgccgtaaagagtcacctttgacctcctagagagtgtcataatgcaacaaaaaaagtttcataagtgggagaaatccatgtcccagggctttaatactctccaccatcactaagtagcttatcgacaccagccagtcctggctaaagaaactgcaaggacaaactctctcctggcattccagcctctccattacccagtccattgcccttcctagtctagtctcctcctgcattccaatgctccttcctgtttcttgaacatgcattcatgcctcagcacatttgcaggggctgttttctctgcctcagatgctctccctcagcttggcaaattccctattcatccttcctgatccaaattaattaagcttgagctttggagacacattgagctgggtttgaattcttacattctaattggtgtgtga

SEQ ID NO: 52955 - DNA, 642 bp, Homo sapiens
ccaccacacccagctcacacaggctaattattgaataacccctgcttttccagcagacacaatgagggcatttttgtatctgtttattcaaggagggagacattggggctgttaggtgtgcctggactggtaataaggtcttttatcataaccctcccaaagtctcagggcggctgtggccaacacgcgtctccaggcccacaggctctgaggcggaaaccacagttccaggtccccaggctccagccgccaatgcggctaccgaccagcagagggcagctgcgggaagccgtccaaaggcggcctccacccccattagtgccaattaagccgcgagatgcaagaggcgagcgcgtggtgaaagaaaacacatctacttctgggttgagctaggctgggtgatctgctgggagggacgttgacctgcttccaaaaagccggctggatggtgccgtggtggctgcctgcaaaggaacaccggcctatgggaaccagaccctggggcttcccgcgagcttctcttcctccagccagcaaaacaggaaaagcctggcccagggacggagggagatgttgtggagcagacggactggctggagccaaagggcagcctctttggagcagaaaaacaaacccagacat

SEQ ID NO: 52956 - DNA, 708 bp, Homo sapiens
actccacctcaaaaaaaaaaaaaaagagagaaaattttaaacgcttctggagagcaaaaacactgcctaccaaagttatccaccctaccgaatgctgtaggaaatagcaaggcctctatcttaaatgcctagcgctgctgtaatcaatgaccacagacttaatggcttaaaacaacacagatttactctcttacagttctggaggtgagaagcctgaaatgagtttcattagacagaaaccaagctgtccgactgcacaccgtccagaggctccaaaggacactccgcttggtttcctggccttttccagcttctagagctgcattccttacattccttggctcccggcctcttcctgcttcaaagccagcaggagcacagaacattgcttcagtagtcacatcatcttcttcctctctagatgaatctccctctacctccctctaggaaggactcttgggattacatttagggccctcctgaatagtccaggataatctctccctctcaagttccataatcacatctacaaagtcccctttgccatataatgttcacagattccaggaattaggacctggatattttaggggaaccattgagcctcccacagcttctaaattccaaagaaaagcagttttacccagggttctatagttccacagtttggaaaacagttcggtggttcatcaacaaattaagcataga

SEQ ID NO: 52957 - DNA, 1930 bp, Homo sapiens
acccgaggacaccttccctgctcacctccaaggccgagtaggagctcattttctgggtgcccacggccccttgtgaccatttatcacgaccacggatcacctgtgtgctggcctgtctcccatgcttgactgggagtgcctcgggggcccgcggggctctgggagctctgggcttgggtaggtgccagcagatgttgagtgtgtaactgtgactgtctccaaatactttcctatgttgagtgtccacacctcgcccacctgtctctccctcccacacccactccacactctccaggtgggctcccagccactggcttccaccacaaaggagccctgggcctggtcactctctgtctgtggcccccgaccccaccattgttttggctaaagaagagggcgaggccagggcgaccttgttctcttatttccctgtgtctgcccacaccgtcggccagtgtcacacacgagctgggaccacatgctgttctgtttggaacgagaaagtggcattaatacaaacagagggtcgttttagacctgaaaccatgtaattaagctctcccgtgaatgcctgttaacaaggaggtgctttcgcatttgagagaagcacgtgtgggagggcgcttggtagccaccatgcacttagtcccattgtgatccagctggaggggtgagccctgcccagtgctgccctctcgggtcaggcaaggccggcggcttcccagggaatggggtcaatgggaaaagaggggacttgggcaaccctgaggacaaagaggtctaaaaggttgagtcagaagcaactccaactgcctgcctcccagcgaggatgaggcccctctgggcctcaccaggagcagggctggactttggaccactggcaggaactgcctgagtgggccgcaagtggaagcagacgctgccagtgtgggctgcactccagcctgaccagctgcctgggcactcgccaaactaaactgcactcacacgcagcggcagggagctgggctctgtagcctacgggcctccatctgaagctgtgtgatcttgggcgggtcactctgtgccccagtccttcatatgaaaaaagcagtccctcccacccagggctgtcacaatgactgcctatgatgatgttccaaagacagccaggctcccaggaccccaggtctaagcaaatgttccctattcactatattacttgtctgttctcccgaccaacctgagttcctccagaaggaggctggcgaagctttggcaatgtttgctgagtgaatatatttgctggccctgtcccaggcagcggggctggtgtgagcaaatcacatgaggtctgtgttctcacggagcttcaggtcaatgacagggagaggaagaacccaaagtcacacagcggccaagtgccagtgaggggggatcatcacgctctgatcatgcagaataggggctcctgatcgggaagccatctctgactagcaggagaagccacggtgagagcatgctaggcaggctgcagcatgtgcaaaggtcctgtggacagagacaaaagccctaagagactagagcacagggagccaagaaggcagacaggggggctcagggaactgagggcttgctgaccacactaggtgtggtgagaggcatcccatattttaaacaagggggatagtatgatttgctttcccttttaaagaatcactctagctgtggtctggcagacatttggaggggtgggtggatgtgggaggccaactggacagtaagctgtccaggtgagagttaatggtcacttggactgaggtggcactggagatgaatgaagcgatggccttgggagatacaagtggagagagtggccctgatcatggatgggatatggagggtgagggaggaggtgcaaggatgtctctagcatgtgctgctggccaaa

SEQ ID NO: 52958 - DNA, 1368 bp, Homo sapiens
aacagggaaatgctgcagtttctcgaagagatggcattttgggggaatactgataatccaagggacatcaggttttaacagactcaggttcaaattctggctacatccctcagtcttctcatttgtaaaatgggtgaggtggtgcagattactgagatgcacagtgtggctactgccatcccaggtgagcgccggcctgaggcgcgaggattttactctccaggaccccgatagggacgttgggatgtgggcctcggaagtgagataaaagcaccatttccaaggtagggcaagcagggggccctgggcctgtctcccaatcctctcactatatatttagtccctgcagctgtttctctcaggtgcagctcctccagcacacgtggtgattaatttcactgaagggaaattgacgcattttctgattactgcttcaaagcctcccgaattcagctgctggtaaaattaactcaccagggacaatggagctttttccaaggtccaaattgtcttatttgcagtttgttcttggcattaatccagcccaaacaaaccaggctgctcctccacctcccagaagagggagggccttcactagcccaaggttgaaagtattttacgtgactctaaactggcggataaaaatgcacttcgttttagattattgtgttcctgaaaagctgtgggtgacctgaagcaaatggccagctgggctcctggagcccctcctctgcagctcctgctccaggcgtgcctgggttcaccaaccagacgggcctgggatgtaccagaatccaatgtggatctctcctccaatccctgcacctcaagcccttgccaatgaccaagttcagctcccatgggctgtgcactgaccatgtgccaggcaaggtaggactcttcccctgtggggacatctgagcccaggtctgacttccaggccttgcctgagctgcatctactacactgtacaacctcctcccctcctccccactgcccccgcaaccacacatgcttacatttgcgcacacctgcctggagggtaaacaccctgacagcaatagcttaagcacaaccttagaacgaccctgtatggcagacgcgtcttaatgttgttctgagctagagaatctaggagtggccaacccggagatttgttccttgtttgtgaggagtatctgagcccccaagcccgtctcatgggacatgggctgtacagggaactgaggccctgagttttgggttaaaaaaaggttcccaggtagaggtccttgggggaaggttaagtgaaaatgctatataaactgcatgctgtttataagtggtgatggttttcctgccccacctgggccgtgggctgtgttgttc

SEQ ID NO: 52959 - DNA, 610 bp, Homo sapiens
ttgctggctctgtgggtctcttctcaggccccttgaacctggtgcctcccctactgaggttaataggggtttggcacaacacagccatagaacttaaaacagtactttaaaacttgcttaagaccagccactgagacagtgaagaagagtcaccgatttgtggaaagggccttgttgttcagctgctttcaaaatctgaggctccgaactctgtaacagtactggacaagagtaactctcatttacagaagcacaagactcgggacgggaaccaggcctcctgctccacagcgccacaccgacccagcttccatttaggaagtcaactgttgtgactgcttgcgaaaggcactccagtgacattatggctcaatctgagttttcacacactggtacgtattctaccgaggtacacctgtgcaaatatttctcaggaagagcacagatggcaggaaccgaagcagaaagggtctgtactgcccacttcctccgcccctctcttaatggatggggagacaggcaaagtggcatgaggccactccccggactcccagccggggctgctgcaccctacgcttccagcaagtgcaatcccgtctcctcccctcac

SEQ ID NO: 52960 - DNA, 849 bp, Homo sapiens
acaaactccagcagtggcaagaatgcccctcttgatcagagttctgagcctgatagggaatctgttctcaacagggcttggtgagagtaagatcagcttactccccacgttggaaataccaaaggcttctggagccgcgcctttagccaacagtgccagaggctgtaacagactcaacgcccaacacacatagcctgactccccagtggcttcttcagaataggtgtctgtcgtgtggtggccttgagaaaatattgatttcttgcctcacgaaaatttccatctggaggtaatggagtttatttgcaatctgtgacactggggacgggacagacggtgtggactttgtttttagccaagcaaaacgactttcagaggtggccactgcccctctaccccaacctgacctcctgctgcagggcaaagttcctgacatggggccctggatatgtttggggggtcagtcctaaaccctccgacactgtgtgcaaatgggggtatgtatctggacgtccgcatttttccacagagagaccacagctttctccagattcaccaaggggcctgagacccagaaaagattaagtatcacagctgtggaggttgaagatgattgtgaaagagcactccatgtccctagagaacaaagctcatggcagaagaactaaggatcacttggctcaagctttgaggggacccctacacctcaacagcactgccacgttccaaagcacagaaatccccactgcaaggagaagaccgaggaacacagcgacaaaggactcgtcccaaatctagactggccccagcacagagctgggactcacatgtgggcctgcccaactcagt

SEQ ID NO: 52961 - DNA, 1633 bp, Homo sapiens
tctcccctattaagcccacgaccctcactggcaaagactgtctcgttcatctctgtccccaggacctggcgtaaggggcaaagaacaggaactcagtgcctgctcagtggctgcgctcctctcttttgcagtccaaacactggcagtctcacagagtctattttcagaaggttcccaggggtggctaaggagaactcctacttggcaataatctctgtcctgtgcttctcagaaatgccccagaaatgttggactttgacaggagagccgcacaaggcaggctggcacctccagagaaaaagtgctgcagtcagcagttctcttaagacagggaaactgacacacagacagcgcaggcttggccagggccatgttgccaacaggcactaatggaaactcagctaccgcctgctcctctaaatgcagcgggagggagtgctgagggtttaaaccaggagacagagctgctcccaaacaatctccaaagtggctagatcagaactgggactgaccttacaaaagttacttaacctcaccaaccctgagtctcggcatctgccttgagaagtatttctcaaatccatgccctcctctggatccccagcgtcctagccacctttcctgtctgactagtgagtcagcctccccctcactggtggagcagccaccagcgagccattcttgcacacagatgtgacaggccaatcctctgccctgagcctgccacctacagtctttcatgaagtactccctgacccccaatccctcccaccttaattcactgtttgcagcctttaccccacagggactggttttggtttctcacatacaaaaacttatttcctgcctttgtgcctctgtccatgctcttccctgagggactgccactccccgctccatgtgacgacgtctgctttcatttcacactcagcgaggtggtcactttgtctaagacgcccaccttgccgggacagagtgacggccacccaactcccaccccagtgctctgcatgttcccatcactgcacatgccacacgactgtctcccagtgagacgacagtccctgacaccaaaaggccgctctacaaaggtgtgttaagtgaatacatttgtctatgtgagtcagaaaggatggagtatgaaaagaagcccacagataggaggcatgattacaaaccatctgggctccaaagtgggtaatccagggcagaactgggagccctcggaggcaggaagtggtcaggcatagcggccacccccacactcactcacattgatcaaagatgactttttcctggcgcttgctcagctgcaaaagcttcatggtgttttgcaacttcttttcttgttcaaacaattttttatgtagtttggtgacctctgccttcatttctccaatctaaagagaagagaaattagaaaaatgaacaaagaacataaacatcatgttacacaggaagaattacaaagccatataaaaagatgatgctcaacctcactagcaaaaatatttgaatggaaactagaagccttttcctgacaaccaggaaaaggcaaaattggacaaaactcattgagggtaaggggaaagcacctcgtgacctctggtggaagtgcgggatggcatggccc

SEQ ID NO: 52962 - DNA, 1118 bp, Homo sapiens
taacactctgcgttcaagacgcttatgatgttgaagctagctaggagggctagaagaggccctcgtgcccaaatgccacccaacacaagcccagaggggaaaagaggcacgctcctggacctctgtatattaccccacactgggcttatgagtcatcttgtaggagaggctcaagtcaactcaaccaacacttatcaaccacccactcggcagaagaccccagattcacaaggatgactcaagctggtgcctgcattccagtagcccacagtctgatcagaacacagacactgcagaaggtgcaacagcagagtgatgaagggccagagccagaaaaaacaattatctgtgcagggagggagagaacagggaaggcttctgagaaggagcagcatttgaactggattgagcaagtagcaagaattacacgaatgatgagtcattctgaccaaggacagcagcaaaggcatgtcacagagaaatgtgtattcatgatgagtcttgaggaaacgggacttctaccggcaaagagtgggacaaagggggtctaaaagtcacagtgagaggaaagtgtgggcctgtctgcaggatggtgacccctgtgtggctacaccaggttaagggataaggctggacggacccactggagctggatcctggagggccttgaaagcctcacaaaggtggtcacaattttaatctaaggcaagagggacccaatgatgttctaaccttggtaacacctaggagtggattaactggcttgaaggagaagatcaccagctggggatgctgagaacttgaaatcccaaatccttaccaaataccctcctgagttgggaccagggaccccccttttctgcaagttaaaaagtcttactgtcacatccaatgctcccacagttacctggacttcagctttgtacctgattttggtgtcactgcctgggaggaatcaaacagatcaaatgaattatcactttccatgggatatttgtcaccatctacaaaatgcaaaacacgagaactgttagtttcactgttgtcagcattcaagagagaactgaaagagaatacagtcaagcccctcacattcacttatccatacacacacagca

SEQ ID NO: 52963 - DNA, 958 bp, Homo sapiens
tctggcttcagtagattgccaaaaggatgcagagggcaagaaaggtgaagaagccctgatccaggagaatactgttgtgcttccaatcctgacaaaacaaggccaaggcaccacctgccaattaaagcttttaaatgctaaaccaccagtctggtcatgataagttagtcatccagactgctggaaatgtcaggcccttttgtaaatcatgccacatgtcactggcacaaggagttcccaaatgccttttgtacacaacaacagtatcatgtgggattctctcagctcccacctgcacacaaccacgtgtgcagccagaggacctcagagaagagtggggaggatttaaagaggacatgaaaaccaaggaggctctccagggccagtgtgtcagccaccatgctaagtgctttccaggcattttctcatttaatcttcacaatgacccaatgtgcttacgtgttactacactccccattttagagatgaggaaactgtgacacacaaggctgttcatggtcaaggtcaggatggtgaggccaggtgtgggcttcaaggcccatgctcttcagcccacccatcactgccccataatagatgccttaaatataatgcatctgggtgcttggcaagggtaacatcatcactgtcagccacataaaggtcagccaaataaaataagaaaagccagtgacaaaataagaaaatctattgtttcttgagcacctaacatgagaggcagtgatgattaagagtgtgtgactttatgaaccatgtgaccttgaacaagttactcaacttctctgtatgtcaatattgttttcttttttttttttttctttttttttttttgagatggagtctctctctgtctcccaggctagagtgcagtgacgcactctctgctcaatgcaacctccacctcccaggttcaagcaattctcctgccttagcctcc

SEQ ID NO: 52964 - DNA, 772 bp, Homo sapiens
cccactccatgttcttcccagtaaaaataatatgttacctccatataatggactatactcagttgtttaaaaagattgagcagcacagagctaaatatgcacacacccccatacataaacaaataaatgcatgtcaactgctaaaaatctgaataaggtcaaaggactgcactgatgtcaatgacctggcagtgatattacatcacaattatgcaagatgttacctttgggacaactgggtaaagaatataaaggatgtatatgtaaatccacaattatctcaaaataaaaattaaaatataaaagacttggtaggtctacatatactgccatggcaagaatgttaaatcttaaaaaatggtcatggaacaaaatacatattatgatcctatttaattttttaaagtatatatgtatatatgcataaatatgcattacagtcaaggtacagagtcaaggcaagaggtgagtttactgatgatttctatcaacctctcactactactttaagtactttataaatttcctacaatgtgcatttttactttaatagctgggaggatgccatttccaatttgaaagttttttttaaaatgagtatggaggtagcagcagccagcccacactatcaccttcacagtgaaaccagtgattagaattcacacctctgtgcttctgaactttggcaatcacttcaagagtttaaatatcacctgctgttgcttcagtgtcaggcttgatgccaaccctgtgaacactggctatttaactc

SEQ ID NO: 52965 - DNA, 881 bp, Homo sapiens
aattacattttcgctaaaattcagaatttgtgatcaggagaaccttcatgtggttctagttctaccacttctgacctatactatgtttctaacccctccaagcctgtttaaaacacaggtattttgggcctaatagctacataaccccaagacgacaatttaagggctgatatgaacatcataaatggaaaattgtaaactgcaaaatacagtgcctgctctttgtatccagaagtgcttttggtgccatttctctccatatctaaaaagaaccagagtttcaggtagagaaactgtgataaaacaaaagatttcaaagaccaagaattaaatagtattacttaatactagcttaaaatagataaggagacaggattttttagccaggaaacatcctgactcccatcacagtgacaggaaatacctaactgagagtaaatagaagaagtgacatgcagtgcctaatagagaaaagacattccatgagcaccagcaggatggttggagggaagccagataccagggaccagagctggaaggacacgtggtagcctaaaggtcagagtctggttccaggcttgactaatgttaggtaagtcatttcccttctctggccgtcagcttccacatctttaaaataatggggctaaactagacaagcagagtggtgctgtaggaagagcatgggctttaaaatccgcatagttaaacccaggattaaacctactagtattaggttaagcctattaaacgagttagtacttctctctgtatctcagggatcttacacagaaatgaggaccacaatggccagtttgtgggtaaaggggttataaattatacatataaaatgcctgaaatggggctacaatccaggagat

SEQ ID NO: 52966 - DNA, 1688 bp, Homo sapiens
cctgggcaacagagcgagactccatctcaaatcagacttgttggattttgcatttaaagtaaaagttgccaatgagtgcagtggctcatgcctgtaatcccagcacttcgggaagctgaggcaggtggatcacttgagtccaggaattcgagaccagactgggcaacatggcaaaaccgtcctgcaaaaaatacaaaaattagccaggtgtcgtggcacacgcctgtagtcccagatactagggagactgagatggagaattgcttgagtccaagaggtcaaggctgcagtgtgcgtgatcgcacctctgcactcccagcctgggtgacaggacaagaccatgtctcaaaaaaataaaaagtaaaaataaagtaaaagttaataggttcctcaggaaaacatgaaggtgccctgtaagttaagggattttccagaaataaaccgtgggactcttttcctgtctgctccaaaatctccctcctcttgcacatatctcagcactgtggagaagagaaaaaaaagaacaagtcaaaatatcttagagatattttgcaaaaactagcactacccacagagacgcttaagcattcacttttttcagaaataaaaattatgaagaatgcttagctagacccaaactgcaaagtctcctcataatccagcttaaacacagtacgctacttatttactcagagccgtctcctgtggtctaaccagctatttgtctccaaagggcaggcccgtgtaggaatgcggggcctcagccggcaaacaggatccagcagcctgccaggaaggccttggcacgctacagtccagatggcagctctcctgggcctccagccactggcctagctgccaattcaatgtccagcctccgtgcagttgttcagttcagcaaacgctcactgaatccctatagctttagtagcaacaaatgaaactcatgaagtatggccaaaaggacaacaattcctctagtccagtgtttatgaaaggaggtggaaagcaaatcaatacatacaaaaaatactgagcacctacggtgtgccagttcagggaagcctctgggccccagagatatgaaagctcaagatgctcacagtccaatgtctactttccttgttctttactcaagagaatgcctggttttgtgtacttacgaccatttcccaacccagcattggggttgatgccatccaggtcatctggtacactgggaacaaggccactaggagagaacacatgagataagagatgagctaatgtttgaacaacagagactgttaagacggtctggactgcacatgacaatcatcccatggccaggagggatgcacacagctgggctacctatgtggcatgaagcacagaggttaagaactcaggctttggggctgagttccagctccaacacttgatagctgagtgaccttcagtaacatcattcattcagtcatacatcaaatgttctgtgtgccaaatatgtgctagtggcagaggcactgtgacaagtacaagatacttatgtttctgagtctcaccctcttaatctggtacatgaggataccatgccctccctgtaaaaattaaattcgttcatgtatataaacacaaagcacatagtaagtattcagtaaacggcaactattgttgttgttactattatcattatgactactaatatg

SEQ ID NO: 52967 - DNA, 1698 bp, Homo sapiens
tggcaggcactacacctgccaagcaaatggctcgacaggcatcacctcttttaatcctcaccccaactctgttgggtggatattactagcccattttacagatgggaaagccggtgaaatcactttaccaaggtcacacagctagtcagtttacagggctggatttgaatccagttttgtccaactctagccaaggttcttaatcattgcactccattgcctcctgggtggccactatgtgacccaaaaagcaaagtctgggcataccggctacactctctccataatgaaaacaaactctcaaaccagaaggaaccatcaggtgccctcaaggtccctgttctccaccaatccccactaacgggatactccaagtggccccaccctcgtcctactctttcagaaaactccttacctgttcttcacacgctctacaaagtacatggcgcaatgctactggcaattgtggtgcaggtcgcggctcccagccctccagagtgtcaggtggtgggccccccagagaccctctccgaaggaacccaccccacacactgcccctggccagacaccctcaagagcaaaccccaaggccgcgttagaacgaaatcccaccagctggaaccccggcccggttaccacgaccaccaatgccccggccgcacctgcagccgctgagcgtcccagggacggtgacgtcctcttccaacaccaagtccatcatggctacagaggtggcgacagcgttggtgtctgtggcggcggcgccactagtaccccccgcgatagcgacccgccgggctccccaggtccccgccccctccaccccagctcttgttcagactctggcggcgccgctggaattcaaaccacagacgccgccatctttcccggcgcttcttcctacggaaacgaggcggggtcacggaggcgcacgcagtgaagccgaccggctggcgccagaggacgggcagggaagcggggataggtgccatcttaactaagggcaaagcatccgtgcttaagccaagcaaaaataagagacaaaaaaaggccggctgccattttttgtgagggcacttagggagaggcgagggcgggtgccatctttgttgagggccaaagcgggccctagtccgttaatttacgcgggagatggaaatgaatacagccactcaggaatcctcaaagttcctaacctcgtgtttgcttttctagaataatgaccccaaaactttgggatttgaccttaagttgaaactcagataactgagtgctgccttgctttggaaaaatactacgtgcggaatctcaaggcaaacagtaatttgcagacttagtttgaagcaaataactcattcccatgagccagtggtcaacagcactcccactccagtctctcacctattggtcttttattaccattaggactcaaaggcacctgtggtcagaaaactgagggccagcaagaggaaaggactctcccaaagtaattaagtattgacaatgtctttcaactggagtgggggtctgcagctcctgccaactagatgagggctctctgcataaccctggctgcctttctttttttttttttttgaaatggtgcctctgtcgccaggctggagtgcagtggcccgatctcagctcactgcaaccttcaccttctgggtttaagcgattcttctgcctcggccttgc

SEQ ID NO: 52968 - DNA, 696 bp, Homo sapiens
cagcctccaccttccaggctcaggtgatcctcccacctcagcctcccgagtagctgggaccacaagcaggtgccaccatgccggactaatttgtttatttttagtagagatggggtcttggtatgttgcccaggctggtctcgaactcttgggctcaaatgatcctcccacctcagcgtcagaaagtactggggttatagacatgagccatcacgcccagcctaggatctctcattatgattagtccattgccttgttcagcatgaccatgtccctgggttgcgtgctaaaccctttagtgaacctagaaactgaaaatagaatcaattgcacaaaggaaaggctatttggaagttggttttcctgctactgtagtggtttcatgttcagagacagaggcctttgtcctgtctctgtctcaccatgatctttctgccaaacctagaggtgacgtcactaccaccagctgtttgggctatctggggctatctccttgacaacagccacccaaccacaaagctggcattattatttcctcagacaaggtcatatcaaatggctgggaggaagtagcttgcagtcagatgtttttcatttgggtagaaccctcctgaagctttaacagatcaagacatttgcactgccattactaacagcaaaaataactttttataggatcaatatatacgcaatgct

SEQ ID NO: 52969 - DNA, 1342 bp, Homo sapiens
tagggctcctttccagccaaattcagggacaaaacattgaaaacatacattgttacctgcaaaaagacctttccttattcctttatttattttaccatttcatcatttatatataaacctatctgaaatacagtaatgtgctttgttgtaggaagaaatgccttaccctctttatagaacaaaaggcaagctttaacctgtcaaactgaaagaaggccagtatggagcccaggttaacaagggagagagtaacagggcataaggtcagagagaaaggcagggcccagaaaatgtaaaaccagataggccatagagagatgtttgaattttatttattccaaaagggatgagaagccattggagggcttaagcatgaaaatgacatgatctggttttacattttaaaaagattgctctggttgttatgtggagactaactgtggtggggtggggatcagagaatagggagagaagagaggaggctgaaaggccagatgagactgtgccaaagtagttcaaagagatgacagtggcttgggcaaggatgatgcaataaaagtcatgaacagtggtcagattcagggtatgttttgaagatagggctgatggaatatactgatgagctggatatttgcagtaataaaaaggagcaaaatcaaaaatgactactaggctttgggactgagtaacttggtgaaatgaatagagcaggcttaacttataagttgaaaaaaaagttgttttggatgtgttaggtatataatgccaattaaaacaagtggatatttgacagttggatatttgagtgtggagatcaacggagaaatgcaaatctgataataagcacatatatagatggcatttaaattaaatccagggttaagggggaaaatgagctaaaacaaacaaacaaatacaaattaaatccaggggactgaatgagaccacttagggagaaagtttaaatggcaaagacaaacttgacaagctctgagccctgaggcactccagtgcttggagctgaactgaggaagatgtagtagaacaaataagaaggaaaagctggttaggtagcacaaaaactaggaaagcatgatactctgaagtaagtatcattggggagtagaggattggtcaactcagtcaagctgctcaggtcaagttactcatcatgggacactatgaatacataaaggtacactggattttcaaaggaagtatattatatgaacatgaagttccagttttaaaaataatatccccccacttccattttaagggaaacgtgcttaataaagaaaatctagaaaaatacaggagtagaaaggggtaaaaaatcatc

SEQ ID NO: 52970 - DNA, 583 bp, Homo sapiens
tgttctctctattggcaatacttttccacaggggatccgcatggcatgctctattacttctttttgttccttattctaatgtcatattctcaacatatcttgcctagccacactatctgaaattgtaatatttcttactatttaatataccataaattttattttcttgtttattatctctcttcccatctagaatgtcagttctgtggaatcaggggggttttatgtgttttttcctctgctatattcccagtgcctagcacagtgcctggcatgtgataggcatgcaaactttgtttaatgattgcataatctggctccaaagtctatgtgtgctttcttcattaactcttgatgacttctaagcgcaatatttattttcatttcagtccatttaatattttccatgtacttaatcttttttaaaattttattattcttctttagacttttatcgacttttttcaggggctacatatgcaggttggttacatgagtaaactgtgttgctgaggtctggtgtatgaatgatcccatcacccaggtagtacccaataggtagtttttcaaccctttacccccc

SEQ ID NO: 52971 - DNA, 857 bp, Homo sapiens
atttatactattagcatatattcaactacagatttagaggggagcttctcacaaaaatgaaataaatgatctaatactataaataacaaaattttaagatatttctttaaaaaattataaactggcctaaaactaacttaataaaatgaaataagtagaggagtctgcaacatggtttagggacggtaacatgtttaatcaacggcaatatcaacacactgtgacatgttaatgttcacaaaggtcaccgagacctggaaaaaagtttttttttttttcattcatttgactacagctgatatctagttaatgattagactaggagggcagattatgccctgtattgaatggaaactttaagacaaaaatccactgaaaaaaacatagagctttccagaatgtattagatacgcattatttacacttaaatcccaatgcactcagtgcctttttctgaacaagctcctctctgaccatttattaacatgcaaactttaatttgtttttccatgaacttaacatacttgatatcttctaagaaataaaccatttggtcctatacaagcatttattgaatcaaatgaatcacaataagataaaggctaaaagcagttacctacttttgatcaagatggctacctttaaaaagtctactttcacggaaaaaaatattcaagtgtaccataaaggcaatttaaactagagattggtataattgcaggaataattggggtacagagtaaagttatcttaaaataaaaaaaagtgaagtattgttctgctttcctacaaaatagcataagaatatgctagattagattttgagtttgacacacaacgaatatacaaatgcttac

SEQ ID NO: 52972 - DNA, 1516 bp, Homo sapiens
ggggcacacacctgcagtcccagctactcaggaggctgaggcagaaggatcatctaagcctgggaagttgaggctgcagtgagccatgatcatatcactgcactccaacatggacaacaggagtgagaccctgcttcaaaaaaaaaccccaaaacaaacaaaaaacttacaaggaaaaaaatttaaaaataaaataaaatccaggtataaatacaaataaaaatgtacaaggaacctataagatagttacaacctttaccatagagggtataaaataagaaaatagaggcacagagaaattaattttcccaaggtcagatggtcatgaccatctttaagagcagtgtgaagaaaggactagagaaggtagactagggctacaggtttattgacaaactgttgtagcaatttgacaggagaacctgaatttgggcagagtcactagtaaaggctgcttcttcaaacatacagatggcacagtaagtagggtctatctgtatattatacactgaaattaagtctgcttgctttctgaataaacactccaaggtcgaaaatatacctgtctgcagttgtctacagtgctagaagtttaatagatttgcagttttctagaagcaagtaaaatagctgagccttgagtcattccaaaggacattttaaaataactacttttttctttcagaagtcaaagggggttatcttactttgtgttccctatctaatcctcttaatcctcaaaacttgttgacaaattcttcccactctcctgccacacttcactattatcaaacacttatacagtataaacactgctccacactgcaagctgtgaaattctttgctttatcatcgtgactaagcatttgagtaacattttatattcaaaaagaagggcacagtagagaagaaatccctcttccaacaccactgatcattcctgctcttgcacacgccattagtggaactcagccacctccctgccaacacatatacgccatgtatacactaagatcctcaaaagaaaactgatgttgagaagtcacaatactaaaacagattggaggcttcatttttttttcttttttttttttgagacggagtctcgctctctctcccagtctggagtgcagtggcacgatctcggctcactgcaagctccacctcccagggttcacgccattctcctgcctcagcttcctgagtagttgggactacaggcgcccaccaccacgcccagctaattttttgtatttttagtagagacaggatttcaccgtgttagccaggatggtctcgatctcctgaccttgtgatccacccgcctgggcctcccaaagtgctgggattacaggcgtaagccaccacacccggccgggaggcttcattttttaaatgcgattttggaagcatcaagatgttgaagattttgttcaaggctgcaagcaatacagacataggattgcattccatgttcctgacatactcctaacctgctcatcacaatgtttacatc

SEQ ID NO: 52973 - DNA, 3700 bp, Homo sapiens
cttcagcctgggcaacagagccagaccctgtctcaaaaaacaaaaacaaaaacaaaaaaagtcttcacagcaaccttatgagttaagtactactataatattatcttcatttcacaatcaaagaaactgagtccaaagagcttcagtgagccgcctaagcttacacagctaacaaggggaagagctaggattcaaacctaagaataaactccagagtccatactctcaaccactatgcttcctgtctctcagtaatatgtcaatctctctatatgaaagccaaaaggggttacaggtaaaacccagctagctaatgcattccttgaagctggaagagatgcacacttggctttttatgggtgaataatcctacttatgtcattgccaagctccaacccaaggatcaagactgtattaaggttcataaccatgtgggaaaattctctacacactcaattatagtccaaagtccatacctgactccacagtaaatcactaagcctaagatttaggtcagagacccagctagacaaaggatttggacaaacctccaccccaactcaaagcaagacaattcagaaacttttgtccaaacgttctgacaaagtaggcttttgttttgttttgttttagtcctaggcccacttaagatttaaacggggaaagaatacgagttgtctttaactttgcttgaagacttcagcaagaaaagccttttctacgtgggctcaaacagaaattggcatatatcagcatcagcaaagttgaacatcctggcttaaggagacaaaaataggcatccttgcttaaatggtgtatttggccaaacatgttgaccttataattgtggaagaaaaaaatggtgcgaggaagagatttaacctaatttgtaaatgtgctcagcctagatacacacctgtcccaaatgacctactgaatccacttatttgcagggacaacatggattacaatgccttttttgtttttattttttgccctcaagtggtccatactactgtttgtaaacaaaatcctctcactacctctcttccacctgtcatacacacacatctgatatttacataaacaagaagaaatgaacagggaaactggagctttgggaggaattccttaccctcagcttttgacccagtggttgaaggaggtactatgcgggctttcaaacttccccaaataacccaggcagagaggctgggtgcgcgaacccaacccaaaagtttgcgcccattctggtctctgaaaaaggccagaaagccctgttgggaagaagatgagatgccttccacccagcagccaccccctcccgagggagcacagcccacgggggacaaaagactttccagattgatcgggggcgggagggagactagctggacctgggatcccccctcgggagccggaacctggggtgtctttggggtaacaaacgataaattataggcaagagcccaaccctagattgccggggctgaggtgaggacgggtcctgcccgagagggagcgccggactcacctggaggaggcgaagagggggcctcggtggcaggtggggtggggaggacgctgctgttgctgctgctggggagatcgggggtcggggtccggggagtcgtgggcgccggtacggtggtcgctacaggggtggtcggcgccgggccagtggtcgtcgaaagggtggtcggcgcgggtctggtcggcgcctgagaggtggtcgaagtgcgttccgccgccggaggggtggtcggcgaggggccgagcggcgcctgaaaggtggtggaagagggtccagcagtcgcccaaagaggggtggtctccggggactgggctggagaagtcgcagccaggggtcggtggacggtggcgcgcgggggcccggtcctcggggcctgggccgtgggagccgtcgccctagggaaggggtggctgggctcgccccgcaacccggggcccggcgacgcgtccacctgccccgcggccccgccgccaccggtgacattccccgccgaggcggctgaggcgacggcggcggcggcggcggcggcggcgcagcacaacagggcgaggccgcccaggctcggcaggctcctcatggcgcgctcggctccgccattcattcattcagccagtcggttggtcagtcatcttctcctcgttgcaatccgaccaaggaagcctccgcaaccgccgccgccaccgccaccgggcgcaccatcgccacctccctctgacaggcggccggccccgcgggcgggccccagcgcggagggagcgaccggaccgagcgcggaccgcccgccctcctcgattggcagccgcgcctaaccaatgggaagccacagtcgcccacgtgatccgcccgcttcccggcctctttgtagccccgtaggccaatcagaggacgtccaggagagggggcggtccgtgaggcgggagaagggtggtgcgagcccagctctagcccgccgggctcgcggcggccccggctttgtctgcccaaagagtggggcgcgggcctcgggcaccgggcgccgcggagcagacaaaggatgcgccccgcgcggcagacgccgggcctagtcatctgctccaccgggctgcgagcacgagcggggggtggaatcagcactcgggagcatccccgccctcctgaacaatggggcgccagcgccgcaccccagctcgggcggggaccgcgcgggaaccccgcgatgggagagggcagcggcagcgacgatgtagagcttggcatgccctctgctgctccagagagcctggtcgcagccttgcgaggtctctgccgccattcccatttcagagatggggaagctgaggcccttgctgagggcctccctgaaccgagacccacgccctcaccagaaacctgctgtgggccaggtgttgtgccagactggacaagggggcgggaccgggcggtggagacccctgagggcagaaggtgcaagcttcctgcgtggaggagacaggctcgcaagcacacttacctaaaccccgggaagaataggatcagacagggttgaacctcaacttgatgtcttttgctgaatggttttgtggcctgagcgcggttttttcaccactaaaatggagatgataggacacccctcaccccccacccccctcacagagctgttgtgagaattaagtcatggacgtaaagggcttagcccagagcctggcccactgttgtaaccctcattaatgctaactattctcagcatttgcgccagggcaagcccaggattagaaagcagccccaggccacagcccttcagtgcccccagagcctccggctggttgcaggggttggggtggggctaatagccgagcttgaccctggatgacactaaaccctgaatcaagctggaattcgggcacgcagcctcgcatcatccgcccaggatccagagctaggtcaggcgctgctgcttcggctcagcagcttccagaggaagccaggcagggcgggtttgtcatctgatggggcttaattcaagccccactgctaacccaatcccggcctcccctacgtgatgtttggctttgtgcatggtttcccattagtcattggtcttcaaccagaccagcaggatgagatttatgtgtgaacccgtgtatgttaattaaagcatgcatttattttcctgcatgagtagtgggt

SEQ ID NO: 52974 - DNA, 494 bp, Homo sapiens
ctttcccatttcatcaggcccagattagaacagcctctgcagagggtcctagtagatcagtcctcctgtcaggcccatgggtgtgatttcctttctcaaacagccactgaacttttcttatgattatggagtgtttattgggtgtgtgcaatgtgtcaggtgcagtctggaatttggaactgtcacatactggcagcatgacctctttaagaggcaggaacttgttatctctgtcatccggtcccatgttggggaactatctatgaatcagccaagatgggttcccagccctccatccatctcccttcaaggcaaaatggtctaatgggaaaagtccatgatctagcatacctggctgctctacttccagcctatgttacttagagcaagaatcacctattttaaccttcagttttgtcagctgtaaaataagcatacaatacctggtctacctattgtgttgctaggaggaatcattcattcattcattcagc

SEQ ID NO: 52975 - DNA, 2924 bp, Homo sapiens
gaagatgcttgagaaatgtttactcaactattgggctttctgaatctttcattcctacaagaaccctacagaatgaaaaagaaattgctggctcaggacaaagaatggccccagaatgcagtgtcaggcttccctgatcttcctacatggctgtgccaaagatgagttgagtttcaggaaagtgcagtgaaactatcagcagtgaaactatcacatcatgaaatagtcatgggcctcacgaaaaggcttcttgtcattacacttccttcctgctccaggtttaagaccacagggaggcttccctaaggctgccaaatacagcgaggtcttggcataaatgttgcccaaggagtccttacaccatcaaaggcagaggcacaaagtccctttcctgccctttggatgagtagacctgttgggggcgctggtgggacagcccccaggtggcttctagacttagctcatctccctcctgatggacagctcaggatctgtccactgacagatcacatacttttttcagctgcccagccagagctgtgaataaacacagactctccgagaagacttgagctgccgatgacagaggtcaggggtcttggttccattccaggctgtcagctaagaaagaggatctgctgaagaattggagcctgggcatgagctcttgccatggatggaacttttttcatgtgtgaggttcaccagttaatcctagaacgttagagttagaagagatggccttaaaaagcacctaggtcaggccacgcatggtggctcacgcctgtaatcccagcacattgggaggccaaggcgggcagatcacctgaggtcaggagttcgagaccagcctgaccaacatggagaaaccccatctctactaaaaatacaaaattagctgggcgtggtggcacatgcctgtaatcccagctacttggaaggctgaggcagcagaatcgcttgaacccaggaggcagaggttgcagtgagccaagatcgtgccattgcactccagcctgggcaacaagagcgaaactccatctaaaaaaaaaaaaaaaaaaagcatctaggtctaatccaaacattcttccaggaagacacaccaaggctcagagcaggaaaggactcattcaagctcacatgataacttggcagcagaaccaggcctggaatgcatatttcttcttggtgctgcattcctgattcagaagagcagctctccctgctaagcaaacagcaggtgggcggatgtggtcactaatcagtgcactggcactgtgggtcattgagctttaaccccagagcaccattaacagcttaacccagtctgtcaccctctcctccctggaggccctgcagtcctcaggattagaaataaactgctctcagccaagcccctgaaataggagatgaaatggcccacagagaccatccaatttagttcccccagtgatgccgaatccccaccctctgtgctgggaagcagttccagtgaccaatgagctcagtgagcttgcaggtgtgtgggcaggctgcacagaagcagagggtggcgagtggaccacagggggatggatgggcatggaactggtgcagttaagcatcggcgttcccattctgtctcctgtcagctctgttctcaagtccttttgctattacactaaagcccatctctgtgaacttctgtctactgggtccagctcagatccctggagcccaggccacaccccttgtgaagctgctaaattaggcgggaaccctggtctgcatgcaggactggctgcctggctctgttccctgccaagccaatatctgtataccacttaggagaaaaactctaaagccaaatgaggaaaagcaaggacggctctgcctgtgatccttggatggatcccctgtatgtgccagcactattctcagctcttagcagagaacagaaaggctctgttgctgttctcatggagtttatgttctggttagggagccagagagtatatgggtacctaaataaatcagataatttcagaaaatgacagtgctaagaagaaaacacagactaataatgggatagaaaatgactccggggtggcatgtcactttcacaagcatggtcaaggaagccatctgggagaaggtacacattgagctgaggcctgaatgagaacgaggaggcaggctggggaagaccagggagacagaatggtaaatgcaaagtctcatagacagacacaagcttcgtatgtgtttgagagggagaaaaaagctggaatgggtagaatatagcaaatgagagagagaaaatctgaaaggaagttttggtctgagccacagtctagtgcgctgagctgggctaaaggttaaatcatggtgatgattccgcttccagagaaacagagccacagcaaagcagaaatcacagcatcatcatggtgctaactgtgaaggccagatgcccactggggcaactccactgtaactgcagctcagtcagttctccaatccaacaggaaacacccatcccaggtttgtttctaagccagatgacctcaggggggcttgtctgctgctcccccaaagcacagtgttcttctcaaggagccccctggggcagaggcaactagagaaggaagcctacatcttaagagtttttgtgaactatagaaggctagaccatgagcttcacctccttcacgggcctccttttcttgctttcaggaactgatcttctcttctcttctctctcttctttccttttttaataaaaactctcatggcgtcccaggctagagtacgcagtggtgtgatctcggatcactgcagccttcgcctcctgggttcaagtgatcctcctgcctcagcctcttgagtagctgggactacagtcttgtgccaccacacctggctaatttttgtatttttagtag

SEQ ID NO: 52976 - DNA, 1269 bp, Homo sapiens
aggtcgaggccagtagatcacttgaggtcaggaggtcaagaccaacctagccaatacggtaaaaccctttctctactaaaaatacaaagattagctgggcatggtggtgcgcacctgtagtcccagctactcaggaggttgaggcactagaattgcttgaacccaggaggcggaggttgcagtgagccaagatggcgccactgcactccagcctgggtgacagagtgaaactgtataaaaaaaaaaaaggaatcaaattcctaagccaaataaatgcatctatagttgtgtaaattaagaaatctgccatccaggtggggagggggtacctgttgcatcagcaggttgatggcggggccctgcctggtcggtgtggttctccctctcccaggccatgtcaccttgttcaagtagaacatttattcctgcccaccacaggcatttgactctctggaattcatgggaggttctagagtgcgtccggctctgtgtcaactaccactgtgcaattcctgcaaaggcagttgaggcgggggtggagtagccctgaataaactgacagccagaggactgggatatcagctgagaacgttcccatggaaaagaaaagtccagccccttccagcaaatgctgcctggctctgcaaagagtgccttgtcatctcattggcattgcttctgtatttctttcctatttcagaccagaagtgagtgcatggaggatctctgtgagctggttttctctatcttcaggataatccaacctttagtaacaaaagcagaaaaatctattcctatcctttggctcccaagtccacatctaagtgattcgtcctaaggatgtatttccaaaattgtttttaaatcttgtttcaggccaggagcggtagctcacgcctgtaatccctgcactttgggaggctgaggtgggtagatcacctgaggtcaggagtttgagaccagcctggccaacatggcaaaaccctgtctctgctaaaaatacaaaatttagccacgtgtggtggcggacacctgtaatcccacctactcggaaggctgaggcaggaaaattgcttgaacccaggaggcagaggttgtagtgagccaagatgatgccattgcactccagcctgggcaacagagtgagactgtctcaaaaaataagtaaataaataaatctttttttaaataaaggttgctagtattatgcatgattacataaagtggggcctacccaggtcccaaatgacaggtggatgagcaaacttt

SEQ ID NO: 52977 - DNA, 1472 bp, Homo sapiens
aaacaagaaaaaatttgccatggatagttgcataacaatgatcattattatcatcacttttggtgcagttgttgtatgcaggcactgtgctgggctcaatgggaagggttttatgtgcattatctctttttatcaacaacctagaaaagaaggcaattacttcctgttatggatgaaggaactgaggctaagaaaggctgagaaacttgcccagagaccacagatttagtaagtggtagaggagattttcaaagctagagctgactgccaagcttgaggtcttaacaagcttagtttctgcaatgaaaatcctgctgggcttcagtgagaatccagcaagctggtgatgcagcctccatccttggtgggcccctactagccttaatatttcagggcagtttccaggagagctggctggagtcagtggttggcatccacacgcagcagagccatgaagctggctttcccagcagctcacattaactggcagtggcagccaaggcaggtcagaagcagaaatgctctcagggcctcaggaaacatctgcaagtcctcaaggagacaagacctgcccccttatcacctcttcgggggagagagtgggcctatcccatctgcagggaaagaatgaacacattgcttttattttccaaggtgtgttcctgtaaatgaaacaattcactgctatgcaacttttaggattggccacttgagagcaggccttgtactggacaatggggtggcagtcctgaaatcagagccaccacctgcctgccagggcttgtggggcaagggtgaagatggtgacaagtgacaagcagtatttgcaattcaaagtgaatggtgcaaggaaaaggggatgtggtgtaagggggagagtatgaactttggagtcagaaagttctgtttcttcatgtcctggttgtgagactttgggcaaatttcctaacatctcgaggttgtttcctcatctggaagaaatgtaaatagttatacttgtattgcataattaccatgaacattaaaaggtacaagtatatcaatacttaaaattgcctagcagataatgggagctcaataaatgataacattactagtgttattaaaaaggctcagttggaggatctataaatggtgttgttgaaaagaaaacagaagggacatattagctgggttttgatggggaagtaggagtttgttgactagctggtaggcaggaagggttttctagttagcaacttagcaaggacagctttgtgaaggagcatggaacatccaggcaacatgagtggaccagttaggagctactgaaatattcccatcaaaatacaggggcgtacccctggggcaagatgactctctgacgtccacttactactattctcaaataaaggaccatgaacaacctctccgtgtaaattcataaaccagcattcttgttagctacgcttcctgaaatggagcagcctcca

SEQ ID NO: 52978 - DNA, 390 bp, Homo sapiens
ttgcttgaacccaggaggcggaggttgcagtgagtcaagatgatgccactgggctacagagcaagactctgtcaaaaaaacaaaaaacaaaaaacaggtagtttccctgttggtctccatcccctaaggtgtcattatttgcttaatcaaggctgggttgctaactctgggaaaggaggaagaaccaacattccagataaggagcttaaatctggagatgacccagaaaatgttcacatcacttcctttcaatatttggttagtccacacttaaccacatggtcacatccagctgcacaggagtctaggaaatgtagcctgtagctgggcaactgtgcccaggaagaggggaagaatttggaggaataagtagccatctgctacagagat

SEQ ID NO: 52979 - DNA, 463 bp, Homo sapiens
agcttcccagagtgctgggattacaggcatgagcaactgcgcccagccaaatctgtcattcttgataagatcactctataacttgtatctgtgctaaagttcaggggccaccgcccttatctgtaacctggaatcctacaattcaatctcccattagagaatgtatccttaggtctcaggtggaatgtaccaattctcaaattccactaggggacagtataggccaatatgtctagacaagtggcacactgtggaagactgtggaatcaatcactgatgacattcattcatccctggaccaacagcgagggcttgtcggctgccaggcactgggctgagcaaaggtggatgatttctgtaatgctatttacaaacttagaaagctgctttggggccagatgcggtggctcaggtctgtaatcccagcactttgggaggccgaggtgggtggatcacctgaagt

SEQ ID NO: 52980 - DNA, 728 bp, Homo sapiens
taagaaaacaaacacactaaagaaggaaaatcaatcccaaaatcatggtgttcttcaagaacattaacggtcccttcctctagcactttactttaccactgaagaaatcaaagcacggagagagtaacacaacttgcttagagtcaccaaaacggagtcaaaagcactaggacagaatccaagctttttgggtgagacactttcccttaacttttcaggctacagaaggtcattagactaaaagcatcccttggtgcttccacttgaaaaatttcataaatccttggctatcacgagctctctgatttgacttcaaataaataggtattacacatgactgcatgtttacacttgcatgcttgtccattacccaacagttctgaacaaataaggattgttaaatagtaaaggtgtttgctgaaatatattccactctaaggcaagtcaaggacaaacctcagagcctgggctaacttctgcaaaagctaactgctaattgctccagtcatcttgaaatacgtgaaggaagaaacctcaaggaaaacctgggataaattatccccagatattcacaactcaacaaaaagtttgtaaagcctcttaagattctgaagggaaaagttggctttatttctgcctctgatgaaaattctatactaatcatggtgacaattcaggactttgctttaagtttaaaatcctaatgattaattcattcttacaatgac

SEQ ID NO: 52981 - DNA, 658 bp, Homo sapiens
accctgaatcccacccacatggcaataatttattacaatggagcaccagctgcactctttagaaaggcaagtgttcttgatttgctatagtccacacagagacttttacctcagtcaggtcatcttcctggtcccagtgtgtatgttccacaagaaaaaactgctctaattcatccgtgtatgccctcacattgtttttcaaacagtaggcatcccataagtaaatatctactgaacagcacaaagcataatagattcctttcttaccatttcagaaataaattgcgaaagagaaagataactacctcaatgtcattagccattaatctcttcaataaaactgtctattgcttactcaaggcactaatgtgagagtcactaagtttattgccaaattcagggtttcccaattccaccacaatgagaattcaatctcttaagtaacaagatgacacaaacacatgtacaattctgtcacaaatacctctcttcacagttccagggatgctgctgttagaaaaattaaactaatactttggatcattttcaaccactgcacagcgtaattttaaatatgcaaacctgatgaatttaatcagaataaaaatcacattaacatacagacccaccaagagaataatcttaaaatgtagaattg

SEQ ID NO: 52982 - DNA, 1861 bp, Homo sapiens
gaactggagagctgcagaataggaatgaggggtccctttttattgtataccttttaaaactgaaaaccatgttaagtataatatactatcaaaaaatagcctttagttttaaggtgaatttttttaaagctttgaaagaatacaaataatgtttataaaatatgtgttctgcaactccacttgttgctgggtgaccttgggcaaatcacttcacctgtctcatgccctgtttcctcacttgtaaaatacagccaagagcattacctacaagggtttttatgagggttaaacaagacagtgcaagtaaagcgtttagcacagtactcggcacgctgtaagcctacagtaaatgtcagttaccattattacttagcattaatattgttatctttgctttacttcaagcagcaccccacatacacacctgttttcatggcatacccacaattatggcgcagtatagcgctttgtacttcataaaccacctcatcacacttcatcgtctttcaaacgtttggtagccctgggacatcactgttaactcatttcgcagctaaggaaatggaggcagtaggaggcagtaactccaaaaccctgttttcccgtctctaaaatccagatcccatcaacccattcgttgctcccaggtcccttgctctcggaatcgtgttccgcgcggcactgacctgagcgagcgccccggggcccgggacctcgcgccgggttcacagctactaggcacgctcggaccgccagagccttgcagcggccgggtccgctccgcagccatggcgcctgcagggaaagaaaaacagccaaggcgcggcgggtcagcagagccgcgggcgcctaagagtcccctccccgaccggccccgcctcgcatacagacccggacctgcggccgctgctcccggtccgcagcctcacaggggagcggcttccggtgctgcctgcgtcatctccgcgcgtccctcagctccgcggctcccggcggaagcggctgcacttccggtccccgcccggaggtgggtggtgggaggctggaggccgggagtaggggtggggagaagagcgtcccgggaagctgaacgcgtgccgcgcggccctcacggtgcttaggctgggtgcaacctagaacggaggttcctttcgtaccgtacatccaggtttgcacagcgcgcttatgtccctcctccaatctgatcttgcaccagctctgcagtagtttttcttattatcctcattttacggaggagagggagctgtggcttagagaagttaagagacgtgtccaaattcatacaacctgttgggcacctctttatcccgaacgctgttctaggggatagggttagtgaacaaaaaacgcaaaagcccctgaccgcctgggccttacatctattaggaggaggaagacagataaactaaggctcgtgcaaaggagaaaaataaagcaaggtaaggaggttgttgaatgaaaagagacagtcaagtgatgtagatttgaatgaatcacaacgtttacactctggctgtggcccggttacttaacctctcagactttgcttcatctgcatagcaattatagtgaggtccccatccgaaggctctgaggattgaaggaaatgaagcatgcaaaccttttggcgtcaagaactaaaactgagctaaaaaatcccacgcactctttctcaacattttttgtgtaccatctcactcagttcccacaacaaccccacaagctagtaactattattaggcccctttttagagatggggaaactgaaatcaaaagaggtttaggcatcttgcctaaggtcatagtaaatggctgtcataggatttcaacccaaaccgac

SEQ ID NO: 52983 - DNA, 1635 bp, Homo sapiens
acgcttttggactgatcgccttggcattcagtgcttctttttctgtcatcccaaccagccacatctcgggaaggtttgaagcactccctcgtgggaactctcttgccgctgcttttggggcgattccagcctcgggttcgaaagaacaaagtaactgcacattttgtgcgcgtatacttgcattaaatttttttaacaagaatgactggatgaaaaagcatgtgaatttaaaatgctgatggttcttgccacattgccaggataggatccttttagaaggggaaacaaatcaagaacctgtacaaagagatgtggaatgctccttgtaagtggacagctttgctttcctcctttaatttctatttgatgaagaaggcagtgcctcactgctcagaggcagcgaggccaggcgacgggagaaaacaccctggggcactctcagaggctgaacctgaaccccatctcctgcctctgaacccaggatccttccttctctgcaaatttcggctactttccacctcccctgtgactgggaaaagcgctgttcttgccctcaaccactctcatgtccatatttaggggtgcccctctcctcggctcaagcccccggggtcctctcacctatggttctcgttaagcagggagaagagcgggccgaggcgcagctccgccgcttgctggcgaagctcgttgagcggcactgcctgcagcacggagtgaagcgcgcgtagctcctccagcggcgcttccagcctcgctacctctctcagcagcgccaaagcctgggctgccatcttgccccccgacgcaggggctggcccagcggcccagttcccggggcgctttcctgaacctcgcgagatctgatcacagcctccttgtccctgagatggctatggggctgccaagcctcgcgagaagcctccgttagggccgtgtcaactgtagccagtggttgcggctccctcagtctggcgtcatctaggtcgctgctcagggaaatgcggaggccagtaggcttacgtgtttaccgcgtagggcaaagccttgccaaattcccggccagcggagcggcgagggtggggactcacgggaagttaaacagcctcgtcggcgtcctcgaggctccaaaaccaggctctaggcggggacgactgcagccgttatggaggccaccgcggctacggccgcggctgaggcctccccaggtggagcggtggcctggaggggaatcttgatcctgggccagccacctgtcaagaggaggcggagcgtcatgcctctggaagactggatgaatattctccaggagcctgacgaaggcgtgagtaatagggacgtgcgccgccttgttggtgttgatcagtccaccaaggagaagcagctggtcgcagtggccgtacctgtaatcccagcgctttgggaggccgcggcgggaggatcgcttgagcccgggagttcgagaccagcctgggcaacatagtgagaaacccgtctctaccaaaaagaaaaaaaaaaaaaaaggaaaaaaattagtgcggtgtggtggcacgcacctgtagtcccagctactcgggaggctgaagcgggagggtcccctaagtctaggaggtcgaggcttcagtgagcggtgat

SEQ ID NO: 52984 - DNA, 1986 bp, Homo sapiens
ccccctcctttctgctgggctcacctggctccaagtccctccacatgctctccactacagccacacacagcctctctctttccccgcgggcctactcgggtctcctccttgtggccatggcgctgggcacctggtgttgtgactatctgttcacagggagagagtccagtgcctgtttctgtgtggtgcgtgtgtgtactcctgtgagactgggcaggatgatgtctacggcattgtgccagggagtgtgtgaagctaagtatgtgcggggccctggggcgagccaggcactgcaggggtctcggctccccagatggtggcgtggccacgaccttctccacccccactcccatctcctttttctccagcgcagagcgcacaggctcccgggcaggggatgcggtctgaatccctgtcctctccctgccacctggctcgcccggcgctgcgaggtccccgcccgcccggccaggggccaggccggggccgctgcaggttcacaaactgacacttcctctcccgctgcgcctctaggagccggccgggtcgccgcacccgcctccaccctggccgggcgggggcccccgggtggcgcccccccagcccccgcctccgtcctcccggagcgggcccccgcgggctgtgattggctgattcaaacccatttgcaaagaaatgcctgtttgcgggttcccgtctgcgtccagttcaaatccgcggcaccgggagcgcggggccgggcgggggcaggaagcgaggatgattcatgcgccggggcctctcccagggcggccgttggctttttaaaaaggatgttcaggaggggggaaaaagcttgcagaagcacccccttcgggttcagcgctcctctcctcagtcgctcggacgccaagcctcccccatcccaaccctgccgcagcctgacttcggacgtgagcgaaatgccaaacgcccgtctgtccttcccccaccccgataggaaaattaaagatcgggggcgaggaagaacgacctgtcacccatgccccccggggctcgggaacccgggtggggcccctctgccccgcaggtaacctgcacccccggtccccacccccgagagccccgctccgcaggagtctcaccccccggaggcgttcgggccgccaaagttcagggagatttcgaaaagagagggatgagggccgggaggggagagcgtggcggggagtccgcccaacagcgcagaactcaccgcgaggctgcgtgtccgccggtcccacttggagtctggccaccaggcgcatcggtggcggaggcggctgcgctcggcccgcggctgcccggccgagtgtccgcccgtggggccggggtcggggtctcggcgggggcggggcggggcgggggcgccgcggggaggagggggaggcggcggagggaggggccggggcgctcaggaaggggccccccgggcgcggggcgccatctttttcgcgttttcccgcgaattattgacgtcccgcttatgtaattagcgggggccgcgccggcctcgccattggagcccgcggccgccgggctccgcagcgccgccagcccccgcccgcccccgcccgccccgcgggcgcgcatcctccgcggccactagccaggacccgggccccccgccgaggagcggccacaccgcggcgcacacggagacgccaggcagcgctcatggcgcacacgaccgctcgcacacttgttgaggaaacacagctctgcgcgcaggcaccggcggaccctggcacagacacacagcagggcggcgcggacccttggcgcagacacagacccaggacgcccaaacaggccacacaacaccttgcactaacagcacaggcgttcggcacagagacacagcacaagtataatgtagatacacaacacacagtgcacaacgcatgttgttccgacacaggtcagaacacaccacagcatgtacaggacacaaacacaccacaaaga

SEQ ID NO: 52985 - DNA, 2223 bp, Homo sapiens
taaagtgcctagcatgtaacaggcacttaataagtggcagctgtgattatttcaacaccagaaataccctcatctatgaatgtcattgttaaatgacttagtaaaggcagtaatgtgtgcaacatgagtgaggacgctctccctttgctcaagccagctagagtgtgacagagaaaccacatggattcactgggtcaataaaatggggaggccttccagaagctctcgattccctcagctccttgtcccaggtctctgctcccctccacaccagggcccctctgattatagcagtgatggcaggtggctccctgtctgagtgtggctgccccatcactcccctctcagcatgcttatgtgctaaagaccctgtcctgtctgcccccgtcatccaatctctagccctagccctgtacattccctttctggaagcctctggcagttttctgcaagcttcccagccctgactgatccctctcctggtcatcacttaagtgagcaaattcatctttgaacggttccttgaccttttgcttgacagatgcacgcatgctttagaaagcacacgtcatgcagtgcacaggaggtgcactcagagatgactgaatgtagtgtctggggctcactccctctgagggttggacaccaggcagacagtcaggaaagcaactctctaatactgttacgagggagaaaatacatcatatagatccctgcgatggaaggtggtctatggtgagttgtaggtttccctaagggcctaaaatttattcataagaggcactgttgcatagggcagtggttctcaaagtgtagctccagacctggagcatcagcctagactgggagctcttataaatgcaaaatctccagcctcactccagaactactgactcaaaccatgtggggcccacccagcgctcccagttttcacaagcccaggggtgatcccatgtagggccggtttttggaccactggaatggtggattcatttggaacctgtcacctcatctgtcaacagggacgaccctaatcatggcagtggcttctggaagggccacgagatgaacgtgggaagcctgcctggcacgtggttggtgctgagccaccgtcccctaagactgatcacccactacctttggagggtcagctaccgcctggcgctgttctctgtcagtcatggaacccaagataagggctccagcagaaaggagaaacaggatggaggtcagggaaagctgatctgaaacttaggctaaggccctgaatgccaaccttaggacctctctttgcctctgtctgcggcggagactcacatgtttccattacttttctgtaatacaacaaagcaacggaatccttgggattctggccatcccggaggtacctcccgggtccgtggcggggcaagccctttttccacgacgcctcccacccgcctcgtctgctttggccgcgctcccgcgaaggccgcggcgggaggcccctgatagggcgcgcaggccccggctgccaagagaaggccgggcgcgggccaggagccggcgcctgcgagccagggcagccccgcgcgtttggaatgcgagcgccgctcaatgcgttccatatggcggcggcgcgggcccacccggccgcccgcggctccccagcctcgcgcccgccccgcgggttcttgtcgatctcccggacccacctgggcgctgggatagggaccacggattaccaagaccagcatagtgcagggcacgtaggaggcatccggaggctttgatgaatgaatgctaaatacacgacttactggtagaaggcgtcagagagtcgactccttaaataacccagcacacagtccgccagcctcggctccaccaaaaatcgatgggagcctgccatgggcgaggaccttctcttgtatttgtgtaatcccagtcccagatccccgactggtcagggactttgttctccagctttgcccaagatgacagttgggctcagagctggtgatgtgacttgcccaaagtcacacaggtagcaagtagcacgtcgggatttgaatccgggttaaaggactccacgtccagtgctctttctatccaaactccagagggaggggaccctgctgacaccttaatgtaccctggcctccctggaggcttttctcattggaatcccagagttactaagacttataaaggatagaactgtccccttaatcccgggcatgg

SEQ ID NO: 52986 - DNA, 1834 bp, Homo sapiens
ctgcctcatcctcccaaagtgctgggattacagatgggagccactgcgcctggccaaattatacactttaagtgggtaaattgtatggtgtgtgaattgcatctttaaaaagctgttaccaaaaaactccaagctttgctgctcctcactagccatgtgaccctgaagagtgacctcacctctctgagcctcagtttctttatctgtaaaatgggcaggataaaagtagctgcctcaggaggttgttgtgaggttttaaggggaggaattatgtaacaagttagcatggtacttgatatacaataaaaccttgataaataataacactagctagtgtttactgagggctcactcgtacctggcactctgctaagctcttaggtccatgatctcatttaatcctctaaccactctcatgccaattgtgtagtggaggagaccgaagcttggacagatgaggcacagattagaaccctgaagcttgggttctgaaccatgagacagtgttggtttttgtgtagttttatgtttgtatggttctttttttttttttcttttttttttttttttttgagacggagtttcgctctgtcgcccaggctggagtgcagtggcgcgatctcgactcactgcaagctccgcctcccgggttcacgccattctcctgcctcagcctcccgtgtagctgggactacaggcacgcgccaccacgcccggctaattttttttgtatttttagtagagacggggtttcaccgtgttagccaggatggtctcgatctcctgacctcgtgatccgcccgtctcggcctcccaaagtgctgggattacaggcgtgagccaccgtgcccggccgtttgtatggttcttttaaattactgtaacccacttcatttggagatgctgcgttgcacaccctgaaatgaagtttcatctacttatccacctccttccaaatcgattgtttccctttctcttgtgtaggatactttataaggtataacacgcccccactgaaaggctgcacgagacctggcatctgcccagagtgtagtgggcagggcccacagcccacccctgtgaagtgttaggcctttgggaagaaggcccaggctagatgacttgctttcaagccccagcgctgccacctcctagcttgtagagacctcctcgccttggtcttgtcatctgcaaatatgcggattacgatcatatgtacttgccagggatattgggagcttgctcacaggctctcagaagccccagagcctcacaatcgagttctcctgagacccccattggcagggagatggcagtcctggggctggcccacgcccagcaagctccccagccagctgtgctgaggcggcaagtgctaaaaataacagtcacgtcttgcagggacacaggctggcccagaggcagatgggagtcagggaggaagtggtggggatgcaccaccaggactctccacctgcagtgtgaagatatgtgggtgtgtatgggggatgattcctttacccagtgcaaggcccctaactataaaggagcttggtttcaggtcacatggagtgggtggggcctgttccctgtagccaaggcactgaaaaagtcctctagtgctatccagtggaaatattacatgacctgcatatgtaattctaaattttctagtagccatattagaagaaaacaagaagcagatgaaatgaattttaatatactttaacctatcaaatttttttttatcatttcaacatgtcatcaatataaaaatacgaatgaaatattaaattctcagccgggcatggtggctcacacctgtaatcccagc

SEQ ID NO: 52987 - DNA, 577 bp, Homo sapiens
cctccaggtcccccgccacttccacggctgcctgcagctgcaggtctgacaggttctgctccagggccatgggcccagactccaggccacagcccagccgggccttccactgtttcatgaaccccaacagcaggtttaggtgggaggtctgggaggtgacctcatgctcttgcacagactgtgggcttccctgacaagagagtggggctgatcagtgaaaacagaggtggagtgaggacaggggagcagtggagtgccctgctatcaaaggtcaccaaggattattcattcacccagcaaaaaggagtggctttctgtacagtgggagggattcagaggaagaccctggcatcagacatgcccacgatgagccacatgcattgcagcttctaattctgccctgccctggagtgcaaggatgattcaggaccatggagaggggcattgggggtgggggtcattttagtgatgttctgcctatgcttaggtaagacattaggaagaacttccctgagtactgtgatgacttaatagtaggctctgatgcttgggaaagtcattagtacaaaggacatcc

SEQ ID NO: 52988 - DNA, 6860 bp, Homo sapiens
aattctatgtaatttgaattctaacacttcagaattacaggcatgtttgtcatttaccaaggggtttatatttgttattataagaacttttttgattattattgattggggctcataacaattctgtgatgcagaaaacagttttacagacaagcaagctgtggcttgagaacattagcagtgcagcaggccacacagtgagagagtggcctcacagcctcgagaattacaggtcattatgcatggcctatcattcttctgattttttcaaccatttgaaaatataaaaaccactcttagctcgttgcttaggtggtgggccagaatgtggcccatgaaccgtagtttgtggacccctggtctggactgttctcactctaagtctattgccaggtagctttaggcaagacacttcaccactgtgaacatcagtctccttattccttataaagcaaattcagtctggactcaggactagttgggaggtgcctgccaggggtggagtgggcagctgtctacttggcttcaacctggaaaaatcaagacaacggacaaatgcctttctgtgatgtgccaacgtaccttctcctgagttcgaagacggcttcctgggcttatagactggaggtcttcccctctgcatttggggcagatctgatcctcgccattcctggggaaacatggacaaagccttggagagaggcactacagctccctgcaccatccactctcctgacagctccagaagcctcaactatcagcagggtggtgatcatgtacgtccacaatcccagagccacagttcctaaatcgcaaaactgccgagtatcccacattttttggtagtttgcagtgagcttcctgggctgccaaacctgccgtgactgcactgaccggaagctattatagcccttacttgccccacttagtgtgaatatatacatgtttcattgcagaaacattaatgtgcttgattacagggcactgccgcattccctgccacaattacatgatgccctgatttgcttttctaaaaaaaattctgaattacaaaacacatctgatctcaggggtttaggcaaaagattgctgacatgtgactatatttgctcttctcatttggtcctccatttggttttggtcttatatgtttagtaattacagaggatcatggcctattagaacaagaaagggcctcagagaacatctgtcctagaggttcttaatcaggaatgggtgtcagattctaatgggtaacacctgggtacccgtgggttttttgtctgttttttgggggtttttctttttttgagacagggtcttactctgtagcccaggctggagtgcagtggtgcgatctcagctcactgcaacctctgcctcccaggttcaagtgattctcatgccttagcctcccaagtagctgggattacaggtgcacaccaccacacccagctaattcttgtatttttagtagagatgaggtttcaccttgttggccaggctggtctcaaactcctgacctcaagtgatcctcctgcctcggcctgccaaagtgctgggattacaggcatgagccactgcgcctggccagcaactgtgtttttacaaagctcctggtgtctctgacctgctaccgctaccgagatagtctattttacaagtgagggaatgaggccccagagggcatgtggattggtcaaggtagagtgagtcaggagcagagctgagtagaagctcttcaggacttaggcctcaggcctcagccctccaacttccaatcagctccctcctctgccaggttttggaaggagggagaggggaaaccaggagacccactaccagagcctgagctgaaccctgacaatccgcttgatggtaaaaccagtgaacctctgctcctccacctcctggctggcctttccacggccacagcctctcctcgctattctcacagcctcctcctttgtcgtcatgtttgaacttctcacttgcctgattcagctttgccaccttcttaagctgtaaaaccgcaaacaaaaggtcatcacatgagatagtttaagggcatatttgccaggaaactgaccaaagctgacctaatctgttaggcctcagtgttctcatttgtaaaataggatcataatagtatccacccctctaagttgtgctgaggacccaagggcagagcatttggcacacagtaggtgcataattgcttaaagagggatgtccacaatagtactgatatcatgcctttctgggttgttaatattttaagtatcattaaatacacaaatatatatcgatctctttgtcccctccaaaagggttcccagcaaacggtctgaggtgatgagcaatgctgtggaaggagagatattcgtctaacagtttgtcattcaccaagaggtttatatttgttattataaggacttttgtgattattattcattgggcttcattaacaattctatgacacagaaaacagctttacagacaagcgagctgcggcttagggacattagcagagcaccagaccacacagtgagacagtggcctcacagcctcgaggctctcctcggtgtggatggctttcccctgtgggagctgatgcctttctgtggcttcctctccttccaccacagccagaggggcagtgtcagggagtgtgagaaaagggtgtggaaactgaggcccagagaagaaaagtcaccgcctgaagtcacaggctcctctgcccctcacctcccatcaggggtccctccctggcacccactttctgcccaccctccgctcctccatcacctcacctcgggttctcagagagacagcctgcacagcagagagccctgggctcctttgggtcctggcagacggtgggagggcacccaaagggaaactcattctcatcaggggccgggcgaggactgctgcctgagctggaggccatctcagggttccaggctggccagagggcctgtttaagttgctccagggcaggggaccagccttgtggagtcctggcctgggcctcactctctggtgagtaggagctctgatgactttatcttcttctctctggcttgtgtggttcaacgtcacagctgagtcacagcagggatggagcaggaattaccctttgtggcgataaaaatcccctggatggtgactgaaggctttaggagtgtccagtcatttttttttttttttagagtgagaaaaagcaagagagcaagtcagagaaaatgacccgtgtcacagactctcagaaagcacagtgagagttcccctggttgagaatcgcaggctgccgctggcttcccccacttccctgggcacatcggaggagggggccacagctggtccctggtctgtgttccctggcacctctgagcagcctggaattctcagtgggggtgctcaccttcctggtggaaatccccagggtgttggagacaggtccaaaatttcaagttctaggcgcttttgctctgctctgtttggagtgtctgggtgacctcaaggagaagtcacttcctcacagtgggttctgatgactccatctgtaaaaaagaagttgcaacaggtggcctctgggctgtaagattctgggaccctatcttgcctgggactgaggcaaccagaaggagcaggaaagccctgatgaaatccaaggcctaggaccacagactcctcagggccctccccacaccaccccactcaggaagtcataggtggctacatgctccggtcaggtgccaccactttactgcctcaaggagaacaaagcgctaaacaaatgcaagatcacagcagctggtctcagcatccaagtgggatgtagatccacatttgcaggaaaagtgcactggggaaacgatggctcccagaatgtgtactgtgtgctgggcaacagtttccctccaaatccttacagcaacctgcaaggaattcttctgcagctgtatatagggtcagagaagcaagatgcctggtccaaaggcacacagcctctggtagtggagtgggattcacaccagggctgtggggccccaagctctgtgtgcttgggatggagatcagagtacccagctcttgtctcatctatcaaatggagaagacaatccctacacatctttccatcctgcttggctgctacagaggttttgcaaactttcacagtggtttcagatcatgggttttgaggtcagacagagctgagttgaaatcctgggtccactgcttactaactgtgggccctgggacaaagtccttaacttccctgaaactcagattctgcatctgtaaaatgggacaataatacctatttcacccatttgttgtgatgactaaatgagatagtgggtcaaagtgtggtgtgtaacccaagtgaagtacttgaatgacatttggctcagatggtgactacaggccttccagctcctcagagaaaaggattaaagtggtgcattatgcttatactgtgctttcacgtctatctactggagcctcaacaggtgggcagggcaggtcatctggcctgagatacattaaactgcccacctgccctggtgtaacaccagggctgccacaggctggtggcaaagacagcacggcatcttaccgccacaatgtacatcaggacctccacccccataacaaacgacctccaggcctgcatcaagactatcagaagacactcccttttaactgtgtaccccatacctgcaagctttcctgcagccagccctacctgttccctccttcccctggtttgggataaaacaggcacccaagacttctctccccatctgtgggtcccttctctcccctccggcctcaataccaccctctctacctgctcattcccacggacatcaaaacgtgcgcaacctgctctaataagaaaagggaaaaatagtactacttttgggtaccgtcttacgtaattttacagacatcatctcatctaattttcactctgtgaagcaggtattgccatcatcatccccaccttacagatgagaaaactgaggcacagagaggctaagcgacttgttcaaggtctcacagctagtgagtggggacccctgaacccagagccagtcctgtaaccacgcacgcttttaaaacactctttattctcgtctccaatttctacatctactctcgcctcacctaacggtagaacttctagaaaagattgtctatacaggcacttggatctccagggaatcatctctccaagtgtatacgcatgtcggggacgccaaatgccctgggcccgccccagtttctatccaaccagccctcctgccagcacctgacccggctctcagcccttccttccggaatcccttcctttccccggcttcccgcatcctctgcggggaattccccccgcgtctctggtggctccttatccgtctccttgacccctttctcttctacactgggcctccatcggctccatccacgaggagtctctctgcgccgcgtgtccccatctcccactcgtcctttggggcgcccctgcaccagaccccactcccacgggaagtctccgtgggccgccccatgatgaggctgggcgccccgctctgtgattcctcgcgcctgccggcgccagcacagcccccgccgcccggctctgcaggctgagcccccagccaggtcggtgagcccgcccgagggcgggggagtgtcgcgtcgccacctccacatatccagttgcgagggcagcgctgggagccaggcagcgccggtgcccgcggaaagaggaatgagcccctgcggggccggggcgcccgcggctgggctgggggcagttgagtccggggcggtctctgcagccgaggtgccaggtccccggctgcacccgaggagtccccgcctcagcaagcgggagctggagcggggagttcggggcgaggaagggggccggggagccgccctgcggtcccggggcaggggtgtagggcagccaacctcggcgccgcctccgccaccgcctaccggcggccaggcccggagcttccggtggagtgtgaaggacgcagccgcaccggcggaaaccggcaaggcagggccggggcccggggctgctgctccccagaccgccgcggggcggggcgagcgatccctgtgaggggaaactgagtctgagggccgggtctgcggcgccacgggcactgtgcgcccagttaactgacacgcgtgtacgcagctcctccgcttgcggggctcctggcatctggtgcagcacctgcgcgtgtttagtgctcagtaagatgccccctgaaaaaacaaacacaaaccgggaattggagcccccaccctggtcccctgcctgcccaaaatccgagtagtgagaaggtgaagaggagtaaaaccgcagtcttacctttcttggatttctccagaagatcctagcacagtgccaggctcgcccaagcttattgggttggagcaatcaagtgatagtacttgatagtacttgatcaaaatgatagtactaagtggttcaaggcactgtgcttttacaaactggatattttaaggaaccgtttctgttttcgtctaaacacacacacacacggtcgctaaatccttaagaatatattaatcaaaatagttatggaacttagtgttggggtagaattttagattaaaagctacacctttatttttgcgaactaccaatttgacaagggctccttctctgtcagatgtcttaaccttgtaggactgatggtggagggagggatgaagctgcccaccttgttggtttggttttaacagctcaaaatctctttatgtgttagggtctttttttttttgagatggagtttggctct

SEQ ID NO: 52989 - DNA, 2131 bp, Homo sapiens
atcctggctaacacggtgaaaccccatctctactaaaaatacaaaaaattagccgggcgtggtggcgggcgcctgtagtcccagctactcgggaggctgaggcaggagaagggcgtgaacccgggaggcggagcttgcagtgagctgagatcgctccactgcactccagcctgggagagagtgcgagactccatctagaaaaataataataataataaaataataaataaataaataaaaattgatggactctgagtcaattagtctgatagttttcccatcatcagaaaacatttaattatctttgaccttgccttttcctgggtgttgtgaagttagaaataacattccagcaaaaatttgggaagaaatctggggttatttgttgaagggagtttctaagtctagtgattttccctaactcaatagatttccagattttaagaaaagaaacaaagcacctctgaagttatttgaattctaggcaccaagcaatccctggggtttttctagttgtttatgggactggccactttgaaggcgcaatggggatttcaatttctgatggaagtgccagtgacactcatggtcaggtgatgtggttcaggggaagagcttggcagatggatcagggacatgctctaagatgccagtgatgaggaagacattgatactagccagctcactgcctctctttgtcatctgtagctacccatgtgtcctgttctaacagactggtttttctgtgtggcaattcttcctttcatggactctggaaacaaagactcttccaaaggtgggcacactgcacaagggccttttgaagaaaagtttctcaaggatttggggcctataaaagccattctcttctgtcccacccaccccttcctctctgccctaagccagtgtaagtgaaaagagcaggcagtctgacctcactctcttcatgtgccacatcctgttttcagattaatgagctcatttgctggaaatttaccaagggaaatagtttaattttggaaagtaccaaaaacttatctgtagtcattcagcttcatttggggggctcttgaaatggaggggcatcaccggaggacctctgaacgcccagggagcagcaaggcaacagaaattgaaagcgagcccagtgaggctgaacctgactcagaaaggaaacaaaatcttttggaggccactcatgtctacccagttgaatttttttttttctaaaaataactttaaaaagagaaatagtttatctggccaaagcctcatatctggtggtctgaccatggagccatgactgaggaacaagaaaatgaacacagggaagcaggcagtgtttgagcctccaccctctaccttcttgtccatgtattaatatgtttggcttgttctaagaggcacggaaaggctttcagtctccagttttgccccaatcccttagcaatccgacccttgacattgaagttgtctgcctaacctagtagcctttgtggctcctgcagccagggggattctagatgatcacagatttgcaagccattctgcattggagatgatgagatgatggagcacaagtgatgtgcaccctagactttgcctctaagcatccaaccacctcctggcctgcactgtttcccagagtagagatttatcatccattctaagcagaatgaatggaacacgtaagtgaatccagccggctaaaggcagccatttgggcaggctcctgtttgtcaacagcccttaaaatgtggagcccagaatggttctcactccctcaaccccagtcagccctttggtgccttcttcttattaccagcagcacgccttgtctctgtcatacggcttgtgttcagtaaaaacaattagtgaacagcttttctgttagcatcattttaatctgctctgataacttctgattcttgaaccaagaaatttaattaaacagatgattacaagctgtcagcaacctatcagattagaagaccaaatggtactgggttcttcaatccaaattcagtatgtccctttggcacattacacagaactgatatcaacaacaaaacaaagaaataaaacatgatcttataaaaatgacagcataacacgtgtactttttgctatg

SEQ ID NO: 52990 - DNA, 1785 bp, Homo sapiens
tatatatctagcaacactttctggagatcattgtcttaatcatttcagatgtgcacttgtaacattttaaaatgcaaaatcaaatagataagaaaagccattctgtctactgccatccttggttactatcttctgtaaccagtgcccagctgcacagccagagagctgtgggtagggcccatggctctctctggcccctgtgattgctgaaactggaactgcttggggagccctggggccctggcaccagctcctgctcagtcctgcttctcctttcacagggaacatgtctacacaccagctctcctgagcagtcttggaacccctccaaggacagccctggacactggccaagggggagggtgcccctgggaaggacgtatctatcaggaagcagagactgtggcaggcaggcatacacacgcacatgctcgcaggatggctggcttacccaagatttcaaaagaagttggaaatctggatttttatgtgaaacgacttgatttttagaacaccctataagccaaaaaataaacccaaaccaaatgagcatccctatgaactgtgtctgtgggccactatttgtgacctctggtagagcctggcactccataaacacaacaaaagcagatgtgtgaacgtgcccacatgtaactcacccgggctgttcacattgttcatccagatgtggaccctgcacacacataatagagaccttcattggacattgacacacacatagtatctcccgggatgtggttttaatatttgcactttccacctaaggagactgaatgtcagaaagatctctaagatcatgtcaaaatctaggctgcctgaccacaaagccagtgttctgaaccgctgcacaaaccaccacccagatgcctgcactctgaattaaaattgccagttactttgcatccttctctaaactaagctttatgaatttagagactgtgtttcatttgctggtgcatcccatcacctggcactatgcccagcagagcacagaaggtgctcaatacgtactggtgggattgtacccacaggctcatacaaacgtgtacagacagggcacatgtaaacccacatagccccaccatgctgaagaacacatgcacactgacgttcccacatgcacaccacccacctccatctcccacccgccagggcattggaccctaagctggggcagcccaagtttcccctgccagccccctgccagccttgcccaaagccttcagaaatagtttcctggaaatctcgaggcggctgtggtgttctttttcctaactcaggagacaactcagcagttttgtttttcaaagtctgagactcataaacctggaatcctttcttcattttttccaccagaattttccttggcctgttgccttcccccagggccttggctaggaggttacactcggagcgccctctgccgggcactgtcctcccaaccttgtgggcagttgcagatgggacctgccccaggctgctttacagatgggaacctaagtcagatggtggtagtgaggagaggttagaggatactggcccattgcaagtgtgtgccagtgttattactagcaagggatcttttgtgatttttttttacgtttttgaaaataaaagaataaatagcttcaagagctcagatgaaggccctctgctctcccaagggcctctgtgtggggcagatgacagaggtttgggaaaatcacctcattcaactttattcttgggtctccatcacatttaataagtgaggaaatggagaca

SEQ ID NO: 52991 - DNA, 928 bp, Homo sapiens
aattcctctgcagagaatttagtaaatatattattttccctctttaagtgggtatttattgtctttttcctcaattataacataatctccaggagagcagggactttgtttatcttgattacaccatctagaactgtgcctggcatgcaggaggcactcaataaatatttattaaatgaataatcttccacagaagatctttgtgtaccaactatttttttttccttttgggaatttatataaatcattcaacaggagaaggattactggatcaagaaatataaacatattttggctcctgaaatgcattgtcgaattgctttgcagacagataagatcagttttcatttgttgggcaaattttcaaatcccaagtgccaagacagtgatttctggtatgtgggagaggggggaggggaagggagaaaggaaggagggaggtggcggagggcaggcataggccgaatcagagctgctgtccctggtgggtcaatggaactagaagcagcagcagtagtaatcaaccaagcaggcccaccctccacagcgtctcaaaggcccacgcagggcaggaaagatctgctgtatgaacttgggtctggccacaggagccagagtgagcagaaaagctgacaggagcacctgctcttcggcttgctgttgaaatcctgaaggctgggtcaggggccaatgagcaagtgggagtgaggacacaaagtgaggcttggatctggtactgaaggctcctttgcagaggctgtttctgggttgcagctactctgcttaggacacgggatctggaacattaagttacacaaggacctctgtccataaacctccaggaacacagaggcctcttcacgtagttctgctgctgccaggcccattcagcagcatgctggccctgtattcctttgcttcctgctcc

SEQ ID NO: 52992 - DNA, 819 bp, Homo sapiens
taattttattggttgatactgtgaattttccttgaaagatccattatctaattgataattctcaactagccacaataaagaattacaaattgaattttggttctgctctacgtatttatttacttgtccaagtactcttaaagcaaaagctgttaacctttaagacaaaatcaaataaataaatatttagaacgctgaatcccttttgactttcaattaatttatacaactttattctttaaaagaaaataacattttaaaacatgcaattccaaagtaagtcatcattttacaaaggaagggaagatttttggaatacctccaaaacattcggtaaacaaatgtgaacagcacatcttctgtgattacaacattgtccgctagcacacaagctaaaaattgattcctgatgataagaattacactctaaagttaaagataacagagataaaataaatagttttgagtcaaggcattgacctatgaacatgagacatgaaagagtaaatcacaaaattctagattgtaaaatttgtgcattccatggaatctaaattcctatctgaggccccaagtcccctttcccaatgtccctggagtgtttatctcacttgtccttgagtgctgccattgacacagaacttactaccccacaggaaattttaatgatcattattacttagtcaaaaagcaatttcaagtctctactaatacccatcgaagagtatcagagaggattgggttcatccccccataacatctcttcactctctcagtcgcccaggaggctccactccccaggtcctcaaatgtctgaga

SEQ ID NO: 52993 - DNA, 1234 bp, Homo sapiens
aaaccaaatgaatacgaaaaagtgagcaaaaatgacatgaactcatatcatctgtggtataatgtaaagaatgctgaataagggaaagggaaccagcgccctaatctcagttccagcaatcattagccctaaactatggacaaataacttcatgaatatttccttgcaagaaactatgctgtctctgggcatataagggaaatgattcagactcacaaatagtttaatattgaaaatgatagataagtaaacaagccattccagtaaagaagggtttctcaacccctcagcattattgacattttgaacaggataattctttgttgtaggggcctgccctgtgcatggtaggaatttagcagcatccccggcctctccctagtaaacaccagtagcaaccacaaatgtctctggacattgccaaatgtctccttgggaataaaaaatcacccctagttgagaaccgctgcaatgaaatgtgaagaatgtgttaagaaaagaggctatacagccggggcagctaacctagtgtagaagagtcaggggaggcttcccagagaaaggctgtcaatgttgaaacttaaagaatgagaaggaattagccaggcaaagaaggggcaggaggtgacaatgggaaagagcattttcaagcagaataaatgatattgtaaagacctggaggcaagagagactttggtcagttagagaaattggagtgattaatacaaaggggagggagggaggaaagggcatgagatcagctggtaagggaggctgatgccaaggaaaatgaactttaccctaaaggcaaagggaagccaatggaggattttaagtttcaacctatctaaaatgggggattggactagatggtttttaagtaacttctcatctctcacctctggatgcatctgtaggtgtgagtgactgtgtcttaacatcttaccattgtgttttgcattgctgtttgcatcatttctttttgatcatcttttaagtcttctcttattccaaatgtgatataaacgtcagcctcagtgactactttattataaaaatatctgtcagacaatagcataaaactgttttactaacatggttacaataacaggattcagataaaatgtaacaatttgaaattacgtaaagcacttgaggcactttaaagtgtctttcatcctaagcaaaaagaacaaagctggaggcatcatgctacctgacttcaaactatact

SEQ ID NO: 52994 - DNA, 986 bp, Homo sapiens
aacaccaagttaaaataagcaaaaaatgtcaagaaagtttattatctggagtttcttttgtgcttttttgaagaggaatttgaataatcacttaacgtaaattttaataaataacaattccataaaagctgtcatgttgttagctactcatcaaatcaaaatgcttccatgactttctcattcagagatgatactattcacttgctgttctcagaagtagcaagttattttcaagttaacagaatctgttaaatttaactcttcattcgtcataactaagatgcattgaaaaatgaagatagcttgttttacttacgtttgctcctgtccccaggttttccccaggaagattaaaaaacaaagtattcccaaaaggcccatggttggaggtagcaggaaaccacggatataacacttttgaggatagtctccttttaaataaactgaacttgaagaattcagataatctggttaattattaatgtcagaaaggtgaacctctaagtgggaaaactagaattggaactaaaacaccctttcatgcccaggaatacagatagggagtactttacaggaacttacacccagggaatttatttttattaatacaaataaagggaccctaaaatgggaatttggcactatgaagagtggctcaaagctagaaaccagtaagcccattgctttggcctttcttctcttgcccagggcatttgctttgatgttgcatcatctgcaagcatacatctggcaggtccactctaatactgatgaagacccacctggactcagtttcacactgaaatgattttagaaggggcctggtttagacagggctcacaagatgatctttttttggtgacctgaatggcagtgtccttggtgctgcaaatggtctgagcataacctagctctgcaaaggaggtctagggaattgttccttggtctgtctcagtctagagaacactaggtggaggaaagttgtg

SEQ ID NO: 52995 - DNA, 730 bp, Homo sapiens
atgctgaattcactagggaaaaaaggagcacaaagggaaatttgatatacaaatttcactaaaggtatctcttgcatatgtcattgaaatgacaaacatttgccactattgtctgatcatctagcccatttatttcaaaagggaatctgtgaaatgattaagctgggttgcaaaagatgggtcaagttaaaacaaacagtacttttgccatcatttttgggaaatgaaatttaagagagaacaacaacactcaaatcaaggtaggtaatatttgtattttaagtgcaaataagtttgtttgcttgagctatagagtaaatactgataaccaatatttgcaagccattgtcctgtttctctggtagaaaacatttagagaatgatggatctcaaagattctcaacagaactgaagtttaacaatttatagattctaagctgtgtttagtcaaaattttttatctaccttctaaatgtggctcacagatgaacttttgaggctgggcacgctggctcacacctgtaatcccagatctttgggaggccgaggtgggtggatcacctgaggtcaagagttcaagaccagcctggccaacatggcgaaaacccgcctctactaaaaatacaaaaattagccaggcgtggtggcgggtgcctgtaatcccagctacttgggaggctgaggcaggagattcacttgaacctgggaggtggaggttgagcacagatca

SEQ ID NO: 52996 - DNA, 906 bp, Homo sapiens
cccatagctgccccaggtaattttcatgtgcctgttccatgtccagaggccagtggagaaacagaggcgtctcctcagaattaaattattctaaatggagacacgggaatcatacaagttttgttcaagagtggtaggctggcactaggcaggtgggttattctaagtaaaacccagtatttgtccctctgactgctttttggctcaagcccgcagtctcacgttttaatcctttaggagaaaggctctactaaaaggccaactgaaatccaaaaagaactacttcagtaactctccatgggatatagaggagaaaggcactggaggcttcggtgccagcagtttaaagactgactggagagagggcggaggtggagcaagatggctgaatagaaccccccccgagatagttctccacacaggaacaccaaatagaacaactatccacgcaagacagcaccttcataaaagccataaaatcaggtgagtgatcacagtgcctacttttaccgtaatgataaggaaagaggcattgaagatagggtgggggtaggggggaagatctccctgtattgcctataccacccctcctccaaccacaggctgcacagcaggaaagagaatccgtgtgcttggaggagagagagcaaagtgagtgtgggactttgcactggaagtcagtgctgccccgtcatggtggaacataacacaggacagaattctgcaggcgcctagaattctgacagtgcatttaggcaggccttgggacagaggagaattctgtgctccagagggagaaacccaggtcatggctagcttcaccactggctaactaaagtggtctgaggtcctgagtctatttgagtggcagtcaggacacaaggactaaagtgtgtagactaaaca

SEQ ID NO: 52997 - DNA, 816 bp, Homo sapiens
acagtttaacactagctgtggcagccacaggagtatgtatgtcactccttcccaaacttcaggtactgatgcttggggagagattccttctgcttggggaaagaagagagaagagcacagaggactttgtcttgcaacttgggtatcagcttagccacaatacgataaaacatcaaacagattcccgaagcccccgattccaggctttgttcctggatagtgtttctaggcccatcctgggtcagaagggaatccactgcccggttggtacggacttggtcctggcaggattcaccatctgctgactaatgtggccttgggccttgaataaacattagctgcaggcataaccaggcagtagtggctgcaggccttggtgagccccaatacagagctggtctggaaggccatgggcttcaggtatgacccagtgtaatgccagctgtggccagtagagtgtctgcatcactcctcccccagctccagttagccaagcctggagagagatgccttctgatttgggaaagagagggaagagagaaagagactttgcctggtaacccagggaattctcccctatcttcccaagtcttagatacaccaaggctgtgtacctaagagtctgtaagagtttcagtgttcctgggcttagggcacccccaagtgctgagatggctgcagtaaccacaggcttaggccacaaaactcaatcccctttgaattcttggaaaaccttctcaaggacagggacaaacaagcctggactataaagatgggaataaatacctaaatcttcaaggcccagacatggacgaa

SEQ ID NO: 52998 - DNA, 1432 bp, Homo sapiens
tttctggagcgggtgcagcctctgatggtaacatggtccagggtataccttcaaaacgggaggctactggagtgaaaggcgtcaatggtgataacactttaaaaaaaacttcagtgtttccctagcatccagcccagtatctgctaaattctttaaaatatctgttgaatgcatgtcgtgaacgccgtgctcatgggcaagccccagatgaagcctgtgcaagtgcttcttgctttaactcccttgtagcaatcagaggaacatcctctgcctaggattcccaagctccctgaacctcacgcgacagctggagcccaggctgcgtccgctttgaggttcatccgagcctgggcagttcggtccctggagggaattcgctttagatacgactgtcagagagaagtgtgctgataagaacactcgctcatagcgcgcaagcatcagaagtgggggaggccggggaggcgctgcgccggtgcctcaggccgtcctcggacacaggccctgagaagcgtgtccgtgtttcagagggtggcggcggcagctttgtctcagcgaaggccacagcactgcgggcagctgccgcatgaaacctcggctccccctgactctgcacccgacacttcacctgcaacgcaatccgaaggcgaaggcaccgcatcccgtcggccccgcgcggccggaagcctcgcgcccaagactccccggcatcctagcgcgctggctgcaaaagaggcgggaaacgcctccgcgtcccttccaacagtaccggagagggagaggggcgtggctgagactagccccgaccacgcgcgcgcggcccctcggcaaccggcacaacacaacaaaatggctgccgcgccgctgggcccctgaggaaagagcccgaacttctcccgctctacctcagcctgcgggactgctcggctcggcttctaggcggtgagcgtcagacctggccgagcccgttccccggcatccggcccgagcagtgggggccggcggcaaaggcgggaaggcccggaccgggcgtggtgtgggccggcttgggatggattcggggcgggggcgcgtgtctgggaattgggattggacgggaaagaggggagggcccggaacgggcgtggggcggtggatgaaggagggaggtttggatgggaagaggtggggacggcgggggcgattggggatgaagaaccagagtgtggggaggtgtggaagttagggtgcggcgcccagaaggttgtgggtcctgccacctgagctgaggggagagctgggatgtgccagctgtctgtggggagtgagcgggagaaaggacagtttgggcgtcctgacgggttgtcacggtatcggacggagtacagtgcgtggagaaagatgacaggatatggggacgaaatgctaaaagaaggggaagaacaaacacttc

SEQ ID NO: 52999 - DNA, 629 bp, Homo sapiens
gagattattttaaaattagctcagaactaagcctaggcaggttttcagcaaatataagcatttaactaggtttcaaattcacagactattttagttataaaattattcatagaagcacaaattatcaccggagcaaacataatgaagatttgtattgcttttctctattgggaaatgtcctattggaagcaaaaggtaactgttcgctagagggaacgagctgtagtgatctgttgcaaagtttgggcgtgattggcccctgggagcttcctgtgttatgatttaactcgcggagggtggggcctgcccgcagaggctgctggtgattggatgggcggggccgccgctcactcttggccaagaatgtggtttgaggctctgcgaagttacagaggctcggaggcgcttgcaaaaatgtggctgtcagagagggaagtgcacatgaatttgaagacagcattagaaagcgttccgcccacagtttctctgttctcaacggctcagttttaacaggataaattttaagttaaggtatgatattttttctctctctgtacaaaggacttaaaaggaggaggagtcagagatgtaagttcctgtttttacaataactcttttgtgagctccac

SEQ ID NO: 53000 - DNA, 1994 bp, Homo sapiens
caatgcgaacacagtaaaaaaggaataaagttgtaactacattataaatggtcatgtctgtaaccctagcctaatttttgaatgtagtacagaaaccaccagccacagtgtgagccgaagccagtttgtaatgtaccatcaacagccagacacacatcacaactttaggcctcagtttcctcacttatgaagtggagacaacttatctccgagggctacgcggggcaagataaataggtacaaaaatacataaatatgtacctggcccacagttaaaacgcttaaaacactccagctctgtcgtcttctcttagattctagaaatgccacaactttctcttatttctagatgctctgtaggttcagggccgtagaggctgtccacgggcctcacaggaacgcaccaaaaccaggacatcgcaagcacaggcgcacagacccagaccccggccccggcccggcccggctgcagggccgggctccccacatcgacaaggacaccggagctgccccgagacgccaagagggctgcgaagagctgcctttgtactcagagccagacgcggcctacgggacgggaccgccacgtctggggcttgcgggctgcagggcggcgcggcacgcgtgggtacaccctgcgggggcgggctgcggccgcggggaacagcggcgagaggggggcccgcgggagatgcggtcctgcccagccgcgccgagaaggcggggaaggcgaggccggaacacacccttccctgcacgcctcggagcgccccgccggttggggagggcaggaggctcaggccggagccgcgcaggggacacctccgcccccgcccaggagtcctgtcaggccggcgccgcggcgctcaccgccgacccacgggctagccacggcctgacggggcctggccccggggcgccgcccgcctgcggcccagtctccaccgtccccacacacgcccctctgaagaacccggcgcgaggaggtatcagccggccggacactacggaaggcccgggttacctggggggttgctggtggctgggcagctttccgggcgggaggggggcgtcaggaccaggaacaggagtgcggacgcagcgggagagggggcgggggcggtcgaccgaggcgccggcaggtacactggcaggccgagaggtgcagacgcgccggcagcagtagcggcagtagcagtggcagcggtgactgctcctgtgctccctcagtatcttcctcgggctggtccaagatggcggcgctccctgcacagggtttcctgtcaccctcgcaatgggccggaccacaaaagaagggggagaagatgcgcgcgcagctggcggagcccggaagagggtggctgaggccagcccgctagccacgccccttcctcagccctcacctctggacttgtcgcgccgccgctgaggcccgccccacgggcgctcgcgcccggagggaaggtggaaagcgcgtatgcgcaagcgcagtcgcgtgtcctcgcctcttgggggagctactgcgcaggtctgcgtggaacctggtggggtgcgcctgcgtcttggagaactagggttgtcgctcgtggagacttttgaacaatttttaaagccaacatttaccacttattggacgcttaccgtatactggccaccatgctaagcatgcatttactgcattcattcaacgtgtatttatgggggcatttactgtatataccgctgtatgcttcgtatataccggtcctgtccaacaaacgtcggaggcacgcatccccattgtatccatggagaaactgaggctcaggttggtcaactctcttgtccaagatcacgcagctaggaagtgaccctgcatttcatctctattttgacttcactttggggttgcctttgacagggtgagagaaatgtgatatttttcacaatttgtctaccacctgccatcttccaacttgctctgccataatcactgccccagaaggtttcgtgct

SEQ ID NO: 53001 - DNA, 1349 bp, Homo sapiens
aagaagagagagattttagtgcatccttaggacaattcttttacgcagccaaaccctccagcagcaggtcttgcagccttggcaggtagtgagtgcggtgttgctggatgtgtgcaagtactgattgtgtgacccctggtggaggggaggaaaggggttgaaacatcaaatggggatttgaccagatgaccttgaactccccctgaggctgacattctgtgccctttgtttacaggtagtgctcatagctctctttgtccagtgcttcggccttggtcccagcgccttcccacggagcagcactcttcaccctgcacagccttgttaggtaggtagagcaatacagacacctgtcgtcctcttaaaccccgccctggctgcccagggaagcctggaggggacttcagtggtggaagcagccgctgtagccacagtggattcagtgggagtccctgaggtcttcctaataaggctcagagtgcgtctctgctcctttcctgtccttgagagggaggtcaggcgagagtgatcttgtagggaggaggccgggactgggctcggtgcccggatgcctggctcccaccctggctgtgctggttgcttgctatgtgactttaggagagttgctttccctctcaaggccttggttgctattctgtagaagagcagagtccccataaagaggaggtgcaggaattcttcccagaggctttggagaggtgagaaaaatgggggtccatttgccaagtctctggacttgttgaccagaggaggagcacctgaggtgtgtgagtcatggggaagcggatgagtcatgcccgctggggccagctggcagggtggggcccacctgactatcagattcacaggtgacctgctgaagtaggtggggaggtggggggaggagtgcagagtcctgggctggaagccaggagactggctcacctcccagcttcagcctcggtttctccacctgtaggatgggtgccttggtctccccctacccacctaacaaagctgctgtgtggacccaacgagcttgtagatgccaaagggctttgtgaccagtgagacaggaaggatcactactagggggaatcgcccagcttccaacacccaaacagaagtgaatttctaatgagcaattgtgcaagaacccaggaaaacacccctccaacccacgccatcccttttctgccaaaaggagaaggggatgaatgaatacaggacttacgcgtctgctgtggcccagctggcttccagatggtgacatgagccacccacagccggagctgttcctctttcccaaagctcaggtgaaagggctttttggtggtccccaggatgtt

SEQ ID NO: 53002 - DNA, 1269 bp, Homo sapiens
tagcagtcagaccccttctccccgaggtatccactgtctcaaccccagccatgcttctccaaactgtttacgcttccttgtgcaggccacacccccaagcctttgcgtctgttgttcccaccttcccaaaagggaaactccatttatcctccaaggctctgccccaatgcccctcctccgtggctctgttgggccatgggtgctccctcctttgtgctcccagggcccacaactgcttgaatgactattggtgttcctgtttgtgtgccctctgggccgggaagtcagagaaagaaaggagacaatttgtgattgaacagccactgtggccatcattctccttacctgtctgatgagagctgatcttcatgccactgtgtacagtaggtattttttaaaggtgtgtagaagtgagagtcagacttcggacttcagagtcagacagccctgaattcctaatggtgtaaccttgggctgaacctctctgagcttttgttcctccgtctataaaaggagacaatgccagccatgggttttggggaggattcaacaagacaatgcttataaagtacttatcatcacaatgggcttctatgagcataggaggtgttatttgcagatggggacgttcattccggggacgtccctatctagggccccacacaagggagtggctgagactccaagtcttggagcctccgactccaccctgtgttctccctcccctccctctcttggccccctgggcctattctcttccccagatcagggaaagctttgtttggcgattgtttttcctaagaagtttcctctgtggggcctctgggtgactcagccctgagtcaccgggaggctgaggacagggggaggagtgggagggaggcggagggaatggagagacgagaagaggaaagggctctaattctagccctggctctcccactgtttgatcaactaggtctgaccaggcccctctcctgcctagcctcagtttccccaaatgtgaaaggaagatgtgggcccagtcctggctgagcctcagaatcagaggttcccgggccccaccctagacctacagactcagaggctaggggtggggcctgggaatctattgtttcctgagctccttgggtgatcctgctgcacacctggtccacagaggtgttagggaactgctcggctcaaactggctcccagctgggcctcagagcagctcggcctctgattgaacttcactgacccacagggagcgcccttctcttgcagaat

SEQ ID NO: 53003 - DNA, 796 bp, Homo sapiens
ggctaattggcatcctgtagaaattatgtagaaaacatctaactgtatggtcagataaattcatgggcaacagtggattttaaaatgttcgagtttgtttactgtaggacttttaacttgttcatttacaggggggcttttcatgaagatgatctggtttgggaaatgctaagctagaagttcataaactctttcggtactatcttgtgggaattctcttggaaaccattggcccagatgtttcccagaggccctgagatgttctgagaggacccatcaatatcctcccctgattctctaaggctcatcttggggaagaggacagaggagagggaggcagtaggaggacagagagaaagggagacggtggggagaaagagagagagagagacactattatgattattactctctaggccccctgggccctgggccagctgatctggaccttggccttggcagtgagaaggctgggactgaggcccagcactggctggccaggagctccttggcacgggaatgccctcagggtggcagcttctcactcactgagtaacctaggtcaagtaatttaatctctctaagaccctagcttccttatagatactcagaaaaagataacaactttttttattacttaagactattctgtgaattaaataatctatgcatagttctaagcacaaaatacatgctcactaaatggaccacagtagtgttgtgattggtgtcactggccagccccaggctggacaccaggagctctagtgagtggtcggctctgggggtctctggc

SEQ ID NO: 53004 - DNA, 4151 bp, Homo sapiens
tgataggaataacaaagtgttcatttttatatattattgtttttggtttggtgctagcattcatttgttgcttcagtggctagggagaatgcaatgaaaatatttcgggtggggcggtgtggtaagacccctggcagcctgactgtgagactttgggcaagttacataacctctttgagcttcactttctcacttgtaaagtggggtttcatcccactccatcaccttcaagaatgttcaaaatccagagattctaggattctgtttcccaggacttggacgactccgtgtctccatagctccaccaggtggcgctgccgggcctcgtgaccacttggaaaaagcagtgtcaccagaacgctgcggagacctgccagcaggggtcacactgaggttgcctcgtggtgtccctgcctctgcaggtgacctatgaaattcctggcaggcccagcacagtggctcacgcctgtaatcccagcactttgggtggccgaggcgggtggatcacctgaggtcaggagttcgagaccagcctggccaacatggtgaaaccccgtctctactaaaaatacaaaacttagctggccatggtggcaggcacctgtaatcccagctactcgggaggctgagacagaaaaattgattgaacccgggaggcagatgttgcagtgagccgagattgcgtcattgcattctagcctgggcaacaagagtgaaacctcgtctcaaaaaacaaaaaaaaaaaaaagaaaaaaagaaagaatccaggcagctcagtaacaatagaggtaatggtgatattagtaagataataataataattatgacaataagagcagctgccacctacagagcagtccctttgtgccgggccctgtgctagactttcacgagtaatctcgtttgagcctcacagtactttgaggtaggtactatgattatccccatttttcagatgggaaaactgaggctaagagtggttaagccagttgtctgaggtctcatggcccggaaggggatgaggggcctgatttggggtctgtgtctggctcctcccctcactgtactgcattcctttggagctgccttgacgatcctcagcgaaggacagacgggctggggcagggcatggtatgaggagcccaggcaggaaccctgacccagagtcccagccctgccttctagtggctctgtgagttgggcaaaccatttaactccagtccgagcccaagtgattaaaagttcatcccatggcctaaccacaacctaccacactgcggtttcctggcttgcctgagctggggggtgggggtgctgcacagcatctgactccagctttgctcctgcagatctggagaatcgaaggttccaacaaggtgcccgtggaccctgccacatatggacagttctatggaggcgacagctacatcattctgtacaactaccgccatggtggccgccaggggcagataatctataactggtgaggttctggggccattggtgtgtgtcgtgggggtactggctgggccctgagcagggctgaagacaaactgagggtgtgagggcctgaggtgggaccaccactccctgctgggagaggcttttgtccacagggcaacaccatttgcttatttctccaaacaactttgaaactcttcttaccaaatgattatacatctattgtaggatatagtgaatgtggagaaacaaacagaacatctcccacaaatccatgacaagtactaggcacactagggtttatcctcccacacatatttttcaagccaaaatttttttaaatttatatttgtttatttatttatttatttatttattttgagacagagtttttctcttgttgcctaggctggagtgcagtggtgcggtctcgctcactgcaacctctgcctcccaagttcaagcaattctcctgcctcagcctctctagtagctgggattacaggcacccaccaccatgcctggctaattttttgtatttttagtaaagacggggtttcactatgttgaccaggctggtctcgaactcctgacctcagatgatccatctgcctcagcctcccaaagtgctggggttacaggagtgagccaccacacccagccccaaaattattttaaaacagagaatacatttacatggttcaaaaatcaaaacagaatataaaggtatttattgagaaatcttattcccacccctgtccctctctaccccattctccagaccccaccccttcttgggtaactgctttactctcttgcatatccttccagtaactcttcgtgaaaaaaaatacatatgcaaataatttatagcctggtccctcccttccttacacaaaaggtagcatactttgtatattgccctgcaccttgcttttctgactccattcttcctagagatcaataatgtcagtacatagagacagagagctttctcattcttttttacagttgcataatagtcctttgggtggctgtactatagtttatttaacaaattccttgatgatgcatacttgggttgattccagtctttctctattacaaacattgctgtgattagtaaccttaaacaaacatcactttgaacatgcagagacatgcctctagagtaagttcccagaagtcagattgctgggtcaaagagtaactgcacttgtcattttggtagatagcccccaatttccctcgatagtgttcgtagcattttacattcccaccaagcaacctgtgagagtccctggttccctatagtcacactcgtggattgtgtggtcaaacttttgggcgtttgccaatcttatggtttataaaatggtgtctcagtgtatttttaacttgtatttctcttactatacagtctaaaactttttgtctgattattgactgttggatttttttttttttttgagacagggtcttgctctgttggccaggctgtagtgcagtggtacgatctctgctcaccacaacctctgccccccggggctcaagcaattatcgtgcctcagcctcctgagtagctgggactacttgccactactcaccaccacacccggctactttttatactttagtatggatggggctttgccatgttgcccaggctggtctcgaactcctctaagcgatctgcctgccccagcctcccaaagtgttgggattataggcatgagccaccacgccaagctggattccttctttttttaaacttattttgaaataatattagacacttgctgaaaagttgcaaaaatagtacagacagttctcatatatccattacccaatggaatattcacctatgttcacatcttacataacccttacataaccatagcacaattaacaaagccaggaagtgaacattgacacaatactacttactaatctataggctttacctaaatttcctcagttttcccattaccgttttttttttttttttttagacagagtcttgctctgtcgccaggctggagtgcagtggcatgatctcggctcactgcaacctctgcctcccaggttcaagcaattctcctgcctcagcctcctgagtatctgggactacaggtgtgcgccaacacacccaactaatttttgtatttttagtagagacggagtttcaccatgttgggcaggctggtttcgaactcctgacctcaactgatctgcctgccttggcctcccaaagtgctgggatgacaggcatgagccatcgtgcccggcccccactactgttcttttcctgatctaggatctaacccaggatcccacatggcatttactcatcatgtctccaaagtctctgaatctatggcagttgcccggtctttcctttttttcatgcccttaacacttttaaagggtactagtcagttattttgtagaatgtctctcaatttgacaaccccagacatttaaaaacagcttaattttttttttgactagataacacattcacctggtacaaaatgtgtgagaagactgttttaaaaattagctgcatcagcgcattaataggtcagattttgtttgcttatacgacgacatatgttggttatggaaaacttagacaatatgcaaagaggtgggatagaaaggcaaaatccccctaaatcttccctcta

SEQ ID NO: 53005 - DNA, 3380 bp, Homo sapiens
tgcaccctgatgctgaatctcacttccccttccaggcagggtgcccagtctacccaggatgaggtcgctgcatctgccatcctgactgctcagctggatgaggagctgggaggtacccctgtccaggtgagcccagcccaccgcctctctgggctgcagcctgagccttgtccttctcttcactcatctgtctgactctcatccatccattcgtttgtccatctgtctgtctgtccatccatccatccatccatccatccatccatccatccatccatggaacaggtatttatttagggcttccatgtgttccacactgcatctgtagccatggacacacagacacactgtccctgccctagtggactttgctgtcttgggtggtagtagacattcaacacacaggcacaccaatggctatgacagatgcagtgagtgaaattgacaagaccttgggagagagacatgggagaggccatgtggctgagcacggatgtggaaccagcatgcttgggtttgaatcctgtcctcacctctgggcaacgttgggcaagtcacttagcctctctgtgcctctgtgtcctcaaaataggggtaataacagtaccatcccacaagattgctgtgaggattaagagttaacatttgtaagcatttagaatcatgcctgccatataagaagtgcccccttatacatatgtgttaagtacaaggaggtaaatcctaggtaggatcctattggattagaaaagcccacccctgtcccaggaggggactgttcaactgggacctgatgcacgtgtaggagttgcccaggcagagtgaaggaaagcacattgtgggtaaagggtggtacacatgcaaaggccctgaggtgggagggggcattgggtgttaaagcaaggggaaaatgccatgatttgaggctagagaggtgctcagaggggccagaccaccagaggccatagtgacgatgttgaccttgatgctgagaacaacaggaagttgctgaatgataagtctgaggtgtagggatttctggtttaaaaagtcactctggccaggcgctggagggcagcagagctggtttgtggaaatataggggaagcggacaacaactgtgcttcctccgtcctacggtgggagtgggcagggctctagattggcatcgggggttcgtgccctgacctttgactatgatagactgggtgctgggcactaaatgagatgatgaccatcttagctcagtgcatcctgacaacagccttgggagtagcatccttggctgcatttttcagaggaggaactcaagaggttgagacacgtgcccaagttctcaccatcagggtggagttggggtctaagccctaactcagcggtggtgggtcgtggtgggaagcgactgccatatgcctgacgtacatgtgaggttttcttctggacatagttagccggggccacggtaaggtgccgcacacagggcaggagcagatgtgagggtgtacatcttccctgcctcactcccaccaccaagcccctgactgctgcccgcatctggggtgcactggctctgcaggagggggttttctggatctagaatgctctgttcttaccactccaccagcagtcatgcccaggcctgacgtcagcattctggaagaatgtccaccagcaatccctgtgcttctatttaagggaacatttgcaaacacaggctctcctggttcttggaccaggctgaggatcaggaaggcatgtcgtcatggagatggagagcagcccagcagcagtgccctggggacctcagacaatagcactgtctccacccttcctggaattctggtgtccctgcctgtgtgttgtcgggtcacattccatgccacacacagacacaagcatgatggcttcgtctggagggatgggcccagtgcgacatagaaggactgaagcctgcccccaaggtccctgacttgctctcctgtctccctgccagagccgtgtggtccaaggcaaggagcccgcccacctcatgagcctgtttggtgggaagcccatgatcatctacaagggcggcacctcccgcgagggcgggcagacagcccctgccagcacccgcctcttccaggtccgcgccaacagcgctggagccacccgggctgttgaggtaatttccaggtcctggaacacagaagggattggcctccctgaaacctcccagctcaatgaccagatctccaggcacaggaacgggggcaggggatggtgaatgacggggtaagaagcagctttttgtattttcctgccgtggccacagggttgtctgtcttagactcccccctgtttcaaggatacccagtgtcccttgcacactttgcacagtggacagctcactacctaccattctgtacaatcagcatgccattcctgattacgttccagttgcctactatccctttcacggaggaaggcacagatctggacttgattcccaggatggtctgagcagcctagaggggaatgggactctcacctcctttgttctgggcattcaacttctgttaatgcagccctgatttttagaatcatgttggctagtcacagtgcattagtgactcatgggagtcaaccaaggccatcagggtccaaagtctgtgccctcagctctgatgggctgtgttcctccaagtccccacctgagagctagtcctgctgcggggtctcctgggctgtgaggagggggctgagggctttttgtctggttcctgattaaccaagctgtaccctcccaggtattgcctaaggctggtgcactgaactccaacgatgcctttgttctgaaaaccccctcagccgcctacctgtgggtgggtacaggagccagcgaggcagagaagacgggggcccaggagctgctcagggtgctgcgggcccaacctgtgcaggtggcagaaggcagcgagccaggtaggagccggggtggggggcctgctgctgtccggatgcagctattaagtttcccccttctttccttcagcttgggggctctaaatcctcccctccatcccacctgagggcctgtcccctaatgtatgttaaataaaagcagttgcattaaaatgagggctgtggccagagagagggaggtctccaggagctaaagaaaggagagcctagcctgggcgtggtggttcatgcctgtaatcccagcactttgggaggctaaggcgggcggatcacctgaggtcgggagttcaagactagcctgaccaacatggagaaaccccatctctactaaaatacaaaattagccgggcatggtggcacatgcctgtataatcccagctactcgggaggctgaggcaggagaatcacttcaaccc

SEQ ID NO: 53006 - DNA, 757 bp, Homo sapiens
tgacatgttagccacatgtagctcctccttacatacatgagtatttataatgtttacaaaaatctgtgaagtaggtgttaaaatatgcctcctgaagttctaaagtaataaggctaaagaccttgtaggaagaaacaaaagaaaaccaagcaaaccatgaaacaaatgaaatttgttgtgtagtaatttttgttgggtaagtttctggaaaggcagttaaacattctttccaagatgacaacacaggctgattagtccagagggctgtagttgtccccgttccccatcagctgatttactttcagatctattaaccttagcactactggaaatcatgtggagtaataaatccactcatcactgagattttattattgtaaagttcaacagataactggatttcctctgctgagaatctgactgtgagtcataagcattatcctacacaataagaaaggatgggctaaggaattactgaaatacctaaactgccactttttaacggacacttttttccttctgccttcacagagtgcaaataaaacacttcatgttgtaaattgatgagagcagtcctgcctggatggggcaagacagaaaggctggaagtttagtctcaaaaacacatgctattcagttgcagcagcactttttaggggtaacagtaggccaaattgaaaagtcttggcaatttttgaactttcttcttaaaaacatatgtattcaggattaagtgttacttttggccactatgatt

SEQ ID NO: 53007 - DNA, 3542 bp, Homo sapiens
gttttgtagacttggtcttccataagttaatttatgaccactgatggaataactcagattaattattgaagaagttacaaagttctctccaatctgattggctataacaactgaaataaacaatcagtctcccaaagggttttatttgttgacatggctcttaattacagtgatacattctttgcaattacttgcattatttcattacaaagtgaatgcatcgcctttaagaaaaactagtcttgccctaggcctggtgctatttacctacctaggactaattctcagtaaagacaaagaggcagagtttaggcttttaaaattccactgcttctttcacaagcagccttctggaagtcatcactgaagctgtgttcctccaggctttttttgtttattgtctctcaacttaagtaaagtactgaagttagacaaggttctacattttggtatccatctctgggatagggaaaatgattcagaaaatcagatagccggggtttgaaacagggctgaaaattttagaaactgtgattttgccatgtgagccgcagtatccttattgtgaaatggtgaataatgactttttccttgtagagctgttacagaatgcaattagataatgtttgtaaagcacttaaactgtcttttggcacagggaaagcattcaataacctctatttaataaattccagcaatacctttcctagtagcgtcaaatttgttaggtttacattaaaaaaacacagactatgcaaaattttatttgtatgtctaatttttgagaggaagtggtggttttcattagatcttgaaagatttctgtctaaacagtagttaagtgtagaaccaaggaaaaaaactggaagttaaaaactcatctatgaccacttgtctgtaaataaacattaagtacaaagatcatgttgattctcaaagaactccaagcagatttgccactgcagtttcccaccaggaggtcagggtattgaggaatgcatgctaatacccacctttttatctaggaaaagacaactaactatcgaagaggcagttaccacccattttttccctattcaagttttagaatcagtcaaatctagatttaaatacaaactaagtgactttaagtaatttaacttctttgactatcagtttcatcaagtataatatggggataagaatacctaccacatcatctgttgtgaagattcaataaaataatatatacataaaatacgtggcactgggggggtcgcggtggctcatgcctgtaatcccagcactttgggaggccgaggcgtgtggatcacttgaggtcaggagtttgagaccagcctgaccaacatggtgaaaccctgtatctacaaaaaatacaaaatcagctgggcatggtggtgcacgcctgtaatcccagctacttgggaggatgaggcaggagaatcacttgaactcgggaggcggaggttgcagtgagcggagatcacactccagcctgggcaagaaaagcgaaactccgtctcaaaaaaaaaaaaaaaagtgatacggagcctgacctatttagtttcaatttttgttgttgtggttgccattattctcatcaactcctccctgttacactctccatttgggaagataacctgcaacgttattagtagacaaaaagtgaggaataaagatttctgtaattcctttgatgctcctgggaaggaactgaacacagggatccctggacaagggaaatggaacttatagctaagatgctgtggataaagctggctttacaaataatcagaatagatgactccaatgtcatgttctttgaggggtcctggaaaggaccacccagccctctaaattgctttcactgccatcctgcctgaaattccatctttagaaacactgtaattcctctggatcactaagagctcctgagtgggtaccaggactcctgagaggtccaccatctctctttattggaaccccctccccagagtaccagttcctccacaggggaacgagactgagccacttacagctcctgccttgaagactgggaagggagggtgggggtgagggtgggagaactcagggttcctggcgaggaacaaaagccgggaaggagagttctccaaaacgcagaggaaagcggagggggaaaaatggggcagaaagtggagctagaaagagaggtaagaagaaagccagagagacttcttccttctgcaaatcggtctaagtttcgggaggtgggattgggggaggagggggttcaccctggggccaggccagggctgggtggaggaggcggccttcgagagagtgagtcgggaaagaaggggagtgggcaaagggtgagatgtggggtcccggtccccgcctcgctggctgccagttccctctgcgtttcctagtccgcgtgcgtgacacgagatagtgcagccctggcatggggcttggcatctggcggccgcgagataaccagggcccgtgcgatgggaaacgtgccgttggcagcccgccacccctccatcgtgacctcagtctgccaaacagggttcgtgatgctcagtttactagggaggagccgcggctttgagatctcgcccagcccgaagcagcggagactggccaggagcccggctgtcagacctcggagcgcacgctgcgggcgggggctcggtccacgggggagggtcaggggacgcgggactcacccttgaaggagtcggggagccgctgggcttcggagtcccgtgtgtgccgcttctcggccatgctgcccgagacgcagtcgcactcccccgtcctcgttgccaaacccggagccgccgggaatgccctgaggagccagaggcacaagacccagattgccgccccgcccccaatcgaggtcccgccctcgtgagagttggccaatcaacgcccaggatcgaggaggacccacctcccaatccccgccctcctgtccctccacggcgcgactgcttcgcagtcacttcccgctagttctgtgggctgaggggcgtggcctgaggggcgtggcctgaggggcgagagcccccaaggctgtgggtatgaggccggggccctgcaccggaagggagggcggaagccacgggacgtggagcagatggtgaggatagtggggaggtagcagcagaggatgacccgaggcaaaagtgcaagtgaagaaaagtcgccttgccgggcagaggtacgggaccaaggcgcctcctctgggctgaggagttagagggaagaaaatggcgccctgtcatgagggcgcgaggtccgagttgaggggagaagactgagggacacagaagtggccgaagtgagggcgctgaggtcagcctgagctgagagggccggcagatcacgccgcagccgaagtgaacgaactcgagtgaggtgtgttaagaaaatcaaaatgtataaatttggaaaaggagaggaggccgggcgcggtggctcacgcctgtaatcccagcacgttggaaggccgaggcgggtagatcatctgaggttagaagttcgag

SEQ ID NO: 53008 - DNA, 2062 bp, Homo sapiens
ccccttggccacaagggagtccattcagtcggtggggtcatttattcaaacaaaatcttcttggagcatcttccatgtggcagggagtgtgctaagggcctcgtggagtttaccttatactctagttgggagatgggccacaaacaagtaattgaatcattacacatggtgaaggaagctgtgaaaggagtggaatattcggagaacagcaaaggttaggacaggggaacacctctgtaaggaaggggctttgagatgtcgcctgagaaatgagaaggagccagcctggggaaggggaataagcggtgcaggaggtgggaaagggtatcccaggtagagggaaaagcatgtgcaagggcattcccaacctcaggccttctcttggggtgtggctgaagacctcatatttggaaagtaggctgtgtttgcattagacttgttctattgcacaatgttcaaagtatgttaatgtacacaaggtgcacttataaaaacattcgattttgaaataagtacagattcacaggaatttgcaacaacagtacagagaggtcacatgtcccctttacccagtttcccccaatagttacgtcttacttaactagagtatcaaaaccaggaaattgacagtggcacaaaatgtatttatagttctgtgccattttaacatgtgtagattgatataaccacagtaattgatacagaactattccattaccacaaagatctccctcaggaggagcacttctttcttaatgtgctcaatatttggctgtgtactacccaacaccttgtggtgcttaggtcatatgaaatggtagactttctctctgattttacagctctggagctttgtgactatcaggacggaaacgggagcagacacaacaggtgttaagagaggcattaagatgatctttgcttgcaggaacaggctccagtgtgtgatcaaaacctgactcagagcttgcagttgacttttagtcaaatactggccaagaactgtttgtattcctgggatggagtgcagcttgtgcagtcactttgttagccttctggagaagataaggaggggagtacagtaatttaatgatcccttctctctaaatcatccttgagaaagtccatagcttcatttttccattctgtaacgaataagccctggagacataaacttcccgtttatcctgtcattcccaggaaagaggagcaaatacacaagaaactaattaaacccttcggtagaggaggccttgattacaaattgcatattgtgaaaaaggatttaggtttcatttttgttggaaaggaaaatggtatttcaaaatgaatttaatatgtgtacccctatcagttacctaagcccaagtctcaagacaatcttaacagtgtagtgtcccttctggagaattagaagtgtctccctttggggtaaagactttggtaaacacttcttggctctggtttcagattgcatcagttctaaaactaattcctggccctaaactaagaacaagctttgacttgatttttaaactgcttttagaatagagtttccaattttttatttaaatatgcttactctcacttgcccatgaaattggtgtattctggctttctcgtgcatattctgttataaatgtattgattaaatgtactttaaaaatcaatttctcactcttaagattagaaaaaaacaaatattagtacatccctttctccttttggaggatttttaatcttaaattttctcccagtaatgattagaagttagaatgattttttttaaagaaccttatggccaggcgcagtggctcatgcctgtatcccagaactttgggaggctgaggtaggcagatcacttgaggtcaggagtttgagaccagcctgggcaacatggtaaaaccccgcctctactgaaaatacaaaaaattagccgggcatggtggcgcatgcttgtaatcccagctacttgggaggctgaggcaggagaattgcttgaacccgggaggcggaggttgcagtgagcggagatcatgccactgcactccagcttaggcaa

SEQ ID NO: 53009 - DNA, 432 bp, Homo sapiens
ggacctgggcggctccccgcgggacccacctgatccgcagaaccagggcgccgagggccggcgcgcggtgagctgggctgagcaggaccgcgcccagctcccggccccggcgaagccctacgcgctctgatcagccaccgcgccgcctccgcccgagcggaggcgcgtcctcccgcccgtgggccggccggccgggcttctgctctgggcagagcgcagcgggtaggggcgcgaggagccggcgagcgctgacagcgggctgcgccaagccggtccccgccccggacacagacagctggaaggccggcgagcgagtgcgtgagtgagagtgtgtgtgtgccggggaggcggataaaatccccggtgagagtggctgggcctcttttgccttctcgggcctgcacgtggtggtggtggtgtaggtgatagagc

SEQ ID NO: 53010 - DNA, 2372 bp, Homo sapiens
ggagttcaccgtgcaggcccgtccccagcggccgaattaactggttctgtctgtacgactgggagagcagctctcgctaaaaatagcgccctgcccagctcgacctgcgagccgccgttggattctgagccgggacggctcaaggagccgggagccctgcacacccctcaccccgggcctggcccgggaccgaccacggaggcggaggccgcgggcaccgcgctggccccacaggtgccgcggagggtggcaggcccgctggccgaggcactgccgaggccgtccgagatgggagctggcggtgcctccttccgcgccctcgcctgggcctccctgcccctgctggggcctccagcctgcgcgctctgcgaggacacgctctgctgcggaggtaaggccgtgcgcctccaggcgcgccctcgccctacgcgggcacttgcccggggcctgtttctcctccttggccccagatccgcgactggcggcaaggtgaggacgaacacaggcatccgcgtagggctgggaaaaggaggcaggagctctcagcaaacccacctttagctggaaaacgtcgctgtcccgccaccacggtccgaaaagcgttcgccccgctctggcctcagtgtgcctatctgggaaatgggtcaataagatagtcacgctttaatattcagtcacgcttgctgaagcgggtcgcagacgttcgcgggacgttccctccagccagctggagtcctcgggagtttctgttggtgggagtgctggggtgccttccctgtgacaccccgcactgtccccttcccaagctctagttccccccattagtccccggctcctgaggttggagatccacgcagggcgcacataaaagtttaaggggtcagcggatgcgggaagattctagcgggaaggggagctgtagggtggaagagggataagtaaagcaaagtcgcggcccactcctcggtcccgtaccctcatagcgccgaaacggaagcagaggttatctctggactcctggaggcctggggactccgggaggggagggggcgtgtggtcccgccggcatctcgggccggcaccaggctggggagcgtgtgctcggagcggagggcctcggctctgcccagtccggcctgggcggggcggtggtggggaggtcgattgaccaaacaggtgcgcccccgcccctctgctccccgcccgcgctgggtcccgggcctggcgggcggagctgtgggcggctgggcctgcgattggcagggctgggcaggccgggtggccgcgggagcccgggagccgtagagcggcggcgccgggggaggcgcggagccggccgtagcgcgctcctgcctggccagccgcctactccgcccgccccgctccactcggcccagctggcgcgaaggaaactttcctgcagccgcccggcgacaccgcgactccgccgcttcgcaaccctggccctgggccgctcaggctccggagcctttgggatggcagcgcccagcggcccggcccgcgcgtagaggtaaaagctgggggccgcggctcaggtggaggggggctcggtggtttgccgggatccgagcggcatcccgggttcgagaggatccgggggctccgatgcgaggtgttggggtaggggactgaggaatgggcggcgactttgctttatttaccccgcttttcccctacagtcccctctcccgcaaggaaatctgcgcgatgcattgagcctttaaactttcctgtgcgccctgcccagatctcgaccgccgggacccagggctggcgctgggttcttgggagagtacaatacaggggatcgcgaggaaggcgcccccagctggggcccgcgggcggcgggagttgggggtggggggtgccagcctaccgatccccaaggcttccagcggtctcccaaacttcagaccttcctcagctcaccctgggaattggtgatagggcagccaaccaaacctctttatccagagccaggcaccccctggggcacccaagttttgggtgtttttgttcaatcctggccaatcctaaattatcagggaggcgattggcagggctgggtcgttgaagtgaggtctcttttccgtttcctgggctgctctggaccccaccttccgtgaaaacaccttgggctaagcagagtgggaacagggaccaacgccacctgcttccagtgctcagcctggtgggaatgactgcagggtgttctggtctcaggatggtccactcttgagctatctggtgtgagccatatggaaactcctctccctctggccccttctgctattaaggagggaaattttaccttaattttgattgtgagtgggtgagtaggtagcttgtca

SEQ ID NO: 53011 - DNA, 565 bp, Homo sapiens
agcaatcctcccatctgagcctccaaagtagctgggactgcaggcaagcaccaccatgcccagctaatttttttattttttgtagagatggggtcttgctgtgttgtccaggctggcgaactcctggcctcaagcaatcctcccacttaagcaatcttcccactttggcctcccaaagtgctgagattacagacatgagtcaccaccccatcgttcctttgttgcttcctgtcctacttactattgccttatcagtttatctgtctctgcccctgcccctgtccttagacagaggcatcctagcacaggtgcctcatggttttcccctctgggtgaccctggagcaagaccaacctcttaagaggggaggggagggaatgtgaataagtaaataaataagcagatgaatgagggactcttctcagcatctttggtgaccctgtctgactatcactggctgtagaatgtgtgacaactgagtctaccaggcaacggctgtttgccgggagcagcaggacccagccagaagacataatggaagcaggccctggccagagcagggacc

SEQ ID NO: 53012 - DNA, 921 bp, Homo sapiens
gaaatcttctggtgcgatctatccattttagaattagggggatagaggcctgggtttgcctaaaacttcatgacaagttcctggcagagctgggattcaaacctggatctccagggctatcttggtccttggctgcaacatcacccacttctcagagccaccctgcttctcagctccaagagccaagaattcccagctctgcaagaatcccagttttgcagccttggctcctcctggggctgggagccagcaacgccaagcctgcaggttcccagagagggctcctggcgtcggtgtggcttagtcacagggatgagatcactactcacctctggataggggaggatgccaaggtttgggaactttcactctgagctacttgattttgtgtatgtgtgtgtgtgtgtgtgtgtgtataagaaaaacaaaccttttggttgggactttgtacttggctcatgaactgtgggcttggggaagctgctgagccatgataagcacttgtactgtgccatctcacagcttcccaggatagtggctctgtgttaggaaggagcttggaccagagccagaacctggtgttagcatttgctctgcctcacattggctgtgtgaccctgagtacggtgcatggcctctctgggctgtaatgataatacctagcagctcacactttctgagtacttcccatggaccagccactcggctcatcagcccatttagttctcacaatagacctgtgagatcctgttttcacctctgttttgcagatgaggaaactgagtcccagagaggaggagtgacttgcctaaggtcacccagctgggaagggcagagccagggttggaatgcaggtcttcccaactccaaagcctctcgtgtcaggcactctgctgccctgccctctagctgcagggctac

SEQ ID NO: 53013 - DNA, 874 bp, Homo sapiens
aggatcgcttaagtccgggaggaggttgaggctgcagcgagccggagccgtgatcgtaccactgcactcccactttggtagcagagtgagaccctgcctcaaaaaaaaattattatttttaatgtgaatgatttttctcttggagatacacagggtctcaaattggccaaaaaaggtgtctgaacatgggtttttaagggagctgctttgatgaatagagaaaggggataatagagaaaaagatttctttaaggtgcttgaaatttatcttttgcatggtatccacagtccccgtgagcttgtttctgctgtgtaagtcaccggggtgagtgtctgttgaagcaggcatgcggggtaaaggtggggcagggcggaactccaacaagtctcagctgctgctcctccctctctcccttccgagaaccgccagggtcctccttagagagagagcctgctcagcctttggggaagccacaaattggtgaagttgctgtagacagcagtgtgtgtgtgtttgtgtgttgtgtgtacgtgttggtggggggaggtaagaggtcaagtgggtttcccagaggaagaaaggctagagccaggcccaggaggacaactgctcaggtttctgcaaacaggattgcaaaatcacttttcccgagcttacccagttctccatcggagtcttgcagccaggtcagctgggagcccccaagcttggcagttaggacacttggggaggtgtggggaggggggatgtcaaatcctgcctcagtttccccatttgtcctggctattcctagagccccatttatctaggctatgctttcggacaggaaacagagggatgtggaaggagaagatgcaggtttgggataagagt

SEQ ID NO: 53014 - DNA, 1159 bp, Homo sapiens
gtggcgcgatctcagctcactgcaacctctgcctcctgggctcaagcgattctcctgcctcagcctcctgagtagctgggactacaggcgtgtgccaccacgctcggctaattttttgtatttttagcagagatggagtttcaccgtgttggccacgatggtctcgatttcctgaccttgtgatctgcctgcctcggcctgccaaagctttgggattacaggcgtgagccaccgcacccggccccgtttgtgtttcttaccctccccttggctccttccatagaagcaatactttttgcagtctgggaatctctggggtctacaagagggggatcttgccttctaggaaaactgcctctcaggggcaagatggctgcctccagaagtgtgtgctttgaggaggccaggatggggacctccaatacctgacacagggcagaattctattccttgtgactcactgtctcgaaggttacgtgggttttgtcagatacgctgggctccatggccgggagccctccactgccctcgtgtcggggctctgctttcctgtctctctctcgggaggtaagatttccacttctcagggctggggctgccgggtggattgagcaatggtgtgggtgaaagcaaaacagaagtacacaaactaataattaacagatgtcaattgttaatagctgaaaaataccaccaccaccccaccccctgcccccaggagggaggagagcaaatggtcacttgatcccttggaggagattatttcacagccagcttggggcaggtttggccaagacagtgacaagtactgtggggtatatgggcaagggggatgggaatagtgccattgccagggccactgggctttgacttactttgattcccttgtttaatgctcacagccttaagagtcaagggcagaggcattcctgagaatgagcatgtgggtgcctgggggtgtgcacgtggggcaccctgggtcctatctgccgagtctgagccttgcgccatctctcttaagcaagtgagatgcttacttaagagagcaattttgctctctttctcacctcagttttgcagatgacattggcttgacatgcctgaggtcagccccagattgccaagccggggtcctcgctgtgacacggcatggccagtc

SEQ ID NO: 53015 - DNA, 429 bp, Homo sapiens
gggggaatttatatgatgggctataaatcacagaatgagaagccctgcaacctgtggggaggaaaattaagaagtcctgagcagtgacttgtttggggtgggggcggaaggcatttggccctgttttgctgtgagcctggcaggttcatgatgcacgaggcccaggggtccgaggggctctgatgtgcacacttcctatgtactcaatggtgacacccccctccccccattggcagctgctgtgtgacaatgccaagctgggcactgggttatgacctcagggagagcagtgtgccaggagagacagatgtgagatgaatcatcaaaaaatatgcagtcggccctccgaatctatgggttctgcatctgtggattcaaccaaccaaggattgaagatagaaaaaaattgcatctgtactgaacatgtac

SEQ ID NO: 53016 - DNA, 1835 bp, Homo sapiens
gggaccagggcagctgatagctctggactcctcagactgagtttgctggagtaacacccctcctgcccctcccccctggtcagggaaggcgcctggcttccagctgtgagacaggctccgcaggactagggaccctccccgctggctgagagcgctagggagggggcttcccctgtgaggtgcaaaacccggcctggatttctgcccagacggccccgcccactccagggccccaccttccccactgttctggaggaagatcccctagccggcctcaggcacttgcggtgactcacaccccccacccctaagtctgaatgttgagagccccaggctaagaccacttgcctctgccactttccatgtgactgaggcaagacctccttgccaaggcctcagtttccccctctgtacttcaaaggaggcagctcaggcaggtgtcttaataatttaaacgacgaatattgctaaagagataaggggcggggagagagagagatcactgtgggccatggttagggaagggtggaggagctgggtcctgaaagggtggactttggtcgggtggagaaaatagccaagaaggcagtccctgctggcagcacagcaaagagaagtgagaattagggggagcagaggtgaggctggaggggactttggttggggcaagattatttggggtccaaataacaaggatgtttagacgtattgccattgtgctctggggagccacggaaagctcttgagctgaggagtgacttggagaaagtttttcagccaatgcaatagagggagttggtacctttccttctgccaccctgagtttctggtgcctacggtagggtagggattgttctgccctgccttcagtgctttgagtgcttgaaacagacaccgtaattttaattacataaaaatgatacgtgtatcagacgggacaacctttaaaacgtaaagaagaggcaagtatcctgcatcacaggggagtctttcaacctggctgggccagggcctgcggagcagtgagggtcgtttctcagcccagcgagcctggggcaggaacggaccctaattgaaggtgaccgtccccaagcatgcgtcctaccccgggctccggagagcgcacaagcaggtgtgcaccgtctacccgcgctggcgggattgggtgcctggtgcgccctcaggtcgacggtcgaaccctcgggggcgggggtgggagccagaaccctcgggacgacccgtctggggtcccggggaaactccgggccgcctcgccccgccgattccaggccgggatttctcccgcactgactttccgggccggtgccagcccggcctccgggtccccagcccccgccgcggggccggctgctcggggagcgggagggggcaggaggcggaggaggagtttgagcgactttgtggggcagccagggcctcggcggccgctcgggcgagcgcgggagaacgcgtgggcgcccgccgggctgtccggagcggccgatggggcccgtgtgagcgcgcccaggcccggcccggtgcccggcgggcggcagcatgtccgcgggcggcagcgccaggaagagcaccgggaggtcctcctactactaccggctgctgaggcggccccggctgcagcgacagaggagccgctcccgcagccggacccggcctgccaggggtaggcgccaccccgacccctgacccctagaccctcctaaggccactaagccacctgatgccctgggatgctagggaccgggatcctccttccagccatttgccgggggtttcctcatccgccccttcctgagtctgccggaccccccattccc

SEQ ID NO: 53017 - DNA, 560 bp, Homo sapiens
tcctccttggtgggaggcagctagggcagccattgccctccctccactaaagcctcagacgcctgactctaccccagagccacaaccaccacctgagggcagggccccacccagggagaaactcaggctgaggaagccaccctgtggcctttgagccagtcccttctgaccttgaacttcagcctccccatccacatgggggcttggtcccatggtgtggtagcatcggacctcagaggagtgggtggtgcctagcatctcagcctggatcagactcttgcccccacaccctttctggcctctggcactagcagggaaggaaaatgaccaagaactcaggctgtgtatttgttcagaaacagaaaaatgcaaggaagagttggttgctgccaggttctgcaggtggccaggctgggggaagggagcagggctttgtccctggtagggctgtgagtgagggacagtatctgcagtctccctagtttgaccaataagggacttaggttcttcccttttctgggcttcagtttccccatctgaaggatgggcagagtgagacc

SEQ ID NO: 53018 - DNA, 1916 bp, Homo sapiens
cgagggcctctaacctgatcatgaattttggagtttcgttttttgttttttttttctttcctgtttcctgtataggaaaaagggacctgtacctttaagaccccagcaggcccaagtaggacactggccctttaaaagcacattacagagagttggaacatagcctttgttgaactagccatgattagtcccagcggacagggctggagtggcatgtctgggatcagggcggggctaggctggccggggccagccaggagcagcggacagcaggaaggctcgcccggccactcggcttcccgagcctggtggctatgctgagggatggtgagtggcctgagcggagcttagaataagagaggctgggaaagccaggagggaggcagccccagagcccagggagacctgaatgagctgggcggcagcagacaccctcagtgagtgactgtcacaggagctggtcccaggagggactccggagcaccctgcccctctacgcagacatccactgccggcccagaatgtagaaacggttaggagggacctgtgaaaaagcgggacaccaagaagagcactgttgctgtttttagtttttaaaataagaggaagcccagtgtgagttgctctgtcccccaggcgcggtgtcccctgtggtgtgctccgttgagaactgggaaatgccagggactgctgacaagttttctgagctgaggagcttggcctttgctctgagtggccgaacctttggctggctgggtggggctgcactggggtttgggggccatggtatctctgccccagctcctcagcagaactttgttttttcttctcccttcctgcttccactccctagtccatggggcccaggcccactgggtggggtggaggcgggtgggagactgggaagactgtgtctgggccaggagcgtgttttggctctgcttgaatatttgaaacagttgtcagaagccagatcactttggtgtggtagcgtctttactgggcaagtacccatttctgaaaaaaagtcagaggaaggattgggcttgttacagccaagtctcagtgcaggttggtcctaaccgccttcattgccacggctgggggcggatgagactgcctgccagtaggtgtcctcactgttttacagacagccacccaggaggtgacaaaggcagggctcagtacatttctggtgacccaggcttcctgtagttacttaaaagttggtgcatttggtcataggatttttgtaggtttggtgaaaacctgaggcattgacgggcagtgaagagagtttgaagttagagccgaagtgccaggtgtcctgttccacccttgtgcctgtgaatcgtgacctcaggcaagctgtttgacctctctgagcctctgcttcagagcagagggcgtgtgcataggcgcaaaccctggagggagttgtcagttctgggggaggctttgtggaggtggtggcctttgagccaggcgtagacggataggctgctggagtgcaaccccttgagcagaggcgtgcagtttagcatgatgagccagatagggccaagcagggctggcatggctgggttgggacctggaaacgtagcttgggaagctggattttaagtatgttgctttctcagttggaatcctgtgggccaggtggcagatgacagggctagcttagcctggagtcagccagtgtggaatgtgggggaaaagggcagacggtgaagtctgacacactggccttgggaagcccctggaggtgtcagagcctcattctttgctgcagttagctgtgtgagggtcagaggtgcagagacagccctacgtgcccttcccaggtatgtgggctcactgtggtgtggtgggtgagcaggtacttgagagccacaggtggctttggtgcatggtca

SEQ ID NO: 53019 - DNA, 536 bp, Homo sapiens
tctcggtcatttcacctccaccctcacccagctgccatcccatcccaccagcctgccacatgcgccaccaccccctccccctggcttcttcctgaatcctgtgaaccagggacactgtagccttggggaactccaggctcctctgtcagtgcccctaggggcaggctggggtcagagagaaagaggaggagagtgcattcatcttcggttccaagcctgtcgaagcgcctacccagctctgcccccacacgcccctcccaaaatgttttcacaggctggacaggccttcaggcacaaccacctggagcatggatgaccctgtcacccaaaggctgcaggcagtgtctggagtggaggtgccttgggctgacagcccagcctggccctgtcccccactcagtgcagcctgccccggtgcccccagtggcagggtcactcactgtcctcttggcagcagagtgtggtgctcaggaggccacctggcacctgtcagctctgcctttggctgccgtctgagagacagttcccgggtgggg

SEQ ID NO: 53020 - DNA, 539 bp, Homo sapiens
tcccaggctggtcacaaactcctgggctcaagtgatcctcctgccttggcctcccaaagtacaggcatgagctactgtgtgcctggcccccttctacttttgaacactatgattccatgtcagtaagatgaataaggtgaatatgtaggaaatgttacccatgaattctgaaggtggctcctatgggccagatgagtctctgtcttgggtaacctgggcattttttgatgacaaataactgatcagatggtttgtgagattctctctgctctcttgggttaaatgagtaagcccagatttccccggagaatctctgaaaggtaaacacttctggaatgttggtcattgctgcagtttctcaaagaccattagaatctaaagacaaagaattatggctctaccactcacgagctgggtgaccttggacacattatttaacctctctgagccttagctttcttctctgtaacctggagtacagagcttaaatctcaggattgttgggagatgtgcgaaatgctaacagaggacttttagtt

SEQ ID NO: 53021 - DNA, 544 bp, Homo sapiens
ttgtagcctggctctgccacttggaagctgcatggccctggttaaaacatttcacctttctgagtctcggtgtcctcatctataaaacaggtggtctttattatagtcattgtgtgtcagcctgaccttgcacagcaatgtgggtccctgcttgctctaaaagagaacaaactccacatgtcaagaaataccaccagcaacgtgtcctcatcttcctatctcttagtctccagaaggaggaggggaagctaggccctcggcactgccctctcctggagtgtccaggcagctgacggtgtcatgctcagatgacccaaggatgacagcatgtcaacagtacaggctgaagccatcactactgtccagaagcaatttcccactggaaatgctcaccagatgagtccctgaggacaaatctatggacaagggctcaaggcttctgtactttacccatctcaatctgtcacctgaagattctacataagccctgaatcagccacactaagccccagatttataaagcagaacagcacaggctgggtcc

SEQ ID NO: 53022 - DNA, 5413 bp, Homo sapiens
ggtggaagaagccacacctggtgggattggcccatgcaaactacaggtaaacattctcagccgagtcttgccaacaatggcaatctgtgcctcacacagtcaagaacactcttgacaagaactcagccgggccggcgccatccagcctgactcagactatgaccaatacttcttcagggtaatatttcctgcagggcagtggcactcagccttggctgcacagcagaatcacctagggaacctagaaactttctgtggccaggccttccacccaggccaattaaaatcagcacctctagaagtggaaactctagtattggttttctgaaagctgcccagagggttctaacgtgcagccaagcgtaagaagcactaccatagggtgatatttgggcttgagcccaggtggtgagaagccttggtagaggaacctgcaaaccaccacttgcttggggaagtctgcattcctcccagtcttgaacaattactgacaagtgctttatttgtctgcgctcattagggtcaatctgattcgtctagggatatgagaagtgctatttgagatgcctttgatttttcttcctgaaacattgacacaatgatatgtactcaacacctactttgtgagagcctggaatttggtaaaaacaaaacaacatactcaagtgaaatattcatttctggggtgatttcatggagggagggcgaagcacatatatccaccaacagcgcaatgtaatgtaccactgagtgggtggggacgaagcagaattacaagtgttgtaaatatcatagaactgtcattaaattggccctgccaattttgaaactaaaagtttatactgcaagagtgtaaacatgaagaaaataaaaaggaagcaactcttaccatgtcctagttacctatggccctcttctcctgcattttattgtacttttcctgtgcttgaggatttcaaagagaagcactatgtgtgcaatggtgggcaagtgggaggcctggccttgagggagacagcttcttagaagagatattccgtatggaattctgggttgaaaattcttttctttaagaatgttgaatatggacacaggaaggggaacatcacacactggggcctgttgtggggtcaggggaggggggaaggacagcattaggagatatacctaatgttaaatgacgagttaatgggtgcagcacaccaacatggcacatgtatacatatgtaacaaacctgcacgttgtgcacatgtaccctaaaacttaaagtataataataataaaaaaaaggaagagacattccagatttgataacactcagaaattcatcaacggaagcctatttgtcagattactccggatttgagtcactgattgcttgggggctgatatttataaaacaaagatattttattagaattgtttaagatgtaaatctcactcacaatggtaacaggttccaagaacttacctgcttaggatacgaagccgggttaggaggcagagttgatagaaatgaatgacataaaaaagtacttactgattctctcttttcttcttaagtgggtccatgaggcgcagagtgtctctgatcacagccactttcacttcttcatcaacgaggctggggacattttcaaacacccctggagaaagcttgaacgggtaaggattctgtgtcacagtggagaccgtgattccgtgccaagtggctatccagctagctccaggggttatactagtaaattttgcttatgctaatctatagaagaaaatttttaaagacttcctttatactaccttaagaatgtcgatttccttttataaattaaccaaatacatgaagaggaaaaatagcactatgtttttctaattatcaaaatgatacatgctcactgcaaaaaattaagaaatatagaaaggggttaagaaaactaaaataatccatataatcctctctaaacccaatattgatatctgctgtatttccttccagtttttttaaatgcattttttgggggagggggagaaaaatataaccactgctaaatgtattatttatcttagtgattcaagtatgtcaacatgactaaatcatactcatagaatttcaattagttcatctcctgaggctaattagttcatgtcaaaactgatgggaaggctcagctgcttctaagtttccaaaccttcaacactggaaaaacagcatgctgggaagtgaccacaggtcagataggctttgtattaatagtctatgttgagaactcaacaaaactgaaattatttgacttgaacagaatttggctatgaaaatctgagaatgtccaatcttgttttgttaagtgagcaacatgagggtaggaatattcagctgtatggcaacatagtcaatgagatgctcaaaatacttacttcgtgctcatgttcgattctcatactgggatttgcatttacttcaagtagtataggcttcagatttttcattagaagaatgtcaaagcctaaaatctgggcaggataaacacaattcagaattactgtctctattgagtatggtattagggtcattaagttgaaaataaattcaaactcagtccccaaccttggccttgaccctggcttctcttgtccacagcccctcttcctctgggggtacttgtcagaccaaatggacagcagaaaattttacaggaaccttgataatgggatgagttcccacagtgcgtttcagcactgtctttgtcgtctgaagggctgttgatgacctctttcttctttaacaggttttttattatgttgaggatgagtagtagcccatcaatttctccctctgccttttcttctgctctcgtttactaagtggcttcttagctagctctctgagaacctaaggctgcttttgcaaacctgaggtatacatcagtgtcatataaggaccccgttcaaaaccaccacatcagctgggcttggtggctcattcctgtaatcccagcactttgggaggccgaggcaggcagatcacctgaggtcaggagtttgagaccagcctggccaatgtggcaaaacatcgtttctactaaaaatacaaaaattagctgggtgtcgtggcgcgaatctgtaatcccagctacatggaaggctgaagcaggataattgcttgaacccaggaggtggaggttgcagtgagccaagatggtgccactgcactccagcctaggtgacagaatgagactgtgtctcaaaaaacaaacaaacaaacaaaaaaacccaccacatccctacagagtcagaagtgcttagagcggaacccaggtgaatgtattttaaataaagcaaattccccaggtgattcagatacaccctcttagttaagaagacaggaatattgattaggcacctactaggcacccattactatacaatgcactgattattcatagtctcactgaatcctcatgacagcgtatttgaagaagggattatgtgctccactttacagaagcagaaactgaaactcaggaaggccaatggatttcccagaaaccgcctagctagttaatcaatgacagagctggctttcacacccaagcaggactgactacacaacataaaaatgcagggccctttgttcaaaaaggatgaacagtttcacatagttaaaccaagctcagagcccttctaagcgcagggccctgtgtgacacccctgcacaggtggagttctccaacaccgtctgcttcacgcctgctcttaaatccagcattctgccttgggtgaagctttgtcttccagtcactcgggtttctttctattccttacagctcctacaactggggccagccactcatgagcatctcgttctctctgcctagaacaactcttcatctggataacttttgctcatccttgagatcgctgcccctaatgagattctgattcagacgacaaggactttcgattttccagaggactctcattatggctacagaagtgataatgcagaaaatttctaacataattaatagaaccccaaagtctcaaaaaattaatgtggagaataaagagaaaaaagaaaaagatagggttgtagactccccttctctgtggattcaaggaggaaagatgagggaaatccatttactagtctatatagaatatgcattagttaaatgataattattaaactgtagctccatccttattaatgaaattagagcctgaatgaccatttttgggggctgattcaagatgaagttatttttcaatgaagggcaataaggatgaaaagttgggaaaagtcatcctcactctatttttctttccttggtcatgaaaagaaagaaatggaaattcagtagaaaatgttgcatggattatagatctgcttaataatacatgacaagtggatgtgagtgatgaggccttttagagactctggtgacatcatcagtctaactccagacctggtctgagacatgtgatgttgatgaggctacagagagcagcaggctgtggtgatgacgtttatcatccttagtcatcaactcttactttttggtatattttgtactttctcagcctggtggactcttcccagttcaatgcccagtggtttcatgaatgtgaaggtgggaatgctgggagctggagcaggggtgttaaagcctcatcagccctgtctacacccaccagtggcatgaaattttccagaacctaaacttgagtgcatgtttttgaatatgctgggtcttgtataggaatgctttggagttagaaagacctgggctccaatcccagctcagtcccttacactagctacatgactctaggtaaggtacttagccactctgagcctcaatgatctcatctgaaaaatgaggataacaatagctatctgtcagggttgttgataatggcagtgaaaagcaatacctaggcctatgctcatcatatagaaggtactcaatatatgctatctctttccagtttcctgccaattccaccaaaaagaaatggcattagtgtgctttgtagtcaagaggggctcatttcatatcttagttctgcctttaacttgtgtgactacaggcaagttacttagcagctctaagcccaaatttcctcatctataaaatggaactatgaatgttacttacttaccttagttcatccattcagaaaatatttatttttaatttaatttaatttttttttttttttgagacagagtttctctcttgttgcccaggctggagtgcagtggcaccatctcggctcactgcaacctccgcctcccaggctcaagtgattctgctgcctcagcctcccaagcagctgggattacagacacgtgcccccatgcccagctaatttttgtatttttagtagagacggggtttcaccatcttg

SEQ ID NO: 53023 - DNA, 957 bp, Homo sapiens
cagtagagacggagtttcactacgttggtcaggctggtctcaaactcctgacctcaagtgatccacccgcctcgacctcccaaagtgctgggattacaggtgtgaggcaccgcacccagcctaaacttttttttttttaatgcaagaatatcaatgtcttattttgcaacactcaaacaaggtgccctccctcccagtgctcttttcgctaaactagcagtattgctcaattgcagtattgagcaattgcagtattgatcagtgccaggcagtgcactaggcacgtcaatatgtatacatgagatctaatcctacaagacaggcaatagcattttcattcacttattcatttgtttgtttgtttattgtcttgctatgttgcccaggctagtctcgaactcctgagctcaagcagtcctcctgccccagcctcccaaagtgctgagattatgggcatgagccactgtacccgacccagaattttcatttttaggctttgtaactagaggtttctccccatattccaagatcctacaaaaaagtggcagagttaactacactgctaactccttgaagacaggggcagtatttccctcatccctcgattctcttgcccactacatccccagctatcactggaagagccttaatggaggcggactcagtaaatgcttatgggaacccacctctgtctcatttggttcaatgctgtcatgttctatccaggatcacaggtgacatttcttcaaacgctaatcctgggtgatgccaaccacttcctggacttcagttaaagtatgccccaaaagcagataactccccactctctatctctggagcgtacctctcttgggctccagactcatacaatgagatatgtcaaatatgacacgtccaaaactaagctcattgtcttttctctcaaatctacccctcctgtgttccctctaacagtaa

SEQ ID NO: 53024 - DNA, 1595 bp, Homo sapiens
cactgttttttggtttttgttttcttgacatggagtctcactcgtcgcccaggctggagtgcaatggcgtgatctcggctcattgcaactgcggcctccgaggttcaagtgactctcctgcctcaggctcccgagtagctgggattacaggcgtgcaccaacacacctggccaatttttgtatttttagtagagacggggtttccccacgttggacaggctggtctccaactcctgacctcaggtgatccacccaccttggccttccaaagtgttgggattacaggcttccaggcgtgagccaccgcacccagctgcaacactgttcttaataatgttacaaataaggatctgagactgagcaaagccaggtgacctgcagatcacacaggaggtggtgagccaagaggcagggggtgggaatcatgaagggggaagggggggcgggacagggaagctaagcctacttcaggggtcaaggtcgccaagatggacactcgccctgagtcccagcggcacagcctgtgcttggatcaggttcacaagcccagggtgggcagagacagcagtgcagagctggtgcttctgggcaacagctctgacctctaaagagaactggctggaaaccaacacaccaagaggatagttttaaacacccacccagccactcagagagcctggtcagggcagccaaatgcctgcccaggaacgggacactcagcctgatcatttacaccatgagagtgagaacaagatctgctgcaagcctctggatttcaactgctggtttaaatttcaaggagaagcacgaaggtgttgacatgtaaggaattacttgtacatgcctttgatcaccctaaaactccagggtgttctaaatgagtgtgctggttggaagccaagctgagctgagttctacaaaggaactcctactgtgccactggaggctgctacagaagccacgtttccttaaatcaacactgcctgtttccccaactttcatttcaatggcatcaggtggccacgggaaaacaggaccttgggctaagccccctctcatgggctcccaggaaatgttagcccggcacctgcttcctgacctctggccagtcacttcacctgggtgttcatttgcaaggaaacctctctgcttccttaataaatcagagagggacactgaaggcagcctctctttggggaaacagatgccccgactgctcttccaaatttactttccctttggggatatctcgctagccactaccacgaccacaacggtcttaggacagggagggaagttttgataccctttaatgctctggacaacacctgggctccaactctttccttaggcccctgtagccatagacatagcttctgagattttattaatgactcaaggagaggagaagggaaataaatacagagaaaagcactgataattgtgtttacaggatactctcatctcagcatgacaaagctctttagtttgctcttagatggcagaggcaatgttttcccatcccctgggaaaacatccagattccctggaggctcagctttaagagatctccagtggctgggtgcggtggctca

SEQ ID NO: 53025 - DNA, 1546 bp, Homo sapiens
agtagcaaagtgtagtgagaccctaggcctgtctgcctccaaaataaaaagtgttcctctgcccaagagtcacacagcaagtgctaaacaaatataacttcaatgaagaagtgagagagcgggtccggggccccaggggcttacaagctggtggaggagacagacgtacacatatctacaagcagaggcaaatgctgatggctgagacataaaaagagctgcagggaggcagaggagtgagtggctaacttgacctggaggggtctggggggccctcttggaggaagtgattttggggggtaggccttgaaggatgagcactttgcggctgacaagcaggcccgagcgtggtgcaccgcaggagctcagccctcgcccgccgacctgacctgggccgtgccgagacctctgaggtcgtcctgtccaccccactgtgcccacgcggccgggtcgggccgggcctcacctccttccacttgagctggcggatgctgatcttcagggcatccagggaggtcctggccttggagctgtccacggtgaccggccgctgggagccgttctcgccggaaccgtggcccgagctccgcttgcagcttcggcccttgtcccggggcttcccgtgcgggcagaggccctgcaccggcttcggcttggacgggggcagcgtgggcggcggccgctgaaggacctgggtgttcccctcctcagccgcactgggctgcgccggggccggggccaggaccttgggctgctcctcccctgccttgcactccggttccccggccgcgcccgcgtccacgcggacctgttccgccaccgtctccgctgtggcctcggcctcagctttggccgccgctttggccgcagccaccgcctccgcctcccaccgggccgccagctcgctctcggagctgccccgccgcatggtgctcagggccggggccagtgccagtgccaccgccgccgccgccgccgctccgccgccccagtccgccaccaaactgccgccgctgcagccgctgccacgcgttccccgcccgagcccgttgccatgatcgctcaggctcgggttgacagcggcagtcaccgcatcgagacggggtccgggaagggacaatcgccggccgagccccagcgacctcataggcgaggctgcccacgtgaccctgcctgtcacagaggcagcggcggccatgttggaagagggcaaagagccgccaggacccgcccaccccgcggatgcgctggatctcgagggcgcagaactcggagtggcgaggagaagcgggagggcagattgagcgcgcgtggggctcgtgagcctggggactgggagtaaaaacaactacctcaagcaggaggctcagtccccgccaacactcgctgggataactctcgataggacggaggaggagccccccagtgggaccctcctcagtgcaatggatgggaccctcctcagtgcaatggatgggaccctcctcagtgcgatggatgtgagcagcccaggccctaggggagcagagagtgttccgctgaagaa

SEQ ID NO: 53026 - DNA, 931 bp, Homo sapiens
tatctcttccagcgttatgtgtacacgttaattactgaaatgatatctcttgaataaacgaatgctttaaatgggtcctgttaccaaacaccttcccaaggctgtgagtagatgcacgctccaatattgtctcattttcccgcggcttcgtcaccccactctatgcactctgcaccggtgataccactttaaggtagatgaccgtctccctcgactgtgagcccctagggttgtatactcacctcgcatgcaagtttgaggattaagcgacataagctaagtaaaatgactggttggtgcttaataaaatgtatcactattattcacggaaggagaaataggtcgctgtggagggcgaaagggggaggattctagagccactgcaagatgcgacagggtggggtagagaggggaggcgactcccaaagctgcggaggggacctccgggggtcgacctgtatatgcgttggaggactggggaggggggcccgggtcccaggatccgcggagcccaaggggggctaggcccaggcccgagaagccgcagccccatgtctcccttgcctgtcctccggatagcctcacctcatctactttcagctcctctagagtgggcagctccactatccccggcatgacggctgcagccccgaccccgacgagaagccctcagccgcgtcgcccccgtctccttgaactcccctttcgaccgccgagtgccacacggcgcctgcgcatgcgcatccggcaacacgcaggcgtattgccctgcccaaccacgagcgagggagcgtgcgcaataccaagaacttttcagcctccagcggggtggggcttcgattcggctccgcccacccctccaggttgtcatagtgatgccgtatccactgagactccggatcctaacagctggaagctaaaaacaggcgcc

SEQ ID NO: 53027 - DNA, 722 bp, Homo sapiens
tggatttcaagtgtaataaaattgttttgatttctaaatttaataattaagtctgaatgcattaattataacatttattaatttcagttttgtagtttctctttttttctgtttagagccaatcatctttttctaagccttttacatttgaataggccttgagaagcttgtgggtgcttggcccagccctccacccagcccagaagatgctcttctatggggaaaagccggagcaggcccaaggccttccacctccccgccctgtggcaggctttgcctaggcaatgactcctcagtcaatattgacaatgctgtggccttggcctctggccaccactgccagcaaagttcaaagcctctttcttgtcaggagtggtgatggggatgcctgggcattgctgccctcactgtggcactgccatggccctgccccaccagctcacgtaggctgcatttgcacagagggtgtggcagggcggtgaatgggacccataggtgcccacaagctggggagcctgctttgcagtgcaccccccatcccagcctggagtcctctgaggatgggcctagacccccccaaaagacgacagcccctatgacagaagcttccttcctccaggtcctggtccagccctgtgctcactgccaccctggcattcggcataagccctgggctgtctctgtgggttggaagtgcctctgctctctgcacgtgatgacac

SEQ ID NO: 53028 - DNA, 2714 bp, Homo sapiens
tgcttgtatttggaaggggagcaggacaaaacaaaagcaaaataaataaagaagatataattagtgatacatgccacaaacacaattaagcagggtgatgtgacagggactcgacgactatagattgagtggagggaaggcctctctaaaggagatgacatttgggacttgaatgataggacattctgattttctcatgtctaaaatcaggaataataccaatagctattaatatttattaccacgaaaaggtaccatgttttactggtaagagtgcaggctatgcgggtctgggttcaaatcctgacttttgcacctagtaactgcacctttagcaagtcacatgacctttctttaagcatcctctcgatagaaaagctttcctaaacagagttccttgttattctatatcatagccacttttccatctttttcctcctactaaatgctaattcaatgtattacttaatgtttcctcttctatttccttcactagaacgtaagctcccacagcacaggaccttgccaatcttgatcacggttctatttctagcacttaagtacactgcctgtctcacggttggtgcttaatatttactaaatgaagcaagccgcttctccactcgaagacttagtttctttttccttcctagaatgggtacaatttgtcgtctcacgaggtcgttgtgagtcttaaataagacaattttggtgacagctcagaatatggctttttgaggaaaggtaaagggtaataaaagatcaagacggcacgggactatcaaaatgctttgcgtttgcaatagcaacaatcctttagactaccagagttcacaaaacgcggttacatttgtctttccagctgagctgcaataactctggaagccagaaatagtcatctggggaaagtgcaatccagagaagaagagacacctgatcctaacagcaagcggtggggtcatgcctggaaccctggcttcccgatttctggctgcgaattcctacaggcgaagggtcattactcggattgttatttccgggccagcgacaggacaatccggggcggggcctgagatgcagtcctgcgagggcggcctcctgtaagacctcttagcgggcccatcgctgaggtgcagggacatgtcgcggccgaactcacctcgtggcctcggcgtggtgctctcagctcatgcccggaaaccaggtcccgacgccgcggtcagacggacctctagacgcgtccgcctcaatgccgccagctgccaggccgcccgtgacgcgttaagcctgcgccgcctcctggcttcgtgacgtcacgacgtccgcgcagctgcggtcgccgccgtcgcacgagtctttccttagtaacctgggcgatagctggtgagtgtccttgacagggcctcgaggggcgcgtgtggtctgggtgccagagacccttactcagggacctctgggggacctcaggggaccagactaccgtccccgacccgttcgagtccagcttgacctttaaggctgagggcgggacctgtggcattggagcgagtctcatggggtgggggcggggctccttttaccagctaggaatttaggggatgctggaggaacttactaaagagtagccgcacacttgacgggaacgtttgagtttcagaacaatcccataggagtagatattattatctcccataatgaagaaacggaagctcacataggtaattttaccagggtcacgcggtcagaaagtgagggcgcttaaattcagacctagggctatccgactcctaagcctggacttttaaccaccactctgtgccacccagtggcaaaacagttgtcatttcagtagcccttctccatttacttaaccctgacaaatagtattgtcatttacgttttacagatgagacggaagtcctgagagtttgaccgatttaaggtcacgtgcctaggaagtgctggaaccaagactcggagttttctctaagtttagtgcctttattttgttttaaaccacactgttgcatttccccccattttggaaagctttatagttggaaagaatgaaaacctgatctgaccccttcattttatggttgaaacaaaatctacgtaggagaaatcacttggtacaagtcacaagtcagtggtagagctgccgcaaatgctttttgaatacgtgtgattatgaatctaaatggcagatggcagggagtgataaggtaggcatactggaatccagatctcttaactcttaggcaaaagccctttctctacctgttaaagtgtctcattccttctttggccgtgccaggtgcataatgattctgtgtatagtcagatactacaagtacctttctttacctggtactgcatttagagaagaacatcatctactatctctaagcaaaaatctggcaaaccagagacagtggaggcaacgctgggaagcccagaacctaccataatagtaagggtagattcccatccgattctggtttaccctggataaggaatttatctttctggactttcactgatgtattcatcacattcacagtgtcttctgtgttctggcaatgtaccaggtactggggatacagcagtgaacaagaaaatcatagattagtccttgtagtacttagagtcatatggagggaattagacaatcaaataattacacaaatgttagcttgtattgttaagaatta

SEQ ID NO: 53029 - DNA, 581 bp, Homo sapiens
cttaacagccaaatcctctgtagtctttaaataaacaaaaacttatttggtgaacagacagggaggaaaatgaaagattttctgtacttgggttccacatgtcaacaatttctctcctgtgtgtatgttggccaaagctgtatcatgataaatgaataaaggaaaacctcgagcccagggcagtcagacagctcagcaaatggctttcagatgattactcaatttcagttgacatttatcaaagagtttctctgtgactctgtgtcagggctgtagtggtgacagggacaagaatgagactacctgtttggatgtgctgagaatgagtaatgctggagcaattcattctccatctcttctctcctacagcctctctcaaaaagaaacactgggtatggaaattctcacacttgccagaagaattaaccacctcttctattcagtttaatgactttcaaagtcctatgaaatattcaggccagagagaatttgagaatttttttcctgtctggtgtgtgtgtgtgtgtgtgtgtgtgtgtgtgtgtgtgtgtgtgtgtgtgtgtgttggaaattacaaaata

SEQ ID NO: 53030 - DNA, 1459 bp, Homo sapiens
aatacatatacttggaggtatatattgtatataattttgagatgtatctatttgtttgtgacacatattttgtgcatctttgctccagcgtcaccttcttaagttaaaatatccatagctaccctgtttaaaacagccccaatttcccaccagtcccttcttcccttttctccctaaaagtattgatttttaatataccatataatgtagtaatttaggatgttctgtttcctccctcactagagcataaacttcagaagtccaaagctcttctcagtttttactgtattggccgccatccattacagctcactgcagcctgcatggaactcatgggctcaagcgatcctccctcctcacctacccgagtagctgggactacaggcgcgcgacaccacgcctggccagcttttctctttgttcacgctggacccccagtgcctggcacagggcctggtccctggcagatgcccacccactcagccaccacgtgtggaagcaacacgtggatgtcggcgcaggcaatgcggctgtgtggggcacgtgcagcgtgcagtggagacttaggtgcatggcacagacacgcatgttacaaggggtgcgaccggcagaaggcttgtgcgcgcgcctgaatacatgacggccgcctgcccgctgccgcttgcccgtcgctaggtcacctcgcaccctcgcccggcggccctcggtgggcggccccgtccgtctcccggggcgcgaccccgtgtacccgcgcggcggtcccgggctgctgtcatttcccggcggccgcagggcggggagtgagcgggccgcggcccggccgggcgggcaggaagcgcgcattgttcgcgggccgcggcccggcagggagttcccggccccgcgcggacataaaaggagaaagagcgcccgcggagcggcccgggcggccgggggaagcgcggccccgtgctccgctgaccccggcgtccactcccggctccgcccctcggctttgaggcgcagattcgaatcccggctcgccgcctccctgagcctgggaaatgaacgttggctactggaagccctctcagggcagacccccgtgctcgccccctccactccccgcgtccagtttcctgctccgctaaaaacccaaccctgtgctacggttcctcagcctcctgacaagagaaggtgcacagtgaaacccaggatttcggaggaaagtttcaccagctaagaaacctaccactgtagcttgagccacgccccacaactctggcctaaaacaccctcttctgagcggaacgttgtttgcaggcacctttatggatgggaaacagagacccggaagaggaaaaacttgcttaaggccatcaataacaaaaaccctattgtgcaaaatttttacaaaccgggggctttctcccgtgcttagaggcattgccactttcatggtggttgttgattgaaaaac

SEQ ID NO: 53031 - DNA, 1007 bp, Homo sapiens
tatttgagcttgttttgcaacaaacagtaccaggtagacaaggaaggggcaagacatttcaggcaagaggaccactgtgacatattaggagaatcgcaagaagaatgtgggtttgtgcagaagggtttcaaagattctagtgcatagtaataagtaaatacatacaagacagagtcctaaagaatggatgaggaaggtgagccagaaggattcctgtcactgaggaatatgattgtcttccccacacagagcctggggacccactcagccaaatttctccaacctccccaggcaccaaaatgtgagtcatcccggcattcccctgccaccatctgtcacaaggtccccaaaggatgtggagagagtctccatggactctgggacagtggaaagggaaggaggaggcaggaagaaaacagaaagagccattccctcaggggctacaaagactataagtccccctgttactacctctggactagggcatgtccctgctacctccccctgccagtctcatgccacaggctgcactgaagctgctctgctgaaagaactccccacccacctccactatttaggtatgtcctaacaatccaataaccacatgcctttgcaatgacagcagctgctgtctgaaccaagacatattaaatgtctgtgtcctggggaggatgacctaaggacttgggcttgttaagaaaagggcaagccacatattgagaaatgccaggaggccagccccaccggactcaaatgcgttcatgagtagagtggggcctggagagcagaggataagtcaagacagagttcagcagaaagctagcaggaagaggctaaggaaccctccagaaagctgaaatcctaagatatcaaagctggaaatactgtccaatatcacctagggtcttaccatgcaagcggtgcccaggctgcagcatcaacaaacacctaggagtttgttagaaatgcagaattttcagagcagtcctgaggcaggcactgcattt

SEQ ID NO: 53032 - DNA, 1352 bp, Homo sapiens
cagaggcctgcttgagaattcagcaggaatgcggctgccttaaagacttatcaccgggcctatcatactccatttacaaagtgactctctcccaccgggcaaggagttcttgaacgtagggacctctagtcactacctctatccccaaagcccagcacaatgccgctgcacaatttgctaaactcgcagcctgggtcaacgggagaatcggaggactccagcagtcagatgcaaaggagacagggatcatggagagacaggtggaggtgccaagaaggaacaaaaccaaacttaaggcccaggaatgggccaagcgggggacacagcagcggcggaggggagggaaggagttgcgctcctaaaggagggaccgctgcggggaggagacgagggcgggccccctggagacgcgagcagaggaggcggggcccccggacgggaagcagaggggtgtgtggagcttttgggggaaggctggaagggcccgggggaggtggggccagaggaggaaaggggacgaggaagacgcggagaacttgggggtcgagacagagcgaagaaggggcagttttacccaagctcgccaaccccactccctcccgtagtccgcagctgctgccgcttcccggtggaccccaatgcagttacctgccctagctcgctccggatccctttgggccagcagctccgggcgccggaaggaatggagcactttcttaagaggaagagcagtgggtcagcgccctgagcgctaaagagaaaagccgccgaagcccgacagcgcggaccaatgaggcggccttcctgcgtcgtggcggacgcgcattgtccaatcagaagccgctactcccagctgaggggcaggggagaagctacgggtcctaccttggaacaaaacacctcgacaacaacgctctcctaattgctttgttttggttttaatctgcacaacaaaaaagtgaattgtatgacccagcgtcaagcaataagaaaaatgtattcacaggccgggcgcggtggctcacgcctgtaatgccagcactttaggaggccgaggcgggcggatcacttaaggtcatgagttcaagaccagcctggccaacacgttgaaaacccgtctctactaaaaatacagaaattagccgggcctggtggccgacgcctgtaatccaagctactcgggaggctgaggcaggagaatcgcttaaacccaggaggcagaagttgaagtgggccgagatcgcgccactgcaccccagcctgggcgacagagcgagactgtctcaaaaaaaaagaaagaaagaaaagaaaaatgtattcacttcccttcgaagtttccgaagccattcaaa

SEQ ID NO: 53033 - DNA, 1489 bp, Homo sapiens
tttggtgtgaaggatttatctgccggtatcttaaacggctgccttgggatttgaaggatggaaatgacagctaccctcatcttctcccatcctgaaagctaaggatagaaaaaagtacagctgcttctctgggaaacaaagatgctttctaccattcttctaagatggtggaagagtctcctcaagaggctacaccaaaaaggaaaaatgagagagggaaagaagaaagccatagcagaatttcctggctgtgtttcatgccattgctcctagccacaacccctgtgcaaccactcaggtccggccgtccccatcctgggaggttaagccctcccagggcattgtttggccggggttcctatttaccactcagatcgcctccaccaccctctacgctagggtctcgggaagccccagggcagaaagctgaaaagctaggagaagacttggtttcgaggacctcttccaaacccccttactaactggtgtagaaaagggagagtgaagccgggcctttgcttgggtgggttcgttaggggtcagaggcgtccgctcggccagtgtcgaaggaaggtggccatttgagccggtcgctccgcatcgaaaaagccctaccagagagaggggcctccgcagggcccgggttccatccgagtgtcaggtgcggccctcagttcccaaccctcgaggcaccaggggcgacagcgcacaggccccagggctgagactggtctcccgcccgaccgccggggaccaggcacccgggctggggcccgagccgcatcgtgcccgcccccgccctacctgagggggcccgggcggggtcgctaagggccgctcccgggagccccgcgacggcgcggcttggcgacggaggcgcctcgtctcgccggggcagagctcggcggaggtttcacgacctcaaactccatcgggagctacagggacagccccgttggcggcggcgaaggccgcgacggggcctcctcctcctccctccacctccgcctcctcctcctcctcctcctcaccacggaggcggacctggagggatcccgatctagctctcgcgagaagttactccccacttaacgcgagattacgcaagcccgggagtcgggagttggaaggaaagcgtagtagccccagccacccaaactgcgaatcaacttccctctgcctcagcggatccaccccgatcacgtgacaagggagccccggagcactgtgggaggtactgtgagaaggactaggcaagccgaagggattgatgggaaattccctgcacattcatctgcgccttgagccggcttcctagacgctggtttgagcgagtgtcttaactcccttcgtgaaaagcgtggaatccattgagcagaatctgatacatctgtgtcacattcttcttcacactcctgtgatgacatgccgacaggatccctcaatccctttacaaagatgtcaagtaatctccccattacaaaaacaa

SEQ ID NO: 53034 - DNA, 1858 bp, Homo sapiens
gtagtgaacagtttctagcttgtttcttttgctaaatgttgtgtgccttgtggtcaagaacaatctatcaattttgaatatccaatataagcactgtgaccaccaaaaagttgatttaacataatatatccaattagcaactttaacgtaatctccaaacttcctactccccaccactacaacaggtcctccttccggttcacctggacaactgcaatgtcttccaacaggtcttctttataccacactcttctgtatgccagattacccgcctgagtgccaccaggattaacaacccttattttattttatttttaatttcccttttctgctttaaatcttctatcgttcttctctacctccgggacagtccagatttcttaggaaagaatacgagacccatcacgatttggctctaacccatctttatggctttatcaccttctattctctttttcatactcgaacctcgttcaatactaaatttttccatcattacccagacaaaaagacacgaatacacatttcttacattcgcgtttccagttccttttttcagctagtgattaggctcctttaagcccaaatcaagtaaaactaatatgactccacctcccgtttcaaccagagagagtcagctgctctctgagcaccgcgagatggtgcctgatgcatctgtgttcctgcaccgagctcaggggcccacacagagcaggaggagctcagggaacatctgctgaactgaaaccggatgccaggttcagcacacaggtattctggaggcaaccctgcgaagggccaaggccctgtcggcccagtggttgcagcacaagattagccactccggggccgagcccagctgtcctcctcctcctcctcctcttcctcaggcaccctccacctgaggaatctactttgcactcactcaccgactcagaaaactagagtcaaggattccgcggcagcgtctgcccaagccggaagatggacttagcctggaagaaaacacatccggtgccaaccagctttattctttactggggccctctaggcgccccggaaggacattctgagacggtcttccttcctcacttcccccctcttggaatgacagaaaggctcctgaatgccggcaagccccatctctcttgtcccagtttcggcactcgagccgttttcccccaccatccctttttttttttaagacggagtttcgctcttgttgcccaggctggagtgcaatggcgcgatttcggctcactgcaaccttcgcctcccgggttcaagcgactctcgctccgcagcctcccaagtagctgagattacaggcgcccgccaccacgcccggctcatttttgtatttttagtagagacggggtttcaccatgttggctaggctggtatcgaactcctgacctcaggagatccgcccgcctcggcctccctaaatgctgggattaccgggttgagccaccgcgcccagccgagccatttccttttgtgagtcctcctgaacatccgaattggagacggggtttgaggttcggttacggcacgtctgtcagagtaaccagaccttttatggattattctgggacgattcctctccttattggggccacctacaacttgaaaggtggcagagcagaaactatcataaagatccgtattcgagattgcctagataatgccccatcaggagatggccccaacctctggatctagcttcacacttaaatgcgttcctccatcccaaaacttttggcccagctgtttcctctgacgtgccctagccttttccccaggctttttttttttttttttgagacggagtctctctctgtcgcccaggctggag

SEQ ID NO: 53035 - DNA, 1678 bp, Homo sapiens
ctcagtcatttctccacagtattgcaactgtcttccctgaaaaactcttcaacactttactctctccaagtacaattcagacatcactttctttctaaagccttctcagcaacggccccttgagcaattaacacatatgtgactgatacatacatacatatatatacacataggagtacttatttgttcagatctggctcccaaacttaatcccgaaaactggaacaatatcttgccaatctccagtgtctggtatagcgccagtaatataaaaggtgctgcgaccagtggccaaataggggaaaaccccagcaaaagggtaacctagcactcacagtggttctcaaagactggcactgaatgcctggtcttgggctggctcccgaggctcgttttcttagggcctcacctctggcacttcttataagatgccagagtcaggcccccaagccaactgctgggccctcagctggggtcctatgaggcggtcccaggggcatcctcaggctccccactccagtcacagggaagggaaaggggcggggcgcagcgtgggccgggccaagggctcctcaagtccccaggggcctaggccagcctctcggctcccatcccagtgcaggtcccggttgatccagggccccaggggggttccattttgagacaccccgcaccccagcccgccgctccggccgtctccgcacttacagacccgggggaaggccgccgtcaggatccggcaccgccaggagctccggcccctcggggctccgggaagggggaggggcaaggaacccgagccaaagggggacccaacggaaccggaagggcagccctggccggacaaagacaacttccaggtcccatggtcctctccgccaatcggaaggctcggaggacaacaggggccccgagagggaatttctgcgttgtgggcggggcgcagacggagggcaccgtactctgggcactagcttcactgcctactaccccgaggtgccttagctcgtaagcgtctgtggctcaggccctgtgcgcctcgcagggacccgctgctcgggacccccgtctcagcggctcttctgtagctgggcctagacggtccgctgcctccttgggcctgaagggctcctctgcacttaaactttggtaagtctttttagcctaggggtgtagactcgtcgcgcgggagcccgaagagcagaaagctctcccctcacttttggatgtgtttttcagggttcttgccttggagttcttcctagggcaaactcttgcactcccatggcttccgttacctacttcatgctgaccattcacaacccaggcagctacatggacgagatctccagctgtcctgatgtgaaagtaccttttaatgatctcaagttcatctcatctcctatccagaccggaaaacttgaggatccttctagagttcttttccttgccaatccagtttactggtttttgaccattcttttcgtttttggtggtggtgaggggctttttattgaggtaaaacatgcgtaatgtttattactttaatcatttgtaagtgtaaaacttgatggtcttgaactctggagttaaagtgatccaccctcctcagcctcccaaagtgctgggattacatgtgtgagccactgctcccagcctttccctctttttaatgtag

SEQ ID NO: 53036 - DNA, 1563 bp, Homo sapiens
ccgcttccatcgtccccagtcccggctgcagtcacgtagttggctgtccaactccaaatacacaagacagcccaggtccagctcacagccagtgcacttcgcgcaggcgcacagtcctgaggcgggctgaaagcccaggtggggctcggagaagaggaagctccgcctcgcttcccggtattgggccaatagggtcgctcgtcatggtcgcagacctatgagacggggcagggggcggggcggagggcggaagaagtcgctctcacgtgagtaaaggggtgggggggcggggacagggcggtttgggaggcccaggcggcggagcctccgggacggcgagcggcgggcggcggaggaggagacggcaggtcgggtagggccgtgtttcccctcctcctcctcccaccctcctacctaccaaccccaggggtattttccgacggcccctgcggggagccaagctgtcttctcatcccgcggggtcgggccagtggagctgctctcagctccctcgacgggccgagttctgaggggagccgtgattggggggagggggaactgcgacggaggggagagggcgcatgcgcaggctgggccgctctgggagcccctgcccaaaccggttccccctgtctgtgtgggtgccggtcttctgagtcttgcgtttttggccctccctctggtcccccagcaaagccggtttgtgtcttgactttaatgttttatgcttggtcctatttgggaatccagccgctcccccccgcctcagtttctccccattgctcactaggcctgtatctgtgacttaagctagcctgggcctcaggctgtcctgggctgcgcctaaatttcaaagacttgctagttttcactgtcgctttgccatctcaggttggtctttcagtctcatttccccgtctgcaattaaagcgttcttggcatcccagtcttctcatctccttgaagcagctaccccagtacctcatcgctgtgtcttttgattatccgcacccttagggttttacgtgttgagccaaaggataacctcaagacttccaggagttcgctgtccattgcctggtagtactttggtctctgctcttctgcatccagactgtttatcatctgctcctgcgtttcacgcatctgcatacctttggttactcgagaattcttttttggaaacaaatgtcctaggagaccgtgttaagtgatcatgctgctagtgttcccgctactagtgctccgttagttttaaatcatgttccaacttgaatttgaggtcttttgactttcgttggctttttgtcagggaaaaaaacctgttagggacagggtttcacaattccttttatatttccattcacatgtatttacaaacgtgtgcctggagtagtaagtacacaataagtgagtttccagctgtttttgtttcggaaacaaaaaacaaaacaaaacaaaacaaaaaaacaacggaaggtgaatggaattgtgtttgtaacattaaactgatgtttgaaaagtagttgggaaaaaaagcttaggtactaaggagggttcatc

SEQ ID NO: 53037 - DNA, 411 bp, Homo sapiens
taaagcattttgaagtatggaaaaagcatatgtattgtttttgatgtcagagatgcaattcagagtccccctggagagccaatttaagtcatatgttatatctgggaaaggtggattgttcccactgtttgaaattgtctgttgtgtaacagtcttgattgaggtttgcagtttctcttctaggtcaacactggttaagatgacagagtgggtaaaagtttacataactttcctctcttaacactcagcgataaaaataaaacaaaacaaacacaaaaattgagaaagacactattatgaaaccagagaatgctcaaatcttcataccatagattttgaggaatatctgctggttacaaagaaatctgggcccgactaaaggttcctcaggactggcatcaagttttaatt

SEQ ID NO: 53038 - DNA, 578 bp, Homo sapiens
agatccccgacagggcactaagtcccaaacaggaaaacttgccaaatacagattttgtcccttggcttctctcccaaggtgggaaatatgccagcatcataaatctcaagtctgttgagaaagagctaccgctgatataccaggccttaagccaccagctttccatgcagtatttcatttgcttctcataaactgtgaggcagggaccattgcatagattttatagataggtttgttaaggttcagattagttaaatgacttgcccaaggtcacacaaattagtaagtgggagaggcagtacccagagacagaacagcctggccctagactttgtgttctgttggttgcattgtgatctaagtagagcacctaaagtccatcgtctgcattctttgtcaaaagtccaactccagtctccacacaattatgaccagattctgaaatgcctttagttacctccatgttcatgggtatctaattccagtctgctctgtgtgatgtgttggagctttggagtagaaattttaaagcattaattactgaatacctaaacaatatgtcatgtatttaaatgtat

SEQ ID NO: 53039 - DNA, 443 bp, Homo sapiens
aacacaaggaagagtgacaagtggaaaacaaggtttaatttgttaactgggagccaccagcagcacattggacttgaatatatgtctgggtttaaaggcctttctctttgtaatgctccagtcttcccccagcatgccccagatactcaggatattgcagcatgcatttgagagagaacaaaatgtcctgggtgcctttgtcagcagtgaccctacttactacatggttcaagtggtattctgaaatcagattagtgttcagtctacttgtgaagtggtcagtatgaaggagaaggcatggacctcctcctgtatacatagtaataatgactcataaaagtttatgaccagcaaaatgatctgattggtccatgcatttcagaaaaattaatcagacacggttgtgccagtagaagtaaagagataaaggaagatcagtgtta

SEQ ID NO: 53040 - DNA, 705 bp, Homo sapiens
gaagacattgttttgtaattagcctattacaacatatatctatggggaaaaatgttaattcttccttaccccagcaaaagaatgaaaagttgaagaaacttgaagatttgtgaaaatgttttacaggatttggtgtcaatttgtttttttttaataaagtgccatgggagcctcataaccactgcccttcctctcatttattcagaatgcaaaagcactgggatgaagtgtttgctgttcgcagccgcatttattttctgttccactactattgatctgttaggattgtctatacacttactgattgcatagacattttacttaggtgctttctttgtgagtcacttaggtacacaataaaagtttaccctagcattgggcctaaactgcagaagatctcagcttaaagatgtcctgctccagtttgtggcctcaccccaggtgttgagtgagcatctttctgtagaggtcagctggagcagaatgctgtcttcctggctgtctaaccttgggcagcagccagactccaggaatagagctctgattgaggcagacctgcaaacagcctgactaggggaggtgtccacagtcaatgggagaggaacacactctcccactgagagcgtctggagacactgacaccaacacgcagcaaatgtgggcctatcctgttccctttctaggtcttatttcttcatctgtaaa

SEQ ID NO: 53041 - DNA, 1709 bp, Homo sapiens
ctatgttaattccaatttacatattccagcttccactatggaatttatgcagatgattacaattgctcaagagattgttgttttatatttgtttctttagatttgttctcagttgagtgaaagattggagaagcagcagacagccaataaggtggaaattgagaaaattcgggtaagacttctctttacctaaaagattttataccacctacttcattttatggctgtataaacaggttttgggaggaggcagttgatttcaaaagtgagagaatctaagcaataaggcacctgtcacaggtcctggctcagtagttgacaactaacactacgcctgttttctctggaagggtgtacagatgaaatcaaacaagctctagctttagatctcaaagtgcaagtgccccatgatttccaaatgtctgtaaggcagtcgatgtccgcagtgtgatgctgaggagaaggagtcatgcaagtgataggtcttgcttgaggtggtgggagtgcagaggtcagaatcatgtgctgtggcttgtcactttccagtgttgttctgagttcatgccttctgctgtaacacatccaattacaatgaggaccttagtttatttttatttttttttatttttagagacagggtctcactatgttgcccaggctggccttgaaatcctgggctcaagcgaaatccctccctcagcctgagctgctggactccaggtgggcaccattgcgcccagtttagaactttaattgtttaatgttttgttggcagcttaggagtttttataacatggtgctttctttctttaagttctacctgtattacagaacttgtcagattttactaagataagcaatttactgaaaagtgcctcactaacatatttacagctcagaggacaggaacttgggaaagttctgtgctcatggctatgtttgcgcaaagcaacattacctagagcaggatgacactggccttcgtcataattaatgtttaaccagatgtgtgtgtgtgtgtgtgtgtgtgtgtgtgtgtgtgtgtgtgtgtgtgtgtgtgtttgagacagagtcttgctctgtcatccaggctagagtgcagtggcgccatctcggctcactgcaacctccgcctcccaggttcaagctattctccttcctcgcctcccagctagctgggattacaggcttgtgccaccgtgccagctaatttttcgatttttagtagaggtagggtttcaccatcttggccaggctggtctcgaactcctgagctcgtgatccacccgccttggcctcccaaagtgctgggattacagctgtgagccactgcgcctggccaaccagatctggtttttaaacagaacttattttctgattctaaaactttaatattcttgcagaaaatttggaaaagaagagtaaataagggaaaaaagcccttatgatccattttccacatataacatctttattaatactgtggtgtgtattctttcagtctttgttcagtgtttaacgtctaaaatttcattcattctgagataagcatttcttttcacatttacatctctgaaagtcggatgttttataattggctttttgtggtttaattggcagaatgttttcttagaggaacataaaatgacatttcttacagttaatggcatcttattttgatgaaatgtggaatacattttatttgtaat

SEQ ID NO: 53042 - DNA, 818 bp, Homo sapiens
agctgtgctgtgatcaaagaatgcacagggcttgtagctacaggagagagagaacagtggcaattccaggcagagggagtggcatgttcagcagcacaaggaggagagtggctgcccaggaaggaccctcaggagttctttccttgcagtaggggatggaggtggtgctaaggctggaagagagtgtgtggatccagattgcgaagcatttcaaatgccatgctagggagtttaaagatttttgccaaaatgaaatgatgtcaccagaaatagagcattacctgtctgcctggtgtgcattaggtggacagaagagggagacatagcaagtagaagactgttttaataaatagaccaggcaagaaattagatcttaactaaaagctcccaaatctttaggcatttcaggcatttctatgccagttggagactgggggaattccccgaggcctctccagagtaaatagactgcattcttgtcttggttctcctctggggagccagtgtcattgacaccaagcccagcatcctcatgcacactgttcctcttgcaggacttggaacaccatttagggcttgccctcaatgaggtgcaggcagccaagaagacgtggtttaaccgaacactgagctccataaagacagcaaccggggttcaagggaaagagacttgctgagagcagctgccgcctcccgacaccttcagaaaacacgacaccttttgttgccttctttggccagatgtgtgattctgtgacttgtcccaggaccagaatgtacctaagtcagatccatagacgcatgttggtaggtcactg

SEQ ID NO: 53043 - DNA, 1176 bp, Homo sapiens
cggtttccgatctgtattgtctgtctgggtattactgaccccgcgaacaggtgtgacgattaagaggtcagcactcactcaacatgacatcacttaccactcactgtgccagggtgccaggttcatgtttcatgttgaggaaacttcacaccacagagaggcagggttttaaggaccataacgggatcatgaattaggccctggccccacccaaatcactgtccattatcaggagccatccaccccccttcaaacatcctcggcccctccatccctttgcatgaagggaagaacctgtaacatgtactgaactagagccttaagggccaggaaaagggagcctgcacttgaacctttcaccaaagctgtatccttcattttatcagtgggtcttgcacagaacaatccattactgtgtgtgacagaagcatttgtttgtttttatttatccaaatggggagaatgcaacatgtcagggcattacagacaaactgcagcagccagacaagagggtcagtctatggcagagtccaacatactcagtgcgaaggagccacagtgcgggtgctgcctggaggacttgtggcagcagggtccctttggatgaaggccaggtatctctgggcgaggcactgatgaccatccacatgtgcaggctgctgcttcagtcacgctgaaggtttaaagttcagagtcctacatgtaataattgcctcagaggggaagggcagtccatggtggtcacggtttccagtgtttttaaacataatacacaaagttattgccaaggattttgcactgcaaattatactatttacacttgcgtattcagaaaaacacagtaaatagatacatgatagatattttaaatagatttctaaaaaccaacttggtcttcagtagacccgagtgagctacagccaggagtcccatgccatgtgtgtaaccgtgcggtagggaaaggtttctatccacgactacgctcagcctcctcctgcctcccccacccttgggcctgacgaagggctaaggctgagcaggcctaccttagtccttagtgtgagggcttcaggtctagactggctgcacctcccaccttcccagacagagttctgcttggagccgctgagaagcaagtcctacaggctccactcctgcaggaccactacacggcgg

SEQ ID NO: 53044 - DNA, 1285 bp, Homo sapiens
ctttttatccttacatgtcaaccccctcccgcctccctgcaggctcccctatacacctggccacacactccctcacacccctcgcaggtctcctggagcccctgggcctacccttcatttccctatcaccccagaagcctaggcaccctgctcccctccctccctttcaggcgctccctgcctgccctcacttccccctgccccgaccccctcctccatcgttccccttcacgggcgtcccggtggccttcctaatacccgccccactccctgcccctggcacgcagcgctccttccagtcctgctcgagtccccagtcttctccctccattcccaccccactcgtccctgccctccccaaaagccccctcattccctcttgaaccccacaatatagtgcccccccccaccggacggaatgtcctccatctcgcactcgcctggcccagggggccccccaaacctgcctgaaggctctcctcctccattgggccggatccctctgcacccctatttacccccaaatctgcccacaccttccgcctgccccccgaagcctctccccagctcctgcccccaatgtcctccaacacctgccccgagccccgagccctccgtcccggaagacctcccggcaccgcgtcccccaaccctgcccacgccctcccctgatcggccgggaccccgtccccgcgaaggtgaggaaggctgcccgctgcccttgcccgaagcggccggggcaccgcagcggcggcggcggcggccacaatgccggagccgcggggccgggattgctccctgctctccgcctcggccgccaccgccgccgccgctgctaaggacgcacaacaaacaatgcggggcccgggccggctccgccaaccgcctcaaccgccgccttaaccgccgcccgcccgggacggcccgccgcgcaggcgcccgccccgccgccggagcctacccgcgccgccgcgctctgcccgcgcccggtacccgctcccgctccgccgccgccgccacctcgcccgctcgcgtctccggctcctctgcccagcggcggcggctgcggcggctgctgccctggtggcgctcgcggctccggtctccgcttcggcggcggcagcggcggcagcgagcacgtgacaccgtcgagcgcgcccattggccaggccagggggcgggccccgcggctgctggggaacggaaagcccgccccctcgttcgccgcgcgccccctccacgcgcgtcctgccgcacctgagagcgccggccagcgcccgccgcc

SEQ ID NO: 53045 - DNA, 643 bp, Homo sapiens
cttctggtggccggtcccagttctgccctcagggcttcagccctttcagcccaggacctcctccaagggatttgaggaccaggaagctccagtctgatctgtgagctgggaaggggagtgaggggctggggcagatatgtgcttggccgcccggggaggtgccctggctgtccacccgcacccaggcctctgagggcaagctgggggtgtgaggacaatggagctgtgttttagttaaaccgtagctcttggtgaaatcccagggagcctgaataattgacagtgtggtcagcagctgaccgctgactttcaggcatggtggaaatcgatctggtcaacatttactgccctggccctgggaggcctgggggtcggaggtgaaaagtattgccccatcctgagtcctaatcaaacggtgtggagttggagttaggtggactcacctgtgtgactgcgagctgcccttctctgagcctgtttccttctgccttcaatgtggctaggaatccggtcctcacggggagactgaatgggaaagagctgtgtgcatcgtaatgaggggaagaggataaatctggtttgggatgtgtctgagtctaagggcccgtggggaagcctggaggtgaaggttcagccactggat

SEQ ID NO: 53046 - DNA, 945 bp, Homo sapiens
aggcaggcgaattgtctgaggtcaggagtttgagaccagcctggccaacatgacaaaaacccatttctactaaaaatacaaaaaaaaaaaaaaaaaaaaaaaaattagccaggcgtggtggtgcaaacctgtagtcccagctactcagccagctactcgagaggctgaggcaggagaatcgcttgaacccgggaggtggaggttgcagtgagccaacattgtggcactgcactccagcctgggcaacagagcaagactacgtctcaaaaaaaagaaaaaaaaaacattaaaaagaaaagctcctgtatcaaagaatcctgtctagttcagggagcaaataacaacagtacagtgtgacagctagcacaccagagggctggtttttgtctttgatttttttttttttttttttttttggtagaggcatctgtatggaaacttaaaactctgtttctatttgatcaatttagatgacacaacatggtggagtgagaatgtggcttgggtggaaagacctgcatttgaaccttgaccctgactgtactagctatgtgctcttaggtgactaacttgtccctcctcgtctgtgacaattatacaatgccaacctacctcacagggttgctttgaagagtaaaacagatgataaacaaatagattctttcacaatagactttcaacaaataactgtttcccctgagggtggagattgggtcttaccagggctggcaacataatatgcaagaccaaatataaaataaatatgcaggaaaaaagtgctgttaaaatatagaagtgccgaactaaaatataaaccttttttcttttatggtgtctttttagacctatcatgatgcttttaaatgtactatttaatgtcattataagaaaaaataaaaatgtaaattatattggcatgaactttgtcatttagcttggccttgt

SEQ ID NO: 53047 - DNA, 694 bp, Homo sapiens
tctactaaaaatacaaaaaattagccaggcatattggcgggcgcctgtaatcccagctactcaggaggctgaggcaggagaatcgcttgaaatcagaaggcagaggttgcagtgagccgagatcgcgccactgcactccagcgtgggcaacaagagagaaactccgtcttgaaacaaaacaaacaaaacatccccacaccagttcaaaggtaaaaatgttaggaatttcaggacggtgacagcagagcattaagccaagcctggggccctgtgtgactgcacaggtccatgcaggtggggccagcctggttcctgagcatgacactcaaggctctaagtgaccttctccagctgcctttcttgcttatgacaccctgtccacctcactcacacacacatctcctcctgcagaggttctgggctgtccaccacaccctgagcattttgtgcactctcactcctggctgccttcttcatggtacttccttggggaaaccttacttgaatcattcagatgaagaggacctcatttcccactaaatgtctccaccaaccaccacctgtacccaggtggactgtccccagcacactgcaagttcctagaaggcaggctctgattcatggtcactctgagaagtggcagattggggggttccactctcagctctgctccttgctgctcttggtgccaccc

SEQ ID NO: 53048 - DNA, 1082 bp, Homo sapiens
gcgtgaggtaggtaggatgatgatctccattttacagataaggaaatcaaggctctgaaaggggacgtcacttgcctgagggtgaagaactgggcaatgacagggccagagtttgaaacgaagtctgtctggccctggggctcatgcagcacaatattatttatgtttgattaagagaggtaatcacaagattgtatttgacatatcaatggccactcagggctgccctagtagcaattcagacagggattctaaggtgatgttgaacagaaagggctttggagaaatgaagtgggttttggctgcactctatgcctgctgtagccatctcggctcttggagcctctgtttcttacagatacaatagaggtaatagctatgtcatgctctaggcattcaaccccattacatagggtgagtccacagtgcagcggtggcgcaaggtgagagctgacatgagtgagacggtgacgacccctgtgctgccgcagagctacagctctctccctagcacagaaaccaaatgggggcccactgaaatctcaacctcaaacacctgctggctcaaccacgtggccagcgccaggggttgcctcactctcaccaggggccagattcccggtttcaacacaatgacacttgcatccaaagtcccaagaaaggaagcgccaagctgattagagatttctgtttccctagtgaggagaacacggtttgaggaagtgcactggagagaggacacgtgtcagggacctgataggcccctagagcaacagaatctatctgaaacgcaatcagccgcagaacccatgtagctgcagcaatgggaatatgagactcatggatctcaaggtaaaaaaggacatggtgataaaacagaagaggcacaaattcgtctccacaaatgaaaagccctaaccccctaactgaggagacaggcccccctgaaggtgtgctgcccacccatcgcttggtgacacagtcctctggggggtgctctgtggcactgtccacatgattaattgtcagaattatttattagccccatgactcccttatttattatcactcctcctccgaac

SEQ ID NO: 53049 - DNA, 1160 bp, Homo sapiens
tgacaccaaatgagacttcgtgttaatccagtttactgctgatgcagtgacagggaggtattaaaagtgagtgataaatgaaaaccaaactatttattgtacacctattacaggctaggcactgcttaagcaccagaatggtaatgaataaaccagccaaggtctctcctctcagagagggtggggaggtcacataaacaaggaaataaatatgtgacaggcatggtaaggcatctaccatcttttcacagatctggaaataatgctctgaaaagccaggcaacttgcccaagtcctcatgacaagcagttggggccaggttcacgtgagacatgtctgagtctaaagtctgggttctttcctctgtcacctgccacctttcaaaaggtcaccaacatgatcgcctctcatttgctcttgatgagaggagctacaaggaaactgacatcccaggatcactcctgaactccattatagccatgcttttcagccctgcttctcatcagactgtcttagaaagctgggaaatggatggctgctgttgaaattcttttcatttgggaaacctttcggcttttcaggtggcttcccaatcactacctcatttaacctgcacacagccctgaaagatagcctggaattcctgtagttttcagcccgtttgacctgtgaggtctgaagtgacaggttgtttgcccagccctctgctcccctctgtcccacggctactgaaacacgtagggactggttagttgggcggaaagagaagtggccccaagagagcatctggatgccagagttttgactagatagtgccatgcctttccctgtctgcccacttggcctgtctgcccctgcaggaccccaaacgccttttggcaaaaaccccctacaaggatcaaacgaatcttccacttgctttggtggtattacacattgggagcctcttgcttcttgcttcctttagacgctaactgcagggtgatttgtggttctggccaggggactgtcaaaagaccattccaagaaactcagaaaagagctttcatttagtcatgatgaatggggaaggcaaatgtcagctgaattcatttaactagcaacatattccctagtgtcagggcagactcccctaccgaagtaggagctgataatctgag

SEQ ID NO: 53050 - DNA, 1082 bp, Homo sapiens
aagtctttagctccccaagtcacaggtcagttcgtttgtaagatggggataattccatctacctcccagagttgctgcgaggcacagacagatttcacataaagtacctgccccaaggccagatgtgtaagagagactcagttgtgggttgttgttctttgtttgagacacagcttagttttttttgtgtttttttaaaaatgatttttagtctcctaggacttgtagcaaacgggttagtgtctcctggtcatcggagccatgccatacatgctattaaatattacatcaattcatctaacaatctgtctaaatctggtcagagggacttggttatgtctgagcagctctggtgttttagaaacctgtgctcctatcctgaaagtttctcattcagaatcctagcagccatggtgggaaactcttgtctttctgttctaagccatttagtatattatcttctatctagcaggacacaaggtgaaggagacagagctgggtttttgcagacacaaagatctgggtttaatcgcacctctaacactgagcaactagacagcctagcgcagacctctcgattggggcaaagggctgtggtgaggactttgcccttgaatctcagtgttcagagagtaagccgcccagagattcttccagacagccctctggtactgtccctcccctgcttaaatccttcaatggttatcatgcctttagcatggctgtccctccattcatcaacatgtactgacctgctatgtactgggtgctttgtgaggtactggggagggtgcagcggataggaagtccagggtctttcccctgcatttaggaccctgccccggcccctgcctgtccttcctgccttgttgccccttgctccgcaccccatagtgcaccttctagccacactgagtgcttgcaggtctacgaatgcacaaggcattcagttctcccctgagcctctgctcctgttccttctgttgttactcacatagtcctgtttcctcctaacctcaccgtgtcctgcagtgacttcactgtggccctcagtacagtctggcatgcaagggagcttctgg

SEQ ID NO: 53051 - DNA, 495 bp, Homo sapiens
aagtgattatcaacttttaacaacggacagaatattgttcccaggaactttcctaggggatttaccagggagcaagtgtcaggcaataaaaaatgactgcagaggcatcaccattaggactggcagtaacagacagagtcccctgaagactgagagggagacagtgtcttgcgtaatggctgcatgctctagcaatgtaaatacagcggaactagtcaaaaatgggaggaaagaacataccaaaaaatagttaaaaggttttctgtaattatgctcatggtagtatgtgtattatttttggagattatgaaactaaattagtaattctggagtattttattattccttctgcccttgagaatcagaattttcatatgggagagaggaaatacaaatgtaatagagaagaggttaagtaaaagctctgtagtcttgaattttaattggaagtatcaatatgaacgacaagagatttacgtacataagcatatgttt

SEQ ID NO: 53052 - DNA, 745 bp, Homo sapiens
ccataaagttttaaatacctcattcttatttcattataaaatagaaaccagccagacacatgtcaaggaagctctatgaaggtatcgtttaagtcgagattcccttacctattgtacagttgaggtaatagggttcagaaaggtatagtaacttgtgtagagtcacacagcttagaaaaggcagagtccaggttagcatcaagtctaacttcaagtcaaggggtctttcacttcattatgctattcatttgcctggggaagggatgagggggagcgatcaccaaatagccttattctctgggatctggcagtgctggttctcagcctgcttgacctcagactcaccccacttttctgctctgctctctacagacaggagggtgacctttgcacactgagttccctgggctcccagatcagctggtttccgcttggtttggcccatgcaaggcaccagcgagagattaggaggaggaaagtggaagggaaaagtttgagtatctcttcacgctctctctgcttgggtgggctgtctagcaatggttcacctcctccctgactcaagcacccactgcacagacccgcagggaccagctgtggtcaagtgaccctggcctctggcctcacgaacaccacctctgctgttactaatctctggattgcctccctgtcttcttttgaatttcagctcctccatcacttgtgtaaccacttccttgcattatttcccctctgttgtaaacaa

SEQ ID NO: 53053 - DNA, 707 bp, Homo sapiens
ttaggtgccattgaaggcagtagtgccattcacagggaccaggaacagtggaaggggagtggagtggcttagagagagagagagagacacagagagagagacacacacacacacacacacacacacacacacagagagagagagagagagagagagagagtgtgtgtgtgtgtgtgtgtgtgtgtgtgtgtgcagacaataaattgtttggggaagactgggggagacatccgtagtacatccaggtgaaatccaactggcactttaaactttggacctgaagctcagagagaggcagaccagcattagaaccccagctgagtcattgacattgacctggtagctgaagcaagaggccttaaacaaggtgactagagggcacatagaaaagaagagaaagacaaaactagaaacttggagaatgctgaggcgctgggacataaaaaggaatctgaaaaagcctgtgctggagcagtctggaaggcaggaggagaggcaagcgggagggaactgtggactccgatagaccaaatagtcgttatattagtgtttcaaactctacagcaattggcactaacggtccattggtaagtatttactttgaatttcaatttttcatacgggagctttgaatagacccccaaacttgacaaacaaaggtaaaacacagaagaaatctcttcaatctgatctaaatacatcatccc

SEQ ID NO: 53054 - DNA, 529 bp, Homo sapiens
aaaatacaaataaaaaaataaacccatggaaaatattcagttacctctaaccaaagaggtaattctaaaattaaagcaagcctgaaataccatagcacatctactttcttagcagaattaaaacacctgagcacatgcacgtacacacgtgcgcacatgcgcgcacacacacactctctctctttcctggcaaagctgcggtgaaaatggtgcactcatctacagctggcagccttcactgtaaacaagcaccgcctgtttgcaaagcaatttggcagtccctaagtcatagcgcttatcaagccctttgacctagtgtcccactccttagaatataactgtaacagtcaaaagaagccaaaagatgttcattgcagtattatctactaaaaggattaaatcataatgaacaacctaaatggccatcaagagaaggatttagtaaataatgacacacccgtatcatgaaatatggtgtagacattaaaaaatgacaattgaagctcatgtagaaacctgcaaaatgttc

SEQ ID NO: 53055 - DNA, 919 bp, Homo sapiens
cccaaaaccagtaggctctaaaagattgtttccttggacaatttccaataaactaaaggtctggcaagggaagtcaaagaggttaacttaaaagggttctgaatctccaaggaatttatcattctctctctcctacttgctggggtagtctatgggagtgttcactatttctccataaaaatgaccttggggaaagggtctgcttccttaaagtctgcagtttgagtttacctcagcatccataatttccaaaggaaccagagatttcaggatgatggaagctaggagaaaccatctcacccaattctcatgtttcacagatgagaaaactgatatttagggtttactttcattttgttttccaaggttatcaggactaggacaaaaatccaagccaacttctggttcaaagtcctttccattctgccacgctgcactaaacacaatgaaaatcctccctgggaagctttcaactcggtttaaggaactaaggtatgcgaggaattcagatagttgtcttaacaaaaaaccatatttttcactaagctagggagaccacatttgaagttctccagaaataaacccaggagaccagggccaagaccagccttagctgtgcttcttgtagcttcccgtgcctaggtgaatatgaaaaacaagggagaaaagcaatagctattcaagccacagacctaaaccttcatgcttccttttaaatgcctatcagccattcagggcctctccagtagcattttgcttaatcttgaagttgtttacagggccagtgcatgaatggtatgaagcatgaggatggacagtttgattctagtctcccagtgagaaacaaacttttacatgtgagcttcactttaagtttcattatccattttgcaaattgagctacaactacactgggcac

SEQ ID NO: 53056 - DNA, 1701 bp, Homo sapiens
actctctacagagtctagcacagtctaaagtgaacactcaaagaataggtgattaatgatttagaagtgtgataataagacctcgggcatgtagactcctggggaaatcagtcttacatggcagttttcaagaaacctgaagatcggtatttttaagcattaaaacttgatttaaatcattttagttataaatgtttccaagcttcattattatctcactgcttttttggaaagaatattttgaatcaaacattttcttgatggctgcagtagacatctgttttggcggcccagcatccgttctcccttcctccagtaatagcaccagattttcctctgaggaaccaccctgccccattctcaggctataggatccaggtggtcctgaacagctcccccagttctccccctgctcccccaacacactcccttatcctccaatcaacaactcaaaagtcatggttattggttcatgaatgggtacgtgatccaaacagggcctactagagtcagccttgggactatggctcaagatactgtaagacactctttttctatttgggtgttaaactgatggaacataagcttggatttattcataaccatctttgccactttatagggagcacctgcccagaaatgaacccaacacagaagacagagaatcaagagatagggaaaatttctgaaaatatgagtagaaaacctagattcagcaaaacctaaagccagttttaccactggacttctcagtgttaagagccagtaaattccctttgttgttcaagtcggatttcactgggtttctgtcacttccagtgaaaaggatcctgactgatgcaatgattgatgtcattgacacgatcagtaactgctgagcaatattgcacagagaaatcttcccggcatactgaagcactcagggcataagctgagggcttttctgtgattaaagaacttaagttttaatggatagactctgagaaatctactttgtctagttacttttactttctgtttttcagttatgtcaatttgataacagttgctgagtagcagagttccacacagatataaactcttgctttaaacaaaagtaagttaaaataacagctcccatttataaagaactttccatgtcccatgcatggtgcactcccatttaatctttcaactaaaacaggtactattagtgccccattttagagttgagaaaatgaggctctgagattggcatgtggagggaattttaaaaattcaacaaactcactgctcaaaaggatttcaaagtttagtaaatcaatgaattcccggtccaccatagaaggcctgaggcctaatactgtgaaccactaacacagcaagaagaaccacagtgtcatgaataaagcaaaaattctaaggctcccctatatcataatttatacccagatggcccctaaattgcgcactttaggaaaaagaagaaatctgggatctgcttcaaataactaagcattaagaaaagaaaatatatggctcactttgttacttcctaagaacagcaattcaaactcattctatataaccaatttagagcatcaccatagtatataaaaagcacaagcttcaagcagggatatacaattaacgtaaaattcaaaatgtgatctcagtagagaaaggcaaattgagagaggcataaatggagtactcaaagat

SEQ ID NO: 53057 - DNA, 1565 bp, Homo sapiens
gccttcagcaatttagtccagcccacttcaagtcttactcattcaataaagcacacacattcactatggatccctcaaagattccttccattctcaatgcagactaaaatgccttatcccaattataacttttcacttttcctcagaaaagcaaacatataaccagtcctcacctcacaaatactccatttgtaacataactctgctaaccttggcaagtcatctttgattcttcttttgcctcttacgtgtaatttgtcaccaagtcttgtcatttctacttaaaatctctcaaagccatccttttttttttttttcttttttctttttgagacagggtctcactctgtcacccaggctggaatgcagtggcgtgatcttgactcactgcaacctccgtctcctgagctctgtgggagctcaagtgatcctcccacctcagcctcccaagtagctgggaccacagatacatgccaccacacctggctaattgttgtatttttttgtaaagacagagtttcatcatgttgcccatgctggtctcaacttcctggactcaagccatccaccctccttggcctcccaaagtgctggcattacaggcatgagccaccacgcccggcctgtcattccttttctttacactgccaaaaccttgctctggaccttgatcttcagcagtaaaaactatttacacagttccacaatccagtggcctcccatttttttccatgcattcttcctatcagtaaaaaagtgagcatacatctgataaatatccataaattataataatgccttactatactaacacatacattaaaaaatacaaactttgaaggttgatataaaaataaatacaatttctaacatattctcacgttccaatgcgtcatcttgtaaaagccagagatatcactgttctaaactgctgctgccagggtaatctacctaaaaacccaaatctgatcatagtacatccccagttcaacccttcaatggcatcatatcccactggcacatgcctacttcatcaacttcctctcctgtaatctttatccttatatcctgtatttcagctttaccttttatctccccatgacttttgcatacacagttccctatatctggaatgcccttgccctcaacagttactgatttgtacataacagtatcttgaagagggaaacacattctaaatgtcataaccaacgtccaaatgaacttttggaatgtcacctctcttttctataggaacatatatgtattttaacatatcttttcttactttatttggctccttttcaagtcctgaatactcggaaagaatgggtacggattccaataaaagtagagaacaaaacaacttcattttgtttatttttcttccttgtttatctttccatgtccctacaaagcccctttaagcaaaaaggatgttacgaacccagagattagctctccctagggccaggaaaaaggctggacctttgcaactgcaaccggaactccagccaggaacttacacagatttaataactcaatgcaaacatactttcctagag

SEQ ID NO: 53058 - DNA, 1753 bp, Homo sapiens
aaacacattccacaaactttcttgtaagagggtttaaagtgtcctaggaaagttgttttacagaaaagcctatgctgtcaactttgctttttaatgcccttaaacaattctattagtcacagaggaaaaagtgaacatttgttagtaattagagataaaacatctccagttctggggcagaggaagggagaggccacaagaggacctggctgggaggggagatagagtcgaaagccacacacccaaattggaccgcttaagagttgcactttccaaagtcaacttctaagtctacaaggacagcaacaatgtttcagtggattctgaagttacatgtatcaacaatttccccggaaagctaaccctccaccgggaactccaggtgaatgaatgagtgagggaattcgccagattgagttacaaagcctttccaacgattatcaagagcaggtgctcggttacaacacagaggtatcctccttcacagcctttggaccttgctgcgtggagattttcacagataagaggggggaaatagagagacaggccttcctccccggccatccacaccttaggtggccacaccatgagcggcccctccctctaagaacctcacgcgacttctgtgggggccgcaggcctcaagcggccaggctgcaacctctccggacctgccaactttcaggggcgccccaaacatgcccaaacatggggaggtgcttccggggctttcccactccccttccccacagttgaaggaccattttcaggggctctccgtaaacccggggagggggccgccctgtaatctcagctgttccgacccccaggtgaggaggggacacctgacccccggcgccctgccaccccgcgcgcaccccgcccccgcgcctccctggatcgccatagcaaccgtccccctccccgcgtgccggcgtcacgcggggcgcccctctggtctcggcaacaagtcccccgcgcggcccgcggcctgcagccctggcccggcctcgccgccccgcgcccggcccggctccgcccggcccggccgcactcacttgatcctggagcccatggtccccaggcctcctcatgggcccgcgggccccgctcggcgctgcgctgcccgcccgcccgcggccgaccggcctccctctggcgctctccccgccccttcctcccttccctcaggctggggcccgcccgctcgaggctcgctccctcgccgccgccgccgcctccaggggttaatgtactcgctccagcccggcgaacgccatggtcgccggcgcgcgtgcccggcgcgcgccgccccctccgcctctcaccaccgcccctcccgcccgcgctgccgccgccgctgcccgctggggctgctgggaagtgtagtccgctcgcgggggcggggccgtggccggtgggggcggggcgggagcgcggtcacccgcacgtctcccagggcgcgggccccggaggactctggcgttccgttgcaggcccttacacatctgcaccccactgcgccccgctggaaacctccactcacagccgccctgaagagaccctaatcctctcatggagaccccaagccctcccgatgaaaccgccaccaatcctcccattggaggcctcccacccagcctctctaacggagagctaatcccccgcccaggcctccatgaaaacacgttttccctttaacatcccgcaccttccagtaagttccgtgcagaacctcttctccatcacaccg

SEQ ID NO: 53059 - DNA, 1479 bp, Homo sapiens
ttcacgttctgtatcagttagaattcaattcaactgtaaatgatagagaagtgaaataacaattgttgaaaaaaatagaattttatttctctttcacataaagtctggcgattaacattccagagctggtatgacaattctataattaatggagacccagaattctatcttattgctctccgattctccaggaagaatttccacctcatagtccaggatggctgcttaaactctagctatctaatctgcagcccagcctgcaggaaggaaggaggatctgtccacgtcaaactctgacctttaagtgtacttcccaggaattactcacaccacttctatttacatcccagtggccagaatttagtcatgcaaccacacctcactagaaaatacagcctttattccagacaaccagacaataaggtccgcagctgaaaggtagggagaagggaatggcatttccaggaaagaaggggaggatagatattgcaagacacccagcaggctcagccatgcttggctatgtgattttgagcaagccacagatttaaccaaaataagagaatcaggccaggtgacctccttccaaagtccttttgggttctaaagttctataattcagtggctgattgattttataattcctttaaacctaggtgaatctgacgtcattcaaatgaaatgagacctctgtgccaaatacatgccataatcaattgttggaatgtaaatcttctggtgaagagaaaggatttaggaactttgccttcttgactgttgtcaaaataggctaagcagatctagcagataaaagtccaacggtagggatgataccacctgcattgacactttgatgctcctcagtttccaagcttgctcttgctcttttgtacctgtttggtttctctgcttggaatttagggagctgtgtttattgaggggaagacagcaaccccagggagctctattggcccccaattatacaatacgaaatagcagaacaaatggtctgtgtgccaggattcagtggtctgttgttcctaatacgttaaattgtgattatattattttttattgaaatgtagttcaccaaccatacaatttaccactttaaatgtgtacatttcaatggttttagctgatggacttttggattgttttcttttttttgagtctcactctgtcaccaggctggagtgcagtgacgcaatctcagctcacttctcagctcactgcaacctccacctaccgggttcaaggtattctcttgcctcagccacatgagtagctggaactacaggcgtgtgccaccatgcccagctaatttttgtatttttagtagagacagggtttcaccatgttggccaggctggtctcaatctcttgaccttgtgatccgcccacctcagcctcccaaagtgctgggattacaggcgtgagccacggcgcccatcctggattgctttcttcttttggtta

SEQ ID NO: 53060 - DNA, 446 bp, Homo sapiens
ccacaccctgaattcttcctgggaacccatttcgggcaggggacagggccccacacccctacatctggggatcagcccatttgccctattgaggagctcagtgccaagccaaaaaccctagggcaagtctcgcagtgtgatcgcctccccgctgggctgagagggacttccccatctcttgatttggaaacaaagtgcaaaaagtcagccctggaaagtttcccgtgtgaagtttaaaagcgcctgtgctgaagaggccgactttgaagcagcttgccggggccccttggcaggctcctgcgagtcagagggccggcctcgcctcagatccgctgcgcctgcctccgcagggctgggaaatgggaattgtttttaagttgaaaaattactcatggagctcactcctttgccactgctcttcttttgttctcagtcgtcgccttcct

SEQ ID NO: 53061 - DNA, 957 bp, Homo sapiens
acttcttagggtttcgtgaacgttgaatggtgtaactcacgcagccatagcgtttagcagagtgcctggctcatcgcagtgctcagttcctgggagctgttgctatttattcagctccgtctttccattcaggcacctctagcgtgcttgccccttgaaaagaggagagggagggctcccactctgggacggccgcagtggttttcagagcttggggtgggggtgggcttggggcggttccgggcatgggggtggccgcgggcctggagctgtaagaggaggtccctggggactggggagaggggggcggaagccggagccgaggtcggatccggcgaggtgggcagagcagacatcctgcgggggcgcccccagcccggaccgaggcacggtcccgggggagccggcccgggcaccgcggccatcggagctgggacgccgggtctggggctgcagagccgccgcaggggccggacgagggcgccccctggcggggcaccgcggcatcgccccgggtctctcacttcctcagcaggctgggtggggtcttcgcggaggaaattcccctcagggaggggtgtcggggactccggagagctgtttcgggctccggacgctttcctgggctccaaaactgggagtgacgcttttgagccctcacgtgtgccgcgtactgcattaggcagatggcagctcacggcacaggcattggcacgcggtgggtcccccagggtcctcttctcccttagcctcattcctcgggcttctgggcaggggtgttgggctcaagcctgagagggtcctccggtatggaaggggtgagggttgtgcagctccagaccgccatcctgggtgcccccagggctcactctccctgcgggccccccactcccaggactggaccctgtgtatggcgtgtgatgagtgggggtggggctgcggtggggctgggtggag

SEQ ID NO: 53062 - DNA, 1074 bp, Homo sapiens
aggctggagggcagaggcgcgatctcggctcactacagcctccgcctcccggattcaagcgatcctcccacctcagcctcctgagtagctagctttcctcaattttaaatgaggaaagcaggctccgtatatagaggagttctcccctaattttctctcagcacaggcccagtccgccgttccttcctggttcccatccctccctcaccgccgcccgtgagcagggccgggcacgcagcaggcattcatggagtgctgctgatggatgcctggaccgggtcccctgggctctgagcccggggcgggggtggggccagagccgggccccggaggggttgggagggcgcggaggggaggggcgcagggggtgcgggttgggggtgcgcaggcggtgcggctggggctggcaggagaagggttaagaacaagcactcattaactgcctcccgcttgctgggcccacgtgcagggtggcctgggcttagggtgcggggagcctttgggtggccccctgagagctggtcttccaacacatgggacccccggagttcagcccgagcccccggggagctgtcgggacgggtcctctctggggtgagccagcgtctggggcccgcggctccccgcgagcaggccgggaaacgcctgttgctgcttttgtttttccatcaacaaccgggcttacgtaaactcctcgccggctctgggctgccagcgcgggggaggcggccttatctgataggggctgtgccagggccggggttccctgcgtgtcccggcacaggccccgcggagagagcccgcgcggtgggcggggggcggggaatggcacccccgggggggcgtctgtcctcccagtcccagaggggacagctgggtcctctccctgcaagacataaccaggggcagtggtcctcaacctccgacctgcaggggtccggcaggaaaaggaccctcttcacccgcgcgcacagagaggggtaaggggcctgtagtgacgctggggtggcctcgtcaccagggtcacctggcttccaaccccagctttatgctaggctggtggtgctcggagta

SEQ ID NO: 53063 - DNA, 2030 bp, Homo sapiens
aacaatatttcccaactccttccttccctcctccttccttttttgccaacatctctaagaaagttggatggcatacaagtccttcatgtgtcattatgaacatgtttaatcaggttgcttttccaacatccaagacaattggtctcaattagagtaaaagaatttctctggaggttaagggagaaataagttattttgaagccttgggcccccgagagagagagagagcctggtgggtgatttatgcatcagagaggcagcaggactgggtgtgatagtgggaaggtgaggtggcccagaaaggatggaggtaagatcttgaagacaaacttggctgaattttatgaattactagaggttggcttctaattaggcctggaactcaatgccatgctggtgtcattctttccttttgcttctctggggacagcctggccttctgggccagggcccattagtgagtcaccgtgcagggcattcattcactaaacattccttcagaacctgttctgtttcaggttctgagttggatgctgggaaaacagacattgctcagcctctgttcctgccactagtgagctcttgaacttgtaaagagaatcatatcattaattttaacttactagatcaagggatgtccaagagagcctgtgagccccagattagtgactctgtttctgagagggactgatatcagagtggggtcttgaaggatgaataggagtttgacaggcagagaaatgtccttctaggcaaaagcacatgcaaaagtatatggaggtatgaaagaatatagcttactcagggagaatgagacattacaggatcagcggttaatggaacaagatgggggacgagcaagaaaaggtataaagaggcagaatgatgaacagccttaaatgacactgtttggagtttggacagggtagagagatcagctagagagcaggggtcaaacttgggcctaggtttgctgaactctcaaggcgccaacttgaaagagtgagaagtccccttctctgaccagaagcaacttacatacttcctggtggagtagaaaccaattccagcatgggggaagcccccagagcagctgtatagggcaggcacatggtgctcctggatctgaaaggaagggaaaaggatggaacaattcagtgcacttctaagttatccaaaacaatgtgagtcatttaacaaatatttgtttcgctcctactgtatgcaagacagaggttgtcagtgtgttcaagccaaagatcaaatacccatgcctcaaacctgggctcagatcccagctctgccactgattttctgcatggacgtgggcaaattgcttctcctttctgggccgaagtttctccattggtacaatatgggtgttagatttgaagattttgatcatgatgtcctgctctcatattctgcaattctgacttgctctgtgatcttgggccagcccctgcccctgtcttggcctcagtttcctcatctgtaaaatggaaggtaggaagagatttagcttgagatacatggagcctgtatcttggtcacccgagccttccctacacccagcccagggtcctgagctactctccccacccccagcacactctagcttcctctacatttctcatcaagatgcaacatactttaaatagcatctgcatgactggctggttttttccttcccggagaagctctctacaaagtgtgccaagtggcagctgtcagggccgaggtggcatttccctcagtgatgctgacagcagctgtcccggcgcaggctgaatggaatggaaatgacatcatgtttattcaggaaagatgttcccagacccagatcagtgtcagcaagatgctgggatgcttgaggagggaaaacaggaccaagaccaggcactgggtctcctcttctggaacacacactgcgccatacgccacccatctcacacacattccacgcacacatgctcacacacccacaccactcacacagacgggcctccatatataccacaccctctcgc

SEQ ID NO: 53064 - DNA, 739 bp, Homo sapiens
tcctggcttcaagtgatctgcctgcctcagcctcccaaagtgctgggattacaggcatgagtcacctcactcgatcctttctcaaaacaaacaaaaagaatttgctggcctcggctcctggttcctgggaggtaatcttcaaatccctggaacttcctgagtaaaaaaagtatctttgatattcatgatggctcccatgggccacacgtgatggtttaggtgactaatgcttcctaggaagtttatgctaatcagaagacaaggtagggtcagggtggagactgacaatgccagaaagtccaaccgtttgataagacggctggggctttgagtcacctgatatcagccctacctctggggacagctaggggagtaaaggttgagttcaacctcatggccatgatttaatcagcctatgaaataaagccccaatagaaagtctggacactgtcatttaagtgagcttccctggttgtccatactatgcatattgatgtgctgggagggtaacggctccccgaggatgatggaagcttgatgtttgggacccttccagaccttgccctatgcatctttttctttggctgattctggtttgtatcttcttgctaatcatatgtatcatgctatcctgaattctatgagttattgaaactgcctttgcaaaattatgactgagacagtgaaagagacctaatttaaccaactccatcttgtttctttctttttctttttcttt

SEQ ID NO: 53065 - DNA, 2360 bp, Homo sapiens
tctgggaagccttccctgaccacccaccacacacacacacacacacacacacacacacacacacacacacagagagagagagagagagagagagaggcaggacaagacagccacagaccttcatcatgaatagtggcattcactgtgacagtggcgttcatccagtgcttcatgtttatgaactgctctgcatggatgatctcattgaatgtttacaaaaacacaatgtgtggttctatcaatagcttcatgttacagacgagtgaaccaaggctcagagatgagcaacttccccaaggtggcatagtcagaaaatggctgagtggggagtgtgacccaggtctgactccacagctaggtcattgaaccatgcactatcctctgagactgggatgggatcagtgttgtgcaacttgcctgctccaaggaggctgcattgtgaccctagcaaagcttcattttcagccttgcccttcccagcacccctggagtagctgggagctatagagtactctagggagagagggaaaccagcttgtaatgaggaagcatttccatgtaaacatttctggtaaactgtgtgaagggatctcagaagtatctccaagcccttgatactgtcttgggttttgttttctccttctaaataaatgcttttgaatctaattttgtattctgtttctacagatggggcttccaaaattgaaaagcttcagacttcacaaatcctaggtccaccctgcggtgccctgtgacttaaccacaaccactgcactgcctgggcttccccagccctctccaaggcccgctttcactgtaccggggttttctatttatggatccgccctgctacccgccactcccacaacccccacccatagatgggccatgagctcctcatgggcagagggcgagccctggtttcttggtaccctagggactgcttggtatatagaagcccaggacagatttgttacatgagggaataaaggagtaaatgaatgagtgaatgaatgaatatgggtcccttcaatgccatcaggaagtatgagagatacaactccagctttaaaactccaggtcagctgggtatggtggctcacccttgtaatcccaatacttttggaggctgaggtgggcggatcgcttgggcccaggagttcaagaccagcctgggcaacatggtaaaaccccatctctacaaaaattaactgggcgttgtggcatgcacctgtcatcccagctactcgagaggctgaggtgggagaattgcttgagccccgttagtggagactgcagtgaactgtgatcgcaccactgcactgcactgcagcctaggcgacagagtgagactctgtctcaaaaaaaaactcaaggtccatctccctgtgtgccaaccctgcatgggtgttgagggtgactgacaatttggacagggttcagctgaagccagtctctagcaaggaggcccaaagcccctccggtcactctgctccctacagaggcagcactctaggccccaggcctggacctcaaggctgcagcagggcccctggccgccccctatagccttggaagcccctgagaagaggcccttcagtgcagctgcagcaggtcagacgcctcctctggagaagaaggaagtgaaagtgctgtggtgggtgagtcatcggagtgtccctctggacggattgatgccatgagtggcataagagggacaggctgggagggaagagacaccagggttaggagcccttttagtatcctccaggaaggccccacctcacctcccagcccctcccagacacaggggtcttcagcttggagaagagaatgccttggagatgccatctttgtcctagtctctgaagtgggtagaaattagacaaggtccacagcagagggggaagatggagtcagatggggaggtcacagaggctaactggttgccaccagggccaggctctggtgggctggctgctgcctggcagtagtgatggccaacagcaagtagggtggtctcctgccatgggtcaggatgtggattctggatttgaacctcatgtcctcaaaccccagctctgcccctcatgagctgcaggatcccaggcaagtggcttcccctctccttcctctgctgtcgagtgagatcatagcacttaatgcataggatgagcagggcatgattagatacattactgtatgtaaagtgcatagaagagtgcccgttcccaggaaacccacaataaacagtaactactgtatcaggcagcatctcatcaggaagcctgaaatgccctaggttttgaacagaagggatttaatacaggggcttgtcttccaatggaaggactgagaaa

SEQ ID NO: 53066 - DNA, 2439 bp, Homo sapiens
tttcactgtgttagccaggacggtctccatctcctgacctcgttatccacctgcctcagcctcccaaagtgctgggattacaggcgtgagccacagtgcccggccgatattttgtttttaagaatgaaataggataatgtaggtagagtgtttggtagagtactggctcagcgtaaggactcaacaatgatcctagcaatcgcttatgcaacacgctagttctcatgacagttctatgaagcaagtactgtgatcactatgactcctatttaacagaagagaaaactgaggcatggagagatcaagtcacgcaactagtaaatggcagagctgatctgaaccaaactgttgggctcctaagtcccacccttaaccattacactatgcccccttcccatttcaccatcaacagctctctccccagtcagcctcactcaagctcaacgccgctctccttctcagaattttacccagggcctccaactcagatcaataaccagcatctgctcccaagggtaacacctgacacctgacttctcacctttttcccaggcctggggccctggagtcaccagggtttgagtcctgactttgcccattttccagccgtggagcttgtagaaggcacttctcttcctaaagcttccgtttcctccactgcagcatggggagggaggcttgtcctaaatttgttggcctgtggtggagacaatttgaagccacactcacggagcaggtcacactggaagcgtatgtgtgttcagtgtgttccctggaagcgtatgtgtgttcagtccatgaaactctgatcaacagttaatcatatccccagagtcctggggacactgccaagtatttctttgcttttcccaacacgttctcagcccctgcagtgtgcatcgtgggcaagtgtgctgggcagtcctgtgtgcttgcccctctcctgcaaactgcttttcccagtttcctttgccaactggcttcctgttaggttgggccaaggggaagcactggcaggagattggagcatgggaggaggggacaatctgggtatttctccctccctctgcttagggagggagtgggagtggcctttccccagcacaggctgctctcttctgtgtctttggctgctctagaaccacccggtcatctgcagttccaagtctccaggtggctctgatgattcaagttactcctgggcagtatcactgcctcttccttttgtctctccacccctaagtggtagcaccttttgccattgtggaacaagcacttgcctcaccatttgctgtttggcttttcagctcttccctcttccaggtaaccaattccctatattaaatttcctctgttggaaatacctagagtggtttctgtttttctgactggccttgaattttacagcgggcatctttggcccaagaattgtctctctcttctccacttacagagtttttatcctagaggggcagcatcagacccctgagggcatgtcacaggcgggactaatggaagaggctctagctccttctagctctttgcagtaaacttactacaagacagcaaagctttctcatgctaccactgactgtctcttgtgacataggtggagtagcattgcgctactctgctgtctctctacttcaccttcctgaagacttattgcacaaagggtgggtggagctgtcgagaaccaggggagagaagaaagtagtgaagggggcaaagaagcccttcctggcacactagcaaagtgcctagtacaggggaggcattcagcagggtatccattccttccccttcagcatctgttgaaaatcaggctggagcctcaaatattggaaccagccctaaggggaatgaaggctcgttctgtgtcaagacagctgccccagggttccactccttaaggaacaaaggagtggggacagactcctttctgtgagtagaggggtggtactgcctcccacctagtgtctctgggattccttttggaggctgctcacagatgtcctcccaccttggcctccccactcccatctgcccttccaggttccccggcagaggtcccatcagtcagtcccctccctccagcccatggtggtggctcaccagacggaagacagtgggtccctcaggcccttgctgggcctgccctatcccaggatctgggtccctagcttcatctgtcacttcaaagcttcctgtccctcagccagggactgaggtaaattctaggcgttctgggctctcactttcctcatgtttgcatgttctttgtgacgcggtatccaagtcgctgcacaggtaggaggagcctgagggctcatccagtccaacctcctcctatgcagttcagatgggaaaactgaggttcagaatagagacttgctggaagcatgaaagtaattgacaggttggtaggggcacaggggg

SEQ ID NO: 53067 - DNA, 1101 bp, Homo sapiens
gcgtgtatttacacccacatgcacactcatcggcacacaatcagagccacacacctgcacgtgcccccacagaatcacacgtgtgtgcagtctcacctatctgcactctgccatgggccccattacatacatgcatgcaaacagataacacacacgcctatcaatagccaggatgactcacacacgaggacacacatcataccctcacagactcgtgcatggaccaccctgcagtcacaaagcagcatccagcatccgacaatctgctgatgtcactcccctgagagtaaccatggctccatgcataggcagaggcaactcagctcacaggtgccgcctgtccacatgcagacacagacacacacacacatacacacacacacactctgacagttccccaatggccagcctcctccactgactccccacagccaggtgctctgacaccctccttggtgggaccctctctcttcaaggcgcccagagccacctggctgtccttggaactaagtgagcaccctgcccacccccagccttgtcccctaaactgggtggtttaggtctgaggggtggggagaaggctgcccagagtccaaagttcaggggccaacatcttgtttgcaggcgctggtggaaattgcacaacctgccagctgggtgacttgggcttattgtctctgagttccccttggctgcaggcccaagcccagccagtgacctgtttctctggaagagggtggggaaagtggttcctccctcccctgcctggggaactggtggccctccctgggcactggtggctggtccccagctatgtgtgcaacacacctgacactgagatgcacagaactcagcatccaacctgtcctttcccagataggaaactgaagctcagggaaggaaaggcttgcccagggtcacccagcaaggaggcccaggaggactggaactcaggctcagtttcctttcttttcttttctttttttttgtgatggagtctcactctgtggcccaggctcgagtgcagtggcgtgatcttagctcactgcaacctctacctcctgggttcaagcgattctcctgcctcagcttcctgagtag

SEQ ID NO: 53068 - DNA, 5116 bp, Homo sapiens
gtgagaactgagctgcttgggtctcagggaggctctgacttctagagggggcgttcaacattctttagtggggacttttactacttccagaaacctctgcacattggctcttgctggtcccccgggggccacaggaagtgggagctccagatgaagagtcgctggcactttgagggcagggggcagggccttcccctcatcggaatactcttggagcctacttcagtgcctgcattcagctggtgcacaataagtgcttgttactgtgccaatttcagtatgactagggctgtggtaggagcaatgctaggcgatggggaatccgaagacgcacaggagtccaagggttggctgactgcagaccctcatcataagtctagagccggagaagatggggagacgccggcctgcgccctgtgagtctgggcctcagtcttcccatctctgaaatggggaaggggttcctcggccgagcggatcggccgcagaactcggcggagtcgaggggtccaggcccaggaaggacgccgccggggcgccccccgcccctcaagcttgcgtggcggcagcgcgcacgagcgctgggggcggcgcggccccgcggcggggaggggcgggcgcgcgggcgcgcgggcccgcgcaggcggtggcggcggcggcggaaccgagctgacgggcgtgcggccgctgcgccgcaaactcgtgtgggacgcaccgctccagccgcccgcgggccagcgcaccggtcccccagcggcagccgagcccgcccgcgcgccggtgagtcgcctggggctggggccgggccggtggggccccgcggcccggagaagggcgggggccgggcggcggggccgtcacccccagccgggccgagggcgggcgcgcgcccacggctccgcgggggagagcgggaggcgggcgcgagtgtggccgcgcggggctgagcgtgtcggcggccgggcgggcgggggcggcgtgtccgcgtgtcccggggtgtgcgcgtccccggcgggtgtgcgtgtgcaccccggagcgtctggtggcgttgttggggtgagtgcgtgcggggacgcgggcatggctccccgctacccacttcccgagtggggacgacgggcggaggagtgtgccgggcgccgcagggagtacgtgcgggtctcagggagtgtgtgtgtgcacgtgtgtgcattccaaagtgatttgtgtgcaagcacatgcgtgagcctagaagggcgaaagtatgcctgtgtgggtgtgagtataacgagtgtgcagggccgtgcgagcgtgtttattactgaggttgaggggccggccccctttgcgcccaccaggcctttgcacagtgatggcccccgagccagggagcccgtggagagagaagcggcctggcatgggctgggggtcggggctgggcctgatccggtgaaccaggggccaggagggcagactcagagcctggctgggcctgacagaggcaaaggtcttagagccaggctgcggcagggccactggcaggaccctctctgcatacacaggctgggcgagcggaggctgtggtgggcccctcggccgggcacccgaggacgtgtgttttcctaaatatcctccaggctctcctgtctttgttcttgtctctctccagccaggcctggggggctgaccctagacttgcctgtgtatgtgggggcctctctgcctgccctgctaagtagacggatcttttgatttatttatacctctcctaggctccaagtgtgaatcccaggacagtaacaaattgatcacagcgggcttgggacaccagcttccgaggtctgtccttgcagttttgactgacaggcttttgtgtgtgtgcgtgctctctaactgttgaaaatctttgcagctgaaagtcttaattgctttaaggcaaactttagaaattccagagctccctagttggtctgacttttccaaattcagcttgccttttttgggggaaaatgtcgccttagtttggtgtacagtacgtgcaggcaggtcttggaggcacgtttaaaaaccctgtcgttaatggaagaagaatttcattgaaagggacgcagagccgtctggaagcgcctgccccggactcagcgagtttggactcagcgagtttgagcttaccgaatgaactttggacgtcttcttttagcaaacaaaacctggaaggaagcaaaaaagacccacattctttttcttttttctcctgaaaatgaaaaaaagaaaacaccttctgggtttgctggaaatgccccctctccttcccccatcaaggccaagccctcgctgcgtcccccacccccaaataaaatatgcctgtggggagccgtggaatgagtcactccctggcagagagcctgacgggcaaacatttgggaaggttcttgcctaacttcccagaagaaaaggcccaggatttaaaatggtccctgtggtttgtcagcctctgctgtcccgtctgcttcggaaatgactaaaaagtagtttgtatctccacaaaataaagtctcagactgaaggccttagacccaggttggtctggatttagagctgtttgggtttccagaaatggagcgcctggctttaactggtggcatttctggtgggtttgaacaagggcagaggagggaaatggggaggaagttcccttttgcggagcagaaggggctgtgtgctgggagccgttctagggggtgtgaatctcccgttggtcttctgtgacagaaaatgcttttggttttgtgcacaaggaaactgaggcacacgggggtcaagcctgtgtcctggggcagctgagaggaggtgggggcagaatccgaagtcacctgcccagcctcacagcctttcctctttccattgcacttgggatatggtatttgactggctaaggtgcacagacctagtgctgagtactttagcacacatccgttcattttctgctcatcgtagatagggtttattatccccatttcacaaatgataaaactgaggttcagagacatgacttgcataatttcattaaagtagcaccacgatagatggtccccatttatttttatttatttatttatttatttttgagacagagtctcactctgttgcccaggctggagtacagtggcgcaatctcagctccctgcaccctctgcctcctgggttcaagtgagcctcctgcctcagcctcctcctgagtagctgggattataggcaggtgccaccacgcccagataatttttgtatttttagtagagatggggtttcactgtgttggccagccaggctggtctcgaactcctgacctcaggtgatccgcccgccttggcctcccaaagtgctggaattacaggcatgagccaccatgcccggccatgtccccatttactgaggatatactgtgtgctaggtctggtgctgtattttacccagtccactcaccaacactaagatggaagctgtcacgatgcccatttacagatgaggaaactggggcacagagagatgagagaatgcgccaaagaccatgtgctaatacgcagcagagctggatttgaacccaggcttgtctgagcagagcccatggtctccccactgtactaggaaggtagcaggcactgtgggctggatgcctggcctgtgctgaggttcagtgtcgttttcctgatcttacagagagggaggttaagtaacttgggcagggtcataaacccacaaatggcagagtcgggattcgaacccatgtctctgattccagagttcctcaccttaaaccacatctggctgcctttgtcgtgctttgctcctgttgcatgctgcaaagccaagtaggttaagacaggctaggttcctgcagggctgggttgcccgagacctgggagaggtcttccagaaggcactgctggccttcctcgcccagggccagagctactggagagaaagggctgctgttcacattttttcttttctttaagtgccccagatacttttcataagggaagtgtcaaaacaattgtcaaaaggagaagaatatttccttcctcttctcaggctagaccaagcaagggagttggagggtggagagtggagggacctggtgaatcatccaagattaaatacgggcaggcactgccaggcttgtgtggagatgaggctgggacactgttcgcaggaagagtccggtgttctggccccctgatgtcaccttcacgggcctgactcacagtcctaaatatctgacagcgagatcgcttgtaggtaggcttcttgtcacttgtcatttaagtcccctgcctgccttttttccctgctcatttccatttcgatcacggcttctactacatgtgcttgaaatgaatgttgtgtgtgaggacctgtgtggtttgggccatgttgtgcccccctgccagtgtccttcggtgttgaaaggaaaaggtatttctctcccttccatgtatgttctgcaaattgacgaacatttgcaaattgctttgagatgcgttaatttaaggtgtgaaataatagatcttgtgcgaaggctcagccacatttctggcattgatggatttttctcccgtctggcctgtgatttggggaggtaaaaatagtccttttttccacatttttatctttttttttttttgctgacatcattcttaggaagtggtgtgcacatgccgtggaactttacatggaacatggagctctggggagcaggagtgctcttggagtgaggggtggtctgcggtggcccaggcaccccctggctgtccgtgaaatggctttgaaatgagcaggcactgttgagggcctcagtggctttttggtatttggctgtcttttcacttatgactcttgggtaatggcaagataacttttggggaaaatgttagtttaaaaagaaaaaaaatcaggccagcactttcactcattcctgtctgagctggtcccttcctttggccaaagctgaactaaaccaatggccttctcagactcgacttccagacagaggagccgacattggggcaaatcagttggtggtgtaatttcctgtgatgttaactttgggaacttgaacttggagtgggagctagca

SEQ ID NO: 53069 - DNA, 1093 bp, Homo sapiens
ccagaagcaggtgccggggacccctctggattccaccagagcaccttcctaggatcatggctcccaaaacggaagggaaggagacagcgcagtttgcaaagaggcaggatttaagcaccagggtggccctgtggcgcctcaggaaaatgtttgcctgtcagtatctgctctcgttcccacctgtccccacaaagcgaggccataagtcctcggcgtggcattggagggtctctgaaggccctgagagctgtgtcagccacggtgtgttatgaagcaaggcagatgttttgttaattatttacacagcgtcggccccgcagaggactgcgctgacaggagcggctgtcacaggcctggccgtggggcagaagtgagcagccgtcttcccctggcagtcctcctgaaaaggtctgcatggcaaggcctgagggagtcctgcacattttatgcccccgccccccaaagccatttgggtttcccttaaactggcttgttttcctgagccggtggagagatccttgtcctccggaagtggctatcgctctggggcggcttctctgccagctcgtcacaccctagacccagctgtagtctgtgtggtgggagagggtgtcaccaggctctggaggtccactcctctgtagtcacctcatgcaaggagggcttcacaggggcccagcctctactccctcatccggaaaacgggccagtaacaccaggcaccagccccgtgatcctcaggcacccttgggggtgatctgccttagaaattcaactttaggattagaattctgctaagaggtaccatgtgacaaaaaaggtagtgtaaaaatcacaaagaccaggacaggctcatgcctataatcccagcactttgagaggccgaggcgggcagatcacttgaggtcaggagtttgagaccagcccagccaacatggcaaaaccccatcgctactaaaaatacgaaaaattagctgggcgtggtggtggacacctttaatcccagctactcgggagcctgaggagcctgaggcgtgagaatcacttgaacctgggagacagaggctgcagtgagctgagattgtgccactgc

SEQ ID NO: 53070 - DNA, 1570 bp, Homo sapiens
agttttaagtaggcacgcggccggatccttggagaatgtttatatggagtgaacgaatctgttagcaaacgttcctcactcccctcagtgggctgtgcagggctgtattgagctgagctggcccttccctgggagaagaggtttcttagagaaatgctcatcctcgaattattccaatgaggaggaacctaagcccagaagggctctacctcccagagttacaggctctccttcctatgccccttccctgccgaggcagctcccacatgtctgcataggagggctttgggttggaatgggtcagtgctgtgtcttaaagctgcattttctaccaagcacacactttgtttagagggcatatcttttggggttgctttgaggaaaggctaaccaagccacctctgagcacagacatgactttttggcaaatgagcaggaccccagattacaccccatcttagaaagtaggaaacccagcattgaaagaggaaagattctgcagctgatgtggccttggcgggccaccagcgtgggtgcccagatggcaggatcactgggcaccacatggcacacagaagagagcaaaggagagggagtccgcccctgggcttggcaggtccggtcgagtccgcctggattcagttacaacaggacctcgagtgggcacggcgtgccggactgagtcagtgtgtgtacatttcctttgttcgtctcctccgggaatgtagtggccttttgtgtgtgttttaaatgccagcctccttacctaacccaagaggaaatgaggactgggtttttgtctgtgcagacgctgggacaagtgtgggagccgcctgctcttggagccagcctagtggtgacagcgtggcatttggaaaacattctgtggttttctccaaggggtgatgggcacaccaggtgctgggccgcccctgagctggccactgggaccctgaaatgaggaagccctgtgaccaggtttcatgatgccattcagcaagggacggctgagcaccacatgccttcttggcccctggggaaacacacaggaatcagatgaggtccctgccccgtcttcctggggaaacatgcagagaaaatacttgtactctgagctaacacctttcactcgcacagacctttatggtgttctgtgtcttcagacattgatcacctgtaggtgagacacatcatggccccactttccaaactcccaaacgggctgtgatctgtagaagtatttagtgccattcagggacaggagagatggtttggaagatgctgtctgctgtgcgaagtctctggatgctcaaatggcttatggggtggcatctttgaaattacccagtcctgaaaatttcaggacatatggtcactgtgatgtgctaatgttagcaattgagatatttaatgacccagaaaaaccccttttcctacccagtgcaggttactggagagcctttatttctcaggaggagggtcttacacagtgtaatttggaccagcagatagggagtcattatccctcattcatttattagctaattaagtggtttatctggtcacacat

SEQ ID NO: 53071 - DNA, 779 bp, Homo sapiens
agcatgaagccctacgcttggggctcccttcttagggcagggccaggtcacctggacatgaagccagcctgatgggaggggccatagcacccacacacacatttcacacagagcaagggccttatgttggttctctccacagagctggggccagatctgatttgaagggaaagttctgtgttaagcactgtctgcagactgctggcccagcaggttagtcggccagccaggggctctccctcttcatccggagcctctggtgccaaagacacaccatggtcagccctccctgacttaatctctcacaccattgccagagattgttgcagtaacaaacccaacccctctgacttccgctccttgagtgacaagggtcagaaatcgagtggcgcggttgccaaccttctcactcaggaacaacgccaaacacgtggtgccccagagatcagagagggtgaggagcttggattccaccagctgtcacgctgttcccagccccaaaatggggaggctcagcacccacagggagtgacgtctggttactctgaaaacatggacaaggaggctcaggtgaggggtacttacttagtacccactgtgcaccggagacccggccaagtactttccgtgtgttgccttcgttaatcctcgtgacaactttgagctgatcctgtttttcagatgaagttaactgaggctcagagaatgaagctgccagtccaaagccataaaccacacactttggaaactgagatttgaacccaggcccggctggcccc

SEQ ID NO: 53072 - DNA, 1226 bp, Homo sapiens
accatgttggccaggctggtctcgaactcctgacctcaagtgatttgcctgcctcggcctcccaaagtgctgggattacatgcgtgagccacgcgcctggcccagcctttctctttctgacttcacttgccccacctgtgcagtgggaggacaggagaacccctttgtctgttgagtgctgattatgtgccaaggaatttgctgcatgatctgatctgatggccccagtgactctttgaaacccggccccttattggcaccacccagtcactccctggctgcgtttccctcaaggcacgtatcgctgtctgaaatgaccatgtctgttcactctcatgtctgtgtctacctcccaaccacgcaaaacctgtgggaggggaaggccttctctctcttgtccactcctgtgtccccaacccctcggacagcacatggcttcacaagcttctcaagaaatgcttggcaaatgatggcagagtgggttaaccctggtgttctcaaaaagggaatggaggcccacagagggcaggcccatccctgggtcacactgccagggcaggattggagcccctgcctgtccagggtcagctggggcctctctcactgaccagctttgagcctggaattccaggtgtgcctggctgtgtccttgcaggttcacaccgcccaaagaaacttccagtccacacttgtggctttggatcagctcagaaaaagtgtgtcctgtgactgctcgaggaatctgggcatttagcccagaaaagagtgtgtttcctggcttcctgagaactggggcccaccctgcccctggtctaggcgtgcagaacaggagggaggggagttgaaatcggggcctggaagggtacggcgtcagaccttatcatctgagtgaggcttgccgctcacgctgagactgtcccagccgagcactccaggagagggtatccccaccattggagcgtccttagagatggcagcagcgcctggagttgctggagaagaaacattcctcacgctcatgcgaatgtttccctgggctgctgtcccagcactgggtaccgtggggcagacatgggtgtgacgttttccaagcacgaggtgaccagtgtccattgggtcatcaggcctccagggccacatgtttggaaagctattcctggagcaccaggcatctggcacctcgctctgtggctaggcacgggtttatgaggggaccctgcagagag

SEQ ID NO: 53073 - DNA, 6325 bp, Homo sapiens
tgcggtggggcgtattggtttcctagggatattataacaaattactgcaaactgggtgcttgaaaacaatagaaattcattctctcttggagaatcctggaggcgtgatgcctgaaatcaggctggtggtaggctcagttcccgtggaggctctgacaaagcacctgccgtgcctttttctggcttctggcaggcgctagccaccctccttgttccttgttccgtgttccgtggctcgtctacacatccctccagtgctcgcctctgtcgccacatggccttcttccttgtgcgtctgtctctgtgtccatccctcatagaaagacacccgtcattgaatttgggccaccctaatcccatgtgaccccagcttaacttgattagtatctccaagtaagggcctatgccccagttccagatagacaagggtttggggggaacattactctgggggcgtaagggatgaggagggcaggtccagggagcctgccctcattcccaggaggagacaggagaccaaggagcagagtctggcgggggaacgctgtcaccacagcaagggccaggctggggccacagggggtgggtcagacacgcccactgaatactcaggggcacgggagggccgggatccccctgactctctgcatcccagattcattcctacgctttcatacaggccccaaagacaagtgctgagtagatctgggtcttcagcacgatgttttttaaaaacaggcttgcagcgtttggtcctttggtggcaccagccaggaccactgagggctgagaacgtctcagcgcccagcataggccgccagccctggctctgctcttttgggttagagagcggcccctcccagtaatgacagggcccgccattcccggcagcgcccaccagcacagcctcccccgctttgtggacaaagggcagcctgtggggcaggaaggagggaatccagcctcccctgttcccccagaggcctttatctattttggcaaaggccctgtgatcagacgtttccgccctgacaactccctgccaagtgatctcaagcaagggagtcccagagccctgctgagccccacttctctcctgtgaagtaggaggcacagttccagccctgaccctctcaggaaggctggggatgacaaggcaaacccttcccgtgcctagcccagggcctggcacatagtaggtgctcagtcaatactgaatgagagagagcatcttggagcccagaacgtaaatttcatgccactcctgcgacggagcctcagtggggcctcttgggaaggagaatctataggcatttccttccccacgtcctaggacacagttagctgagacgaccgggcaggggtggggaagttgagtgcacgggtgtagcactggacggaggacagaggctgctaagctgcatctcaggcattgattggcattgaggaaaacccacctagacttggtatcgcgggagggagggtcatgtgcagggagccctggaagggagcctggagagctgggtgccagccctggctctgcaccccttaccagccatgtgcaggtcatggcagtgccctgtggatcctacttcctgaacctcccctctgcaggcttgatgccactgctgtcatttcggcctctatcccacaactcgcacagggcttgcctcacctttaggcctttgcacgtgccatgccctctgcctggagtgccctgcccctattcctccactcagagctgcttcccgttccgaggaaaaatcccatgccccaggtagactgcacgcacattttcttgtgtttccacaccctgctttgcagagcagcgggcaccctggttgtagtttaagggacgcctgagagccccattgaggatggagattggtcccccttgcctggcacacgcttggtgcccagcacttgtgtgtccattgagtgagcaaataatggaatgtctggaggcatgtgacgcctctgctgtgtggcttggtttccccatctttaaaataccagatgtgggccaggcgcagtggctctcgcctataatcccagcactttgggaggctgaggcgggaggatcacctgaggttgggaattcgagaccagcctggccaacatgttgaaaccctgtctctactaaaaatacaaaaattagccaggtgtggtggtgcatgtctgtaatcccagctacttgggaggctgagacacgataattgcttgaactagggaggcggaggttgcagtgatccaagatggcaccactgcactccatactgggcgaagaccgagactccgtctctaagtaaataaataaaataaaatactggatgtggactgatggagtccttggggatctggtgaaacatgaggcctcaagtgaacggactcgggtctttcctgctcccaggagtggaatgggagcgtggcagcgaccacgcacacgtttgtttaatgattatccaatgttgacccaaaactatgagcaaagctccggggattttctgggcgttcagcacaaaattcccagttaatgggttccagtgtcttaaaaaggcaggactgaggcggtctctatggagttgttctgactgcagctgggccctgtccttccacacctgcccctgcaggaattctccggacgcctgtggagggaagaatgtgtgtgtctggggtccaagaccacatgcaccgcctggtggaactttctctgctcttgcatgtctggtgggagcttcccttaatgacacaggatctgccgagattcatccccaactccaggctggcaccagtgttcaagcccctgcctctgctgtctcccaggtcttcaaatttacaccactctgactctcagtttccctatctgcaaaatgaaggcaggaatgcccacctcatggggtgagccagtggacccaaatacgtggtgcagtaggtgccacggagtagtggcacgtgattttgtggctgttagtgtgagtattccttactttagagagcagaggaaaacacatcagcagattgtttaagccaaaaaatgtctgttgtttgaagaatttcgttttggaaggcaagcccaggttttgggtcagaaccgtattccctcaggcacggcacggttgaacgtcgaggcatattttacaggcttggtgaccgctcaagcctttgagccctccatgcgggtgctctgaggtcagacttttcgggaagccctcacacagctggtctgcttgtcgcgttggtagcaccgtttccacagagcaggctctgtttggctatgaatagatgtttttctcactcttttcttggatgcctgaatggcaggctcccctcctgcagtctcagaggccgacctgcatgtaaaactccaagcggacatcagagtgggttcgtctgttcctgcttggacttgaggctctcagcaaggctcaaagagctgggtcgatggccaccatgacccagggagcctcccgagagtctcccaggctatagtttctgaaggctactgagtgaactgaagaaatcagagttcatggaagaggcagcagatccgagcaacagccgagattgaggaggatggttcaggatctccaaacacaggcccgctggctccactgtgtccaagccgcagatgcaaagcctgttaggacagaaaggacacgagatagcagccagggccggccgcaggcaggagggccgggccaccagcagttaggagtgtgggttctggagccacacaaccggggttcagatcccagttttcccacctctattgggcagcatactgtaagcctcagttttccccttctgtaaaacggagataataatttacctgtctcacaaggctgttatgaggattaaagtaagttaacatcactcaagtgcatagaacgatgctgggtacatactaaataaatacagataaactgaggcccagagagggcaagggacttcgctgtggtcactcagcaagtcattggggcagccaaggctgaaactcatgactcctagtctcgtgaacggttcccccctccctgccctcccccgcagtcagactttttaaacactgccttttgcagaggaaatcgcgtgacccttcagcccacaagaattccgactgcacagaatgtctgaaacctcttcgggctggctgggggccttgttgcaattctattcagctgttagttctttttttcccctctctttcttttaaagctctataggatcctcctttcccttctccacaaatagaaaaattaacctcttgacaaaggagttggaagacttgagtccctgctgtgtgtcccggaaccaatcccccagcctcaggttccccggctgtgaaatgagaaggtgtcctctgttgacagggaggtggccccacctgccagtctgtgattgccacagagacaagccagccaagaagtgccaccctggacgaaggtcgggtgagtgctgattaaacaaaatctggtgacgcatccttctaagaagcgaggcgaaacccaccagagatgctgcgtgcttctgcccacctcctcgtgtcaaaggtgatttgagtcatcagcctggcctgcacttttctcgctctcctgtttccttgcagtgctcctgggctcctgagccactcggggctgaggcccgggggccagttgtgtcccatctgcaggccccagggcattagacctgaggggcctggtcaccttctgatttctgctgggcgccccagccatgagctccagaggctgccagcctagggtgtgagtctgtctccgaagctgctgacatgagtagggacttcccctctctgagctttagttccttatctgtgaaatgggtgcatgagccctgcctggcagggtgagatgaggtacacaagccctatcctacttcactcccctcttccttcctgcccgaaaggccctggctcacctgggatccagctggggcacagcaggtgttgatatgtccacctgctgccccccggctgtgatatgcccccctggctgcgggggacagagggacagctggccacaccgggaagcctggggacagaccctgggacatcagggtcaggagcgtacagggtgcagccctcttggcctagtgatggggatccctaggggaaagacctaggggccaggaggtcatggagacaagactcgaacccaggattggggcccccaggtcctcctgtcctttgtgtaggctcactttcaggttaccctggcaccagcaggggccagcctggttgggcctgggaattcagagatgggtgccaaggtgggcctggagcacgacgtaggcagacacggggccgagccccaccttgctacccgctggtaaggggccttgggcaagtcgtggccactcctgagcccccatctcctcatctcaaaaatgaacatcattcccactcttcccacctttcaaggttgtcatgcggctccctatgatagtgtggacaaaagtcactctgtagaccatcaagaactgaccaggccagatgcggtggctcatgcctgtaatcccaacactttgggaggctgaggtgggtggatcacctgaggtcaggagtttgaaactagcctggccaacatggtgaaaccccatctttactaaaaatagaaagatttgctgggtgtagtggcatgcaggtataaccctggatacttgggagggtgaggcaggagaatctcttgaacctgggaggtggaggttacagtgagccaagattgcaccattgcactccagcctaggtgacagagtgacactgtctcaaaaaagaaaaaaaaaccgcccagaagaaatgtgtcatttcaccctctggaaccatgagccctgtgatcatgaggcacaatcgtcatgtaaatatatagggtctctcaccagccacgggccaagatttattttatggagacagtgggggagggggccagctcagtttcattgtcctggtaactttgtaaaatgctttgccatcacttcccagctcctgggaggatgcagcaggagctgtgcagcctctctcgccctcccaaaaggcggatccccagaggccctggacacctccttccaggtccacaggcccaaaggcctggtgtccataaggctggggttccctggaaagtgggtttctggaaatacttgttgcagggatatcgctgttgcgtgagggctggttgtttatgataacaggaatcataacagtggcagtacccacattgattgattgattgattgagacagagtctcactccatcacccaggctggagtgcagtggcgcgacctcaattcactgcaacctctgcctcctgggttcaagtg

SEQ ID NO: 53074 - DNA, 985 bp, Homo sapiens
ccacggctcacgtagatgatgaagacgtttgctccagagcagtcctaaagaggccatgctgcgtaggacatagagcagcaatcttgggtccaacagccccagctgtgtcatttaccagctgtgttacctggggcagggatgaccctgggcaagtccctgcctcaggccccatgtctgtcacatggaggtgatcacgcctccattgtacaagtgagggttagcttcaatagctaaatagcctcatagctaaagcctcagaggtcccttcccatgtgccaggctctgtgctaaggagtttacagtgaccctaagaggaagatctgactgttagcccattttccagatgaagaaactgagacgcagcatggttagatgaaaccgggccaggacctggactcctgcagtccagctccccgccagcctcactgaaccctgaggcttctcccaatctggtccctcggtgcctggggacacacagcacacggcagcctaaagccaggaacctgagctgggaagcctcactgtgcagctatccacagtgttttgcaaatgtagggcccttgcttgaggcagaagaaaagccctctttgaggtggtgttcagtgtggcctgcagctctgggtcttgcattccatggatttttggcccctgacttgggcttggcagctactacctcattgttctgcaacttggcaggagccgcgggatcccggggacgggcagtcctcagtgttaccccgaggtgcctgcacgcatgtgctaagggtcttttccctgctccgtgtggctcgtccttccacgtcccctttgccttggcctttctgcatctgaaccccctaagaagcagtttctgacaggaatttccagagcacagggcttgggtttctgttggggtgtggaccaatagaacaaaatgccctaaaatccaatacccatggagagccccaagaggcagtagattccttggaacaaagagggagtttag

SEQ ID NO: 53075 - DNA, 980 bp, Homo sapiens
agctattaggagtttggagacatagagctgtctaagcagctggaaactagcacatagtaggcgtctaacgtacaacacctcatggttatttttatgagtacgtgcgattcttctaagtgctcagaaagccgccctggctgtttatgagggtatgtgattttggctgcattcctagaggtgacggcgtctgagtcacagagtcccactgtgcgccaggtcgtgtcaggcacattccatgtgtcattccacaaacatgctccaagcagttgctctggggtcagagcctcagtgcagaggacgtggaggggactagacaggggcccccttttgaagaggccggtggcgggtcctggggcggggcctggggcagggctcaggtgactgaaagaatggaggctggagcaggaagtggcaggcctggccggtcagggggtcttgagtgaaaagccgaggagggatctgagctgagagcccacccgatacggagcaagagcttgggcaccacagtccccagtcctggggtcacaccccagctctgctgttctttgctgcctgatcagaacaggtcactgctacccctccaagcctcagattcctgaaatggggacagcagtgaggcccactcacagggttgttctgaggacccaaagagtgggcgcgtgggcggtgtctgcacagagcccagcatgcagtagacactcaggatgcctgctcttcttaggtgggtgctctgtgtacaggtgtatttacccgacagacattggcacatggtggataaaatcatcatcttcctcctccagcagccctccagatcgggtcctctggcaggacccaccatgagaggtaattaggcctcgaggcttcaaagtcaaggttggcccagccctcaccttgctgtgtgctgtgaggcctggactcccatcactcactcccgcaggagggtgttctgtagagttccctcagccaaatctggaagagac

SEQ ID NO: 53076 - DNA, 1412 bp, Homo sapiens
agctgggtcacagagaaaaccatattttctatttaaaatgatttgtgtacatcgcttgaccacctcaatggtttagcaaaggaaaaaggcagcgattaaacagtttcaaatgaggtgtcctgctgattttatcaagtctgctgaatgtataatgaaaaaggagaagctgacagcaacgccgcattgagaaaatacagactaccttatctgaaccatttaaggaggtccaattatagatcaaatttaaagggtagaaacagcagatttacagacacaaatcaatgaacatggtaatcccgatgaatatgacagatactcctgttagggaatattgctgcggttgaggatcattaccttcacagtaccggatacatcacatctaaagccataggaagcgtcaagtgtaaaccagcattacaagcaatgactattcatttaggctttgggagcaaaaggcaacccgattttcccctcctcacaatttttttctccttaaaaaaaaaaaaaaaactaaaatggtgatctaaagggacattaaaagccctctgaaaaggagatagaaattaaacagatataaaactagtaaactcagataaaactagcacatatgtgagagcaaattcagcaaaacaaacctctgaatttcaaagtaaacatgtccttgaagatgtggaaacagggtcaaactccaccaatgttctgtgagtcacatatttactctgagattcaggggtcaagggggaaagttaacctaagttgctgttttcaggcccaggtgagaaccagtctcagacttactagtaaaagcaagctggttttgtgtggaaagcgaaagacagctgccatgaacgaacgaggcaactgcaaatgaagaatctcaggaaaaaatactcccagatatagaccaatcctgcacagcactgatgagcagactggtctcttccaacaaagtccaagaatatctccacgaagaacacaagggtaatcaaccagaggccagaaataaacatttaaaaaaggacagggagaagacaggtatttagctaggagctaacaacttgtggaaaactgtaatgaattgttaaaaaagaaaaacaagcttaccttaaaggcatttttccttaaaaatcactagctgttttttcctccggggccattcctttccttggcagttgcacagtaaatttttttttttttgctctattctttttcctaggcacatatatttccttctgctcagcttcactcaataatttaagaaatgaaaaatatttccctccccaaataattatttctttaaaacctttttcctggccgggcgcggtggctcacgcctgtaatcccagaactttgggaggccgaggtgggcggatcacaaggtgaggagattgagaccatcctggctagcacag

SEQ ID NO: 53077 - DNA, 707 bp, Homo sapiens
ctggaagcatataaatcaaaatattaagcttatttctgggtggtgctattttctttttacttgtatttttaaatttttcttcaaagtgcaggcattaatagcaattttttaaggtataaaaaattgaagaaaatccaacattgtgaggggatggaaaaaacaagcaaaagaccaagactttgctagctgtcacagtctccgtgtaacagcagcagcaggcagcttattccttacatttgtatacaagggcctaaaggtcaatccatgcatgagtcaacagacccaaagaacaacagcaatcaatcatcacaaacaaatacaccatgtctctcctgcctaacgtccttaggagggcttccttaggaccgtcttagaggtacaatcatcttaataatgaagtcctctgagcgtttcagcatggggctagaccccacttatccagaagtgtactcttggcaaacacagcactgaacaaactacaacagatgcacacggtacttaagaactttcacagcacagtcacatcagttttgtttgctcttcaggcatggcaagtagtagtagtcccattttacaaaaggagaataaagctcaaagataaggaacgtgcccagatcacacagccagtgataagcaaatctgggattctgaagccagatctttctgaatttaaagtgtgcgatgttctttccattccaccacgtttg

SEQ ID NO: 53078 - DNA, 1664 bp, Homo sapiens
attattcccattttcaagtgaggctcaggtgtcgggtaaattccttgtaaatcagagctaatctggaaaaaacctggattaagactcaggaatctttccattaaattagccatcactatcaatttccttttaaaacatgttgcttttctttaaaacatgttgcacaggtaatcattatcccttttgacgtttccaacaatttaaggcaggagttatctccatttgatgcatctgaaggtgtccctgtgagaaggaaagtgagctgccagaagttggaatcagcactatagagttcaaaggtgagacagacctgtctgaccccaaatctcgtgatctcccatcacatacttcagcttcctaaactagtaattaagaagctaactgacctgtttaaaaaaaaaaaaaagaaagaaagaaaaaacctcagcaaagtgaggaaagaacataaactgttaagaagcacacaaaacctgacaaaagcagtcgctcctgaaagacggtctcctgatgtattctatagcatttgcctttccagaccgagccgggagagacaccggaagccaagtgttctgattcctgttgccggttcagtcactgctgctcttagcctaacccggcttaccttatagaccaccccagcgatggtcgtgccagttttccggacctttggaagcttgtatcccctctttgcaaaatcggcttccaagacggcattcctaagagcaaatgagagaatcaagtgttgaagggcaggaccacatcgcacagcactggcatgaaaagtgcctaacagagaactcaggaaagctgctacttgttttcacgcccatctgtttaatgaatcctcccaccatcagcactgttctcccgttttccaacgaagacagtcttacaaaggggccgtgacgtgccttaggagacggagataaacggtggccgagtgcgctgggaaggtgggagagcagacccggcttcaggagaaacccacgcccaggccctgattcccctgagtcacactagccgcgggccacaggccccgccatgaattcttccctcagaattctcgtatcacaccttggcccagctcccacccgagcaccgcactcttctccctccctgaaccaagccccaagcaaggcggcacctgcggcagttatcaaaagagaagcctccaactggtggagcatacaccgacacagccgccatcttcccaagaaagcagttccgggtcggaggcgggtgcaaacaaaaagagccgagcacttccggcgtcgctggcaacgggggctgaaggggcggggcaaacgccgcactagaacgattgatcttagagattctggttcctagagaggccagagatgtttgaagtatatcgccccaagtggcacggaggagaaagtgacacccggaaccgggaaaggacttgtccaaggtgaacgcaccagcgaccaggtctcctgccgctcagactggacttgtttctaccgttaatttggttctgcggtgcttcagagacagacagacccaagtcccaggcacagccccaccacccccttgcgttaagcaagtctcttcaactctctgaatctgtttcctccgctatcagatggagattacaacctagctcaaaaggctgctgtagaatggccattaagtctgtgaaa

SEQ ID NO: 53079 - DNA, 656 bp, Homo sapiens
cgaccttatgaagtggggtctgctttgtccgccttcttaaacaagacaaacaggtctctctccacaccatgacgccatagaaggaaccagcctggctttgtcctagtctcctggtgagtccttgagccctgagaaggagaattgctggcagagtctctggattaaatcccagttctaccactttctagctgtgtgacctgggaccagtcacttcccctctctgggccttctctcttctctataaaatggggatgaaaggagacaatacgtgtaatgtattcagtggctggctggtatgtcatgtgtgctcaataagtgtcagcaaaacacaaacaaacaaccagctgaaggactggatgatctgtcctcagaggccctttccctgttgagtatgagattgcaacatcatcatggacaccgtttgcccttctgtgatgagcgcctcacctcagcctggggaagcctccaggaaaggcctgatttatctctgggtccacagcagcctgcgtggagcaagcgttggaacttgctgaatgaccactttcctccgcacttgtaggtagagctctgctgcctgctccatgggtcctgtctcctctgacggcatcagttgtcactcaaggctgggtgctcctcatcccctaaccaaccctggc

SEQ ID NO: 53080 - DNA, 1324 bp, Homo sapiens
ctactctattatacaaatgaagtagtgaaaaaattcctaacacataaccttgagagaaacaaattttacaaactagagtgctttgtttgtatgtaattctttttgtttttagccttacagtatacagtcaaaatacttttcaaaggttagctccttttttctccaaccccttaagtgtggttatgtgactaatttgtaacaccagctagattcatttgtcatagtgtgcattctttctctctgccctttaacccccaaaacatcctagctgattaaacaaattttcacatatagtaacatttatttttttgtggtgtaaagttctatgggttttgacaaatgcacagaattatgtgtcaaccaccacaggtccatacagaacattccttacccccaaaatactcccacggcaactgcaattttaatcctgctttcgcagcaccaaccaggaggtggcagggtttctctccctgacgcagacttcaccaggcaactgggtctgcctgctctgcatgcaaacagtcctaaggagacagctagctccctgtccctcatactccgtgtgtcttctgactatggtcagaggggttataaggttaagtttcttcttccctaaaacaggtgagttttgctggaagcctcagaatctcacactccagctgaacaagcaggatgattcatcagagacagcagtcaagaaggcaacccataataactaagctttcataagatactcacagtgagggcaacaaagggagatgagagaagtggaggccaaaaccaaaacagggtgagggcaggaagttgacagactcttcagacagtacatgtttggtattggtggctggaaaagatttcaataagaggaaactgacagtggggaagggaaaagatctccaagtagaggaaaaaacctgagtacaggcacagcagtgtaaggcatccctgaggcacagtgttcagaaatgagttagaaagacaggcaggggacaaacttggtaacacttcaaatgtcctactatggcattcatcatccagtaaacacagggcattccaacatgtaaacagctatgccacatggtagacatgtgaagcagtacattgtccgtgtccgtattaagcaggtacaagctctgcttaataacaaattataatttagttaactgttaactgtcaacataaccacccctaaactattgctaactcattttacctccctaagctgtatctgtaaactggggataatagttaataacagggttgttgtatgtattcagtggtagaatatatatatggagggtacataaataagtgctcaatatta

SEQ ID NO: 53081 - DNA, 1856 bp, Homo sapiens
ggatgtctgcattcataatgctataaaaccagtttgaatagttcactatatctgactaacacccccatccctgaacactgctgctatgaacccctaataccttgctgggtattttatatgttatcatacttaatcccgtagagaactctgaagggtaagtaacataccatcttaaaggtaagataattgaatattggagatataaagcaaacttcctaaggtcacagagctaaaagctagtctgtttgcctctagagcctctcttctttctgctgaatgacactgctctattctactctccactctccatgggaataccactctaggcttctgacaccggcccttctctcttctgtatctaagctctctctgtgggtgatttcacctatggactagacttttactaccacctctgtgccaacagctccatgaagcctgtttgcaggcaggacttttcatctcagttccaatcctatataaccaacttccttggtggacatctttatgcatccttctcaggtatctcaaactcagtattgccaaggccaacattttgccccaccctttttcttttcttttcagagggtcctatagagaaatcaccctgctttttagcttgactttttttttttttttttttttttttcgtttttttctccctggtaaggtcattactcttaatccacatcctcgatttcaacttctggtgctgctcaatattcagtatgtcaccaactcctatcagatgagtttcttcaacatctctgtgtgccattatttcccccgttccttcagatccttcagatttccttctagactctactaaaaactttctaggtggttttctgtttcccctgccccaattcaccctccaaaacagcccttcatattcatcctactagaacgtcagtttgttcatattatctcaggctaatggctcttggaaagcttcccaataaattccaaactcctcaccaacctagacacagacttctgagcatgcctagcctctgagtacaccgtggttctagcaaacaaaatgataccgcattcagcaatctcctacctcatgccttttcatccaaaaatttctacttctgtcatcattcctgaaataactagtgaagtatattaatcccagttaagacctgattgttaagtgggttcttggtcacacagggcctgtgcactcattcccaccttaacatctcactagttttcttccccccacctagtttaggaaggtcttataggcaagaatggttcatttttggttatgagtacaaactataaggcctgatatgtagtgcaagcttgaggaataagtaactaaacagctgacactaaaggtaaagttttgaatgaaggatgggccatcagagccatcagcaccactcacccttccggttcatccccatctggaggcatttgagcaggcggcagtactggcacctgttcctctgcttccgagacatgacacagttcttgtcacgactgcatcgatatacccgtttgttgcaaatgctccgcttgaaaaaccctttgcagccctcacaggagatgatcccatagtgcaagcctgtagcgcggtccccacaaatgagacaggttcgttgttcagcccgatcatctgaaacagaaactgatcatgttcaagttagaacacagtggaaataatggctttaagcctacagttcctaaagtgagcaactctgctctgggtagattaagaccaccactatctccaggctaaagggcaaacagggggcccatcttcggatccttgtcccaagagtagtccctgtatctgtggttgcagataccacaacacagtctacctaaactcttcctcctgg

SEQ ID NO: 53082 - DNA, 1459 bp, Homo sapiens
gtgactattcattacatacacacacatgcagaaaatgtacccatttaaaaagcaacccacttaaaaagaaattagcaatggcttagtcttatatcccaaactgtaaagtatagaagctccctaccagaggatgaggttgccttatcaatggcctcatgaccccaattctatctataattaacagtagtaaataagactttggcagatagcgaactggattaaggaatttaaaatacaaacaacatctgtcaagaaataaacaacaatttttaatgtaaattttatctatgtactgacacgtatatttaatttttttaaaatcactataaaatttaaattaatcccctttcttctgctcttcatcaaccacaacaatgaattcactgcagttctctctcacttttctccattccaaaacatttacagccacttgctacatacatgaaaactttctagctgaactctgcgaagacacaaaaaaaacagttgcctgtggactgcctcccttctccctcaaggctatttgctctaaaccttcaaagaaaatttctaacccttagatttgggccccagactgttccttaccttcccatgtctccatttcatgcttcttgtagtctgctgaaaagttctattgcagccatgaagaaacagagattacaggacaagtccagcttgatgactacccttccgacacttggtcaattcctctaagccgggactacgacagtcatcctcacaggtcagtttacaagctggtcatgtgattgcaaagttcaggctctaaggtcacaacgtgtacggagttcgtttattaccaaaggttatctaagtggaactgatagacttattttctttagttaacaatactgcctagcacgtctttctgaaaactattatgggaaccatttcatgggaaattctcctccagtcttctttaagctaagatcctaaaattaaaaggcagcattttaaaagaatttatttaaaagggttctggtatgtggggcttttcttcttttttttcaagaactattctatgctatagtcttccagactgggttagaaaatttaaagccaaaacctttcggtctaaggaaaagacaaaacggaaactcaatgttaggtatgtagggtttttctggggggtatggggggcgtgcagaagtgggattccctgttttctgtcattacaataaacaatgacaaggcaaattcctctaagaaaattaatacacagagctaagagttgtttgcagggcttactttaactctagcccttcatttccatgctctggttatctatactagtttgaaagaatgcaagaatgctctggttatacatattagtttggagaaaggaaactaggtctgcaaaatccttttacaaagcaaaagttactaatttcaccacccccaatccttaccctcagccaaaagtttacaccttcaaactaag

SEQ ID NO: 53083 - DNA, 1761 bp, Homo sapiens
tattttcattctatttttgtcttttatatagtcaatttcagcagctgtaagccagtcaactgaatggaaacacaattagctagcgcagggcacctaggtgttattatttggccactacaaataatgctacagggaaagtttctgtacttgtatcttttctagtgtctgatgagctattttcaaaggaaaaagtcttagggctgggttatgaagttggaaactatagaaagctttatgagtggctccctacagctttgtcagttcccctagtgattggacccatccaaaccgctgtgggtgtcctagagtccaccagcagagggcagcatcccccagaccaacaaggcctcaggatgcagacattaagcctggggagtgaagaaaagtgatcagaagacaaaggcaaaatccacagaacatgctaaccagggcttccaaaatttgggaggtatggcagaccctcgtacctgcaagataactgggattatccacaactagcaacacctaacactcagtgtccttgattccttaactggcaccaagataaaaaaaagtcacctcctcttaaacaggtatatatactggccatgccaaacctttatcaactagaatcttgccaagcaacaaagattactgaagcccaacccctggggagactaaacaggcgatgcattatgctgctggcctcattttggcagtttctgttgaaagaaagaatggaaagggcaaacctacatatccatcacaaatgtctggtttctcattccctttacttggcttcattttaaactgagctgggggcaagggaaggatactgtaagcagcaatgagttgaaaggtaaccatggccaggtacggtggctcacacttgttatcccagcactttgggaggctgaggtaggcggatcacttgaggacaaaagttcgagaccaccctggacaacataatgaaaccccatctctactaaaaatgcaaaaaattagatgggcgtggtggcatgtgcctgtaatcccagctactcaggaggctgcggcaggagaatcacttgaacccgggaggcggaggttgcattgagccgagattgcaccactgcactccagcctgggcaacagagtgagactctatctcaaaaaataaaaaaaatagaataaaggaaaaagaaaggtaaccacgagcccagagcagttaggttacaggtcaaagaaaacagaaatcactatggttgaaatgtctccaacagtgttcactttagatcattaaccaagtgagtcatcctaaattaatctgaactaaagtttgggccactcgatatttcagctcttgaaggtctagggaaataccacatccttacctatcaagaggcgagacacaacaactattatttgccatttgttcactgccactgatatgctaacttctccctggaacatttatatgatctgtatcacagcccacactacagtcataataaataatacagcattggtgagaataggaaagcaggctctcttacaccctgattgcagagttgaggtggtaggagagtaggggtgggagcagtatttaccaccatttgggggaggacgaatttagcagcaccaagattcaaatggataaactctttcacctagaaattccacttccagggttttacgctacaaaagtaatgccataagtaagcaaagtattatacaaggatattcactgcagccctattcataatagagaacaaataaaaacaatctaattcccaccaacaa

SEQ ID NO: 53084 - DNA, 2758 bp, Homo sapiens
caagtttatcaacaatagggtgatttaggattcaggaaaaatcggctgcctatttgtatttcagaaagactagtatttcttctgacacaagtagagaggtgtaagcaacctctgggtgggtaatgccaccaaacaaaagcaacaccttcaaagtctctcagtgactagaggcagccagacactcaaactgccagtcctgaattacggcctctgaatggtgagggcttcacatttcaccgatcagggcacagcccaatcagaagacaaacccctgcactgccagggaccagcaaatccgctttcttccagtgtgcacatgactaaatgtgcttctgtccatcatctgggtcatatatagttcaatgcgagctgagcagacagggctgcaaggaaatctggcgcggttcaatacctcgtctagcctgggttccagtatctaattttttttttgttttaactgacaaactcatttctctactgggacaggatgctgtgctggctggaagttccatttctacagcaagaatcctatctggaaacacagaagttgtcctctagccacagcagctcgaacttttttgattgtcgttgctgctttctcccatcacccccatccccttttgacaaagatccaactgtaaaaagtcttacgtaacagttcaggactacttcggttcttttactgggtaagcactttcaattttttttttttaactaaaagccattttaaaattgaatctgttgaggggcttgactaaaatcttttaagtaatttgtgtaatggaatactgtcagtggattttttcgtctcatttctgcacgtgctcctttgttctcagaacagaagctttttatacacatcccataacgcagctggagagagttatgaagtcagttattataaggaacacaaaggttgctttccattctttgcctttagataattaatttttttgttttcttaaaatggagtatttaaagaaggaagaaattcacaagaaataaactgttggagaatttagaaaagtttgaagtttttaccaccttttctatctctagttttgtgtggccaaacacttgtgccgcctggggcggtgggggtagaggcaagcatagacagagaggaactaagccagacatggacaaaggcacgagccaaaaccagacagtcctggccgttcgataggccagcagtgggtgagacaggtcagccagctgcaggggcgggagcgggggggcgggtagggacatggatgtgtgaggtgctcatgcgtgcgatcgtgactagattctgaaactgccagccattttcccagctccgctttgtgcaatctaaaggaatgcatcccctctgaagcagtcttgccagagcctagtgagggagagaagtatggtaaataccacaacatatggaatcagaaaataccgggaactggagtgggcaagggggaatgcagagggtgtggaaattttttagtgatctggaatgtgttgagtgacaggaagtgccccaagcttctcccccaccaactcttctcagtcgcgcctgcttttgtctaactcttgtaatctacacactactgcttacaaagctgtctgagtttaagacaaaaagaaacctaaaagtctccttacttcatagtacctgtgatatggaaggaatgtaaaagcatgaccctttaagcctatggacattttttcaggtatacaggagaaagataaaataattttccacagaaaaatgagaattatgaattatatagttcaggttccaaatctaatttttaaaagaattctgattctgctacactttacaaatgcttaggttggttcctaatttgaagcagacttgttttatttggttaatgcattgcatttgaacttgtttctattttctttgcataaatttggactttgggagaaaaatgcaaagtaataagtagaatgcacttgggggaaaaaaggaggatttttcccttcatgggttggaaagtattttaaagggttgttttcttgaaaaaacaagctctctcttactttctgcatctatgctataaagataactatgctataataaatgtaaggtagaaaactttaaagagaaaataacagtgttctaagtgaaaagctacttagcattttcccaaacttacacattatcaacagaaacactaaaaattaagagaaaagcagccaactaattaaatagctagccttattttgggggtatgggatagaaaattaagtgtgaataaaatgatacttgggaatgtttctccctcgtaccacaaaggatgttagtggtcagcctacgagttaatccttcctagcatggctctgagccttcatgccgagcagacgttattcacatgacgattcgaaaagtccattcatatatctcgctacctggatttgaatagaaaccagacagcaattctttagttccagccaccattcgccccactggacaatagcgatttgttagcacagagtcacaggctgtgggacacaaagcttggagctgcagaaagatgggggattcagagaacaggaaattacaggctcgatgcactcctggcagctctgagaatacaaaaaaaaaaaaaaaaaaaaggcaacacagagatgccatgtttaagagctacttctagcttttttaaccacctccaatgtcataaaagctctattgttggagtacataaagtcacgagtcccatgtgctcgcttttctcactacagggaacttcattcaatgccc

SEQ ID NO: 53085 - DNA, 1102 bp, Homo sapiens
tatatcctttgaacatcagacaacatagcacataccaaaaaaaaaaaaaaattcaatcttcaactttggaaactgaattaaagtaagtactttcaattttggtcaatgtttactctcagtgtaattacttgtaggattatgttacaagaggagaaatggacttcattatatgtaagccaaaaattcaggaacagtatttctgaaatagataataagagacaaaaagtttggcgaggaagaacagctgttgctaatccaactatttaccctttgaccctctatctggccagtaaccgaacactatcaactgtttccctttattatgtgctgtttacaatccctgagaggcatgaaaggaattaataatttagcctagaaagctgacagcctttattgggaagccccttgtctatgggacagaaatcagagcaagtcctgaagtcacaggtccctttactgttcctgttttatagcctaactggcccccaaacataaatcaattatttctcctgttttaagcaacaatgacttctattctctaacttcccttgtatcaagtcggtccttgttctcttgagttttacagctacacggtaaacacgacggccgaggaaaaaactcggggagcagggcagacaggggttatttggaaacagaagcacagaaaggttatgctgttttgaacttctcttgacctttgactgcccttgtccctagcttatgctaatggacatggtacagggacacttcttgtagaaatgaacttagcctgaacctgtgccataacattggactccaggaagtccaggaatcataggaaggcagccagagtgtgaacagctgcccatattctgagcatggctgcccatctgctttatcacactaaaggtatttaaaaaaaaagaaaaaaaaaaagccaagccatttaattggacaaagtcagtctttcctcaactagttcccacatgacacctgctgtcccaaacctgctgcctacaaccactgccatgcacaactggaaattagcaacgaagtatttcctgttccaaaataagggagtgtgagcaggctttcctatcaggaatctggggaatggggggca

SEQ ID NO: 53086 - DNA, 3662 bp, Homo sapiens
atacacgctaatatgggatataagataggttggggtttggattcaaaaaaatcagcatgggaaaatttagatcaggatttacaacactcacaaattaataccaaaccaaatctccacacaaactagcttaaaaagtcaaaggcattaaagaaatcctttgttcctattatactgtctccttctaccctaactggattccagcttccccctttgtgacacggaattttattgatctcaaacatgttcacattcagaaattagttgccaacgacagcccacggaacggccagccacctagccatcatacatcatacacaaattaaaaaaaaaaaaaaaagagctctgaaaacacatcattatttttaagatcagcaacatcaagtgaagttaaccaagctctcttctacacggacttttcccttttgtaaaaaacaccagatctcctgaactaacaaaatgtttgactagttaataaacgtatgaaggcacggatccaacccaagatttccaccgtctgtagctactcactcattcaacaattgagcgcctaactgacctattttcaggttactttcctcacacctgccaggtcactgtcctgattgagaaacctcttggtgaagcagttaatttttagtgcctcctaactgtcccgggtgtttgcattcaatttgaaatctgttacttgttagacactgttcggtcctagatctctcagagaactgcgagtttatggcgcagcgaggggaggaggcactgatctctgagagcctccctttattcggaaatgaggagatgtgaaaggtggaaaacagggcaaataaataaatcgggtttgccgccggagcgtttgccggccggtgcgagcaccctttgtaatgcaggcctcccggggcgatcgcctgcgctaattgctccagggcgctttccaagttcaaaagttcaccttttacgacctcacaaaagctcctaacacgttaccaataaaaacattccgcggcaaacaccgaggaggaaaatatcaaacagatacaaataaaacaccccgcagggggagggagcgaaggggaggagggcgaggaagccccgaggaacctgaggacccggcccgggcgagggggcgagggacgagcggtaggaagggccgggccaggtgagggattctcagctcccaaggtcccggatcgggacaagaaagaggagaactgagactaagaggtggggaccgggacctgccgggcagaagccgggaggaggcaggtgtccggggccccggggcgggctggagccctcggccagggaaagccgttgcctggcggagaggggagctgagcaggggcggagaccggccagagcgcgcggggcgttgaggaaggtgaggcgcaggggaagcaggaggcgcgaaggggtccgaaaaaggaaacgactgggggatgtctagcgaacgggggttcggcagaggtggggggctcgtagtattcaaggaagaacgctcgaggctgcagaagaggaaaacgctctagaaagctgagcggtacaagggtgctgtggagtcgggtcaacagggcaagaagggagcgtcctcggtgggaggaggaacccctgtaggggaaaagagaggctctgcgttaagggaacccgagtgaggggatgcccccactgacggaccgcggtggggacttccaacctgaggagcccggggggaggggaaggttcggtgctgggaagacagggggaggggacccggggggaggagggaggattggtgctgaggggacggggggaggggaagcctgtgcagaggggacggggggagggggaaatgaagctcggtgcccagggacccgggcagggggagggtccgcgcagaagggaacagggacgaaggaggaggatccaccctgagcgagaccggggaggagagggagggtccgcgccaacggggaacggggtgaagggccaccctaaggggccgcggggccgctgcggcttcccagggcgagggtcggcagagaggagggggatccctggcggaggctcaggaagccggttcctgcctggcccgggcgtcgcaggcccctcacccaccgttgcgcggcggcggagggagcgcggcgggaggctccaggaaccccgccgagcccccgccgcctccccctccgctaggcggcggttcgtcccgctccatgcggtggtgcctagggtccgcgccgggtttgttgctccgccatgaccggcgccctagtcgccgtggtcgtcgtccgccgaggggaggaggttgtcaggagcccgcgagctcccggccgcggctctctctgggccccgagccgcccggctccgcgccgctccgcgcccctccgcgccgcgccccctcagcactggccagctccctcccctgacgtcacacgccgctgccgcgcaaggccctgcggggcacgctggaagttggagtccgctcagcgaggccggccacgccgaccgcaccaactgaaggggtggaaggagggataagaagtcctgagaagggaaagctaaagtctgtcaatatcaagaaccatgacaaagcgtttgatgtctatgtagtaagcggatacttccgggccttgtcttgattgtgatttctacctgatcaaagttccctaagagtcctcgtaaccccccaccccaacaatgagtctttgcgaggaggtggatcgcgaggcagccgggtgagcacgtgcaacgaagcccagccctgtgggcggggccctggaggcggggcttgaaggtactcacgtgggcctctccctgccgctgcgggacaaattggaccggagattaaaggaccggagtttaactcgaggtgactgcgttcgtatgcaaatggaatatataaaactcttctttccggggtagtctttaaagactttttacctccgggtgggcggcaaagactaaagtttcccctcctcccctttcattttccccctgcccatagaacagatgggcaaactaagctccgggccattggggctattaaagaaagccctaggctcttgaccccaggtgtcttgaaaccttccgtttaagagggatcccttgcccagccttgtttgccttcccctttcctcagtttccctatctgtaaaagggggttggaataaggacaggatcaagttggaagatcgcaaacccctgcccctcccacctcagtttcccgaagctttccggaagcaaaatcccgaattttgcagcggctcccggccgaatccacccgctgcggccaccaggtggcgcgcggccaccggtcactaggcccgccggggtgtccgtcttcggcgaccccatcgggaaaggatttcgctgctgccgccaagggtctaaggcctacctggcccacttgaagacaaagaacgagaacgttggtgctttgcccacttctgctctgccggattatgctgcagcttcctcggtggccgctcattcgccctctcctgccccacccgccccaccaatcccttagcccttttattttttttttgcctaattttaagtcctcgtcctggcattcgcatccctgcttggcctgacccttgcccacatttcgcaccataccccgtccctcacctgctacgaaagttgcaacgcttctctgcacttgggggcaactggaccttaccaac

SEQ ID NO: 53087 - DNA, 904 bp, Homo sapiens
cctgagtccgtgagaggagcccacgcgcctcgccctggccccgttgctcctgccggctgcgatcgagacccaccctggcgcgcgggcagggatgcccttgggagagccgcccgacgacggggaggccccgcgaacggcgggcggggcggggcggggtgccccctccgccctagctccgcccctggcggcgctggaagacccgcggggctggcagcagggtgcaggcgcggggcgcggggcaggcagagcgggcgaaggcgcggagctcgcagtgcagcccgcgcttcccagcgtccgtgcccggccgcctgtgcctaccgtgcccgtggcgccatggccgctgccgccctcccgccccggccgctgctccttctgccgctagtgctgctgctgagcggccgccccacgcgcgccgacagtaaggtacgcacgcccctcggacccgcgcggctcggcgggtagcggggcgcgagggggcgctgtggctggggtgcggcccgggagggagcccggggccagggcggaggagccgggagctgagagaccgaacctgggacttctcagcactgaagccgcaggggcaggggccccgagagaggggcgcgtggaggaacaagcgctggagatgtagggatgctagggacccggggcctgaggaaggggcgctgggaccgggtccgattcccggaggggtcgggggatttccccggagtgctggccagactcggggttcgtaggggaagctcctggcaactgttacccaacgactcccaggcttgcagcaagccctgggccacggctttcacggcccgctggggactgggggtcttctctacccgatgaacgcagccgcgctggccactcgcctggcctctgatgttcttgccagggaccgggtgcaccc

SEQ ID NO: 53088 - DNA, 1194 bp, Homo sapiens
accatgcctggccactaattactattaatttatgagtttacctgcttcacatccatctcccctctgtgagctctgtgagaacagacctcgttccccactgtgtcagcacccaggagattctcaacgtatgtcctcagataaccaactgatgtatgttgaaaccttgggcaagttcctacatgaactcctgagccagccacccttggctctgaagccatggccgctgcacaagctacacttctttcatttatttgtgcagcaatatttgttaagtcaggttccacacagaaatctctagaatgccatctcagatcatggaggctggagagcagacaggatattaacggcgactctcttcatcttgcggttctaggaaaatgagaaaacccatcttcagagaaaaacacctgcctaaaaacccccaccccagtctgcaactacaaaaaaaagctgtggcctttctcttgtctgtggcaataacactcacagcactggatatggcaggcacacggctggctgtgccctgatccagtgttcaaggcaagcctgtggcccacagaggctgaggccatagagctctgtgggctcgggggctggacaggcttatctctgacctttatcatcctggcggacaacatcacatgccaaaaagagcagtcaccgggcgattgtgagtaagctcttagcctgaggctcagtgcacggtgggcgttcaggaagtggtggccactgtcagggttgtgaccaggtggttctctgctcagagcatctgctctctgtcctggcaggtctgcatgtcatgtgctgtgggctgtgcaccatgacacataccttccgtgtgccaggctcagaagcaccatgttcagcaagtcccttccctgcccttgagagcctgctgggagcagggaagccacactcaaccacaccctctcgctgagctttactgctggaagagtggagagcccggggcctccatgtgccttgctaaggagtgtgggctgctcccggagccacaggagccatgggaatccgcacaggagccacggagcggcccacacctcccaaccagctttggatcagggcaagggagcctcccctggtcacctcaggtggtacagtcctcgagagggccctctctgctctttagacttttttcctgcgacttcaaggttccaaatctccccgtggccagtg

SEQ ID NO: 53089 - DNA, 1011 bp, Homo sapiens
gtgagtttcttcacctgtaaattaacaatgaaaccaagtcctgctcgttccaagcttcagattgcgctatccggtaaggatcctggcagctcctgggcaactgccccccagccccagcctccaccccatcctcagatggcacattttgtgctgccaggaatgttaacagcaacgtgaccccacttttaatgccatgtactttacacacactacctctggcttccacgccctggaggacagagctggctactgtccccagcgctctcctgggacatccttaacctcagtactggccactcctggacggaaggggtattggctcctgagggggccctcttgggcatctaccgtgtgccaggccctgtgcttggctcacccctggagtcctgtggggcagggctgatgctcccggttgtgcagatggggagacaggctcgttgctcccctgtatcaaagaggtgcagggaccccttgcagttcgcagtccgcagggcgcggggccgggctctgggccgcgcggtgcgtgtggctggcgcgccctctagtggccgctctgcctgccgtgttgccccgcgcgagagctgccctagagtggacgcgcagccgctggcgcgggaagtcccttctcccagcccgccgcggtcccgcctgctgcggctccacctccgccgaactgcaagcggtctggcctgcctgtcagtcctcgtggcttcgcagggaccccaccatggccgcacgccccgccccgattaccatggagaccgcctgtacacagtttcctctttcctctgcccagtcctggggtcccgcggccgcctaggagggagcccgccggggcggggcggggccgggtgcccatgaacagcggggtcccggccacgctggccgtgcggagagtgaaattcttcggccagcacggcggggaggtgaggtccagcgggctctgcccagactcccggctttggatgcagagtggttcctggttctgtgtagtgggggttccagaatgtt

SEQ ID NO: 53090 - DNA, 729 bp, Homo sapiens
agggcaggacctgggtgccagcctctcttcctaatggccagcaccaaggttagggctggcccattggtagttgcattgacatttccatgacccaaatggcatcaggcaaaagggaactcctgctctgaaatttcaaatacagcctccaaacaaaacctacaccaagaggttcagatgttttttgggccgggggcggtggctcacacctgtaatcccagcactttgggaggtggaggtaggtgaatcacctgaggtcaggagttcaggcgaagactcatctcatattttgtctgggactttcctggaggtggcttcagatgccacagtggcctggtgaggcttcctgacatgcccccctccttttccaggtcaaagtctgggactgcaacacaggaaagtgccttgagaccctgaaggtaaggcacggcgctgtggcactgaggaagctgtggacagcttctcccaaggcaggacttgcctcgagccccaccttctactcttagcagggagtcctggatgtggcccacacctgtgccttcaccccagatgggaaaatcttagtgtctggagctgccgatcagactagacgtcaaatatcccgcacgtccaaatcacccagggaccctcaaacctaacaccaaccaccttagatggtgccgacctcacccgctcccctcagtggcgcacaggcatgccgcttctccccacagacgcaaagtgactgtgctg

SEQ ID NO: 53091 - DNA, 2449 bp, Homo sapiens
tcggctacaaaacagagatgtcagtgaagatagggaagacacatagcactacccaagactcaggactcacacatagggcagcaatagctgcagcctcccccatcaacccatccatattcactcaggaggaaggcgttctgggagtgaggtctgaggagggaagagaggggcatgggagagacagcagaggctttatgaggaagtgcaggctggataaatgaggcagatcagaaaaagaccttcaatcccagaacacgaatttatcctgagggctaagacccaaccaatgccaatttcaatgagctgatgggaaggaatcatgccacaaaccaggcaatcaggctagcttagggaactgcaggagagagaaacaagacatttgcaaagtggagtcactacaagccaggagactgaagcaaacaacgagccagggagaagttatttgtagtcatgtcaggatgagggagtcacctagtagacagctggtcaacatggtttttgaggattcagtgtgcaactgtgcttgtccaatcctcccacccctgcctctactaaggttgtttgggggcaaagagggcaaccaccattttttttttttggagacagggtctcacctgtcaaccagactgaagagcagtggccccatcatagcctcccaactcctgggctcaagtgatcctcctgcctcagcctccagagtagctgggactacaggcctgtaccaccacacccatctaatttttttttgagaagtggactttgtacccaggttgatgaactccaaacccatgttcctttcacaagtctcccgcactcttagccatgtaaaataacttacgctgccactccagggtgcaagccacccacctgccaagggggttaaaaactcaagtgttggtgggaagcggaaggaaggggtccgggtaggctttgaaggcagcattaagatgggtctccggggatgcattccaggcacaaggaccgcaaggtcaaggcaggtaagaggctaagcacacaacgggtctcccatgcgcgccaggatgcacggagtgggcatctaagcggccagctccttaagccaactttgaaatcctccgacgatcccgatgcacacgtgctccccacccacgagggctgtgatccggccgcctcacttacatcttagagagcttggaggccgcaccgcctgtcactttggcgacgcgcagctgggacagctccaccttcaggtcgtccagctgtttcagcagctcctccttcttcttcccgcgaagatctcgagccttgatcttggcctgcgcgcaagagagagtgtgcctcagccaggccgcggggccatatccccttcacctgcgtggccagcccccaaaggcgcgcgactcgccatcgactacgagtgcgccggagccccaaccagggctcaggacagtctccctcgccggccgtgccttgggcagagtaacccaggcccgggccgcgcgcctctcccggcgccaagcgaagaggcgggttgtggtggcgccagaccattctgcgcggcgccccacaggcctaggtggcagatagaatccgcgggctcagcccgcaccgccttccccaacccccgcgcctcacagcgctcggatggcgcccgattccgcagctctcaccattgctgcacaagccgccaacgccgccgcccgctccgagggaaagaggaagtaggcggggctgacctccgcaactactgccgggtggcggcgggcgcggccaatggcgccgcagcgggggagccccggctccgcctcatctcccccgcccccgaggaacgccgtggtactgcccgccccgcctggtagggccggagccccgccttgtagtgctcgcctcattcacggcacccctgatagcgaggtcggcgtcacggtgtaggcgcgcagttggggaaaccgaggcccaacgtgggcggcagctaccagagatggcacacggaggactcaaattcgtccattcagtcattcgttcattcattccttcgggaaaccttgcagatctcccaatctgggcaactctgagctgggcgccagtagtctgggggtgctgacgggaggaggggccagagttttcaaagacgattaaccgaggctcacgtcgcggaggaatttaaagcgcgagatggacgggaggggcgggctcaggcagttataatccaactccataaaggttctggggaggcagtatatggaactgcaaagagcatttacacctttttttttttttttttttttgagacagagcttcattctgtcgcccagggtgccaggctggagtgcagtgtcgcgatctcggcttactgcaacctccgcctcccgggttcagcgattctcctgccccagcctcccgagtagctgagtagctgggattacaggcatgcaccaccacgcctggctaattttttgtatttttagta

SEQ ID NO: 53092 - DNA, 3094 bp, Homo sapiens
gagacggagttttgctcttgtcgctcaggctggagcgtaatggcgcgatctcagctcagtgcaacctctacctaccggtttcaagcgattctcctgcctcagcctcccgagtagctgggattacaggcatgcgccagcacgcccggctaattttgtatttctagtagacacggggtttcagcattttggtcaggctggtctcaaacttctgacctcaggtgatccgcccacctcggctcccaaagtgctgaggattacaggcagagacttcttcaccactagtttcccactatgggagtctgtatccttaccaccgaagataaggttgcatcatagtctggcaatattttttttatctttagacacagttcaatgagaggtattcgaagcagcaaaaatgaatcacattccaactactgacttttattaaaaagagtactattagatgaaaatagttttcacactattatataaaaagacccattttacttaccctaaggctaagatcaattaacagaacccctgggataacagcccaggcaccaaatctggcacctcagagtcgtccttgacttccctaaaccgctttcccccatctcagattctgagaatttggtttctgtcaagatgtgcctctccagccaggcctctcctgccaggacggtggccacagggccatctccctctcctggcgcccccaactgcctggccaaggtgactgctacacacgtggggtcgcagaatccctcgagtcacaacgtcttcaacgtcttgtcagtcccgtgatcgcactaaacgtatttaaagccccctactcctttaagagggtcacctctgtgtacaggcggcctcctcgtactaagtgtggtggcgttcaaggctccgagacacaggcgcctcccgcgccactccccgggcacaggaactcctactcatccctcagtcatcagctcgaaggtttcttctccaagaagcctgcccggcactcgagaagtagagccgcgagccttctcccgggggcccagccttccccagtaccggcagggatcaccccgggagcacgcgcccggccccgctgaggccaggggctcctcggaggcgcgggaaagccggggaaccagcgcagttacggcacacacgaggcggggcctgcacagatgccgggcgcccgatcctcagtgacaaaatagagactccgtggaagggacactgaggtgggggaggctgcggtgatcccataccgcactccaggtgccaggctccgccccgcccctgacggcgcttccggatccggcgggtgccggaagtgggcgggcggcggcggctgcgcgcggaggcggtggaggaggtgctgggagcagccgggcagccgcttcccgcccccgagcaggagccggtgcgagcggagcagagccgaggtcgggccgcgagcggagccggctgagcgggcgccgagctcccgccatggcccggaacacgctgtcctcgcgcttccgccgggtggacatcgacgaatttgacgagaacaaatttgtggacgagcaggaggaggcggcggcggcggcggcggagccaggcccggacccgagcgaggtggacgggctcctgcggcaatatccttccctgacgcggcgtccgggcctgcgcgcggccttctcaccttcccaccttcccaccttctcgggccctttcgggcgggcctcccctgtctccgacccttggccccctcaggtcagcctccagctccctgccgacccggcttccctgggccgtgctcccttgagtcccagtctccctgggtccctcgtccccagccctggcgccttcttctgcagcgccgtcccgcaggcccctggacccggtggacgggctccctcggcacccccgcaggtcccgcgccctcttccctccttgcctcctcgtcccctcacgctgtcccttccttggggccccagcactccgtccctcccttgcaggaaatcgggcctatggcggggctgggtcggcggcagggcggaggtgagccgcatctgagtaaccgagtgatcggggaggctggggcgcggtcctccggggcccgattgctgcatggcgtgaagataggtgggtggacggctgtggggaagacagaacccaggagggagtggaggcggccgccgtatttcagccctggggtctgagattgtgtctctcttcccccagtcagtctaaccctcccgcttaatgctgagaaagggggaccctgtggttcccctggacaccttggtggtctcagccacgctcaacaagtgagtcttggctccccccagtacccttctggtgcaggaagcagcggagaaaactagtagttcagagctaagaaaaaccagacaccttgaagcgaagtgtgaaagtggagccccacgcctggaaatgactgttcttgtggccacagaaaacagcatttagaaaagattaaaaatagaggtgattgtcacagccttgcttggtcctttagcagtatgagcgcaggaaactgacttattctcaccggaaggatttttctttattcaaatggtgttccaggaagcctgtcccctccccccgcacgggtgggggcagggttggaggcccatgctgtacataaatcaggttctcggtgttgaaccagttgactcagcttggaaagtggggcctgctgctttagggggagcccggcagtgctcctgagtgtgcctttaaaccgaaaaccttcagacttgatttgaacaggaatgtgttttccgaagtggagattcaagcttgtaattcctgccccatcaggatctcccaatccaccctccttatgaaatggggtcaagggaagggtccccaggagggaaggttggttgtagtctggtgtagggcctagttcatggacagtcagtgctgaaaggggctccagggtcaggcctttggcccaggactctcattgaacagatgagatcaagcctgtcagctgctgccttggtctgggtgcagaaccttgttgaaggtcatgtcttgggactcccctgcctggtgacaggttccttgaggctgcttagaggcctgggcttagcacatccaggggatg

SEQ ID NO: 53093 - DNA, 2429 bp, Homo sapiens
gtcctgcatgaagacaaagataaaatgcattgggtatttcttttcaagtgtatggccaaaatgttgggtggggatagggggaagaagtgaaggaagaggaggggcagaagaaggattaaagggggtaagaaaacctgtcacaactctcaatgggataccctccctaaccctgatctcctatgaaattgttttttgcctaagagcttcacttacaagcgcatagaacagaattgatcaccgcagcgggtgcctaaattcacttctccctgggagccctgagcaaaacaatttgaatgaggttaagttttcctggagccagtatttatttctcagttgattactacactcacatactgtttacccggccagaccctgggcgtctggtcacggatgtgcactgacaaaaagcaaggcaaaattgggtaaagacagatgtctaacccccagggaggcaggcaggtgcctgccacggcagtttggatctcactccctcaggctacctccagccccgcccgtgctttggactgtcaaagaaaggaaggatccaacatctctcccatttgacagcaaggaaactgagccctagagaggaggagcgacttgtccaaggtcgcgcagggaggaatcccggaaccctaggctccagactcccaggccggggcagcccgcctccgcccccactctcaccctttcagcaccccggtgccgccccccgccttggggctcgggcaaccctgaccgggccgctgtggggacagaccgaggccactgggagaataaggggcctgctcgcattcccggagtcctggcccgcgcacctgcctctctctgggaagccagcaaagccccgcctcccgggcctctcgtgagccccggcccgcgtcaccaacccccaccgcccagccggcgagccgagcagcgacccggaaccgcacgtctcccagcgcgccggaagtgactgcgcggtggggggagggggttggtccgacgcgcgcatgcgcccgtgcgcggccttggcggctactgttaccacctctgagcggcgactgggccggaacggctggagttctcgggtgcccagccgggcgctccctcagcccagttcgccacgtcagcgagcggccagagccacagatgatgactgagtctccgaggcctctcggtctttttctattttaacaggggcgcgtgcagagcgtggtaagtgggaggggcttcgtgtcaaaagtaaaagaacccagtcggtgccacaggccccgctgtgctgtgctggctacaaacccggccggggctgcactgcttggccaggcgcccccccgcgccgcccggtcccgccgcaccctaggcagctgccttgccaccgtgtgacccgggaagtctgcgcctccagcttcactcacaagccagtagctccagaaactagtcctgggaccttacaccttgagaccagtttttagactttggcgcctgtcacctactgtagatgatgcgttttatatcgcaaccgagtacataacgtccagcagaaccacgttcttactatgtaatgcacttaaaaacgctggtggcagctcactatattggattagcttcaccatccgctgctgggccgtctcctttctgcttaggaaggaagttgaaaacatcaaaagtgcacggcgcgcgcttctgtggtcccagctactcggaagaccgaggtgggaggatctcttgagaccagggcttccagaccagcctgggcaccgtggcgagactccgtctctttaaataaatagcaatcatgcaggcagtaggaaaataaacaaaagaggaaaaactatcttgttccaagtcacagtccaggccgggcgcggtggctcactcctgtaatccccacactttgagaagccgaggcgggtggttcacccgaggtcaggagttcagaccagcctaacatagcgaaacctcgtctctactaaaaatacaaaattagccgggcatggtggcccatgcctgtaatcccaattacttgggaggctgaggcaggataatcgcttgaacccgggaggtgtaggttgcagtgagtcaagatcgcgccattgcactccagcctgggcaacaagagcgaaactctatctcaaacaaaaagtcacggtccaaatcagtaccctaagtcaggtccctgaactcgtcaatgccaagccagccattccaccttaaggaactctggttccatccccagactcaacacaagcccaagaataagcagattccacccaattcttcaacagtcccttccctcgcgtgttccagttctgacctgcaggagcagggcagggaaaaaaccaaaaccaggattcaaacattgacaaactaacaagaagcatcaaccccaagatagttcaaagcctctgagatatttgaatgaagcaaaccctaacagttcagct

SEQ ID NO: 53094 - DNA, 681 bp, Homo sapiens
cagagattgcatgtagcatcacaaaaatatacatatgccattacaaataaaataagaatttcaaataaataaggtcaacaaaagagccctcaaggtaaataccctctatgatttccaaacacacacaggaacatatacacccaaaacatcaccaggagactcatagcattcatattcatatcaaatcttttactcagggtggggaggtggttttgaatcactggcaatggccaaattagcagaccttggtacctgactatatttccagtccagagtgttctctgtatatcaggctgattacaagtctccataaataaaatttttcagctgggtccaaactgcttctcagagacagaaagttactatatcacacatgtcagagattaaacttggaggagagtgctaaagaaagctccataatacctaatacataaatccgatttgtcgcttttcccattatcctgactaaatcagtataattacgacataatctgtttcagggaattctattgcacaaaggaaataaagggcagtagccagaagttggaggggagggaaccacccggatcctctatcaggaaaactccagccacaattggattgcactttgcttctgaaatcctgaaacgtttcaatttggtaaaaataaagagggtacaataaattctgtgctttgaaagg

SEQ ID NO: 53095 - DNA, 1067 bp, Homo sapiens
agtatagtctttgtttaatacgcatttttttgaaggcatcaatgaaacaataacattttccagcacagttttcctctctttgaagattcaagatcacttcagtccactttagatttttaactaccagtaaggaattacactattagcttaaggggcaacatcataagggtcaatgttgtgatttctaagaccctcatttttagacaagcatgtttctaatcataaaagctctaatttcctcaggagagtctctgtctgtactagtttctaaaacagctaagtgggacccagattttcttgaacaaaatctaggtaaatatgacttacaaaagaaaaggttgtgtacactacaaacagggtaaatagttctcttggtggttggagtggggaaatcaatatttttggaaccaagagtccaaattacagaatcagagttggagaagacctgggccaacctcttcattttacagatgagagtgctaacaagcagagacatgaagacagttgtcaaagggcataacgcttaagttaccaggaaagccaggactagaacttaggtctcctagttctcagaccagtgttctttatgcttaacgggggaggataaagctcagaacagtaaatactattttaaacattagaggacaggaaactctgtgttggtaggagcataactggcacaggacttaaggggaattgaaacaagaggtcagaaaaccgaagatagtctattgctgtagttcaatgaacactgttactaaaggaaagctatgaagtttattaagatactgaaaaaaaaggaaagcagtctttacctgaaaatgaaaacccactagcaaaggaaatctttccagggtaacttttcccaagctttctgaaatactgtttgaaagaacaaacaaaaaaatttttaaaaagtaaacaggccaggtacagtggctcacacctgtaatcctagcactttgggaggttgaggcaggaggatcacttgagcccaggagtttgaggccagcctgctcaacaaagtgagaccatgtctctacaaaaaattaaaaaataaagaaaat

SEQ ID NO: 53096 - DNA, 1339 bp, Homo sapiens
taacatacaagaaaacatctcccggcgctaccgtgccagtcaagaactaaatagaccaccctctgggaccacaggctcgccaagcccagatctgaccttacaaacgcctcatgccctgtttcccctatttaccaagacctagcattcctgggactcaccgttcccccaattccccctgagctcaaaccttcctggtccctcaccccatcctcgacccctgctcgtcacagcccagctccccaaaatcacccacctccacctactcattgtctgcctcgtcacccccgcaagcccccctagcctcccctttcctgtgcccacccgttcccgaccgtgcactgccccctccacgccccgcctctccgggcccggcgacccccgcattccacggcccctccgggggcgcgcccgccttgcccctcccggccccgcgccgccagcctcacccctcggcgccccttccctcacacgcccctctcacctggcctcgaggaggcgatcgcgcccagcccgcgccgccgcctgcaggcgcccccaaggtccccccagcctgcaccccccgcccctccggtctctgcgccccgaatgctccaccgccccgagccgctgcccctgggcccgctccctggcccccaccccatccccaaccccggcctccacccagcccccgcacctgggggccaggcgactccgcggctgctggggctgccgggctcctctgaccatccggctcctgctccgccgcgggagctgctccggcggccgcagggctcgctcgggaagctgaggcggcggaggctggagtaggcggagaggcgggaggagggcctcgcgcctctgccaggcttgccgcggggcccgcctcctccgcgcctctcctcggctcccattggctagagcagtagtgtggacggaaatctgtcagtcgattggacgctcggcccgtcacatcccgcgctgcccacccagaggtttggttgagactgcaggtggcggcggaggtgccttagagattgctagcagggccggaggagaccctagcgccaccatgcgtctaaaagtaggaactgcacccccggctccagacacctgccccaggttctcctggctctgcgtcctgcataccacacacctgctggcgcccctccacctctgcaccacgccaggaccgaaaacaagccctgaaatctcccaatttcttctagcaggtgagacagtgaggcaactctcacaaacgtgtttccttttaagccacctcgaatgcgatccttgtccctacatcttgctgaaattgtctcacagctcacagctacccctcaaaaaggacccagccagaaaa

SEQ ID NO: 53097 - DNA, 892 bp, Homo sapiens
aggaaacaaaagctcagactagataaataacttatctaaattaagatacactgatgcaggatcagaatctagttttttgacttcattatgatgctggagcacttcccaatataaggggtgtgtgtgtgtgtgtgtgtgtgttttaattgaaaacagttgaaagttcaaagtgtgtgtgtgtgttttaactgaaaacagttgaaagttcaaagtactgcctatcttgaagatggcggagtagcatcgcaaagagattagtattgagtctctgggccgactttggttgcagtctctgcagcagcagtgatcacttagtgaagagtgcttagggtagttggccaggatcctgaatatcaaaatcttcagcggcagctcccaccagggcttatctcagaaaactgccgatcgcctgggcctggagctcggcaaggcagtgattgagaaattcagcaactaggagacctgtgtggaaattggcaaaagtgtacgtggaaaggatgtctacatcattcagagtggttgtggcaaaatcaatgacaatttaatggtgcctttgatcatgactaatacctgcaagactgcttcagcgagccagcttactgcagtcatcccatgcttcccttatgcccagcaggataataaagagtcaggtgacaatctcagccaagcttgttgcaaacatgctatctgtggcaggcgcagatcatattatcaccatggacctacatgcttctcaaattcagggcttttttgataacccagtggactatctgtatgcagagccaggtgtcctgaagtggataagggagaatatctctgagcagaagaactgcactattgtttcatctgatgctggtggagctaagagagtgacctccattgcagacaggct

SEQ ID NO: 53098 - DNA, 1919 bp, Homo sapiens
aaagtcattcctttacccatacatacatttactcttacttggactcaggagtaacaaggaactcacctcctttagaaaacgaagaaaatgaaatactgagttaagaaggggttaaggagaaagtatttgtatttattgagaaccaactactttatccacttcagtaagctcaacaacatactcagaaacgggattcacctctgaattagcaaaaccgacgatcctaaaaagcaatttggaggagtggcaatgaagagggacgacctgacgttcgctcccgccagtaccaaaccactcgggcccaccgccttccccttcctcagagacctaaacacactgaggccgcgttccggtagccggtggcatctcctgtcagacgccggccactccgcgctcctgtcacctccggtggaggcgaccccatcccgagggcactgccgcgggggctcggctccgactgcgggagacccagggatggggtggggagccgagccttctaaataaagctgttacagctgcgggtcctggggcagcccgaaggccagaaggggcgaccctgggacagaggccgcgacatccctcgggatccccactgaggcaaccgggacagcattcgacgactcggctcgcgagaccctcggcgtgacgccgggtaggaccgggtcgactggcaatgggggaggccctccaccgcgactggactggatacccggcgggggtcctggagaaaggaagggccggccggcgggcgccccacagccggaaggggcgagcccgcaaatagggctcaccttcaggtcgttctctggcaggtacttgcacagccgcgctatttccacatacttgtccaggtctagcggcgccattttaagaataacaagccgcggcaacagcggcggcggcggctgtagcagcggcggcggcagcggcggaggccgaagccggaactttccctgcgtcacgtccggcccgtgagtggcgcctgcgcagcgccgttaaagcgcgacccgtttctccccgctacgtcggtacgcccggcgccccctctggctgaaccccgactgcaggccccaagagagcccgcttcggtccaccccgcgaaacctgctgggacccgtagtcgtctgccgcgggggtgctgggatgtgtagttttctgttgtggacagccacccctctcttttcctcccgttcctccagactttcacctcccggcagccggcgaggcttttccgaggcaaaacagcggagtaggtggtcctagccactcactggtttgtttttccaacccttttaagcactctccagaatatcttcacttaacaattgggtaagcctggccgtagtaaccgtttgcacctttccaagtccctgtgaaaacctcgcctaagcctgtggcagagatgtcaggccccagtcttccagcctgaaaggaagggaaacgaatattattaaagcatttctgatgctaaatgcgatacaaatgatatttttccttttaatcttcgtaacgattgataggaaagtgaggctaggaaactgcagttcaccccaaatctcacagggaacaaaatggtggggtcaagattgaaaaatggcttaagcttaagcatgcttccagtgagaatcccacgagggcagggagttttttgctgtaactccagcaccgagaacagtacctggtactagcataccttcagcgttcgtttatccaaccactctttgctgagcaacaaagatgtgccaggtacagctcaaggcgcttgcagtacttcgtgaacaaaatagacaaagatctctattctatctgtagctacaaaaagtaccaaaattagcctggcgcggtagtgcgtgcttgtggtcccagctactctggaggctgaggcaggagaaccgcttgagttgggaggcggaggttgc

SEQ ID NO: 53099 - DNA, 1760 bp, Homo sapiens
gcatgctcaactctcccctttagaaactgttaacaatcgttgtggccgggcgcggtggctcacgcctgtaatcccagcactttgggaggccgaggcgggtggatcatgaggtcaggagatcgagaccatcctggctaacaaggtgaaaccccgtctctactaaaaatacaaaaaaaattagccgggcgcggtggcgggcgcctgtagtcccagctactcgggaggctgaggcaggagaatggcgtgaacccgggaagcggagcttgcagtgagccgagattgcgccactgcagtccgcagtcccgcctgggcgacagagcgagactccgtctcaaaaaaaaaaaaaaaaaacaatcgttgtaactggaaatgtaactgttataccctcccccccttttatttatttatttttttgagagggagtttttgcgctgttgcccaagctggagtgtggtggcgcccagccctgttagccccttacagagtagatcagctgccgcaggcatctgagttccccaaacggacgcccgaacccggcattgcgcaaatcgtttccaagtagccccggcttatttatcccgtccgggagggagggacccagggaaggcccaccccacttggttcccgagaaatgcagagcctggcgtccactcccggtctgggggacccctccaccgccagcccaggaagtcagcgccgggccctcggggcggagcagggaagagggagcggttggcccggacgctcttccgggtcctgggaggagggcccggacctaagccccgcccctccggggtggagtcacggctcgcgactggcctaagtcgccgcaggtattgcagtccggggctggagggtaggggcgagggtccccggataccgggtctatcacggtctcgggcagggagtctgaatcttttaggggagtgggcccaagccgggtgcaaagaacggggaagggccttccctggctccgtcccggccactttgaccgaatcagcctgttctttcccgaccccgtctcctatcccctagaactgccacgtggggatgagatttgctgggctggtagcggcggctgctgcgggaggtcccgcccacgtgaagccagcctaactgagctctggactttggggacagctgtcagtggcctaggccgcaggtgagatttatccattcatctctcaatctattttctttcttcattcactagccactcccccacttctactccatgccaggtccattggtaggttctcggaatggatctgacaggcccagccctctaggaacttagtctagtggaatttaatctagaatctagtctagaagccttaaatagataaacattccaaatgattcctgcaatggtgatggctaataccttcagagcccagtgggtggaagaaggaagtaacttggatgtgggtggaagagaaaagggcaaatcagggaaggtttcaccagggaagggacttttgaactgggctttgaaggttaactaggagtttgcaaatttcccagaagggaagcgacattccaaataggggaagcagaacaggctgcaaaattatgaaaaggcctgccatattacaagaacagcaaaaaaaccaataatgcaagagattgtggaggtgagttcacgggaaaaaagctcaacagcagaaggccttactttctatgctatgttgaggccaagatttatcccagagctcagtatttctcagcttctttaaatattttgtcctttgagcggagag

SEQ ID NO: 53100 - DNA, 2946 bp, Homo sapiens
aaacccttcacgaaggcttctatacataacagccaaccgagaatactaatgatcaaaaaatacttaacattgttctagaaatatttaccttctttcccaaataagcctcagcggtttctttcattttagtgagaaccatggcagaaatttcttcaggagcaaatgtctttgtttgcccacctccaatatcaacttgaatgtatggtttagttttcttttcaaccacctattttaaagaattattgttttcagacacagatacaatgacatctcaaagtttaaaagacccactaccatccccacaatttggtttattttggtcccttggggctgcaaattgactagaaatacttcagggagtataggtgtcttacaaagttcagttttaatcggtcttttattcctaaactatcgtagacagtacgacagcaactgtcttaagttttgtaacatactaatagtattaaagttattacatacatcatgtctataaccttcaactgttgtctcaacacttttccagagacttataactctaaatactcccaccacccacccgttctctaactggatgagaaaaacccggtcgaaccttgaacggcaagaacttgatgtcctgctgcacagacgggtcattccacgtgcggccgatgagccgcttggcgtcaaagaccgtgttctcggggttggaggtgagctggttcttggcggcatcgccaatcagacgttccccttcaggagtgaaggcgacataggacggcgtgatgcggttgccctgatcgttggcgatgatctccacgcggccgttcttgaacacgccgacgctggcagaaaaacccgacagagggacatcagcaccgcacttctcacgccaggccaggcggccacgccccgtccccctgcatccgcaaccccacttaccaggagtaggtggtccccaggtcgatgccgaccaccgtgcccacgtcctccttcttgtcctcctcctcggcccgcgccgcgctgagcagcagcagcatcgcggccaccagggagagcttcatcttgccagccagttgggcagcagcaggcagtccagccacaggccgtagcacaggagcacagcgcaatttccgacttgcaggcggcaggggcccggggtcacaaggcgccacgaaccaggcgaagggcaggtctagaaatacaggccgcggcgcttccctctcacactcgcgaaacaccccaataggtcaatctgtctgtgctgtcttggccggcgtcgacctcaccgtcgcctactcggcttatataccctcccccagccccgtcgtggaggccgccgattggtgaaggccctgctcgttggaggccgttcattggcccaggccaccaagctggccgccgccgattcgaagcggccccctccgcaataaacgtcactgctccgccccccccagctgattcattggctgctattcgtttctaacgttcaccaatggtagataacatccgccccatccgctggtcccattggttcagcagctgtctatctctcctgcgacttctgaccccgaggcatttccgctggtaaccgcacaagtcccgccttcactcccggccctagggggtcggagtaggtccagcaggagtgaccccccggggctgtgggatctgaaactttttcttctctactgcttgttctcccttcctccatccctcaccccgaagcgggaagcagctttctcttcccagcttccatccagtctctgagtagaccagtcgcagcttagatgctgggatcgcctcagaacacatttctttgcccttcacggccactaccggtattggggtatgcgagtctcagggccgttcgttgctcacaggtcgagctggtctggactctgttcgaccacgaatcatgactccttcctgccagttatgtcccctccgcacccttgcccagccattttaccaggcctctccacattgcgctgccccacggtaagtcgcaggacaagcccggccaaaggaattgcctccagctctgagtcccctccctactgtggcaacccactccagtgccagccctcccacactggatgtctaatttttctagcttgccaccctttactttcccctccgctgcccatcctttccctctggggcaaaggttatcatttacggggctttctccatcctttattgttgatacttttctaccttcattccaggaaaaggtctgatgtacacgcagacaacacatttgataggcgaaaatcgtcttgataatgccttattcttatataacatcctgttgcaaaaaataatagagaccactatttgctgaaagcctaccgtggattaagcattgttcagtgtgcttttcatgtgtcatttagtcttgacagttcaatactcggtaggcatttcccgttttccagatgaggacattgaaactgaaaaagattaaataactaaacaagtcacagagctggtgagtgatggagttaggattgataaccaggtggagttcactctattgccaatacttttttttttttcaagacggagtatcactctgtcacgcccaggctggagttcagtagtgcaatctcagctcactgcaacctccgcttccggggttcaagcgattctcctgcctcagcctcctgagtagctgggattacaggcacgcaccaccatgcctggctaatttttttttttttttttttgtggagatgaggtttcaccattttagccaggctggtttcgaactcccaacctcaagcgatctgcccacctcggcctcccaaagtgctgggattacaggtgtgagacactgtgcctgatctcttaactttaaaacaaaaaattcatctgtggccgggcgtggtggctcacgcctgtaatcccaacactttgggaggccgaggtgggcggatcacggggtcaggagatcaagaccat

SEQ ID NO: 53101 - DNA, 982 bp, Homo sapiens
tccatctcaaaaaaaaaaaaaaaattcatttgtttgaggaatgtttttggaggacctactatggaaagggcaaagctctgatatgaaatatttgagattcatgggtatactgtgtccagataccactaaaacatcctaaacacactttattaagatgttgagcctgtgactcagtactcaagaattttctttttccttagtgcttctcaaaggttagactggtgactcaagagttgactctgttcactacagaggttgcatcatgcatctctttcagcagggcttgtaatcctgcggcaacattgacccttctttggcttgcatcagtccagcattaagatagaaatcatcatttgaccacattacagcttctttcatttcaatcaaatgtttttatagtgcagtccatttccattaaaaaaaaaaactctccatttcagccttatccttgattaacagagtaacgttttgtaactctcctttttgtaaaatttagaaaagcgatacatggctaacttccaaagggaattgaatatattgtggtttcatctttttaaaaccagacattttacatacattttctagtatattccaaagcacagtcacttacgaataggaaagtacatggtcaaaactagcttgctgaacattaaatgccaaaaataatatccaggtcaagttatcaatacttaactgttagacactgtgctaaagacgtacgtgcattatctctttttatctttaagaaagcagttttttgtaatcccagtattttgggaggccgaggtgggcggatcacgaggtcaagagatcgagaccatcccggccaacatggtgcccagtctctactaaaaatacaaaaatcagttgggtgtagtggcgcgcgcctatagtcccagctactgctactcagaggatgaggcaggaaaatcgcttgaacctgggaggcggaggttcagtgagctgagatcgcaccactgca

SEQ ID NO: 53102 - DNA, 1841 bp, Homo sapiens
aggcgggcggatcacgaggtcaggagatcgagaccatcctggctaacacggtgaaacctcgtctctactaaaaatcaaaaaattagccgggcgtggtggcgggcgcttgtagttccagctacttgggaggctgaggcgggagaatggcgtgaacccgggaggcggagcttgcagtgagccgagattgagccactgcactccagcctgggcgacagagccagactccgtctcgaaaaaaaaaaaaaaagggaagggaggtttgtaagtagtgtgtgcgtacgtgtgagagagaaacagagaagagagagagtcattcatgcgaataatgtgtcctgggcaactgagcgttgtcacagaaagcataaaacgctctacatttttgctttacacatacttgctcagtcggattcttcacgtccagcattactgcaggcggaaaccagggcccaggcctggtgaacagccttccggaagacgattccggacccggacacccacgacagcctcagggggcagctgacctagggctgcctaaggcggaagtgggagcccctagccgcccgggcggaactacagctcccagaggcccccgcggcgctgcgcacgcgcgctggcgtggcggcagcgccgctgcaggacgcagggaagccaacaggcgagtggcgaaggtggcggcagcggcggcgggggcagtcaccggctagggcgacggctccgaggccgagtggcggtccgacagagtcctccgtgtcctcccccgcatgacccccttggtgagtacgcgtcccgatttagtccgcgggctgtgagcggctccctgcctcgcggccgggttgctccggcctagggccgcagcctgtctctgactgcccggccgtcaggtccaactgaccccggggtcctgggctcttcccgtcagtgtcgggcgaggtgggggtcgggggacactgggttagacccaggggagagatgtggcggcgcgcaggagccagggcggcctggggctgaggagagggagagacgcgtgggggatgggatgggaagggacaggaggaccgcggggcggcctcgggtgggggccagagacgagaggcccggcaggtagggaactgagtataggaggcgagaacgaaatggaatgtcttctgagtgtcgctgataaagatatcgtgctgcagggaagcttgacaagctggacacacgggtctgggggcagcccacctaacacagacactcactgtacttggcatctttccacttgctgtcggaggtctgaaagtgagggagctgttggttgtttccatcccttttcttttaacttcaccttttattgactggcaaaattgtagtgagtgctggctaggcaaaccacagaagtacacccagggttctgtgtataaatgtgcataaaaacagggagacatagtgataggttcagatgagaactaggtcaaaggaggaatcagtgtttttatttttaaatttatgacgaaaatcagttctgagcaggactttgaactagagaggggttttaaactggagttcattgatggatagaattagaagggtcctttcactagaaggaggataaaatgacatcattatttttattgactgctaactgaaacttattatttccttcagttacgaatgtggacaacaagccagagtagcattagcagcgcctatgactttgtgatcaataaaaattacggatatttttgcatcatgtttacagttgcagatagctcagaatatcatttatggttaacacttctttgaatttctggtgttactagacccgccgttagacattgttatttaatgtgataataaggctg

SEQ ID NO: 53103 - DNA, 587 bp, Homo sapiens
ttcttaggcattatgcacattatttgaaattatgaattccataattctatagagacatcttaatgattgatttctttttgaaaacctattttaacaaactggataatattgttgactaggaggtttcttttgggtagaaccacagtaatgatggtaacgctgtttggagtttgataatgaatatgtatactttttatgaaacaccactctggtaaatgtgatgaaatgtacatgacagccctctgtttacattctttaattttgagggtggactcttggatcttgaaacaggctttaccagtattacagctcagcaaaaatgcagctgaggctcaaagttctctttctgctccttcattcggttgttttgtgtacccgctgtatttatggaagcagcttagtttatccagggaaccaaagcttcctcaaagcatgggggttgtgaaaacttcctctaagtttacagtgttctaaggatttcagattgttcttagttacttggtttatcttgatctccagatttatatatatcttactgagttgtcattagagattgttaaattagatttggtggtatttaatttcac

SEQ ID NO: 53104 - DNA, 742 bp, Homo sapiens
tatttttagtagagacagggtctcaccatgttggccaggctggtctcaaactcctgacctcaagtgagccacctgccttggcctcccagagtgctaggattacaggtgtgagccaccgtgcccaacccaagaaattttttgctaacttgatgactgtctgctgcccagacacacaatattatgttttgttatctgtgccacaggtatttctgttgttgatttaacatttgtgatctggcacaaattctagattcaagggcatagcttaaataataatgctttaaaatatgtgtgctatttgtatcagtttgtttagctgctagataaataagagtagtgagatttcatttattcctttggcaaatatttattcaactcctgctgtgaactaggccgtctcctagtccctgaaattacagctgtgaatgaacaaagcaaacaaggcttggccctgctgtcacttaccttctagtggggaagcctcacaataagcacgattaacatgcaggtagatatctgtaatataatgctagataggggcagtgcttttttaaaaggccagaagagggattaggaagttatattttctattttagaaggagttgtctgagaaggcctttctaaatacacgtttgagtggagagatctgaatggaatgaagatactggataaccttccagacagagaggtcagcaaatgtggacactttgagagagggacatgcttggcctgttcaaggaac

SEQ ID NO: 53105 - DNA, 606 bp, Homo sapiens
ctgcagtcgcaggcactcggcaggctgaggcaggagaatcaggcagggaggttgcagtgagccaagatggcagcagtacagtccagcttcggctccgcatgagagggagaccgtggggagagggagagggagagggagaggtgtaaatagatttcttaattggttttacattactttgttccagatgccaaagtggtattgttcttggcagttagctgtatttgcgcaataagctgtatttgcagttgagtgagtgctatgaagatgtgtattttcctgtgaatgtatcttattgccctgaatagtgactaatatgctggaagaaaaaatatttggccagcataacattctgtggttaaactctcagtgtttttaatctttgtagggctataaattttagaacgatattaaggacccctgtaaaatttgctgagaaatcaaagctaaagctgttgaaattacttgacttaatgatgtgtgttttctctatggagagtcaaaggtgaactggaggaaactggtgaaaagggtattgtgccattgtgaccaaagtaggaacttgtgtttttagtggtgtgcttgattgaagttattcttactttggcc

SEQ ID NO: 53106 - DNA, 1236 bp, Homo sapiens
gcctcagtttccccctctgtaaacgtggaaatggtccctccctgtggtggcgcgggggacggggcctcagctccccgggctcaggagataccgcctggacccgggcagcttaaacaccccttccccttccacgaggaccgagtccgaggcctgagccgggccgggctgtctgctgcagggcggcgtcgagacttggggtgggagcccccggaggaggaagagacgaaccgggagccagagggagccgggtacaccgcgggactcacggggcgccccggggccgggaatctagctacggaatccggtcggtaggtggcgccgcgaggctgcagttgggtttccgtcgcccaggccgagggtggtgcggagccgggacccgcggggcttcagcgtcccccgtggccgttcccaccgccgtcggtccgcggagatcccaggtgtttttagggcacccaggttcacaccccgttgggccaagaccgagagcgacgcgcgggcaccggacggggtgcgaacccggggcggacgggccccctgccccaccccctactcccgatccccgcagctgccaccgctgggcctcggctgcgaaggctccagaaacgggtcccccgtaccctcgggccttcccagccgcgcgggcgtgcgagggagccgaggtccgggaggccgctagggcgggggccccggcgtggaaggatcgcgctctgggctgtgtccgtcggccgtgtgcgtgcgcggaggccgtgggcgcggccggcaggggacccttcctttgttctcgcacttccttctctgcgggccctggtcagggaggacgcaaggcccaggctgcgagctgtgcccgtggggacgcaagcgacggtgggtagggacaggcaggcgccccttcctcccgctcagcatccagccttcgggctccctggctgctttcccgagggcagccttggctgggaaatgtcaccctccccgggggaaggaaggggagccgcgtgtgcgcgtcttccatgcgtcctcctgagaccacgccgcgcccggagaaagccctttgatcccctcgctatcttttctttttcttttctttcttcttttttctttttttgagacggagtctcgctctgttgcccaggctgcagtgcagtggcacgatttcggctcactgcaacctccgcctcccgggttcaagcgattgtcctgcctcagcctcccgagtagctgggattacaggcgcctgcc

SEQ ID NO: 53107 - DNA, 952 bp, Homo sapiens
ctctagacatgcgtgcatgcacttcggtcacaagtgtgcctggggaagttgcgtgtcacccccttcttggaacacagtgcacagtggcccgttgaaggctctgagggaccccgcaggagcaaaaactgccatgttcagcgtggagttcccagacctctgtggccatggaaccttttggacactttttaacatacgttctagtcattggatatttgttgagtgtgtgctacatgccagagactgatgagcagagctggcttggtccctgtcatctgggagcgatggcctgtgaggccccttccctgggccccaccacaagagggagccccagggcaggaaggctgcttgtcctccctgcagcccctcccgcctctgggagtcagtgctcagaggtggggccgcggcagctgggtgggggtggccctgggaggcctagtagtctttggtctggaggccatgggcgtcctcaccaccggtgtgacaaggagaccaagaaggagaggtgacaccaacccagccctcagtgaaagggtgtgtggcttggcccttgggcctggctggctggatcctgtgctgagggctgggctcataggggattccctctggtggcatcccccatcatgggtttccactcctgcatcaaagtgtcttgactaagatgttgacttcatgggatcaaagccacccagcttggcagtctcttccccagatgctctggaaaccagccaagacagcccaggcaggcttcctggaggaagaggtcctggagtcaggccagagggaacagcccagcccaggcacctgtggggaggctgcagatagtgatggtgacaaccaagggcttggggaggggccagagaatccacttccaatattggccccgccttggcagctgtgcaccttgggaaaacaacatgactgctgcaggcctcgatgtcctcatctgtaaaat

SEQ ID NO: 53108 - DNA, 2030 bp, Homo sapiens
ttggagcttggcaggaggcaagggaaaacagattatcccccatcatttatccagctgagaaatctttcacacagaatttttcagtagggaacagcccctgcccttaccctcttctcaattaggatctcttctgatattaaaatcaagaaagaatgaatttgagaaaatggtaatcaaaatctaggaaaacgcaaatgtatagaaatttttcattttacctaggcaattgttttgttacaatgggtccataaagcccaagtcaacaattaagtgaaaacttaatagcaaaaaggaggcttctcccaggagaaaaaaaaaaaagttgataccctcaaaatgttttctactctaacaaatatcaatattccaatcaacacaaattttctttcttgtttattaatacgtccgagggaaaaatgaagaaaatttacagaaaatgtaagaaaactcactatctcagcaccagccaattttcctcgtagacattcttacacgttctgtaaacatacacataacgtcccctatgagcaactctagtgcctgatgacgaatatgggaggtgtgctcttcttaccaactatctgggggtcagaggagaatcttctgactccgaaattcagagtgttgatccttctagggcccactgtatcaaaacaccttttttataggaactacagagacaagcacattggtaccatctatcatacactgagggtcaatagcaatagtttaagagtaagatgttaggtttcccttgtcactacaactgtgagaagttctccactgtgctcccatacccctttttgaagagccacacttgctcttggctgattccaaattccagaggcacttttaaatctcattgtgcctaggcagaattagaaaaagtcatcaagcactggtgatgactggacagaagctgctggatttctggaggaagcagggagtgtaaataaataggcatgcctaaagcacaagtcagatgtcagctcatgatgaccaggtcagtcaatgggacacacgttggcctggctgagttctcagggacctggccaatgctatccaactctgccaaactgttccctgaaagcacagtgatttgcctgtttaacagcagattgtggcttgaggttactggaaaccaaactgggtcagagaacctaagaagacagttcaacattagatgacgcaagctggccgtctgcttacggtttttctccacctttatcctgtggtgcactccaagtctttccctcccacacgcttggaaaaattgtggtggtccctctggttgcctaaacccatctccccggcactcccttgttttggaaggagatgagaaataaatcaaaatgcactaagcagcacttccacaggcattcgcctccttcactgaatgtgcacctcatcaatcacactattgtctgcttgaaaggcgagccttgtaaatgtcatatccactcaggcccaaggagaggtgcatccaaatgcagcaaggagttttaattggatagtgtaattaaactaaaaaaccccagcagacttcctttgacaggatagatgaagaccccttttaatagggctaggaaacatatctgttaaaaggatgaggcactgcctgctcctgattgtgctccagagtactcttatgaaaaggcaattcaataactggggcattaatatgtgagagtccgttgtgttctgtaatcaggcagtacttactgtatttgatctggaacttatgaaataagcccttgttagagaataaaaacacaacataacgtgtccacctaacgtctggagtgcctggatctcccgggagtggacagagcctgaggaagggctgttgccttcctgggctgcagctccagttatactggagtataactgcaggtgcctcacctactgggccctcagtgcaccagcagggctgtagatatccacctgtctaccttggggctgtagctctttcatccaaaggtaactaaagtcatcctcattcctctttcacacatttcatgagagcatct

SEQ ID NO: 53109 - DNA, 863 bp, Homo sapiens
cagttttgattggtgctctgagttgttgttctcatttaagaagatctggggtggacagataaatctgtaacatccctatgtttaaacagctaagctaccaatgaacagcttctgatctgaaacaaccttatacactaaaaagaataaaataactcttcctttctgtgacactaaataattatccaagctatatttaagggaagtcacgagaggattaaaccttacataaaaccttccaagttcaagtcttggagcctggcttcaggctgcagaggtcattgcccccctgctgagggcgagactcggcactgggtgtgagttttacgcaacaggaatccagaatgttcaatactggcacttcagattttattttcagagcttaaaagacaacacgttgtatagtgaccgggaataaaggtgtttgcagaacaaaggtaatgccaggtatgggaggggccctggaataagtgtggaaatgcacagcaaccgctttctcagtactgcagaggagtacatgctcagcccgccacacaccacctaggctagatgtgctctttttcctcttttgctgaaaattaaggaatctgttcatgaagtgagacaaaaacctttaacatgccttctatagtgggccccatatggaaccttaaaagtaattaatttttaggccatagtttaaaggtcagggtcaaagtgaaaaaaagcaaaatgaagatataagaaataattaaaataaccaaatgtacaaagtgaaacagaaaagacatagttaacatatttcatcctacgaatcacactcaaatttttgaacaaaatgtgagaaaacttagtaagccaaaagcagcagcagataaaagaaacag

SEQ ID NO: 53110 - DNA, 597 bp, Homo sapiens
tttcattcaaaggactaaccattctgaaacggtttgggaaccacagctaaaagctgccaattccaatatgtggtcagtaagagactcaatgacaagtccgagtgtacctgactagactgttaggcttggcacgcaaaacaaggagtggcctggacacgaacgaacgcagagcagcagtcagcacaggacacagcaccagggcagagcttatgaaatcagacctgggactgtttaatcccagaaagacttgtctttgaatgagtgctaagttctctctgcagagaaggcatttacaaagattctgcactaggacagctagatcaccaaactactctctcagtaaatggatacctcaggtgagcctatgatgtcagctaggaagcagcaggccctaagagaatttacagtatcacttgtagagtggggaaaacctgatcttccccatgttcaggccctgttggagctcaggtgccaaagatgaggaagtgattaaaggagcacagaactctggatgaacgctcatgaatccgactcccattaattccatcatgccagtgcttctcaacttcttccaattctcaattctttctcagccac

SEQ ID NO: 53111 - DNA, 2524 bp, Homo sapiens
tgcttaaaatgctttgggataaattaaaataatatgggctatttaatttggagaagaaaaggctgagcgatgacttaataatgccattccagtaaacagagaatggtaacatattaatcattcaacaattaattccacaaacactatggcaggtccttggctgggcagcagggatgcaaggataaaaaaattcctgcttgctcttggcaggaagctcagtccacaggagtgagtcaaaagcacaagagcttgggtggtgttagcagtgtcacgggtcttgttttttttctaaatgtgattttcctaatcacaaaagtaatccacattccttgaagaatctctgtcctttccaagattcccaaaacgtcttctttactgcctctcaccctgcgccccacagcctccatgtgggatttcactcgttccccatagcaaccctgagccattggtactgatattcccattcacgcaggatagaattgaggctcagaaagattaagacacttgcttaaggttacatggctgtctattgatagacatagctgtctactgacagagcccccactggctcagggggcacctgctagtgcttgagtgtgacagtctcatcactggcctcctggtcaccaggctcttcctctgcagtccagccgccacaggctttctgatccatttttctaaaggttggatcattcattcattcaccaaatgctcagagagcaccctgtgcatgctaagtactctgatatgtgacactggagacagataagaagcctggtgctcaaaaatcttccctggctccacggcctcctgaatgaagaacacttttttagccaggcaatcggggcagcccataatgtgcctgaaacataccaatattcttctcacttctcacacatgccttctctcagccctctcaaacccctcagactgcacagtgcttcaggcttttataattctgggcctttgctcatgtgctgcccttggcctagaacaaccctctcatcctcacccagacctgttgaaatccctccacccctccctaggctagctcaaactctacctctcctgtgaaatcttttctgatggttcttctggaagtgaattccataaaagttggcttatactggaccctggagcccgacagctgcggccgcaactcctagctctgcctctaatttgctgtatgatcttgggcaagtgactttatctctctgaatttcagtttttgccattcacatccaaatttaggtaaagaatatgtatgcttcataagagcagtgactatttttcttctagtgtcagggtggattatattcagccgtgtgctagaattgcttagtggttgctctgtcctaatctggaagctttgtgaaggtcaggaaagtttcttactcatttttatatcttctgcaagcagtaaaggcaactggtatgctctcactaaattgtgctagataaataatagctagtatacatgagtgcttaccatgtgccaggcttggtgttaagcatttcacacgttactgcattgaaggtcttataattttccatattacagatgagaactctgaggctttgggaggctgtcacatgccaaggttacactaagcaaagttaaactatctctcagtccctggactttgaaatgtggacttctgcagatgcagctgttggtgccatcaccagtgcagggggtagaatgggttgggaggggaggagcctgtctcgcaggggctgaccacagtagggtgctctaggcctcgtgttgagcactcagagacagttccacagggaaacctagggagaactctagggggaatggaaaactctagatttgggtataaaactggaaaattttgtaacaaactggtagcctgacaatgatatgcttttccttcccacagttactgcttacggggcaagtattttaagtcaaagttggtgtctgatgctttcacagtgaaatcatttattaggaaatttgtgttctatttgcaaacactacagtaattcccaacctggaccatcccagcacccacaatagtactttccttcagtaaggacatgacctcgcccttcactgagtgcctctggcagaatcccatctcagagcctcttgcacatgctgtcctctctgcccaggtcacccttctccccatctcattctctcccggcccctccctgttttcctactgaagagcagagcaccagtgacactccagggaagccttccctggccgcaagcccccggcactagtttggctccttctgtccccgtatcctgcatttttcttcagaacagttatcacagggagtaattgcctgtctctgccattagactataaccccaagaacacagggactgctttctcaccactgcaactcagacactgccagtgctaccactcagaggataaagcagagctcaataaacatgtactgaacgaataccaggtgccatgtccacaggaaggtgagggtcaaagagacagagtgacttaaccaacattgcacctccagg

SEQ ID NO: 53112 - DNA, 2620 bp, Homo sapiens
ctaaaaagatctatgccaactctagaactcaactggaagatcagtggcctctgttatatcctcacctttgtccatagcacaatcctgttgactgtttcttctagactagcagttacttagctccagccatatgccaggtgctgtgctagtgcttccggaatttagggggatggcagtgttcccagatgatgaaaggaggacaggcaatccatggaggaatataggaaaaaacataaagtccacaaagcatgaggacctacacagggaacaccaagtgtttgcctttggcacagtgtgtgaagcggaatggtggaaaagaaaatggtgggggtgggagtagttcttcaaaagtggagcagtatctagctcagcacctggcacacaattaagtaaaatagtacaagtgactgacaatgagaagtacataaacccttctctgctccactctatcttgaagtcttattgctactccccacgcagaagccctgcttcagctaaactggactctgctcaggttctaccatttggtcagaatgtcctttatgctctaaaatttatatgcttcaaggtctagtccaaatggaacctcccctgtctctctcctaaagcattatagccctttattgaaggttcttctggtaagtatcttacatggtaagtatttgcactcccctccagacaaggagcctgagggcaggaacatcccattctacaaagcacatggtcacacagtagatgttcaataaatgctgctgatggaacaagtgaagtgtgatgcaacacaggttaaccattaacagcacctgaggtttgtacaccaccccttgtatttaccttggctaacagcacctaacatacctttcctcgttttccattcagactccccaacagactaggtttgtcaaggacaggggttctgcctcaacaactgtgacggtggctaacacacactaagtgcttaacgcatgccagcacgatgctcagcattttaaagacgtcatctcattccatttttcccaatgcctctttaagttggatattatcctctttttacaggtgagaaaaatgagactcagaatgtcattctgctacagtagtcatacaaacagtacaagctggagctaggaactgaacccaggtctaattccaaaattgcacctttaaccaccacacaacctctgtgagtaaaaatgttcctcagatgggctggaaatgcataactccatgggctgtaatggtatctaaggagaacacagtcacgcctggccatgccagagcaaaggaatcagggataaaacctaactctccactccctcggtaagacttaaagctggatgcataagtgagtcacagagaaaactcttccttagcgctctgcatccatcacatttttttttccagaggccttttaagtccccaaagccccataagcccaaaacttctcttctattaaacacttccctttggctactagttatttttgctggtctctaaaaaacaatcaataggtgatatactaaaacacacacacacgttcatgccccccgcctgcccaccgctctgcagtaatctctttaaagccatcgggatcacgcagtaggatatacccttcactagaatctgccatgctaccaccggggtagggatctttgctgtcagtgcttaattgattaaactcttggagccagagccagccaggctggaggactttccacatggagatttcagacccccttcaataaatcaaggtaatcttgttttatgaggtagtcagaaagaaacagtttcaggtttgtagaatttcgaaaaagagcagatcatggaagcggggcctacgaggctctgcatcttagacccttgctatccctcagtctcatctttcagcacactctccctcattccattccatttattcattcctaaacaccccaagctccttctcatctcaaagccttcagatgagcagtcccttggcctggaacattcttctcttactcattattggactaactcctttttcttcttactcaagcctctcattcttctcacctgctctggtcccctgctatgcactcttttctacccttcacagcactgatcacaattgtgtgctctataacgtggggctaagtctcagcacagtggctggcccagaggagggctcaatcaatgtttggggaatgcatgaacaaatatgtgcccaaagtgaatccaataccctttacaggatgaagcatgaccacttaagggtctggaccaatggttcattatgggtttgcttggaagttagattagtgacagaattctcattatttcctctttctccaatatgtctttgtccatgttcaaagcccaggaaaagtaatggggtcttctcaggagcatggcatttttgacaatttacatggcaaaatatctaagaactgtaacatctgatcaacaccaaggtgtccctttccctgactcgagagtcagaggatgagggcatatccgctggaagaatcccacctcccattcagagtcactgcagaaatgtcacctgatgcattaccaaaccattagtcaggaccttcagggcgaattctggggccaggagcctatcagagggatgcaaatctcc

SEQ ID NO: 53113 - DNA, 1775 bp, Homo sapiens
gttcacaggtgcgatcccattaccgatcagcacaggcgttttgacctgcacgtttccaacatgggccggtttacccctccttaggcaacctggtggttacccactcccgggagctcaccatactgatgctgaacttagtgtggacatctgatcagcatagcgctgatctaggctgtagcccagaaatcctggactcaagcaaccctcccatatcagcctcctgaggagctgggaccacaggtacacaccactgcactcagtggtttgtgtattttaaaatctattataataattccaaatatttttgggatcaaggtaggatataagtgaattaacctatcatcatcattgctgaccataagaacaagtttgagaatcacctgtgcaaggaaaaatgacagtcaaaagctgaacactttcatggttatgtcttcatgtcaactgttttccattcaccaatttaaagagctgctttaatctgaaagagcttctggtagccagaaaaaagctaagtgtgagcagtaagaggaaaggctagacttgagcagaacatccctggtgtttgtgccatgagagggagtaacgctgccagctatgcatccttgggaaggaatttaaactcatctgtaaaatagggataacagagcttccctcagaaggttgctgtgaggattaaatgagacaatgcaggacttcccttagcaaagtgctcggtcaatgagagctgctattattgcaaatacagactgaaacagaaaccactgcaataaggtttaggtagatccctagcctatgagtcacaacaggctcacagccttaccagggagggcacaccggggcagggaatgctggcatcaaagcgaaagtctgtgctctttccctcgtgtgtccaaagtaggggtgcagggtgcatatctatttaaacaagcttgcttttaagctgcagacggcatttaagattagagacttgctcagcagccaggattcctacagttccctagtctctcaggtcctacaaatatagtctaaaaatgacgagtaaatgtcagaacccacagaacaaaccacggcagcacagatatcaaaggacacgtgacgctgggtctgagctcacatgtccaccccacacagccttggcttcttccacaatgaccttccatggtccacgtgggttcctcagtgcctcctggcttctgcacgtgccattccctcttccctcttcttcacctagctctgagtcctgcttcaagacaacctggttcagatgtttccacctcagggaaggggagggtggagctacctgtccccttctctgtgctcccacacagcgccttgttcctaccttggtaggaacactcattgggctcttctataatttaccagctcaagctgcctcgctgcctcccccagcctcgaggcagggatgagtaatctctgtgcttggtgcattgttgatgctcaaaaaatattcattagatggatgtttggatggtagtgtagcatcacatgtcctttgatatctgtgcgatcatggtttgttctgtgggttctgacatttacttgtcatttttagtcaatatttgtaggacctgagagactgaggaactgtgaatcctggctgccgagcaagtctctaatcttaaatgctgcctatagcttaaaagcaagcttgttcaaggaggagctgaggctgagaagcttggcccagattgttggtcaagatttggattttctctcatatgcaacaggtgctaacagagcaggaaagtgacaca

SEQ ID NO: 53114 - DNA, 1987 bp, Homo sapiens
acatttctaaagcctcatcttcaaaccaggcataataaaatctactttccagggatgttgtacagattaaatgaggtaatatttctaggtacaccaaggcactccattcattagctcccatgtcgttggaaggggtcctccttttggaaagaccaactcctcccatggcacacaaatcccctttaaaataactccccctcccaatacagagtcttgctctgtcacccaggctgaagtgcagtagtgtgatcatgcctcactgtagccttgacctcctgggtttaaccaatcctcccacatcagcctccccagtcactgggactacacgcatgtgccaccatgcctggctaattttttaaattttttgtggagacagggtttcactatgttgtccagtgtggtctcaaactgctgggttcaagcaatcctcctgccttggcctcccaagtgttggaattacaggtgtgagctactgtgcctgactaaaatacacttaataaataataaattcatctgtatacaactttctcagtctatctggcatgaaagtaaggcctactgtgtgtggtattatggagactgaccctgctgcagccagtctagtacagcaggtccacagtgggtcacaggctctaaattccgcacctccccatggccttgagtgcccagggtctcttcctgatctgtatccctctgtcataaggcaatcatcaactctgtatttttttctccatttctttcaagttcttttatttctttgtgttcatactctctgtatgtctcttatcctctttgggcctcagtgtatttcacagtggttaaaaatttggatttaattctatacagaactgaaagtcattgaagagttcggagcagatatgctctgactcatattttaaaatctctctttggttgctgtgtaaacaacagactggagagaggccaagagcacaagcagaaaaaccagccagggtgctatttcagcagtctaggtggagagtcatggtgacttggacccatccaacagagacgaagacaactaaatggattcaggatatattctagaggtaaaactgataagacttgctaatggataagatgtggggaggcagtgcaggaaaaattcaagactgacagctggatatgtggctcaggtgaatgggtagatgatggtgccacttactgtgcagggaacctgctttatctcccttaaagggtcaattttactacaatttttttttttggtggggtggggggttaagtaaattaaactgcaaagtaatctgaaatgttctttttacattaaaatatggtaagccactgctttgactggcattgtccctgccctactcctaaactgttcatagcttaaatgtgaaggtcattgtttaaatgtcaatttctccgagaggggctccccaaacaccctataggatgcagagagctcccctgcatcctattattctccctctcagcctcttatgtatactcttgctctagaaaaaggtcatccttaggtctgacacaggggagcacataagtgaatgtacgacatagctacagatacgttatggatcgatatttacattttacatgaaatttttaagatacaacttaagagtccaacgatgccatcattgtccctcagaccagaacccccaaaccctgttgtacatgtttactccccctctgctcctagtagtacttggcggaataatgtttgagaagccccgtacactatctcactggtgacattctaggggtcttgtgaaaacaaagtaaattagcaagcaataaggtgctctgtaattctaaacagatatagagttaggagggagtccacttgacaaagctaacatttttctttcaagttctacgtgaaattttataaaagtaggaatgaatgtcactaggcttattaacaatattttaagaactttttaaaagaatcttcagactaataaaaatttgtctttcatatcaaaag

SEQ ID NO: 53115 - DNA, 769 bp, Homo sapiens
tgaccaaaaaattatagcatagtaagcagccaaatatacataaatctcttaggcaaaaatttcatagtccacattttctgatcaaaattcaataaagaataacaaagtctaaattttaaaatttgaccatttagagattgaaattatttcagttagtttctcccaaatgttttcccccaaatcagtgcatcaaaataagcaggaaataagcctaagtaccatattccaatcttgctcaagagttaacagacgtaagtgtaaaggaggccaagaattcctgccaaattctccattccttcattggggccaaagtctactaccatagacagtttacaaggcacaggaacaggagaacaatattttttcttttttgagacaaagttttgctcttgttgcccaggctggagtgcaatggcgtgatctcagctcactgcaacctccgtctcccaggttcaagtgattctcctgcctcggactcccgagtagctgggattataggtgcctgccaccacccccggctaattttttgtatattttgtagagatggggtttcaccatgttgaccaggctggtgttgaacttctgacctcaggtgatccacccacctcggcctcccagagtgctgggattacaggtgtgagcaaccgtgcccggcccaagaacaatattcttaaatggttttcttgacaaccaggctgcaactggtgggccactcttcatgtgcatccagcaattccctctctgtgaatgaaaagctctttcacagggc

SEQ ID NO: 53116 - DNA, 1047 bp, Homo sapiens
tccatgttctcatgtctgtaattcacaaacttctaagtctattttgcaagctgattctctgagatgcacaggcgcgagacctggtgagcacccagagctggatcagtgcagaagtgtggttccaggccaatgcctagaaagactaaccagcctagaagacaccttgggtggccaaaagaccacaagaaactagagcagccaaaaagagaatggattacttgagcttcggctcccgtccttcgcttgtatactgccagcagatgagcccgatcaggtcctgcaccctggcgctggccattgtcaccacggtcattggcagcagtctgtcctggctcgagtgcagagggaggtagacatcgatcttcttggttgctgttgtacctacatgaccctgtggacagaacaaacacgtgagagcaaagcacactgccagttatacagaccccactgctctccaggcctgtgggcagcacagccatttttcatccttgctctacagacctactgtgaccatggaatggtcccaaagtggaaacactgtctagtttcaaggattttttttccttaaattttcattttataataaactaatggatcgggatctgccagcaggaaggtaaatgggcactacaactaagaggaaaatatgagtggtgagtagagttcatgtttggtgttaggaggctggctttgctactaactcagtgtgtccctggaccttagcactgggtgcctctctggcaactgtctcattgtccttgagacaatgagatgagctgcctgggaagctgtcatactctcccaggaaggatttaggcccgcagcactgaaacaggtgcttgccttctcagagactgggggctagttccactaggcagtacatctgtttccttcactaccacacaggttcaagggccctttgatcctccattattgccctaaccaccaaccccacactgctggatatattcccactccctcccacacacctaccactcctcccacctgcgtcttccactctgccctcaagagctgctgcgctaatca

SEQ ID NO: 53117 - DNA, 3278 bp, Homo sapiens
ctcgaactttccagccatcagaattgtgaaccataaaaacctttttgttttataaactactcagtctccagcattttgttatagcaacataaaatgaatgaagacaactgcctttgctctgtccagcctggcagagccatgcagagcatcttctacccaagaacccttctactattttcaggcaatgttcacatcttctctggatggattctgtaaagcccaactcatatgccccacccggttcctagtctctaccacctccttgtggcacttgtctgaatagacacttatagttgtaaatgtctgttgtacagaacttactatacctcaccacactaaattccctacttttgctaaccacagccatggtgatttattcagacgtaaggatgtcagtttcctgctccaaatacaactagcaggagcaaatcaaaactcttcttgatcaagcctcgtctctcacctcctctgctctcagcctccacattccagtcataccctactactttcattgcccagaatttaccagcatctctcacctcagatgtttacaccagcacttcacctacctagaagcctcctgcctaacctcctcccatccttcaaggcttggcttaggggtcatctaaggagtcttccctgatattctcccatgcgaagcccaggccaggtgtccttcctctaagaaactcaccatactaggccaggcgtggtggctcatgtctgtaatcccagcactttgcaaggccgaggcgggcagatcccttgaggtaaggagttcaagaccagcctggccaacatggtgaaactccatctctactaaaaatacaaaaaaattagccaggcatggtggcacatgcctgtagtcccagctacctgggaggctgaggcagaagaatcacttgaacccaggaggaagagcctgcagtgagctgagatcacgccactgcactccagcctgggtgacagagcaagactccgtctcaaagaaaaaaaaaaaagaagaaactcaccatactaaacttttcctctcatagcatttattatgctatattataattgtctgacttccctacaagattacacataccattaaattagggactatctcattcactattgtatcctcagcattagtcaagtccctggcacatacaggcactcaagaaatatttgagaaatgaatgcatgagttttccttctaactacctggctctgctgaatcatactgaggttacaattaaccatgaccctaaaccttttctttcatgtgctacttggttaaacctcatcttcctcttccccttttccactgccacccccatacacaaatgactgcatcttatgacttaagtgcaagtatcattttggtgtgtcaagaccactttagtccctgactttgtcactgcacatgcctgctattcttcccagccttctgccttccacaagtgtcatcagcctatcatcaatgttctcattcaggtccctgacagcaatgaacacacaagagacctacagcttgccacgaaagatagctctccagtttgacataaatccattaatcaccactctgtgcctcgtctctcagccaggtgcaaagtccacctgaccacaatgtgactggagaatatctccagcttgcgtgcaagaatactatgcaaaaattgatgctttactgaaattcagaacaaagaattttaaccacagccctctatctagctaacaaccctatccaagaaagaaatgggcttgttctgccctgcttggttctgaggaaacccatggtggctcctagcaatcactacttcccttttttgaatttacaagccctttagctctgctaagtgagctgttgtaaatgcaagaccgctcaatcccaaagctgaaaagagaagtctatgaagtgtgagttgctgaaggagacttcatgaaagaagtgagatttaaggaagatttcaatgcacagcgccaacagagcttggtagaggacacagggagagtagccaaatctaagtgtgagtaacagggacagcaaggctgattgtggataacaaagacagcaagtcagaaagcctggcccaagtatcacctgggacaaacagggactaataaaaagcaagttcttcctgctgggctgcctccttgagccaaaaggtcaaccacagctgggcttctgcctgaattcttattttaaatataatagaacacatattagattaagctgagacagaaagtaatccttacataaaagacagttgtcagaatggccaatctagtttctcctaagcactttctgatgacgaatccaccaccaggattatgtgtaatgggcaattttgatgcaaagtactattttgcaacattgtcccatttctcttccagaaaaatgcagaggtaattatgtactcatagtcagtgtagcaaatcagttaaattaaacctgtatttcatctaattcatatagaatatgaataacataactaacttttctaatttcatactctagtactctcaagtaaataaaaggggaaaaaaagtaaagtttctcccctacaaatagaatctgtcacttcctaggatgtgcacttttcagctcatgcatcctaaatgcatgtggagatattatatgcactttctatttagcaatttaattatatctttgcattcaaagagtggcaatggtttgcagtaataatcaggtgaaagcattctgacattaatatgctggaatccgatgtgttaatttgatgcaactttgccttgacaatatgtgattaatttgttctcaggctagccttgctcccagctctgacagtttaaaatgctgggtttctttatccatatcgctatttgacacgccttagcccactgctttgctaagaccactgttaatttgtaatgaacttgcttttcaggggggctccttcatttttaattctgtcagtgtcacctccttgaggaaaattacaagtttccgtaggtgtgattactgccaagtgctgctgataagaggtttgagaaaacaaggctttataaagaagtctgtatttaatctgctgaaacagatttattgcctccagacagataaatataatacaaagttctcttatttaaaagtcatccctaagttctcccttaccacaacctcctcctaaacaaaaacacagttgcatttctaggactcaataatgagtcactcagggaaaagaggtgaacgtgtaataaatttagcaataacagcaattcttgtcatcaaattagacttgtgggggagtctc

SEQ ID NO: 53118 - DNA, 2197 bp, Homo sapiens
taattaaataaatgttagctattaataataatgataaaaaatcaataatttcaatgatcaattcttgcttaaagtagtcctaaaatatgtcaatatcccatctgtcttagtaagttcgtggcacataaaataagtctgtgcttcctttgtgatagaggacactgcaagtcatctgagtgacttccctgcccctgcaaaattgttgagaagtacaaggaatatgaaagctggattgactatgtttccaggaacagtcctagaagatacttactttcagaaggacttataacaccagattttcttgtaatctgtttcttctagaaatggaacatagagaggaaatctagctaataaatccttacagttaactaaggttttaaaaattgttgtctggaaacacatcattctgctgatgtgtcttaaagtgggtcttaaaataaagatactgagattaaaaagaaatttaactgaggagcatctctaatcaagcaaattacattaatcttcacttttttcctcttaatatattccttgagtacttattttactctgaggctaatgggaaatgcaaaggtgagtaaggtatccctgaatcaaaaagttaataccctaatacagaccgagtacatctcctaataccatgggattcctttaagcatcaaatttctgagatatctggtccctgaagtattagtgtcaatctaccattttaaggatattgatcagaaaaaaatatgaaattaacaatgagcatttaaatttcacttgtaaaaatacaaacttctctataaccataaaaaatgtatacaccacacatttatttataaatgagagtatttgtggaagcatagtatcacagatcagagctgcaaacatccttctacagcaatcacaataagccatcttcctggcatgaaaggaaggcagctagtcaccagtagagaggcaggtgctttcaaattcatactgaatagttctcccttgcaaaaacaagggctttaatgagaagtcacacatttaatacacttgatcttagccaaaaggccgagaagtgatcagatatttaataggtgttctagcaccaaaaagtcaaatggcaaaaggcaaagtgacaaaagtatactgaagtgccctcaataaaatctattctagggaaatagatcacttctgaagataagaggaatgggcaaacacttctgaaggcacataccaacttcccagctttatcctcccagaacaaatgcctcaacagcagcagatatcttctctattaggacactatgacttcatacattaaggaatctgtatgattcattcaaaaaatatttattccctaccagctctgatatggaactcccacaggactgccccagaaaacatattattgtgtatgtcactttttacctccaattacatgtacttaaagacttagactataagttccacaaggacagggttcataacaccatattccttctggcaacaaaggctgttatacatggcaggagttcaataaatgttgctgtctaacttccaaggactattcaattttgttgtagagataagtcatatatgaatgtgccaggtgtaagtgtgtgattataaataaaggattgtctttttttcgtaatacaagagcatctcttcaacgtgcccttcaaaattgtccccttggaacactattcaacttattctaacaagactacttttcaaaacccaaaagaatattttaaaaaatctcccaaagagcagcaaattatcatttgaagctatgtttgatttccaagacaaggacatacatatcacggataaaaacaaattgtactctctgatcagttgtgcacagatcaaaaagatttttaaaaatctaactctggcaagggttcagagaaatgggcactctcatgcacaatatgaaggaatgaaaactgggactttttagacggtaatttggtaatatttaccaaaatataaaacatgaatactatctgggcaatcctacttctaggatttgttctaaggagataattgtgtaaaatatttatctcagagtaatttgtaatactggaaatctaaaaggaacctacaatagtacacatatgccatgacacatacaaacaacacaatactaagtagcgattaacaatacatggtagagggtgaacaaaatgtggtatataacgatggaatattgttc

SEQ ID NO: 53119 - DNA, 2049 bp, Homo sapiens
agtctgggacacacagtagttgaaggtaggcatgagcacacagatgaatgggaaagggctaccagcatgccccaaatcccgcaggtgtgtaaactgaaaaacatgaaaacaattattgcttcatcaagaactctttccgtgtttactaggtaccttgtgtgggctcataaaatataaggaataaaacccatatctaggcttctgctcaagtgggttttaacattacggatccacctctcctgcttgtcagagaatgagaacgctgctttttttaaaccaatgggtctccatttgactcttcacacctgggaaagttttgaactttgccgatttgggtttataacaacatggtgctttgtacagtgccaggtactgtggtgggcttccaaagtgactttcattcattcaaaaggaagttttaaccaatttctgagtcaatttgggggtctctggttaaagtcataatcttgtttacgctacaatctctttttcccagccttaaacaaatctaaatgactccttgccactcccataaacaaagaatgaatcaaagttccagcagcactgtagctagaaaaaagtctgtaaggctgttaacctctttaagggggagggggagaagggacgcaaggaaacaaggaccacacagtcaatgcttgaaaaccttgattttcacattatgaagaccagggcacctagatattgccaagtgcaggcccagaaactgccggagtcaactacaccccccacccccacactaccaggtcagctggcttcttttcccctaaaccacacacccgcctcagactcctgacagcctccagttctggaaatggccaggaaacgaacgcgcccgggccacctgaacaagggcccggcaggcggcccgccgggcagcgctgaaactggaggggtgagagggccgccaggtgggcaagctggtgggctgacggacgggcggggagctggcggctggggcaacctttacctgaagctgcttccacactacgggccgggtcggccccgggacacgttcctgaggggagggcccggctcccccacgcctcccggcccctgccccgagctctgcactctcgggatccacggggaccggcgctcctcccggcccgctcagctgccgcttcccgggttagccctcatgcccctgctgctcgccgccgccggccggccgagcagcagccctattaccccgagccgcacacgacccggaaccacaccccggcgttccggaagtccccgaccgggaaggagcctctggctggggacgtagtgcgcaagccccagagctgaaagcaaggagcggtagcttcccgcggggcggggccgggagggaggccgggcgcatgcgcgccgcttctccagtgcagggaaaggcctgggtcggagactgagttctggcaagatgcgccagtgcctggacttgccttgagcaggaatcagtgttaggcttctccatcgaatcttctttctccccatttccacggagaaaagcccttagttcgtccagaaatgagtgatgaggcagctcagcctctctgagaaagacctgggttcaaatgccagctcttataacttgctgtgtgtcctaggatgtgacacttctctctgagcctcgggttttcccatccagggcaatagtttcaactttagagtatattgctgtgggaatcgaatgggatgatgcttgaaaaacacccagcatagtgcctgacacatagtaaacatgcagtcaatgttagttatttctcttattataatatctgtaatatggaggtgacaataatcttcctcaagccctgctgggaggtttccaggagatgtaggaggactggcacagggcagaagttcagtgtgtctcatgctgctcccttcctctctcacggaggaaatcagtagagaaagccacgatgaagggggaaaaaggattcagggagtgcagtgagagtggttctcccacctgaaagatgcttggggaagtctctcaaaaacgcaccttagcaaaagaaaaaactcaaggttgaatttcag

SEQ ID NO: 53120 - DNA, 3050 bp, Homo sapiens
ttcgaacgctccaattgggacgaccctttcttgcctctgtcccgccccattcggctctaagcgctttgcgattggcccgggacgagcggcctggtacccagagggcaccacctcctgacaggaagagcgggaaagtgcaccaggagctgtccgaggcgtgaagctcacgggcgcggcgggggagcacacggttggctttgcagcgagttgcccactgtcccatacacaaccccccgctcccatgactgccaaaagcatggagcaggagtcggggtgcgggcacaccgtttgtgggccggcccggtctatcccggggggctaggacgcgacgaggttggagcgaggatccggcggcacactccggagcgcggagtatcagaggccagagggaacgggccgggccccgggggcggtgccggcggcggcggcgggaggcgcagagcccaatgagcgcgcgcaccgccccgggggcggggtctgaggagcgctcccccgcccttgccagcccccgtccctccccccggcgcggggccgcagtgagtgagtggcactggcagcctgtcaatccctcggcccagcggccttccagcccggtccgcggcggctgctggctgggtgcgcggctccggcggcggcggcggcgacttctcccgccctatccatcggctgtccgcccggcgcgcggcccgccggggccctcctccgggctcagcgcccccgccgcctctgcccgcccgctcccaaactttcctcctccgccccccctcgctccccgcggcccgcccgcaggcctcctcctccgccgccgcccgccgccgccgccgctgcctcccccggggccgccggggctcggatcccgcctggccgaggcggcggcggcggccgaggagggcagtgcgcaggctggcgcggggggcggcgggcgtcccggcaactcggcgggcgctgaggagcaagttgcgcggggccgcccggcggggcgcgcggcggcgaggaggcggcgcggcggccgcgtgagggcagcgggcgccgccgcctccgcctccgccaccgccgcggagcccggcgcttccgcccgccgcttctcctcagcctcggcggcggcggaagccggagccgggcgcccgtcctcatcgcctcagccgcgggccctgccggccgggccgccccctccccgcgcgggcggggagcgcgcggccgcctccccctccccctccccctctttcttctcctccctcgtcgccgccgccgccgccgccgcctcagccttcgcctcagccgccgcccgctcccgcccgcgcgcggcgggatggacgatcaatccaggatgctgcagactctggccggggtgaacctggctggccactcggtgcaggggggcatggccctgccgcctcccccgcacggccacgaaggggcggacggcgacggcaggaagcaggacatcggcgacatcctccaccagatcatgaccatcaccgaccagagcttggacgaggcgcaagcaaagttggtgtcgtctcattaagcatcttttgtgtgtgtgcgggagccgggcccgcggccgagtcgaggcccggggtggcgcccggggctagggccgcagcccccggcggggaactttctccgaaagccggccgcccgccccggcctcggggggacttgcccgcgccccccgaagcgggcgggagtcggcaaagttgctctggggggctcgggacggactcggtgcggcgcggattccgtggcgtcctttcccccgtcctgcccctcgcagcccggccccctcccagggatttaaacctcccgccccgaccccgtgcgggccgcgccgccgggaagtgtaactttctcctccggcggggagtcccggcgccggctcccgcggccgcgggacgacctcgcgatgcgggcggccacccgggcccggcgcggggcgatgggcggttccctggcgggtccgggtgcggacggccaagttctcggagagggagggccgccttgcaaactttgccgagctgtcaccctcccgctggccgcagtcggccggcctcctctgcacaggagcggacgcgggagcccctccgcacccgtcccctcccccgggtcgccttcgcctgcccccggggcgaggctccccgcgcgggttcgcgtcgcgtctgcagtggccgaggctgctgcctgccgggcagatgggtccgccttgttccggctgcagctttcgccgccggggcttgctggctgtcgggaactagtcaactggagtttttgttgacttcccacggttcaaaagggccttccagaatggggggctggaattaaatcttgggtctaacttaaaggaaggcgccatattattccataggtgatgctaatacctttgtgtttcgttatttgttttttaggaaacatgccctgaactgtcacagaatgaaaccagcgctcttcagcgtcctgtgtgagatcaaagagaaaacaggtaagacgctgcgccccgcagtgggcctggagacccccgaggtgggggtcggagctactccttcgactctccagttgagagctgctgcttttgggcaccgccatctttgatcattctctccttcccacgtcctgatcttgagaaaaaactgcaataaatctggagtcaatttctcagttctgctcctggtgtaaaatgaagtgtaggtgcggaccgggctggatcgccgtccctcggcggccgcccctggctgcaggcggggagggggcccggagcgccagccgccctcttccctctcctttcgccttgtttgtgtgtcagtttttaaaaggagcaacgggagactggatgccaggaccgagtccccgggagaagcatcgcccgaactttgttttacttagacagtcttaagcttcagctgcacggatagaagaatagatgcaattgaacagaccccagtagcatgcttgaattagtgttttaggtgggaaggctactttagagaatcgaggaagggtaatgatgtgtagacacatacgatgtattacatctgttaatacttgtattattt

SEQ ID NO: 53121 - DNA, 937 bp, Homo sapiens
aaaaataaaattttaaaaatttaaaataaacctttaatacacgaggtcccacagcaattagaaaatgatttctttaagtggtgtcctttttaagagttgcattggaacttatgatatgaaagatataaaaacatggtagttgtacatatattgagaagttgctcaaaatttatattgtcactattttgagccatttttggtgtaagagactaagagtcctcttgcatattttggagtgtatttagttcatttgagtcttgactcttaggtgtaaagtctagcttatccttttgcagtattctgcatgtctattttctttatttgcggttatacaattagtaatgtgcagtgaaaatatggttagtgtgggaatagctcagattaaaattagaaactggacttggcatgtattcagttcactgcccagggttaaagtccagcgccacagaaagtggatcttcacctttctctcctggtgttttagctttactgatgatttgaaaccatagcagttaatatgctttagcctttgcttttacagatgagaaatggatcttatacttatatcaccaggtttcaaaactatttacactaagtgggatggtttactacctcaggggtagtgcattaagcctattgctcttgagaatccattttctccaccaattgatgggacagatatgacaagcctttaaagttgagtggaaattttctgtggggcgggctgttgtattaaattgttccttaccactatcatggatgttgtaaagacttgtgagtgggtagcctatggcgaggaaaagagatatattgtctgcagtagggaggctgtaaggtctaatatatagggaataattctcttcctatctgctatttccctctccttctttaaatcataggttgagcccatccactccaaggagattttcttgattaa

SEQ ID NO: 53122 - DNA, 1524 bp, Homo sapiens
agagcaagattccgtcaaaaaaaaaaaaaacaaaaaaaaaacaatatgctgtgctcctctaggtgtgccagcctcttgccaacttcttacaggtttcctccctctgggttaaagtctgggatcacagtcccacagcttctcagactaagaccaaagccagaccctggactccagcctcagcctcaggtccctgtacctcaccatctcttccatgggtccccgaagttccggcattctgctttcttcaccatccccaaatttagctcctacctccaccacctccatgcttccacctgcgctctgccacttctctcctcgcactcggtatcccgtgactcatgagagtgggcatttggccctttccctgctgggacaccaccaagatcccctggctcagtcggtgtactaaacactaaccacaccttttgtttcaaaatagcttggggacttgccgccactagagggagagggactgcccttccccggggagagattagagaatccttagagacagcaaacaaccggccccagagtgagcccctttcaaatgcagaccagccaatccagagccatctacccacccacctcctttgtggggctctgacactccggaggcactatccacctgccctaatcactccggggcccgcttcccgaccctggggacagcgcctacccccagagcctgctgatgttactcacgctagtcagtgctgagcctgctcaccctctctttcctgtggaaaccaccacaagggctcttaaacacattttccctgccctcccctcaactctgcttccaaactgacaggtgcttcctggtatgacacgtccatggcattggcgtggcttctctctagggatctatgagtataacaaaccatcttttcaaggtaatcacgttctgatctgttagcctcaccatccctgaatagcaataaaaccgattacatttgcaaacagacaggataggctcagttatgctgaggttacaaaccggtcttggtggcttaacacacaaagcttactgttggtctaggtgactctccaggacaaagtcctccacacagtgactcagtgatccaggctggaggaggctccacattcctgtagtggcagctttgggaacacacctccctggttgccttggagagtatgaaagtactggaggatttaggaccagcacttcactgctttggccccaaaatgacacataccaccaatgctcacacctcattgggaagaacaagtctcctcacctcaaccaacagcaagttgactgggaggcgtgactccccagagtgctcagaaggagaagaaaatgggagagggagatgggtgcacactcaatatctctgtctcactctctcttctctgctactgggtcagggaaaggaactcttccccagcgtaggatgttgccctcttgggctcaccaggaggttgcactggctgggaggcggtctgtcctctactggcatcgacatagtgggggctggctgcagcaggaaatctgcatttgcc

SEQ ID NO: 53123 - DNA, 1674 bp, Homo sapiens
caggcttcccttctgtgacacttcagtaagcctatttccttttcctccttcattcccagtctcccttgcaagcagatgtagtcatgtggctgagtctgacccatgtgactgaatgctgctggaagtgaagtactcctagggctgatctgtgtggccccttctacagagaactctgaggccccagggaagagcagagccacggatggagggtgcctgggccgctgaatgactgtgtggaacagagctcagccctccccactccagtggactttaccccttttcccaagtgggaaataaacctctattgtgttaagctactgaggtttggcagttatttgttacagaggcgggtataacttgtcccagctaatacgtcccttgggatggatgccctaggaggaaccaggtctgatcatttctctgctttcagcgtctctgtcttgttgccacccttgatcagaatgggctgggtgggtttccaggaaagaggaagaggtcattttctaacatttgttcctcgtgcccaccctctcctggggaggtgggagtgacttgaggacctggagtttctatctggagtggtagagacagtggatgggagttggactctgaaatcagttgtgtgttcaaatcccggttgtgtccgtgacctctggacagtcgcttgtcatttccgataatgatgcctgcaccatggagttatgtaaacactcaaagagctcgaatgtgaagcacttggcggagtgcctggcacccatagaagggagcgatcatgataattacgattttcctcaggtctcagcgtctcagttgcaggaagctctgcattgcaagccttttgtctcattccattttcgagccagatggccccatttttctcccagtttccgcggttcttgagctgccccagtgcctattacacaaaccccaatgcatctctgaagttagcagctaattatgttccaggaagttatagatctggagtttttcatgtgccagaggcaattgcctgctcgggctctcattttgcagagcagccttccaaggactgattgggagccccttcccctggccccaggggccttgtgggaccaacctctctgcacctcggggagtcagggtgccccttccctgcctcccagactttactagctctgggcctccctcacagctccttacaggctgtgaggaacgttcgggctgtctgttctgggctgggaggtagagggagtgtcagagagcccttgagaaatgtccctccctcctggggaggcacaattggtccttcattattgtgagtaatagtttttgctgctgagcaactgagtgacttgcgtctgtttatcgtgtaagggtttgccctgaccccctgccccacagcctccctgagctgcctctccacctggggctctcatttctgcctctcccctgcagccagacaaatacccctggctcccagggctccactccccacactgggctgccctccggggacccagtttctccttccttaggcagcattcccttggaactaaagtaagagaagtgaagtgctcacagtgcaaaatgtaacaaggtgcttacactctggtgccaattgcacacttgtgcacacttgcacacccttgagagtgagtgcctccttaggttaggtgcctcactggcttctcccta

SEQ ID NO: 53124 - DNA, 1055 bp, Homo sapiens
gtgaggctcgcgctcgagctgcggcgccggctcctgccgcctgggccccgggcccggcccctcccgcgccgcccgggcgatgagaagctgcttctgcgtgagacggagccgggacccgccgccgccgcagccaccgccgccgccgccccagcggggaacagttaagtgaggcccgggcgccgcggaggctcggcggagccggccctgcagccgggagggcgggcgggcgggcgcgggcccccggccgaggggcgggcggacgggaggagccgggccgcgccgaggcctgcgggctccgtgcccggcccgcggcggggacaggcccgggcggcctttgcagagccccgagcgcgccgcggctgccggtgcccgggctcggcctggcggcgagaggcgggagaagctgggggacccgagtgccagcagcgcccccaaggcccgggcaggtgaggggcgccgagagccacctctgcccgcgtgagagggaggcggcccacctgggcacagactgggaacagtcaatcgtttgaccggcctggcctggggtcctgctctctctggtcacgtgggtgcagaccaacgtgcacctgccccaggagcatcactgcctctgtgacctgggcacagcagagaggacacctaaaccctcaggcacctgtctggaaggtgacatgcccagcctgggtacccgagacccagagcacccatccaggaacatggtgggcacgtcgagcaccctacagtgactccaacaccagcgagacgggaggagcaggggctgggacaagagctgaggcatggcaccaggggacatcacatcctcagaggcaggcaccagggaacggggtagacccaagagcatcttttgtcctctttgttaccaacacacaactgttctaaatcagcagcccttctcaccatgaaagatgagactcttctgttccctgcccctcaacacctcttgcacaaggcactgaggaagaccacaggagggcaaaaggcaaatggtggttgccccttccctgcttcctgcccccacccaagaaccagagccc

SEQ ID NO: 53125 - DNA, 2950 bp, Homo sapiens
gtcatctgtggactcactgttcacgcgccaggccctcttagagaccgggaatgtaggaggatgcttcagggggaagatggcaaggtcagctgaatttgaggtattcctgagccatgtgggcaaagacgcgagacagatacctctgagtctcaggagaaaagcctgggtttgaggtattttggaagtcattagcatatgggtagaatgattagatgaccaaatatatgaaaaaaaattctcaagacccatgtgaaagtcagagaggggtgtggtggcctggctggcctgaagacaggtgttctgatgattctggcaggggcccccatttgcctggcactgaaattatattagtatctttactgtatgagcaccgtgcccatcagggcaagctgtgactcctgtcaccaaacactcaggaaccattgcttttggggcctccaggatggtttcatttgtaggcatctgccttctgttggggtcctttttttctccttctctacaggggacaatatggcaccacccagcaaaacctgatgggagtggacatggactaccctcatttgcagtaatcatgggcaagcaggtggtacccacagtgtactggagaatgccctaccctcgagtaatgttccctggtttgtgcagagtcaggcctgtatggggcagggctttggccagggctgtgctgtagaacttgatcctgaatttatttttggaaagtgaatcctggaacctaccattgcaccataagggctgcagcaatctgaaccctagtcctgcctcatggggtttatgcaaaatctgtttggtaatcaaatggttaatagaaatttaagcataaggcagattgaatacacacgtgcatacactggattcttctgttgggggggaaaggaagtgctcacaattgttagttcccgagctggaaaattctttgcgatctaggagagcttagaaaaatatttgccttagttgcccaacaacttagcagccctcctagcagctagtgacttgttgccacctgactatgtccagcagcatttgtcagagtgatttgactctggctggtcaccaggtaatctgtccaaagttcagaaggtgtcaggatgctatcctgaggctccacagtgacagcctctcagtctgtgcactgtcccccacgggtggccccaaagccagctgcccatttaactgggcacagcatggacactggcctcagctctcagccttctgaggaggtaggtctctgcaactttctgtaaggaggtggctgggtttgtgtgtgtggtgtgcattggtgaggcctggccacaggttccctccttggggacaggcagtcccttgcctgtccttctgtcccttgcttgcgatttgccagcagaaaggtgtcagtaatcccggggcaccagaggtgggcatgtattcctacagaccatcgctgccaatgggaaacaggcaaagaccctttctatgaaggccggagcagcagcttttactgggggacaacccatttccagcagctacctgctcttgtggcgtttcctacggcgaatgaaatgtttattcttcttccttcctcagccctgtaagctggtatatgtgagcaggcagttttttgtctttggtgcccttgactttggatttcaagcaagctgatcacaagtttgcccttctgtagggatgtaattaagccactggttttgtcatttcaattacagtagcccaatttagcctgccccccgttaatactttgaaattactctcctcaaaagttgtatgccagtcatgccttcagccctgagcagcagcgctggctggcgccgcttctgagctggcctcaccatggcaggaggccgagatggtgggaggctggaacgtgggcccactgcccagggcacctgctttgaaggcagcgccccctgccccctgcagttgttgctccctgaaagcactttaaactcctcggcccacaccccgctgctggaagagccttggtggagagaggtctgagctttgttagttgggttttgatttcagtacaggagttgataaaacgagataaaccccaggctcaggagggccatggaaattaaacagagatgatatcaaagttcccctgagttttcaactgtgatacagtagctctgttttctcccagactggggccgggaggcacacctttgattccgaaacaatgttcagcatcagttaagcccagcactgctgactttcagggattaaacacactgttgtagtaattctttgatcagctacaagggagcagtgtgccgtctgtatgaagggtctttatagttaaagttcatttctccgtgaacccgggatgacaaccttggctaggtgctgcagtaccgggagctggggcctccccaagcgctatctgcagcactgcaggcagaagctggaagcaggcttgctcctggctttgttgtgtggtttgcatggtgctctttgagcatggcatggtggaaaaaatccttctagcttggaaaacacttcaccttaaccctccccagctttcccattccgtacacttgtgggcgcacatacatgtttgtgtgtgcacgcacacacacacacacacacacacacactactatcctgccttgccgagggagcctctcggggcagacaacactgcctgaactgaggctctgcagcccccagccttggaaattatctcacagaggctgtatgcccgcttaggggagaggtcagaatggaaccatctggacctgatgacctgcgaggtgaaagtaagaggacctgctcaaggtccagtctgagtccctggcatcctaccacctttattccttacccagcatgtattgagaatagacttagattggcccaatcctatagttctgaaaaatttcaacatttgtcttgtcatccaaaacactgggtcagctttgggggttccctatagaga

SEQ ID NO: 53126 - DNA, 938 bp, Homo sapiens
agcttgggaagggtgatgcaggcggccttgtcccgaaggcctgcctagatggaacgggtcaccctcgtgtgaactatgacacccagagcacaaaggagacggtggaacccatttcacgtggagggcaagaattgattccctggtgtttgaggccatgactcttttaaatgaattggtttgctttgtcactcaggtaaatgctttgtgctaaccagagccatgaagatttctcttttttcctaaagggaactgaacagcatggggatctggtatcgaatgggcagagtaccaagaaatcatgactcatctcaacccacaacgccttcccagtcatcagctgcctccaccccagcccccaaccttcccaggtgaggccttgtcggggtgtcttgcgttgtcctgtggtcttaggtccctgcacaacattttagaacaccaccacttagtgtctgctgaaatactgcaaagtacagctgaataattgtagaagcaatatatctttagaggagatttttaaaaatccacttggaaatctttgcattacatgaatgcaaaggccattctatagtctattttgtgcgtgttctgcaggcttctaaaattgcagattatgcaacttaaaattggctccctattcaaaagagctgctagctacacacagacacgtgctgtatagccatggggttgggatcactggccttaaggtcaaattccttctctgtcttggccagcaactcatttgaaacccaggagggtaggtgagttcttatattcttcattttcatataatttctttttccaatgagctataaagtaagaaatgggtagtttgggtatgagagaatagtgaggagtttttcaggaaatgctagttttaacaattgtctccgcaaagaaacttgggtgagccaactgtttgctctgcaactgatttcagt

SEQ ID NO: 53127 - DNA, 708 bp, Homo sapiens
cagtcattctaggtcacacatgtgctgtgtgaaaaaggcacctagtaattgaccacttactttatgtgataagtgttccctccagcagtctcttccttttcggaaatgtccgggtgtggccacaggttaggctcctgagctattgcaacacagcccccagttgtcccaccaagaggttttgttgtttttttcccccagtcctgttgggttttaaatattttcctattcgcttaatttttcttttcagcattcactacaggcagctggtgaccatgccaaatggattgtttacttttgactaaatgctcacttaggctgagtgttctttgtgagctttaatgactcacacctgagccatcaaagactgtgctgtatctgtctggaaggtgctttcctgagcacctactgtgtgcgctgcctgagggggaacacacagacatagcagttgagagcgatgtgccatcctgattttcagaggtcattagtctcctgaactcatatggcaataataattcccaacacctttgtttacagagcgcttcatgtgcagtgatcctcagcagccctgcggtgtaggaatggaagcatttgcatggctcctggaataaaccaaggctggtgttcagcgcctgggttgttacggtcttgctggtgcattttgcccagtgggcagagatctggatcaaactgccaccccgtagagtccct

SEQ ID NO: 53128 - DNA, 1091 bp, Homo sapiens
acgggcaacactgggctgtcattgtcatggcaacaaaaggctggagtatgtatgagtggtcatgtgctttcggtttgtcacactctctacccttccctaccgcctcaggaatctgagacgcactgaagtcctatttgctggtgcatgtgagctgttgttttttctctgggtggagaagtatttccagactccataggtatcattccagtaccagcaggaaacagatgacacactcaagttgagtaattgaggagagtttagcaatgagattatttacaaaggtataaacagggattaagaaaagcaacagggaaggaatgatttagtaccctggggctaggaacactggggactgttgccaccctaaatttgaagcggtgcagacaggggacctggagagatttactgacggagctgaggctgggtcaagggctgtggccagcccacggggactccacaggaagggagcccggaaaatgattttttaaatgtactcctccttccctccagtctcccctggggatcccaggggccacaccagctggaagctagcagacagaagagtccatatgaatcagccccccaaacacagacttggggtggggaggcagagaggatctgtgggaagagccaaatggaagacagccagcctgtcacatgtccttcagaagtggcaggatggccaggcgtggtggctcagacctgtaatcccagcactttgggaggccaaggtgggtggatcacttgaggtcaagagattgagaccagcctggccaacatggtgaaaccctgtctctattaaaaattagccaggcatggtgaagcagcctaattgggagacttgaagcaggagaatcagttgaacctgggaggaggaggttgcagtgagctgagattgcaccactacactccagcctggacaacagagcaagatgctgtctcaaaaaaaaaaaaaatggcaggacaaaaaaatacacatagaggagccaatatctaaggacaaatgagagtgcatagctttgtgtagatgttaagaatatgcattctggccgggcatggtgactcacacgtataatcccagcactttggga

SEQ ID NO: 53129 - DNA, 881 bp, Homo sapiens
gcctcccaaagtgctgggattataggcgtgagctgccacacccggctgcctggcaatttttcaagagtttcttgatattcacttgtgcttttagcccctttgtttttctaagcatgcttgttttatattctggttctaaaatatctaatatctaaagccggtgtggatccacctctactgcttgtcttctctgcttatttcctcagggggtttgtggtttctggttgtgagttcatatttatttagaaccctatctgtgggaattctttgaaacctgggttgccagtgagctcttccagagaagatctgtgtttgttttggccaaatactgtaggcaccacctacccaggttcatttcaaattaaagcgattgcgggcttttgaactatgcaaattgtgtgtccatttgatagccagactttttggccatgaatcctccaggggaatgttttccccttctgctcagaaccaaggcacagagagacatctttaattgctgcacctctgtacggcagattttttccaccatagtttatccttcacctgaggacatatttcttcgtgagttccaacctgatgttgcaatttgactcttatcctgcctggacccaggtgaacgctcctatagctggtagcagtatcagtgtttacctatctccagagataattttgaaaatatttgtcagtacaggacatgcaccaatggatcggaacagatgcagacggtacctctgcataatttctgaacatcaattgtttgacttcccaggcttgtgttcttgttttcctcctagcttcagataattttcctgactttttttttgcaagtgtatccatgcgtttaagagggtattctaaatatttcttctagcaattttata

SEQ ID NO: 53130 - DNA, 2312 bp, Homo sapiens
ggtctcgaactcctagcctcaagcgatcatcccctctcggcctcccaaagtgcagggattacagacgtgggctaccgcgcctggcctatgccaaggtttcaagaaggtttagaactcagtatctgctcccctattttcaacagcgtagtcagtccctaaaattgacccgctccagagtgtactgcgcaggcgcccgctacctccgcgctctctcccgacgcccagctcagacggtaagtcccgcatgcgcactccgctttctctctgacgcacccccggaagcactgtcagtttcggggggcgggaccgggaagcgtttccgggggctgaaggcacaggctgaatctgttgcggcagctgaggctacaacaggcctgcgccggcggcagagaggatatcttgggcgggggatgtgagcgctgagcccttggcaggtactgcgtggccaggaccacgggcggcaagggtaggggaggagaagtcggtgggggagttaagggctcctcagcaggccccgacgctcgcgccgctggccccgccaggcccattccgtggaccggcataccaaagccccgcgcgggaggttggggtcccggcgctccagctccgaatcccgcagtcttctgcccacacggcgcgcagaccgcgataccgaggcctttggggcagcttctcgcccaaggtcaccctcgcggcggcggagctccgccggccacagcgcttagagatcccgcccccgtccgtccgctggcctttcggggcgtagggtgggcgcggcttgacgacctcgggttcgagccaccaatgcctgaggcctgacgagccgagctgggagaaagactgcgcctggacttagctgatcttctgtttaagtaaaacattcagcatcccctgttgctgtctctgtcacctgttgtaacctgccctttttgtctttcagctaggtcgctgtcaacctgatatttctctccactttgtctttgtcggggtatctggatcctgttttatatctgtctccaccttgcttctgtgtctgttcaccctgtctctgccactcagcccttactctaattcagggcctgtcagtctggctttttggccatctgtctgtttctctctttctgccaactttgtttttgcctcttgtctctctttcctgagtttgggtggggcagggctgcccagacctctgagccatggaaggtgactcatgaccccgtgaagttccctgcactggtgacactctcagtgactcgaccgcagtttggcctcaactctgacaggtgtcgcccaacataagtgtcagagtgcaggagagcctgtcagggagacaggaggcccattttagggccagagcagcttgatgagtcctctccttttctcgcctgtggtttctcaggcctgcacagcttcccaaatgccttcgctctatccactcaccacaggatggtctccagggatctctggagcctgctctttgagttacagctgtttaacaggcctgtctacaggctaagaaaggatcagactgaggtctttggggctactggaacagtagcagggtttctgggataactgcatgcttagttcagagattgtgtcagcattttcagttaaattataagaaacctaataattgggaatttattatttgctttataaaagcaccacgggagaaataaaccacacacaaaaggacaaatgttgtttgagagcacttaaatgaagtacctagaataaaccaattaagagacggaaagtagaatagtttaccaggggctggggagaggagttattgcttaatgttacagaacagagttttgggggatgatgaataaggtctggaaatgggttgtgatgattgcacaacattgtgaatgtacttcactgaattggactcttaaaattacttaaaattgttaagtcttaaagttttatgtatattttatacaatacaaaaaacaaaaacagtattcattggagactcctgaaaccaataagctccttttacatgtaatttttcaaaattcattctgtagttgttaggaacacagttgaacctgtgtttattgattcctactctctttacagcagtgggtacagctgaggttcttagaaaagtttagttaaatgaatttggttaaaatctttctcaggctttctacttactttctgccctggctctcctccctctgcctttcttggaatcagtgcaagaatgtgctcataagtaggatacttgataattatgcttttcacaggaagaaaactcataaggttgaaaaatagcccttttattataatgcaaaatt

SEQ ID NO: 53131 - DNA, 1559 bp, Homo sapiens
tggggcctccctatgttgcccaggctggtctcaaactcctaggatcaagtgatcctcccgcctcgccctcccaaagtgctgggattacaggcgggagccacctccgttttgagagagagaaaacctgcccaaggtggtaagtcaagagaccccctatgacaggtccccagagccctgctgctaaccactgcaccttgctgccttcagctgccctgccaggagcagctcgggtgcgtggcatgcgcctgaagagatgcaggagggagggtcttggaagggagggctgggctgggggcaggccccccagtgctgggggggtcgagggtcctgggctctctcccacccgttcgattccgggagcccctgaaacgcgccccactgcaccgcccttctcccgccagcagggggcgccgaggagagcgcgggctgaaggcagagccgacgccgcttcccggagtcgggactccggggtccagaccaaggctgccgctagcccgcggcgaggctctgggacgacaaccgggcgggactcaggaccccgggccctggctagaggtccgccgcgcaacgccaccacccgggttggcgcctgcccggaagcgcgggcgtccagggggcggggccgggaagcgcttccgggggcggggggcgcgggctggggcggcagccggagcggcggggactggcctggcgccggcggcggcggagggggcgccgcgggcgggcgatgtgagcgcggcgctctggacaggtgaggcacgctggccgggggcggcgagcagcgggctaggcgcgggcggggcaggcggggcaggcggggcggggggcagtccccgggccgctgtccggctccctctgggcgcggcggggcgggagcctccgcgcctggtcagtcccgcgggcaggcggccggcgcgggcgggagccgaggccgggcggggtccggaggccccgggcacctgctggggtcaggcgcgcgtccccgaggggccagctgtgctcggtcctggagtcccggcgccgctggcccggctgagggtcgcgctcgggcagctgccctgggctcccagcctccgcccggggcgtctcgggatccccagcttccgggcccctagccctgggggcgctcccttttgtacggggagggagggcagatggttgagttccctggagagccggccgggccaggggtcggcccttcgggtggctgccacggagccgctgcctcacgccaccgccttcctccaggtaaacaggcggcggcgacgggttgcgcttggccccagacgtctccgtggccactcgcgctcagttggtcctgccattgcggagggctgggctggggctgaccggggttgtaaacagtgcccttctaggccaagtggctgtgctttcagggcggcactcgtctgggagtctctgtcttgaggccttccgcaagccccttccatgctaggactcagtttccccatgtgatcattgagggtttcatttaactctctaagaacccttctggctctgccattccgtgtatgtctcaaattggaagggctgtccct

SEQ ID NO: 53132 - DNA, 613 bp, Homo sapiens
gtgcaactgaactaaaagttcagaaaagtcattcacattgttccaaatttgtaatggttgtcacatgtcacatgcgtctttttcagtaagtgccagagtgttcccactgtttctgcccagtgcttgacttctcggcccggaagagaacctgctttctctggtttccttcctgagtctggcacagacggggctattgtagttcttgatcaagtcctggagtcagccttgcctggctctccttgtagcagattcagtccacagacctcttgctgcccctcagtgacaagtatgctgtgaattcaacctttggacttgctgcccaagcctttggttgctgccctgactattgtaagaggtaaacttacctggtttgtttgagaatgaccattttcctaatgtgaaaaccatctctctcaccacttttattagtagggctaacatttttttccgttataaatggttgagcaatttgaatgacttaacacagtgtcattatcttgcaatataaactggtaacctcacaactccacacttcatcaccatatgaagtaaatgaagctagctaagcggatgctgtatcaactagtaacttgccattaaggattattttata

SEQ ID NO: 53133 - DNA, 2472 bp, Homo sapiens
caaagaaccaactttcagttttatttatcactttgctagactgttgattttttaaaaattcattatttatgcttttatattttaaattgttttctcgtttcttttttttctagttctatataatgaatacttagttcactttttaaatgttttttaattattaatataagcatttgaggctgtggacttttctctcggtggttacatggccttgcatcattgtggataattttgatattttaattttaacttattttttcatctcagaattaattggtaagtgttttttctttcccaaataattatttttaaaaatttgtttttacccatgggacagagaagggggtggaattgctccagatgccccgaagccacacgggttatgagtgtgggaggtataatttccccaaaaggaaatcaagggctgtttccaaaataggtagtgggtgttaggcagaaaaaagtgtcagtttcttctctattcccaattgtcattgaagggttaaatgagctagtacatgtaatatactcagcacagtgtccagcatgaaaaaaggccaataacagtaaccagatgcatggcctctcctcatgccccttcttactgccagtcagaaccccagtgcacgctatgccatccattgcactctgggggaacgtttgcaaacagtgggttacctctttgtgcctgtacattaccaggcaatccccagggcatgaggggatctatagttgtgtcctcatttcaccttggggagccaggaggtgatttggcttccctggacttcaggattctgtccagacagcaggactttgcccacgtgcctttgtgattcatgagccacaaccccaagtcatacacaaggccatgtgctcatccagaaagcgtggcctctgaccacctgccatgtgactgcctgcgcctgcccccttctgcagaccgaggaaactgtctcagtgacagtaagcttccaacagctttcacaaaaggaatactctctaaatgaggatttgttctgaagccctgttttgcttgttggatattaattagcaggtgctagttaatactcacagtcttccccatcttctcagggagcctgggccgcctgctgagatctcatcatgcagtagatggaaatgctttgtgctctcttaaagagagcacacacatcctaatgagctgctgctttgttatttcatttggaatttatcaggacagtttatgtgatcaaaccacacaaatatagttctgcatgccagcactcctgaatactgaagtttgaaagtgatctttttaaggcagagcaggagaacatggaaaaaagtctttcatctcaaactttgaaaaagggagagagagaaaatggaaagtataagatggaaatgtggcacatttttatgctgtagagggtttttttttcccctcaacacagcagaattttccttattaaaaagatagctgtatgagaaaaaccaaaaccagacttgggttggaagtgagacagggtggcgatgggagaacaagggagcagtgagtctctgggcttgtgggaagccctggtgccagccgtgggctttggcttggggaggctgcaagcgcccagcttcaagcaggctctgggccatcgagtatgggtgtccctcagcttcagagaaggtgtctgttcggaagagcacctcctttgtcagcctggcactccctccttggggccgggtgtcctgtggacacctctggtggggagcctgtattcactgtcaagaagcaggtttggccacctgccccttgtgttgaggccagcccagctgcggagggcttctggagcagaacgaggtgagagctgcccactctggccctgggggtttgcctcaccacggcagtctggttggcactcatgtggcagctacagcagtgtcaccaggccctgtgtggggcatggaaggagggagcagagcccaagcatggtctgggatctgtctcagaggaggtccagtctgcgggtgggcatagccatggggcagatgccagctgccagcagtgtcctggggattgggggaagacaggccacagcaggggtcctcacacccccaactctctgcctggaatcctcatccctgtgccagccaatgacttccagcccccagcctccagcccctagcactgctgtctgtcccagatctttggagtcaggcagtcctgaattcaaatcctgattctctcacttgcaagctgtgtgatcttggccaattgaaactaagcttcagtttcctaatctgtaaaatggtggggaacaggagtgccttctgtacagggtcactgctaaggtgccatggtaaacacaatacttcccttccctagagtagacagtggctgttactgtcagggttgtttcccccaacaggtctgcacctctcagccttgcctggtccctggcactgtccagccccaaggcagccagggccaatggctgatcc

SEQ ID NO: 53134 - DNA, 737 bp, Homo sapiens
gcttcagaccgtcctgcacatgggcctgggcacagtgcagggaatcacttgctggctgggtccctcccctgccctgttctgggagttgctgatgagagctcttggaatcctggccagtgcgctttcctgaggctggtgtgagcttgggaggagctgaggggcactgtggcagcactgactccacaccaccgacaggtgtctcaggctcagcagctgatggaggaagggtgcagggaagggcagggaagtagcagtggcattccagagaatttgcccaagcccagttaatgactcatggaaaaccccaaagtccagtagacaccagtgactgtcatccagggcagtgttcagtttctcatggcatctgcctacagagcagtgaacctgctggctcatcagtcctgtgaggcccatagctgggggacatgcgtgagccctcggcatggctagggcaactgtgcctgtgtctccagggcattaggcacaggcttccgaacagatgagtcccttccttccttccttccttccctcccttccttttctcccttcttccttccctccctccctcccttcctccttccttctttcctacctacctacctacctaccacttccaaggcacaagctcagcccagcctaggcaggccctggaggagctccaaggctggaggagaaagagttgctctttgagtgttaagcagccctctgtgctagacactctgcatatgcctgtcaag

SEQ ID NO: 53135 - DNA, 459 bp, Homo sapiens
gcggtggagctgggtctggtccgggcacggagtgggggcttcgaagggaaaaggcggggctcctgggggcggagccatacctgtgggcgggacatgggaaaggagggcccgaggggcggagctacaatagaaagggccaggaggtgctgaggcgaggagaggccgaactccaagggacgacgctcgcggaagcagaggtttggggtgagtgcgagggccttgcgcgagctcagtagtgcaggggtaggtgagcggggcctgggtctgtgccgaggggcaagcagcaggaggggtggggtcgtggacgggacagtcgaggttagggtgggcgttttgggcctgtgggcctcgcagaggtgcagaaagccggcggcaagaaccccgcggggctggcgcgggaggggcgttaccggagcgcggggcggggcgtgggcggggcgtgggcggggcgtgggcggg

SEQ ID NO: 53136 - DNA, 1171 bp, Homo sapiens
ggccggggcggggcctgtaacaggctgagcgggcgcggggcggggccgggaccagggtgagtgatcgcggggcggggcttgggcccagcggagggtctgggcaggctggggttcggggcggggctggggcggggcctgaaccaggatgagaggcgcgaggcgggctgggctgtggttcggggcggcgccggggcggggcctgggcccagcgaggggagaggggcgggacgtgggctgcggcgcgcgagccgagcggccggccgaggcccgagcccacccgagtgcgcccgagcccgcggcccccgcccggggcgatggaaccggagcccggcggggtggccgctgcgctcctgcggcagaagagggcggcgctgcggcgcagggggtgcagcttcgagagcccaaggtactgcggacggggaggggtgcggccgggcggggtgccggccacgtggggggatggcgatgtgaagggacagcggggcgaggccgtggcgtgggaagggtctgcggaggttctcaggagaccgggcgcggagcccgggctgaacggccgtgggctgtgggaggggccgggccgtcgcgcgggaggtgcagggacgggtgtcgggcgtccagaagcgtcggtccagtggcaggccccgcacgcccgcggcttcggcggggcatgggctgaggagaatgtgccctgcccacctctggtaaaccctcaagggcaaggtcgggagctcacccctccgtccactggaggcttccttccggcgcccgcgtgccctggcagccgcacacctgctgcctccgcggcccccgcgcccctcgcgccccttgcgcccctcgcgccccttgcgcccctctccctcgcgacgccggcctctgcccgggccgccggcgcccctaggctgctcttcccccggggcctctcacgggactacagccgcccgggcgcgtgccctccctcagcttccctggcagtccctgaacttggaacggattctcctgcttcgacgtcgctcaagtcggccctaccattttctcaggtcttggagatgactccaacgtcctctcagccacacttcccatctctgttctgacacctctgaaatccacaccccagccggccgcgaaagaggtcttcctaaagccgtgactgtgcccttcgcggccaacaccc

SEQ ID NO: 53137 - DNA, 1821 bp, Homo sapiens
gatgcagtttggaacgtaaacgggtcacatcgtttagataaaatcgtgatggtcagttgattcttaagggaaactagcgaagccaggagtcactgttggcttttcagagcttccgcaccttccagaaactgcctctcaggtgaataagatattgaatgtctccttgatctgaaatgggaatttcaaatttcaggcgatactgaattatctgagcaagatggacccggtagtctcgcgggtcctcggtgaccccagcgcactgcagaggacgggagggaacccagggcgtcagttccaaaggtggggcgggtgggtagccccgtcttccctctttatcactaattaggaaaaggaatttgtgtccggggcggggggttggaggtaacctgaggacgctcagcgctggagctccgagcaggagttaaagtacccgcagtggagctggcccgctgcctttccagactgcaaggcccgcagtgcaccgcgcgggtgacgtgtaacaggggcgggcgggaccgctggagagcctatgagcacagcgcaagcaccccgaggggccgccttccggccctattggtgaatccgattaggggtgggaccgagccgtggtgattggcggccggagggatggcaaagctgccacgcgcacgggggtgcaggctgcgggactgcgatcgctgccggataggaccaggtagtgtgcacacctccgtccttaggaaggaacccagcggcagattctggacttgcgtggcctcacccgctgatctcacccagcggcatgtagaaatgggtggagtcaggccttgctctggaccccagacttagggaccggacttgaaaccaaattgcaaggcagccagagattgggttccctggaaagatgcgtctttaagaaccactaccattttgtgggccgcctattcattaactccttcactgaacaaatatttattgatcacctgtgtaccaggcaccttgcccaagcatcctaaatgcattttctcatttattcacaaaaccccaatgagataggtgctgttatctccactttacaggtaagggtgcggaggcccagccttttctgggacgcaccgcttggaagtgacagaacagggattggacttcggtctgtctggtccagtgcccatctcttaacctcagcgcactcaggagtgcaatcaggagaaaaatatttatgggatggcagcgtccacagggcttctcggtgctgtccagtgaagtatatataacaacagtccagtgctgaacaccaatgaagttgaccaagcaccaagttgggtcttacactaggtaccacagtacctcaaagacctactttgaagttggtgcttcttagggagtggtgggcaatgagcctgtgaagggagacaaaaatcaacccattggggagtgggagccattggtcttgactctctagaggagggcatagcatgctcagatttgaaagttggaaagataattggcgtcagtaggcaactggatttcagtaggatgaggctggtggcagggagacctatcagagcagaagatgtgaaggtagatgttaagagttctgatgagcaacaggaatggtgggattgatttgggaagtattttgagaaagattagagtggatctggtaagcgtatgggttgtggggtgaggaagtgagactcagagcttcaactcagggagctgagtagttggtgttgtcattaataagagggcactgagatgagaaagcacaaaatataagatagaataaagcaaaggtcatgtagaaaatgatatcggggccaggagcggtggcttatgccc

SEQ ID NO: 53138 - DNA, 506 bp, Homo sapiens
accatttgtattctgagtttctgtattttgtggattccctgcttaaagtcaaatatttgagaacattcaaataaaatcagggtgtcatatatggattttgattacattatcctcaaaatatcctggccagattcagtcttcctccgtcacatcccacaagtataagtagggggtgggggaagataatgaagacagtgagaagctttggtgggctttggatctgatgcagaaatgattcaggacttttgggtctctgtgggcatgtacaggcctgaatgcagcatggagcaacttgagttcatttccctctgttgtagcctttcacaaatgtttacctaaagggcataaaataagcatgagtgtttgcaatgttaaacttcagttatctggaaagtgtactcatcagcctattttctcctaactttctagttgatgtcaaatgaataatgtgttcctgtttcattgtcaccttaaactcctatagacagagtttctatatctccaag

SEQ ID NO: 53139 - DNA, 3065 bp, Homo sapiens
ggcatggttaccagaactgtccattctatagtttttttgcatatattcataactgaatgaaacactaaattttagttagaacttagggaaaataaagttatatttgttttgccccatccaagtttatgccccgctctctgtgctgaattcttttagaactggcatagagcattgtttctcaaagttcagttttcatcagaaccacttgtaaaacagttgctggttccccactcatagagatcttaaggaagaagtttacgatgggcccaagagtgcacattttaacaaatttgagaagcacagaactaagatctgttgctgctacctgaaagaagcttgtctgtgccatccacgcatctcttggaggccccagaagtttaaacgtcctgatgacagcttaggagtttactctctaggcgagagagaaagacgttcatgacagtgttgcttttagtagaacaaagaaaaataactgtgataggcaactgatcaagcacaataatgtgcaattatgcagtgaatacatggagttgttatgatgtaaatacatatttattaatagtcatagtgggaaaatgtgataccaaatagtatgcctattgtgatctctgtatatgcaaatgaaaaattgtggaacaatacacgaaaatgttaatttgaaaattcaggtgatttttgtttaacctttgttttctaatagggctaacaagttttttttaatgtgtcaagtaaataaaagttttagaaatactaaaaaataaaaaaataaaaagataaaaagtttactctctaggctctgctctagctttgtaggatccaaggccttgggaccatgacaccaaccactgtggagtctggctgaggccagcttccttggctggactccccctatgtctggtcagctgatgcctgaggctggctggtgggtcatgccatcgctgcatgccctgcagtgtcatagtggaaagacctggagaccaggagtactgccagtagttcatggttataaagtaaataactgttgataatgaatcatgcgaaagtcctacaaggaacaaaatccaatgatatgctttcaccaaaaggtaaaaactaagaggtaatatcttgaataggtaatcaaaattaacatcaccactgaggaacagatgggtattttgaaatatgataagctgaggacaaacctcacttacatggtattccagccaagtctgcataccctgaatctaactggggaaatatcagacaaacccaaaatgaggagggaagatgctgcattcttcaaaaatgtcaaaatcagacacaaagaagggaactatagacactggggcctacttgggggtggaaggtaaggaatgaaaaattacctattgggtattatgctgattacctgagtgacaaagttatctgtttaccaaacccctgcaacacacaatttgcccatgtaacaagcctgcacatgtaccccttcaacctaaaatacaaaatggaaacaaaaaaaaaaatagtgacagtcaaaaaatgtcaatgtcataaagacaaagagtcagtggaaatgttgcagatgaagggagtctaaagaaacacaatgaaatgatcctgtactgaagagagaaaatgcttaaaatgacattgttgactcaactgacaacattagaatacagatggcatcaatgttagacttagaaaagttgataaagctctactgtggttacgtaagaacatagccctactcttgcgaaatacacactgaagtatttagggatgaagcctattattttacatctgagtcttaaatggttcagaaaaaatattgtatatgtgtgtatgtttgtgtgtgtgttgggggttgtgaacaaatgagccagtggggtaaaacattaacagtaggtaaatctggtaagtaaaaggtaaacatgcttttttacactgctcttattcttgcagcttttatataaatttaaaattatttccaaataaaaattcatatgtatgtagcaatagctagttttttaaaattccagaaaatctgataaaagcaaaataatactaaaattttcacctacgtttttactccttaataggcttaaaaggcaggacataaaaaaggacacagaagatgatgtaatggttaagataaaaaaagaaaaaagaagaaacctctggaattggaactggtttcagttccagctccactacttattatctctgtagccttgggcaacatgtttaaactctctcagtctcaatttcctcatctgaaagtagggggataaaatagaatctatctcataaggttgatgggtggttctggagataatgcatataaaatgcttagcctaatacttggcatttagcactctctcaatgcatgtcagtatttccagagcaatgacaaggacagagagcttcccgtttcattttataaggtaacataaccctgaaagcatgacagaaatacaaatagaaaggaagcctatagatctatcacacaaatatgatacataaatcatttgttaaagtcaagcagtatattaaaagaatactataccatgacctagtagggtggattccagaaatgtaagaacctttcaatgccagaagagctattactatattcattattcattcattacattacatactgtgattccccccatttaacctgttctctcaacagttgccccccaaaaaaagcttttggtaaatttaattttcattcctgagaaaagcctctttgtaaacttccaattgaaggaaacatctttagcatgataaagaaactgaccacagacatctagtaaatcgctagaggcatgtcaaagtcagagagtatgttccagtagtctgtcttacatacgtggcacgatggagatatcaacaaagctgcaatagagtgacatcagtcatgcgggaaaactgacatctaacacagtctcagcccagaccatgcaagattcagacatttactgtaaacagtaatttaatgccttataaggattgagaatgatagagtgttcaataagtagaactgagttaattgataaatgatttggggaaaattg

SEQ ID NO: 53140 - DNA, 1473 bp, Homo sapiens
aatagttattggcaaagcaagccacaaaactgtatattcaatataatttcatcttattaagaaaaatacgtatgtatatgcatggggaaaaaaaaaaacagaaaaaacctaccaaaacatggattaattctagatgaattgtgcctgttacaggggtaacaaaaagaagggggttcctctagggggcaccaactcccaaatactgtggaagtttcagcccagaaaggagaggtacttggtacccattttaggaatagctgaactcaccggttcactggttatttttcctacaccccaaaggcctcctggatgcttccacgatgtgaatttagactgggtgtcttttctaatgagaacatgcagccacagcccttgggtgtatgcttttaacaatgatttttctggttctttggccgctggttcattgccaggttcatgtttactttctgaataagcctcttaatgtcacaactttgttccattacagaatgcaactgccctgcctggtacttggcgaagaacagacgtgcacttagagaacccagaataccacaccagatggtatttcaaatattttttaggacaaggtaattatgctattgtggtggtagggaagaaagggtattcaaaatggaagttagtgttcatataacttctggtatcctatatgagtgaaactagccattttaggaacactaacatcagggcatttcacttcaaggtcagtagtaagctttgtaggctaaaagattcagagtctcagccctaagagtttttgctcatagtttcctttttttatggacagtcatttttatccctggagagctaaagattagatcatctgaaaaagtgatttgagagataagacgaattttccagggtggaaaaacaactttagacctaacaaggcaattgccctgtctatattgggttttgaatacttagttcaaggcaatgagggaaataattggttccctgagctccagggcctgtatagaactagagagacattagactgtagactctggcatcattcatacattcaaccatgacaagtatttatcacctactacatgccaggcaatgtgcagagcaatggggatacaggggcaaagacactcatgatatgggtttggatcctgatcctgccattattaatcaaaggaccttacactagctactctccatttctctgagacgcagttttcctttctgtaaagtggagatattacgagtgcatatctagtaggtttgaatggaagtttcaatgagatatgcaggaataatactaagcccagtgcctggcacataccaacagctcagtcattaatagctatgtacatttaaagtgaagggctcaagtgaaaatatacagaaaggtggaaaacaggagtgtggttaatgacaaaagatttggagaatggaagaataatcactattttgagattcaaaatgagttagagaaattgcttc

SEQ ID NO: 53141 - DNA, 1813 bp, Homo sapiens
cgccacattggaaacgatatcgtcaccattgtgttccaagaaggagaggaatcttctcctgcctttaagccttccatgatccgctcccactttacacgtatcctgggcctttgtaaatgctccagtgtggcaagctgtggttcagcctcactggacttccatgacccttaaaccaaatcttgtcatggacttgttttgtaatgctagctttagactcacttttggggaatttttcctaagcattgtgtatagttcccccttcctctctccttccatttcagtagtagatggattaattctcagagaattcttgactcctgaaatatggtctcttttctcaggtagtctacaaaatgaggaaaacttcctgctatccttcagtcataaatgatttagaagaattataggtgctgaattctctgagaaatttgctttaggcataaaaacttgcaagttaagataaaaggccaaaataatttttcttgttgatttaagccctggtaatcgctgttgtattaccatctcttgaaatttgagaaatgatagaattaatagtatttttatctgattcccctaatccctgttcagctcatattgctggcaaagtccagcaatggggctgaagcttctgcagtgtctgagctcagctctgccagacaggcatggggcatgagcttgacctgcccagcagacactcagttgtggccctgttgctctgggtcccagaccatgacagcaaaacccaaagttggtggctctactggttatacataataagcaaaaggcaacaaatcagcattttcagaataaattctagtcgagttactcatttccctggaggctccaagtaaacatgtttggagacaggcccacggtgactcatggcatctggagacttggacttgttccttgtgacataaaaatagaggatggaagtaagtgtttaaaagttaacagtttccaaactttcttccatgagggtagggaagcaaacaatatgcacttgcaccttcattagaattttcttcccttttcatccctgctttctgagtaatatctgcccctgtcccctgggatttaggactaatatttcccctttctagaggtggttcttcttgtataacagaaaacttctccaaattcacagtagaagcagtggtgaggtgactgttcaggtgattgagaggtagtcattattttttagaatttccctgagttatacgttttagatttggggcttggcacatttgttcctgaaaaggggcaagcagatcattaaggcagattcattccagggagcctagaaatggagacactaaggaattgatggctccatagccctagccaaggaaagcaggggttgggagatggtgggtggaggtggaaggggaggaagaagagtgggagaaaggaagaagctggatggattctttcctactattttagactctgcaaaccccagcacaagctaagtagattctgctcagaatctgccaccagctacaacaggcttgttttgttttgtctaccaaacccaaaaggagagaaagggaaggtatacagcggaaacatttaaattgctttccctttccaaatgtgtgagatgaaatgtattactaatttcctattgggatcttgtttgtacttccaggcaagggaactgctctttttgctttgctgactgcttagttgtttaatagctatatttctattgcttttctgacagctttggagatttaaaccttttccccaaaggatgcacatacaaacattgaacctactcatggtgccctcacataagtctccctgggct

SEQ ID NO: 53142 - DNA, 2661 bp, Homo sapiens
cagcagcccagcgggagcgtctgaccagtctcgccctccgagaggagagagaggcggcccaggacggtctgcttagaggctctctcccctgcagagctgggcccaggcataggtcagacgcctccaatacagtccccagggcagcgattaaagcggagcaggaactgcagacccgaccgggcaggacaggtgcagcttctcggagttgggggcgggaagtctcgggctgaggcccacgtgcttcgccttcgccccgcctctaccctcattggttgaagccagattgagaggaggtgccagaaaaaaaactcctccctccaacctcattggccagctcagttctgaggcagctctctggccccgtctatgggctcgcactacactccaattgggtggttgttctcccagacggaaactccgccccacctgtaccttggaccgctccgccctaggggcggttccagcgcgcttcgctaatcggttctatgctcccattggtctgctttaatgtgaagggcgggtcctagctgattcgctagccccgccttgcgttcctattggctgctcctgctctgcggttccgatcccgcccagcaccgtcccccaccccccgccgcccattggctgcgagaggccggtgcgggccgcactcgcagggcccgtggcggttcaggcgccagagctggccgatcggcgttggccgccgacatgacgcccgaggacccagaggaaacccagccgcttctggggcctcctggcggcaggtgagctccggggaacccgggcccggatgcggcctcgccctcccgcccctccgcgtccgctccgctcaccctcggccctgtccccccagcgcgccccgcggccgccgcgtcttcctcgccgccttcgccgctgccctgggcccactcagcttcggcttcgcgctcggctacagctccccggccatccctagcctgcagcgcgccgcgcccccggccccgcgcctggacgacgccgccgcctcctggttcggggtgaggccccgggctcgctcctcccgccctgggaccccacgccctcctctcgggacgggcatcgggaccctccgccccccacccttcccctcgggacaggcatcgggccccgccgccaccacctttccccacgagacaggcattgggcctctctgccccccatcccttccctcgggacgggcatcgagcccctcagcccccacccctcccctcgggacgagcaccgggcccctcagccccctacccctcccctcgggacgggcgcggggccccggctcttttacctctgagcccgcggggagtgggtggagggggaggatgggctgcggcttcggcgccccctcctcagcagccgcccgcctccaggctgtcgtgaccctgggtgccgcggcggggggagtgctgggcggctggctggtggaccgcgccgggcgcaagctgagcctcttgctgtgctccgtgcccttcgtggccggctttgccgtcatcaccgcggcccaggacgtgtggatgctgctggggggccgcctcctcaccggcctggcctgcggtgttgcctccctagtggccccggtgagtgtcccgtctctcgagtgtcctgtctcgcggcctgagaccgagggggagtgggacaaaccgctccccaggcctgggggcgcggctccccctggcgggaccttctgggtgccaggcttgaagtccctgcgttatctcgcggtccctcccgtcgaccctgggaaggatcctactgttctctccattttacactgaggtcatgacatgcagtctcggaaaggtgaagtcctttgcccaggcgaggtccacagctagtcagaggggaagcagttgcaggaacccagggttgtcccacttagccgtgcccctcttttgctctgcaaacctgcggatgatccacaggagcccactccctacattttggttttcatccctggcttcgggtcaatgactgcaattagcaggaagttcctgtcctgatttctcttggggcaaaggctgctggcctctgtgttccccttcccttctcacaggccagcccctctggcttccccatcttccccctttccccctcctgacccaggctgcccacttgggagccccgaacatctgggtcaaatcctggttctgccactaacctgagcagagtgcctccctgggcctcagtttccttctctggaaaacagggattatggcattagcccctgaggtagtggtcaggattcagtgggactttggatagacagcccctggcatggcttgtagaggactggatcctgacagcttggtgacccatgaactgcccccagccatgggcttggacaatatctcccccaagtgaggttgaaagcagccactcaggcccctccctgggtgctcatttcaccaacgtttgctaaccggcagcagcagctggaccagaagagggtggggaagaagctgggccttttatgtctttggtttttttaactgggcagaaacacacctgtgttaggggcctaagctatggaataaccttagatgcatgggtgagggcctggtggcctgtgggcccaggagggagctagtggcagccactggtagtgaccgaggcagagagttcgtgcttctagtccaaggccaccactca

SEQ ID NO: 53143 - DNA, 2219 bp, Homo sapiens
ggcaagaaaagattctcccctggaacctccagaaggaatgcagcactgtcgacaccttgattttagcccagtgagacccacttcagacttcttacaaaactgtaagccccaaactacagctgcccaatatagagaagggctagctcaaagacatttgtgagtgtggcttctccgatggagccaatcccattaagattcataggaagacccacaaaattaagaaacttacactggcaaaaatgccaccggctgtgattgaaagggaaagagacaagacaaaatgaaaaggagccttagaatccccatactcacttatttcctgggtaacccagtcccctccccttaacgacaaaatgcctataaaaaggagctgatcatcgaaaaattgcttaagaagtaatttccaaagggctcgagggaaagtccattgaaacatccccagcctgcagcagggaagcccttaaggaacacaggattcaggaatctcctcccgcagaagtgctgatcaaacactgcccctgaaatgactgaagcagttcccgccggccgataggtttttatactttgagggtcccaggccacccactcacggctgtcctgttcagactgagggacttctgatttcctttagtcttcccaaacttttagtacggctcaagaggaccctgagagtggctggtgattgccctgagtggaaggccaacgagggacaggcgtaccgtgcgcagagagctgcggagaggaaaccaagcgcctagcgccagcgaagatcggcgcccctgtaagcccagcattcccagaatccttcgcggctaaatctcttcttttcctcgaggctccatttcgttggattctggtggactttaaagacgtgtgcaacaaaaaagcacgatggataatagattccgggagcaagcacaggcggaagcctctctgggaagtacaatccctgagcgtgtgtgtatcataaaccgggctgcaggaatgaaaaagactttggccagaaacagagccccgcggcgacttctgggaaatggagtccggtgtggccgccgcggggcatgtgcgcatgaccggaagtggcgccaatcaggcgcgtccctctggcgctggagccaggacctggcgttgggcggtacttggacagcggttcttgagctctcgcggttgccggtagattgttgccagttgccagttgccagtcgtttttcggaaagctggcagcggctttttcaccgggttctgcttgaggccgagccaaagagtggctgtgactcgggagacggagtggaacacccggctgggcaggcccggacagctcccgcgacccagcaccgcaggatcagaccgtgcctctgcggggagaggctggagaggaagagtccggcctgggagccgtcagagcagccctgcagaacggggtgggggctgctgtagatagacccttacgcccagagaactgctgggaggctgtggcgcgaggcgggactcaaatgctggaggaaggaggtgaggagtggtagagggagcgattgtcaagagatcggctgctgcttcgtttgcccacgactgccgctgtgtgagccgaatcagaactctctttatctctcctacaggtagttggagacaatcattttttctttctttgcccatgacacagccccaggagatcctgagaacatgtgcccctacagtccttttttgagtaaagaattcgggggtcaaaaaagtttgaggacctcagactgcgtgatttctgagtattgtaccacgtaccccagtctgcccagatggaccaatgacagtggagagtagggagaagtgggttcctggggactcctctgtcacttttctccttctagcccttctcgaagcagccaggaatgcctggaagcccgggaaagtttgggggcaggccagcccagtaggattgtgaagttgtggaggacaggggaatttgcagttagaaggcacaggttcttgtgaaagctgtgaggtaccagccaggtctcttaacctgtatttctccatggaagaaaggacaaaataatgttaactactttgtttacctctgagaattgtaattctcaaatgaaataacacttttgaaagcaccctgaatgtggtacagaacaaatgtgtaagcaggcaacctcttttaagtcttaaccaccaacacctctgctgttcacccctagatcaactgtatttggtctttt

SEQ ID NO: 53144 - DNA, 464 bp, Homo sapiens
tgcaaaacaccttcaataaacagccactatttcacatgctgtatatggacgctcagctctccatcaaaagatcagggctccactcaattgcaggtttgcctttattcaggtagtgggccaaagcactttatttggtaagcaatccagaaacctgagtttattcagagtaagtgaccaaatcaatgagtaaaagaacttggctcctacatcaaagccaagtctttgggcaatgctggcagtttctcctggaagtaatgagaaatgttgtgaaagaactcagcgcattggccagaaatgattgaaaaaccatcaaatttggggcagcaggaggtgtaaatacaagtgagaaaagggattctagagccacctatgaaataccacaatctccttgaggtggggaacattccttgatgttccaaaactgagaaaagcacacccagggccagtctttgtagagtttgttg

SEQ ID NO: 53145 - DNA, 3047 bp, Homo sapiens
actctgaagttctcctcctctagtaatccttagcctcaacaggaggctaagtgtcccttaagtgccagctaacggccaaggaagaatagttaagatacaggttaaaaaagaccaatggggaagagcatttggggcaggggagcactgtgcaaggattaaataaaggcctaatgaaattcagagaaatccaagaggacagaatgacggggaagccagcagttgctcagcaggcatgagacacagcctgccacattaactgctaggtttacatctacaacacagctggaaacgctcactggatcttcacccacaccccgtttaatctcccaacaacgccatgcccacttcctgacgaggaaatacagatgttggctgcccaatgtctctaagccagtcctaacttcaaaactcccccttgggcccacccctcaggtacactaaagcagcagtggagacacatggagctaattacaatttaaaggcaccaggttcgatttttcacacacgaccttcctaaggtacctagtacttgttcagtggctcaggcctactgagggtgacagtccaagccacgagggcacctctggcacaggcgtgactccacgagccggcgcttaaagtgaaacaaatgtgaaaaaaatgccccttggaggggataacgtaccagacccagggggccgatcttgggggccagggcagaagtggcaccgacttcacctccggtgcacctcaggtatactgggggaaaagaagagttagtgtctgtgcagagggagccccgagccacagccctctcagcgtctttccggggttggacacgccaccctctgcctcttctcgaaacagcacagagcgcgaggcgggccacccgctcctccctcgggtgtgggcagctccgaaactcacaccggggaggcgtggagagagccccgtcgcccgctaacccaggccaatggggcgaaacgcccggagacaagccttaccctagggcgtgcgggctcccaagccgccacaggtggtccagtcctccctccccacctacacgtgaagaagctaaggcccagaaaggctgaggcttggccggggcggcgcaacaccgggaaggtctctgggaggcagcggctttaagagccccatacggggaaagctttgcacgcgcggcagggccgagggatgctccatcccgcagccccggccacaaccagagcacgcaccgactttgatctcgttggggtcgaacttcggcggcatggtggaggcggctggtgtcggatgaacccggattcgggacgaccgaaggaagttgcaccttggcctcctccgagccgaaagccgagaggccggaaatcgcgcggacaagccagatataggcaggaaaacgcggctatcgcgagaactgtcgtcactgcccggccttccagagacgcccttgtcgccatgtttgttgtgggcaggcgcctgaggctgacggctggcaagcagggcaccgcggtgcgctgaagctagagattccgaaagggggttcgggtagttcgctccggagaagtctgagaagggtggctccggtgatcccagccctagctgtttcccatattcctttatcgtgagtgtcaccccggtccccgtcacccaatcccagagccccgcccctcccctgaggggtccgtagtcccattccgagaccccagtaccgcggcgacccctgctccctcgagcacttgttgtgtgcactttagttatcaaaacagtctatgtggaaatccagtcccgctcttcattcggagagtccgcgattcctagagcctcagacttcgtcatcccggtctgcgtgactttatgagattctgagtttctgttcccagcacctgcctttgaaggagaccagactccggctccgcccggcccgtgccgggtggtctgcggccccgagtccgtgaccaagccctccgagtgatcggcctgccctcgggtgcacccgcgggtcccaacgtgggggatccctccatccgcaaagccaggtcagccactgcccaccccaccccaggaaatatgggtgtggccctccccccgcatctaggctggacgtcggagagggagggacaggcatgtggggcagcctggaaagaactgatcttcggggaggggtgggagagcgatggtggttgggaggaagtggggagggctgcacatcaggaagggggtgcaagagggttagtgattggggagcagaagggtaagtgctggtcatcagggacggatgggggagggctgttttcaaaccattccccatccttgcaggcaggtggggtgacaagagggcctgaactggctctgcaggcctggctgcctccccagacagccccgcccccgtgggtgcagagctgccatctttgcccatccctctgaggactgggtgtatgtcttcttcaactgcatctcctcccatgactatcttctccctagctcctctagcgggccctgaatcaatgttgcttgcatgtgggttgctttgtggctaacatttattgagcgctcatgtgccaggtactgtactaggggcttgacatacatgaagtcgctggatcctcatagaagccagtgttggtagcatggttactcacactttacagatgaggaaactgaggctctgagaggtgaaccaaggtgacctctgcagttgtgggtggcagatttcggattcaaacccagttctcttttcatcccaaagcctgtgctgctcaccatgcacttccctgggtgattgcctcctggctcattgccatcccttatccagctctggtatttacagacactgtgcaggccctgggcaggcagtgagcacctggctctgagttcaggacagtgtacttcgtgtgtgccaagttatgtgagcaccaagcagtcgggcaaatcccataggtcaggacttgagagaccacggttccaggctgcaatccaggctgtacagccaggccactgaacttaataagcatctacttcttcactttatttatttatttattattattttctgagacagagactcc

SEQ ID NO: 53146 - DNA, 585 bp, Homo sapiens
gaaccctccctccagacaagtcccggcctcccaggtctccacagcctccctggcctccactcccacagcccctggcctgctccccggcactcccctcaaccacagttaatgcctcatctgagacgctccccggactgagactgctctccgctgtctccccagcacccagctcccgccaggcccaggggggtgcttgataaacaagtgccgaacaagtgttaggtcacccagcctcaggcgccaaacaggtcaccagggaggccatggtgggcagggactcagtctgagggcacaggccgtctgggtctcatcacagaggcaggtcaggcccaacagagccaggagtcagctggggtttttcacaaggctgccttgaaaactcttctcggttggcaaatatttaaccagggctgggccacaacaggtctggtggggaagggtgagctttgaggcaggagggctgggaggagagggcggggctgaggcgggagcccagagaaatgcacccaaaaaaacgggtgacccaaaacccgcccactggggctgccctttcctttacacctcgaggccgcctggtgggaggaa

SEQ ID NO: 53147 - DNA, 1169 bp, Homo sapiens
ctccagagtctgtggggaaaaggaacccaggccccctctgcagctccggcttccccaggagccttggggacagctgtccctgggagaagtggccactgtgcagtaataggctgagagtagggttggctgaagaacagggttgaaggggctggcgactggccctgagggccccccactctggtgaccggtccctgggcccctgctgctagcaggggcagcctgctgtctgcgccaaaggacatgcaaccccaccgcctccggggcgccccatcgatccctggccccactccccagaatcagtcccgggccttcatgggcgcgtccttcaggaagcctccgccacgtgtaccagggctggggcccggcggagctggggacgggacggctggggaggaaggtgagcgcgagctggctgggtctgggagatcccaaagctggtagcggatgggcttgcaacgcttctgggcggggacagccaagggtgggcagcaggctgcgacccctgccccagctcggccaggggtcgtgggctgggggtccgccaagcccgggctccgaaggggttccgggagagaaggagttccgagtccccttgagccgggaaaggtggcgctcagaagagcgcgggaaggggcgcccaggctcagagggaacgagctcggacgcggggcacgctccctggcagctcccaccggcccggcctgactcccccgagcccccggccccggcgccaactgctggccggggcgggggcgtggtccgggggttccggcaggcccctgggcgcgcgtggcgcggcgcgaccctcacctgcgatgtgctggcgccgggcgtcgtccaggtgcgtggacagcacgtcccccatggccaggaggtgtcgcggcccgatccggccgacgccgccgctgttgcccgcgctgctcaggcggacgccgctggcgccatggagcccggcccgccctgcttcccccgctcccgccgctcccgccgctcccgccgcccggctgcggcttccgctccggctccgctcccggtcgggccccgtccctccagccggccgccttggccccctccctgccctcggccctgcaccccggcgccccgctccgccccaccagaccacgcccccgcaggccaaccccgccccctccccgcccgctgccctgcgc

SEQ ID NO: 53148 - DNA, 815 bp, Homo sapiens
gcacccccctgcgccccacccagcccctccagggcccgccccgtatgccccgccccctccgctgcctccggcgggcggggcacaggggcggtggacgccgggaccgccctggagaaggagacaaagagaaggtcccagaaagggagaccgcggagagactgcgaagagcgcacccgccctgtacctaagcagagaaagagacggggctggtggggacatctgaaaaactgggggtgctctgggggactccagcctgagtgtcacccccctcccctccccaaccttgcccgcgcgggaaaagaatcgcgccgaggaggatgtggggcactggcaggggacgcctggacctacgggccggaattcggcgttcgccccctcctctaccctgaacagtgccccctgcccccccaagtcccgcccgccactgcccgcgctcaggaagttccctggccttgattcgacctgccccagaaggtgtgcccgctggtcttgcacaacagctataggaagggggtggggaaggctcgggcccgaaggcacccccgccccagtgccaggcgggcttgcctcaggctcagcatatgggcatttcactcgggaggcggcttgggggacagagcaaatcagaaaaggaaaaagcagtagcactttacagtttgcaaaagactaccagaatcaaaacccggagaccgacaggcaccagcctatggggctgggcatgggtgggtcgcagtgccaggggaatgtgtttcagtttcaggacctcccaagctggcaggggagacagtcaggttaaccagtgggatccccagatc

SEQ ID NO: 53149 - DNA, 580 bp, Homo sapiens
cccggccatggctgagatttttttttactaatcactttgaaggttcatgagtctttgcttagagattttctggctccttcactttttggctccaaaccttataaaacagggatataaaataaaaaatgggagtctctcttgaaagagaaagtaaatagtcatttctgtaaccctacccagtatctttatggacccgaggttaggatttggtttctcggatactaggcatttatcatcaggcactctctcggatattggcagtaacccaggttttgtatgttacagcgttggacatttgagtcttatgcaatctttgggtgtgctcagtaggccgatgtaatcaaatcattgttaacccatctctacacgttttaaagcttgtgacaactccaaacaattagccctcacccttttttctcactacccattacccaaaaatcaaacctaaatagagatgttctcagattataaccaggctaattagttgtcattcaacagttacagggagtgatacccagtgcttgccctgtggctgacaatttgagatctctattttggtctctcccacttcccacaaata

SEQ ID NO: 53150 - DNA, 501 bp, Homo sapiens
tttagtagagatagggtttcaccatgtttgccagactggtctcgaactcatgacctcaagtcatccgccagcttccgcctcccaaagtgctggcattataggtgtgaaccaccgcgcccggccgaccaaggacaacttcttggtgtttcacagaagccaaaatgcccaaggaacccctggcgctctggcaagggtgggactccacccggagttgccgccagggcgccttctgcccggccgcctgcactcccctcaaccaacgcggaaccgacactcgaggccgaaacactgtgagcaaggaaaaggccgacacccaacaccggtcacgcggcggatcagacgcggcctcgggactgggcttggggaggccgggcttccggggctagtaagcgtctactagccgggctgtttagggattggtcgcctctggccctggaggcgggggttcctggagtaagacggttgctgattggctggctttccgaggcggggttgtgaagc

SEQ ID NO: 53151 - DNA, 1102 bp, Homo sapiens
tggcccccgcgccccaacccccacccccttggcccgcccgcccacccctggcgctctcaactcaccagcccgggccacgctgcgcccgttggcgttcataagccgccgtggccggagcaggaccagttgggcatcccccagcggggccagggcgaggtcggcggcacagtgccggtcgcgcgtccaactctccgccacacccagccgccgcgccagctgccccagcaccgccatgcccacgctgtgtcgcgtgccgggcagtccgggattccccaggccagccacctgcgggcggcaccagggaaactgaggcccaacaactctcgccacccccgatctcacagcgtcccgtgggccccaacgcagaggagcggaaacgcagagcaacgctgcagtggggaaggggcgcgaagaaggggcccagaaacccgacccctgagaactccagaaggctgggcaggcagggcgccctagtgcaggaacggagcttcaagaagtttggagcccgtcgagcactgaactcaccagttaagaaaacagagcagcaatttgggggcactcggctcccgggacataatggccgaactgaagctagggaccgggagcccctacgtcgccgccccacgccactcaccatccaccgcttccccggggggcgaggctccaaaacacatcggctcatggctctactcagccgctgtccggcgcccaaaaagccgcccggcctcatgctgcccccattcactccgacaccgccccctgacgtcatcaccccgcagcagccaatcgtgttgccaactgtttggcgtccaccgccaacgtccaatccgggccgggctacgtggccgccatgcttctgaggggcggaagcggcgaggcggtggccgagtccgggaacccaggcgccttcagtagcgcggcgtcacagtgtcccttcgggacttgtgtgggacgctcggagctcttgcttgaccttcggttgggaggccttgttatgccccccgctatggccctgacttgcggcgaaaatctggcaagtcctttccccgctgtaggcctcaacctctccagctaataaaagttttctacctccctccggctc

SEQ ID NO: 53152 - DNA, 1376 bp, Homo sapiens
aaagtggtgcacgcgggggctgcggaggccgccctggaagaggtagtgcgccagcagggagctgacataggatttgccggtgccggtccagccgtgcagggagaggaccagcggcttggtgggggctgggtcccgcacaaaggccttcagcgccttcaccaccagcgccttggccagatgctggccggccaggtgctgagccaggtcacactccagacctagggccacaggaggatggtgaggacacatcccaccgaggcagaggttcaaggagaacatcatgtctggaacctggtctgggactcctgtgtccttacgtttgtccaagctgcctatgcacatggcacgcaaaccttggggtctgtggcggaaaagagccaccttcgggcctgattcagctcggcagcgcccccaccaggcggtcctctagattgcactcagctctaaatgcgagctgtcaacggggtcagccgcagaccccgcccatccccaaggcgcactgcacttctcctttgacggccaggccattccggggaggcccaagaacttccaccaagggttctgctggctgaggcctctctccaggttggcagggcctcctggacctcaacgggtaccctccaccctcccaagtctgcgggccccgcccctcggtcccaccctctgggtcctcagcttctctggccggcgccagccgggctcccagggctcccagcgctcccgcgtctgcccgcgtccgcccgcccctcgctccgggctccctggcgcctcacccggcaagtcgggccggaagtcgcattcgcaaaaggcgcccaaggtgcagcgcagggaagccaggtcccaggcggcggccgcggccgagaccagcccgagcagcccgaggagcgagccccagggccggcagccgcgcgtcgcagccgccatccgggtgaggcccgagctcgttgtggggcagtcaactgcctcgcccgggaactgcaactcccggcgtgcaccgctccgcagcagccacgcccatcgcctacaactcccgacgctcctctccccgcctccaaggcccgcccgtcgttccgcagcaggaccagaaggtggcctccagggggaacccgcgaaccgtccaatccgggacggcgggccgcgtttccatggccacggtaactaggggaccatcgtagtggctcagaaagaataaataaaggatcacgaccacaaagggcgacgtaacaattacagcaaaaacttgtgcggaaccttacaccttgcaaagcgccttttccatgctccttttttcttctatatgacaaaagtgccctcactaacagcttttggtgagcacttactctgtgccattagtgctaagtgcctatataccttat

SEQ ID NO: 53153 - DNA, 1365 bp, Homo sapiens
tccactgcagtcctggaagctgaggtgcaggagggaacgggcctggctgaggtccgggagagagccccaagggctcctgactcctgggacaaaccctttctttcggattcccccaactgaacccactgcagccctggcccagccccaagggctgagcctggacatgaacagggctgacacagctgccagcaggaacagtgagctcagggaaagtagcttgcacagagctcagccaggctgtcatcactgtccatgctgggagtctttgcaaccccagggagggctgcagcctgtccaaggtcacgcaacaaggaagtacctttgccctcgttgaggctcttgagaaaaggcttgagcttcttctcgtacaggatggcaccctctgtgtgtcgctgccgcagggtcacccatgtctgctccagccgagaaatctggggaggccaaactgtgagagaccagccaggcagagggcctgcaggggccaccctgctgccctgctgagtggacacccagatgtgggatcgttattattattatggccatccttcatgtaccagggacagtgatgactacttttcatgtctaccatgaagctctcacaacccattttacagattagggaactaaggctcagagacaggaatgacttgcccaaggttattctgaaaaaaagtggcagagctgggtgggagttgaacgcaggacactgcctctgggaacttgttgttcttatttatttattttttattattttgtttttgagacggagtctcattctgtcacccaggctggagtgcagtggcgcaatctcggctcactgcaaactccgcctcctggcttcacgcgattctcctgcctcagcctgccgagtagctgagactacagacatgtgtcaccacgcccggctaatttgtttgtatttttagtagagacggggtttcaccatgttggccaagatgatctcaatctcctgaccttgtgctccacccaccttggcctcccaaagtgctgggattacaggcgtgagctaccgcgcctggctgttgttatttattagtcataggagaggcaggctcagctctgaagtcagccagacctggttcaagtcctaattctttcagcctctgaccgtatgaccttaggcaaggactgctctgtctcaaacactccatttgtaaaatgtggatgctaaaggcacctacttcatgagatggttctgagaaatcagtgctggttaagcacttagtatagcacctagcctataggaaatactcactaaatggttgccactttcttcttattctttttttttttttttttgagacggagtctcactctgttgcccagggtggagtgcagtggcgc

SEQ ID NO: 53154 - DNA, 2548 bp, Homo sapiens
gcataaggacagcaggcctccccactgctatcctcctggcccaacagcgaatagcgtgagtcaagagaatcccctcactcagacacccaggttcgggtcccaactttgtcgccgtgtgaccttgggcaaatgacctcacctctgagcctcaacgtcttcttctgcaaaatgggttagtgatcctgactatggggctgttgattcaggattcggcgggaacgcccagcacttcctgagtacacaagagtgctgagaaaatggtagctgttttttgcgattactgactcggggcccgaccagctctggcacgactcagcggaggtgggagtcctgcgggtcccatccctgcctcccggagagccagaccccagcgatagaaggcccgggcgttgcttgctcgtcgccgctagtgccgccgcgccccctggcggccgtcggttgccatgtcaacggagggtggcggggaccgggggaggcggaggcgggggccgttctctcctcccagggccggaggacgctccctccgcgcctcccgccttcgcctctgtgggggcactccgagccggggaggaaggggctttccgctgcagccgacatgtgggggtaaactgaggcacgcggcagggcgcccgcagccaggtgccgagcgcggggccccacctccgaaggcggaggaggggccgcgggcggtgacgcgccgagggcggccggcggacagcgagcgggcgggcggtggcggcggcggcaggtgcggccgcggagggtgggagggaggagggcgggggcgggcggaggaggaggggagggcgaggccgggcacctccccctttataacgcgccccctcctgggctctcgggccgtctcctagtcggctcttcccgtctcgccccctcgcccggccgccccgggcccgggtccggccagggagctcccaggccgcggctcgggggctgaccccccgcccgccgccccgcgcagcccggcggaggcggcgccgtcggaggaggaggagcagggcactgcggctggccccggatcgggcgccagagcggcagcagcttcggcagcagcggcggcccgggcccatgcagcgggacgcgccaccccgagccccagctccggcgccccggctccccgcgcccccgatcggggccgccgctagtagtggcggcggcggaggcgggggcagcggcggcggcggcggaggcgcctctgcagctccggctccccctggcctctcgggaactacaagtcccagggggcctggcggtgggcggcgggcggaagaggcggggtcggcgccgcgaggccggaagtggccgtggaggcggaagtggcgcggccgcggaggggcctggagtgcggcggcggcgggacccggagcaggagcggcggcagcagcgactgggggcggcggcggcgcgttggaggcggccatggcaaagcagtacgactcggtggagtgccctttttgtgatgaagtttccaaatacgagaagctcgccaagatcggccaaggcaccttcgggtaaggctgggcccctcggggccgggagccctgggcctgcacccctagggccgacgtcgggatgcccgggccccccccgagttggtagagaagtcgtctgtccccgggcttgcctgctggtctctaggccgcgccgcaccccgccccggcctgacggagccggctggtggggaggagcctgaggcccgtggtgggggcggggaggggctgcagagaggcgcccgtgaggggagcgggatctctccaagggacgcccaagtgaggagaagggactgagggaaggaagcagaggctccgaacgagacaggctgccgggtggcggggtagccgcgtgccctgggtacctagcccagccccgcccgggaatctctttgctgctgcccctcctcctgtagtgggggaggggcgggccctgcggaaatggcctgatgagttctcgggtctccctttccgcctgcagggaggtgttcaaggccaggcaccgcaagaccggccagaaggtggctctgaagaaggtgctgatggaaaacgagaaggagggggtgagtacggatcgggcgtgcgggccggccggctaactgcccgggaccccgggtcggttttccaccctgctgcttctgggagtctcaggttgagatttaatttttttgtagtagttcagaaatttccagggaatgtggcttccaccctaaaactaaatgtttcattcttaggcagttatgggtgaggccaggagggggagttgatgcatgcatcgtgtgcactttatttcacgaagttaggaagcctttaaacacctttttttagtgttaaatttcgcttaatgtaaaagaaagattatatatgcatgctttttgaaaggtgtctgatactcaattatttaatgtatttaaaaggagcggtcccttctccaccccatcttagctctagtacaacttcccataaaccttcttttgcgtaatgtgcattagcaaggacatttttaaatcatcatgtttgttgccaacgaaacagccata

SEQ ID NO: 53155 - DNA, 1933 bp, Homo sapiens
ggggccagagctgggaggaggacccaggcttgggctggtcttggctcccactcccgggtggatgtcactaaaggacccactcttgcccttcctgcagatcctgcatagggacatgaaggctgctaatgtgcttatcactcgtgatggggtcctgaagctggcagactttgggctggcccgggccttcagcctggccaagaacagccagcccaaccgctacaccaaccgtgtggtgacactctggtaccggcccccggagctgttgctcggtgaggactcccgagcgggccaaggggggtgagggccaggcatctacctggccccttccccccaactgccagggcttcttgagctgccggccctggggcattgagcctcaggaggccctcgggctcaaggggccctcctggtgcgctcttcttcccaggggagcgggactacggcccccccattgacctgtggggtgctgggtgcatcatggcagagatgtggacccgcagccccatcatgcagggcaacacggagcagcaccaactcgccctcatcagtcagctctgcggctccatcacccctgaggtacggggccccggtccccacggggtgcagagatcgaggtcccccggcagaggaggagtggggagtagaatggaaggagcgctcctctctggaagggaggctggtttggtgacagggcctgtcttggggtggggagtgtgtgggagaaaaaaacacctgacacaggctgtgcgccagtctcggttccatcagctgttctgtggccttgggcagaacatctgagtcagcgctgggtttctcttctgtgaaccagaaatgtgacgtgtatcagggttggagcccatattccaggtgatgtgggtggaaggacctggcacgtggtatgtgccaatccatagcgggcactgcttctgggaggggtcgagtagcagtctgggagcctccgagtggagcaggtattttagtccttttaggcctttatgaagggataagccacgcacctcctgaccggactccatattctctcaacgccccctccctcccaggtgtggccaaacgtggacaactatgagctgtacgaaaagctggagctggtcaagggccagaagcggaaggtgaaggacaggctgaaggcctatgtgcgtgacccatacgcactggacctcatcgacaagctgctggtgctggaccctgcccagcgcatcgacagcgatgacgccctcaaccacgacttcttctggtccgaccccatgccctccgacctcaagggcatgctctccacccacctgacgtccatgttcgagtacttggcaccaccgcgccggaagggcagccagatcacccagcagtccaccaaccagagtcgcaatcccgccaccaccaaccagacggagtttgagcgcgtcttctgagggccggcgcttgccactagggctcttgtgttttttttcttctgctatgtgacttgcatcgtggagacagggcatttgagtttatatctctcatgcatattttatttaatccccaccctgggctctgggagcagcccgctgagtggactggagtggagcattggctgagagaccaggagggcactggagctgtcttgtccttgctggttttctggatggttcccagagggtttccatggggtaggaggatgggctcgcccaccagtgactttttctaagagctcccggcgtggtggaagaggggacaggtccctcacccacccacaatcctattctcgggctgagaaccctgcgtggggacagggctcgcctcaggaatgggctgtttttggcctaaccctcagaaacactggggctggcacaaactcttggtttcttcaacaggagaattttactgtgtttcttttggttccattgtttggagacattcctgggcacagtttggt

SEQ ID NO: 53156 - DNA, 2215 bp, Homo sapiens
agttccatggaaaacaacaaagtggggtaaggggaaaagtagtggggagctgagggggtcagcatgacatggaagcagaaatcaagagacaaggctttgtggggtgtgggtgtgggtccaagtgccaagggccagggagctttgtagagtgtgtggttatgtttctcagtgtttcctcatagttggttaactaatacatttgttcatgcaattaagccatcttttcattttctaacatttttaaaaatacatatattttttagagatgggggtctcgctttgttgcctaggctggtctccagctcctcagctcaagggatcctcctgccttggcctcccaaagtgctgggattataggtgtgagccaccaggcccagccaattaagctgcattttaaaacaaccaagacagaccttaaaccttggagctgctgacccaagctcatcctcacccctcttccccagagtctaccccagggaggaacagggactggccagtcaggtgagggttctctagctttggcctcaagctctggtgtgacatgggtgctgttttcacctgtggagggaggtatgtcgcctggaataaaggctcgccagagggcagggccttgtgcggcttttctcagcacctagatagtgcctggcaccatgttctcagcacctagatagtgcctggcacacatgagtctctgggatacagtggagtgagtgcagtgaacagatggctgaggaggctgtgtagatgggaaaggccttcgccagctcgcggggatgagcttaggccgggggactgagttctgtgtcctggctttttgtttgttttttaagagcctggagtcacatcctgccctttttttttttttaaaggaaaaatggtggttttattcatttgtacttaaaccagccaaagtagtactgatgtgattatgattcagcaaatacaagatctctttccacaaatattagcataacaatcaaaatagggactatagtaaaacagccaaaaagggctgagggaatcaagtatgttacagtttaactccacctcagtataatttttattttattatttttttttaagacagagtctggctctgtcgcccaggctggattgcagtggcgtgatctcggctcactacaacctcctcctcctggggtcaagtgattttcctgcctcagcctcccgaatagttgggattacaggtgcctgccacccactcctggctacctggcttctttttgcccaagtgatttggtgaaacaaagcctcttcctccagcggacttggactcttaagtcaggggtgtcgtgtgtccacgctgtactttgtatacgcctctccctggccaggatctcaccctggcagggcaagggcaaaacgggccctaactgtaaggtgggtgggctgggataaggaggcctggaagaggccagataaagccagccccaaggtctggaagcctcccaagcatagccccctcccctcccacccacctgcctgtctgcgtgcttacctttaacctccacccagttgttacttaactcgcggtaaggttctgaccagtcccatgctccactccagaaacccgccagggaggctaagtccctgggctgaccctaggatgagggcaggaacctatcaggtaaaacctttctccctgcacactggaaaggccagaacttctgcccccagtcctgtcaggggaggggaggccttggcgtctcccaaatcacgttttctgggtcaacaagcctcacagctctagttaaatcctgggcagagctggcttggcagagatgcccacacctgtgcgtcacttcgtgccctacccagaaggggagcaggaaaccaagggatgaaaggtgctgggtccctggctgcctccttgcccatggctgagaagttctggtgggaaggaaccatggagggcccatctggatatccttcctcagctaaaactgcctccttccaggtaggagaacccggtgaccaggcaggtggcctttcctgtctaagcctcagtttcttgggggcgatgctgccagcccctcacagggctcagcgcagcacccagcatgcttggagggtgagaacaaattgaaaaaagatcccacatttttttcctctgaaaattttggtaagacggccaggtgcggtggctcatgcctgtaatcccagctcttggggatgccaaggctggtggattatgagg

SEQ ID NO: 53157 - DNA, 1599 bp, Homo sapiens
gtcaggagatcgagaccatcctggctaacacggtaaaacccggtctctactaaaaatacaaaaaaatagccgggcgtggtggcaggcacctgtagtcccagctactcggaggctgaggcaggagaatggcatgaacccgggaggcggagcttgcagtgagctgagatcacgccactgcaccccagcctgggctacagagcaagactccgtctcaaaaaaaaaaaaaaaaaaaaaaaaaaaaaaaatcctcatcctcctaaagaggagactaggggtcagacaggatcacagagggaagtgtcttgcccatggtcacacagcagttcgacagcagagagggccagggtgaccagacaggtggtggtaaggtgcaaggaccaacattaaagtcagtaatctgggtttgaatcggctttgccacgtccatgtgcctgctgtattcctgggtgagttgattaacctctctgagcttccatttttccacctgtaaaatagggatcatctgtaattcacacaattttcatgagattccaggtgccaaacacagggataagtgcttaataaatgtttatttgttttgagacagcgtcttactctgtcactctgttgcccaggctgtagcgcagtggcgccatcttggctcactgcaacctccgcctccctggttcaagggattctcctgcttcagcctcccaagtagtgggactaccggagtgtgtcaccaggcccaactaatttttgtaattttagtagagatgcggtttcactgttgtggccaggctggtctgaaactcctggcctcaagcgactgacccaccgtggcttcccaaagtgctgggattacaggtgtgagccactgctcccagccgagtgcctacttaataaatgttaacaagaaaaacccaccccaaaaaaggaaagaggacaaacacaaggcaagggtgtttcagcagaggcaaacatcgcgagcaaaagcttgcaggtgggagaggccaaggccagttgctgaagtccttgccagctggcagggactgtgccctgtaagtgggggatgagtccagaggcaggcagggaccaggccacagtgaacttgtgggttttattaatcccaagtgtatgacggggcaggagagagtgtagtatcccaggcagatctgagttcagaaagacctgacccactctgtctgtctctctctcagccttagcctgccactctacagtggttaccatctgacctgatcagggtttgtaaatctgtatattcctttgtgaatttctttatttgctgccctctcacccccaggactgggtgctctgtgagcagtaccttgtcttctgttctccacagtgaccccagcatctagtccagggtctggcagagataatttcttccaatgaataagtgaatgaatgacatcgtttccctgtgggaaggtggggattgaggcagagttcctcagtctgctcctaccccagcccctcctcctgtccacacgcacctgcagatctgcccgcatgagtgggcactggcccacttactggttcccctgccccctttgttttctattgttcttcctggagagagagaacgcagtgcct

SEQ ID NO: 53158 - DNA, 484 bp, Homo sapiens
gggtgtgatggcacacacctgtagtcccagctacttgggaggctgaggcaggagaattgcttaaacctgggaggtgcaggttgcagtgagccaagatggcgccactgcactccagcctgggtgacagagcaaaactccatctcaaaaaaaaaaaaaaaaaagtgtttgctaagtaaatgtcttaaaaaaataataagcttgtcattgagtaagaaagttaagttgcagccaggcatggtgactcatgcctgtgattccagcactttggtaggcccaggtgagaggattgcttgagggcaggagtttaaggctgcagtgagctatgattgtgccactgcactccagcttgagttatagattgggaccctgtctctaaaaataaacatttttgaaaagctaagatgcaaaaatattgtcacctgcattggcaagaccctatagatgtctaggtgtgtctggtttcatgagcatagaaaactatggg

SEQ ID NO: 53159 - DNA, 2777 bp, Homo sapiens
gtgtgtgaagagcagaagtccagccaatgacagactcttcccaaaacatcacttgcttatttcgaaatcaaacaatttctcataaatattttctcccaatgctgggaagagggagaggggaaggaggtacggaaactccatcaatcatttgaagggctgccttttatcagactgattttccgtagtgggttgtttgcagcttcctcctccccagttctgggcctcagctgtcaaaaggatttcaccatgcaactttttcatgctagcagttggggccaagaagctaatagatgggaaaaagctctgaaaactccaggacgacaaataggtgtcctcctcacagaaaaggattactgccccaccatccccaggtggccctcaaatccgttctctaaacggcagcagctgtttagaggtgtccaccaggtgtccgcagctttgtcatcctatccctgttcggggcagagactgagggctgctgacccggaccggctattttgggacgtgctgcggggggccttgggaggttggtgacgaaaggagtgcgtgcccgctaagggaggggacgccccggagcgtacactcataaacctggtcccgaggcctgcccctcaccaggatggtgcacgcggaaggggcggctttttagtggcgcaagggggctggtcggtggtagtttggggcggtgctgattgatggcgggcggggcggggcggtgctgattggcggggggggcggggtgaggcgacgctgcgctgattggctgggggcggggcggggcgtctcccgcccgggcctagagcgctgccgggggcgccgggactatgtcgcgggcgcggagccacctgcgcgccgctctattcctggcagcggcgtctgcgcgcggcataacgacccaggtcgcggcgcggcggggcttgagcgcgtggccggtgccgcaggagccgagcatggagtaccaggtatcaggcgggccagcgggccagcgggcctgggcgcgacgacacgtgggcctgcgctgagccgcagaacatccgggctccgctagccgagagggtatcgggagccctggactgggggactcggggggcggaacatcctggaggctgggggtggggacagggaccaggaagttgggcccgggccgccggggctgggaattcggagactatagcgtccccgccccgggttgggaagtgggaagtggcacaggagctaggatccagaagcccagaggctcagcggtgcttctggagttccagtgatcccggagtctgaaccggcagtgagagtggggaaagagggtagggaagagactcaggaattcaggcttgaaagatccaggagtattgatctgggggtgggctgtccaggattcagaagattggggatccaagtgcctggatttgggggagaggcaggaatcaggggtagtggagggccccagaacctggaaaatagaaaatgtccgcgggcgctgtgtcaagagccggttgccctagaccagaccctgatgccagtgaggcgggtggcactggtttgatgagggtggagcctccaaccagccttgaggtcctgagggtgggaggcacggaatatgaggcctaaggggaatgaaatagcacccccactcccacttccattgtgaaccctcctgaagccgtacctacctgccttcctggctgagtgacccctggcacacccctcctccctctgagttgctcctctgtgggttggaatgtggaaccccagagtcatgagggttggggtggagcttcggggaactccagaattcgaataccccagccttctgtagttctggccccgctctggcagggagcaatatagcaatggaccccattggagagaatgagggcaaaggcccaggagtgaagtcgggggagcctgggcaggaagcaaggctagcccgttagtcatgccaccttctttgtgtagcactccctgggtggggctgaactgccccagactcccatttttgccagagctggaaagatgccatactctctgttgcttaacctacaggctaggctaacagtgctggcatggcaggcgggcctggtactggccttgttgccctggcttggccactggtctgctggctgtctctgtgcctgtggaccctgagtgagccttaacctactatctgggcactgtggttgccaggatgccgtgcgcatgctcaataccctgcagaccaatgccggctacctggagcaggtgaagcgccagcggggtgaccctcagacacagttggaagccatggaactgtacctggcacggagtgggctgcaggtaaggtagagagggcctgtgaccacctcccacccccatttgtgattcccgtagctgaggcagggaccttgtctgtctgtcccaggtggaggacttggaccggctgaacatcatccacgtcactgggacgaaggggaaggtgaggggcaggaccctggggtagggggtctattaagtggctggtggagtagagcctgcccagacaatcccttttctttcaagggctccacctgtgccttcacggaatgtatcctccgaagctatggcctgaagacgggattctttaggtactggcttgtggggggatgtggtgtctgtgtcccaatggaccctggggggctatggaaccagccagtgcttcaggaccagggtcacccccaggaggtcagctgcatgtctctctgcccagtgtttattcattcaataaacattcagttagcacttaccatattggcccatgttta

SEQ ID NO: 53160 - DNA, 748 bp, Homo sapiens
tagataccttctctgtagggattcaacaagggggcaaagtgatgggcatcttgggtgaggaacccagcccgcggaatgggaaagggctgggacactggctttacagctgggttgggaaagggatctgatccttgagtcagcccctgtaaaatggggatacagcagggcacgacgtctgttggtcgcctggcactgggtcggccaccgaggccgcgccttggcctctttgtcccctctggccaccggccccagggagcccgctcgggaagcagcgcggccccaggaggaaggcggcgcggccgaggccagagccggcggctactgcgaccttccggctggcgggcgcgtttcatgttcctgcctcaccctgggctgcacggactcagatcgggaagggggaggatccatggtaaaggccacgccccctctgggacctcgattccccttctgggcggccgagggatgggctgcaaggagtcaaatcctcttggccctggtggttggatttggccccctccctcctaggactttggcatgctggcttggtcatgtctgactgtctctgtgctgtccctgtcaccagtccggaagcttctcccctgtcccccacgcccaacttcgctcaagcctgcctccctcccgcagtgggcatgtttctttctatgcctctctcccctttgctatctttgctctcccccgggctctccccttcctaccctctgctttctctgttgtaaacaacagctgc

SEQ ID NO: 53161 - DNA, 1882 bp, Homo sapiens
tcagcagtaagagggcaggcacaatccctgctcagcctgtctgaccctccccaacccccaatcctgccccttcagcaagcctgcctctaatatttgcaaggcctgagacaagaatacaaatggcagcctctggccccagtgctttctccttctcatcactgtggttctgacagccagcaagggtgctcatgtgtccacatgtggacagctcagcccggatacccaaactccaccatgcctgcctccccaagtagccaactcaaccatccttcaggtctgggggagctcacatagccatgcagtgctcccctggaggatggaacaggaaagatccctgcagccctgagaggaggctcagagccatttgggattttggggtcctgggtacccagagcatcatctagaagggaggggtgcaggtttcaggggggtacatccctttggccccacagagtccccaccctgggagagggctgccattggcagagggccagagggagactgcttcccccaagcccaggcaggggtcccctttgcccaagtctgagggctgtactgccttccatggcctcccactgcctcccaggacagtctgggggagctaaggtccctcccggctctctctctctgcctgagtggtgttgcctgcccctctggtcaagagtgagtcagtgctggggcctgacaggctgtgtctgttcaggggtgggtggggtctcagctgccccaagtttgcccaggagtgggtgaatcagtgctgacccagctctgccctggcctggcagcctgtgcatttgttaggaggatagcagatcggcccagtcagcctgacgggaattgctgagacaccaggctggtttcctgtctccgagggtcaggatgtgaccctgggccccctcccggaatccaggctccggcctgcccttcagggacccagcgagatccagcccctgcccagcggggctgtctgcagacctgcccagcacacgcactgagcggcacttccccaaggctctcggctgccaccgcccatctaccacccacccacaggaaatctgaggattctgagggatggacgggaaagccacttctctgtgccagagatcgaagaagccggccataggtcaggagggatccggctggctgctaaaagccaccacccccactaccacgtccagccccatgccgctaggcctttgctgtgcactggcttctgcctggaatgccctctaccctgctcttgggctagacaccaggggccttttccctaacgcccctccctcctctaccttcagtgctcatcaccccatcacctgcggccccctgaagccccatttgctgatcccaccactcataccagggctgctgatgccacctctgcctccctggctctaccttctgtctgcatcatcaacacaggctgggcacagagtggcacctggtgagggctgcgcaatggggactatgagctctagaccccactcttaggggatgcctggggaggaaggtgcctcccagggaaaccacagggtcctcagtggtcacagcagtaggggctggcagcatcatgggctcaaccctcagagcagggagacaagaagcagcaggaggaggaaggcccagctccatgaggctggacctcagcttgccctgctgaaaatgaattcacagccctgccccattaatcttttttttgttgttgttttgtttttgagacagggtcttgctctgtcgctcaggctggagtgcagtggtgcgaactcggctcactgcaatctccacctcccgggttcaaacgattctcttgcctcagcctctctaatagctgggattacaggcacctgccaccacgcctggctaatttttgtatttttagtagaga

SEQ ID NO: 53162 - DNA, 1725 bp, Homo sapiens
tatgactggatggtctgctaaggggcctgtggggccgaagcccagagggacggtgacttaaccccaatcacaagacaaggccaaggcaagcccaggtctcccagcttctgacccaacgtagtcggttcccagtgggtggcaactgactagggttcgaatcccagctccatcactcagctgtgtgaccttgggcagttggtgtcccctctctgggcctgtcctgctgctgctgaggagtaccaggcggccactgagcagtgctgtgggaaggccccaagcgctggccctggtcaggaggctagggcaagctctgagcatccagggggtgttctccaatgcacccagcactagaagtggagtgacacgatagccctacggagcacagaggctgcccctgtccaggtcctctggggcagggagccaggccacagctctccctctctgggcccaagctgggacatgccaagggcagtgacctggagccccgggagtgccagccagaacaaaggggtgactatctcggaggctggaaggggctgcaacacacacaaacacacacgcacacacacgcacggatccacaaaggcacaggcagcgaggcacagatccccagcgcccggggaacacagccacgcaaacacacacggatcacaaccacggatacacagccgcacagcccccagggagccccgcaccagcacgcccccgccctcccccggtgccgctgcccctccccgcagaggcgcccccccagacacgcgcgggcacgcactgacctggggaggggtgcgggtgggcgccggggccagtgcgtgccctgcccgtcctcgcggcggccggcaaaggcgactatttataaggctgtcagcgcgcggcatgccgggagccggcgttcccgaaggcagggagggcgggaaggagggagggagagcggaccagggaccgggaagcggggcgggaccgagcccgagcccgggtgcgcggcgacaccgcacccggcaccgtgtgccccgcaccgtggacccccaggtggctgtgcccacacacgcgaactacactttacagtttgccaagagttttccattgcgataccccgactgtgctcaaggtacactccagggtacaaggccaggctttccctatgatagctggagaaactgaggctcagagaagagcggctctttccgcaaaatcccacagcgcattggtgccagagagaggccagaccagggagcgagagggctgaggcatcgactcaggggctttgctggccacagtccccaagcccgccctcagagcctgcccagaggccctggccgagacccacctgggactcctcttcccctgttgggagggacccttcgagctcctctgggactggaacccgccaggaccccaaagaccacccagtaaggtagaagattatagaaaaccagccctgctcccctggagttgcccgggacattcagaaggctgtggatagccagagaggggatttgcggtcttgataagaagaatagctcccataatgagcactcactgtgctaagcagcagactccagccgcatctgtgaatccttagacacagcagagaacgggaggcgagcatgtcaaataccttgcgggaggttccctggtagaaagccacgtgtttatccagcgttttgcagggagactggcacatagtagtaggtgctcagtgatgtagccgggcagggatgggag

SEQ ID NO: 53163 - DNA, 476 bp, Homo sapiens
ggcctttggaagacctggcagtgaggaggccggcccagctctgctccgcacaccccaatctcttcctctcccacaaccaaaacccagctcctttccagggttccccacctgtgaaagggaaaatgtactgtgtccagcctacctccagcagacaggccgggggcagggcgggcaggagtgcagagggaagaaactggggcttagggggccctcctcagctccgtcccctgctccaggggcctctcagttcctgtattctctgagccctttgacctagccgctgtttactcctacacggccaccaggaatagccagagaacctcgggccagaggaggcttggcacacacacctcgctcctgattggttagatcatggccccgccccctctccaaccccgccccctccccgtgggagcgcccctcatccggagctcggcttcgggtttctccagcggctgcccctcactgccagtcag

SEQ ID NO: 53164 - DNA, 1528 bp, Homo sapiens
gtctcaaaaacaaaaacaaaaataaataaataaaataaaataaaagaaagaaagaaagaaaagaaagtgctcccacaatgccaacagctgttagtcttgtggttaatcactgttcaaggcccgcctctccagtgtgtcagtgaaacactcctcccctgaccccagtgcagcgactttcccggaatatcaaggaatgtgtgggaatgcgttctaagcatcacccacgcactgaatccaggcaatgcatggtaggagctcttgttgcccattttacagataaggagactgaggttcagagaggcaaagcgccttgcggggccgcccagagccggctccagagccttgtttacagggagctgcccagggctgagcctgacttcgtctccctggaggatccctctcggctggaacgggtcagaggccatggagtgtgtgcccaggacgtggctcggcacaggcaccagggcgggggtctaggggtgccggcctgttggggagcggcttgctcacgctggggaggcggcagccccgagcgctgggccaggagcatggactcagcccaaggctggacgtgcaggcgagctgagcgggagccgagggtgggggccacaccctgccctctgtttgggggctttccttcttccagccccgggagtcctcccgcagatcgggacgcccccacgaacccgcgtgggaggagggctccagggagaagggggaggggggctcctaaatccaagacgatgcgggacgctgagcccgtgcgtccacctggtggggggctcacccagcgcgcgcctcgcctcatccccctccccaactcctgcactccgggggtccggagccctaaccccagctgggaagaaaagagaggcaggaccgctgacggggtagtcggcggcaagaggcccagcggaccccgcgacagaccctgggcgcgaggaccggaacctcggggcgcggctaccaagggggaaggggtctaggggtgccgccgggggacccgcatccatccccatccccggcgattagcaatctcctctcccggcgccctccgccccagcccccgcctccgcccccgcccccgcggcctgctcccgcgcggcgcctgctcacctccggcggggagcgcccggccccccgcggcccccgagccccctcacatggcgccgggagccgagcgccggggtccgcgctcctcaggccgcccaggcctcgccgcacccgcggcccgccgggtcctagcgccgccgtcacggcccggcccaggcctgggaggtgggcggagcctcggggccgcgggtggctccgcccacgggcggcgcgggcggggaagggaaaggggaggcggacccgggtgccgccgcctggtgagcgcctcggtcaccccactgggcagcccggggtgaccaccaaaatacaacagcctttcggctccctgcagtgtggatcgggcccacttctagctctctttattgccaccatgaccccggatggggaaactgagttccggagcacgctgtgcttg

SEQ ID NO: 53165 - DNA, 883 bp, Homo sapiens
tggggtggagaggctgctgagctgctccgccagtcggggcctctgcgttccctggaagtcctccttcttcccacttaccggagccttcatgctgtcgctgtccctcagtagtctaggggctgctgtctccagggctggggctgggaaggggtgggagccgggcacctgccaagacccagaaactcagagccgggaggggtaaggcaggtggggttctaagctatagggaaaactgaggcaggagagggtacaggccggggtgaaagcacatggcacccgggaatccaaccccttgacgtctccaaacaccggaaggcaatgtccccatcctaaaggagcaggaatcagcgacgtttgcgagacctcctgccaacccaattcccagtgcgcagatggggaggaagaggcagcgaggaggcgcccccagctcaaggtcacccatcaggtctggggcagagagagccagaagcccggaattccaccccatccatcctacctctctacccgggggacgaatggagaggccgggcgagggcaggacgtaggtttttcaccgcccttccagattccactgccgcatctcccggccgaatgctaaccgggcgtgcaggctggggttcgcaggaggctcgcgatccgccgctcggagctccatggcccccgggccgggccgactgggctggaagctgatccgcgcggccagaggcagggggcggggccggggccggggccggcgaggaggggcggagactcgcgcgccgggggcggggcctgcgcgccgcaggcggatcctacgagcgcggcctgcgcgacctggggagggctctgcgcggccgggacggggcgggacgtgaatggctggcggcgaggcctccagctaggg

SEQ ID NO: 53166 - DNA, 1792 bp, Homo sapiens
gcctcccaaagtgctaggattacaggcgtgagccaccacgcccagcccttgtttatgattttttgtgcaaaatgttgaattggccagaaagatcatttcaccatcccaaccacacccacctcctctgcagggagctagcctgggaaccagcttgggctcctgccctggtctccatttcaaactcctttttcctttttctcagaggctcaggcctgggcaggatgccagggtatctgtccccagctcagcaaccttcccagtctaccctgctccaggttcaaagccaaatcacccctgggcctggtgctctaggcctcagtgcctcccctatccaggggctgggaggagggctgctgtagtggccctgccccctaggggcctcctttgagcacaaactctcctgtcactgccactccagcctggacacacatggggagtagtggttcacgctcagtcaccatggcccctcactcacacaaggcagtgggtccccaaagccagagccctttcctctcagtcctcgttcttcaagtttctttcctcataggcccaaccctgagggcacaatggtgagaagttccctatggattcactcactgcccacaatggctggtgaggtgatgattccttccccggagaggcaactccatccttgctagggccacatggagacagggacatgcccaaatggcccgtgctcccagggtagatgaggatcataagtccacagtagaactgtgaccaggaagtcccacagccccagataaagatcttcactttgcttttggcaaaaacctactctgcttaccacaacctacacgatcctacacagtgtgaactccttcagtcaccctccacctgccctggccaccctccgaccgccaatcattactgaagccattcctactgcagggcctctgccctcactgtgtcctctgctggactgcgctagtcatatggtggcttctcttaccattcagctcaagcatcacctcctctgaaaagcccttgccagccaccctacccaacgctgcaccccaatccctcttgcctcaccccgactcagtttttcataatatttgtcacactctgaaattgccctgtgtattaactggttgccttatttatggtccacctgccccacagactctaagctccatgtgggcaaagtcagaccagccatgtgctcaggacacctccagcacctgcacagtgcccggcacacactaggtgctaggtcacgtctatcaatgcatgagttaggagagcctgggtcccatgagttcttggacaaatcactttcctttccagcctgaggtcccggctaggctcacggccagagacccaaaggtggagagagtctgagtcatccttatgtgtgagagcaggactctgtggcgctgactcagccctgtgggatccagatgggtggaaatgtggagtcagactccagttcctgctgcaattccctgccacctccgagtttccctggcccatcacctcctgagtgatgggcgtgacaacactctatgtcacaacttcctgctaaagtaaggacaagaaatttccactcagctcatgccagcacagagaggttgagaaatcaggcaaggtcacccagacgactaggagtgatatcaatatttaaagtacatatattctggtgaggtgcagtggctcatgcctgtgggcccaacactttgggaagatcaaatcaggcggattgctggagcccaggagttcaagatcagcctgggcaatatgatgagaccctgtctctgcaaaataaaat

SEQ ID NO: 53167 - DNA, 1739 bp, Homo sapiens
caacaagttttcccacaagaaaaaaatatcctaaaggccttcacaaatatcactggcgtttgccatgcctaagagtcagcaggctaacccagaaggaacagaactcccccaaaagtcaaagcaagccggaaacagagttataagtgtagcggctaaggatgcaatcttgggccagatccttctcccctagcctcagctatctcatctataaaatgcggtaccactggcatcttcctcatagagttgttctggagagttcaagagatgaggcaggcaatgaagccagcgccgtgcctagagcctatatagtagttgctctggcggtgccagggctcggggaaggtgagcagcggacggggagaatgacataccaagagaatcacccaggcggtgtagtaggtgaagatgatcaggctaacggcgacgaggccgagtcccaccacctggtctgtccccgtggcctggagaaaagggaggtctcagctgacgaagtgaccctctatttcggcgcactaatggaagcggggcgtcgcggcccgatcacggtctaagcttcccattcaacagatggtagagggctgactagggatcagtttctaggctgggagagaatgctaggcctccgcgttgtcgtccgtacaatagtgggggcgggagagcaatccccgttccaagtgcccatgccccagctcctgagcagacccgggaccccacccccagacgcccctatctccggcacacggtgccaatctcaccatttccccgcgcgctcagccacccgagccgcaagccacatccggttccgggtccacgctcttccggctttggactgcggagcacgccgggagtcgtagtccccaggcctgctcgggcccacctcgtcggagacgagcaggaaccgcctcctcttctttgcatatcggcgaagtgtagttctcaagagcattgtggggccggttgctgcccgaatctctctagggaatgggaccgagttggggacccagactccctggccttcatggccacagtcctgtcgccgccccaccaaaagccaatctctaagtatcccagagtcccggggccagagtgggatgggagtgcgggatcggaagttccatttttcagatgggaaaagtgaggctcagagaaaggtagatcccattccgagtcagtggtgaagccgacacggaaaccgggtgccctacttagtctgtaggtgggagaggtgcagagaacgttcactttccagcctagggtgggcgggggagggtctgtccctagcccgcatggatggggaggatttggtggagaggaggcgccctcctcaccatcgcccggcctcccgggccacccttcggatgtcccctcccttccttcaccgactgtctctcgcagcagcccagacacgtttcggaccgggacccacgcacaggcccctccccggtcttggaaggcccttcctctgagaacaaagagatgttgggccagatcatcttccacgcttcttcagctccgagataggaacgcggtcccccaccactcacaggccggctgctcctcacccatccggtctcactgggacgccacgttcctcagggaagccagtcgggaacgttttttttgtttgtttgtttgtttttgagacggagttctatgttatccaggctggtgtcgaactcctgggctcaagcgatcctcccaactcggcctccaaaagtttacaggcgtgagccacggtg

SEQ ID NO: 53168 - DNA, 977 bp, Homo sapiens
tgatcagcaccacgtccagccacttctcagggcctcagtttcctcctctgtataatgggagtaaagcctgcagtgggagttcaattacagaacagaagggaaggggcctggcagtgcctgccatgtgctgggtgcctggtaaatgtttgccagtggaggtgagatgctcccaggtgtttgctggtaattcctttcctggctgcacagctgtcctcacccgtgtgaatcagagaaatttccactgtgacagcaccctccacagcctggttctagccatactgtcctctgcttctggagagggacgtcagcgccccgggccagggcagagtgcactgcccagccggctgagttcctgagctctggtcagtgggaagggccacgccctgtatagcgcctccctcgggtgagaggtgaggcgaaggcatttcccctcccggctgatgaagcccaccctcctgccactgggctaagcctcaggagctgaggaggggaggccaagagtccaccatggagaagagggatggaaggcagagcaggcttattcaaagccagagctgtcttctccctctttgcccagtagaaaagctcttaatactatgtagggctgaactgtctgtgggtacagtgaaaccctggtaacaatgcacatgtccagcagcagggctggctgagtcaaccatcgccagccatgccacgggacactgctgccattagaaagcacatggaaatttgtgataacacaaaaagatgcccagaatggattaagtaaaaaaccaagctgcaaatctgtttatttatttatttatctggaggcagagtctcgctctgtcacccaggctggagtgcagtggcgcaatctcggctctctgtaacctccaccctcccgggtgcaagcaattcttgtgccccagcctcccgagtagctgggattacaggcatgcaccaccacacctggttaattttttttgtatctgtag

SEQ ID NO: 53169 - DNA, 2837 bp, Homo sapiens
tggccgggttagcactcatcttacacacgaaggtgaacctctttcgccaccgcacacagttctcctgtacctcctccctgtgggccagaggcgacaggtgagcacaggcacacacatccgcgccaggggactccatgtggtaccagggacatggcactccccattgggactgaggcggtgggaagctccactttcactctgtgtcacaaaatagctgtgttttcaccacaagaatgtactcgtgtagttgttgtaaaaacaacagtgaaaacgtaataaaaatgagacaaacacaaggcaggggtgaggtgagctagggcagctgtccctccccaggaagcctggcaacctgcagagcctccctctgtacccagtgctgctcccgccaccttgctctgagaccttgggcagttccctgcactgccattacctcctccaaagccaggctctgccaaccgcctcatgaccctcacaatagtcttaggctggactactcagcccatttcaaagatgaagagaccgaggctaggcaagctgccccacacctcccagccagtagatagctgagctgggcctgaagcctggttcctcctgactccagagctgccttcttcatcactaataacaacaatgacaatagtaacaacagctgatacccacacagtgattcccatgtgccaggcactgttcaaagaacttcacaagagccagcaggccctggagcctgctccaagtgccagagaaaggtggtcatgccaaacctttccaacctctgtatggagcagccacatcatcagctcaatccccagtcaaagaaactgggggcccggaggctaagaccctcacctgaggcccaccacaggtaagagcagaatggggattaacccaagcagttggactctgggtgcggagacagcgacctgggggcttcagcttcaccaacactaagcagagggctctggtcttctagccccccggttcctcctgagttggagagcatgaccatgctgaaaaattcagcacccctctactggagagatgctttgtgccctgggagtgagtgggagccagtggcagcagctcatccaagcccctcccaactgctgcgggggccttggcaggatctgggggtggcagcggcacgtggcagaaccgagctctgcatccccgagcagctccccatctccatacagcctgcctggcagagcccgtgctcaggaaggggtggccagggaagggaggagacagtgtgagagacgttatctccagctcatcccacctaagcacaaccgccaaggggacagctaaggaagtgacccgaggagagtgggttaactgccagatcgaggcctcagggcagagggtcggagagggccgcagccaagcctcccctgagcatcgccaggtttgctttgcatggcagtcttgcaaggtgggctctatgccaccccttctactgctgagggcactgaagctccaaaagaaggccaccctacccgccactcgagctcatatccccagtgattggcaaagcaggatttaaacccaggactgtatgacttcagagtcagggctctcagtcgccactttggctcaggagcccgggaaagcctggcgaggagaacctgtggtgttgtggggcctgtagtaccctgctctgccccaaggcaccgcccaggtctctgagtgccaagcaggtgctgggatgagccactgcagactgtatttacccagtgatgactcattgtcaccaggagagggcgggggaacagatgaatcagggaaggtgacattcaagctcaggatagaatgagcctggggagtagccaggtggaggagacagttccaaagagaggaaacagcatgaatgagggagtcccgtttccttagccaatgaaagcccctaagcctcactttctatgaggagccccctccaggctccacaaggctttgaggatgtgaccaaggcttaccctgtgctcctgccaaggcggtgacaagggtcaagagggcaggcagacctgggccacaccctgcacactcactggggcacaccgcccctgtcgtggctgctgttgtgggagcactgagtgaaatgaatcctgcaaagtgcctggcccggtgaaggctctgtgatgtcaccagaatgcacctagcttgttaggagggtgagctccaacaaccctctgcaaccaagactggggacaagcagaaaggtcagggctgaagacgggaggaagggacagatctaatccctataggcaggtgccacaggagtgggggccctaggctgggggcatcacttgagcctagtcatgctggctccacttattcattcattcatcatcaaacaactgagcaccagtgtgtgccaggccctgttctaggcactcgaaccacagcagtaaccagcttacattctggtgggaggagaaagaagaagaccaaataaataagaaaaatacctagtagtggaaaggaagaactaaaactatattaacagatgacttgatcttttatacagaaaacacttaaggaatccactaaaaaactattttgttttatttatttatttttttgagatggagtttcgctctcgttgcccaggctggagtgcaagggcataaactcagctcactgcaacctctgcctcccgggttcaagcaattctcctgcctcagcctcctgagtagctgggattacaggtgcccaccaccaagctcgactaatttttctatttttggtagagacggggtttcactgtgttggccgggctggtcttgaactcctgacctcaggtgatctgccccccttggcctcccaaagtgctgggatta

SEQ ID NO: 53170 - DNA, 7856 bp, Homo sapiens
agaaaagaaaggatgaagatgggcatggtgccccttttttcctttgtcttgaacagaaagtatccattgtgagcatttcttaaagcacacctgaccaaaggaaacccaatccccggcagtcctggggactgcattgtggcccagggtggaaatgcaactctgcagaacgaccccaccccagcactatgagaccctggagggagggcccagggtcctcagagctgagtgccaccagggccggctgtgacctccatggcctgtgagtgctaagagggcaggcctgggctgctgggtgctgtgcatgccagtacccaacacatgtctccagtgaccagaggcacaaccagctgcctgtctcagaaagaggaaagtgtaaaaaaactaaaatgagcacctatgaagaaaaattataaataagatgtttattaagaaaacaggccaggcatggtgactcatgcctgtaatcccagcactctgggaggctaagacaggagactcacttgaggacaggggttggagaccagcctgggcaacataacaagaccccaccttgattaaaaaagaaaaaagaaataggaccacggaccctccttactgcccaccaccacctacttaccctaatgtggcccaggtctgggctacagaactgaaattttaaaatgatagaagcaaggtccggagaaggagattgttttaacccagaatcctggacttcaggctccctggccaagcagcttattcacactggtatgaagggataatggccagaaggcaggcagggagctcagagcaggtctgaccaaaggtggggtggaagggttatcagagactctttcttcgtttctgtccaagagttgtttccataattgaaatttaaattgaaaatgagaaaagggtatgggttaggaaggctgcttataagcaaaagggatctgaaccctcagccacctggttcaaggcctgggtcctcccaagttaccaagtggagtcaccccatgcagtacatgggacctgctggcagggctggccgcccgcctgggaagagacagtgatgaacggccctcccgggcctggggttgcagggcgtgcttcccccgctccccgctgccaggaacaggtaattacagagactgggtttcatttttagctttaagatatacaattagacatgtaaatctcagcaaggcgggacaagccctgcacccaccacagccactgtggccatcccagcagtggaatttggctatttctgggctgtctggaaacagcagaacaccccaccaggctggtgtccttggcccagcagaactctccaggagctctcccagccctgggaaggctgcccagtgacctgaccaccctctgacccatcccaggaagcacgccaggtggtgtggggagacacacagacctgtatcccaaatcggaccgggacctccacaatgcatccacgaggactgactgtggtgccggctcggggtgcgggacacaatgcgagcaacctcctggaggagtccctggttgagagggggagacggccattacacaggaatgactgcagtcaccgccagtctcccaggaaggagaaggagctacaagggcggtgaacagagcaggctgggggcaggaggccgagaagcctccctggatagtgacatcagagccgggacctcaggcagtcagctgggtgaagacctggggggaaggaggtcccaggcagtgggaacagcacagggaagacccagaaggagggaggtggctcccaggaagagcctccctggaaagccggggggtggatgaggctggtgacgaggagaggccaccaagtgactcggggagccccatcttggtgagcctcaacttcctcatctgtaaaaggacgacttacccatcacatggggctgttggggtgactctgtggtcccacagcacctctctccactgctcaacagagggaggatgcagagaattctgcctctgtggtcccgaggtcagttcgctgccacatccccagcacctggccccagcctgatccagcattactgcccagtaggtgcaacaagaagatcccagagccttgacaaccccaggtctccatcaccagggtgacgtggggccaggtgccgtagggctgtgggagccacctcctggcctcaggctgccaggctcacaggattcctacagacaggggtcaaatgggcccatcaggggctctcctcagagttggagcaaaagtgcatgcctggctggcaaccctcacaggagcagaaagtcaggaaaaaggaatccgggtatcactggggcagtccaacctctgtgacagggctccagcctgacccacgtccactctcaacacttcgccttcccagttccagtactcagagacacacatctcacctccactgggtgcccagcacgaagccctgcgggggcaggtgctcaaactcacaagcaaagagaggggtgaggtccagcaggacaggggttctcagataaaaatatccctggcagccaggcgcggtggctcacacctgtaatcccagcactttgggaggctgaggcgggtggatcacctgaggtcaggagttcgggaccagcctggacaacacggtgaaacatgaaaccccacctctactaaaaatacaaaaattagccagatgtggtggcgggcacctgtaatcccagctacttgtgaggctgaggcaggagaatctcttgaacccgggaggcggaggttgcagtgagccaagatcgcgccatcgcactccagcctgggtgacagagcaagactgtctcaaaaaaaaaaaaaaaaaaaaaaaaaaaaaaaaaaaaaaaccaaaaaccaaaaaacattccactggctcatgacaaacgaagattcccagtgagcccttccagaaccacagactccgcaggacagggtttctttttgtgaggggctgtcctgcgcactgtgggatgttcagcagcaccctgccagtagcacagccccaggtgtgacaaccgaaaatgtctccagagatcgccaaatcaaccctggttgagagccactgctgcaggtcttaaaagggcattttaaacgagctcccaggtgattctgatgcagggagctgggcacccagctaagagacagtagcgctctgacaggcgtgtggaactccaggttccagctgtgctcctgggttcctgacagtgctggtcccccagaacagggccccatcacttaagtccatcacttaagtcccttgcctgccatccgtctgcccctccctcagccacgctcactcccaccctgcctgctctcccagcccttggcctggttcctggaggagtgagcggcaaagtgatgcaatcagagttcccggctgatgaaacccagcccaggccagagagcgagagtctaataaggaaacaatttaaatcgacaacatctgccttgtgcttccccgaagagaagagaatacagccgcctgggaggagcctgccctggggaccagccaaggcgtccgtccaggggctgaagagccagcgtggcagcacagcagcgtctggctcctgccaggggttcagggggagcagctcacagtcctagcatggccaggacctcctcctgcaaggaggcagcaagaagtttctggaagccaagccactctggccaacactggagcactcagagcagccacctggcagccccaaaacgctctttgttcccctgccaaagacacccctattagcagtggcctgggattggcgggtgggccgggagggaggctggcatcataagtgacccaaagaagcacagagtggacagcccactggggcttcagaaactccaagatggaaaaggggcagggcatgggcacagggtggagggaagccaggtcatccaggcttgctgggaaagcgtcagggttaggtgaaaggatcccagagtcagacacatctaggtctgaatcctgctgctcaccggtcaagcagcaaccttgagactgatcttcaagggaaaccccacacaagctgggcatggtggtgcgtacctgtaatctcagctactcaagagactgggactggaggactgcttgagcccgggagttcaagaccagcctgggcaacatagcaaaaccccatctccgaaaaaaaaaaaaaaaagcccatgcaggcaggtgtgggcatccctattttacaagcacaggcaagtggctgccctgctctgtcctctgtacccagagtcaggttgtgcagatgccttgagctactgcccaggcaaacgccctgttaacgccattctccagatgcaaatgatcactctctcttgctcttacagcccaagaggcgagcaggccattgaagggacccaaagtaaactactggctttaaccaagaatctcatgcacctgggcaaagatgcccctggcacccagcatggcccagcctggctgtttcccaggcaccctcctgtgtgccaagtaattctcaagcatcatcttcctgcttctacttcacagatcaggaaacagacacttggggagtccaggcagtcgctgcaggtcacatgggaggtaacgggtggtctgtactcccaggccccccttcaggaacccacccccacttcctgatcttgcagaacccctgggaaatctgccaaggcagtacagccattctccagagattgtggcatgggcatctgtcacgctagcgaccctggaccccatgctgtgtgggctgacccttcaccttgagtctcaatcccagggaagaggctttgagaccaggtttatgccaagggagggatggtcactgggtcaaagtgtggggccaatggggtgtggctctgagccaaatccgtcaagacctgctggtgttggggaccatgttaggaagtcccaagttaggagggagaagtgggaaaaggccccccagcaggcaagctctgcagaacttccaaagatgagcgctccatctcctgaacacttgctgcatgtcaggcaccgagccaagcactctccctgaccccaagaatccacacccagccctaggagatgggtgctgtcagcccattaccccatcgcagccaaggaaattgaggccccagagcagggaagtcacctgcccaaggtctactggccgggagagggctgtgacctaaagccagggctgtctgaccccagagctgcaagctgggctcccatgccagggttggacccaagaccccagcagttcaaagcaagaagacacaatgggtgtcacactgggctgtggtagcagcttcccctccccaggatccatgcccacagcaaacacagagcttcggggctggctctgctcgggggacttcccttcctgcacccaccagtctcccagcaggcctgcccacaaggcattgggaagcagagactggggctcaaagccaggctctggtacccaccggacacttgacttttctgggcctcagtcgcagttctgtccctgtctcacagagttgctacaggacctggcacagtggacacccatgctgaatgggggcagggactagacctccagaagtaactactgacaggcacctggagttcccctctgaggcagatggtccagcaggaaaagctggtcacacagtcccctaccttcttctccaccccaggaccatagatcaggatatttccccaggtctttttttttttttttttttttttgaggtaaggggtctcactatgtttcctgggctcaaatgatcctcctgcctcagcctcctaagtagctgggattacaggtgtgagccaccacgcctggcttccttagatcttaaacctggctgggacaccctggttgggacatccagggagggggaccagcaggtggcctaggcatgcctgagccactcctggctgactcatgcctgggtggtggttgattcacccaaggaggaaggggagagagaggaggaacggattcccatccccagggcctggcccctcgaatgactagactcaagtcatggggctgcctctgtcctctctatccttaccctccatcccagcccatcccaagggcaccccctacacactgcaagtttcctcttctaggcctgggtcttaggttcctgtctcccagagtgtggaggtcctggaggaagggcctctgttttgctcactgctgcttcccctgtcgcaaggatggtgctgggcacacggtaggtcagtaactaactaatgactaaatgagcgcccttcatacccctgctcccgtaagggctcccctaagccttcttgtgccaccttcatggaagggtagggccatattctctgcagagtgtaaggggccaggggtcactgccattgctggctctgccacccagctgttcctactgatccatacagtatgccctaaggttccctggacttctgaggtgaccaggagataattgtgaatcgctccgccaaagtcacttttcctcccagccctgcacagactcagacctgttttcctagctgtcttcatcagttccccaagattccaaccaccatgggctaagcatcaggctggagtgtgaggccctgactcactggtctccacctcctccccagacatgtgattccctgaagactcacagaccaatcctggaccaatctttgcctctgtcattcacggactccacacatatgtactgagcacttactacacgtcaggcctgtgctagacacgggggacacatcccaagagcctggccttggtcttgcctgtatccaagatgggtgtggccaacataaaaaacccttaggggctgctacaccccaaggtcaggccttctcctgggatttggggagagcacagtcaaatgcccgtcggcaaagacagggttcagggcagagcaggcggagtggcaattctcccccaccccactgtgctcagcactcctctgagagacgaatgtgcctaacagtctctcctggctctgggcccaggcagggacggttgtcttggccaaggcaatggcctggttctaatcacaaatgtttgctggataggtgaaccacaggaagagagaagagaaacaattacagggacagagggaggaatatggacctttcctttctgctctcacccctagggcccttacaataactgccctggatgaataccaatgctgccagcctttactgagcccgtactccatgccagagactacgatgggcacataataggcattaacccatttcacccaagcatcaaggaggacctcattatcccatttcacagatgaggaaagcaaagctcggggagatctagttctctggcagcctcaggagcctgccctccccatgaacagccaagccccacagcccagcaggccctgctggagtttgcaagaggcagaaggaaaatctccagccagagaagagttacatctctgtttgcagctgccaggatgagttactgcctcataaacaagactgatgcttatcaggtcagaacggttcaggctgccttaccagaaagaccaaggaaaacacccagggatctcctccaggcttccgggcacccaaaaaggtgcctcatttttgtctagaggactcaggcatccacccagcaccacccaaaagtgtggggcatctcgagtcttgtttctggcacagagacgtgcagaactcacagatactcagagagaacatacccatgaaaccagcccccaagcagcagaatattacaggcccccagaaggtccttccagacatgactcccctcagcaaagacagcactgccctgacttgcatcagaaaggtttttgaactctgtataaatggcatcatacacttttttttttttgagacagaatcttgcgctgtcgcctacgctggagt

SEQ ID NO: 53171 - DNA, 2341 bp, Homo sapiens
ctgtgcagagggcctcttccctcaccaaaagcccctcagcccagcctgggtccaccaagcagggacgctccaactcaccctggctcacagccaagcatctccctgtggggcaagttcaagccaacaagggacaagaaaacacgcagaccccactggggaccctgagctcagacacccggtgtgctcctcactcacccccaccctgccccgagtgcaaagtgtcctctcccagcagcacctcatcagtcctggcccacacaggagtgccagcggccatgcaggggcactgaccctgccataactctgcctggacacaggaggacagactgtaagcacatgcagcgtgtgcactgtatgccaggagccgcgctgggcgtctgacagacattatctcaccatgtcctctgagagcaccaggaggcaggcaccggcagccctgcttcacaggggcggtcactgaggcttggaggccaagtcccttgcccaaggtcacacaggcagcaagtagcagaagcaggatggaaatgtctcctgcaggcctggaggcagggaggcaacaaggcagaacaagcaggcagaaaggcctctgtcagagctcttcctcccagccacccaaatcagctggctggcaggacagaggaccgggcagggtgggggtgcgggcagcttcaggcctgcatgtgagagctcttccaagccctgggtgccaaaagaggctcagggcaaagacccagggtttgccaccacagccctatgcagacacagaagccagccataggttggcagctttgggccttactgagccacggacagcagtctgacctcatagtgggtggctgacaggtcccagggcatatctggagtccccataatccaaagcacttgccagggaggtggataatacagagcaacaccccctccccaccctacattagttctgggtctctttctaagcaaatctggtgtctctcccctgcttaaaccttcctggggctccctggtaagatgaggatacatctaaactggttgtgcttaagatattactgcctgtccccagcagcaagcgagtgactgcagggtcactgcatagcagtcaccagatgccagacacagagtcagtcggctcctgaccccttagcagacatgccagcagccatcccaaggtgcaagtagggcctcccaaatgcaagtcaggactcccaggtactgaacaagcagggttcaaagggactcagggcccccctgccacccctggacaagcagggccctcaggcacataatgtggttgctgctaagagcctctggccagagcagctcccaggacggagcttgaagcaaggaacaggcctcaggaaatagcctggctccacgaagccagatcatctcgggtcagggctgctgccaggctggcaggtaggcagcaggggctgccagggtggcacctgccaacagtgcagccagctggcagcaaaggctaggtccaaggagcagacaccaaggccaggcacagtcacggcagcttcaggcttccccgcagccaccagcagtatagtctgacctcgcggaaccagcagatggcctggtaccacagcctcgctgcccgggctggcctctgaggccacccagccctgcccacttctgccagcagggcttctctccacaggccactctgcctccttgtgcccccgacctgcacctggaaggccttctacggcacccaggggaccaggctggcctaaggcagcacacatcagacatccaaggcatgctgcggggtcaggggaactcaagtgggcagcccacgtcaagaggcagctgtaaagccccttgagccaaacgccgccacacagcactgctgccagatcttccaacttaaaacaaatgggaaatctgattttcatgcaatcacaaatgactggcgcactgcaggggtcgacaaaccctggctacatttggccactgtgcccccatccatctcccggcacttactaagtactaggcatgatgccagccctgcggttgaggaagcccacttgcccactctgcctgccagccctctctccaatctgcctgctcctctgcctgctaccgccaggccagcagtacctgccagccaactcccattgtccttccctgggtgcaggtcaggcccctgaaccttctccacctggcaaccaggccacgtggctccactgcccctgggtaggtactcctgaggccaggaacacaccagctcggccacccattaccctaacttactccatcccctcctccaccctccccataccccagctcctcgcctgaccctgggaacaagtgcctgttggccaggggcttctat

SEQ ID NO: 53172 - DNA, 5291 bp, Homo sapiens
ctgtctagaggggcagactgtgaagcggggttcccaggctgcagtccagggtgggtggggtacgggtggagggggtaggaacccaggaacccaggaacccccgtctactgggcaaaaacacagcaaacaccaaagcagctctaaactggcctcaggttccaatgtcactgtctgctgtctccagccacacctacccaacagcaaacaggtgcctggtggccactaactgcccagctttgcgagagctcagtgtcagttcctccctcctcagccccattcaggttgcatgcaggacagggctgggaaatgctttgggcttagctggattcaggcaatttaaggccccttgccaggaggaagaagggaaaacagaggtgaaatccagaccctgtggactaagacctggaacttcccacactttccctaatggggaagcaggtttgggcaatggaaaggccaacaggtagggagacagtggctccagggcctggaggccaggcaagtcctcagcctggggctcaaaatttatattcctcaatgggatccaagaccctgtccccactcccagctcacacacaggccccctgctgactggatctggtccccaccccaccgcccaccaaagacccggaaagggctgggccccagcctgggcccctctaccaacagaagcgataactgctgcggcagtgtgcctgggcgagacataacacacagattatctgtactctagaggtgggtatgacatccccattttacagaaaaggaaactgaagttcagaggcacaaaagggttgaatgcaggctccactgaatcaactcaggcaaatcatttcctctcagagcctgtttccacctctctaacatggggataataatcctatggggcccccacctccactcctgctccatgacacagtccaggggttaagtgagaggtgctagtaaaacagggagcccagcaccaatggtagctggttcttgcaatcagagagcttaggtaacttgcccaatgtcactcagccagtgagtagccaactccaggccctagctgtgagcacagccttctctctgaaacctcagactgctgtgtgggtggcctcaggatcacaggcttcccaggcaaccaaggaggccagccacccccaccacaaggggcagcccttgtccaaattcctcagataagcagctcccaacagaacagggagccagtgctcagaaaaagcaccccaccctgtccacaccggagattcctaaatctgagcctggctgtgcagttcccctcccttcccctcctcccagcagagtgtttgacctctggattcagccagcaggcccccaaaccagcgaagttcagttaataacagactccttcgaggtccctggcaagccactgacttcctctttctgggcctcagtttctccgcctataacacgcacacatgggctctcagaacagggaggcagctctggctaacagggcccacaaggaggcccagggagcaaagggcagaccaggtagggaagcagcgtgtcccaggcactcggccaggccctgcccgcatactattttatttcatttttattttttaaaaagagagaggccgggtgcagtggctcacacttgtaatcccagcactctagaaggccagggggcggggtgcggggtggatcatttgcagtcaggagttcgagaccagcctcgccaacatggtaaaaccccatttctactaaaaatacaaaaaaattatcgtggtagcgtgcgcctgtaatctcagctactgaggacgctgaggcaggaggatcgcttgaacccaggaggtggaggttgcagtgacccaagatcacgccactgcattccagcctaggcaacagagtgagactccatctaaaaaataaacaaaattaaaatttaaaaaaaattagctgggtgtggtggttggcacctgtaatcccagctattcaggagactgagatatgagaattgattgaacccgggaggtagaggttgcagtgagccatgcttgtgtcactgcactccagcctgggcaacagagttaaatcgcgtccccccaaaaaagaaaaaaaaatagagacaggaatctaagtcgtccacgctggtcttgaactcctggcctcaagcaagtcttccacgtaggcctcccaaagtgctgggattacaggagtaagccacagcatccagcctgccctaagttctcgctgctgcagcttctccacctgtattaggctcactttccagaagaggaggcccagaaagtaacagagtcaagagtcacactcccatctgtagaagtccaaggctcttcggagacaggccaggatgatgtgaccccagctgggcccaattggcaagggacagcctgggaactcagttgcattcagcaacaagctgggcagctggacctgccaggatggggacgaacaacacaaaaccaaactcaacggagcctctttcagagagggcagcagcctcctcgacaagggtatttgcaatgcaaagcagcccagctccagccagaggaggatagtcactcggagggggctgggtaggccaaaatccagccacctccctccagccagactagggagtgcctgcgatcgggccttcccaggcgcctgggggtgccggggaacccgtggctggcctggactcttgaatcatatgacagccccagtggccagttcgggtgcaaggtggcctgaacacccctcccctgcacaatcgctcagggtacaaatccctgataggctgtacatgcaagtctgcagaatggacctactgcaggcggcacgcagggccccaagagaaggctgaaagactagacccccaggtatttggctggcggctgcctggcaccctgccaactgcctcaggcccagtcctgccttgtgcaacctgccccaggcacacagaatcccccggatcctcctcacaccggccccaaggggcccttccacacttgccaagtgtctaggtctcgctcatcacccccgctgctgcaggcgcgaccgccccagctcctaccttgacgacaagctgacaaaatcccctccatccagcagccggaccttgcagaagaggaccccgttcacgaagggaaccgcagtcagctcctccagggtgaaagtagtttggaatttgaatttcttcttcttcatcaagaaagccatgagcgagttccctgagtctgaagccccgaaggcgaaaaaaggtggagagggacgggattcctttccctacaccacaccccctcctcaaaacaccagagccggatcccgccctgatggtggcggagacggcggagatcggagtccggggccccaggtctgagagatccaccagtccagttcgcgggccggcgggcttcaccctcggggagccggggctcggaggggttcggagcggccggggacctcaccggcatgtaaacagcagggcatggcccaggaggcagaggcaggggcggaggtgcggggctgcgcgcgagcggccgcgctggcttgcagcatcccgagacgcgatgtccggggagctcacgccgcgcggccgggcggaccggtgagactgagggcggcgggcgggctggctggccggtaaggctgagggcggagggcggccccgcccccgccccgctggcggccgggggaggtgccctcgccgctcacgcccccgcacctgggtgccgggcggccagcgcaggtgaagccggggaaggtggggcacccccagggggctgccaggagctcgggggcctctccaggaggcgcgtcggggtcgctgcgggccgggaacgtccggcctcgggcctcctcagggcaggcaccgggccggccccgggcagcggaggcgccgcctcctcctcgatcctgggacccgcgccgcgggccccggcggagctgaggcgcccttcggcccggccggtggcgcccgcctcgcccggcacccttcgagcagcagcgccgccccctgcggccccgacgctgcagccagagcccgatgctgcgaggcgccgcttggagaatgcctgggccccgcgcggccgcccgcctagccgccgccgagcacggcaggggcggggcgccggcggctcagccctcccgctattgcgcggcccggctaggcgggcgcgcagcgcgattggtgggcggtggcgtggggtgggactcgcgggaggcagaggcggctcggggctctcggattggtgcaccgcgcggccgggcccgcctcctagggcggggcggggctgagggaagggagaggggccctgggaaggcagtgggaggtcgcagggctggcggggcagggagagcgcgagcagaagaaaagaagaaacaatgacaaggagaaacagtttgtggctgcagcggccttccagggtcccgccagacttgagctcgtagaaccctgaagcaggcccggaaggtagcgagtctcctttctcagaaagctggcgcccagagagagcccctggcaggtcgcttgctcgccctgaatctctagtgcccctcagcaatgagcagagaagcgtctggaaggcttcgccgaggaggtggctctggctcagtccatcacgcagccttgtgacccagcttgtaacattccaagctgttatctaagctttctgttgtcctttagtttcttgcccagcgtgactggtctcactgactagttagctgttctgggggcagaacccactcgaaagcctcgtacctcccaggcccctcggcatattgtggttcattcatccagtccccaaatgtttaggggcagtctccactaagccaggctgggacctagtggagaacctggtgggcttgcccttcccaaatgctcccagctcaagaccaccaggtggagaagcagacagggacacaggcagcgacaaatctatgggtaagagttgtaacaggggataagaggcacctgacatgggttggggcgcagactcagaaagtctcgaacaaagggagccaagccatccacaggatgcgtgccctgagtcacgcagggtccaggcatagggagctgccagagacctggtggctggagatcgtggtgcccgcagaaagtttcaggcaactacatctggctgtactgtggcagttggagagaggggcaagagatggggctggaaaggccagatctcccagagtcttgtaagaccgtaaggaggaagccacggacacgcgttgagatggagagtgtcctggtcagatttgctttattttttatttatttatttttttttgagacggagtttcgctctttt

SEQ ID NO: 53173 - DNA, 3638 bp, Homo sapiens
tcgcgccactgcactccagcctgggcgacagagcgagactccgtctcaaaaaacaaacaaactacaaaagttaaccggacatggtggcaggtgcctgtaatcccagctacttgggaggctggaggaggagaattgctggaacccaggaggcggaggttgcggtgagtgtagatcatgccactgcactccagcctggacaacagagcaagattctgtctcaaaaaaaaaaaaaaaaaaaaaagaatattcttggatattgtttgatttttgtaagatgaatttgttttataatttaacaatatataattataagaatgttataaacaaaagcctttccccatcattctccggataaaatccaaggttcttagcctggcattcaggaccctctggaagcaaccgctcagcccgtccctgactgcctcccttgggcccctgcagccctgatgcccacaggtcctgggcttaccctcctgcccacttggggacacctactcaatgtctcaatgtctagctttagctccagcatccccgcccatcctatccccccatcagttacactgcccactccctgctctgtgtgctcatgtcaccaaaaatctgtatgcagagaaaatgagggcttagccttctgtcttctgtctccaccatagctggtgcatatttcattctcattggaagggagggagggagggagggagggcaggagggaagaagggagagaagaaggagagaaagagaaagaaaagagaaactgaggtagggacagggaataccacttgcccaagtcaccttgagggcagccacccagctggcccactctctcaggcacctgacacccagcacagtgcctgcttcacagccatgccatgccaagttgtctccccagccctgcttgccaagggcggtcagtgctgattcaccggtgactggcctccaattatttgcacaactggaatggcaggcgagccaccgaagcagctgaccaagggcatattgatttgtgctgggctccttgctaatatctgagccagtcacacaagaagataaaggccacaaagaactcgcccacagcagtctgtcctgattaagcctcccacggtcaaatccacaagtttccctgttgatcagccaactctgccctttccaacccaagcctgaccatcactcacagagggtagtcatggttcagaacacgagatgtggagtcaggcggccctaggttccggtccagggattactgagtcaaagagtatttgcatatttaccattgagagatgttgacaaactgccttccaaaaagatcacacacatttatattcccaccaacagtataagaaagcggccattcccacactttctccatcttcaccaatctgtttgaccaaaagaggaaaaaaaagctatcctatagtgcttgcatttctttcatgatcatcttttcatattttttggtgattttaatttcttctataaattgcctgtccacatcttttgtttgtccatttttaaatttgggaaataatctttttgttatttatttgtagtggcttattacatattgtggacttcaactttgtatatgttaaagtattgcttctacttattatctttgttttttgagatggagttttcctcttacccaggctggagtgcagtggtgtgatctcactgcagcctctgcctcctgggttcaagtgattctcctgcctcagcctcatgagtaccacccgccaccacgcctggctagtttttgtatttttagtagagatggggtttcaccatgttggccaggctggtcttgaactcctggcctcaaatgatctgcccgcctcggcctcccaaagtgctgggattacaggcatgagccaccgcacctggctgcttccacttagttatctttaggctttgtttattttttattttattttttagagacacggtcctactctgtcacccaggctggagtccagtggtgcgatcatagttcactgtaaccttgaacttctgggctcaagcaatccacctgcctcagcctcctgagtagctatgaccacaggtgtgtgccaccacacctagctaattttttgttttttgtagagatagagtctcattatattgcgcgggctggtctaaactcctggcctccagcaatcctcccacctcagcctcccaaagtactgggattacaggcgtgtgtcacctttcccggactctggacttggtttatggtgtctttttgccccatagaagcctcttacgaagccccagctaagagagaggagtcaatctacttcagtggaaagaattctagattgagagtcaggaggaagacctgtgtacctccatgggctagaccagcactgtccaaagaactttctgcagtgacagacatgccccatatctgcactctccaatttgataaccagtagccgcatgtggctattgagcacttgaaatgtgcctggtgtgactgagaaactgaattctaaatttcatttaattcgaattttaaattcaagtagccacacatggccaatgactattgggcagcacatgtgtagatggcctacatttctgagcaagctgcaatacctagttgctattaggggatgaagagtccctgtgtggcttgggtcaggcactccatttctctgggcctcagtttccccatttgttcagtgaggctcacaacagcccctgcttcctgaggttcttctacaaatttggtttgtgggttgtgtgtgaaggtccaggccctgtacttgacccaacagcgcaaaatcaggccacattcccaggttgaaacatgagagtatgttggccctgtttacactgtgtacagagacccctgggtggctttctccagagctaccctccttcagctgggaggccagctttcccttcctaatccagctccagcaggcctcagcctgggactccatatcgctgacagggcaacgtccaaactctccagcctgtgttctggcctctgagagctggccctgccctggcattactgtcgttcctacaatatgtaggtcagcccagcagcctccccagccttaccctgtgtctgcctcctaccccagccttctaaggtctgctgagccacttcattcactcacttcattcattcatttttcattcacaggtgtttatccgaccatctgctctgggactggggctacaatgagggatacatggatgtggcccaaatgatgactgttgtgatacacctagttagggtggtgggggctggggttcagggagcaatgggaacacagagaaggtctgcctggggtgggtggtcagggcaggcttccctcaggaagtgacatgtaagcccaagcctgatgagtggatagaagcagccaggagagcagggagccgctggagaagacagtctgagtcgacctgcagcagaagacagagggtcccatgatctgcagaggcatgagcaaagctggaaatgaaacaggcccaattccactagaggggcttatcggccatatgaaggtgttgaggccacgtgaggtggcttgcgcctgtaatcgcaatgctttaagaggctgaagcaggaggatcgcttgcacccaggagtttgaggctgcagtcagccactgcactccaacctg

SEQ ID NO: 53174 - DNA, 1163 bp, Homo sapiens
caagagtgaaactccacctcaaaaaaaaaaaaaaaggatgtgtcctttagtcctttatcctgaaggtaatggggagccacggaaggtgttgaaggatgatgtgattactccaggggtcagctccccacatagcctttgtctccccctggaattcaggaatttagccccctttacgtttcctttctccacctgccacctaggtttcaaaatactttagtgcacacagttcccaggaactttctcccacctgtagtgccctaggttcaaactgcagccctgccacaccttggccctatcacttcaagcaagtcatgaacctctttcacccttcacctttcagtgtcctcacccgtaaaatggagataatgataccttctctgcacagttacatatgttatgagagaacattgcatgccacagagccaccaggaaatggagtctagttgaattccttctgtgcacggtcaatcaaagccatgaagggggcctgaggggcttcccaaagggcaagcagaagtctcattcctgggaagtgtccttgggccagctggccccaatgggagtggagggaagcatttctgaggcctttcttgggcagcctgaccatgtgctaggtacctcaaagcagatcccccaaacctagagtcggacttctgcaccttctcagagcccccacccagcaggccaggagtcggcaggctggtgtggggcttacataacctggcaggagtcccacacctttcacccagtgatcggggctgtgtttacccagaagaggagttgccgggtcacctccctgtcctcttaggtacctgctcacaacacagccctttagcctttgctgagctctgcttattttctgagttcttagtcatagtccctggcgttactgttggcaacggctattgttttgttttgttttttattgatatatcatagcaggtggtgtttgatacatgtatacaccgtgtactgatcaaattgggataattgagaaatccatcacctcaaacatttaccatttctttgtgttgagaacattacaattcttctagctattttgaaacatataataaatgtcaaccatagttgctctactgtactattgaatactagaacttatttcttttgcttttttttttttttttaaagacacggtttca

SEQ ID NO: 53175 - DNA, 1068 bp, Homo sapiens
ttttaatgggataatatgaaacgttttgttttattttacctgctagtgagcttgcaggctgctgcttgtggaacattgtcttcatggctgcacgggtctgtggtgaagacatccacacaggatttagccagttccatcaggatatgtttgggtgtttgcagttttttaccatttcaagccacactgcagtaagcacccttgtaaatgctccctatgcactgctgggagggtcttgggctaattgccagtagtagagccgctgggacacagggcaagaacatttttaatgttccctacaggaaggtaaagccagcttttcctagagggtagaagaccgttggtcctgtacccccattattggtgcggctgtctttgctcagctgatcaatatgacccctatttgttctgagcagtgcctgacccatgagagctgcgcagacgttcatagtgacagtcctgctgctgccagcagggtctggaaattgaccatcttgtcaggaagattcatcaagtggctgaagacgaagaactaaaaaaaccccatgtttgccttttaactcatttaggcaagccaggaatgtccaaaactagccctcggccagagctgtcctgcaaaaccgccagggccttcccttcaaggagagcactgccccagccagcctctgattagcatctctacacatggatagcccggccggctgaattcccttccagaatgcagccaacagccttttcccctgaatcatcgtgactcctgcaaaccggcactgaagtgattaacttccttctgggccacccggtagcaaacgtctcctggacacatccacagttttgtcctgctgccacctcaaagagagctgtgaggccgggcgtggtggctcacgcctgtattcccagcaatctgggaggtggaggcgggtggatcacctgaggtcaggagttcaagacgagcctggccaacatggtgagactccatctctacaaaaatataaaaattagccgggcataatggtgggtgcctgtaatcccagctactcaggaggctgaggcgggagaatcgcttgaact

SEQ ID NO: 53176 - DNA, 749 bp, Homo sapiens
ggaataagggaatgtcatgatctcagaggaggtggcacagtctgatagggagagggctgtcccagggctcccagctgcctcttgggcagggcaggtctaggctgtctggccccctcagagccttgactgtcagggcccaggctgagcaggctcccatgaccccactgcgtggcagggagattaaggccaagaaagggagggggccagaatcgcacagcttgcccaggcagaatgggcccctgccttctgttcctgagctttctccctgcaccagagccatctccgggctagacaggctggtagaaccagccacgtcctctccctggggtggaggaagagcctgctccgcacagggccagaactttccagccatctccctccagcctcaccagtccccacccagagcctgaaactcagggctgtctgtgcccagggctgcacctgactttggttatctagcaccacctacaggatatattgagaacaacatgccacatggcttcaagccccagattccagaaactgctgactgggaagacgcccattcatggatcgcacctggtatgcccgggccagagctctgtgccctgcatgagcctctgccctgatctgcaccacaggcccttaaggcaggaactacattatagtattgaatcaatataacaccctttcataagggatacaaatgtagttgttagataaaaggtataacttctgttgttcacagcagagtagagtgactacagata

SEQ ID NO: 53177 - DNA, 2964 bp, Homo sapiens
aagggagggaggaggggagggaagggaagaagcgactccaggtagcatgagagttaagagagaggacgtccagggggccatgggcatgagcagcagtgagagctagcctggaccggtgggagctggaaaaagacctcttgaggaaataagcagagccctggaggctacccaggagctgggcaggggaagaggtggggcagggaaccagcacattctggcacagcctctagggctctgccaccggacagaccattttgagaaccacatccccctttgtaaacctccatactgaagttagttcatcatctctaaccaaaagactgggtttgtccctgccagttcctcccagcaggcactctttcgcaccctctgagaacctcgactgattggtctagaatttctgcaagggtcaggaaggcagttcagggagatttccaagcaaggcatgtgagtgagccgtcttaggggtagaggcccagccccagaggggcaggtccagctgccactgagaaaaggacaagctgttccctctgggacctgatcaaattgcaaaatcatgagcaaataaatgatcattgttttcagccactaagtttcaagttggcttgttacacagcaaagacaactgaagcaagcagctactggtgttgagtacctgccgtgtgtcccccactgtgttctgtgttctgtgagcaacagcttgttaacttcacccatcctccttatcagagaaggatttttagagaaattaaataatcccatcctagagcacagtcgggaagttagagacaggcagactctgaagcccccacatttacttgtgaggagcctggctcctggccacaagcctacatgtgatctctcagtcccaaccagaagcaatgacaaaggctgagcctggcaggcctcagtggggtggcaggagggggcagctgccctccccacaccagacttgagacacaaccagtgagttgcagtcatggagtcagctccccagccggtcatgcccttgcacatactgcagacccagcccaggtgcctctattcggtggcccctatcagggggtctcaactgaagccttacccaggtgcctctgccaggacctcctggcaggagtgtggcatgtggggaatcttttctttccttttttttttttttggagacagagtcttgctctgtcgcccaggctggagtgcagtggcgtgatctcagctcactgcaacctctgcctcccgggctaaagtgattctcctgcctcagcctcctgagtagctgggattataggcccctgccaccactcccagctaagttttgtatttttagtagagacagggttcaccatgttggccaggctggtctcgaactcctggcctcaagtgattcaccttccttggcctcccaaagtgctgggattgcaggtatgagccactgtgcctggcctaatttttgtatttccctctttttttaatttttattattattttttttctgggtagagacagatttttgccttgttgcccaggctggtctcaaactcctgggctcaggagatcctcctgatttggcctcccaaaatgctgggattacacaagcccagccagtgaaaggaatcttgaacactctttactatcagtaattttccactcctagcccttctccctcttgtcccctccgacccccaccaaggccataaaacagcaggagtctttttttcctgaggattccctcagcagtgagaagacacccccttgtgtaatacatctcacccttacctggtgctgtcctgtggggaaaaaaatggaacataaggggagtggcgttttctcctcttggttacgccagcatagtaagcaattacaggcttcactgttactttcactgtagcctgttgtcttcatggactaaggtaaggggacagctcagcagtctccaacttgcgcacccgcctctttcagagcaattgcagccacagcctcctggcggtggcctcttccctgtactggccttggttcccatgtccccagtcagccttaagtccttcccactctgctttctgtgcccctgccaccttctagttccagggtcgcatcctttgtaatcccattcaaaccacagagctcccattgtgacatcaagacttggtagttaccacttcggattatcggccactgtaatgacgatgacagcagctgtatttattgagcatgagctattcccagcactgccttgtagatctgttgggcaaacattattgaagaaagaactggccggatgccacggttcacatcgtaatcccagcactttgggaggccgaggcaggaagatgacttgagcccaggaattcgagactacctggctgacctggcaaaacccagtctcaacaaaaaatataaaagttagctgggcatagtgatgggctcctgtggtcccagctactagggagactgaggtggaaagatctctcgagcccaggaggtcaaggctgcagtgagccatgattgtgtcactgcactccagcctaggcaacagagtgagaacttgtctcaagacaaataaacaaaaaaagaaagtactctcccctaaaatacagtttacaaagcatgcctttccaaaaggctatcaaaagggtttaaaatataaaaggtttgggaggctgaggcagaagaattgcttgaaccagggaatcagaggctgcagtgagccgagatcgtgccacagcactccagtctggcgacagagcaaaaaaaaaaaaaaaaagaatactaacacaagctgcctctaggcctcgtttgatctagacactactcctcccggtcaggtcaggctcaaatcatctctaggtgacctcaaatcttactggcagcaaggtcagagtagttaagaacagtagctaacagcatgggctacgttgggtaataaggtagctgtgggactttaggcaaattgttaatcctctctgattc

SEQ ID NO: 53178 - DNA, 3525 bp, Homo sapiens
actacaagccgggccctgtgaaaagtcctgtggggatacagacacggtctcttgttttcaaggaccacccagttcggcaagtggaggtaagtcatggacaaacatggtggcaatgctcagtggcgagctatccagcacgtcagaagtccagcccacgtgctgaggaagtcccaaagagagcaagatcacttctgtctgggtgctgctcttggaaggcctcatggtcttccaagacccccatctgacctctgacccttggcagccaaccttccccaggccaccccagagcttgctggcccttcccacttatgcacgccgcctgggcaggagaggtcactcactctgtgtcagggtgaccgtggctgcggctgcggtggccgagggtccgagggccacagggtggatctctgtggtgctgggcaggctgatgatggtggcctcgcccagcaggttgcagatacgttgttgcatgggggtcagcagcactggggctacagctgggccaccgccaccactgccaccgcctgtcccaggccccccagctccgtcctcctcagtgggccccggcgcctcaccaccctccacggcggcccggacctgggcaaccttgcgacggacctcggtcttgaggtcagaccacttcttcttgacctcaggcagctctctgcggcaggtggccacggcgttgacccttctcaggatgccgtgccaggccgcactcttggcggccaggggtaccccggcgttgaagtggttcaccagcaggtgcttcttcagctccagctcctccacgatgatctccacctcccgctctgagaagttcatcttccttttcttggctgggacggccatggcctctcccctcccctctttttaaagaaattataatcccctcaagcgccccaattccccttctcttcttcctcagcctcgcccctcacccaccccctacaggggataggccaggcttgctcgaggccaagcactaggcctttggtaacccccctcgctacgcaaagtgcgtagggcccagccccgaccggcccggccgctgccagccagcagcgtaatggcttcctgaatctgcctcttccgccgaggtgtgcggagatccgcccacttcccctcttcccgcctcccagcgcttctccgggaaaaccggccttcccggttggtagctgctcaaatatcacgtcgatcactggttctttcgatctgtcgctcagctaaagagcacgcctgcttactgtaattcgcctgatcattggtctaaaattgtgtccgtcgcccagagggccccgcccacctaacctttattcacttccattggaaaatcattctgtcgttcaattgtcagtattacgactattaagccgttaaattcagctattttattggtggtttagggagttagattaccaaaaccctgcttcctgaggatacttagtgctttcggccgtgacccatgggtcaattaacttttaattcctcccaccggcacaaactctgcctcgcaactgcagttcacaaatgctctcacacaaatcctgtttcccactggaggctacgatctctccgtacactaccgctcctcccatccttaagatcccgcagtctaaacagagttagttcatcaatggaaactggacacggggccttccgcctgccaatcacattactcatgcctatcgctgcgtgattttctctctcttggcccccggctcagccaatccccgcctccctcagtttgaatcggccccaggcggagccgggtgaccccgcccaccccattgatccgggtagtccgtggcgcgtgggctgtccttagacaggctccgcccctccctcctccccatccgagcctgtgactggccttcggtgcgcccgggcgtggccggcgaagcggggcgcggaggggcggggctcccggaagccgccccttccgccagcttgccggcgtctccgagcccgcgctcccagctgcagagcgcctggcttgcctcccgcgcggtcaccgccggcccgccgcccccgctcccgcccgcgcccggagcccctgcctcgcgcccgatggtgagcagtgtgttgtgccgctgtgtggcctccccgccgccggacgccgccgccaccgccgcctcttcgtctgcctcatcgccggcgtccgtgggggacccctgcggcggcgctatctgcgggggcccggaccaccggctgcgcctgtggagactctttcagacgctcgacgtcaaccgggacggcggcctgtgtgtcaacgacctggcggtggggctgcggcgcctgggactgcaccgcaccgagggcgagctccaggtaggctgcgcgcgtcctcagcactggcggggagggagcccctcgagggccgggtgacaggtctcgggggacggccccttgggctgggcggaacccccactgtccagaggaagggtgccccctgactcactgagggacaccccacttatgccctggtgggagcggggctccttcctgacttctttgggtgcttgagccgggttcttcgtggacacaggtgggcatcctatgggctttctgatgggcgaaaagccctttcttgcccagagtagaaggccaggtctcaggagtgtgcctttgtcacctcctgacctcaaggccaagctggacgctcccttcacccaaggatgggttcatccatcagtccccagcagcaccccctcctttccctctcgtttccatgccagccgtgggccctgatctggttcctctcaggaacatgtgggagttgaaaaaaaaattggtattggggtttcaggctgatccgtgtggacgttggcggcgaagactgacagttctcatggtttaggctcatctccattgccctgtttatccagaaaatgggatcgtgatccccgcggggttggagtgtggacggagtgaaagaatccgggggaaattttttttctaaaagtcaaagcgagattgttactattgtgggctcttggccgaggtgtgggcataggggcgcagagaaatggtcatccctgggcctgccaggaagagaagtgctggcctttctgtatgagaacctcagagcagaggctgtttctttcccttctgtctcttcccccttcagtctgacttggcgggtgtagctgccattttcccaagtatttcatttactgtagcttagcctgatttacagcctggaataggactcctgagtactttacctaagaacctgtttcactgctgagttagtttggtccatttgtacacatgacaattagagaatctcgtagccaagtatgaaaagaatctggtaaaccgccaatgaattaaaccaatttgttgggtgggtgtacataggtgttgttaactcatgttcaagattcttggatcaacatccaaggtatttagcgctaactattaggatcagcctaggaggaccaagagtaacactacgcaagatagaatggttaagtccaggagatttagagacaagttttttttgtttgtttgttttgagac

SEQ ID NO: 53179 - DNA, 774 bp, Homo sapiens
cacaagttagtcctgtggggaacgtttgaagtcttggagagaagatctgcctttttgtaaataactgggcaacaggaagacatcctgcctcttgtacccccataccacttcctgttgaattagcattagtattaactgcctacagaaaaagcagtgctgaggctttgcagaactagcaggagccgaaagagaactgtggggccctttgggtcaaaatgggtcatctgccatgggaatagatgttgaagaacacatcaaactttggaaggtgcttcctatggcccatatgaaaccagtgtgagatgctggggtttgcacgggaatcagctgtgagtgcttatcagggggtgatgggtaaacccaggccatgtgacttcacaaagcctcttcttagcttataacagtctgggtcaagttttctttaaaagtaaaccagcaagttttgccatctgcctttgtttgagaagagatgggacactcataaaaattgcttaaaatggaagtgggcagagaaaccgttggcagccagccagggaaattttctttgtaaagggcatgtaagcgagaagcttgttctgggacaaaaaaagggaagagttcattaaagaagaaagaaaaaagatgacgacaacagtagtgactttgggagatgagactcagccagagctaattatagattgcctatttaaggcattttcatgtgaccaaatacaatctgtgtcttaaaacaaatttaaaacataggttagaactcaggcagccaattagaggaag

SEQ ID NO: 53180 - DNA, 813 bp, Homo sapiens
ctctccagctgaggctttggggctcttgtaaggggctggtgtttattgcaggtgaggttctagatgagctgcagtttgctcatttagagactggcatccacaccatctcttttgagccccacaaaaatttgttaagtaagcaagtcagtaaaatgattttcactccattttactagggaaggaacaatggttcaaaaagacaatggaacaacctcaaagatcatttgatcgcaaggaaattggaccagagaaggaattggaaccatcttctgattcctgctcctctcctccttaacacagtttttttcaggaacatgaagagaattctcaagttcttttggggaaacttgagaaagaggaggagagataatttagaaccacatattttgctcccaaagtataggtttcaagattatccagtttaccctgtcaaagaacaagaatccgccctcccccatttctctccctgacccgagcagtgcacatgaggcaatccctattgacttgaaattattgaatggagatcagtaatgtcaagttggtattgcttaatcagacagactgttgaactctatactttttaaatgtttggccatttgtggatgtttatcaaaagagccagacttagataagacagtctacagaagaaagctcctttccaagagatagacattattcgctataatataatggccctttaggaaaagaaaaatgcttttcacagattggattaaattcatatattaaactaattgtgttatattgttgcataatcggtccctggctcaaagtcataattatcaagtcaactag

SEQ ID NO: 53181 - DNA, 7508 bp, Homo sapiens
gggttcaggcaattctcgtgtctcagcctccccagtagctgggattacaggcgtgtgccaccacgcctggctatgactttacatttaaaaagcttctgtattgaacagcaaagttctagctgtgactaagactgggctcctacgtgttctgagcggacgtgggcgttgaagactgtgggtctcatgtgaggcctcgactgaccccagattgatgcttctggggagtcctttggcatggtgtcctcttaccaaccccatcatgtcagctcctgggcactctggggctcctaggtgaaggctggtgctcacattgcagaatggcctggaagaggtttcaatgcaatgtgggctgtggagggctgcaggttccctggagcaggagccagctagaactgtgcctggagccgtgtgtggccagggcagctcccctgtgggatacatgggcccataggggggtccactttccagggtggctaggcacctggctctcggccacccctcagcctcctatcctcacagctgaactgggcccgtttgcagtggcaatcagctctgtctctctccaactactgattttttggttgggaatgatttactaaaaggagaaaaactgttgtgtgacacgtttggggaccttgtgtgaaagcagccataggctgtttgttcatctgaaggggttggcagctagagggtgaaggtttgtttgggctctgtacctggtacccaggcaggcagaacgcaccacccggcctcttctccaagagttaactgcagggagggagcggtgacgtcagccctgatctttgtgcctctcacttgagcaacctgatgccaccttctcccccgggctctgtgttcattggctgttggcaggacttgccgtgggagggcttttttcttttttcaattaagtaaaagggcagggcttaagcagccaatgacagctgaggccaggcttgtcttatgcaagtttcccgggaccggcagcatttagggaacttgctcccggtggtgagggcagtggagcacccagcaggccgccaacatgctctgtctgtgcctgtatgtgccggtcatcggggaagcccagaccgagttccagtactttgagtcgaaggggctccctgccgagctgaagtccattttcaagctcagtgtcttcatcccctcccaggaattctccacctaccgccagtggaagcaggtctgtggggtgaccgcgcggaagggagaggcgcattcaaccggtatttgttgagtgaatggctgagcatgcatgaaccatcccccactgagaggaaagaatgtctgaaatgtagcagttttttcccattgccatgcggctatggccggcacgtgtacgtcacaggagtgaccggttttcatgtgacttcccaggaaggctggaattccagcgaaggctgttgtgagaaatggactttcagaaaggaaattccttttgctggaatgaggggggtgttcctgagaagtacagagccagaaagggacctggggggcaggccagtagtgcatgggaggagaaggcagggaggcccaggagttgagggtgctgcgtggtggagctgcccgtccctggtgtgggggtgagggagcctcccgccttctcgactctcagacatcgctgtggaacagggcctgtgtctgccctgaaagtgaggaagccgagctgcagagtccggaggccccttgccacctcggcttctcggttaatcagtttccctgctacccccagtgcccactgtgcaccaagggggatttgcagatccaaggaaggagacagaaggaggcccaggccctgtgaggcagaagcaagcactttgagaatgcgttgaagccagctgcggtgagcacaccctctgctctgggtgtctgcgacagcacccaccccagggaggcatgtggctcaccctggcagcaggcggctgggtcccagagggctccatgcctgatgttcgcctcctgcctaaatggcttgtccactctatttccattcctgttagagatttggagcagtcaccctataggtgatttatgtcactcttgtctgagagcacagatgtccacaggaagttaaatgtaacctcagcagataaaatatgtacctgcatctgtcctacattccagccacgcccctcacattagccttttgatcgcgccaggtcatggggtatctgttcaggcctccctgcccctgacacctttggcagctgaggaatcacaaggcgctgtcagtagtgtgtctaagagagaggcgcggtggtgatcctttgaggacgcgagctagccagtgggccatccatttccaaaccccagctggctgtcagttgatttctcccagtgagaaatccggaggacacaggaagactataccatcttccttgggagattctcggtcccagttttgggttccggattcagggcgttgctgagttggggtgactcactttcatcccccatgttctgaaggttagccttgagggtggcggcaggatgtgcagggaggcggcttgggaggaccacggcccaacttgcatcccgcccaccacttccctagctgtctgaccttgtgtaaatgtttaggctctcggaactcctgtttccttctctgtaaaatgggggaaatgacatttcctacctcctagagctgtttgcgaggggggtaagtgggttgctagaagtaaagcatttggcacgccctgcggccggtgctaggtgctggggaaatgtgtgctctcgtggagctgtcccagttgccaaccattaacagctgctgaacaaagcccacctcctgggaggcgggggcggggggggttacttttggaacctcattgccaaggaacagtctctcaaagccttcttgggacactaaagtgcttttcagtgagtgagcgggagagccagggcagctctatcacctggcttccctgagagcagggactggcagtaccatcatacacatgcccttggctccttacacttccccggcctcgggtgctgtggcagagtctggctctgcccccgattttcacctgcccaccaaattattctcggaccaatgccagttttaggagagaaacagcgagctgcagagttcctgtcagaaactggactccatggccatccccaagtctcagcagggagcatgtgtggttgaagcctgggtccagggacccagggacggcgctgcagcgaagccaccctgctcaccctggctgtacggcacgcaggtcttcagactgagaaagtgcccagctgtccctgtcggcctctgtccggagggctcttcccaggctccttgtttcctctctgcttgagagggagacaagattggcccttgcctgggttctggccagcacctggggttctaggtggtggctctggcatgtaagtcgattgccatggtggctctgagagtggagcagaagcatcttgggtccttggggccagctctgctcgcaattagtgaagtcattgcctggggatggggccccacaagggacaaggaaaggctggtccaggagccaaaagacaaaatgttacctttcttttctagaaaattgtacaagctggagataaggaccttgatgggcagctagactttgaagaatttgtccattatctccaagatcatgagaagaagctgaggctggtgtttaagagtttggacaaaaagaatgatggtaagtgttgccttcagagctgtggccggtccagcctcgggcctccccgtgcgcctggctcctgctcacggcctctgttcttgcaggacgcattgacgcgcaggagatcatgcagtccctgcgggacttgggagtcaagatatctgaacagcaggcagaaaaaattctcaagaggtgagtgctcagccagcctctgtgtttggtttaagtgtgatgaagggaaggctctgagactaaccctccgatgccattccctgggctgaccctgaacttggccttctcgtggtttgaaaggatgaataagtaacccctgtgggaggccagcccctccccagggttgcaggcctgctttcattggaagaatcacagatcacctggaattttgcccatcggccagtggcccatgaagggaaaactaatttgggggtggttcaaataggtaaaaggccagcaaggagcacctgtgcgtgtggagggggcggggcggggcggggggctcacactgcagcctcgttcccaggtgaatttcttccccatgctggtaacttgcacttaacactttagtcagaggcgctgccccaaaagatagctccctggtgcggggcggctgccaggaaatctcatggaacagccctgggagttgccgtctgtcctggctggaccttccggaaaccctgcggtctgaacactggctggtcctcggggacagcagccctgggctcagctgctgtggcgggctcgtctcgtgccgtgctgtgcccctgtctctgggtgtgtgcttgcttcactaacatggctccgagcacttatgcgtgttgtttctgctctctcctccgcatcctttgtctgtctgtcagaatacgaacgggccatttctggggccctgtcacctagtaagtatccatgtcgctcatgactgcctcccttgacttccatgcctgatcagagcgggattcttgtgggccattatattgccattgttgtgctaagtggggtgtggagccccctgctctttctcctgggggcagaggcacctcgtgtggtttctgggcatccgaatgcctgcccttggctcactgggaggtggggggatgcagctggcggatgggcatgtgggcacgtgggcagcctcgcctctgtcttgcagcatggataaaaacggcacgatgaccattgactggaacgagtggagagactaccacctcctccaccccgtggaaaacatccccgagatcatcctctactggaagcattccacggtgagccccacgtgcccagggccctcatctgctcccagggacccttagcccagagtcacccagtcgtccccatcccagagtgcagctggggctttccagccacctcctcttccacaggagactgtcccctcttctgccagcccagtagagctgtccgcatgttccccatgttctggcactccagccaacctgaacagccccatcgttcacacacacaggcttcctcttccaggaacaccctccgtccccacatgctccctgctccctgctcctcatgggccacttcaaataccccttcccatgatgctgtctgttctcccaaagctggtatgagccttccccccggtgggagggggctggggcagaagctactctacagagaacacctaggcagagctgtgaggtgtccccacggtcacacatttgctgccctctcgcccccgtccactgtggtttcatgttcagaaatgtgagtctgtgctggtctctgccccgagcccttcatgcttggcgtgtccctctctgagtcctggtgtgcagtcctgtccctctggaccatccgctccaggaggggaggccagaggcgctcctcatctgcctctcgcagtgccaggccagggcttgttaggtgagattaaatggacagctccaggggtgggagtagctggcccagagctctggcctttagccctgggatcagagcagaggtggctctgatcagcccggatgtcacccggagaaaggttacgcaggcagcgagccctcgtgtttgctgaggcgttgcataatgttctgccagcgtgatctggttacacgtgagatctcagacggctctcaccccggcctgatcccttcagcgcagccagcctggcaatctcacacaggcctgtgagctgttcttgcagtagctccctggcagcattggaaagggccggtgaatggttttctaaccggcacctcccggctgtgttcagctgaggttctatacctgtgcctctccaggaccccagcaggggtgagagctctgctaccttcagagtgaagggaaagaccccagcccgcttcccacccagagtccttggccttctccctgtcctgtggtccctggcctggagccgtgctagagggtagacggcgacaggtgccagcagccttgccccaagggtcctgagtcaggcttgtgccatctttcctcacagatctttgatgtgggtgagaatctaacggtcccggatgagttcacagtggaggagaggcagacggggatgtggtggagacacctggtggcaggaggtggggcaggggccgtatccagaacctgcacggcccccctggacaggctcaaggtgctcatgcaggtatgtagggaaaaggccccagacccctggggggccagtttccacctgggggatgctgcttggctagttttccctttctctggctggtgcctgctttgggcccaaacttttctaacccaataaattagactagaattattgctcagacagggggtaccaaaatgtcactgtaggtgacattttgtgcagagcggatctaattttatctgaggcatcacattacaggggcataatgtggacaggtgaagctagcgagactggggtgaggcaggaaccaatttctgtaagtacgttttgtgtacgttaccccacactggggccagcagagcctcacctgacccagatgccaatgggaagccacgccattaccttggccaggtacgcaaatccatgtccacacagcagagataagctgggctgatgtcaaggcagaattgtgaaactgacccacacaacgacactggtggactttgatgtctgaatggtgactggccaccacttgtccccttgcccgtacctagtacttcttgtgccaggagcccggcttggaagagctgcctcctttctctccccagtctgccttgctgggcctccctgtgttgcacagagacaaaggaagcaggtggttcagggcagaatgcctcgggcttggactctgcccagggcaccaccacagctgcctccctccctcttgtggccttgagcaaacccctttccctcccaggacttcccctcctctgtgaaaataggggcttgaacaactgcctcatccttttgtttttttagcagaattatcaggaatgttgtagagattgaaagcaggccttgggtgaaatcaaatgcctggcgtgtgcctttaaaccagcatgggtggggcagcaggagagagaggttggctgtggtttgatcattgtctaagctgagtgggcattcattctattttttaatatgtcttaagtttttttaataatgaaaaactttgatttttaaaaattattattattattattattattattattattattatattttttgagacagtctcgctctgtcacccaggctagagtacagtggtatgatctcagctcactgcaacctccctcactgggttcaagcaattctacagcctcagcctccctagtagctgggattattacaggcatgcgctatcaccccaggctaatttt

SEQ ID NO: 53182 - DNA, 1401 bp, Homo sapiens
tcgcaggggcactgctcacgcacgacttcacttagctctcagcaggtgtaggaggtgccaccaccgccacgtccccatttcacaggggaggaaactaaagtttcaagaggggaggggacttgcccaggacctaggatgcagtggacccccgactggcaggtggcacgcaggggagtgaagctgcggcgggctctgctggggccgcccaccaggaacttggggcaaggcagagagctgctgcccacatcggacccggcaagctggaaccatgccacaacccacccgtgggaccttcaccaagttagacgtgcccaagggacaggcattccttgcctcacctcagaagggtggcacctggtccctggctgcctcctcgcagccaggaggccacagagagcctgggcaggcctgcgcttgaatcctgggtcccggtggtgtgatcttgggcaagtcttctgcctctctgagcctcagtttccccactagcaagacaggcacgacgccttctgacagctcactgcggaagcggctgttctgcttcacataaagggtcactgtgaaacagattcaaagcagctctgttgacacggaagccctgttctcacctgggcctcaccctgtgccgccctagtccagatttcaccggtctgagtgcgttggaaagtaggggaagggtggaaacaggtggggcgggtgtgctgggcccggccgcccaggtgtggaccttgctctctgcagcagcagcagcagcaggccacgtgacctgggctggccaggagcgggcagcaggaagggcatggtatgatagcacctccatcctgcagatgggtaaactgaggccagggagggccccaggcctgccccagttccccgaggggcaagataaacctaggcctcctgctctcagctcctctgaacgcaggggcaggccagggaacagccgcaggacatggttctcttggtcatttgctatcacccaccagcacagccccgtggcccaggaggagccgttatctcccatggcagttgttgaggccgatgagagacggagctggccccacccatgctagtcagtacggggcacccctggctgaactgaagagcccagcctcccaccccctcatcttacagatgaggaacctggcacaggctggaaaccctgggacttccccaggtcaccacatgccccatcgctgtttctcttccctgactacaccgggcttaaatctgtgtatgagtgtcctggggcagctgcaaccaataaccacacacttggtgacttccaacaccacaaatggctgggagccgcggctcatgcctgtaatcccagcactttgggaggctaaggcaggcagatcgcttgaacccgggagttggagaccagcttgggcaacacagtga

SEQ ID NO: 53183 - DNA, 2001 bp, Homo sapiens
cagtgagccgcgatcgcactccagcctgggcgataatgcgagaccctgtctcgaaaacataaataaacaaaccaaaaaaaaaaaaaaaaaaaaaaccacggtagaagaacgattttatgagaactcgaacaattccaggtagtaggcatcaggagtgcccctattttacacaaaagaatacagagggttcggagacttcagaccaagtcactcgcccaaggtcacaagcaggcagaggcaactcctgaccctgcgggttcccaggagtcccgagttcggcgctgatcagcatccccatccccggccgggccaggccttacctgcgcggctgagcgctctgcgtggaggtcctgggcgcgcaggtgccaccgcgccgtgtggtacagccccagggctccccccagggccagcgccgcagctcccagcagccgcgggctccccttacgagctgcagccacggggctcgggccgcccgccgcccccgcgaagccagcccggctctgcgtgggtagcagcggctgggggcggcctcccagcctccaggccaaggcgcacccaccaggccacagcgcccgcaccacccgcgcagccgggtccatgttcgctccgccggcgccgcgggcgggcgcgcgaaacgaagacgccgaggcacgcgcggcgtttaaagggccaggactctggcgccccgcgggttggccggggtgagggcgacgctaagggaaccctcagcgctctcgggactgggcgtgtgcccggcgcccaagttcgaaacgcccgccagagccgcagaggcccgctcgggaacgtttgcagaccgttccatgcttccgcctccaaaggctcttgggtagtgacccggccgactgcaggggggcgaacgtctcctcgccccaccttgaccgcctaaagggcggcgtggccgtctgtaacacgtacttgcccacctctcttacgggcgcccattcaaaacaactccagcccttcctagagtcagtacaggcgccgcgacttccggccactgaaagccccggaaacgacccgacccggcaccaggtgttgcggttctctctgccctcccgcctcattgtccgcttcctactgtgacccgaaccataaaattttcccgaacccgaaggggccttggaaaccacgtgtctctgatttcgcccacgcgaagcggccggcccgccgaccccgagatttccagggagaggatggcaaagtggggtgccaggctgctcggtccttctgctgggctcccccgccctagctgaagcccggagcctccaccgcataggcgtctccgcggacagccccgggatggccccgcccggcgcccgagagggggcgggactcgcagagtgggcggggagaggggcggggcgaggggggagctctgagtcccggctctgctgctccgccgcgtcccactcttctcgctccgctttcgccccgcatcttccaccttccttccagtccttgcggcgaccgagcccgcagtgtcagtccccagcggggacctgagtatgccggtgaagacgagagcggaaggcgaggacgacggcttcggggaagcgggtgacccgaggagactgctggagcgaccttggcgtttccgggggtgccttcccgggaaggggaatcgggatgttggcttcgaagggaccgaagggcccacctcgacccgccccgagtgggtttggagttgtaggtgctgtctcggatgcagggcgagcacccgcgagcgggtaaccagtcccgtgagagctgcaggtccccagccccgttttacagatagggaaactgaggcagctgctgggacactcgcccatatgggttttgctccacccacttccttcagccactttacagaccaggagttgagggactgctcgagcttagagtgtttaggggtggttgagggtgacccccatgttctgtgctctactctatccctatccaggccttctcccagcgccactctcacgctcctgcttgcta

SEQ ID NO: 53184 - DNA, 1701 bp, Homo sapiens
cagcactcaacccatgtgccctgtgtggggtctcttcccactgcactcacaggagaggaagggtccctcaggggtccactggggtcccctcctgcaaatggggcaaggagaggggcaaggggctgtctcaaggcccctggagcacatgcaggtcctggactggggctcctgggagggccatgattctgggctccatgagttcagagcagacgccttgtttttccttgtccactgtcagccaccccacccttccctgacccttaaaagaaccaggaaacagcacatgatctgttggaaggaggcattcattctttcctttctgtgggtgtggggaggggaccacagggcacataccccaccctgggatccagctgagcaggggggtcagagatgacagctcttccggctcacaggccaccggcccacatacagggcaatcagaagaaagaaacagcacaaggaaggcacagagggagtcgttgtccctgccagaggtgcagcactccgggaatgtccctcactctccccgtccctctgtcttgcccaatcctgaccaggtgcagaaatcttgccaagtgtttccgcaggagttgctggcaattgcctcacattcctggccttggcaaagaatgaatcaacccaccctagatcccataaatagggccacccaggtgagcctctcactcgccacctcctcttccacccctgccaggcccagcagccaccacagcgcctgcttcctcggccctgaaatcatgcccctaggtctcctgtggctgggcctagccctgttgggggctctgcatgcccaggcccaggactccacctcagacctgatcccagccccacctctgagcaaggtccctctgcagcagaacttccaggacaaccaagtaaggggccaagaggggcacctgcaggcagggcctggggaagagtgggagcagaggggaggagaggtgaagagactcaggaagagcgttgggcaggactctaggagtccagggtccaggtttcagctcactctgtgccaccagggtcccctggtggaaaccatgccccttccccccatccccaccccctctcagcctgaacagactcccccaggtccacatcccctctcccataacccccattgtccaaagaaggtgggagcacttttagtccccctgcacagatgaggaaactgaggctcaggaaggcccaccagccacatgcctcctccagtgaggaggtcaccctcctccctgccagactcagaaccgcctcttcccccaggactcccttctggactgatggcctcctgctcctgccccttcaccagtgcaggcccagcctgggccctgctgcccagctagaggggctcatggttccaagctgggcggcccagaggtgccacagggacagagctggaggggtggctcctagggccattcctgggttgtgcctcttatcagtcccttgcagttccaggggaagtggtatgtggtaggcctggcagggaatgcaattctcagagaagacaaagacccgcaaaagatgtatgccaccatctatgagctgaaagaagacaagagctacaatgtcacctccgtcctgtttaggtgagggccgacatctcctgggggtgtgagagtcagactgacgtcacaggcaagggatggccaaagctgagggatcctgtcgttcacctcgctgttc

SEQ ID NO: 53185 - DNA, 2447 bp, Homo sapiens
ctgctgctgctggctgaacatggtggctaggggcagaaagcagagtgaggcaaggggtccccaccataagtcaggcctgctcccctcccatccaccgccactccccgcagccacagcccgcagagactgctgaggagcttcacagctgcattcccagtcctgccaagagcctgccacactcgcttggcccatccttccaagttacctccagtcctgctaggggcaagattcaaccaccctcctgccaatgccccccagacactgccaacagcccctccttcaagtccctccatctctccatttctggcggctccatcctcccaccctcagcctcagcctctctctgcgcccatcacttcctcactcacagccccttttcaataccgcaaccctctctgggcccccgggtgtcaataacatcggcacccgtccaacccggtcaccgtggtcctgagctccgtgggacggcttctctccaccaccgccacctcctcgcgccccactccgcccgctcccaccccgccagccgcctcctccgcagacacagccagctcgcaggcggagccccacgacccagccgcccccggccccgcacctcgcctccccgcgcgccctcaacgctcaagtcgcccccacggatgggccggccccgcagcccccacgcctcggccgggcggctccggcccgcgggctcccggcctccccgctgctactccggggcctgtgggctcgtaaggcccaaatgcgggcggggccggccggggcagcgccctctgggggacgggaggtccaggcgcctccggccgcgccacccgagcccgcccagtgcacaagtcacgctggggggcggctgcggggcgctagcaggtgcgagggggtcctgggcggctcataccctctgtcccgcgtcctccgcatcgcgaaggggaggctcggagaccaaggtccgtctgccgcccggaagggtcagccatcccgcggggcatcgagggggacttccttcctgttcccaacccacctccctgcggccgccgcggtcctgcgatcctggggccccgcgcggggctgcggtgagagggggcgcgcagttggcggatgtacattcattcgagggacccaggccaggcgagagggcggccaaggtcttacagtccgtcaggagtttgcccacggaggggtggagggagagtccccctccaagtcttttctcagtagatttggctaaggaaggagtaggtgaggagggtcgaggccaattatcaaaaaatagccctaggggccgggcgcttccgcctgtaatctcagtactctgggaggccgaggctggaggatcaagaccagcctgggcaaaatggcgaaatccctctctacaaaaaatacaaacattagccagggtggtggcgggcgtctgtagtcccagctactcgggaggctaaggcaagaggatcacttgagcccgggaggcacaggctgcagtgagctgagatcgcgccactgcactccagcctgagcgacagagcaagagctgtcaaaaaaaaaaaagtaaaaattttaaaaagaaaaggagaggaaaacagagccctgctcccttatcctgcacctaaaatggtcctgcccccaagaacccccttaacaaccgctgtatccccccatccccgcgccgtaacaatccttggctactaagtagtaattcttttatttattttttatttatttatatttttgagacggagtctcactctgtcgcccaggctgaagtgcagtggcacgatctgggctcaccgcaacctccgcctcctgggttcaagtggtcctcccgcctcagcttccagaatacctgggactacaggcgcgggccaccacgcccggctaatttttgtatttttaatagagacggggcttcaccatgttggtcaggctagtctcgaactcctgacctcaagtgattcgcctgccttggcctcccaaagtgctgggattacaggggtgagccacctctcctggactaagtagcaattccggctcccttttctgtggctccctgccttgtgcgtgtcacagcctgggcgactcctcgccctgccttccgcgccgacgttgggcgggcagggcgcgcgggggcactggcggcgcgcagacccgggcaggcggagcgcgttgacggagggcgctcgggcagcagaattcgcgcgtccataaatcactgcagtcatgtgacgagcgccgctccaaagctctggactggctctgcggcagatgggcggcggctgaggagcctaactcaacctggactagtcgtggaagagctaggacttagaggcgcgaaagtgactcagcgaggccggagcgcagggtggcgtccagggccccggggacgtcggcgcctatgggtgaacaggcagcctggagggtggggacttcgaatgctgggctgagaagtaggcttt

SEQ ID NO: 53186 - DNA, 2211 bp, Homo sapiens
tgaagtgtaggcttttcacactgtcaatgtctatgttaagggtgtaaggcagcctgaaacctctccctcctaggtcccatagtccccaatccccttccagctggaaatttatgctgtgaccagaggaaccagaagcgggatgagaacacttaggggactgggtcctaagatcaaagactggtctcgcgcaactaattacggttccgagggggattgtgacgtcactacattccactcctagggggaacatcagcgcgacgtccaagtcgccgctccgcgatgggggaggggaccgcagggccaggacccaggtccttggagacccgagaccaaagaaccccgggaggtccggtttggggcggcaggaggtgagggtcgagtctggagcggggggccccgggagtcacgggcccaaagtcactggcgagggcaggggctgaattgctggggtcctaggtccttggagacgccagcccaaagagcccagggaggtcggacttcggggggcaggaggtgagggccgagtctggagcggggagccccgggagcaccagcccaaagtcacccgggggcgactggcgagggcgggggctgggcggctgagggggcggggctggctgacaagactttggtggagggagcccggacgcgccgtggggagcccagcccggtgtgcctcaggagtggcagagactctggccatggtcctgccatcggagtggggctggggctgggtcggggggccgcgacccggtgcactttacctttttcttcgctgcggccaatttgctctgtcgggtttcttccgacatcgcggggcggggagggaggcggggttggggccacatcagcgcgatcccggcaaccactgcggaagtcagtcagccaccgcgcagctgtgcgacggagccagaggaggcgtaaccagggcgatactggagcgcagaatgggggcgtggcctcaaagatcaaagcccattggtcaatgagaaatatgaagcggaagggggcgtggctatgcagcggcgtggccagagggacctgtggcgtcacaacaaaagctgcgcacgcaaccgctgtccccgcccacctcgggagaggggcggggccggctttccttgggtgcgcgcgcagctttctgtgcgccagttcacactccgggtcagagttcctggcccggtgcacctgagaggtcgctctccgactcccgcgctggaccctcttgcgccattgaaccccctgatccgggggcctcggaccccagggctcaggaggtgggcgaggaacggactccacagtttctttcctgactcctcacagccctgccccagactctcccttcccagaaatcacctccaaagactcccatccagtgctccagacaacccccgtctcagaacgcccccttcctagagggtctctaccctgatcctgagagcgtgtctgccccctttccagatggatccagtccctggcgctcctacttcccaactgctcctcctcccgcatccccacagtaccccgtcctcacagcgggctgtgggtccaatcagactttcccctcggattcctctctaggactgaaccaagacttacccgaagttgccgcggggccttccgatcccctgtgagtatttcttcccccacaccccctttcccatcctcgaccttcccttgtgcgctcccggccccactccccatcccaacagcagccaatccccgcttggccctcttccatatcttctcccagtcgactgagaaccgccaggtcattcccgaatccctccccttcctttcctcatgcccgccagtcttcaaagaagtgttatcctgtcctgtcctaggctaactcctctccctccccatcctgtctcctggctcctcagatgcctttcactccagtccagcaccagccatctctcctcctcgctcttttcacccctcacccagccctgcctttaaacaaacccatagctccccagtcaggaaaatgcttggcgttcaccctggccactcctttcgttgctaatagtctctcctcttcgctggcaagccacccccaaaacgcagcctactccttctctcatcccccagatggagttgccactacaactaccaccactcttaaggtagatcgtgagggccgggtgcagtggctcacacctgtaatcccagcactttgggaggctgaggcgggcagatcatttgagg

SEQ ID NO: 53187 - DNA, 2417 bp, Homo sapiens
tccgtctcaaaaaaaaaaaaaaaaaaaaaaaaaaatgtgggagagtattccagaggcagaaaacttagttggcccaggacacaaagggatttggtctcgttgaaaggtgatcagggatggtgatttgcaggttgtgtccacttggattcttggtgcatgatgaaagtctcccccaaacacaatcgtaacccagctctgcattttggttcaatcttgaggcacccagggaggacacttggaaggaaagcatccaccttggtctgtttctcttgtgtgagctcagctctcccaggtgtcatagtgggcacggcctcgagggggcagtgtccactcagagatgtgcccaactgccctgggaagcaagccctgggagggccttgttggaaaggttccagcctgccaggccagattcacgaaggctgaatcctcagaacacatagaagagggggttctctggcagcacccctctcaggagtttgaagcaaccaggggcagtaaggagcaagcagctgcgagatgtggattcctcaggccgtgcccccatgtgctggaaaacaggtggcagaggttactctgcctggtgtgtacacatacatggtttgtttgatcatatccggtataaaccctactcgaaaatatttgtcatccggcacctacggagttcaaaatactaacacagtacagcctgcactgttgtccctggggactgaaaggggtcatttttgggtggcctgacagaaatgtgtcacagagcagtgtcgccaaatagtgccccactctagttttgctcagaaggggccacatcagctgggcagggtgtggtggctcatgcctataatcctagcattttgggaggccaaagcaggacaatcaattgagcccaggagtttgagaccaccttggcaacatagtgagacctatcctccacaaaaaattttaaaaacagccaaacatgggccgggcacggtggctcacgcctgtaatcccagcactttgggaggccgaggtgggcggatcatgaggtcaggagatcgacaccatcctggctaacacggtgaaaccccgtctctattaaaagtacaaaaaattagccgggcgtggtggcgggcgcctgtagtcccagctactcggcaggctgaggcaggagaatggcgtgaacccgggaggcggggcttgcagtgagccgaattgcgccactgcactccagcctgtgcgacagtgcaagactccgtctcaaaaaaaagaaaaaaaaaaacaaagccaagcatggtggtacccagctactcaggaggttgaagtgggaggatcgatccagctcaggaggtcaaggctaccatgaaccatgatcacacattgcactctagcatgggtgatagagtgaggccctgtcttgaaaaaaaggaggggccgcttggggagagagggaagggaggaagcccaggccaagggcccagtgcctctgtggttggggctaagggatgttggggcccccaaccctgattcttcggaggaattgggaggaaagctccaggttccacgtcatgtggatgggcctgagaatgaggtgaaaggtaacaatcacacacccaaaccagttatgagccaaaggtttcaccagataagggattgatggccacaatcaccagcacatatgcaattctgtgggtcagacagggagctgagtcaccatgccccgcagtatctcattgactgcccccaacaacagagagtggttgagagtccccatttccaaatggagcaaactgaggctcagggggatgcagataagtagcgaagctatctgattccagaacctggctgagtagccacagtgtgctgcctgcctccccagtggagcctcttgagtctcttatctgaggtcgggcattactaaaacaggaatcggaacttgaacccagcactctccaagcccttaagcctcaggtcttaaccacagagccctgctatgtttgttgtatgttgtatctgcccagggccctgacctagcggccaggtcagtggccagaaatgatcagcctctgccttggacttggcctgggcccctccttcctggttcctgtaggtagcctgctcggcttccttcccagtgagcctcccattcctaacatcagcaattctggacaggagtaaagtccctcttgacctttgactccttcagcttctcatgttcatcccacaatcccaaaagttcttggcggaataatcattatagcagctaatgagcacattctaacttggagaacattctctgtgccagaccctgagcctaatgctctgcctatcacatgtgttcctcatggccaccctgagaggtaggtagagttgtccccattatccaaatgaggtaaatgaggctcagagaggttaagtcactttcccaaggaagcacagagaag

SEQ ID NO: 53188 - DNA, 2642 bp, Homo sapiens
tccaaggaaatctgccaattcctggtctaatacctcactcctctgtggaccttcaagggcctggcacaggaatctgagcactgggacactgactcggctcagggatttcctgggaagtgacacacaggatcctgcttaaatctgccttacccagtggatggttgatgaaagagggtacgctggtggctgtgagggtcagctccttctcttcgctgccttccatggggcccagcaagaagcgaacacgctgtttaggagcgggaggcttcctggcattgagacctgaacacacagagataatatatacacacatacatacaaatatatgtacatataaaatattttttaagagacagggcctcgttctgtagcccaggctgaagtgcaatggcgccatcatagctcactgtaacgtcaaactcttgggctcaagcgatcctcctgcctcagcctccagagtagctgggattacaggcgtgcaccacgatgctgaccaggaatatcttgttctgtccaaacacttgggggattagacaacagggaagtatgatgtagaagacaaagcagaagcccatggtgcagagggcagtatagcagtagttaagaaacaggcggattcaaacagactctacaacgtagtaaccgtgtgacaaggaacaatactgagtcagtttccccctcggaaaacagaggaaagtgaggagtaagaaagcacagagaacaggcgtttgggaaagcgctctgcccaggtgaataggtcacgtgattttgttttggggtaaggaccagaagcggagatggacttccaagagaacgagagcgggaacgtgggtctggttcgaggcactcacccttcagaagttgtagctccactgtatcccgcaggtgcttccattttagccccgggggcttatagaccgcgaaaagcccatgcagccgcgacaagccagcagaccccatacttgaagatcacagcacccgctggacctggacggaagtaccgccaggccccgcccccaaatgtggtcctttccacgggcgccgccatgttccacagccggaagaggttcgcattttatagtcttcggggaaaaccggctgtggagaaggaaatagggcccggcgctgagtgagcgtggttgcgtgtcctttgcagacactttctggggcgaggtgacatggcgagagtcttggatcggtggacgtagacggtagacagttcgcgtgcgtttccttcgcctacttggcctacatgccttctgcccgtgaagcgatgtttcccctcgaaaggccgtaggctacgccgtcagaatcggtttttcagtgagttttgacccctccgacgctccgtcgcctgacagaatcgcggcgttcttcgtacccgcccatcctccgcggacgcccgctgccatggcgactctgctgcgccctgtcctccgtcggctctgcgggctcccgggcctacagcggcctgcggcaggcaagtggcgccgggttctgggcgcaggcgggaaggagcctgagggcgcccggctcctctgacctcggcctttttcttgccccgcagaaatgcccctccgggctaggagcgacggcgccggcccgctatactcgcaccacctccccacctccccgctgcagaaagggctgttggccgccggctccgcggcgatggcgctctataacccctaccgccacggtaaggccgcccgcgcctcgcccccgtgggggcggcttggagccgtttcctgtgggtaactggaacatagcctaggtcggggtacccaaacctggttgcagctcgtaaccactcggaacgtttatgaaaatgcagattcctggatcccacctaaacgcactgaatctgaatctgaatctgcagtggagggagaaatgggcgtgaaaccgaaagtctgtctttaaactacttgggagaatctgtcatgcagccatattgagaacatctagactaaatagatgattcataagtaccgatcagtttataatatcctactagaaagtcaactccgaggtcgaggaccatgtctgcctcgttccactgcatctgcagccttctggatagtgcctggcacatagtaaatgctcaataaatgtttgctggatgtgtgactagaacattctagggttctacagtgtttttcttatgcctcctagatttttgagttctgggaagtactgttattcctactaacaaaaacaggctaggcgctattatagtggctcacgcctataatccctatcggggggccgaagcgggcagatggcttgagctgaggagtttgaaaccagcctgggcaacacggtgaatccccatctctacaaaaaaaaatacaagaattaattggggctggttgcatgcggctgtattcccaggctgaggtggaaggaccatttgagccggggagttcgagactgcagtaagttgtgattgcgccattgcactccagcctgggcgacagagcgagaccctgtcttaaacaaaaaatacactatatctccatgtccccagtggttttttgtttgttttgttttgagacacagtattgctctgtggcccacgctggagtgcagtggcgcaatctcagctctatgcaacttccacctcccaggttcaagcgatt

SEQ ID NO: 53189 - DNA, 2389 bp, Homo sapiens
actatgttgcccaggctggtcttgaactcctggctgaagtgatcctcctgcctcagcctccaaaagtgctgggattacaagcttgagccaccacgccagtcccagaatcttttttttttttttttttttttttttttttgagatggagacttgctctgtcgcccaggctggagtgcagtggcgcaacctcggcttactgcgacttccgcctcccaggttcaagcaattctcctgcctcagcctcccagggatctattaatgtttaaggacaagtggcaactgtggatgcccaacatggttacttaacaagaaaccaatttttcagaggccaagagtcccaacagggccgagaatctggccactcgcctatggctctggaggtggcatgacaaataagggtggcatgacaaatataggttaactgatttgttgcagggaccagagatcatagatggtgaagttaactaagggcctccaaatccgtgtcctttgtgccaacaggtgtgccaggctgctcacaagacaccatggtacgagaaaggatttctcgtagtcacctagacaccaggtttatggctgtgtcgcagcaaagttgggtgtgacttatgattttcgttctgaaccttatttgttagataggtcctggagtccttaaaacacgcaggtgaaagtcagggagtaggagccatcaaaattcgactctggtgggactcgaacccacaacctttgaatgaccacactaggctcagctagaagtccaatgcgctatccattgcgccacagagccggctgcggaacccggccgccccgctcacctctgcctgaaaccgccctcttagcgagcttctaggtgtggtgctgggtgtttgctgaactcggccggggcccgagagcgtgctccgggttttcggctgtggtgtggactggggtgctcttcctacatccgggcgctggggacagcagggggcaagggccggggtcggcagggaggaagggccggggtgaagcccgcctgtctcctcgcggactcgggggtctcctcggctgggtggggccgcgcggcgtggactacaactcccagcgtgccgcgcggcggcgccgcccgaagccgttgcgcgagcagggcgggctggggccgagcggcgtcaggcgcgctggggctgcgctgcgccgccggctctgtggcttgccggcttcggggaaggtgcggcaggcggtgctgcggcctggcacagcaggtttggggtgcgggaggcgggcggggtaggagcgcggcgggcggggccgggcggcgggcggggctggcggggcggccgggccatgcagggcgcagagccggctaaaccctgctgagacccggctccgtgcgtccaggggcggctaatgcccctcacgctgtctacgctgctgcaaccgggccgcatctggacggggcgccgcgcggcggagccgacgccgggtgagcatagaccgggctggtgggttcccgggtggggacatgtgccaggccgagtcgggcgaggtggcggtgcggaccccaggtggggggcgcgccctgcggcgctatttccccgacagacgcactgttaccttgctgtctaggggcgagggcggcacgcgtgacccgggacaggggcccgagggaactagtcaccctcttctggcctcttcttgccccagccttccaggacaggttcctgcccctctgctatggcgggctatgggaggccagagatctgaggaccctggaccctggcgttggggttgaggactctggttcagttcccccgcccccggcttttgcttttcgcgagggggagggggagatggtctcccagggcttcttgtggtccagaccattcccttttcctggcttggaggctctcaggccatttcacatttgtgaccttcatctactcccaagaacaggaaaactcggagaaaaacagtcccatcagatgtccccttgatcgagtcctcaaagctccaggaatagaacccaagagtcctagctcaacccagcccctgaagcacagtcaagtcattcgccttcccctaagccctagaccccaaagattcatccgagtggctgtgtgtgtctgtgtgatgggtggtggtgtcttcaaggtcctcctcgcctccctcaatcagctttgccccctgggcggtcacctttcaagcacttccaggctctaactcgttttctgggtcgccctctatagaccaacagacgcactgcgatacctgagtctatgggcagggaccaagcagggctccttttccagggagctgcccctttgacttggcctggtcatccacagaacctccctgggttctgggtggggagtcgagccagagactttttttttctttttttgagacggagtct

SEQ ID NO: 53190 - DNA, 2340 bp, Homo sapiens
acagggttttgccatgttggccaggatggtcttgatctcttgacctcgtgatccgcctgcctcggcctcccaaattgctgggatgacaggcgtgagccgccgcgcccggcctgccctgagccgccgcgcccggcctgccctgagcttttgcaacaggctccagtggtctccgtgtctctttccttattcccctcaaatcattctccatattgcagccagaaattatattttaaaacacaattctaaaatgtcactgtctcccaaaacccttcagtagtctcccactgctcctagagactgaaatgtttacctgcttacaaggcaggggttggcccctgagcacctttgcagctccctctctagatggatgaaagtcaggctccctaacttccaccttcctctccatgttccagcatgttctcacccagagcctctgggccttttgtcctcctcactggaatgctcctagaggtttctctcccctcacagccacctagtttactcaggttttagagcccagcaagtccagtctactcagttttctttttgaagttcctataacttcagttcctttatttaagtttgaggttgtacatgtcttagtatgcttatttgattacagttagtctccccgctagactgtgagtgccctaaaggcaggaaccttgcccatcccctttaccactagcaccgatcaaaatgcctggcacagggaggcgcaatgaacagctgttgaacgagtgacttccaaatcgacagcaaagggggcggctggatagcgagtcgcccgctcaggagagattctgggtcggaaataaagatctgggagtcatttataattccaaccagacgagtagatgggctggcccaagcggtgtgtagactgaagagattctaactcatgcaagataagcagctacgtggctcacggtcacgtcgcaaaaaacctgggggctctcctccgcctgcttgtggtcccgtacaaggcgcttcccaccctgggtctctgagcccagtcggtgaaagacggaaggagaccgattcacagccccaacagcgccggtgatagtccctctgccacccctttccctccgctgccctcccctcccctcccctcccctcgatgacttcctccaacagctgacgaagctggatccctgggcaccgcctcttccgtccgcggcacccggagacgcccggaaatttgcgggcgcgccggaagttgaggggagtttcctgcgagctcggcttcctcaacatggctgcgcccttgtcagtggaggtggagttcgggtgagtcacagagctggggcgccgtggggatggattgaagtcgtcgggcccagaattcctttccttctgccgtggggcctgacacggccgaatcactgggtgtcccagtgcccgctgtgagctacgctacccgcctaggagagtctgagaggccagtctctcttggcagtgaggccgtctgtccggaaatagaggcgcacattgggagggaaatgctctctgtgtaccactcggtgccctgtgctccgccggagtcggaggtcgtgactgttagcaggcagcctctctctcttcttttccattcctatctcggaccaatcccatctgtttggcatctgagctcctagaacctagaaggaccaccctccacccgctgatttcattctttgggcagcagtttctttttacactgttattaaggtcttgtttctcgtgggatgtagtggccagggcgggacttttttctttttctttcctaagacttggggatggtaaacagacctgagcctccttcaggacagtcagtaaacttgctgattgccttctgcagaactggagtcaggtggagacacggggacaaataagaaatcacactgaagggaactaacagggacagtatagtatacacaagatgaaaaatgcagagattgggacacacaccagttactgaagaaacacagagcagggaggaagtctacccaaggcactatttgtgcttcctacaaacaggtttgtcatatggtttcaaagctgagggaaactgcagagcttagagagaaggcaaagaaacaggccttgaaagatgggtggtgtactttacagtatcacgtggaaaagaggaaataggtagggatgtgtgtgtgtgtgtgtggaataggtaggtgtgtgtgtgtgcctgtgtgtgtgtagataagccaaggtctatgtgacaggaaaagtctgggatgggaatctaaaacctctgcccagtgcctttcttctcattggatgcctcccatttctttcatgttttcccttaattgggtagttcattcaccagccatttat

SEQ ID NO: 53191 - DNA, 868 bp, Homo sapiens
cgctaggggctgggcctcgatggcgaaacccaagcggctcccgggggggtttgaactggccaatgggcgagctgccgaccgggtgtcggaaaaggaggcggaagcggggaggagccgctgccagagccagactgcatccgccgcggcgtctccatggcacgaccctggcctccgacttcaacgacttcataaggcggcgtttctgggcgcagccgtgtcgctcctggtgagaggccgccggcaggcgggatccagcgccctccggggcaccgcgggcgagaccgtcgccttcgcacccccggcgcggtcgaccccgcggggccgtcgggtcctgggttccccgccgcgttgcgctcgtccccctcctgtcagaacctgggcccccgccccgcccaccggcgcggggcctctcctcctcccgctaacgggcggtcggccgcctccttcctctcttggctaccacggggctctgcccctcctctgccgcccgcgggcagggcttcacctttctctctatgggcagaaaccggtaccctcctgcctgctggtgggtggccgtcccttctctccgccgacagaggctctccctcgctctgctgcccgtcggcggcatcgccccgaccgcctcgtcctctcctcgggcctccacatggcagtcacttgtacgccctccgtaggcagcgctgtcccccgggcaccgtctccggcttgccagggccctcgcccggcgggggggggtcccgcccgccccctcccagcccggcgtctatcctgctcagaactctgttcggttttccctcgcggcggggcgcccggggcccgtgcaacctccgcgcctccctcctttaaacactattggtcctctcgg

SEQ ID NO: 53192 - DNA, 1607 bp, Homo sapiens
aaaaaagcagcattaaacccaaaacatttattagggaagcttacagagtgggctgcagcaattctcgcgacagacagagagaagcggtgtttcacctaggtacatccccagcgaggggtcagggtatgaagtttatatgagggtttatggaatttggctaaaagcaggggtcagtttcagcgttttgggcaataacctagatatccttagtgcctagggatatgcaaggcccgtgtttggttgcaagtctgcaggaaaaaacttgcagctggctgggtcacagggcggtcaaggcactctgatacttggtcagtgcacagaaagcgggggaactcgggaaccgcgcacatagtactatattttatttatccattcaccaatggatggacgtttgggttgctttcactttttggctattatgaataacactgctgtgaacattcatggacaagtttttatatatacataggtttcatttctttggcgtattttatatatatatatatatttacctaggagaattgctgggtcaaatggtaattgtttaaccttttgaggaactgccagactgtcttccacagcaggtgcttcattttacagtcccatgagcagtgtatgagggttccagtttctgcacagtctcaaggcacagacaaattttcagcagccccggggattgggagcggtggttacctctgcggaacgtgccccgacagccaagccctgcgcgcaggcgcactggtgggagggcgggaacgcgggagcgtcgccggaggtggggcgtgcaggcgttaggggcggggctgtgctgcgcgcgcgtcccggaagcagaagcctgtgtggccttcccggcggctgattcgagggcttgtttggtcagaaggggggcgtcagagaagctgccccttagccaaccatgccgtctgagggtcgctgctgggagaccttgaaggccctacgcagttccgacaaaggtcgcctttgctactaccgcgactggctgctgcggcgcgaggtgagcggtggccccggaggacgtaggcctttccggcccctcgcgaccgaaaccttctccctagccgttggcacgttctgctcccgggaacccgtgcagtctaacaacctgcatttatttcttgacttctgtgtgtacatccctctgtcctggggtttctgtcctcttcagcctattttagcgtttcggggagctcccctgacttcacaggtgccccgcgctctgaaggcttcattgctaccctccgccagttgggcgccttctccgttctgctgttgtcaaagcaatctcggccccaggttcagttaacttactgtatgtctcatgtgctgggagctctagagtttgcgacgaacgattgacacgacctaatccattgctactagtgaaatgaccaaatttttagattgatttggcagacctggaaagtgaatgggggcgtggtcaccgtacctagcatttgcaaagctctgcgcgagaagtggagggatgtggagagttaaggccgagctcccattcccgagtcgctgctagttagctacagataaggcgttgtcctgcatcctcagacttcttgggaaacaatcctaaa

SEQ ID NO: 53193 - DNA, 1309 bp, Homo sapiens
gtaatggagaagaggtgagtctccctgaattatgactgggaatgttgatgtgttcaactggaactctttcccaagaggaattccaaagggaaagagttgaacaacttctgagtccttaaatatcaaggtaaaataggcagagaattttataacctggaaaaaagaccaaacttggagagacaaccaaaggaacacaaagagggaggcttttaggagaggtaaaacaattttacgggcgtggtggaacacagctgtagtctcaattactagagaggctgaggcaggaggattgcttgagtccaggagtttgaggctgtggtgagctatgctctgcagcctgggcaacataacgagaccccatctctaagaaaaagggaaggaagggaagggagggcagggagagggagagaaaagaaagaaagaaaaacaatttcaggaagtatccctgactattcctccctgccatttttcatgcagctccagagaagccttgggacaccaagagaagctaaaagctgagcaccgtcacagagcaaaggtcagagcctggcagaattggtgtgggtgttttggtgtctgtctgtaacctgcctggagagccaggttttggcagatggccaccatggaggatctgggccgtattatgcctgtgtatgactaaccttgggatgtcctcttcctgctctgagcccatctgtgaaaatatgtagcccacgtagaatttgaggactgtagaaagaagaagcccaggaacccctcagagagaagtcactcagcccttttctacagattctcaacctgaagctgcgggaagcagagcagcagcgcgtgaagcaagcagaacaggagcggcttcggaaggaagaaggccagatccgcctgcgggccctctatgctctgcaggaggagatgctgcagctcagccagcagctggatgcctctgagcagcacaaagccctgcttaaggtcgacctggctgccttccagacccgaggcaaccagctgtgcagcctcatctcagggatcatccgggcctcttcagaggtgaggggggcttcagagtgactctttgctgtctttgaaatggaagcctttaaaagcaaaactgttttctgacttaaaaagtaatacctgctatctgcttattgggggaaataccaaacattacttgttatctccatatctctttacctagaagtaaccactgttaacattttattttgtttcttttatttatttctttatttttatacctgcttattctggagtctttttttttttttttttttttttttgtgatggggttccc

SEQ ID NO: 53194 - DNA, 2292 bp, Homo sapiens
gcctacatgagcattatgtaagagtgcccatttgtaaaatgggaaaacatctcataaaattattgcaaagattaagaaatgaaaaggtaacacgaaatacttagcatagtgcctagtacacaaggcaagttcgattaattgtgccagaaagaaccttaatgtcttgtttatgaaataggatgaatgtagcctattccactggcgacctgtgagaaagcttttgttgcaggaatgtaagaaattattattttgccgctgccgtttcctcccccataatctccaagaacataagaaattaactctccaaatcccagaatgacagctttatgccccaaattagtcgacttaattttttttctgattcggatttggccttttcctctcaccacctcctcaaacccggggccccaaatcatccgcgtcttcttgaccccagcccccaccgaattaggctgacttgggaccccagcgccagcctcctcctcgggaaagtgagcaggaagagacgcactcgggtgatctcaccctttgggactgggcgtttttccggccggggcgcgcagcatccccagccagactgcagcgatacccccgccccgcccttctccgcagtcctggaagagctcccagggcggagtggtgcgatgcagacgactgtccgcagggcgggcggtggcggggcgcaagctgcggggagggaggtgaggcgggagcgtctctaccgccagggcgtaggcagtgacctcactgcaccatcacccctcaccccttgcgcgcgccccatttccccatcctcccgcggcccgcccctcgctcacctcttcccccgcattgtcgcttcggctccttccgggatcgctcggccctttccgccgggcggtcgggcggcgagccggcgggagcaccgccccctttgctccgccggcgcgctcccccacccctcgcgcagcgccggggcgcttcccccggcgctcgcgcccgcccgccgcgggagcgcgcgtagccgcttataaaagaggcggggcgcgcgcgtcgccgccactacccgctgcggagtgaacggtgtggagcggaggccgcggaggctcctcggtccttcagcacccctcggcccgacgcacccacgcccctcaccccccgagagccggtgagaggggcagccggggagctccgggagggagcggggccccgggcagccgacccccgggtgggagctgggcagctcttcaggcggggcggggccggcgcgcggacaggtgagccgggcgggccgcggggctgcctccattcggctgagtgggggaagccgctgccgctgcttttgtggcgcgtgggctgcggaggagcagccgggccgaggctcggcgccgccgctggaatgtcactgacggggggagggggcgcgaggccgccgggtccctcccaaccacccccaagcctggctgcggcgcggccctgccctgccccatccggctgcggcaggtgggtgggggctccctcgtcgggatcttcgccagccgcctccctgcagaacgctccccgcaccgcccccggtcccttccctcggccgggagcgacttctgcagctcgttcttccgaatcgcaccagcaatgccggccagccgtagagggaggaagagcccggggagcccgagcatagcgtaaacggctctctgaccttaatttcatcctgcatggcgaatctctgccgtctctctgaacgcagaagggtctgagactggccgtctccttttctttccttgtaataaacatttttctttcttcctagttgtgatttgcttgtaaataataggtaaatgcagtgcttgcatggtatgtggctcaaatcaaataacttaatagcttagcgttcttgtttgtgtgtgtgtttcctgggactgggtctttcgagtcgagatacagtgtcaaaaattctaccataccactgttgaatgatagaacagtcttttgtttgaaagctgtccctgagaatttgattagacgcttcccctagaacatcgctttcaaaagtctctgatgtactagagtaaaatatattttaaataagcgccttgttaaaagttgaatatgttttaaatgaaaagcctaaatagctcagaaagctgggttgagatgatgcttgaactgttccaacatctaatcagatctcttttatataatagatcctaaaatatttaagccctttgttctgtcttcatcatgttattttagaaaaacttaccatcatggctgttcgggaagaacaggagagaggccatatgaagtattttc

SEQ ID NO: 53195 - DNA, 849 bp, Homo sapiens
tgcatattcctcttgtaccaattttgaacaggaaatagtattttgtaaagtaagtgtactggcaaactaggcccaagtcagatctttgtggcttgagttctactttgtggcaatttcatgaagtcatgctcttttattgctgaatggaaggggatttaggaatcatcttgtcctgggatcctcaggaggaaggcatgtttagtttgaaaaagtatattcggtattattactttaacaagtggggaaattgaggccccaaggagaatgagacttgaccagggcagcatatctagaaagtaactgccaagacctgggaaccttggttctccttccacattttaaatcccttgtgggatttagacgctatacagaatgtcagagagaagacactgaaaaaatatctgaaattggatttttaatctgtattcatattttttaaataatctgttttcttcatgattttgttccgtttgcccttagaagcttgttatcttgctcttccccctccctctttagactccacattcctccatcatgttgtcatcgtttcgtaaacgcagagtccaggtatttgacgagcatgcagaaaacgggttgcctttttggttttgcctggcttgcagtgaaggcatattcgtgtcaaagaggttgaatgatccaaagaaagggggaaaaaaaccctgcctgcatgacgtttctgttaaacaaattggttaggatttgtttggggttttttggtgttaaattatcagaagtattagtaaatttacttgaaaatttgcaaagcctttttttttttttttttttttttaacctccctctctttctctttaaggcatgaatatatta

SEQ ID NO: 53196 - DNA, 624 bp, Homo sapiens
tatgatcttttgctttgggtgatgtttatgaatttttccataaccaaatgaccaaacgacccgttcatcctgttagtccctaaaaatccctttcttgcaaaactgtatgtctagtggtgtcctgcctgagaatcagaattcattttgtagtattccaaatgtctcttacatccagtgcattcaacttgctgaaagaatggcaatcccaatgctttgtttttaatagagactcctttcagcttcactataatttttttctctcttttgggattccatagagaaactgactgcactcactgcaggtgccaggtttacagagtccagagcatttgacctttggttcgaaaatgtttgtatctgcagtcttttgtgttgcttaacgcagtgggattcccacccactgcctctgcctgtacaagaagatagagctatatatcccataaataccccccaattttttttatttttatactcccaaattttatgcccccaaatacccccaaatttttatttggggaatgaaaattccccaaataccaagaactgcctcaaacagctgtctcttggcgttcatcaataagacaaagatattcatgtctaatctattttgtaggaatccatttt

SEQ ID NO: 53197 - DNA, 887 bp, Homo sapiens
agagacagttggctcctttgagataagcagtcagttgattgcattcctaggaagtcgtctctgttgtggtttttaggcagttagtggaactgatagataggctggtaagattggagtttgttttttaatggcacgtttcccagatttttcctttctggtgctctcaaaaggcgttaatcccatatggctgggaacagcctggaacgttctctgtgaagtcggccttatcagtctgctgcatatgccagggaaggggtggggtgcttgcagcatgcagcctcggttgtggaaggaatgtggcacgcccaggccgagctgagctgacatttcagtaactgacagtttcgggtgagaggctgtagcacctttggatggcaggaattcttaatgatatttatgagaattttcctgtgtttaatgtagtctgcagaaatgacccttttaggagcaaaaagaaactggaactcgtgtagataaacaagagacagctccctgtcaggttaagaggggggaaactctcactaacccataatgttttttggtgtctcctgtaattgcacaaatgaaaattctgaatgctgactgcagtgggagcacattggtgactttcagatacccagctccccagagacagcctgttgtggcttggcagacctcccacctactgacgtcagctgatctactgcaggaaagaaaagtccattattgcctgaccaaagcacttggtatagaattgactcgttctacttcactggggtgacaaagagggccttttaggttggttaatttcagcagggccttgctgaactgtctctctggattggcaggatcaaatcagcaagctgggcccaagcagggggacttgctcagatggaacctttgcgata

SEQ ID NO: 53198 - DNA, 771 bp, Homo sapiens
tttttaacactttgcccaaagacctagcctcattcagtagatcagattaacccaagataactttctgaggcaagaattatgtcattctctgttttcctgggcagaagatctccttaccaggtaatataatagctatttttctggggtgctggtttccagggacctcatgtcttggatcaatggaatacgggggttggtgtcctcagatgagctagccaaggatgtcaccggagctgaggcattgctggagcgacaccaggtgggtggacctgcctgctgagtagcaaagacgtggctgctctgcagggccctagaggcctcattcccaccctttgtggtgagtcggtggttgacgtcagagtgggcatctgctgccagttacctaatcccttccctccttttggcaggaacaccggacagaaatcgatgccagggctggcactttccaggcatttgagcagtttggacagcagctgttggctcacggacactatgccagccctgagatcaagcagaaacttgatattcttgaccaggagcgtgcagacctggagaaggcctgggttcagcgcaggatgatgctggatcagtgccttgaactgcaggtgtgtgtgctcctggtttctgaccaagtgtttccttgctgaagggcctcattttctcacctgcctcttgccctctttagctgttccatcgggactgtgagcaagctgagaactggatggctgcccgggaggccttcttgaataccgaagacaaaggagactcact

SEQ ID NO: 53199 - DNA, 2209 bp, Homo sapiens
aagacctgaacacgggtctcagagtgggcagaaggcaagcacttgaagcagtttgtcatgaggcttggcaggctagagacccgcagggcagggacaccctggccccactgtgccccaggcctgccctacgtacctgtggaagggggaacagctcacagagtagatgggaccgccgtggggggagaaggtaaactgtgctggggcccgcaggggcacggagctgggcatccgcgtgagggctgcctctccagctgccagggaacacttgagcgggaagccgccttccgtgcccagaatgaacagcctagggtcaaagctggagaaggccactgccgtggcgcccacctcggtctccccgcggggatgctgtggagaaatggcagcagcagggtcagagccaagggcatcagatggcactgtcccaacagagccagagaacaggaggggagatcacagcaagtcaggcccactgccacaccttcccacccccaaggctcaccggcgcaggccagggcagtttccgggtgcccacgtaccttcttgagcttggtgctccgtggcagctgctgcatgaccagggcgaagccctctgtgagctgcagctggcctaccccgatgccctgccagagtagcaccttcccgtcggtggccacactcagcacctggaagcggtggctgtgcccaggctcgggcagccacaccacctgagttaacagcatgcagggccaggatggagacaagggacacctgcccaggtgtcacgctccacccctaccctccctctcttccaggaaaaaaaaaaattctccgggaggccccagaaccaggctcacccaccagggggcaggcctggagggttcccagggccctctccagtcccagaatcccagcgctgctcactcggtgcctgcagaggaggctgggaatggccacagggccctgggagtggctcctgaggggggtgactcatgctgcgggagctccgagaatgcaggaggcagctgtccaactgccaacgcccgggtgaccttcctaggagagtgggcgccctctccccagctctgcctcagggcccaccccgcccggcagcccctgccctgacctgggacacagggtctgtgtgggtgtcatccgtcaggcctgtgcgccacagcagcgggtcctcaagacggctcaggtcccacaccaacacctcaccactgtacagccctcctgcagggacagtggacctgggcagaggctcagccccacccccagcctgacttcctggccaaacacccgccccagcccacctacagggccagggccagggccaggcggcagagccacttggctggaagtcatccccacagagggagagtcctagcccccagctcccctgttgtaccccagggagctttgccggacacccctgccctgcacctggcagctccctccagcgttgcctgccccctaccactgacggcttcccaagggcacctgcctcttctggcctctccacagccccctgtcctggccccgaccctggcccccttccagactcctcccccgagttccacccctcagggctcactgcagaccttcacctgggctccagactgagagggtcagggcccgccttcctgtctccgggccaaagggcccatggaaagctcccttgtgccctctgcagggcgggaagctgagtcctgagaggagaggaggcggacacagcaggcagctcacctgcgacgtgggagggctgcgtggggtggaaggccagacacaggacagcgctggggacctccaccacggccgacggctgctggggacgcaggtctcgccggtccaggttccaggcacacacgaaggacttaagcgtgctccagtccccatggtccagcctgtgcagggacaggcttgagccggctgtgcccctgggtggggctcctatcacccaccccacctctctccccactagccccggacacactcgctgtgtccttgtcaccaccagacactactctgggtattgaagtggcccacactccactctagcaccccaagggtgtggcattctctggaaaatggtccccaggcaccaaggacagtccatgccatgcaggatggggaagcagctggtggggcgggcgaggcaggcaggcccagggcctccaggcaggggggagggtgatcctggcactcagccccactgcctgctcttctgcca

SEQ ID NO: 53200 - DNA, 1392 bp, Homo sapiens
gacagagcgagaccctgttcaaaaaaaaaaacacaaaacaaaaccaaaaaaagttgtttgaaatgcttaaaaactacagttcacacaaaatccttcaaaacgtgggatccttggaggtgttttgtttttccactttttgttgttaaaaaatgggccgaaagtatcctctgggtcagtttctgtggaataaactgtaaaggcaaacggtgggacgcccgaacccgcccggcagccacggtgggacgcccgaacccgcccggcagccacggtgggacgcccgaacccgcccggcagccgcgctgcgaccccgccttcccgcccgcgtcgctccgcgcggggcccgcgccctcaccgtctcccagcggatgccctggacggccctccactgcgagggcacggacgccacacccagggtctcgtcctgcagcggccctggccgccccggccccgggccgctcgcaaccccgactgtcgccagcgccgcaacaccagcgcttcccgcctggctgagtggccccggctgcgcgcgggttgccatggagacggttccgccctctcgtgcggacgcactcaggcgcgacctccgcccctacgccgccatgagcggaaaacggggaatgtgaggctgacggcgccatgtttgaattggtcgcagcgcctcctgcaagacctggaagaaagaaaagtaacgattcttctcggccagagagagaagcatgaccggttttgcataccctgtccccagaaaaagcactctaagagtaggcgcgctactcctgggcgaggaaactgcggaagtgaggcattggtgccaggttcaaagatggcgctgagcagccaagcgcagaagcgaagagagggcggcagcctgcggccgtggccggcccgcgaggtctgggcctgggagcgcagatctggctgagcagctgattcttccagcagatccgagaaccgcgccactcgaacaggctgtcacctcgaagccaagtgatctccctttaatcctcagtctctgtctcaatagaatgatgatgaaaaatattcctacggagatcctaaatgtggttaaaaagctgggaggcccaaatgaggtcttctacagaaacatgcttattaaatcgaaattaaaagcaaataactaaataatgtgcctactgtgtgtcaggcaaagagcccagaacgtctctttcttattaagttctcaccctgaggaaagaattgctttttatactatattatgtcgttctgccattccgcgcgccccaccggaattaaaaaaactggagattctgacctgaggactaaaaaataaaaataaagaataaacaaataggccaggtgcggtggctcacacctgtaatcccggtactttgagaggccaaggcaggagga

SEQ ID NO: 53201 - DNA, 2015 bp, Homo sapiens
aaaccctcttctcttaacttgtatccctttctgaaacaagtgaagaatgaataaatactccaagtctccaaagtttcctgcttttccctctttctctgtaattctttctttcttcttttttttttttttaaagcaggcatctaattcctttgtaattcttgattgggaaatctttttttcaacattaatctatcccttcaagcagagacaagggaggtcaggaaggagttagcgaaaccgggcagtgggggtgtggtttactgaggaatgttccaagcttaggtgaggcaacagcacgtgtttaaatcttttggaggccaaaggaaaaaaaaaagaggataagttctcagtaggggcaggcctgtctacctgggggtttgggaacgaactgggggataggctgcgggggtttcacgtgaaaccaggaggtctagaaagcacagggatcctctcctcaaggaagaacttgccccctcccccaaagccaagagtgcccctgcagagcgaggcagagagcaactaaaagaaatttctcctgattggagggtgggtgggatgaggctgggggagggggccggggtgtgtgtcccactgtcatgtaaatatcccttccaggcagggcggctccagtgcagatttaagccgctggcacctggggcagtctcagtgttcagcctgcttccggacgggcgaggagactcgtggtctggttctgggacttccctaacagcatggcccctaaacgccagtctccactcccgcctcaaaagaagaaaccaagaccacctcctgctctgggaccggaggagacatcggcctctgcaggcttgccgaagaagggaggtacgtttctgcgctaagttttattggagatttaagggatttgcaaggattgactctctgatttttaccccccaatccctcttgagatgtgacccctaagcacccccaaagggttttaaacctgggatggtggattaagtttgcgtgaagaaccagaagggactagactgggagaacgggagtgcacgggagctcatccctgcccccaactcaacactgacccctgagcttgtctccccagcccccaaacttcctcctctggggctccctttcttggcaaggggcactgccagccagcctgaggcccctccttcacccctccacatccagccaaatccccgattcctggtggttctacctcagtatctctcagatctgtccacctctctctctgttcttgctgccgacggcggcccacaactctggcctgaatctctgccacctcctcatcttggcttccagcttcctcctcctccccttcagcctgagcatagccaatcacgtggcccactccccggcttaaacccctcccttgcctccccgcgtcctccaggtgctcagaaacttctctggcccgccaacccggtccccgccgacctctcctggttcacacttctgagactccccacctggaggcctccctcaaggtggtacccttcaccttgacctcttgggactctaccctctgatctcggggcctagacacccacttgccctttcctctccttacctgtgcaccacctccagctctctgctggaaagtcacttcctgtgggcaatctgtgagccccaacacttgggagttaggagtcccagagtcatgctgcctcaccctcttgtcattacattgtaaccagcagtttcatgcctgcccttccccccattaaacttagaggtgagggctgcattttgggagacgtagctggagctggatagagagttgactgttctggtgactaggtctggctcataggggagggttgtggtggagccttcctgggctgggtgtggataggcccagggcctgcaaggaaacgggaagctttgattggctgagggcaggcaactcttatggaagaagcactgaggaggagtcctacctcagggctcagtgtggacctgttggcacttttactgggtctcagtcccttttcctccacatgggatgcaga

SEQ ID NO: 53202 - DNA, 2743 bp, Homo sapiens
tgcgccactgcactccagcctgggggacagagcaagactcccgtctcaaaacaaacaaacaaatgctactaatcagggtttttctggctttttatggttcatgtcttggggtgctggagggacagaatgtggggcatccgcattacttgaaaagtattatttaaacaaaatgctttggccctccttagtggttcagaactttgcctctcaagtagaacttgttggcccctttcatctctatgaacagaacaccgcctatcgcttggggctgttgtgaggcctcggtgagataaccgtgccatgcgctgctgaaactggcacttaacgctcagtatgattcttgcgggcgctgggcaccgcggactaatgtggtacctccctgccttcacaggacttcgagtttaatgtggcttcagtgtcgtaacctttatcatttcataacagaaacgggttcagagaggaagggtgacttgctcaagggtacaagcttgctgggcagggcttggactaaaacccaggaatggccctgcgcgcggattacacagcctggggcttcgcacacgagcccgagtttgagtccgatcggcagttccccatctggcatccagaatggggtgccccctgctttctccacgaagtggaaggcgccgagaggccgggcggaattcggggcccccatacgaggccgggcctgcactttcggggtggtgggcgccccgctcccggtgccccgcggagcagggaagccgctcgctcaccacgtgacgcgccggccgggggcacccgcgcctccgtgcgacgccccgcccaccggcctgccgcgcgccagtgtcctgggtcgggccggagaggggagagcgggggaggggacgcggcgcggggggcggccgtgcgtcgccgcgcgccttcctcccacctctcgccgggccctgtgtctccgcgccgcgactccgccccctcatcccgccgcccaggccaatggcgccgcggcgcgagcctccccggccggaggcggagcatccgcgcggggcctggcgcgcctgcgccctgcgcccgcccctcgccgtaggaggaggtggaggaggaggcggctcgggagagcgagcagcgagctggctggatcgccgagcgcgagtgagggagccgagccgcccgccgccgccgcctccgcctcccctccgcgaacaggagcccgggccggggcccggcacgccgccccagcccgtccctcggcgtcaggccgcgagggtagcgcgcgcgagcgagcgagggggagggagagcgagcgagcgccgggaggaggcggccggaccgagcgggcgcccgcgcgtgtggcgtgaggggaagccgcttgcccgcccccttcgccttcccttctctccccctccccgctccccccccgaccgcggagcagcaccatgtcggcgccggcggccaaagtcagtaaaaaggagctcaactccaaccacgacggggccgacgagacctcaggtgagagcagcgagcccgggggccggcccgcgccgccatcttcgccgcccgccccggcccgcaggccgccggcggggcccggggcgcgcgcggggggcgccgggcgggggggcgcggcgcggccgggcgggggcccgcggactcggcgcccttttttgtgcgcggctgggctgggggcctgggtggcccgcgccgcggcggccgcgctgcgaggcgggggcgctgcggcctgctcggcgcgggcggaggagacccccccttcctctcccccctccctcgctctcctccccctccctccctcccgagaagcctctctttattgtgctccgccatgatgcctcgctcccatcagccgccgccgccgccacatggtgcggccggacgcggccccgcgcccgacctcccgcgcggttccgcttcgcgcccggcccgcggcggcgcccccggcacccccgcccagaggctggccccggcggggcttctgcctggagctcgggtggggtgggggcgcggggaacacgcgggcggccgcgcgctgggccttggccggccgggaggatgctctggccagcccgggcgcactccccacgtggggcggccgccccgtcgcgccagcgtgcggagaaacctggcgccgcgaccagtgtatcgggggtcttggaaatggctaagaaagctggcctctgcctaggaggctctcggcaggggggctgccaatccgggatggttaccggaaatgaaccgcgcgatctggccctttcacacccacttagctttgtagggggtttgtagtctttacaggacaaaagggcacctattccagagcacacccccttttcttcctctcccttctgtgcctcactgctttccgatctcatagttgctcccagtaagtgctccaaagtcgtgtggggccgcatctgaggtctgcccgcctgaattgggttggaggggttcatgttctgagaaggcgaaggccagggtgtaggatggtgccccgtgactttccagtctttgtaggcgtgcctggtatcttcatcgtaatagcagagtcgtcaactttctatgaaaggtggttttaccttgataggtggtagtggtggcctaatttgtatcattgtcatgggtttagtttccatattctagttagcagctgctactgttctcttgcaagtgtataatgtgaaataataaacgtgaagacttctgaataaggttattctgtgtctttcatagtagaaaccttaatgat

SEQ ID NO: 53203 - DNA, 1003 bp, Homo sapiens
ccaaccactccgaggagagagacaattttggattagcccacattacaccaacaacgtgcgagacaaagagagacttgaggggcttggtcgaggaggcccagcgcgttagaggcgggagccaggttgtagaggggctcaaagttagaggaggcggccagctccaccggctgcacccggctgggcgacccggcaaccttcagggggcgctgtttcccccatccctgtccctaactggccggctcccgcgggcgcgcggcggggaaggccagaggacctgggcgcgggcgatgtgcctcctgagcgtccaaaccgggggtgaggcgcggtcacgcccagcgggaaccgcaggcgccgaagcccgggtactgggcccagaatcccgcggaattttggatccgagggaggcgctggggcgcgggacctcgggcgtggggtcccgggcgctggatcggcgcggacgggaggcggcgctggtcccgcgggccagcgggtctcgggagggggcgcccgatcccgcgtctccggcgccgcttcccgggaagtttcaagtttgaaagtcctggcggagggtctgcggcttccgggaccggagtggctgagagaagggccccaagcggccggagcggcgccatggaggagggggcgccgcggcaggtgaacggcgtgggaggggcgcgcgggcccggggggtgcgagaaagcctctgtcatcgccccggagccccgaaccgcggccgcttcccccgatcctcccctcacccgcgccccttccctgcccctgccctggccccggccccgcgacgccctcgcagagcagacctgatctccgggttcggtggttcctggaccttgcacagtctccaaatcagtccgcggctgacccggagactgaaccccaaccagcccgtgagcgaggacggctgagtccgcagtgtgcgccaccagggtggtccccagagtgtccttaagtcggttctcctcggtggggctccaaggccgacggg

SEQ ID NO: 53204 - DNA, 1123 bp, Homo sapiens
gggcatttggcaatgatcaggaagatgctgggattaattagggatcaacggggtatcagacagagagcaggtggctcttggaatgatagatggggagagggcttcaggagctggtggagatcgggccaatcccaggatctccagggattaggcgggagacccagtgtgaccagaacgtctggggaagtacgcgggatcgggtgggtccggggtcgctcggggtccggctcaccggtatcgtgcaggaagagcaccagcgtgattccccaggtcagcacggtgtgcccggtccgcaccaggaccccagggctgaggagcgcccagggcgccatcgcctcggcccggggccccacccggaagaagcgcccagaggggcgggccctccgagggaggggaacgccgccgcccggggactggtggatctaggcgttgggcggggccggactgggtcagggaggctgcctattggatggcatctgcggccgaatggaccctcaagccaacaggtgcctgaagaggctgagggtggggccggcgcgcgcgcagctggtaactccctcaactccagccccacccgccaggtaacttttgaaagcgccggagcgcgcgcgcacctcccccgcgctccgctgtgccctcccccgcgttcccctgtgcccgccctcgcagcctcgcgcatgcgcgtagctccctgggcgcttcgaagatccagcggcttgctgtgagtccgggaggcaaaattgtacccatttcaaagatgtgatgactaaagtctcgagagggccaaggctcgcccaaggttgctctgtggtgacagctttacctccttgctatgtattctcagatattgcaaacggacgagagaaaagtggaggtacgtggtgcacattctgactatgggtgatccaacttaggcgggagtcagaaatcccagcactgccccttcctacctgtgtgaccctgggcgagttactgagcccctctgagctgttttctgtctctataagggggattacaatagtgtcttcctcctaaggtgtttgggaggattaaataatggaagcgccttgtctagcacgggactgtcttgcctctcctgctgtgagccaccacctacaggcgg

SEQ ID NO: 53205 - DNA, 1357 bp, Homo sapiens
atttgtaaaccttccagactgctcaggaaatccagcgggaagccacagggcacactgggctttggaatcagccagttctgagttcaactgtggcaccactgtctactggggactgtgtgtggatgggctgtggattcaggcaggcatagctcacatttcagccttgctgctcacgaggagacaaacttgggcaagtgtctccacctctctgtgcctcagtcacttttcctctaaaatagaagcagcacaatacctcatccccagcacggtgtgaagattccatggaataatatcaaaagggcttagaacggtgtctggcatgtagtcattgctcaataaagacaaccgttattatgttgttgttataatcattaccttctcctacctcatctgccctggctcccagctccgggcctgtgctccccggcctgggtctcccacaacaaggctcattgtgtcagctgtcccactggcagcatggcaccctcgagggaaggcacaaaagccaggatgcctgggccccgggcatggccttcctttgccttcatttgcttcaagatctttaagagcccagcagcctctcttgcctgggaaactggaaccagagggagcactgctggcagagagtccccactcttggaaagcaactcttttcaagcccaccggaattacagccagctttctggcctacttggtccccactgcccccctactccagccagcctggcctcatcattcactgtcctggcaaaaggccctcggcacaggtcaccttcagacctttgcccagtctgttctctttcaaccaggaccatccaaattcaactaattactgcactttctaatttaaatactgccttctcccctcccctacccaaatacactccatgtccttcctccaggaagtatctcctggccactccagcccacatgatctttgaactctcctttcacgtagctgatacctatggtcccagtgtcaaagttacttcctctgggaagccatgcttaacccaccagggtgtgcctgctgagtccccccacaggcccgatctaccacagcaatgaacacttggtacgatgtggctttgatgattcagcatccttgatggatggccaggtccatgagggcaaaaccaggctgtcttgtttggtatcacctccctggacctgctcactcagtccctgctgagcactgggggtccttggtgagcgagccggacaaggtccttgaccacatggagcgtactggctccggagggagacagatccacctacagggcccataagcgcctgtcgcgtaactgggaccagtgtcttgcaggagaaggggcctggggctctggatgcccaatca

SEQ ID NO: 53206 - DNA, 937 bp, Homo sapiens
cataccacgtccatgttggctgcttccagatgtggtcctaagctccttacaggctttactccctcgagtctcttactcaaccgacaaaatatttcctagtaccctgtacttgcaactaattaatcatttacataacaatttgtcaactgacaccctcctactgcctgtgagctctgggaggacagaagctgtatgcttgcttgcatgcctgcatccatgcacatgtacacacacacacacacacacacacacacacacacacacgtgcgcaagcgcgcacgcacctgtatccttggtgtctgacttcggtgcccaatttatgcctggtgtttaatagaacaaaggtttgctgtggctggaattcccttactctagtactgcaagatagagattattaccccattttctgatgaagatactgacgcatacacaactaagcagaagcttgcctgagatcacaaaactgatgagagtgggatgcaaacctaaagcagacccccgcttctcaccaaatatttggtcttcagtccatccatccaaacaatgggagggaaagagaaactgaagtctggaggtgggagcatgggatcccaccagtgtcctgatacccagaggacagagaggttgggggagccagaagctctgagccttggagcagtactcaccctgtgaaatattaacctaggagctggggggaaaacccaaacaaatgccctatttacagaggctagacgctttccaggaggcagcagatcaagggccagagactgggggtgtgaggggagtcacagcaagtgtggggatctccaggtggtcgggaaacaggtgaaaaccagacgccacctggctctgaaaagtctgcagagattaaatctatgagttgggttatgtcagaaagatgcagacacacaataattggggagtgtgcctcacagct

SEQ ID NO: 53207 - DNA, 2478 bp, Homo sapiens
tacaagcgtgagcccttatgctgtttcttcaaatcaccaggcatatgaccacaggacctttgcatttgctgcggaatgctctgccacaagagaactacctggcttgctccctcacttatctctgctcaaaggtcaccttactagagaccttccctgaacaccctctataaaatgacaactcccaactccttccccatggtccttccttctctatttttctccaaaccacttattacctccttacatatcatgtttattatttgctgaatgaacaaatgaaccaaagtagcgaggcccttcacccctggccaccactttctgctctaagtatagcctcccgtgacccttttcaaggctatgcttttatgctcatcctaaccagtttgaagtctgaagagaaacattctgtgaaagatcatatatggaaggattttcccaagacatcagacattccattcccctcccccttaaaaatcaaatgcactagctgagcgcggtggctcatgcctgtatttccagcacttttggaggctggagcgggcggatcacttgagcccaggagttcgagaccagcttgggtaacatagtgagaccccatctctatttaaagaaaaacaaaacaaaacaaaacgaatggactgacaaacacaggcaaagactggaaatcttgggctctttcggtcaaagagcagccaagacaagttccacccagagagctatagtggccagcacagtcagtttcactatcaactcacctgtcgggctcccttggccctccggttgcaacctcaccctgttggatttccctatactttgtgtcatcccttttgggagctgatccagaatccaagtcgtccttgagcttctaagcacttctctgggggaacttaagctcatccaacaggtaggaggggcagagggtggccctttcagccctacaccgatcccccatcttgtaggggcaaacgacagagcgtcattttctttctggaggaagggagctcagttttaaagacacgattctcagacctggcggcagggatagagaaaggaaccctcccaccactggcggagatggacctcagagagtggttgcagcggcgatgcttaggccccgtaggcaggaggcgaaggaggaggacgcaggtacgtcccttggcccggggtccgggacctaccctggacggggctgccctcagcgtcgggaagcggacgtgatgcttcgcaggcgaggaggagcagagaatgcagcccgggagaatccggggccagagcacctcaggaggttggggatctcgtcaggctagagccggggtccaggggagacgggggtcggcggggcggagcttgggatcccggggacgggagctccgggagggagggggtcgcgacggggaccccgtggcggttaccttgcccttagggctgccggcggggctgaggctcctgggcccggcccctcccccgatccggctcctacggctcggagcctgcagccgccgccgcctccgctgtcaacaaacccggggcgcgtcacttccggggccgccccttagcaacagcgatcgggttcccccgacccgtcccgcggctaacgcgggcggcggcggcagaaggttccggggaccggcgggcggctcctttccccgggcccggcacgttacgccggtggaggaagccgcgggatgccccccccaggccacccgagagaacgcgtcattcagggctctccctggcctccgaggggcctgttcgtgggaccctaggatcggtgcccgccctggcgctgcggttcacctgagcccaacactgctgaatagcaggactgactctgggcgccagccccctccatccagcgccctgttgaacatgtcttgcgttctccacgggtggctcacactcgcgtgtcaacccgcagtcatcaccgtcccccaaaaggtgctcctaacctccatctagggcatgcgccaccaggcaaccgagcttccaaatgggaaattgggcggcgacctcggcccctacattttcctgggcccctcgtccagtctccaagtcctaaggatcctgtcaaaccagttccttctggccgagcgcagtggctcacgcctgtaatcccagcactttgggaggccgaggcacgcggatcacctgaggtcaagagttcgagaccagcctggccaacatggtgaaacgccgtctttactaaaaatacaaaaattagccgagcgtggtggtgcgcgcctctaatcccagctactcaggagactgaagcaggagaatcgtttgaacccaggaggcagagcttgcagtaagctgagatcgcaccactgcactccagcctgggcgacagaggaagactccatctcaaaacaccatcatttcttctctggatttctcttttttttttttttttttgagagacggagtttctctctcttgttgcccaggctggcgggcaatggccctcagctcactgca

SEQ ID NO: 53208 - DNA, 1388 bp, Homo sapiens
cggtccagcctatttttcttaagatatcatttgtgtttttttctttcttcctaacttacattttatagggtttgctggtatagtttttataaaaaaaaaaaaagttgggccgcgcacggcggttcatgcgagtccctgctatacaggccttgaggattctgcagagaccaagataagctggggggcctgaacagtttagcaggggaggccgagactcctgtaacaatcatgcagtagttaattacaggggggtgagtgcagggaagacgacagggtgacaggtatattgcgtaagtagacactgaggcccagggaagcgcaaggaatagtccagagacacacagtctgcgctgtcaccggcgggttctcaaatttggcccgcagggtcggcggcgctggggctcccggcccgcgattgccacgcccaccagacccgaggttgccccgctcaacccggccggccgtagccgccagtaccgtgtggaagcgtgagagtcgaggggtggcacgtgactggcggggcggggcggggctgaggcggtggaacgcgcaggctagtggctgtgtttcccgccggaggcttttgcgcagagccccgcgtccctggggggcggcggcggcggcggcagcgcaggcggcagaggcgcaggcggcggaggcggctggggggtccggaagtcaacaccatgtcaagtctgcacaagagccggtaaggggccatggggcctgacccggctgggccactcctggccaggctgccccttctgcccctcagaagggggaagcgcgggtgtggccaggaatcggcagaccccctcggcagagggtctcgagcgtccaccttctaacctcattgcctgtgggctgcaggaacgacggaggggcggcccttctcctgcccctgatgtcactgcttctgcctccctcatcctggacccctggtgtcccccttcccctgagtcttcctcatccagacccccatgccccgcccccgtgcctttcccccttttgatccccctgctcccgtactctctccaagtgcaccctgtcccccgtgcctttttcttactaggattgctagagaacttgcattctccagtctggcccctcccccaggccagatcctgcagcattggctgaattttgctcactcttcagttttccttcaggacgtgttttttaaaccctttgtccttgccttctggcaggcccagaggtcttgtaatggttatatttgtgagcatggtccattgtctgcatatcaaattactcctggttcctgaggtccaaggagttcagttggtggctgtgcgtggacccggcctggccggcaggaagtgcccagtaaatgtcagctcactaagtattagaatgttggaatatgtcta

SEQ ID NO: 53209 - DNA, 1462 bp, Homo sapiens
gcggaggttgcagtgagccgagatcacgccattgcactcgagtctgggcgaccagagcgaaactccgtctcaaaaaaaaaaaaaaaaaaaaagaaacctttgccaatctggtagaattgcggggcttattttatggtgtcatggaggatagcctagggccagatatacctggggccctgtgcctgctctgcgaactaggagctcactctccgagcggtgtagagggtgagactaagcagtgacagtaaaagctttcgacagtgcttgacccttccgcggagcgtattaagcaggagctccctgcgcaggcgcagaggagagagtgtctcccaccccacgaccagcagggggcctgcgaggcgggtgcggagccaggcctgatggtggccaatcgcgagctgaggcgacgatgccacgcccctcataccggcgtcttaaatgcgcaaagaaaggacgccggggacacccggttgggctctgctgctcccttctgggttccgaggcccaagcccttggcagtgtttgtgagtggaagggaggtcacgctatcgtccgcggccccagcagccctgtgccctcgttggatcccgcgacgcggctcctttaagagcctcgcgggtcgcccgccgctaggtcgctccccggccatgcgggcgctgcgggccggcctgaccctggcgtcgggcgcggggctgggtgcggtcgtcgagggctggcggcggcggcgggaggacgcgcgggcggcgccgggactgctgggccggctgcccgtgctgcccgtggcggcggcagccgagttgccccctgtgcccgggggaccccgcggcccgggcgagctggccaagtacgggctgccggggctggcgcagctcaagagccgcgagtcgtacgtgctgtgctacgacccgcgcacccgcggcgcgctctgggtggtggagcagctgcgacccgagcgtctccgcggcgacggcgaccggcgcgagtgcgacttccgcgaggacgactcggtgcacgcgtaccaccgtgccaccaacgccgactaccgcggcagtggcttcgaccgcggtcacctggccgccgccgccaaccaccgctggagccagaaggccatggacgacacgttctacctgagcaacgtcgcgccccaggtagcgcccgcgccccgggccggtcgcggaatgcggggccggcgcctggcctcgcggggcctcggtttgttcttctgcagaacggggcagctgcccaacgcgcccccggtcaggcatcgcagtgacatcccgtggcgggagggaggagcactgggctccaggcacagggtctgcaggccgaccagggcttgagcttcaactgcgaaccctgggcacctccctgagcgtcgctttcctcgtcaaaaaaatggggataataccgttattcaccttcctcctgcggtagtgatgaggcgctgaggctcacagaggca

SEQ ID NO: 53210 - DNA, 1134 bp, Homo sapiens
ttcatcagcttgagatccttccatttttttttctcctctttctctggataaaagaacatcctaattggccaaggagacagttcccactcattgggtcagcctggactctggagagctgctgggtgagcagccagagggcagcaagggagcctccccagggctcccggcccctgcctccccactttgtgtgctgcaggacccagagggaacaaagttggtgtctttctccagggtttgactgagcactggtggagtggcctatgggaagatactcttacccacccttacttactctgttgcttccattttcgccactcaatcctttggccgtgttcaccctggagaaggagtggtaggaggattatgagtgtgaggctgatggtcacacctggagggggtccgtttgctgcaccatagccagcccctccacacggggcggcaaggaagccaaggaacctctgcgaactgctgccccagaaagcggcaggagggcagggacccgctgtatccccagcgcctgggacccagcctggcacacagaaagcactcaagaaactgtcgaatgagttcccacaaaacagaagagaaaactgaggctcagggtacagcactgcccacagtcgccctggaagtcagaaaagggctccagaagccacgaaagggctccggattcagcatccggaggcgagcagggtcccgcctccgtaatccagcgggggccagggagccgcagggggttccggagaggacacgggcgctgttcccatcctgctgaggctcacgcggcaccttcgggggcttccggcctgggatcagcgggaagcaggcagcaggaggcgcggcccggccccggcgaaggcccccacgccactggttctcacgcctccaccatgctgccctgcacggggtcccgccgcccgcacttaccgggccgcacggccgcttcctgccgcgctccgccatgttccgcacacaccgtcggtcccgcctctgccaatgagactcgcctcttccggccacacctccattaagctgtccaatcggagagccaatatcgcccaggggcgtggcctgggcgcccgacgggctgcaggggtacgcgggctggagtaggttgggcagagtaggtgtcca

SEQ ID NO: 53211 - DNA, 556 bp, Homo sapiens
ttgtacacctggtgccagcacagggcagaaactcaggagaaacagatcccagctgtggccctcttctctgccctgccccagccttggccccttgccttctctgggcactgccagttctcaggaaaggcggtgccttctgtgtgtccagatcactggctccatgggggtcaagaagctgggtggcacctgtgctgcacacggatatgcttaaacaatcttgcagccttgggggtggggctggaaaccaggatcggcttccattgcaggggactggcagtgcatcgggcctatgtgtggccgggtaagactgggcataggagtcaatgttggtttgtttgttttttgacacagagtctcgccctatctttttatcacccaggatggagtgcaatggcatgatctcggctccctgcaacctccgcctcccaggttcaagtgattctcatgcctcagcctcccgagtggctgggattacagacgcgcgctaccatgcccggctaatttttttgtgtgtctttagtagagatggggtttcaccatgttggccaggatggtc

SEQ ID NO: 53212 - DNA, 2398 bp, Homo sapiens
aaaaaaagaatattctgaactgaacagtgctgcagtcttccagtggtttaatttaggatacagaatgagcatttcttctatgtttgttgccaaggctggagtgcagtggtgtgatctcggctcactgcagcctcaacctaccgggctcaggaaatcctcccacctcattctcctgagttgctgagacaataagcacgaaccaccatgctcagctatttttttttttttgtaaagatgggggttttactatgttgcttaggctgatgttgaactcctggcatcaagcaatcatcctgccttagcctcccaaagtgctgggattacaggtgtaagccactgcacctgacatcttctatgtcttgatgaatacgagtcatccttagtcatcctttgttttcaatgttgtgaaatatctctgggagttcctgttctgtacattttgtggtgagataatcctgccttttttttttttttttttttgagacggagtctcgctctgtcactcaggctggagtgcagtggcgtgatctcggctcactccaatctctgcctcccaggttcaaacgattctcctgcctcagcctcctgagtagctgggattacaggcacgcaccaccatgcccgacttatttttgtatttttagtagggatggggtttcaccatgttggccaggctggtctcgaactcctgacctcaagtgatctgcccacctcggcctcccaaagtgctgggattacaggcgtgagccactgcgctcagcccagggagttcctttaatgtgaagttttgctggtattatttcctctgggtcattatctttttctttagaaccactttcctcatttatgttgataagtttgccttcaagaagtttctctggatgcagatctcaggtttcccaaactgtgaacagctgcagagttgccatccccacagctagctatttcttccattattccatttatgttcaatttgtttttttttgttttttttttttttttggtttttgtttttgagatggagtcctgctgtgtcgcccaggccggagtgcagctgtgtgaccttggctcactggcgtggtggctcacgcctgtaatcccagcactttgggaggccgaggcagacagatcacttgaggtcaggagttcgagaccagcctggccaacatggtgaaaccgcgtctctacaaaaatacaaaaattagccgggtgtggtggtgggcacctgtagtcccagctactcgggaggctgaggcaggagaatcacttgaacctgagaggcagaggttgaagtgagccaagattgagccactgcactccagcctgacagctgtccaggtgacagagcaagactccgcttcaaaaaaaaaaaaaaatgtgtgggataactgctgcaatggaggcagctcaggtgatctggcagcaccgaggaggcccagcaccactaggcatggggaccatagctgtgccgaggacccttctggggtagctctcaggcatctaagatctgaggcctccctgctgccaggccaggggccgagggccagtggcctgtgcccccctccaacacacacctctatcagcctgggcagctactggccatttgcttgacccgaaggcagtggatgacccctgggcccgtggaatgcatcactgatgcattccaggggctgatgtcaataacccaggggctgatgtcagctatgccactgtcccccaacccccattggaccagctctgcccagaagcctgtggtgacactggacaaagtccaaagcctcctcagcctggcgtttggagccggctggaatccaggcttggcagcctccaccttccctccctttactctttttttattttagagatagggtctcgctttgtcacctaggagccttgaactcctgagctcaagtgatcctcctgcctcagccgcctgagtatctgggactataagtgcatgccccaacccccagctcaaattctttgcttttaaaaaaaaaaaaaaatagagacagggtctccctatgttacccaggctggtcttgaactcctgggctcaagtgatcctctggtcttggcctcctaaagtcctgggattacagcttggattataggcatgagacaccacacccagtcatcctttgttcttttttttttttttttttctgtttttgagacagagtctggctctgtcgcccaggctggagtgcagtggcgtgatctcagctaactggaagctccacctcccgggttcacgccactctcctgcctcagcctcccgagtagctgggactacaggcgcccgccaccacgccctgctaattttttttgtatttttagtagagacagggtttcaccatgttagccaggatggtctcaatctcctgacctcgtgatc

SEQ ID NO: 53213 - DNA, 6710 bp, Homo sapiens
gagatggggtttcaccatgttggccaggctggtcttgaacttctggcctctggtgatctgcctgccttgacctcccaaattgctggaattacaggtgtgaaccactgtgcccagccaccctttgcttttgaataaatgttgcccatcttcactcaagctgtttcccctgcctggcataccctccaatccaaaatccctagcagggcctagccccacctgtacctcctctctgaagcttctgtgtccacccaggccctttgctgaactcagaaagcacctacctgtgcctgaccctctcccccaaccccatgctaaattctctaatcctcatcacagctgattaggatggtattatttactctattttgctcaaaaggagaacaaggaaaactcactcagcctagagagctccagctgtgattcaaaccctggtttgcctatttccaaagtccaaattctgtcccgtgaaatctcctctcaggcgggtgctagggctgacaggagaccaccagccccttggggacaggagccatgtcttgtccaacttcaccttgcatggctgcttacaagggcaggcgaggtgaccatgccttcccagggtggccccacgtcacatcactcaagtcaattatgacattcggttttggagcttctcaataggggcacacttagaatttgagatgagtcagttcttcactggggagagctatctggagccttgaaggatgtttagcatccctgggcttaaaatgccaggagactcccagttactgagacaacacacatcgtggcacctctagagaaagggtacagaactggggataccatgcccaggaagaccagtctagtgcatgaataaccacagaagaccaaaccttggacttggatcaaatagtcccagctccaccataaactagctatgggaccttggtcatgccaggccgcagcctcttgggggctcagcttcctcatctgtacaatgaaggtgacaagaatccacagagaatatactgtgggtcctggctcacagccacttgtcaatgacaacaagctattaacttttttttttttttgagacagtcttgctctatcgcccaggctggagtgcagtggcacaatctcggctcactgcaacctctgcctcccagtttcaagcgattcttgtacctcagcctccagagtagctgggaccacaggcacgtgccaccacacccagctaatttttgtatttttgatagagatggggttttaccacgttgcccaggttggtctcgaactcctgagctcaagcgatagtcccacctcagccttccaaattactgggattataggcatgaaccaccacacccagtcaacaagctattaacatttaaacctaccaggctttccataaaattagtaaccaagcaaaatgaaaaatctcttattatataatgaatccaaattttttttgatagaaaaaaaacagaattccctgaagacaaatgtttggtgacaatttgttgagccaatgttttcctggagagaacagcctgtctgaggagatctaacaattgcgtcactcagacacagtccccctgggcttaggaattggcagaggagagagaaatgacttctggagtccagacggcaggtttacaggctggaggggttggtggaagacctgagtgacacaaacagtaggtatctcaccacttattcctcctggcacaggacccagattcaaaaaccacaatctcactcccatacattaaaggaacacacaacagataggcagatagcctcgcgggagccttggaggaggtggcatcagctttacaggtggggaaactgaggcttagagaggggaaatgacttactcgaagtcccagaaaagcaccaggaggcccccagctgcaagctggggaatgagggcataggatgagcattttaaaaattatgccgggaggccgggcgcggtggctcacgcctgtaatcccagcactttgggaggccgaggtgggcggatcacaaggtcaggagatagagaccatcctggctaacacggtgaaaccccgtctctactaaaaatacaaaaaattagccaggcgtggtggcgggtgcctgtagtcccagctacttgggaggctgaggcaggagaatggagtgaacccgggaggtggagcttgcagtgagccgagattgcaccactgcactccagcctgggcgacagagtgagactccgtctcaaaaaaaaaaaaaggaattatgcagggaactggcagtgccatccaggagtgggatgtggccccaggtctgttctggcaggagttacagtgactgcctcatggctgtgaaggctcctgcattcctttatcgcccccacctggattataaaatcaggcgccctactctttggagcttggagaggttagtgtggcgttctggtggttggcacctaatggaggcattctccgggaggaaagattcctgctgaagccagactgaatgggtctaacttgtatattctccaatcctgttggtcaccctcagtttcttagtggacaccaaggccaagtccagggtaggagcccatctctccttgagtctccagcctcatcatttctccttctggacatcctagtttccagtcacattgaaagtcccttccttggagaagccccttctgactccacccaggctaagccacatgtcccctcccaggtggtcccaagacctgggcttccgccctcaaagtactcagcacgggggcgctcaactccaaggacaggaactatgtgcttgacctgttctccaccagatcctcagcctctggcagctcacccagcacagagtaggtcccccaggcattagcacagatgatcctgggaagctaagggagaggcctgggagcccagcagccttcctagggagggagggagacctgtaggaacccccttctggcaactttcttaatctctctgtgcctcacttatctgtaaaatgagacttatctgcgtgtaaaatacaaagtataatacgtgggaacattcactgtctacaactgtggttctggttgttcattttacaggcggggacatggaggcccacggagtacctggcaggcccacagtccacaggttggaaagaggtgcccaagccctggactttaagcctgggctctgaccttcaacgtttgcttttcacaccacacatcatgtcaataaatagttactggatgcctgttgtgtgccaggccccaagacgggtgttgcgtgactgacaacagaaaaagcatctcagtggcgagggataagctagatcatgggcattagtgtaaatctcccagggttcaaattccagcttctccacttcctggctatgatttttttttttttttagacggagtcttgctctgttgcccaggctgaagtgcagtggcccaatctcagctcactgcaagctctgcctcccaggttcatgccattctcctgcctcagcctcccgagtagctgggaccacaggcgctcgccaccacacccggctaatttttttgtatttttagtagagacggggtttcaccgtgttagccaggatggtctcgatctactgacctcgtgatccgcccgcctcagcctcccaaagtgctgggattacaggtgtgaaccaccgcgcccggccctggctatgatattgctaagtttcctaacctctctaaggttcttttctcttctattaaaagggaaaaataagacctcccaacagaagtgaaactaggcattggcttaacacgtgatggatgggagccacgactatcttcatcatcttatttttaattatctatctgtgcacatggtagtaaatttctcgccctggcccaggtacccaagaccccaattctgtcggagacaaccgcaattaacaacttcttgtgcatcttatcagacagctggcgcgcacacccgcagatacgcccaccctcaggcgtccttctacgcaaagatggatagcacccatcaacgctgttttttctttttttagacggagtctcgctctgtcgcccaggctggagtgcagcggcgcgatctcggctcactgcaagctccacctcccgagttcatgccattctcctgcctcagcctccagagtagctgggactacaggcgcccaccaccacgcccggctgatttttttgtatttttagtagagatgaggtttcaccaagttagccaggatggtctcgatctcctgacctcgtgatccgcccgcctcggcctcccaaagtgctgggattacagacgtgagccaccgcaaccggcccaacgctgtttttactgttgtttccttttttaacctaaggtatcttagaagtcaccctacattagtgcatattaaacattgttcgtcttaatggctgcacagtattccactgtatggattattttttaatttggttgccggtactgttatcagccagggaatttgcgaggacccagcgggatttatggagctgcagagttggagtctggggacccaattccaaccccagatctgtccagaattctgttgtctcgggtatcatctccaccggcgcggtcgtgggagggggatttgggtgcagacaggaccagccccagtgtccgagcgagaatcagcgagcagcacgcgcagttgattcccgcgggcggctcaatcattctgtgcagccactccgttatacttagtagcatcaaactcattaagcactctagcacaaccaagctcggaaccgttagccgaccctcccagcctcggcacctgaccttggggaagtggcgctccgacacagctactcaccctcacctgggccgcttcacccctcgttcccaagtacaccccgtaggttgcagcagtccctgtccctttaagggggccgagcccggctccgctacttccgccccgaagcagcagggcgctagcgcggaggcgagagcgggagaaagcgccgctagaattctcctcataaagatggcgacgccctggccgccgcgttcgcgcccggcggtgacgtcacttccggggcggaggaggctgagtggtgcagtgagggacaaacaaaaggaggcgccggagcagcgctgcggccggcggcgggacggagcggccggggcctggggctgcctgccgggcggccgggcgcggcgagcccaggtgagtggacggggtggggaaaggggcgcgagctgtcacctctcgaaacccacttacacacgccctcggccagctgcccggcccggggcgcccggggcatctggggctctgtctccgggccggccccctggggacctcccgcggtgttcggcctacctctgggctccccagtgcccggagtctccggggcaccaccttctcgccggctccgcggcgcgcgagccccctcccaggcacccctgtgcctccttgtgcttcagaaaccaggagtttccgcctcggctcccccatgtccccttgtcatcccctgggtccccccagatcctcacccctccacacacactctcccgttcctagaggttccacctctgggctctctccttgccatttctttttcaaagatttccttagctgtcttctcctgagttcctggtccccttctcttcccttgcacccctccttcctatcgttccgatgggggcagtgccctgacttgggggcaggatccccggctaggctcttggggcctttctgggatgggatatttgggaagaccggtccggaatctaagaacccagaccctgtcccagtcctgtgcattcaggtgggcccgagggcgaggcgagatccagtgaggtccaggcctggtgcagccctaggtgagctggatacccagcaaactgagctcccaggctgaaggggcatagctggggtcatggagttcatgatgattctgctgctttcgctgactgcttcttccccttgatctggaccggggtgaaccgaggtctgccggttctcagctgttgcgattgttgccttttttgggaaggagggatgggtcgggggttgtctggtagccgcctcctgatggagacttggctggaagggtgggcggttcctgggtgagccacacttccactgactcctcttcccctgccctacctcaggaagccttttgagaatgaggtgtggagggagagcacctggtaagaggaagggaactgggggagcccgaagttcccaaggacctcttccacctcttctgttagtagtactcttaacccctgccaaactgtattctgccctttggagcagacaacctggcagacagacaggctgtaagaagcgggaggagatcggctgttgctgatacttcctgtggaggggatgtgggagtgggagtttgttcagagagactgggcagtgctgattgctcagtctcactggtgttgcttccatgaaggtcaagtcttcctctggctcatgaagtgaggcaaggacagatgacctgtgctggaggaggctgttgtggacatgccagggatgagtgactgggtggctggtctctgcttccttgttttcctggtctcagggctttggcatggggtctgatgccctctgcgttctagggaccatagggtacagagcagggggtgcagggccgggcgtggtggctcacgcctgtaatcccagcacgttgggaggctgaagcgggcagatcacgaggtcaggagttcgagaccagcctggccaacata

SEQ ID NO: 53214 - DNA, 1690 bp, Homo sapiens
ggcctgggtcccaggtgggtccgggaggcctgcttgtctttgaggcaggttggcacaatggaaagtcgggcttggggtgcatcttcccagctcttcctagctgtgtggccttgggcaggttaccaaacttctctgggcctccgacatcacacccataaaaggactgatttaaactctaccataataataacagcagtgaacgttccagagccttactgtatggcaggcactagtccaaaagctttatatggactgtctccttctgtcctcatcacagccctccaagcaatagacttgtcaacccattttacagatgaggaaaccagagcccagcgaggtgaagggactttctcacggtctcgtggtgaggtgggtgccaccttgctgctatgcatgaaggttgggagatggggcaaggacatactgggcacttagttgacggtcagtaactgggcgctcctgccccagcctggcagggcgagggcaggtcctgaggctgcacctccagccccacctgctgcctctctctgcttggctccggagctgctgggggaagcccaggtgggtgtccctcacctgttgcctttcaccctagaaggcgggccacgcccttgcaagttggtgtgaggatgaacctgtttgggagcccagcccaggtgagagcagtttggaactgacccgtgctcccctccccctccagccctggcgtctcccctcttcctctccccaggaagtgagggtgtacccttctacacagggcgagtcccaagccaggcaacacccccagccagcagcctctgactcaccccagctgggtgtgggggcctccagggcagtgtccgccctggggagggtggaggctgtgtgtgccagacgaggctgagacctctcctcccactctggctctgggacaggggaagcacatgacccatggcccgtggtgggagcagatccacaggcttggaaccctcccgggacagggcctgttgagagcggccccttcgcgctccctgggagagcactggagggccagccttcccatctctggtacaggaggggtgccaacctcccgcctcccctcctgcttgggaagttttcctggctcagccttgtttgtgctttcacaaaaggctctctgtgccctgtttacccgcagcccgactgcctgccgcccaggtgtgggagccacgccaaatccctgtgggcccacatggggtctggtgcgtgctgggggggtctctctctgggacagagtgggcagcttgtcatttcttgactccctgtcttcgagaagcatccaggggatgtggactggggctgaacctaatgactggctctgagagcagatggccaactctgccacacggggtcctgagcctgggagggtctctgagtggtctgcgagttttcgaggttctgcgagtcctggggggtcctgtgggtctctgagtggtctggccctgctcagagacatggtgcttgaggctccgccctcacccaggtcagtccccactgaattctgggagggtcatctgcgatggcaggtgggaccgtggaacgacagcctgagtgtgcccggtgctgtattgacacatgatgccttacttttaattctcacgataacccatttcacagctataacccattttaggatgtaatatttccatcttgcagttgaggacacagaggc

SEQ ID NO: 53215 - DNA, 3714 bp, Homo sapiens
taagcaccctcccctctgcagcctccgtgtggcaacccgcgtttcttagttcggttgttgctgttgggtgcatctgccatgcagcagccccacggtgcagtccctgttggtttcgtgggcacctgctctgtgttcgccctgtgccaggcatgatgcacctgtcctccttccaccaacctgctgagtcctcccaacagggtctgtctatagcatcctcaggcacggagggaggtggcccctggaatgcccggtctgtctatagtatcctcaggcacggagggaggtggcccctggaatgccctgtctgtcctcctgggccccaggacaggacacaccttctccagcatcactcagactagatgcttcaggccctccagatgcctgctggcttggaagccttcctcccctcttccccagggctcccttactgcagagcaacctgcaacccacatgtatcagggattttgacaagtccttatctccggccaccccatattatgacttgagcacagtgggagagtggaccagggcagggttttctcttgtagtttcgggacaggcccactgaataggaaaactggagtcccctggggagaagccacatttgggaagcacagaacaaacccagcccttctttaatctgtggagggggagaccctgtggcttccccatagcacagtgctgcccttgataagctgggacttcctcacagctcctgccattcctgccctgtcccgggtgctgtgctggggctgtcctcctggttgggggagggttcaagcctccagcctggctccccatcctgtcccccacccccagctcctcccgccaagcttgcctgttagtgtcatgcctgctggctgaggtcacccctcaggaaaggagctggcggcaagcacgctgtcccagaggaaggagaccctctggacaccctgtttagcacatggcttaatcacatcctgtccccaccccctggaacaccagagccttaatagggaaaacagttcacttgggccaaccccaggcaggcccctcattctgagtgggaggcctgagcccctcttcctcctcactcgggcttgatggctccttctcagccaccttggccagtggtgaccaggaggggtgggcgtggcctgcccacgcccttgcgtgctgtttctccagatttatactcttgctaatgaaagccttgacaagacagtattcattcgttcactcgtttactgatgtgtgcaaattgttatgttttgtttgtttgtttttttggtagagacagggtctcactgtgttttctaggctggtctttaaactcctggcctcaaagcctcccaccttggccgcccaaagtgctggtattacaggcatgagccacttcgcctggcctttgtgcagatgttttttgagcacttctagaatccagctatggagcaaggcgccggggacatggggatgaagaaggccaagtaacgaggcagttagcacagtgcgtaggcgctctgctggagcaccaggtccctgggaacacagaggaacaggcccctgaagaacgaggaggaggaagccaggtggaggggaaagggacagtccaggaggttctggtggggaggagcagtgagatgggctgcccaggaatgtgggcatcctggagagcagaggtggggctatgggggggggtgtggatggcaggggggtcctgtcctacacctcagtttcaattgtctcttcatttgtttaacagccgatcccttgccagcccataggctctgatgactaagacctagctcttttgttcaagcaagtgtttaccgaattcctagtgattgagtgggtgaaggaatgagctgacttgcagcgtgaggttcctcttgcggtagtgtgtggggtggggtgagtgagaggtgggaggtggaagagagctgttaagagaccacgattagccatcaggtgaggccacggggcctggcgtggccaaggcaggtagggatggagagacatggacggatctgggagacgctggagggggaattcaaagggacgggagttgatggtgggggtggtctgagtgacttgagcttttttttgtggattgttgagactggaggaagcacaggttttcagaggccaaggtgtgtctcatgtcaggtgtctggggctctgggatgtccaagggaccatcttgaatccacctgaagcccaaggagtcaccctttccaggctcatgggtgaagatgggtccttgacttgctcactgtggagagcagagagggagaaggacaggagtctgcagaagaggagggcgaggccagagcgtggggcacatggggcctggggagttggctggattaggaactggtgactttggccagagagttaagggtggacagggtcatggaggcagagtgaggagagagacagcggctttcctgcagttggtcaggaaggccagagagccaaggacaacgctggggccctggaagcctcctgagagagttgtccttttcaaagatcaggtcgagttgaggcctttcagtgccgatggggacccactgaagtctctggggaggtaggagagggtgcaattgggggattgggaaccaacttcaagcctccagggcacgggccggcgacaatccgacaatccagcagagaaggatcggtccagaggatgggtgtggctgtggtgggagccgagcaactgagagtacctccccttttctctctggggcctggagagggctccctggctcagagcagggcatgttctggggaggaggcctttcagggagggggctccagagccaggctccatatggacccgagctctgccactcgctgtccagagctttcccactgtccctgaccactgcatgtgtcagcagaggagatcacggggtgggagtggggtctttctgggaaggctctggcccctgggtgctccagagcccacttcctgtctaccctctgaccttcagcccctgctgacctcaaagccaaccccaaatgcattcctgatccttggtcacagtggtggcagtgtaggatacacaggttaggagcctttttgaaagcaccccctgtgcctgggctgggcatggtggctcacgcctgtaatcccaacactttgggaggccgaggcgggcagatcacctgaggtcaggagttcaagaccagcctggccgacataatgaaaccccgtctctgcaaacaatacaaaaattagccgggcatggtggtatgcggctgtaatcccagctactcgggaggctaaggcaggagaatcacttgaacctgggaggtggagattacagtgagccaagattgcgccactgcactctctgggtgacagagtgagactccgtcccccgcccccgccccccaaaaaaaaagaaaaagcactctgccgggccttggccatgcttatctccctgctgggaaagccacgttgctccccaggaactcctgggcccttctctaaacgcggctggagagagcaggtgcccgtgaggttgaggtccgagtctgcaaaacggtcctcagccacagagtgtccaagctcagtttctagtccaacctgtgccttttacaaatggggaaactgaggcccagagagggagggacttccagagttaccctgtaactgagtgccatatttggcagaagggaaatacagcatgggctctgagtgggaggaaataagacgtacatcctctc

SEQ ID NO: 53216 - DNA, 2616 bp, Homo sapiens
cacccaggctggagtgcagtggcgcgatgtcggctctgcaagctccgcctcccgggttcacgccattctcctgcctcagcctcccgagtagctgggactacaggcgcccggcaccatgcccggctaatttttttgtatttttagtagagacggggtttcaccgtgttagccaggatagtctcgatctcctgacctcgtgatccgcccgcctcagcctcccaaagtgctgggattacaggcgtgagccaccgcacccggcctagggggtggattttctcagcatgctgttttgctttcataaattgttgttaagctgggcagaaccaacagcctggctcctggtgagccctgggatggaggtgggagcagctggccaatgcgatatacttcccagggccaggtgctggaagatagtggggatcgaggcaggcaggtctcatccttagagcccacatcaagggggtaacagatggaaggatgagcactgcgagtggggacatgggggccatgagacccaggagatcagggaaggcttcctggaggaagtgagcaagagctgagacctggtgcacaggcagatgttggccagagtttggcccagattgtgctgatgctgggggcctggggatcagaaaagatgctgagatcttggggagagagggaagggaagcccagaggccccgtccaagcccacacccacctcactctcacccctgcttttttccctccagatcgagacgctccctccggagctcttccagtgccggaagctgcgggccctgcacctgggcaacaacgtgctgcagtcactgccctccagggtgggcgagctgaccaacctgacgcagatcgagctgcggggcaaccggctggagtgcctgcctgtggagctgggcgagtgcccactgctcaagcgcagcggcttggtggtggaggaggacctgttcaacacactgccacccgaggtgaaggagcggctgtggagggctgacaaggagcaggcctgagcgaggccggcccagcacagcaagcagcaggaccgctgcccagtcctcaggcccggaggggcaggcctagcttctcccagaactcccggacagccaggacagcctcgtggctgggcaggagcctggggccgcttgtgagtcaggccagagcgagaggacagtatctgtggggctggccccttttctccctctgagactcacgtcccccagggcaagtgcttgtggaggagagcaagtctcaagagcgcagtatttggataatcagggtctcctccctggaggccagctctgccccaggggctgagctgccaccagaggtcctgggaccctcactttagttcttggtatttatttttctccatctcccacctccttcatccagataacttatacattcccaagaaagttcagcccagatggaaggtgttcagggaaaggtgggctgccttttccccttgtccttatttagcgatgccgccgggcatttaacacccacctggacttcagcagagtggtccggggcgaaccagccatgggacggtcacccagcagtgccgggctgggctctgcggtgcggtccacgggagagcaggcctccagctggaaaggccaggcctggagcttgcctcttcagtatttgtggcagttttagttttttgtttttttttttttaatcaaaaaacaatttttttaaaaaaaaagctttgaaaatggatggtttgggtattaaaaagaaaaaaaaaacttaaaaaaaaaaagacactaacggccagtgagttggagtctcagggcagggtggcagtttcccttgagcaaagcagccagacgttgaactgtgtttcctttccctgggcgcagggtgcagggtgtcttccggatctggtgtgaccttggtccaggagttctatttgttcctggggagggaggtttttttgtttgttttttgggtttttttggtgtcttgttttctttctcctccatgtgtcttggcaggcactcatttctgtggctgtcggccagagggaatgttctggagctgccaaggagggaggagactcgggttggctaatccccggatgaacggtgctccattcgcacctcccctcctcgtgcctgccctgcctctccacgcacagtgttaaggagccaagaggagccacttcgcccagactttgtttccccaccgcctgcggcatgggtgtgtccagtgccaccgctggcctccgctgcttccatcagccctgtcaccacctggtccttcatgaagagcagacacttagaggctggtcgggaatggggaggtcgcccctgggagggcaggcgttggttccaagccggttcccgtccctggcgcctggagtgcacacagcccagtcggcacctggtggctggaagccaccctgctttagatcactcgggtccccaccttagaagggtccccgccttagatcaatcacgtggacactaaggcacgttttagagtctcttgtcttaatgattatgtccatccgtctgtccgtccatttgtgttttctgcgtcgtgtcattggatataatcctcagaaataatgcacactagcctctgacaaccatgaagcaaaaatccgtt

SEQ ID NO: 53217 - DNA, 2396 bp, Homo sapiens
tgagccaccgtgcttggcccctcatgagttttgatgggtggggatgggagaggagggcactggaatgggaaccagtagtcctgggcctttgtcccagcttcatgggacaggatgtgcatgaagctaggcagatcccttctccagtggcctctgtatccccatgtggacaatgggaatttccactctgtgctctcaaaggtcccttgcaattccaacagtgagtcccaagtggtctacagaggtggggctgagagtcatcgtggggaagcctgcctcagctcccagcccctttgggggcctttgggaggtagtgtggtaaagggcagaggctgagacagctgcttccagatgccagttctgccgtgtttgatgtggggcttcagtgttctcatttgtaaaatcaggaaggtaatggcacacttgcaggactgttcaaggaacaatggcgattatgtaggtagatggggtttttggtggaggacctggctgctagtacccaataaatggccttgtatcttccacccagaccaaggatccttgtggtgggccaacgtgggcgccctgcggcaggagactgggtgaggaagaaaggccatcatatctgactttgaccttagtgatgaggcctgggtggctgcttgggcacctcctctacaactggacagagtctatccctcctccctccacggggactctgacccctccaggtgaactcaggcctgagccaagattccctccctcttctccccctgccatgggctgacaggctgagcagctggactgtgactgccgggctggggccttcttttctgtttccgtggtggaggtccctcccccagtttggtacccttcccaccaccccccgaccccactcccgcccccaccctggccttgaggctgtccagcgcctggagcaggagagttcgatctggagctggtttacatttggaaaaaaccaccatgtagaaacaccgcccacccacttcccaaagttgagcagaatgaacagttagtgggaggctgggcctctcccctccccctcccccacccacccagggctctccactctgcctaaaaccactgtggtggtcttctctctgattgtaacagcaattttggaagctcaaaaaaattgtttaaattatattccacccagctgggcgcggtggctcacgcctgtaatcccagcactttgggaggccgaggcaggcagatcacaaggtcaggagattgagaccatcctggctaacgcggtgaaaccccatctctactaaaaaatataaaaaattagccaggcgtggtggcaggcgcctgtaggcccagctactggggaggctgaggcaggagaatggcgtgaacccgggaggcggagcttgcagtgagctgagattgcgccactgcactccagcctgggtgacagagcgagactccatctcaaaaaaaataaataaaataaaaaataaataaataaataatattccactcagaacagcccctgctaacatttggtgaacaacttgttcaccagttggtaggcacttactcagcgccaggcctggtgccaagctctttatcagctgcgaagcattcatcttatttactgctcacaggggatcctactgctagccccaaattacagactgggaaagtaaggcctgaacatctgggacgcaaacacagtctgcttcactgagtctctactacaagccttctgtgggggctcccaggggaatggctggcccagtccgaggggacctcagtgttcttggcacatggtaggcatctgtctttgttgggcagttgcatcagaagggttaaggacagctgggaacacatcctgcctctagtgaacctcgtggttctgtcatctgcctgcccctcacccagcctaacccctctgaaccaggagcctgagctgcacttactgctcccccctgccccccggacggcctggaccaagcagcagctcccagagcggtggcccagcaaacacgacttgactcgaggccaaggctcttgagggctgagcagtgtccccatgcacactcctgaaacactttgtcccttcgccattcagaaggcatcattttggggaaggcagcagccggtttttcagagccagcgagtggccctgccagctgctgagcagggcaagctgagaagggtggtggtgtgcaagtgttattctctctttttgtttttgtttttgttttttgagatggagtcttactctgtcgtccaggctggagtgagtgccgtggcatgatctcggctcactgcaacctccgcctcctgggttcaagcgattctcctgcctcagcctcccgagtaactgggactacaggcacctgccaccatgctcggctagtttttggtatttttatttattatttatt

SEQ ID NO: 53218 - DNA, 1793 bp, Homo sapiens
ctagtgcagtggcccaatctcggctcactgcaagctccgcctcccgcgttcacgccattctcctgcctcagcctcgcgagcagctgggactacaggtgcccgccaccacgcccggctaattttttgtatttttagtagagacggggtttcaccgtgttagccaggatggtctcgatttcctgacctcgtgatccgcgcgcctctgcctccaaagtgctgggattacaggcccgagccgccgcacccggcctgcaggtgttgttctgaccccagctccactgtgccagcccgacttgagatgccaagtatcttgggcctgagggtgggtaacaggaagcatctctctctcctcagccccttcctcctactaagataccccatgtctcctactttcgtctgagctgcagatggatgcgttaattcccttccataatcctcccaggaccgagagggtttcagatcggtgctgggaggggcccagatagttctccccaggacctcttccacctttggaatgcccattacctggagaaggggggtgccgcacatcccccagaccaaccctgcatcccattctatccagattgaggcctagagagaggcaggcgttcctcagagtcacagggaatggcggcgcctggactgggactcagcccagctgcttggcctgaccctctcacagcataatttcccggcacctggtaagcagtggtggggggtggtttccagaagaaacacagaggaagcagataaaatccttggagatgggaaagggcaaatcctggattagttgtgggggtgggggagattagcctggaggtcacaggctgatctggctgtgtctagggaaggagggttgggtggtgggaccgggttttctccgggtagggaagggttaagtcctcccaggctcctaaactttctcctccccaccaggaggccgcgcttagaagccgcccagtgccctgagcgtctccatggcctgcctgagcccctcgcagctccagaaggtaggagcctgcaagtcggggccgggagggtcatggcgggggggtccctgccggaccttcagtagtcccagtgcccaacccaccccctgccccattttaccgaggacgaaactgaagcccagaggagcgggttcccaaccgcaacccctcctgacttcttcacacatagccctgggtgtctagatcacaggacccagggtagggtggggtggggacgtgtgtgtttgaccaaaaacgagaataaggcctcggaacccaccagttcagccctgggcgggagtcggcaacgctgttggggggcgcagcgcccaggagggggcggggcctgcgaggggcccaggagggcccatgttcgtccaatcacaaaaggctacctcgtaggaattagtgtgcaacagccttttaaaaaatcactcatacattcctacgctgagacttaatattttcgtatacagctctagaagctttgtttcaaagtctgttacaacagctaccacgaatcaagtgctggacaggtttttttgggagggtagggaggagacggggtcttgccacaggcacacgcccccatgcccagctctttttttttttttttttttttttttgagacggagttttgctcttgttgcccaggctggagtgcaatggcacaatcttggctcaccacaacctctgactcccaggttcaaacgactctcctaccttagcctcccgaatagctgggattacaggcatgcgccaccacacctggctaattttgtatttttagtagagacaggattt

SEQ ID NO: 53219 - DNA, 2187 bp, Homo sapiens
ctgagtccatgaagacaaacagagtgctgaagaaaatgcccatgagtaccatccctactaccaccaccagcaggaagaagtccactgggtccccctgactttccaccagtgtcagagagcgcttgatgagctggttgaggacaaagctaatgccacccaataccagcagtgcctcaccaggggtgaagcagcggggcagcaggtacagcaggatcatgttgagataaacgaagatcagaaggacttccaggacttcgatcacctcccccacgctcaacgagtgcttcatgatataaatgataacacctccagccaagcccaagatgacacaagtgttggttggcactgggcgagtgatgccgagcgccaacactgatgagaagagggccactgccatgccagtggctgccaccacaatgccaaaacgctcaaagaacgggttcccagcagtctggcaccgctccttcatgactagtccaagcaaaggcatgaccatggaggcgggcaataggccactgtttgcggacattcggaactggaagacggcgcttccctgctgtagcagccggtcccacttgtattggacgtagaaggcctgcactgcgagggccacggcgcaccacgagtatcggtcccatacggttgcgtggatgctcagcaccactgcaaacactactgccgcctctgccagcaccgatccactcagcggagccccaggccccggggccggagatgggcactctcgggtcatatctctagacctggggcttcacggaggccggggcgactacggacgccctagacttcgggcccctcagccccgtcaagcagagggaggcactttcacccggccagcaaccttctccctccgttctccagcagcgaggagggaactccaccgcaggtcacttctgcggcctgggagctggcgcccggccaccccccacagcctccaacctacggcgtagacgtcgccactctgcagccttcctcacagttacagccgcccccgctgccggctcctcacctctttgggcctcgccatcttggcaccgccccgcggcaacgtcacgtgacgaaatccccgcccacgctccgggtccgggggcgagcggtcacgtgggcatggcgtctgggggcggggttagggcgagcgggcgcgcgaagatggcggcggccgccggcgggccgtgtgtgaggtgcggagcgggtcgaatggaccggggtggctgtgaagcgcggtgtcaaagccgagcggaagcggggcgggaattggaggcgggatgtggcgacagtggcagggccaaccccggctggatggacgggcaccgagacgggaggcggttacgtccaaacggtccccgcgcgcggggatctgaagagtcttcttcaggaggggggccggctcttcaccccttccctccgcgctcggcctcccatctcctcacccagggccctttgccttcctcctctctcacctccgacgcgtctcttggcgccccacccgcgcttccttctccggccgtgacgctccctcgagccacggggagctttgcggtctcctggggtaccccccacccacgtccctgctgcaggctcccagtgtcctgccccggcgtcgagtgcgccctgctggctccccgacctctcccgcgatctgttcttgttaggattttgtttcgcgttgagcggagccacgcttgcggcttctgtcctctccgcgcctcgtatcgttcttttcttgcactgaatcaagtcagccagcatgtccaaatcctccaagagatttcagggattgaactaggctttagggacaagaagatgaaatattatatacgaaaactacaattctgacaaagtgctttctagcgtcagaccctggtggagcgcttcccaggagttatctcattcaattctcgcaactccgagaggcgccttctatttcacagatgactcagaagtccggctcagagctagccaagtgataaagagagccttcaagctgaagtctgcgtacctccagtgctataaccagaccaccacgcctccttctgtcttccacattgcagctcgaaggtcttcgttcttcccaccaccctccctcaaagttaaacatccccgtctcttatccttccctgtgccagcagtgttttccccactttttttttttttttttttttttttttt

SEQ ID NO: 53220 - DNA, 869 bp, Homo sapiens
acttcttccaatctcagcatcgtgggcctggacagcttcccagccagaccccagccctctctccatcccccaggcccagggaccaaggaaacagacctcccgtggagcagaaaagaaacaactcctggcttccggcctgactatccaaacgtgtgaaatggccatgagggactcatggcaccagccgcccattgcacaggtgcggagactgaggctcggagaaggggttgtggtggacgcatgagtccctgggcctgggacccaggtcgctaaatgccccgccaggcgccagtcactgctggacaagggcagggaggtagcacccagccggtgcctcctcccctcctcagccaggcaggcgccaggggagcagggtaacccaaccagcccaaagggtgggcaccggtgcctcgccccaggcagcagggccaaggcccggctcgggccgcacgggctctttccctcttccggtcagcaagggctcaggggggcagaggtgtgccgcggcggggacgagggcagcagcccgggagggctttcccgcgtccccaggcgtctgccgcagggtgctccccgcccgccgcacatccgggcccccggcgcacggcgcgacgccaggcctcacctgcaccgcccgggtgaagaagatgcccgcgtccgacgccagcttcttcatgttgaagtccatggcgtgcccgcacggccgccgcgcacggcccgagcgcagccggcagcccccggcccagccgccgccgccaaccgcaccccgcccacctgctgcggggcaccagccctccgcgcacccgcctgccggcctgcccgcctgcccgcccgccgcagccgccgagccagcccgagcgcgcagggcg

SEQ ID NO: 53221 - DNA, 1146 bp, Homo sapiens
acttgattctatctcaggtcggcctgatctcaatcctggtatttagtgtaagacccagataggtggccagaactgaagaccccttgactccagctctcagagagacactgtctagcggcgagacctggcacttttgcaaacaactccagaacaagggggagagtggcgacagtataagagcatgctgcgggaagtcaggggcggtagtatttgaaaatgggcgcttggagagtgggaaggatttgtccttgtgtggaacaagaatagaggatcctaatacgagggctcagcctgctttggcgtactccaagaaagccccttggaggtctgactgctccgcttcagcccctttaagaatggccccgccccacccagccgcccatgtcgatctaatctgaatgaccaatagtagaagagaagagaccactttcgcgcttcaaccgcactaggaggaggggaagagggcgggagaggcggaatataagcttggtcacatgacccgcctaattggccagaggctgcggcggccctgagagactcagcgatgctcattggccagaagagggtgggggcttggcgctaggccacgcccccgggcggccggtttggttgcgcagccgccggggaaggagacgctgcccttccgcagcgatggcatcccgggtgagtatcggccccggccgagcccccaaggcgggcgggcagcgcggcagggccgggacttgagcggaggaccgagtaggcgcaggtgtccgggcccaacaggaccaggaaggtgtcggggttggaatgagtgggtacccgggccggggacggtgcgagagggtgccttgcttgggagcggaacgagaaggtacttgggtcagggaggtgatgcccgggcctggaacgtggcggggattggagcaggcgcgcaggtacccgatccgaggcggggagagcacccgggatggaaggagcaggcgtgcgggccgtgagcggcgccagagggtacctgggtgagtttcaatgatattccggggtgggggcaagagaagaaggggctgcccaagatgcctggggtggagtgagcaatttctgaagacggggatattgctgaggtccaacgcggggatgcccggtgcccggcatggtgggactattgag

SEQ ID NO: 53222 - DNA, 657 bp, Homo sapiens
atttttttgtatttttagtagagacagggtttcaccgtgttagccaggatggtctcgatctcctgacctcgtgatccgcccgcctcggcctcccaaagtgctgggattacaggcatgagccaccgtgcctggcctttttttttttttttctttaatgggtttgagcaaagcttttgaacaggtcggacagatgattctaaaacacacatctgacctcactagccagctgcctacaaccctcacttgcgcctgctgcccttggggtgaaggccaagctctgtttggtggtttgctgccctgtgagcttcgtcctgtctggctgaagggcctgcttctagtgcaccagacttgctgcctgatctgggctttacatatgctggtctctgccccaggaacactgttgctcaatcttgttttttttttttttgagacagggtttcactcccgccacccagtctggagtgcaatgtcacgatctccgctcaccgcaacctccacctcccgggttcaagcaatcctcccacctcaacctcctgagtagctgggattacaggcatgtgtcaccgcgcctggctaatttttatatttttcatagagacagggttttgctatgttgcccaggaagatctcaaactcctgacctcaggtgatccgccc

SEQ ID NO: 53223 - DNA, 1418 bp, Homo sapiens
cagcagtaagattagagtcaagattcaagtttaggtatgtctgagtccaaaatcagaggaggaagcagcagagcttaggcacctggccccatcttcctgcttggagtggggtgagctgggtttaagggcttggtgctgggctggcagagggcgaggggctgtgggctaggcccattttgacacccgggggacatcctatttttgatgtaggccttggccactgcttgctggtcggtcctgaaagccaagaggaggctgctgatggtgagtgactggcaggcccgggggagcacgagctgggctctgaggcagcgtggtggggagcggagcgggtgcagggtggctcgctgggccacttggccttcaccgctcacagtcctggcccccttgttccgccgttacctctccctgtgccaggagctccctggaggctcgtgtagacccacttcctctcctccccaggcccagcacagagcaggccactggggaggggaacggataccctagggtagtggccacagggctggcagctggcctggtgcaggcgtctcggtgggggcaggatacccaggagcaagcagagccctgtccctcctgccctttccccgccccagtcaggcccctgtaatctccgctcccaggcagcgactggctgtgctatctggcctgtggtttgtcgttcccctctgcgggccaggctctgttgcctagctgataccagctgccgtggccacgtgctccaggcacttcccgcggagccactatggccccacctcttgcagtactcacagcggcccatggttaccctgtctgcagaagttaaaatgggcttcgaaagcttgagtcactgcccagggtcatctagcaggaaagtacatgagctggggcgacctctaaagcccagccctttatgcgacacctgggcctggtgccctcatcctacctgggccccgcctggcccctcagccttgtgcccaccgcaggtgcctgatggcttcatctcccatttctactccgtatcggagcatgtgagccctgtcctagccttcggcttccttggacccaagcctcagcttgctgaagtctgtgctttcttcaaggtaaacagagagcagttctcgttctttcctgacccttgccctgagcacaggcgccctgggaggtgccaggaatgggatgagggcctgggcctgggcctgctcccagagagagggcagagccagacccacatgggtccagaggaagcagtgggagggaggagcctggggatggaaaggaccggctggggctctggtggtggacaaggggacttcaggtaacctggggggcatcatggtgggcagtggctgggccaggcctgacaccagccctgctcccccagcaccagattgtgcagtacctgagggacatgttcgacc

SEQ ID NO: 53224 - DNA, 449 bp, Homo sapiens
agtcaaaccatatcggaggccaagagagggagagagccttgtttcctaagggcttgctgggaccctgagcacagaccagcgtggctggggtgcggtgcaattagactctgtacctctaatctcagggccaccttgtctgtgaactccctgccagaggaaagtccagaggtaaaaggccagaccctgccctgggacagctctggaaaagcctgggtttcagagcttgtctgataacctatggagcagtgggaggaggtggccagcagtttggttcatgagacgcaggaggttctgaacctgggccaggaggccgtggcaaacagtgtgccactctgagcctcgccatcctcagctacaagctgggcgcacttagggctgccttgcagggctgttgtgaaggtaacaagaaggacgcagcacctctcaggatgcagagccggcgtcgagaa

SEQ ID NO: 53225 - DNA, 1530 bp, Homo sapiens
cctttcgccggccagtatggggcagagggaaataagccccctctgctctctggtctcagtttactcgtaactgaaagtgggtcggttcaaaccccctggagctgaggttgcctctcctcttcgagcacgcgctatcggacgcgcaggtccccaagaccgcggatcggcagggggtaccagggaagccttcattcagggcgcaggtcccagccgaaccaaagctcccaccaaagttcaacacgcccccaaagccagcgcctgattggcccgccctgcccacaagctgaggcagcctcaccttctgattggctgttatgctccctgttcggtgctggaaccctccccttctctgattggccagatgcctacctgcgctcgccccagattgggcgccagctggggcggctcgttggctcccaggggccccgctctctgattcgccgctcgggccagcccccacggcctgcacgctgaatggctgcgccgctacctatattggcctccgattgggtgcacggcgcctccccggcgtgataggtcaggaccaccgcccccctggctccccattggctgctcgaagaagcccggtctccgggtaagatggcagcggacggacagtgctcgctccccgcttcatggcggccggtgaccctcacccacgtcgaatatcctgcaggtaaaaggcggtcccggctccaaggacgccttcccagggacggcctctcagtcccgggcgctccggcctgctcgagcccgcggagggggcgccgggggaccggggtgggaactgtcaaatagtgaaccacggaggggctcggccggcgcgcgcgccgcgcaggcgcagtggtgcgaggatgagctgggcgaaattgtgaggcgctcgctcgcgcactctgcggctgcgcggccagggcgctcccccgggtcccggggcgccggtgggctgaaatgggttgaggatctgtgtgaggcgagaaaagatccctggcctggaccttggcccttcttccccgccctcccctgtcccagagaggccgcactcctgttccagcgtgcagggagtgtcttgtttccttcgaacagtgctttgggctgcttgtaagagaaagagctccccgttgctgggagtgtgcaagccgaagccaggcttttgagtacttgtggtgccacgccctgagcagggcacgattccacaacagagaggacccgatgagggggcgggcagcctccgggaacttgacttctgttgcttcccatcagacacacctctcgaagtgcagggctttccagttgagaggtccattagcggcgttctggaggctgtctagtaagagtggcgcagagcctgggcgtgggggtcagacccatctgggctccagttgaggctgaggccttgtgcaggtgcctgcctctgcttaagttaattcatctctaaagtgggactgattacagtgcttaccttctggtgatggtatgagcatcaaatagcaggaggcacaagaagggctgagtacagtgcccggcatgcag

SEQ ID NO: 53226 - DNA, 587 bp, Homo sapiens
ctgcctgggggccgtggccagagaccctcgctgtgctgctgccagcccctggctgggcagaaagtgccctcggcatgggcacctgggtgtggggtggaggaggagggctcgcgcctctggtctcggggccaggaattccaggtggcgtgagaagtacacactatttattttttggttttgtcagaggcaggcaggattttggagctggaagaatctgctctccggtggctgccctgtgaacagagggctcccggtcagcttcccaggcccttcgccctatgcccagagggcagactgcctctccctgggccggggtggcctgggtgccaggaggaggggagcataccccacaccctccctgccaccgttgccgttccagaacctcggtcagtgtttccctgtctgggggcagggcccagagcgagcacgcgtctggcggctgctgtcgttgtgttctaccccgtactgacccaacaccacaagggctttctctggtcccctgtccctaagacaataatcgctttctgacaaaggagcctgcacatttgggtgagcagacccaagctgtttacagctctttcttgtcc

SEQ ID NO: 53227 - DNA, 2930 bp, Homo sapiens
aggacactgggattgggctggatttgaatgagcaggtccaggggactctgggcaagtccctccttgcctcagtttccctgcaggaaggtaaccagtccagtcggatggtcctggaggatgatctagaggctgtttgtgggatggatgcagcttgggagacagtgacaagggtgcggtggaggctcagggtgttgcaacacctaaaagagcctctaggcctgagcctggatgcaccctccgccctctggccccgtagtgtgtgtctgagacagagtgagacaccagcaacatatgcttggatcagggacggaagggactgaaattaggctagcatccgggctgctcaccggggaggactgaggggtagatatagccagggtggggaagggggctagaggggaggatatagccagggtggggaagggggctggagggaaggatacagccagggtggggaagggggctggaggggagggagaccatggggctgccacctgccagttctgaggcctttctagcttgatgcctccgcgtgtttctctggccacacacaattccccagggaccgtctgataaaccaaaggagtgtgaccaactggacagggtcggaggagtggctctggcctaagcgtgcgacgggtgtgtcaatcggagaataactgggagagtgagctagggtctggatgctcctggtctctctcccctaccggcctgtctctgggtctaagggtgggggtgctaactgaagccggggtcccccttgtctttcctgggtcgttggaactgaatgctccaggacgtgggtttaatcccgcttctgaccttgcgccccaatctcctgctctgccaaacctgggacgcccgcctgaccccaccccatcagctggaggccgggtcgaacagcggccgcaggacgcggtctccgttcccggacgcaaccgcacggcccgcccaggccgtccagggccctcaggcccgggatccgccgcactcaccacggtcctggcagcgaaggctaacatcttcgctgcccgtccgcggacacgcagtccgctccgccccacacaccgggcaaagtccgcgccgccgccgccgcggctggggtcggtgggtccttgctagagccttcgggccaaggtcgctgagttacagccgccagccggtagaggcagccccgcgcccaccctctgggccgagcgggctgcgggaaggcacccggggaggaggactcgcgaggcggggcctgggccggtagcgggccccgggcgggcaacggtgcccgggaggttggctgtggggcggggacggggcatcgatggggcggagtctccttgaggagggacaggaggggcggggacggaggggcggggcgtcgcccggtagcgggtcgcagtaggctggctgcgagtcgggggcgggaccacggcgggcggggacagaggggcagggccgagggcgagtcattgagacctgtggaggaggaaggaggaggtcaccgtccagctgtctctcccctgtccccacatgtcttctaagctgttggaggtagtggtgtgcacctttccaactccgtctggtgtccttgagcctaactcttagagtgataggaaaacacaaccatgttgaccggggaatgtcctctaatattccttgggttagggtcagtaccacccacaaagatgacaggtggtactccgggacaggagactgtcccggaaaaacatggctgagcacaacccaaacttgacgccccgcacaatcgtggcagtcgcggcgcccgacgttcgggcggccgtgagcggtcctagcgcttggcggccgttggcgcgcatgcgccccgcgcgccccgcactgacatggccgtcgcccggttccgcgcgtccgccgcgcgccggccgttaataggcttgctccctgagcgccccgcaccgacatggcggccgtcttcgctgtggtgactttaactctcggttttcggttatagccggccggcgctcacttgtcttcaggaagctcggagcctttggtggagccggggagaggaagggtgggtgcaagagtgaaaggcgagaggggactgcaagcatccgggtcggctcctggccggagcaagatggctgagggcgagcggcagccgccgccaggtaaggccggcggggccaggccgggccggggtcgggtagggtgggggcggtgccaggtgtgggaggctcaggagggcgagagtcatgacacggaggaactggaggggcaaaagctgaggggccccgaggagggactgagttgaatggccttaggggagaggtgggtggtggggcgccgctggggagggaaccaggggctgcaaaggggtggtgattggggcgcaactctgggttttgtgggagtccaggctgcccgaatgctgggtgggcagcgccgtggtcataagggggccttttgcatctctgggcagcgcgtgcttaagtaagctgctgactcggtggggaagctgccagggaggggggcgaaagtgattccggaggctgccgtctttattagtcgctgcttaggggatggggtggtgctccgtgggcctgcgcccgcctcgcctccagtttcggcctccgcgtcctgctcacccctcatcctcctactctctggttccagtgcctgagaatttattgagggaaactgcccgtggtgtctaaatccctaattttaaaaggctggttgtgcaaggaggttagtctctccggcatctccttcggtaactcttatttaccttgtagcctctttttagttcatcttaaataactgggatggaggtgctacggaaggatcttagagaccctttttgtgcagaaggagaaggctgtttgccgacctaccttgaactaagaaggactggccatagataacttttacattcccgacagaggcaaataggt

SEQ ID NO: 53228 - DNA, 4478 bp, Homo sapiens
aaatggcagggccggccggagcgggttattgaaaaggaagcaccactgggcctcttccgaaagagccgctgctgactgtcaggtcctccgcccagttctccttcagtttctcctgaacaccacaggagtcttgagatgagggtctaagacttggtcactaactggccttggtgactgctgcagcaggtctgaaagggtcggggcgggcggaggtttgtgggggagggtcagcatctttcggtggggccccacaagggtctgtagaaccatgtgctgtggatgtgtaaaatgaaaccaccagaggagatggagcgaacttctggtgcagacagcttttctgtcgaagggacacgtctctgtcagtgcctgaggacgtgggcccgagcaaagtgctggagtgggagtgcgcaggcctggcctgtggtggcagtcactggatagccagccccacggctgggttctggaactggaagttattgtctcaccaaggcaggattccttgcagtgggccctggaccacttgtgcgagatctcctagtgtgtttgttaaaacgcacattcctgggccctccatcccagcttattgcatcagaatcttaggggacaagagccaggaacctgcatctaaacacacgtgccaggcgactgcacaggaaagctggggaccctctgctctctggacctctcttgagggaggtgttaggacttctcatcctctctgccatccccatgccccagtttccaaagggcgccctcgctcagctatctggagagggtttgagagttctatccctcctcagtccctttcccgacaccagcacggatgtctgctgcctcagtgaggttcctagcaggcctgtggatgctggccacgggggctgctctccgtccgggctgtgtattctgagcccccgacgaggtggagaaagctgggttataaccagcagccttggctccaggctcttcctggtcaacattcggctcaggcttctgccaaactccagaggccagaggggaatgacacattttttccaagtcagcaaatggagccgggactgacggctgggcggccaccacttcattcccggagatctgctgccctcagcagtgtggcaggcccaaggtcgggaggacttgggggcagcctggctcactgccttgaaagccagtcacgcgctgctctctgtggagtggaatgtgggggtctgcggagccctgggggacctcaggataagctggaggagcagggtgggaagaagggtgcagatgccacactgagttcttgggtgtggctgaaaggctgagctgtttgggctcccccggcggctggccaggcctctgggtccctgtcggtattctaactaggaggcatgccaggcctggcctccaggattttgggaattgattccatggtaaaattttgtctttagttggttggttgattttgttggtataaacaccccaaaagcttttccaaagtttgggacccagttcctccagtagaggaaatctcaaagtagccactaggtggcaggagaggcacactgaacttggagagggtttggtgacatttatttgaggcagcagaaggaacagggaggggagggcgtgcctagagttgttggctgttccgcaccttctccacaggtccgggttttcactttgggtctaggctcttgggcatggtgttcaacagtagaccctaggaggagtgtgcccaggagccggggtggctgcagcaagggcccatcttgccacgtggccgctggttgcagcacacgttgtgttggttctccagagcgcccaccctcttccacctcggagcagtgagcagcattttgcagtccctagttggtgagtggcctggcctagctcactggggacctggaggcttgcatggagttctgtacgccttgcttgggaaggaggcagtgtttcctctggagaccctggattcaccatggtgctcttttaactgggagattaactaaaacaccgagaacttgggagtggaatcaggcagccctttcagggtctcatgccaagactgccctgatacccgtgggcatcctaggtgagggaccccaccttgcagggcctctacagcctctgtaaatgcagccctggcgcctttaagagcccagggcaggcaggaaaagaatttcagtttcaatctggcttctaaatttggagttttgggaagggagggatcagatttcagctggaagggaaggagctgacaggaaggcgctgtgcagagcctccccacccccgcccatccccccagttactgacagaggagccatttacaaaaggccgattctctggggagtggagaggcaggaacgcagcgtctgtgagtaatttcctgctcaatatggctgctctgactcacacgattcccctggggtcactgcgggctgcagctcgctcgctcattctggttctttctcttctccctttgtggctagaatgagctaattttttctttgtcttccagccccgattcctttttctcccactcgtctgttttcctttgccagagttacaggcaaaggactgtaacctccctgaaggacttagggagaccctggggtactgaaggcctgggggcagcctgcagcccctccaaagaaactacctctctggcctttctgtgtgtaggggcccagggccactggagctccaggacatgggcctagccctggctctgccagaggccttttgaggatctgttctttggccctggtaggcgaggctggccaggaggcaggggctcttgtcttccagtgcccatctgcctgcctttgcctcggagcccttgccgggcaggcccctggcagacaaagccgacaaagccgacagggtgcctcctggttgcttgctcagagggccctgtccagagagtgaaactggttacacagctccatgctccctgagctttcctgggcctggaagtgtgcacagggctggagcctgcagactggggaaggggtggggtagggtggggaggtgggggaggggctgggggtggagtgtggttgagcagggcagttgaaacaaagctccccagaggtgaggcccctgtaggctcggggtgcctggctgccctcctggaggagagagcctggggtgattctgagtgaagcgagtggtccaagacaaggcccccagggaccagagtgggctttgtctctgttgggtgcctcgggctcttgcctggctgtggtggagcctgggagagaagaggaggggagggaggagcctgttgtccttgctcctgaacatgggtgtttggatgggctttttgggaacctgggccaggggagggaaatgagggggataaaatgacaggttttttttgacttaaatcttaaaagttttgtcacagttgcccttactagagaagtaagaggcctgccaggagtgggtcaccaggtggcagcccatggctcaagagtgggggctcctgagggctcttgtggtgaactgatgcccctttttggagagcgtttctggcttatcttttctccttcaaaaaataacccagtctcccctgacacccgcatgtttctagaaccttccaagtctctgtttctttgccagattcagcctctttgcagagtcttccttctgcagcatgggtctggggtacagagccctgttcccctgtaaatgctgcctatgagctggggggctgtgtcgaggggaattatgaactgcttggttaataaatacaaatgtgctggacttgcggtgtcagggggatatgctcaggcacacaggcgtccctctgtggtttctgacgtcatgggaacttcatgctggctgcagaatctttctcttccgtcctggagggtcagactctttggcaagagggaggaccaggaatggagccgtccttgtgcctgcctctttcagctgctgtggcggccaccccttccccacctcctggccaggccaggctggctgctgcttcaggcacccctgcctcccatcggccctctcttccctgcctgcatggcaggcagagggctgtcggatacctgggtttggtcatacccaccttggtcctcttgcaaattgaccctttcctcatctcttctagctctgctggtggcaggtgcagaccacgtgtcctgtgggggggcctgggggagagggggtgggcctggaggggtggggcctagctgctgctgctatttatctgaacccaagtgaatccctgtgctggagaggcgctctgaggctcctggggagtcggtgggaacgacaccagaagctcaggtggagatcttatcttcctgaggctgctggatttggtgggcgataggaatcaggccccctttttttggctgtgggagaaagaggggtgactgcgggtaggtgggcaaggaatgttatattttcctagcaggccttgagggccaaaggggaaccttgtctctggcacttgcatgtgcctgtttgtatgtttg

SEQ ID NO: 53229 - DNA, 701 bp, Homo sapiens
ggagggtctgtctttcctctgggccatggctgtgtgggtgctgccttcagaaggaccttgtcaggacccagggagtcccttccccagcttgaatcacctctggctggaaggtcagggggcagtctgaagccgctgctccgcccaggtacatgggagggccttgctgggagaaaggctgggctggaggctcctcctgccctggagccttaggcttccttggcccagctcctgtggctctgagggggctggctctggggtcctgtgggcagaatgggaagaacccctgcctccaccccttctcgccttgcaacttcttctatgggagctagagggaggttgacctttgaccccttctggaattccagggcccttggggggtgggggggctcttatgaccacttctgggatgacataagcaccatggcagctgccttggcctctggcctggatctgcggctgctccccctcccgcccagggaccacctcccgctccctgctcccgcattctgtgtctcaggcccaggatcctggctgtggccagggctctgctccccaccccaccatgagcttggtttccatccttctttccctcccctcctggcgcctctttggcccactcgtcaccctggtgcttctccctcttaggttccacagctgatttttgaggagagggaacctgggccagtcatagcacccgtttg

SEQ ID NO: 53230 - DNA, 5263 bp, Homo sapiens
tgtgtggaatgtcttggtgagacgggtagattgccagtgggttgcgttttgggtcaaggggaattatactcagggcactaaccctttgtggggctgcccaggtccttgggccccgagaagataagggaaggggaagggcacctctctttagggtgctcccagagcgccccatcccatcccttggcattgctagattccagtgtgcggcttaggctcagatcacccggcagaggggaggggagccctcgtctggggtcctgctgagttcagagatcttatttcgcaccccaccatccactctcctttaccacagggatccctggggcgggtggggaattcccaagccctttggccggtcccttccagtgcccagctcccaacaaagggggccgaccacgtgcccctcctcgacgtgggcctggagtggggacgcacgcggccccgggacccagctcaggcaagggcgagatgcagactccacgcagctccccgggtggacgcgaagcggcccccgacagccccgccgcctccgccgagcctcgcccactctcagccccagccactgcagcgcgcccgaagcggcgctagggggagctctggcaactggcttcgtggattgaagcaaaaccgtgcagccaaccgcgatttccttggacttgcaggggaaaatggggagggaggaaacgcactgttccccctcctcggcagctccagactcttcccgtgggaggccgatgaagcagccctgggggtgaaggtgcctttcctccccgcgactcacgcccccagagcctcctttttccccacccccaacgcggacctccgcggacccccgcattctggagagtgtccccgagaacttcgcctcgcgtgacaccgggatccagagcggagcagtccccggggacaggcttgcgtccgcctctcagagtctggcttgggggcctcttggcggcagcccctcctgtcgccgcgggaggcgcgaaggctggggtggggggcgcgagccgtcctgcggggtggctgcgaggctcgcaccggcgagggcagtgtgggggcgagggagccagcgagagcgaggagctgtggggagtcggcagcaaacagccagcaggctgccactttgctttctttttctcgttctttctttcctaacccctctttgcaaagctggaactatcccgcgcgcccctgggcccaagccgcggctccagatgtggatttgtttccagtggggagaacgcgagcttcccccgggccttggcacattctcccactctgaggtcattccgtaggtggtcagaggggagcgcgcgccgggagccttcctccctccatccactggggagggaagagcggcgggtgggagggaaggagagggagaggggaggggcgcgaggagggagggagacgccgccagcacaccaccaagtggcaccgagcagtgataacaaactcaacttaaaaaaaaaaaagggaaaaagaaaaggaaaaaacttccccaagttgcagcccgagacatgcggacgtgcggggcagaggcgcggggcagggagtgcgggtggccctgaaacccccggcgtcccccggctgctttccccggccacagagagctcagactcgaggccgaccaggccctgcgcctgtgcctgggcaggaaatgtgctggaggctggctccgcttcccgctggagaccccggggcggccagttcccgtgggggacaggacccccctggagcgggggcggccgagagacgcgcagcacccgcttcatccccagccaccaacatcaccccccattctcccaccgccgaccttgcggatgtgggtagatcccgcccgcccaggccgaagagaactggggtttacatgggggtgggcggggtctctccccacacctctctatcctctctgacgcccccagacatctgaaaacaaggcaccaccatcttctgtaatcgactttttattaagattataaatttaaacaatctgaacagttttacccggtgatatacaattcagtatgcacaaaaatacagggtaatgagggaaaagggccgagaaaggaaggattggcaactcgttttggagtccacacggtgctgatggcagagaaccagaggggctgcagacgaaccccacctttttacaacaaaaggcttttaaattaaacaaatctatcgagctgaagacacaggacggggttctcacaggctcgaacaatgctggtttcatgaaatgcaaccgaaggctgaaccaaggcagtgcaacttagaagcacacacacaaacaccacagctgaccaggaacttagtgcaaagtctccaacgcagtcggcggtcccggcccctccctcccccggggccgccggggatccaggtgaaggaattgacttccttttttgtttagtgaggaccgcagtgctaggcatgatgggaaatgtagtccgccgtgcccgccccccaccccttacccagtgtccgagagtgtcggggtgtcaggcgccacccccgagtccgggagacgggtggaggaggggaggagaacggagccagaggggcggggagaagaggggttcaagacacccgccccgggaagaaaagaaaaaaaaagttgaagtgttttcatttctgccttctcattttgagaactttggagtccgcccccagagaggaaatgtgacccaaacgtccctttcggagatagagtttgcctttgtttttgctcagaatttcacaagacccattcctcaccccacagagggactcgggagagcggaacgtcgggcttcccgggtctgacaactgattggaatcggcttcccaggtccggcgccctcctgagctgcgcccccggcgcgccccggcggccagggcgccctgcctcgcccccggctgcccggcacctcctccgggcagcagccctccctcacgtggtaggctcctcgctaaacaccactgcaatcactacaataaaaagaaaaaaaggagtaggagaaacacaaagcatacttaaataggcgctttttctctctgcaaaaataaagtccaagattttagatttcttttttttttattttacaatttataaaacatcagccgcctgcccccgctcgcccccagctcagccccgagtggcccggcgcccgctcgttccctcctctcgcccctttgccgagtctttgtctggccccagccccgcggggccccgggtccctgtgccctcgggggtccctagaaggcgacaatggctcgagtccaggcgccgaggctggcgagcgcctgcttggcgcacagctgcccgttgagcggcggcggctgctccgaggagtccggctgtcggctcaccagccccgagaagccggagccaaagatggagatcaagtttgagatgttggacgcgtccggggacgagtccgggcagaagtcctcgaagcgggcgcgcttgcagggggcgaacggggcgcccccggggggctcggcccccagcccgcccgcatcctcctcgtcgtcttcctcctcctcctggccagggtaatacttgcgcttgcagccggcggcggacgccaggcccggtcccggagcgccctggccacagcaggggcagtgggcggaggcgcagcagtcctggtgcaagtagccgttctccaccgtggtcaccacgtgagtgtctaggtccagcacggtggtctggctgctgcagtgcaagccgaagtccgaaggggtagggtatgcgccccggtagaagccgggggaggaggcgggggccggggaggcgggcggagaagcggcggcggccggaggggcggcccctgggggcgcggagcaggcggccggggcgcgagggtcccgcgggcagagcgcagcgggcgcgggcggcggcagcggcagcggcagcggcgcaggacccggctgcagaggctccaagggctgcccgcggtggggcgcgccgtgcggcggctggagcgcggcgcacccgggcagctccgagagcgcccccgcgccgcccgcgggcgctccggccgccgccgccgccgcgcagcccctgggcgccgggtgctggtgctggtgcagctgctgctggaggtgcagctggtggagctggtggagctggtgcagctggtgccgggcggccggctcgcgcgcctccgcgtccccgccgccgccaagttggagcgggccgaagtcggccgcgctggccggcatgcccggcgccgcgtacgctaggtgctggtgctggtggtggggcggctgctgctgttgctgctgctgctggcgccggtagagctcggcgtagcgctcgctcaggtagagctggcgcgcgttgcggagcacgtaggacaccaggaggttcttgtgcagcttgatgccgccgcgctgggttcgggagctgtggatcttgcgcagggagatgctgatcaggctctgggcgtccagggcgcactccatgctcccgcggagacggcggcggagcagccgccgccgctgctgctgttaacgcttctgctgtttctgcctccagccggccgccggggcgcgccgggcaggggtaacggagtccgggtcagaggttcggctgcgctccgaaaggagccgccaccatgcgccgcgcgccacccgcgggctcgcgctccccagacggcgccaaagcaatgagtctcggccggccccggccccagctatttagccgggtgcccgggccccgccccacatgagaagagccaataggagctctgagagtctcctgagtgacaggcgcagcccgccccggggctactcggctggccaatcagaccaaggcggttcctttgtgctattcaaataccgaacggaccccgggcctccaacgccgctgctgcctcgaatgttctcctggggctgccgcgccgcgcgggactcggagccgccggggccgcagtctgcagcataggtcgcctggcagcggccacgttgaagcccgcggctgccctcgccttaggtcccgggagccgggggtcggctcacctgagtgctgcggcgacggctcctcccctttccgcacggctgggcctcacctgcggcaggtgcgcgccgctcatcgctcccccagcggcgcggcgcctccacctgcgcacctgtcgcccccccgagtgacccgcgggagtcaaggcctctctacaggaggctggtggagccgccggcttgacactggggaacatcaaaggagcgaggttttgggggtaccctctaccgcagagaatgtagggcctgactccttgac

SEQ ID NO: 53231 - DNA, 1631 bp, Homo sapiens
cggccgacaatctccctttcttaaagtcaaccaatcatggactatttatttattttgagacagggtcttgctctgtcacccaggctggagtgcaatggcaccagctcactggaacctctgcctcccggattcaaatgattctcgtgcctcagcctcccgagtagctgggattacaggcataggccactatgtctggcgaatttttgtatttttagtagagacggggtttcaccatgttggccagacttgtctcgaactcctgacctcaagtgattcacccgcctcagcctcccaaagtgctggcattacaggcatgagccaccgcccccggctggcaatcatggactttaatcgcatccgcaaaataccttcctggcaacacagagattcatgtttgattcaagaggtggggactgcagcctcccctgagtggacacaggaaactgaccgtcccaccatccctcctctctctctggtttctcgctcctgccagcatgaacactgagtatcgccactggcctccccccggagccagggtgggggtggggtggggaggtggggagtgaaaccagcgctgagctcctgagtcaggcccttctggacttcccggactttctccccgctccacctcccagccccctgggataaattccacctggacccccagccctcggcctcagctcctccttcagtgtgaatccctggcttgtgacatctccacagactggcctgagcgagccccacataagcccagcttggagtggggccaggagcctcccttactgccttcagggagctgccagtctcctgagggagccgcagagcctggaatccgggtcccaggtttgcagagcgagcttgcagagagcctctgttttccctgattctcggctgtgctctgggccggactccctggtcagcccatagctcttggctgcaggaaaccagccccgtgcttgttttgttttgattgcacaaccccggtgcaggaggccagggtggacatctgctgttttggccagcccagcacccaagccccccttttctggcaagagccccccagttgcctcatggggacctctcccagtgtgtgtagcctggggagtgtgctgtcagcctagatgcccctgtcctgcctggccaagggatgggccttgtcttcgtctgttttctgttgcttataacagaatacctgaaactgggtaatgtataaagaaaaggaatgtatttcttatagttatggcagctgagaagtcccaggttgagggaccacattcggtgacaccctttttgctggttgggatctgtgcagtctccaggcagtgccgggcatcacatggcaagggggcagagtggcccatgagctggctcaagcctctcttctttttataaagccaccagtttccctcccatgatgacccgttaatacactgaaatccatgaatgcattaatccattcctgagggcagaaccctcatgctccaatcacgtcttaaagctcccacctctcgatactgccccactggagattaagttcttcatgacacatgaaatttgggggacacattcaacccacagcaggcctggagccccatcttggtcaccagccatcctaccctgaagatagatgc

SEQ ID NO: 53232 - DNA, 1411 bp, Homo sapiens
aatctgctcatctccaaattcgctgtctccccgttaggagtgagcttggtgagggctccaatctggtctcccccgttcattgctgagtccctggcacccagcatcagccccgcatggagcagctagtcaataaagctttgctggacacatttcagatgaagagactgagggtcagagaggtcacatggcttgcttggaagaaacatcagatttgtctggctcaagagtccacttctggctcccccctcacacagttgcttaagagacccccagcccaagacagcctcagagcctgggtcttccccccctccgcccattctcaggcccttatactaaaaccagagaggcctctgaactgctgtctgcccccccaaccttttccttgcttatctgggaatcacgcaaaagttggccagagttagctcagtctcagagaagctgcattcttctagagtcactcggttttgcgtgacctgattcaaattttccatctttgtcactttgattcccactctgagaagttttctcagtacatataaccttactatgtgatgactggcctgggtattcatatgtgcacttgttacctgttgcttatctcctgggggacccctggttcagaggggtttaagcaggtgtcctggtgagaccggggttataatcagagactctcagggttagagcttggccctgccactgagtggccttgggagtctcatttgacctctctgaaccttggattcctcacttgtgaaatggggacaggttgagttcctgcatggaaagtgtcttgcttgatgtctcgccaaaagaccaaaactgccgtcactcactgccggagaggccctgcacgtggatattagagtttgctgggttttgtttgtcctgagcgaatgtccgtccatgtacaggctgatggattttgtaggtgcaaggtccctaacgcaatcaatctctctcctcaaaagaccatgagcatgcctggactcagagagcaccgtgtgtggggggctggcgtgggcacgtgtccgcagctgggactggcttctagggttctgggctcaggcaggagggcggggtcccaggaggtcatctctctctccttaccctggagcctttggaatttggtttccaaatgtcctgaattcctgttcattaatatgtggctcagtacagtgcttgtcccggcagcaggagcttggttggtgttagtctgctggggaatgggataaagcagagaaatgtcaagctttcccttaaaaacaaaaaacaaaagcaaaccctcacatctcccaccaataacacaccattgttatccctgtacttaagacatgttgttgccgggcatggtagctcacacttgtaatcccgacactttgggaggctgaggcgggtgggtcacctgaggttg

SEQ ID NO: 53233 - DNA, 732 bp, Homo sapiens
aggaggctgaggcaggagaatcacctgaacctgggaggtggaggttgcagtgagcagagatcgtgccattgcactccagcatgggggacaagaacaagactctatctcaaaaaaaaaaaaaaaaaaaaaaggataagagagcaggtgccaccgctgaaaaataatcccgacaaatgccttcccttctgcacctcaaatttctcaactaattcctctctctgttcccactgggaaagtcccttcttctgttatttgccccaaggcccatgtttgcccaacgagcaaactgcatttgttaagtaacataagcgttctcattttgggttactgaagggcagagatgatgcctgttaactcccatcagctcccagcagactgaacaggcacagtgggctgacaccatcccacccaaagcaaagaaatgtggtggaggaagcctggggcggcctggcctgcagtaaaggtgcagtgaccgtcagggactgggagaggctgtgaatagcatggagccagtccccacaccagagagcctttgaaggcttgctccacggaaccaattgggaactgctgggctaagccagttggatggaggtgcagttctgaccatccccgtggccactcccacttcccctggacagcagggtatccagggacaactcagtggctgtgggatcaccctgactctgccatttagtaggctgtccttggggagatgacttcccctctctgaga

SEQ ID NO: 53234 - DNA, 2164 bp, Homo sapiens
acctcaggtgatccacccgcctcggcctcccaaagtgctgggattacaggtgtgagccactgagcccaggcttttttttttttttttttttttttttttgcgacggagtcttgcactgttgcccaggctggagtgcagtggcgcaatctcggctcactgcaacctccacctcctgggttcaagcaattctcctgcctcagcctcccaagtagctgggactacaggtgcgtgccaccacaccaagctaatttttgtatttttagtagagacggggtttcaccatgttggccaggctggtctcgatagcctgacctcgtgatccacctgcctcggcctcccaaagtgctaggattacaggcgtgagccaccgcgctcagcccaaggttctgttttttattcaaggcgtcttagggcttagagctaaacttgaccatgtcattccacacataagcccttccctggctcctcactgacctcagatgacggttcatgctgggagtggcctcaaggccttctgggacctggcatgggccaagctctcccacctggggctttcctccccttcctctctctcctccagaaacacagattgaaacatgagaacgtctctcttccctctagagcctcacacttgctgcctcctctgcctggaactctctccctctgctctcacagggttccctaagtgtcgcttcctccaagaagccctccctgatgagttgagccactttagtttgtgctcaggctcaccctgcacgtcttggttgctctcatcactgtaatgatctaaaacacacgtctgctcatgagacccgcatcccacccccgatgctggggccgctcttggattttcatgcctgctgccagcacccagggggagctccggaaatgtctgctgggtgagtcatgaacgcgcaacctgttgatccaggttggtaatcagtggccgggcctgccagcaaatcacctgacccggtcacccagaggctgggaaggactgccgcggctgccgcccagatccctccttcctccccctgaaggctctgcctggaaggagcgaaggggttaagtgtttctggcggcctggtgctgtgtctgctgcagttcccccttccggggctgcagcaacccgaggttggcgaggaatgtttgcaatgcagagctaggaggagggcgggctgctagaggtgggggccgaggcaggcccgcggccaggctccctagttgagcaatggccctgctggttcctgtaactcggacccctcccgccttttcccgccctgccggcttcctccaccccggctgggctgcctgccgggcagtgggggcggcctgcactcagctgcagagggaggtggagggacagaggcccagatagcctgaaggtcaagagtgaaagagaggggttccctgagagacagagcaggggtgcagttggctcagccaccccagcccagagaagcggggccttttccaaagtcacacagcaagacaccagtgaattgggccacagctctgggtctggcctctttagttcccataactctaggctgcaactcccacacacagcagggaggtcacattgccactcagctgggaagctttgaaccacaggggaccctctcccaacagaaggcaaagcccccccaccccaatgcactggcttggcctcttcacctaatccccagggtctcagagaggacagtgcacccactggtctaggtgcacccctccatcctgccattaactccccaccacttcccactgcccactgcccggccaggtcttggggaccttggtcacctctgttcctcgcttccgggagtatgaagtaaatgaatgaaggccaaacttgagctggttcttgaaaaccctctctcccctcttcctctgggtcttttcaaggaaggaccaaactggcacggtggctcatgcctgtaatcccagcactttgggaggctgaggtgggtggatcgcccgaggtcaggagttcgagaccaccttggctaacatagtgaaaccctgtttctactaaaaatacaaaaaattagctgggcgtgttgatgggcacctgtaatcccagctactctggaggctgaggcaggagaatcgcttgaacccaggagttggaggttgcagtgagctgaaatcacaccattgcact

SEQ ID NO: 53235 - DNA, 1572 bp, Homo sapiens
ggctcacccagctgaaacaagatctgggaagggtctggcaaccctcccaccaatagcttcccaatgggaagaagccacacccttctgtgtctgttgagaagctttggggctgtttactgcccaccaagctctcgaaactgtggctctcgaaacccagagggaaggggagccttatcactagtcatggcttctgcttgatatctgtccaaaaggcctgacttcatcagccaacaggcatcccagccttttctgttaagttggggtctgtttccacactgagagtccctggggggcctctggagtggggatgcaggcatggcagagcactaggtgggcacccagcttctcagacctctctcttttcccacccaagctccaggggcagaaaacaacccacacctgccagaaacctgaccaggctgcagagctggaaaagctggtttagtgcagggagggtgggggcagggaggcgggcagggtgagcccttctgaggctgccaggcgctgctcacatcagccgactggccgttggcctctcaggactgtcacttggaagttccttctccaagagatggctattgccaaagtcatctgtgcagtgaccactgcagggcctgggcgctcccgggagccgcagcgcagggacagtccgtgcagacgggtggcgggggaggcgggggagggcaaaggcctccactctgcaggtagcccgggcctggtgggcgaaaggactcaaacgccagagctctctgaccctcggccgccagggttcaaggctgggcccagccgcgctttgccggggtccagggcgtgaaggatcgtgggggacccgatggatcctggggcgcccgctgggggcctcgcgcggggacctcccggctgcttgagaggcggaggcagcaagaagcaggaaaaggaactggggggacgcgagcgagtggcaggccctcctcggtggccgccgagcgcgcgcccagcttggggaacgcgctgcctgcgcacccgggcgcgcccgggaaggccggctcgctggcaccgcgtcagtttccgagctgtctgtgcatgtctatttctttcactagaggttgctcactttcacttcttggttcctttcgcctcctctgacggctccgggagcgtctgtgcgcgcgcgtgtgtgcgtgcccgtgtgcccgcgcgcgaccggcgaccccgccccgcgcccctgtccctaaagggaagggcgtcccgccgggcgtcgcggggcctaaatgaacatgggaacctgcgctggggaaggcccgccaggccctgctggcccaggaggcccggattacagcccagtctgcgtcgctgcgggcagaagaccgcgttcattaccggtgcccctcgtccccacccacttctctctctttctgggtctccagacaaccttcccggaagctgcagctacttcttctgacttggactgggggtagggtagggtagggggcgctttctgccacccctttcccccatcccaaggaaaccgaggccagtatggacggggccttgctccactgaacaggaagcgacaccctgaaacttttgctt

SEQ ID NO: 53236 - DNA, 2744 bp, Homo sapiens
tctacctcccaggttcaagtgattctcatgcctcagcctccctagtagcggggattacaggcgtgcaccaccacgcctaatttttgtatttttagtagagactgggttttgccatgttgactaggctggtttcaaactcctggcctcaagtgatcctcctgcctcggcctcccgaagtgctgggattacaggcgggccgtgcccggccaacatttgtttttctgaacccatggtatggtgtgcactgcagaggctttttcctctggcttccctgtccagagcagcaactgtatgcatttgagctgataatgtccaagagtggggagctgagttaggaacagaatcacaaactttaattagcaggatgacattaacatcccagcaggggcttgggggcgtccttcaggcccatctgatcccggtggacacctccccacaggacccgcaatcttgggacactggaagccaggcgccctttgagggtggagggaggccacccacctccccatgtggccagaaattgcatgccccggcagcctgccctggcttggttcagcagggcccagaatgttctggtctttatctggtttagttttaagtgcttccaacggcagcagggctgttccaccacagtccccaggaaattggtccgtgtaggacggagccttcccgagaatgaagtcatctgttccttttttattttttgttgcctttctccttcaacgcgagtcaccgggcctctgcagtccctccccgcgccaacgcgccccgccgcggggcccggacggggtggcgggggaaggggcgaggagcagggccccggggtgcgcggccgcccgacgccccctgctctcgccctgccccccgccccggcccccgcccgccgcggcctgaaggtgagctcccggggggccgcccgagctccggcgcggcccgctcggcaaacaataacagtaaataacgctcccttgtcaacgtaataaaaacggaaacggttacaatgttttttaataagcgtcccccatcaatctccctccccctcgtcccgggccgtgggcaccggggaggagggggaagggtggggggcaccggggcgcgctgcttgggggacccggggtgcaggaggaggacgcccgggggaagaggggaaaacacagcaagtgagagacgagggggcgcgagcggccggggtcacgcgcgccagccgagccgggaagcggccgcggtgagtaacaccgttgccatggcgacgtggccacgaggaacaggaagcggcagaaatagcagccaccgcggcccgcgccgcccggcccctccccccagcccgttgccacggagaccgggccagagcgaggctgcgcgggcggccgcggccgcctgcgccccaacccgcgcatgcgcagcggggcctggcccacgagggcgtcgcgggtgtgtcccgtcgccgcgccggggccacctggacccccagacctgcccctgccgcccgcttaggtggtggttcgggggccgggggaaggaaaagccaaatcgttccttgtttgcctttggaaagccgccctgccattgttccgggcggattccttggtttccaggcgctgtaggccaggagaggagggggcaggaaccccggcccagcggtcccagacgttttcgaagcgacagaccctgggcccagcgcggggacgcggaggggacacgggctagcagccctgccctccggagctcaggcccagtccgggcttcccaggccccggggctgccctcccggagcccgacctcccctgggggtgggggtgctgccccggggcccccttcctgggtttcctggtccttttgttcacgtatccccctccccggattgaaccagcaaagagcacaaagcagaaaatacatccttgccgcccgcaggctccctcatcccgcagaaaactctgaaacagtccacacccgtcccaaagttgagagaaacctggacgtttcataaacaaaacccgccctccagcagcgtgtttatgtggaggcggcctcgcgtgtctgaggctggggtgtgtgtgctcgtgtgtgtgtgtacgtgcgccggggacacgcgatcatctctcaggtgtttgtggagaattttttttctctccagattttgtttggtttgtttttaataagggtcagaggtctgggcttctgtggggaaggggcaaaggtcatctcggatggccaggctgggaggtcctagggggaggggtcgcggggcctgggctgccgggcgaggcgggagccggtgggagtcagcggggacaggctccgcgagctgctcctggggtatggccccagagaggacccgagccaggactgggatctctctcccctgagcagggcagctgtcacttccccggcccctgtcctggccacactggccaagagagaaggcaagcggagtggccccggtctctggggctttctgcattggaaaggggaggcttttgttttttgtacaaggcggacttcaactttcagcgagcaggctgaccagatgggaatgtagacagggtgtgcggggaagggggaccgcatgcttcaaacctccttcctgccaccatcgcctagcagcctgagcccccactgcggccctgtgctggctgaagggagggaggggctagggctgatgtttcttcttccctccttcccccaccccccttttccagatgtgagaaaggaaccccgccctgcaggggaaacttgtctggtgt

SEQ ID NO: 53237 - DNA, 508 bp, Homo sapiens
cagcccggagccgagccgccgcgcagccgggcgggaggctgcgtatcagagctcctggcaggctcgcaaaaagctgtccccggcccgccgccgctctatcagcccacggagggagggcggcgggggagggagggaaaaagtatttgcttcagcccttaatcacggaatttgaaatcccagcgagtcggtgccatttattttcagaggctgtcaaggctggtttcagcatttaaaagaaaggaggataaaacgcatttgcatttctcccccactctcgctgcgcgctcgccggcgctccccctcgttccctgcgcagctcgcgggtcgggcgttggcggggagggggaggccagaggcttttcaaggcgctgggggctccggccggcccggtgggggcctccccccgccagagtcaggggtgtcgggcgattccggggtgggggcccgagtctggtccagcggggctctgggtggcagaggggggaaggttaagcggggctgctggctt

SEQ ID NO: 53238 - DNA, 2432 bp, Homo sapiens
cggatgcttcgctgatccaaggggcacccacagagtccatggaagattaggcagccccagtgacgaggttgttggatctgtgccactcagacctgagctcgggagaggtgcccgtgcagagggggtaggatggaggtgccccaggggcagcaacaacagaaggtcccagctccctccagccctgggctacttcctctccttccccaacggctgcagactctggttaaaatggcacctccgccatctgtcgtccctcccccaccccgtgggcacggctgtgacggggggctggctggcctcgtaaacaggcggctggcgggtccccagggccggcgggtgatagggcttgtgctggcaccgaggcccagccaagagctggagccggagaggccccagggcggccgagctggggggggtaggcaggataccaggtagcaggaaggtttccgcgcctgagggggcctgggtggtgccccagctacctggccgctccgggacctgtggggccccttctcctaagtatgcccaccccatccccagcatctccagtcccggccctctcacattcgcctcaccgcgcttctgctgcgcttagagaatcttaaatcaacactggggtgtgagaagctccatggagccccctaactcccccgccactgcagcgtacaccatgccgtggggatccttgctttacaaccagggaaactgaggccagagatcagggaggtgggaaggctgggcgtggaccagaactttcctccacctggttgccagctagtggcggttgtggggtgaggggctgtcccaggggccaagctcggggccctgacactgtaaacaagcctcccagcctcagtttttccatctggggaatggtggaatcaaggcggctgcggaggcgggagggctgtcctgtgagccagagagcactggggacctgccgttctctcacagtcccctcacctctccacgagggaggactcgggggagcatcccgggaggggctaggggtgggcgccaggggtgcctgggagggaatctgtccgggtcagttccctggctacccctccctccccctaccacggtgctgccggccgccccctcctctctcccgccttctgactgccagctcctccccgcaaagccctcagaccccagctgcagggatttacagctttgaccagcagctcagcctccccctgctcctcctccctcctcccccgcctgcatctcccccctccagcctccctccctcctcctctccatctttcccctccattctcctcctccctcctcctcccccctctctcctcccctcccttcctccctccgccctcccgctccctccctcccgctctccgggggaagaaaggtcaccgtgcagctgattactcagagctcagttgctgtagcaaccggcgggggaagtgggacaggctggctttgaggacgcgcgaggtcggccgcgggcggctggagccggcgcgggcctctgtgcgccgcgagagggaggccgcctgcagcccggctgctcggccgccgcgggcccggctccgggggttcagttttaatgaagaatccctgctcccttctcgcgcccctcccgctttctgcccacctccctggggtctggaaggagagggtcgcccctccccgctttggctgctaaactctctggctctccccccggccgctgcctgggttctggtggcttccttcctcctccttgtctgtcggagctcaagggacaagccctttccctggcgcgtgcctggtgaaaccctcgcacccttccccacccccacaagcctttggcatggcctgggagactccgggcatcttcaacccagccagggacaagggtccgcggagggtctggagcccctcgtgggcctggtgcccacggagtgcccacccctgccctccaggagcccctgggaaggcagcactctgttcaaggaggaagccagacccagctacaagggagggaccctcggctgatgcaaagaggccggagcccgcatcccagcaccgcccccgccggctgtctgctggttccttctccaaggccttcagagaggatccctgaagcttggcagggacagacacaggttctggagtgggctgggcctgagttcaaatcccacactccagtgggaccctcatccaccgctgataggaatgagaagtggttcgactacttttggaaaacatttggcacttttaaaaaagttgaacatactcttaccacggatctgaccatggcactccgaggcttttatctccaagaaatgaaatctccaccggcgcagtggctcatgcctgtaatcccagcactttgggaggctgaggcgggcggatctcttgaacccaggggtccaagaccagtctaggcaacatagtgagaccctgtctttacaaaatatttaaag

SEQ ID NO: 53239 - DNA, 1135 bp, Homo sapiens
ctgagtggaggattgcttgagcccaggatttgagcctgcagagagccatgattgcaccactgcactgcagcctgggtaacagagtgagaccctgctctcaaaaaataaaaattaaaaaattaaaaaataaataataaaaaccaaagatagccatggtgacaatgtcttgtggtttataaaatgctgattcatgtccactgtcacctttgatcttaacctcttcccatgagtcagcaggggaggccctgttctcatccccgttttataggagagaaaattgcgggtcacgttgcctggtgcacagtgaccgttccgcacacggtgggtcttcttgttcctttgaatagtgctttcttagtattatgctactactaacaatttttaaaaaaaaattggaggaatgagatgtgggaacgcagaagaagtccacgtggaggactcaggagagcagcagctgctggacttggcgttgaccttgaggtatctcttcccttctccgatgcctgttttcctggtatagaatgaggaagttgaacaagatggtcctctctccccatccccattctgggatcttctgctttgtgtccctggggttgggaggggccagggtccccggccatcggccagcgaggtcagaagcagctcctagctggtgggcagtgtgcctctcctgggccctctgccggcatctcccagctcccttcctgagcctgcctctgagatgagacctggcataaagatggggacagcatcaaggacccggacagcatcaaggaccctcagtctttgctgaggatgagctgcagagacaggtgataagcgacctcaggccctccacaggctgcggtttccagaggcactgggggatgtgaggtggaagcagaggcctgccttcctgtgccctggggcttggcatgtcagccctctgagcctcagtgtcctcatctctaaaacaagagtgatagcacaaataaacacccttctcataggactgccatgtcaattacacacatttatacacataagcacttagaatatagcctttctttcctttttcctctccctctcctttccttcctttctttgttgtttttgtttttgttgttgttgtttttgagacagcttctggctctgt

SEQ ID NO: 53240 - DNA, 3519 bp, Homo sapiens
ctccaatctccctagcccagactagaagcaggttggaaggagaacccaggtggggatgtgaagggcagagtcgggggaggcagcggaggtggggagtaaaaggactagattgagcccctctggctgccatatgcacgaccttctgcagggccaggctggtgagaagccagctaggggtgagcgtcctgagcagtggccttgggggtggtgtggttttaataacgaccttcaaatgtgtgggccccggggagaggcagattatatgagacccaaagtcggggcttcgagatggggaatactgggggactgggcatgttcccctctatgtaaagtttcccaaggacaggacctcccttcgaccgcgcccccacaaactctctgcccaagcgccccatctcccaagtcctgaagaccactggcagatgaggaagtggaggctccgagagggcaagccgttgcctaaggccacacagcaggggagtataggatacaaatccggatttggacccagctgtacctcgaaattccttcctgctcctaacccctccctaataccgccctctgctgtgggcgcagtggcacgtagtgggctcgcagtaaggatggggatgaaggaaggaaggaagggaagaaatgcctaggccaggctcttcccacgccccggtctccgcggcccgctctttccagctccgtcgcccgcccccctctcccctcccagtctaattgggaggtctccgagccgtctctcccgcttcctcaggttcccccgcgctcctcccggaccccaccccgaggcagctttctcacaacgggatcctccccgggcggcgtggggacgcctcccgaccccgaggcccggcaggagagccgccaccgcggccgggtggtctccgcgtcgcatggcccctgccggcccccccgcccatggcagctacataattaattcgcccataaataactgattggggtcgcgcacgcgcccggtgtccctaggactgggatccccgttagggttaggggcgtggggggtcgggggccgcggggctgtgcgtgccggggcgcacggttttgctccgcgggcctctctcgctccctcgcgccggctttttccctttttctctttcctttttttctttcctggagcggagcccggcgccaggagtctggaaccagcttgacaggcttttgagttatggaggggggagggggagaggcgggcggcggggagggggaagggagggcgccgccgcggcgtgggggcggggccggctccccggtttggagactcgccccgactttggggtccgccagcggcggccgggcggagggcgggggaccgcaatcgtggggggagtcaccccgcggggcccggcgggcgaaacgggccgggcttcagagccgcagtaaatgaggcccggggcgggcgggggtggacacggcctcggggccacggcctcccccgccgagcaaggcattcctttccgctgaactgggcgcccgggcccgcgccgcgccctgcacgcctcgcgcccggcgatcgggcccagggcgggggagcagggaggcggccccagccggtcgccggcgcccccaggcgctgcttcccaggagctcggctccccgggatggaagggactgatacccagttaatgggcgtggagcctgagcccctgagggtcgtcgctaacgggggtcgctcagcagggccggcctccgctgcctgcccggggtgtctaatcacctctccgatcctttgcccggatctgagcttcgtcattcacgcccctcctccctggcgactttgggcctggtgacagtcccccgaccctcgcagagccaggggcacagtaggcgccttagccactggcagaatttcaccggcgctctgcccgacgcccccagccccagggccgggcgtgggtggaagtgtctggaagggtgggttcaccagggctgggcacgtcagcggccccgtacagagaatccggtgcctggggtctctggagggggtactcagagtatccgaggaggagactcctggatgctaacagagcccccagttaggagcagtccgcgagacagttggtaacagtgctggccttgcccgggcgccggaaggttccgtgaggcccagcaagtcctgacttggcacagggcccagcacacggtaagcgctcggtacttggtcactgttgcttgattttaccatttcggaggggctcatctacgcctagcaaagcccccctcccggtgacccaaggggagctccagaatgttgagcggctgagcggcctggctcctcctctcgaccccatcgagccaagtgtcgaaatcatcccagacgaagctgctgagcagaaatttccagtctccctggcaaagctgggaagattttgggtgcggctcagagacgcagctgggtcggctctgtggggccagggctggggagggaccccaagatgttctatgagacccaagcagcacccccaacttgggttgggggcgttggggggtggagcctggcctcctgctgagccccagagctgatacagcacaggtaaaagcccattgttctcagtggtccacagaggctcagggcaggagcaagatcagggttcgggtgctggcgccacccctcgtttagcccctacctgggatctgagggagcacccatccttggaatgcaggataatagggttgctgtgaggatggaaggagactgtgcccatgaacacttgacacagctccctgccctggggaaagcacccaggaaatgcgggctgtttgtcttagtgatgttccacttaatagcacttgcggtggctccctggcccccgaggagcccaccttgccagttcttggccacaagagtacgagcccctctgtcaggacggtgggtctcattgaggccatccttatcctgagcaacctaaagaactcacatggaacttagcaaacaggcagacccttgccttgttctcagggctgtgtgatcccgggtgagcaactcggcctctctgaacctggttctcctctgcaaaacagagatgatggcctgggaccctctcccactacagggaagtagcattggagggggaagagacagggggagcgtcccagcactgcccaaaattggacaggtgactttggacaagtctgaatgagactgaataagacaaaacggagtaacattagagcttgctggctactctctgccctgggccggtgctagatgttttacatgcactgttaatcactgttactcgtggagggagattttattattaactttcttttccagatgaggtaactgaggctcagagaggttgattcactttctcaaggacacacagctaggaaatgatagagtcacgattcaaaccatcatttgttggcttagagcctgaatccctaaagaaaaagcaggcagggtgtagtggctcacgcctgtaatcccagcagtttggtaggctgaggctggaggctcacttgagcccaggagtttgagaccagcctgga

SEQ ID NO: 53241 - DNA, 6495 bp, Homo sapiens
gggacacaagacttggaggaggcgctcctgagagttagatgtgaaaagcagcaccctagaggcgtccaccagagctgagggcaccgggagagagagaggtgggttttggtgtaggggatggggagggaggagagctggtgggggaggcacagaggccaggggacagcaaaggctgctcttgagaaatctcagtggagggcactgggccattcccagaggttggcacagcaaagccaaaggcatggtggcaggagaggaggccatgctctgaggaagggcccgcagcccagcgtcagggagggtaatggggaggggaaggagaatggtgttgccgagcctgggccagcctgcaaaggctggaggaagctaccttgctttataaaaatggggagccatcgaaggcctttgagcagaggtggatgtcatcctatggaagttttacaaagacagctccataagcagagaaatgtcccagaaatgtacacgaaacctagaatgacagcgtcaggatgtactgcatgaacttttacaatgcttcctttaaaaaaaatggttttgtgtttttttgtctgtgtgtgtgtgtgtgtgtgtgtgtgtgtgtgtgtgtgtgtttgccctgtataggtatgactattctaacaaaagaagggaggacattttcaaaagacagaggggagccaggaggcaaagagacacaggcagcaggagggagcccagagctggcgggccaggctgcccctctcactgcaggtctggctgtttgggtgatgggccatctggcaggtctacaaggagcccagcaggcagggcggtgcggcctctgagatccctctcttacctagagcctgagccttgcctgacccatgacagtttcaggctgttccccctcctcccagcagtctgtccctaccaaactccactccatgggttagactgtgggacacagactgatccttaaatcccattctgggccaaatggggacagtgattccagaggcctccctacgtccgtgaggacacatcaccctatgacagagccccagccaccgtgctaggtgctgtacaggcagtgtctcttgatctgaatataaacctgaaaaaaaaatgttattttcccagttttgcagatcaggaaatagaggccctcacagtgaggagggagggggaattctcacccaggatggacccacccaagagtgcggatggaccactaggctgtactgcctggggccctttaggagaaaatccgtcctcccagtctccccaggtctcttgcctttggcctgctctggttcctgttatagaatgggggctgcaggtaggcacccctctgagctagtcccctgtccttgggccgcctctcctaggcaaactcctatttagcccgtgaagcccaattaaattatcgcttcctctcccgagtcctctggctgcacccctgtcctcttctctgtgttcctgcggagctcccaaagggaggggagaaaaggctcaggggacatggctgggacacaacttccagcccagccctgcgtgggcagagaggagggaacagtccatctattctaggctggacgtgagagggaggacggccttggctcaacccggggtaaggcaggctgaccagcccctggggttatttggcttggcagtcagaggaggacaagttgcaggagagagaatcaaagattcaggctgcctagtgtggccaccgccccatcagccctaagatgatcgcagcccctttctggccactgaatatgtgggcaccccagacctctgtggcaaggctgggtgagagctgtcttttgtgcacaggtgcccctagtcccccaccactagtgagcattcacacacagaggtgaacagcccccttgtgggcctggaggctcctaggccaggtagagatgaccagagtagggagcagagaatccccagtgcctagcacagtgactggcactgaagcatttgttggatgaatgaatgagtgattgcctgacctcaggcccagggaggaaggcctggtgtgcagggcagctcctgggaggcttcagggatggggagaggacagagagggactgggagagccacaggaaggcagcctcatctgatgactgacttgggagggaaacagaatgtgggctgtgtttctggggaaacacccccctgatgcccgggcacccaggaacttccaggtacccccggatcaccccagtgaggacactccacaattccccaggaggcatcacagtggggccgttaaacccagggacttgggattcagacacttctgggctccagtccacccctcactggctggaccagttgcctcagtttccctatgtgcacgggggacggataggaccacgtgctgcacaggtttgctgggaaggccatatgagaggtgccggctcagcacatcctgtctgccattgttacaaacaacagcacgggagagtcggggagcagagtcggccaaacgcaagaccctgggctctggcttccctgtgctactgacctatggggtggctttggacaaggcccagcctttctccaggccttagtttccccatttgtacagtcaggccctgctaacttggacagactttggcccttctccaagccccacagagacatcagagacatgtgcacacacggccctgggattgccgacagacacacaggcacacataggcacgtacacacaggcatacagacacaggcacagactcacactcggcccctccccactcacactcgctcacactcatgctcacactcacaccaacccccctcccccaaatctgctgcgcaccaacggttggtgcgagcggggttgagaacgggaggaaaaaagcccacgactcagcccgggaagaggggtgcggtgggggaagggcgggcgagggaaatgacagcccgcggtccccctcgagtcccggctcatgaatattaatacggcggtaattaaaatgcagggacgcagcaggatggatgcggctgcctccggagcgcgggggagcgcggagtctttgcaggcgggtgaagcccgctcctcgccggcgaaaagcggggccgggctccggggcctgggtccggggcgggcgggagtggggacatttttcgtggtcccgagcgtcccgtcccggcgtccccgcccccgccccgcggccgcctctccacgccctgccccgggccgcccgccaggccgccgtttcccggagccggccccctcccgccctcgcggccggctgatgtcatctgcacacaactttccgcttcccggcccgtctcggggccctgagtcatcgccgcccccggccccgacgctggcctgcggcgtctgtttgtgcagagcgaggccccgccggccgggcttgacgtcaggctggcagggcctggaacggccccgcatcgcggccccctgggggcaggacgacaccgctgggggccgagggcagggcacgccttcggaatccggcttcgaagccggccgcctgacctggggcaagtgctttcaactctctgaacttcggttcctcatctgccagttggcagacgctcagcaaatcttcctagactcacggggcgaattgtacagttgggtaaatcgaggcccagagatggcaaaaggaccgtccaaggtcgtacagccacccggaattacaattcttttctgccgggtcacacgctgtcatccacgtgttacctaagagagctttccagcctgtgctaagaaaactgccccacatcatctgcagtaggacgggggagttggagccctggtcaggccactctgctactgaccacagttttctcatctctaaaaaggcgcagtaacaatataattaccgtatgcagtcccccaggatacagggtcaaaggagagcacaaccatcgcagttggaagcccatggggcaggtgagtcactgttgtcactactggggtcaatttttttttttttctttttgagacggagtctcgctctttccccaggctggagtgcagtggcgcgatctcggctcactgcaagctccgcctaccgggttcacgccattctcctgcctcagcctcccgagtagctgggactacaggcacccgcagccacacccggctaattatttgtatttttagtagggacggggtttcaccgtgttagccagaatggtctcatctcctgacctcatgatccacccgtctcggcctcccaaagtgctgggattacaggcgtgagccaccgcgcctggggtcactattgaagttggctaatgtcactattgaagtcaagtgagagagagggccctcttggagtcagaccacctaggttcaaattctggatcctgcttccggctcctttcctctgtcccccttctcccctcggtgccctccaaccagtgggcctgggaaagcgtgttcatgctggaaatgcctgcccagcccttgcccagtcacacagagcaagtgccccagaaatgtcctgaacctcagtttactgaggggaaactaagaaccttctggctacagctcttgggctgagcagggattaggctcgggtctgcgatcccaggccctgcggcctcccagaggcttggttgagagctctggctctcactcccccacctccacccagcacctgccccggtccaggctcaccccctacccctccacctggtcagtggtggctcggcctcctctcagcccctccacccctcctggctgtacacaccctcaagctaacggaattcaaactggtggaggaaggcctgccctgtccctcccagcccctgcctctccctccctactcccagcctcactggaccactttcaagtcctccagtgctccaggctccatcttcatgcctccaggcctttgcacgtgctggtccctctcccattctcctggttaactcctccacctccatccgagctaggatcttcccctggagagtgtcccggttagcactaccccacaacacacacacacaccgacatacacgccccacatcacagggaccacatcccacacaggcacagacacactgcatgacgcagatcacaggcacaaaggtgcatgcgtgcacacatacacactcccactccatatgccaatacacttatccccctactcccacatcacacagacggttccacacactcctcacacgctctggccacacagtaaacacacacagaccacagagctcatgtctgggctgccctggtgccctcctctgggctcgtgcccccagcctcagcatttaccccccattgagggcagggacccacccagctccgttttcctccatttcagctcagggccctgcaccaagtctctcccagttgttgcttggacccggactcctcccacagtcaccactgtcacagtcccacctccttcaaggtctcaaacacccctcccctgtttctggcaggagccgtcctcactccctctattgcctctccagacccagacttcaccctcaggtcaccctcacctggactttggggtgccccacaccccgccccaggccctggcctctggaatatttggaaacttgaactgggccagaggcttaagctcacatctgtctggagcctcaactttctcctctgtaaaatgggctaacactgaaagaaccttgcagaatctcagcaacgtcacagaggacattgttagcacagccagcgggctcctgctgggctgagtttgtgggtaatccaagcctcggcaggtacagttcctccctcaggtgagtgttccacccccaagtgagcatcctgctgcccttcctgcaaatcaggcccctgggacacttagtgctgagccttgggggtggggtatttgatcggggttcctgacaagtggctgggttgtctgttccctctcttcagagggagcctccatgggtggcctgggctcacatcggctcctccagtccagcagagcacccccccctggctgcccagcttgttgagagaacttgctgagcaggacagtgagcccttcctggtggggaaccggaatcaggagaagacagaggggaggtggcaggccccaggatggagggagggcagctgagctgcctgccctcatcctccctgcccttcaggtattagggcccttcccatggcccagtaggaacccagcggctcacctgagcccggactaaggatggggcattttaccccatatgcagagatgagaaacagaggcccaaggagggaagggactgaacacagggtggaacagccctgggctgcgcctgtgtttccatccgccttcctcctgcctgtgctcgagtcacgtgctggtgtgcagggaacaggaagacagccgctgccctcacaggctcagggtctagcagagtccacagtgaccacaggcgaataaacaaaggcagtgagacagaggtgggcaaggagaggtgctgggatggggagcaagggggtacccatgctcatgggtatgaacacatggacccatatacccatat

SEQ ID NO: 53242 - DNA, 1135 bp, Homo sapiens
actgtggccaaccctccactgcacacacagaaaagctgcagctcagagctgggcgtggtggctcacacctgtaatcccagcactttgggaggccaaggcaggcagatcacctgaggttgggagttcgagaccagcctggccaacatggagaaaccttgtctctgctaaaaaatacaaaattagccaggcgtgttggtgcatgcctgtaatcccagctactcaggaggctgaggcaggagaatcgcttgaacccgggaggcagaggttgcggtgagccgagatcacactattgcactccagccttggcaaaaagagcgaaactccatcccaaaaaaaaaaaaaaaacaaagctgcagctcagagaagtggagacactggcccagggacccacagcaaggccttggcccagctggggctagatggcaagaggtggttcagcattggagctccattgcctgggttcaaatcggggtctgtcactggccagctgtgagcctaagtctctgaacttctctgtgccttagtgtcctcattctgtagagtggagatagtaatcattcctatttcaaagattgttgtgagaaataagtgaactaatacatgtcatatgcttaaaagcagggcccaggacacagtgagcatacaatagacattagctgctgtggtgtcttgatttcaagcccagtgcagatgcatctgacttacgaaacttcagtgacacctgctctgtgccagacactgaagatggagcagtgaacagcactgacccagcctgtcctcctgttgcctgcaggccaggtaggaaacacactggaaactgataactccatgtgctcatcgccatgtggtttctgctggtctggggagccggggacaaagagcagaaaacatggttccaggtagaggggggtagcacgcatgaagaccgtgaggcagaaagcacacaaaactgaattggagagaaggcccaaatggctagagctcagaacccgaggagaggagaggggaggaaaggagagacctccagagcctggggatgatatgtagagagcccgggaaccagcgctggttagagagggaaggaagcctgcagccttgcattttagaaagatctggctggctgagctgaggaggg

SEQ ID NO: 53243 - DNA, 4496 bp, Homo sapiens
ttggggggcaggcagagagtaggggctaggagcccagggagcaggcgggagatggagcagccggataagggggataagggtggggggcagtggggacagggtaaagggagctgactcattgaggtgggaagctccccagggtcggcatttggttggggcatggggaatctggctggggcgggggtacatggctggaggtgatggttaggagcaagctcaaggatggagggagaccccgtgtccagctctggccaccccagctgccgcagcaccctggggccatcagcccacagacttgagccctgtgctttagagggcagcgctcctggaccagggagacatttccagctggagccatgggccccttgaccatgatctggcacctggggccctggagttccctgttcaatggccccagcctgcgtcctgtgtgcatcctcctgagggttgtctgagccacctgtttgggcacccctaaaccccaggagtgaccaggaggtggctgttggcagggggtgtggacagaacatgtgcttacagcctggagtgcctacacctgagcatgcacagcccctcagggaaaaggacagaacctggggcaaaaagaaaagaagaggcgagtgtgaagccggaggccagaggctgagaggcgggctccccaacccgctacagctcctcctgtggtctccaaggagcctgagaattctaaacacaaacccagccttccaggtgtgtttgtccttatgaaggtgtatttgtcaaggaaggaggacagaactttttttttttttttgagacggagtttcgcttttgttgcccaggctggagtgcagtggtgtgatctcggctcactgcaacctccacctccctggttcaagcaattctcctgcctcagcctcccgagtagctgggattacaggcatgcgccaccatgcctggctaattttatatttttagtagagacgtggtttctccatgttggtcaggttagtctccaactcccgacctcaggtgatctgcccgcctcagcctcccaaagtgctgggattacaggcgtgagccaccgcacccggcaacagaacatattttatttagcagtttgttagcttgatttataacttgtaaatacctagacatgaggtatgtgggcctcggcttgcactcctgccccaggctgacccctggtgctgcccagagagaagccgcctccctgggctgacccctaaccagcaggctgacccccaggggatcctgcaggcttcttcagagcttcctactccatgcaccctcgctgggctcagtccagccccctgcctttgtctgagggtcctcctgcctccctgtttgaggattcaactccagcccctccctgccctcacccttcttcctgtcccttgtccatggagatcctgggctctggttttatttggccacagtggcatctgtcacgagctgaccagctgggtatgagtcctgtccctccttccggagagacggagagctcctagaagcagcgcctcccagcagaagcagaatcttgccctggggaggagtacagctcagaacccgcagactcggggtcaaatcccagctctgtgactttcttgatgcgtgaccttgggaggcagctttgctgccctgagccctgtttcctccccggaaaacccataataataactgtacctcttccagtgaggagacaaggtggaatagaacgcagagcccacgtgtgcctggcacttggcaagtacaccgggaagaaggaattgggaagggcaggagttacatcattcacctgtttacagctgagcaaactagcggaggctcggcgaggtgaagccagtcccccaaggtcacacagccggccggccggccgcaggacaggggccgaagacgtagttgtctgacctgtgctctaaccactgtgctctctggcctcaagccggctcccacactacccttccctgttctccgtggccctccagcgcctgaaagccgcttgggggccgcggaggcaggtggcatggccagggcagagtccgcggggcggaaagggttaacgggctccgccgcattgggctgtccttcaaggggggagccagccaatgagcgcgcgccgcgatgaggtaatgccgggaccacgcggagtgggcggggctgacggggaccccgcagagctcagcgcttcttctctccccacctacccctcacctttgaccttgatgtacaccctcccctcccccaaccttacccctgcagaggcgcccgaactgaaagtcggctgcagggccgcgggcctcccttagtctgggacaggaactgagagacgtcccggcctcagtcacaccctctgggcctcagtttccctttctgcaagaagcagagtgggtgatcgctaaagaccctaccagctgtggacgtccttggatcccaggacagttttcagcccttccctgcccttggcccgaactttaacggtcccagccccggcttcccctcaggcggtgcccagtgccaggacctaggagtccctcgggccacggggagagagcctcaccggcccagccacgccctccatgtgaccccgacccatcccttgggtgtcgcacctggcgcgcccaccgaggccactaagctctgctagctgcaccagcagcaggacctgccggcgtggcggtcagaagtcaacattcatcccaccgccagtaaaaatcgagggcctaccgcctgccgctcagggcctcgtcctgagccgtgtcccggggccgcccgcgcccgccacccctccccccgggcctgcagggagccggtccgcccctttcgcgcagtccgggcacgaagtggttaacgcctttccagccgagctggcaccgcgcggccgggcttattagtcagctcgcggggaggcggcgaggggaggggaggggctctagtggagaaccgcagaaagctattctcaggggctcccgagtgtggggagggcggctcagcaggagctgctgcttcccagaaagttgattatttttaacccaggaagaagaaaggaaggaggcgagggagaaggactcagagaaaagaggagaggaaaagagaggagaggagaggaaagaagtgagggcgggggaggtccgggaaggggaatggggagaggggagggaacgggaaagagagcaggagaggaggggagaaggaggggaggcagcagggtgatggagggagagggaaaggcagagcccagttggagctggagaagccagctggcagggcctggggaggaggaatggatgcggagcgggcactgccacctctcccgtacccctggggctctgtggagctccatcctggcctcctggtgccccagctgagagcagccccccagcatcatcaacctaggcccgggcgggggcggggaggggggcggtggggcggggcgctgggcttggaggagtggaaggcacaaggcagccgcagccctgttctgggggctctccagccaatatgtccttgccctttggtggccactgggacacagggcttgggagccctaggggaggggcaaggaggcctcccctgatactccagggtctctccagggagggcttcctggaggagagggtgggagggactggggctccctttttcctgcctcttggtggagccaggctgaaaaccaaacccagagagggccccaggagggtgctggggacacagtgacaaacaagacagccacagccaggcccacacagggcagtcctacagcagagacggtagctgcacaaatcatgatgaataaggcattaaagaatgacaagggggtagcgggcagggagcactggtcccctgggcctggcctccgcagaggtcgcagaagacctccctgaagagggtgcctgaggaccagggtggctgacgaggggaggagagactggtggaggcaagagggacaggggtggtctggatggggacccccagccacagacctaagagcttgagaggggatcactatggccagtggcagggagggggtcatttggcctgagaccagcccttgtcttgtggtggctggaagcttaggaaaggttttatagagaaaagagactagattgccaaagcttactcagaatggtagggacaagagtggacacagaagccggttgggagtgtggcactgagatccaggggagatggtggcagctggctgagacagtgtgggaggtacaggggacagggcatggtgtgagggtgaaggaggcgaaggaggggctggggaggctccttgggccctggcatgtgcagtgggtggacactggtgctgtccccgaggcagaggacagcatgggggagcaggttcatgggaggccaggcatttgttttgagacatggtgggggcagccaggaacggtgtgccagggggaggaacagcttgagcaaaggtgcagagaggagacaggcaaagagaaccacatgtgacatggtgggacatgccggaatcttcc

SEQ ID NO: 53244 - DNA, 588 bp, Homo sapiens
ttataactgtacaggaatctacaatgattgtaacaaaaatttcaattaaggccactctaggcacatggcctgtggggtagccctgctcaacaagaagccgtcaaaaaaatgttttttaattaaaaaatttcttcaattaaaaagcgttatcttcctctgcccggaaagggttaagtgagtcactgcagttagctccccttcccccacaaccacctagaccaggccagggaccagcgggcaattgcctggcagctggagttttcctccactgtggactgtacttcttgcgtcactctgaatgtctccagtctttattccagaatgttctggtcctctcccacttttccaaggacaggaattccctagtggggctccagaagaggctctggaggagaacaagaaaggcccttgtcatccattggcctcaggctgggaaatctcggttccactcccagcccagcctcaatattaggttgtcagtctggagtctgagagccatgcccccacccccttagtccttcacctccaggagagttggggatactggaaagaatgttgagtgtcagagcccctctcagtggctcacgc

SEQ ID NO: 53245 - DNA, 888 bp, Homo sapiens
accctgacggcaccaaaccagtgggatatgggccagttgcacggaccctgcggggctcctcgggacgtctcccctccaccagctgtgctgatttcacccacactgcccgggggtctcccctgggctccctagcactcctgtgccatccctgccatgcacagaccactttgagctgtccttgtctccattgccccgcccccctcccctgcccatctggactccagggccctgctaatcgccaggcacagggtgagggaaggaaggaagggagggagggagggagggagggagggacagagggaggaatgctccaccaactactcaggtgcaggctgccccgaccttgcaggtcacgcccaccctccggggaggaactggccccagcctggtgctggtcattaactcaatgcctggactcgcctggttaatgaataattaagctggacagagtctgacctcgggatgaccttgagctgcccgctgcaatgtcctcccccagttggatatgtgacccattcagagcgaccctgctcttcttcctccctattggtaggttctgaatcctggggaaggaccagacaggagaagtcctgaccccaactcccgagggccccggccagcccaggaggccaccactccagcacacagggcatgagggactcctttctctccacactccttgcacgtgggcttccagcgctgagcgacgctaggtccagctcttcccctacccacagccaccccacccctgagtttcagtttctccatcagtcacccaaggaggatgggctcagcatgactgtgattccctccatgtggctgtggaaatgggtgagcatgtggcagttggagccagatgccttggagaccactttgtcatgcataaaa

SEQ ID NO: 53246 - DNA, 1532 bp, Homo sapiens
ggcatgcgccaccacacccagctgattttgtatttctagtagagtcggggtttctccatgttggtcagcctggtctcaaactccctgagagggaagcatgaaggagaagcaggtggggaagactggggtggagggaacctgggtggcccacagggacacctaggggaggtgttcaagggcagcagacgtgatggttctggcgttcggaaggtgattagaccggagatggaagtctaggaagccatgagtgtgatggacactgcccgggagagctgagggccagaacataccgtcagttactcgagaggtgaagcaacaagcgccacgtgggcggcctcatgagtgacctgcagagagccagcagggaaaccgaaggatacgtgtcagagattgggttagagtgacaaggccattgcttaaaggtcaagtctggtgaggctggtctgggttcccccagctggggctggcaccagggcggaactgtcacaggatattgtatggaaagtggtaggcatgaggagttctgggaggggtgggatctgtggggacagagggttctggaagaggggggtgagcttaaagtgcttctgaggacagtgagggctaggtggccaggggcagtgtggagctagggatatctgaccttcagacctcagaatggggccgaggaggcagtgatcaggtcagggtgtctgtggtacagggggcacagtggaggtccctgaggatgatggggtgcaggaagggagaggccagcgtgtcggccagggtgtctttctgggtacccagaagggacactctgagtggggagagaggactctgggtgaccccaggtctttagaggatgaggggtcacaccagaaggtgagtagctgatccccggtgcaggggtgacaggaacacagagagagggtgttcggggttggggtaaagtgttctgaattactgagatatcgcccgcaagctgattttctgcaccgggggctacatcgctgtcagccaggatgcagcccaaggacggacatgcttgtgtgtctggcttgcctgggcagctccagttgcggaagaggagagccctggcccacccccggcctgcactttgaagccagggctgtgagatggagaaaaactcgagagaagccaggatccacagccggccactggagcacggcacctttagaaaagaggcccaggcgcagctgcgacgagcgcacgcagtggacacaggagcgcagcacggctcagtaacctcagaggcgcttgagaggctcccttggcaagggccccaggagatctcagcctgctcgaggctgcggcaggctcccgcccctaccagccctgcaggcctgcgggaagcaggaggaagccattttcctgaaccccagctgggcagtgggaaggcaggggtgaggggcagctgggtggcgctggatggcttctgcctccctcagcatcccccatcaggcaaccagcagccgagctccaccccattctctctgtcctccagcaaacccggaaaagcacgctcctcc

SEQ ID NO: 53247 - DNA, 1359 bp, Homo sapiens
tcctgttcctctccttccgcaggcacccctcgccccccaccgccacctccagccgggttctggggtcctcctgggccacctgcttactgtgtgtccctggacacggcgtctcccctcgctgagttagtttcctcatttgtaaaacggggatatggcccgtctcctagagtgaccgggaagatcggtggtatcaacgcaaactacagcccggcagcttccaggcgaactcacttctcaggacgcctctcctgctgtcctctcaaagcgggggacgaagccaccaccacccagtttacagatggggaaactgaggctcagggagatctggaaaccttcccgggcagctgggctccgaacccagggctgcgagcacaagggctggctcccgcccccggccctggtccctccttccccggggcatggcccggccgtgccaggcgctcggtgacagcccccgcgggggaggccgggctgggaaaggagagggcagcgggcgggggcgcctggccgcgcggggtcggccgcgggtcgatacggcggcaggatgaatgggagaggggagcgcgggcgggaggaggagggaggaggagggggaggagggagaggccggagcagggggagggcccgcccccgccgccccccaggcccccgccccgcccagcgggcttggccgggtctgcagccctcagcgccaagcgcggccccgcggccccaccgagggatcgataactaatttcaccgcggcagccgccccagttttttcccgataattgcgcgccggcagctgcgagcaaggcccccagcccggcgcgcagccccgcccgcgcgcgatcaattgacaccgccaccgggcggcaggaaaactcatttttctctccctccccggctccgggtgggcgcgggctgagctctgccaagggccgggggctacgcggggccggggccggggccggggccggggccaggccagggagggagggcagggcccgaggagggggcgggggcgcgggcgcgggtgtgggaaggaggcttgcaaggaatccgaggaggcggggtgcctcagtttcttcactctaccacaggggcgtggccgaaggcgtcagggacgtggggtgcgggcggggctgtcccagcccctctcagctgttggcggactggctggctggtgggaggaagggctaagtcaagcgccacggcctgaatgcgtgggttcgactctggactcccaccagggaccactgtgtgaggttgcatccgttcctctggactcccaccagggaccactgtgtgaggttgcatccgttccttcccttcgtctcttcctctctgagcctcagtttccccatcttctgaaagggg

SEQ ID NO: 53248 - DNA, 1141 bp, Homo sapiens
tccagactgggggatgcgaggatgccctccaggtgtccacagctggggttctgggccagggattaccagagtctgagcagccttgggggacgctgaggcagggggccggggaggagggcacccgggaagagggtagggcaggaggtttatgggaggccccacaggaagagaggacgcccttccctcccatcccccgcagggaggagctgaggctggagcctgggaggggaagatgggaaaggcgctcctggcagaaggaacagcgtgtgctaaggccggagtgaggcagtagctgagaagcagttctgtctggccaaggggccaggagggaggaagaaacgggtggcgcgcagggcacccacggcagggccttgaatgccgggataactcattcctcgctcctagcgcggggctgggccgcccttgggccctggggagggcgtcaggcgggaccctttgtccctccctccgccccctccccttcactctcccctttctccccctcccgcccctcccctcctcctccccgctctccccggccctgtcccgggaaggctggaccggcccgcggcttgccctttcaagtcggcctcccggagtctccggagccgtccgagcgctggggccgctggcgcggacttcaaagcccgccgcccccagccagatccggttgcgggtggggcgggcgagctgggagggaggcgggtttcggtggattcccctttcatcccgcggctgcagccgggcgcagacctcggggaggcccggcgcgtccccgctgggcaagtccctgcagggcagcgaccgggaacggagggctggggacgccacgaggccgcgccgcagggcgggggaggcctgaacccagactgggggcttcggacccgcctgcgctgtgggacctcaggccagcgcctacctgtcgctgggcctcagctttcctgaatgccctactccctgcccaggactcctctggggaggggcattcgggaacattcagtggcccttggacagctgagataggaacaggaagctaagctgggagcccgggctctccttggggtacctgcccgaccccacccatcccaccggagaggaaccgcttcctgcatcagccaagccctgcccgcagtgtaacccg

SEQ ID NO: 53249 - DNA, 2295 bp, Homo sapiens
ctccccccaactagaccgggctgccactctcccctgccctggctgggcacaggactgtccatgaccaatggcaggcgtggggttggagggtgcgcctgccttgatcccagctgctcagatgggtctgagttggggggagcagagctttcctggcctccctgacatgctgcttcctgaagcccaggaggggcagcccccccaccccaaaccccaccccacccccgccagccctgagtggaaatgccccacggaaaagggccctgttggggcccctggggaggcccccaatctggggtctctgccaaagagggtgagagataggcccccggagggcccccggggaagagctggggttgggtccatcccctgaatgcctcgctccctcttcctcatcccctgttcatggtgggggacatgctggtggacagacaagtggctacagagggccagggggaggcgtctgggcctccagggcagcagatgaccccgaatgtgggggctgcggccctgggagaccccgtgagaggccgtgtatgtgtgaggtcggcctgtgttcaccggctgtttgtagggcaggagtccgggtatgtgtgtggtgtgtgtgtctgaagggggtgtctgtggggcgttgttttgtctgtgtaccgtgtgggtgtggccctgtggtgtgcctgtgtgtgtctcggggtgcgtatctcggtggtgggtgtgagtgccgaaagcggcgggactgaggcttccgtcctccatctgtggtctgcggggagggagtggacagcgcagggagcggacaggagcgctgcgggatcccggggccttgcgggccgagccacaggggaggggggaggagggggggaggagggagggggaggggaaagggggagggagaggggaaaggggggaaggggaggggtaagcggtaggcgggggccaggtctccctgcaggccccgccccccccccaccggcgtggtgcccccggcgcgagcaagggcgtggagtccggggtcgcgggggcgccgagacccgccccgggggctccacgcggactccggcttcagtgctcggcgctgccgcacggctgcaagcctagcaattttgggctgaacaacaaaagcgagagagagggaagttggggggcgggggcggcgcgtttccccccacccgccagggccggtcgtgggctcggagcaggtgccaggaggtcgcgcggccggagcggggctgtgcggagccagcagcgcggaggcggaggcgggcgggcgcgagcgccgcgcgaggggaaaagtttccgaccctggagcgagaggctgagaagtttcggccgcgccaggcggcgccaaagccaggccaacactgcccccgcgtgggcgcgccgcggtgctgcagccggcgcaggggccggggcccgccgcgacccttggggtaaactgaggctcagagagggcgacgtgggctgcgcaaggccacctggaggaggggccgtagaatcaggcctgctgagacgggggacggggcgtgaatgtccagaaagggagacagaagggaggggacgtcccagggactgaatcccactcctcgtcctagatgtgtctccacccccttccttccagttacctccagagtccagcaatcaggtacccggtggaggggcggtggcagtgctgtcttcttcccatccctgcagagtttgtctaaactaaccctagctctattgcccttcttctggagttagggcgcctctcccaaaaggcgtcccccatccacaacccatcccggccctaaggacccccaccagccaccgcccaggccagtcccaccgtttgcagcccattcctttgccattaaacaaggcgccagggtgtggattccctgctgtttcctcagcggccaggaggtggcgagaaagacccggatcctgggcaatggcgcgggtctgggggccactgacagcttcagggaaagaggcggcggctcaaactttctccagggggctggaacgcaggtgtggcaggggcaaacctggtgggcagggtctgccaccttgtctttcgccacctcctgatgcagatttgaacatccaccccctcatccccagactaggagagaaaccgtgggccccagcccgtcccacacaggtgctttgccttctgggaccagagggtgccaacccttccggggaaacgcatgagaccaacacagggctctcttccctcggctggagtctggacgccctcactccattgtggatgtcagatggaggcttggtgggggaggacagaggcttggggtgggg

SEQ ID NO: 53250 - DNA, 2200 bp, Homo sapiens
cccgtctctactaaaaatacaaaaattagctgggtgtggtagctcacgcctgtagtcccaggtactctggaggctgacgcaggagaatcgctggaacctgggaggcagaggttgcggtgagccgagatcgcgccactgcactccagcctgcttgacagagcaagattctatctcaaaaaaaaaaaaaaaaaaatttaaattatttttcaaaagaagttaagttaaatccggagcccgcgcgggggaggggcgagctgagcgagggggtggagccagccatgggcccgcccctaaacgcccggaagtgacgttggcggacaaaggcagcgcgcgccgcgagctgtcgcgtctggtcgtggtctggcggagctgcggttggcttgtggcgtctccgccgccgccgccctcccttcctcttccccatcttcttctctcggtcccgggagcccccgcccggagtgagtagcgcgaggcggtgcgaagggtaggcagccgctgggagaggggaggctgcgacccctaactgtttcggcgccctgaggtcccgggtccccggctcgtcacgtgacccggcgcgtgcgcgcgggccggcacaggcctcacgtgcgcgtccccaagaggtctacgggccggacctgggcagggactacggagcagtccatgggtcggggtacaggaggaaagtcaaggcactcaaagcccaggcagggcactcccccaccccggtccccagaccgcagcaaatccctttctctgagcctgtttcccttccgagaaacagggatatggagagcgcccacttggaggatggatgggaggaatcggtaaaatcggtaaaatgcccagttcagagcctggcacagttaagtgcccgctgcacagaagttgctgtcgtatttaaccttgggtgccacccgagcgccagcccgacacaggtgcagctcaaaaaagacagcccgagagcccttgcggccaaggtcagcctgtctgcagggaggctgccatatcgaaaagcccagactttgctgcgcaccaactgtgtgatctctccctctggactttggtttctcctctgtactataagtgattgccacaactggtgtcagaggccctgacagcggggagggacagtgtaaccggtggttgtggtgtgtagaatgattgcccagtgagatgggatgagcctctgggaggaaccagggctggtataaggagcctggattccctccttaattctgttctcggcttcctgtttgtatgtttaaagacacgtcacttcctttagtgtgctggtttttctctatgtaaactgaggactgtgcgggggttggaaggatgcatggagcgttttggtggaggccggaagccctaggatcacaaggatggcatctaaaaaatctcggtgggggttctgtgcttataggcagaggaagctcactccccactctggctgatttgcagagctgtttgagtctgctggcttggccgcccagcataccagtaacagtcccctaggtgtgtccaatacagcttctgtggcattctaaggcagttttcccatttgatcctcatagtgggcagagttgacaagaatctcatttgacagagatttctaagctcaagagagaatatgtgcccggcactgtgcaaagcactttaagcttttcatatgcacttttaatcacagcctttctgtaaagtcggtattactgttccattttataggtgaactgaggaatggtgaggtttaatgtcttgtctgtgcttacacagcaggtgtgcagagccaagattcagatctggttcatctggctccatcagagcctttgttagtttttaaatgtatcccctgttttgtcttcttccctccctttctcacttccttctttttcttagagcactctgccgtttgcatgtggcctgctgctgtccacaaagatccagggaggatggactctgtccactaggctgctagagggtggaggtaacttttaggcaggcttttccgtagagacttacgtgaggaggatgagatgactgcaaaagtctgccggtgacagtttcagcactgttttcttccatgggtcgtgggagaagagatgcagtaccttgggtctgaacaccttggcggggaggaggaggcagcagccaggtgactgtgaaggatgtaggatcacatttactggctgagcagccattt

SEQ ID NO: 53251 - DNA, 1822 bp, Homo sapiens
tgcgctctcctcccgcgttgcccagagtccggtcgcagacttaggtacaaagcctcacacacctgggctgctgggactgaagggaccaccagcctggaggccaagagcccaagcccgactttgatgcttcttcctcagaaagcccttccatcctcaaacccgcaggaccccagccccggcaacacctgcagccaggacagcaacacagcctcctccctcccctcacattgagaccttcagctgatattgatgaagaaagcctacgtttccaccagagtccctggatggcgagactcatcattaccacgtgttggaaataccaactgacaaccccctcaacacctgagccgagccccttccttctgctctcccctcccttccacctcgcgtgccgccgtacaattacttgtcagtctctcctctggagcacatgcgccaagaaggcgggggttttgctgagccactgatggaccccaggtgcctagtaccatgggcagtgaatgcagattcgctcccgacccctttcctgcaggtccacgacagaccagctcttgtctataaaaacgcaaactctgctacaaaagcccaccttcacactgctctggggtaacatctgaggcctcacggattccaccctgctcctctgccacgccggggggtggcacaggacaggcaggcgacagggtggggctgaggcgcaggccctgcgacaacccgcgggcctccgccctcgggccctccccgcccttcgtctccgccatgcaaggggcaggagtgggatccgcgcggggcagcgcgcactccgagccacgcaaccccggcttccgcccgtcccttcctctgtcaagggggacgcatccaccccgcccggcttgtggtgataaagtgggacgctgcggggtcggagcggcctcggccagctcacgggagggggtgagttaccggtccagagactcctgccgctcggggtcctggatccccagggagcccagaatcgcatccaccagcggctggtactcgaagatgatcctccggaagccgtgcaggaacggcatcgccgcgggccccgcgcagcagggccgtcgcgctttctgccgaggccgagatgcccagacgccgaccggaacgctccggcggccgcggaccccacctgctccgccagtccagcccctgcgcccggccgggtccgctcctcagtccaagccgcgcccccgccggaagtgaccctcgtacttcctgcccgcgccgactcagggtgggccatatggcgacagcgccccctgcgggctcggaggacctcggcgcgtcctggggcacgaccgccaggccgactcgggcgatgtccagtgggcggccccagcggagtgggagagtggaggatcgagccaagccagatccgagactcaggcgggtccgccccttcctgccagggcccggcccggctcggcttcgccctgcgatcccgcccgcgaccgctgggcgccgtccgagttccgccggtcgtgctctcggccctgccgctgccccactggccctgggcgcccctgagagctgtggtcatcagacactgccccttccggttcgggctggccctcgccttccctgaagaggggctgggccacctctgtcaccacccggcccgctgactggaatgatgaggaccagggtactcgcacgtcccctcctcagtttcttattctctgtcccggggagcacctggccaggacggctgctagccctctccacctctgccttgatggactcagtgaatcttgttttttgttgttgttgtttttgtttttttgggggacgtagtctcgct

SEQ ID NO: 53252 - DNA, 1095 bp, Homo sapiens
accataggcaggcaccattacacccggctaattcttttttttttttttggtagaaaagggatctagctctgttgcccaggctagtctcaaacccctgggctcagatcttccaacttcggcctcccaaagtgcttgaattacagacataagttggaaaaaaatccaactagtatgcccagcccaacgcttagcaagcagtaggtgctcaatactggatcgcgcccttcccgtttctctcccgagagccgccgcggcccaaaaacagaggcgtccccttaccaccagggggcagtgtttcccctctcagctccgaacgggacccggggcctcacggcgctttctggcggggcctggggtccctgcgctgctggagaacccccggcacggcaggtcccatccgttagaggggctccggcctcggggtgctgggagggggcgttcagggaaagtgaggccgtgcagcacaggggctccgcccagggactttggcagccccgactttcagacctggccccgcacttccgggcgctggcctcctggagtctccgtgtcctggttgacggagctgataatggcagcccgcgggcggggcagccccgcagggaggggtgacctggccggggcaggatttgggtgctcctggctcacctcgccagatgccaccttacccgccccaacgggaggcaggaggctgctgcttgctgtgtgattaacacccagccagggcgcgttggtgtctgcgccagagatcttgtcccgccaaactggctgtagacagtcaccggcaagaacgcccagcgcgctggagcatcaggccagcttgggcagcagggaacaccaggaacgcgcaacccaagacgaggtgctgggcccagctggcagacacttccatttaatgactaaaaatcacacatctcaggtcacgggtctaggagaaaacacacacacacacacacacacacacacacacacacacacacacacacggattccccatcaaggggacatttgcagtttccaaaccttgaagatactgaagggaccagaaagttcctttgagtggctggtcacccaaagctcccggtcctccaccca

SEQ ID NO: 53253 - DNA, 1351 bp, Homo sapiens
gtctcgaactcctgacatcaggtgatccgcccgcttcagcttcccaaagtgctgggattacaggcgtgagccacggcgcccggccaaaaaaaaaaaatttttttttttttttttagatattttttcactcttgttgcccaggctggagtgcaatggcgtgatctcggctcggcctcccaaagtcctgggattacaggcgtgagccaccgcgcccggcccgaaaaaatttttttaaaagaaaagggaaacaaaacagtctcctacaccttcggaccactcccaagaacgatggcaccgccctcctctccgcccctcaccaacatggccgcccccaagggagtgggcgggtctgcggggcggaagtgacgcacgagaggaagtccgtcctgccgcttggccgcggggcgcctggctcagtggcttctgcgggcttcgaggagcgggatgttgcgggctgggtggctccggggcgcggcggcgctggcgctgctgctggcggcccgagtggtggcggcgttcgagcccatcaccgtgggcctagccatcggggccgcgtcggccatcaccggctacctgtcctacaatgacatctactgccgcttcgccgagtgctgccgcgaggagcggccgctcaacgcttcgggtacggcgcgcgcgcgagctgtgggtcggcgctgcggggggcgcgggggcgcgggggcgcggagggacggcctcgtgggcgcctggcacggaccgggcccgtggcatctagacggcggtggtcccagctggggtgggcggggagcggatggggcggccccggaaccgttcgcgggaacgcagaagcggtgccttcgcaaacagtctccagatcgtggggctgccccagcgcctttctaaagctcccgttccttgggatcacaggtggaagaaacggaaagtaggcgggcggcccttctgcgccctgccaaccctattaagtagttttcagacgtgctgcgtcgcccagaaagcccacatttggcccctggttttcctgcaggtcagcaagggtggctgggattagcaagcgctcagtcaagcgatggttcatctctgaatgaatgaacatttagcttccttatcagaccccgaagcgttaaggacctccacataatcttgaaagtggcatcgtttgactgcctcggccctagggtgtggcagacaccctgctgtgtccctggataatctgtgcttcttgctttggccagctaagaaagtgctgcgttgctgatgcatttttaaggtctgtttctctctttgttctggggctgttcttgcagctctcaagctggatttggaggagaagctgtttggacagcatctagcc

SEQ ID NO: 53254 - DNA, 1136 bp, Homo sapiens
tattttaaaacaagggaaggacacaaaatggaatgactgcttagtcctttctcagatactcttaaaacaattttttattgttaaatttgtggtaatacatggtcacaaccgtggatcaaacaaggtcagtctaaagtggcaggtcctaggtgtgacctgataccaccaccctttgtggcagcaccgggctggactgccctgatccctgggacgtgagacttagcttccagccagtgtgaatcattgtatctgtctcataatcacagcacagctgcagacacaacaacgtgcagcattttttacataaaaatatggtagaattaatttatgacatggaaatgccttacgtggtatcacacttagtcttgaaaaaaacaccaaggtgacgtttaaaatttttagtacatatcctcaaattggagctaagttatacttcttttataaccttttgggcatctggtcgagagaagacaagattttctctatttacagtgaggcaataaatatgtttgccacctttggactgccgttactgatttgtaacttgaaaaggctacggttgatcatgaccccgcctcccccacctcccttataagatgtggacgagagctttattgacctactgactataaaatagtaaattctagattttatcatgtgaaatgccacttgctaactttttctagtttatttggttccaaagttcagaatgaatttcagcagcacagctgtgagactcaccatatccgggacaggcgggtgggcagtcagcgcgatacagaagcaatatttaccttaaaggctcttccccagacaaatagaagttaaattagctgatggatatttcatcaaagagatggactttctcccaaaattaacgtgggaggaaattgaggtactggtaaagtaaaactcacctctgacagcctgaacctgagctcaggtgaggaaacctaaccattgaaactggtaaataaatcctggccgggtgcggtggctcacacctgtaattccagcactttgggaggccgaggtgggtgggtcacctgaggtggggagtttgagaccagcctgaccaacatggagaaaccccatctctactaaaaatacaaaattagctgggtgtggtggcacat

SEQ ID NO: 53255 - DNA, 1786 bp, Homo sapiens
gctcctggcccagaggggacggcggtccagggagccctccctttgctggtcctgcctattctaaagccctggcccgactccttcccgaaaagccccttggtgccactgccactgccaccagtttgcacccctaacccctgtgctgctcctcccaccccaaggcagagccgggaaaggaaacagtttggtccctcctggtcggctgcggaagagtcctcaccatccttcctgtctcccgctaggctagaaaggaggcagaacccacttcggagggaggttaccactggtccacccccagcttagcgcaaagtaggccaacctgcagcctggctcctcaggtctccgacttaagtctggcacgtctgtggtcatggccgaggagccaggcctcatcctgcaggccggccgcttggcttccggggtccggcccccgcggactcagctctgcccaggcccggccctcctgggatgtgacccctaccccggcctggccctagtgccatcccccagccccagccccagccccagcccccgctcctgagccccagcccccaaactccgctccagccccagtcctagcccggccctactgccatcccccagcctccatccaccatcctcaatcccctagccccagccaaccgccctggtcttaacccagccctagtgcgatcccccagccccacccccagcccccgggccccgctccatcccccagccccagccccagccccaacccggccctagtgccatcgcccagccccagcccccaggccccgctccagccctagtcctagcccggccctggtgccatcccccggcctccatcctccattctccatgccctggtcctagttcagccctagtgccatcgcccagccccagccccagccccagcctccagcccccgccccagcctaccctcccggctaaggctccgcttctgcccgcagcactcggcgaagaggcagtagagacgcgggtagatgtagccggtgaggacgccggccagggccagtcccaggctgatgggctccaccgcctgcaccacggacggcgccagcagcagcaggcccagcacggcccggcccagcttcatgcccggacccgcgccaccctgcttgttctcgcgccgaccgcgaaccggtgcagccgccagacccacgcttccggttcctcctctcgcggaggccatctttcttcagggcagccctcctcccgacgccggcggccgccatctttgttcggtacaaagccctgttttgcttccggaaactcggttctgctccgcccctgttggccacgtgtttttgtttatggacgttatttttgccaggcatggtggctcctgcctgtaatcccagccctttgggaggctgaggcgggcggatcacctgaggtcaggagttcgagaccagcctgaccaacatggtgaaaccacgtctctactaaaaatataaaattagccgggtgtggtggtaggcacctgtagccctagctactggggaggctgacacatgagaatcgcttgaacccaggaggcggagattgcagtgagccgagatctcaccactgcactccagcctgggagacagagcaagactgtgtcccctccccgcaaataataataataataataataataataacggacgttattttttagaacagatttacagaaaaattgagaagatagtagagagttcccatgtgccacccatccctgcaatttcccctattactaaaatcttacattattagtgtgctacatttgttaaaattaacg

SEQ ID NO: 53256 - DNA, 2053 bp, Homo sapiens
aaattatacaaactcttaacgatcgatatgcatttcacaattaattggttttaataaaaaacgcgagttagtgatctgtttctgtatctctggagcacaccccgagacgacacagctcagggcatgtcctggttaaacatttgcaaagaacgctgttctccaagttgggcagtggaaggtgtacagtgtgtcaagagaaaaatctacgtctgaggagatatttgtgacagcgacccggacgcggatgtgtctgtcgtccccgccgcctcctcctcctccccgcgtggtacccacctcaccccgttgggcctcttcctcaagttctgtacctctctggtctcttccagttttaatctttaaaaagaagaagaagcagcaatgcataagctgagtgattccccgcggaatccaaagctaacagagccaataaggcaccttcgagggcatcccagcccagctactgagccaccagcacagtggtccagaggacgaccttgtgcctagacccaccgggagtcagagccactgcgcatcccggaggcatctctctcaaccgttcgagcttggggcggtggcctcaccccttgagcctcaatttctgcgtccgcagaaggaaccaccacccgagctcacagttaacaatgtcagcgaagcgccgagccggtggtgagtcccccaaacaagtctatctttaccaagcctatgggagccccgccccaaacgcaccgaacctcctctgagtcctgctcatcttcctctgactccgagtcgccccggcggcgacggaaaatcttccggacgaccggcatggtgacaacggccgagttgtacagccgccgcgcctctgcgcagcggcccaggctgcttccggcgcgcggcagagcggtcagagcgcctgccccgtctggccccgcccccggcacgcacagtccgcgtggccacgccccctctcctggcgtcagcctcttccgattggacggcagagggaaggaggtggggcgtcgccagacggccccacaaccctgcgcgtcgcctcagagggggcgcgcttgactgacaggcggcggcggcgcagttgcgagtgcaggtgagttccgggccgccaccggctgcttctgtgggccgggcctctgagcattggcgaccccagcccggctccgggctgacagggcctggcttcgccaggtacgccagacgcagcggcccggtgagcggagcccgggacccccccggccgccgccgcccctctcccctcctccggtcggcgcccaggggggcctctgggccccagcaccaccccactctgagctccctgggggctcgtggcttctccagaaccggggccgcccccctctcatttctgccggggcctgacctagcgttgaaagcatccgcgtggcgtctcgcgtctcgggcgctgacttttctttcctcgggctctgagccctgacgtgcgtttttttctttcggaacaaaagatgaccacttctctgcggtgctgacttagagtcccagcgccgactgcctcacaaataatggcccccagcttctccgcgaggagaggcgcgtctgatgttttgaagccacgcaagagggtttgagccgggggactcctcctcggtgcttgccggccacccccctggaccttcacgggtctggttttcctccttcggcaggtctgtcgctctaccctctgccccttccaccccgaagatgctgtgaggataaagtttatttgaaaaactggtatcagcaaacgcttaggaaatacctaaatgcataaataatggcttctaggacttttaagaaccccttaagtaacagtagttttccttttctcagtgtcatcccttactttgagaactacctcttattaagcagttactatgtggcaggccctgggcaaagcatcatctcattgaattctcccagcaatcctttgaggtagattgtttttcgttttacaaatgagaatgcggagtctccgaggggcagtgcacgcctcaagttacccagctaggaggtggaacaggaattggttgcaggtcagtct

SEQ ID NO: 53257 - DNA, 1488 bp, Homo sapiens
acggagcaagggtgagctgggcgcagaagaaacacacgcctttggggaaagctaggagcagtagacagcctaggcaatgtatgttctggaagggtgtcccagggtttctcagggtgcagcctccattccttccttcgatttgacccgggaccagcctagatgagggggcctgtggagagctggaactggaaacaggttctcaagggcagggctcggcacagcgtggcagccaggggctgtgcggactgaagggatgcggccctgtcctaggctgagacgtccgtccagcaggtgccgcagggaggaagggagccttccccatccccgacggggacagtgggtccgtgtttcctcccacagctttcggccccttagctctgaggacaaggatagggtccttcctctgcttcttctgtaccttttgtggtccggagatgtccccggcggaggtcactataccatctggaggtctaacgggaggcaggagtgctcaagtcaaggccgaatgggcactcagtgggaccctggagaagcagctgacacaccaaggggctgccacgtgcctgctggcagccttcacacgctcatcccgggtctcagagggcgctggcaacacagatccctgcctcccctatcgggaaagcgttttaggaccagggaaaaggaggcctcccccaggcgagtgcgcagagccagggaacccgtctggatggtggctctttcccaccatccttctctggcagcagcagttcaaagtggagcttccaggctgtcccatacatttcacgatttctgagtctttcgcttcaatttaaaaaaagctgggggcacgaccgaatcctgcctctgtccaccgccatctcgttcctcatcgcagggggcccttcttgctccctccactgctgcgctctgccgtctgctcccgccaggggtccccaccacctctgcggacggaggagccgcctcccaggcccgggcgtgcccagggcgggtggagggcgtggggcgggccggtatttcctgacccgctggaggagccggccccacaggcttgtggcctccccggagccggtgagtcaggaacttcctacttcaagaggcttccccagtgcagcagaaaacaaactagtcgcccccaatgctcccgacctctgtgatgtccacacccgcggaaatgggggccccaaaccagcaggctctgttctaggcttctcagcgctggtgcggctcttggagaaggctcggcaggggcgggtggggcatgggggggttcacaggtggagacagcccgtctccgccccacagacggctgggcgcagtcccgaaatattcttcccaagtggacttttttgctgacaacctagaggagagggtttcgggtaggataacagtagatccaccttgttcccttgtgccacactgtgtcacactgggaaccagcaattctcaatggtgccttgaagccaactgcacgcacttgtggttaga

SEQ ID NO: 53258 - DNA, 1251 bp, Homo sapiens
taggagaatggcatgaatccaggaggcggagcttgcagtgagctgagatcgcgccactgcactccagcctgggcaacagagcgagactccgtctcaaaaaaaaaaaaaaaaagagaaatagccatagcatgttttcttgtttgtttgtttgagacagagtttcactcttgtttcccaggctggagtgcagtggcatgatcttggctcactacaacctccacctcctgggttcaagtgattctcctgcctcgcctcccgagtacctgggattgcaggcatacaccaccacgcccagataatttttgtgctttttagtagagacggggtttcaccacgttggccaggctggcctcaaactcctgagctcaggtgatctgcccgcctcggccccccaaagtgccactgcacccggccaagaaatagcgagagcatgctgagcagtaatccacagtaggaactccatgtgtcagcatctcagtcctcacttccttgttaattccctgttgctattcctctttattatttcacatgttacttttatttcttctacttcccccaaatctacagatgtgcctagaaaaatatgtgataatcaatttacaattttgatcatggtatgttttgcataccaagtgacatgtggtttcatctgtaacaaatgctactagatgacgggagaggccaccggcttcagtacaaagggcattgctctgggaatcaagagaccatgtgcccggacagcatgacctcagcaaatgagccagtctgtgcttcccattcctaatgtgtacgtcagcaggggttggacgacatgacctccattgtccttcttgttttgaaattctgtgggactagataacatccagtagaatattaactgctgcaattattcaaaaaatggaggcatgtatatataatagtttaaaagttataattagaccgactgatgaaagaatgtagttaattcaaaactgagatcatgttggcatacacgtcaacatatcaactatgacatgctttctctgctgatactgaggatacatagcagagtttaataattctagatgcaaaataatgtgaaaaagcaattatttccttaaagaatgtcccttgtagaaaaaacaatgcaaaaaagagaaatattttatgttaaaagcacagtacaggtctttgagttggattatgatcacaatcacttcttaaaaacaccatcacaaggatcaagaatgaaagggggccgggcgcggtggc

SEQ ID NO: 53259 - DNA, 1590 bp, Homo sapiens
aaaatgtacctgtggactttccactggccaatttaagtcccttgtgagactggcctgttcatccagccactggttctgtgagatatcccttgcaacagacacttttgtctgagcatcttggctgacaatctagcagctatcccccatccatcccatcttccctttggcagagcacctgtcttattacaggatcactttctccatctctcttgcaacacagacatgggcatgtgacattaccctggctaaccagatgtagcagatatctactaaacacgtactgagaaaggtttcctcccaaaaaaacccggatactttttgtatttttagtagagatggggtttcaccatgttggaaaggctggtctccaactcttaacctaaagtgatctgcctgcctcggcctcccaaagtgctggaattgcaggcatgagccactgcacccggctccctcctcttctttacttgacgtggtcatagctacctgtgatgcttgaaatggcagagccagagatggaaagcacctggctttttgatgacaatttctcagctattactgaactgagacaccaacctggaatttccctgcctctggactctttgtcatgtgagatagaaaatgtgcccttgttgtctaagccacttttctttgggtcttttttttttttttgtctccttccaaaatgttgctataattcaaccattcttattgagagctcactctcagccaagctctgtactggcactggaatgagagtagggaacagtagagtgctaatgagcactctaggctaaaagagcagtagaaacatagacttgcagggctcaagatagacatgggattagggaaggcctttcagagggagggatttctaagaggaaatgagaagaataagtaaaaatcagccaagccaaacagacagcagagatggaaggaaggtggaaaagcaagagacagttaggtgggcgtggtggcaggcacctgtagtcccagctactcgggaggctgaggcgggagaacagcgtgaacccaggaggcggagcttgcagtgagctgagatggtgccattgcactccagcctgggtgacagagtgagactccatctcaaaaaaaaaaaaaaaaaaaaaaaaaaaaatatatatatatatatatatatataaaatatatataacattattacttataacagcatgaagaattacaagtagacagaaacaaacataataaaaggtgtgcaagaacataatagagcaaagtataaaactttattaaaatgcatttgctaaggttttaatgaatgtatcctccaaaagtcatgctggaacttaacctccaaggtgacagtactaagagctggtgcctatgggaactgattaggctatgaaggctccaccctcatggatgggattaatgcccatatgaaagatgcttcagagagctgctgttgctcttccatcccttccccatgtggcaacaccaacacctagatagcaccatctgaggaatgggccttcaccagtcactgaacctgctggcaccttgatcttgaacttcccagcctccaaaactgtgagaaataaatttctgttg

SEQ ID NO: 53260 - DNA, 823 bp, Homo sapiens
aattagctgggcgtggtggtgcacgcctgtaattagagctactcaggaggctgaggcaggagaatcgcttgaacctgggaggaggaggttgcggtgagccaagatctcgccattgcactctagcctggacaacaagagcaaaactctgtctcaaaaaaagaaaagaaaagaaaatatttgcttaatgcatgaatgagtcaatggaaacttctactgaattctttctagcctgtggtcagagttggttttgttcacatacgtagtttattatgttgggtttcaggaatgtgccagtgactctgcaaggtgctggggatgtaactgtgaacagaagagtcccctgatctcatggagctgttaaaaatgtcatttggcagagcagggtggctcatgtctataatgacaacactttggtaggctgaggtgggagaatcacttgagcacaggagattgagaccagcctcagcaacatagcaagaccccatctcttttaaaaaaaaggtaatttatgaagagcatgcaataacgtgagaattttacctattaaaaaataattcaatcataccataaggagttcttcaagtccctgagatcagctgcaaaaaaaagctaaaagtctctagtacatggctgccttccctaagctgttgccaaagaatgtgagatatctaagtgtttatatacctataaacctagcacaagtgttttcttttcattaattatacacgggtagttggttctacttaataactgaacagtattcagctttaaaaaataaacattaacagatatttcaaagaaatcccaccatgtttggctctat

SEQ ID NO: 53261 - DNA, 3617 bp, Homo sapiens
tgcccgaccttaagaatacagttaagaatactgtttggtatactaagcaggcatattttacatagttacaagtagaaaatgagttacaaagctttgggttcaaagtatagaacatcaacactttgtcttaatatcctcaataaaaatttcacacaaataccaacactcgctctttttttttttgagacagggtttcactctgtggcctggtgtgcagtatgctggtgtgcagtggctcaatcaccgctcactgccgccttgatctcctcaggctcgggtgatcatcccacctcaccctcccaagtacctaggactacaggtgtgcgttagcacgcccaactaatttttgtttttgttttgatagagacaggggttggccgtgttgcccagtgtaatcccagcacttcaggaggctgaggcaggaggactgcttgaggccaggagtttgagactagcctgggcaacaaagcaagaccctgtcaaaaaacaaaaacaaaaaacagaagaaggattaatagttacattaagaagaatgaggcggctaaggaaaagaaacccccaccaagatattataagtggtaaaaggtaccaaaaagtgtgactagtatgctaacatttgtaagggaggggggaatttactcataaatgcttgatagctctctggaagaattcacaagaaaccagttatggtggttgcctccagggaagaaaaaaaaaaatcccctaatgactggggcagtcacacaccaggtgtggcctattcaaaaatacataaacaagtaagaaataaatcatgcttttaaaatctggcttttcccccaattccccttctttaacagagtgtattcaatcttggctgaaccctcagagctcactggcgtgtgtaactgactttagagagagccaggaggtcgggattgcacacaatagggttagctgaaggtgaagcacctagggctagagacttccccggccaagggcaaggcagagctgggataaaggagttcaaagccctgaggtggaagaaggctggtgcatataaagaaggagaaggcagcctggccggaggagactgtgttgcaagagggaccagcaacataaaaggattgtctaaatttagctttacttggagttgggaagtccttgttgggtttctgctcagatctgagccccactcactccatgttaggtgatctgggttcctaagtgttctcccaacagtaccctctcggtgatgcctacaggatcccatggaaacgtcatccttttatcgtgagcatttggcatcttactcagtttccctggactcaatcttccatccacgtgagtgtatcctacatttccctctagtcttttttcctttcctttctttacttttgccccatgtccctaggactggcccacaattcagactggttaccaagtacctagtgtataaaatagtaccctttactctccctgtgagctgccttgcctgatctcggccacatctgaagaatcaacatacatataacctttaggttggcttacatttgccgtcatttaacccccaggtccctcaccccaagcttgtgagctgggtggggtccatactacaagcaaatattatctaaataaacagaacttggccaggctcagtggctcatgcctgtaagtaatcccaacactttgggaggctgaggcaggaggatcacttgaggccaggagttcaaggctagcctgggcaacatagtgagatcctatctctaccccccccaaaaaaacaggaaataataataaataagaaatttacaaaattaaaaaattagctgggcgtggtagtgtgcacctgagtcttagctactggggaggctgaagtgggaggatggcttgaggccaggaggttgaggctgcagtgagctctgacagtgcctgggtgacagagcaagaccctgcctgtctcagactattgcacattggtgacacgtaattgaacactgctaatggagagtatctgttgcccactcatgcaactaacattttacattttcaatttttctctaacaatccaatgccaatttctagatctgcttgaagttatcagaaagtctttatcccacccaactacttccaacttctctctagggttttcttccatctctaatgactgttcattccgctttctcaattactggcatttcataatccaaggaaagtgagaaagtgaaggaagaagccatcgtatcatcctgtttttcatttccatcaggtggttgaatctttttggcaaataaagcacttgactgcctaaaatttttctgcaatgacattgtttatctaccttactcacttgctgatctgccaaactgacaaaataaacaataaaccttagccaaaaggtttctgttcagcaaactactccctgatgccaggcggctcacgcttgtaatcccagcactttgggaggccgaggtgggtgaatcacctgaggtcaggagtttgagaccagcctggccaacatagtgaaaccctgtctctactaaaaatacaaaaattagccgggcgtggtggtgcacacctgtaatcccagctactcaggagactgaggcaggagaattgcttgaacccagaaggtggaggttgcagtgagtggagatcgcgccactgcactccagcctgggtgacagaacgagactctatctcaaaaaaaaaaatagtccctgacatttttgcctatggagtcacacccaagacattcaatctatgtaccgagtgcctcacaacttaaggaatgtgcctgatgattctaggtgtgtgtcactttttgaattgttgaaccctttacaaacctcctgttaacattagcatttatttgagctacagtgtgggactcaacataaaatttctaagtaaagtttctaactttagaaatcgtctattgtaattggcattgccatgttatctgctcattatgaatcagtactcctaggatcactatttcagtgtcagttgatcctggaactcagattaccttgaaacacttgagttgaagggactcgaggtcacacagtctagtttataccaaattcattgatcacgtccacaatacccctaataaaaaagtgatcattcagtctcgacatggaattcaagatatcaatggaaggccgggcgcagtggctcacgcctataatcccagcactttgggaggcctaggcgggtggatcacctgaggtcaggagttccagaccagcctggccaacacggtgaaaccctgtctctactaaaaatacaaaaattagccgggcgtggtggcacatgcctgtaatcccagctacttgggaggctgaggcagaagaactgcttgaacccaggaggtggaggttgcagtgagccaagaccgtgccactgcactccagcctgggtgacagagacagactctatctcaaaaaaagaaaaaaaagatatcaatgaaatatcatgacaaccagcaacatgtggaggtggataatgatagccaacactagtagagtttatttcgcatataatcttatggagtaggcactatcattatctccattttacagatgaaggaactgaggctaaatgacttgtccaaaatcaatcagttagttaat

SEQ ID NO: 53262 - DNA, 1946 bp, Homo sapiens
tcatgaagtcttaatgtcttcacatcagagctttttggtttgctattttctcattttcagataaaaaagtataaaactctttgaatgttcctcaacttttaaatttcatattctaagcattttttcaaagagacaatgatttcattttatctttaaactagaataaaaggatacatggtagctttgtccttgaataaatgaagaaggggtagtgttaatactatctattacaacttctaaggatattgttccagttactattgttgtataataaatcactcccaaaacttgatgggaaacaaccattttatcatgggtcaggaatttggacagggacaacttttctctgctccatcattgctgaggcctcagctgggaaggcttacaggctggggggacccaactgctgggcgttagaatcatctggaagcccttcactcatatggctggcagctaagtatgactgttggttgagacctcgactgagctgtcaacaggaacctctatggttggcttctccgtatgtctctctatgtgtgctgtttgggcttcctaacaatatggtgactgggttttaaaagtaagtatcctaaaagcgcaagaaaaaaacgcacggctatttgtgattctgcttcagaaatcattaaaaaaaaaaatagggtctcattgtgttgctcagggtagtctcaaactcgtgtgttcaaacaatcatccccctcacctctacccccacctgggcctcccggaaaaaccaggattccaggtatgggccaccatgcctgggggcatcactttaaccatactctattggtcaaggctgtcacacagatctgcctagattcaaatgaaagtggtataagtcccttctcacccactcagtgggaggagtcttgagatcacattgtaagatgagcaatgtgggatgggcaatattgttgtggacatctttccaaaatataatctgtcccacatgtgaagtatctctaagaaagataaagaggaaagttaaacgatatcaggtacaacagaaatctcagtcaacaaggtgtgaactgagtaattctaaactttctctttttatctccatgtcaaaataagcacatgggcagctttcaaaggaaaagcctacactattagtctgtcttcaaaagcctattagaatgatgtgtgatattaacttctgattactaccaaaaattgaatgcccatcagtggacatttttttttttccacttatgacttggtacattagttctacttctaagcctatcagaacctccagctccacttattatgttgttataacaatttgcaaaccaataaactcttaacagtctatacccctcccagtctaaaacacggttcacacaatggttctcagtgaggtaaacactttggcaaacagagtgcagagttactgtccaaaagggcaacacgttatgacagctatgctaggtaacagagttccaaagttaaataaagtgcttggaggaatgcaactctgccaagagcttagcattttaccaacttaattctagctttctggttatccaaatttatatctccaggctggatctcttccctgggctccagatgcatatactaggctatcgacgcaatattagataattagttatataacaggcatcttgtaaaatgtccagcactacacttcttctccccatcaagctcaatcctactgttctccgtctcattcccttgtttttgtccatagcatttatcattatctgacacactgtaaatacagattacatataagcaaaacattttttactatttggttaactgccattttccctttgcctagaacaatgcttggcacataagtagtttaaaatattgttctttctcttttcttttttttttctgaaacagggtcttgctctgtcgcccagcctggagtgcagtggtgcagtcactactca

SEQ ID NO: 53263 - DNA, 755 bp, Homo sapiens
tgataaccctaacaaggttgtatcatctgagcagagacagagaggacaagaataaagtgctggtaggtttaggttttgcacccagctggtggaaaaaaggacctgtggcctatatttgatttaccccacaagccagagcagggaacatgcctcccccttgaacatcttgaagtgggaggaggcagagggtggctcctaggccttctttgttcactactaggccttcccttgaatgtccaaggctccccagcaatccattttagccttattccacccacatataaacaggttgagaaatgcaatagatagaaaggctctctactgaaacccactccagtaatccagtcagccaatcggcccagcgtggcctgaagctaccgagctcctctccatccttctccacactgaaaactggcaccataggtacctgctttcagcagttcaagggtatttcccatgctctcaaggtgaggtcatagtcctcacatggtttttagctatagtctgcctcttcaggctcctattacaactccatcacctgctcatcatttgagagctctgtgccctccatgaccctttggacataccatttcctccttcttttcccggaaggctctgtccagatcccctccacccttctgaacaccccacttcacctgtaaaacttactagtccttcaggactccacttggatgccatttccccacctgagttacactcctgtacacatttccatggagttaccctaccttagt

SEQ ID NO: 53264 - DNA, 2669 bp, Homo sapiens
gatgtttataaaatgaattatcttaatttaagggagctattgccctcaggattttggtaataacaaccgtagctgcttctgtacctaacaaatggttatgtaaaaacaattaaagcaaaagaaaacaaaacaaaaaacaagggaggatgtgctctgtttctgtaattgctctaaccttgttttattttgatatgagatttcttggcctcatctcagatagcaacaccaccctacactttctcctccacaccctttgcaaatagaattccaaaaggtagttcaggcactttagagttcatcctgggaaatggctcatcttgagggcatttcagtgcagtaactgagatttcgtctgctccttcccgggccgccgcactgcccatcccctgcccagtgatttccccaggaatccggggacggcaggaaaagagctccatccacagccagcccctcgcctttccggggacggccctcagccctgagggctgcccgtttaccgtgcgcatcccccggccaagcatccccgcaaggcgcccctcaccgccaactttccccactggaaactattctccgagcaaccgttaaagatcattgaccccgcgaacgcctcttcctgaggtagatcacgtaagatctctccctaactcccactttcccctccagaccagacgtcgcagtgcccacatcccactcaggattgagctaccccgaaagaacaagtgcgcccggagccgccacgggccagaagtcctcgcctccagagcgaagaccgcactctcgccccagcaccccaaaacccgacccccggcgctcgccccggccgccccgctcccggggaagtgcccgatccgccagcgcctccgcggagccaggacagaactcgcggccggggcgccccgagacccaacgcagcgccgcgcagccggggcctccacgcccccacgcccggtcccggccctccccgggcatccgcggctcgccccgggggattagggctcggcccgacacacacggcccgctccggggcgccggggacagggaggcccgcccgcgccgttcctcaggccgccggggacccgcaccaactcccctcgcctccgaaggacaagccggcccgcacctcctgctcgggccaaggcggacgaggggcattggaaccccgcctcctccccaggccgcgaggaccccgaccagcgcgccctcgcctccgcccagcagcgcggcccgcgccccctccccaggccgcggggaaacgcagcgcgcgccccgcatctgcccgcgggcccagcccctcactcacccagagctcggtgccccagctcatggtgcaggggacgcgaaggggcgctccgcgcggcgggcgcggctctctggtccccctccccggcgatccctttgccccccgagatccccgcgacggcggaaagcccggagtccgcgcggcctcctccggctcgcagctcctcgcccggggtctcctcggcggctcctcctccccgccgctccacagcaaaatggcccgaggaagcagcagccgcggccgccgcagcgcccgcccgccctacacccggagagcgggggaggggcgggaggggaggggcggggccggtctgacagctcgcgcacgcgcgcccgccccaccccggcccggccccctcccccgggctcccccggccgggtccgcgtcgccctggggtccggaaggacgcggagggaggtgtgagggacggcgggacccggatccctaggactccccctgccaatctggtaatgacttcttagtgaccactgtctgctcgcagtactagcgcttgccttggaacgcggcaggccctgggatcaccgatgctccgccgcggtctgagatcgctcccctgcgcgtatcgccgctctggatttaaggacaatactttcccctggcagccatgcgcgccgagcagagtcagcccgggaggctcttttcccaccgcccgagggaagcccgagagtcccgcaggctggcgcggtgggagtggggcggtggtaactgcgcgctgtgcgaatagagacgtcgaggcaagcgcgacggcctcgagtggctagggaaagaatccaggggcgtgcacccagtgatttccaatctctgaaaccagtgatttccaacttgttcagccaagaaactctcaggcgtgaaatcacgttaccgcctagtgggtaaaagcaaaggcgtggggtacacagataacttgtttggttcaaatccagcctcccgcacgtgctggccgggcggaggcggacaattgctccacctctggaagcgcagagcgcagtccaccaaatggaggcaaataacgtgtccatctcactgcccggcggtgaggatcaggggtgggccaaggccgaaggttggtaaacccagcgctcattttatcagcagacggactccctctctatatatccaaaggtctgcacaaatgttcctgacaagctatggaaaatgtttggaattccaactcctgaatcactagccctttccccacagcttatctttctccctcggttaatgctactactggatccttttctgagaaaccgtgcgactcccaacatgggcccccagttaaaaaatattttacgatgatgcatttctccaatcccaccccaccattttcaacctgcttatcattctc

SEQ ID NO: 53265 - DNA, 1829 bp, Homo sapiens
attgcactccagcctgggtgacaagagctagactccgtctcaaaaaaaagaagttcctataatttctgaaagaagcaaagaaagtttccatacagaattaagagaaaaatgttaagacccagacttggggttggatgaaatagcatgaggcaacagaacacaggagttaagagcttccgtgtgattcccagctcaacctggagcaaatgacttatttctcagagcctcagtttgcttacctgtaaagtaggaataatgataatacgtacctcctagctcatcaaattgttccaaaaattaaatacaacaaaaggcctaacaaattgcctcataagggctcaatcaatcgtattattgcaaccatttcgcttgtatttgagtgtgaagcgcctagaaaaccacaggacccctacggcgagccgggaatttttagatattttcctccgagtcaacgctcagtgaaatcagttcaatcagtggcccgacaccgtgcggctgacacagcttatcccccgaccctgagatcaggggtccccggagcccaaggtcgcttccaaagctcagcgaggcggaggtgcggcccgggctggtctggttcggccaccgttgttatggcaaccgccaataggttggcttcatctctaactgaaagtctgcacaggagcggccgatcgaagggccccgaggtgggcagcacaggctcctcgacgacttcctaggtcgcaatctccaggaaaacgaccacagggtcagcggagctagccgccgagccccgctccccgggcccttccggcggctgcgccctttcaccccggacgtgggcgggagaggaagcggctggtgatgctggaacaaacatggccgctctggcgcccgtcggctcccccgcctcccgcggtcctaggctggccgcgggcctccggctgctcccaatgctgggtttgctgcagttgctggccgagcctggcctgggccgcgtccatcacctggcactcaaggtaaagcttggcaaggccgggccggggggcggaggccgaggccactccccgggttttagggcaactttggcccattggggacctctgagccactggaccacctctttgcccctggctgcggcctttcactgacaggtggcggggtctgtggggaaggcgggtctgggcggcgctggggtcttcgggctgaccggcacggggcgggaagactcgagctgagggaggggaaggggctgaactgtggcgttgcccccacggactcgggaggctgctcttaaatccctgctggcttccctgaattcctcactcagggcagcccgatcgcctttcttctttctcccctccagcttttatgctggctttccttgtccgcggtctccgctcttctgtgcccttgtactgtaccggcggtttgaaggtacttggaaccttagcctcagtttcccatttcggtttagggcgctctctggagcgagactctagagaaggaatttcaaatcttgcttaaaacacgtgactgagaatgtaaagccagcattaaggtgtgtctctaatcaaagggcctgctttttcttcctctatccagccattgtctagggaagagagatttttgataaacctagaatgatactctggatcttgctttgtaactagcagagaaaagacctctaaggctgaaacgcaccctaaggtggttcagcagtttactatatctgggaaattgtccaggtgctgtggctcatgcctgtaatcccaacactgggaggcctatgcaggaggattgtttgagcccaggagttcgagaccagcctagtcaacgtgctaaggacc

SEQ ID NO: 53266 - DNA, 1821 bp, Homo sapiens
accaccacgcctggttaatttttgtatttttagtagagatgaggttttaccatgttggccaggctggtctcaaattcctgacctcaggtgatcggcgctcctcagccacccatagtgctgagattacaggtgtgagccaccatgcctggccagaaatgtattttcgattcattttcacatgactcaacattttgaagatcaaagaattttattctgtgtgtagttgttcttgaccactcgtagcctttcccatacttgctcctgatatggtctttgagtgggattagtgggatcttttcttagtggaggccagagggcagctcgtgaactaaaccctccccagaagggacatttcaggccagtgtggtctcaggtcagcccgtggcctgcgtcctttggtgcctttctggtgactgagagaagctgttcgccagactttcaggcctgtatctgaccacaaacgggggagctcctctgtcccccatgctgagtgagctggagcccaggacttaagcagattgtggaaatgccgagactcagcgtaagtcagaggtactcttaacgccagccaggctgtccatcgtctttatttctttaatttttgtgtttgactcaaaattccctctgaagcccagcagagaggaagcaggcaacaaggatgaagagtaggtgggggtgttttaggctctgaggctgtccttacactcagggaaggattgttttagaaatttttcacgctttaagtggctgttgtgggcctttgcttctgtgtgccgcataaatcatgtggtgtaaactccttagaaaggattactgcctgctcttgggcatcacccagccttttgagtcatgattgcatcgtcctgaactaatcgtcctgacctgtgtcgtcctaaagtcactagtggactttaaggttatgaactgcctttcccttagcatgaagcgtaggtgttaagagcttggtccttggagggaggtggacttgggtttgcgtattggcttctccacttacaagctgggtaactttggtcatttactaaacttctccaggcctgagtgtgtcaggcctgcttcccccacagaggccatcgtgagatgaagcatgagaggtgcccagcccagcttctggcacatggtgatgactcagttgatggcaacgaccagtgctgttgtttttgtccttgttacagttccaggatcctcttgggaagtcagctgggaaggaggggataatctgtctccttgctggccttcttagttcctctttcactcagagaggacaggggaccacctagggcaggggcagcacctcctgtgcactgtggggggcgttgctcttctgctgagtcatggagagtattgacttgggcatttgcaggggctgtggtatttcctgcctcagtgggcacttgtcctgttctcatcagtaagaaggacttaccagaatcgagtgtcatggttattttcctcagagtgagttggaggtagaggagcccacaggacaggaggtcagccttacaggacccccaagaccaggtggacatgacaccctccccaacccccgtctcctccttttctctcccctgcagaggtttcagcatcttcatagccgggcctgattccctaagatgggcaggggcaggggcagcctgggcatctatacttaaagctcttccgatgattctgttgctcacccccattaagaaccattgctataaaggaattctcctccacatgaggaggtcgatgcctggagacagaggcagcaggccaagggcaggcacacccagctgagatggggcagggctggaaggcagg

SEQ ID NO: 53267 - DNA, 982 bp, Homo sapiens
ctactcaggaggctgagatgagagaattgcttgggcatagtgaggtcgaggctgcagtgagccgtcatagtgccactgcactccagcctgggtgacagagaatgagactctgtccaaaaaaaaaaaaaaaaaaaaaaacaacagcagtagcacacacaggaaggttatggacaccagccacagatgggcagtgccaggccagtgacgcagtatcgggcggggattgggctactctccctacctcactccccaggggcctccctggacaaggggaaacttcagctacccttaaaggatggcaggatgtacatgggcaaggaggagaggcaagggcattccaggcagtgtacagtaggtgcagaggaaggactgcaggaaatcgacacacaggggaagagaggaatgcaaaggagttaacggcaggtgcctccatggcaatgagacagtagatttttccagtggatgactccgcacagaaagaagaggcacgaggtcaccttttaagaattgatgctgactggtacaggcctgggcgctctgagcacacagcaccgaggtccgcctttctgagcttcttgggaagccccgcggaacggctgttctctgtaactccgcccattttaacgattagcaaagtgataacagggacgagccaggtcatagcaacggaagcggagtgcttgccctgtgctgggttcacccgcattatcgcatttaatccttgcagcagcgccccttgaggccggtgctggtattaccatcccacattttacagacgaggtcgctgaggcccagggtgaaggggctcctccagtctgacagttcgtggggggcttccaggctccgacgacattgtctttggtcagacacagggagctgggggagactgcttctattaagttcagatccggcagcggcttattgccctggtccctcccagatgcctgtcgcgtggggaggcgaggtctgcaggggaaggcgc

SEQ ID NO: 53268 - DNA, 1348 bp, Homo sapiens
ctaccctccaaacttctctgctgtgacctgtctgaaatgcacatcaaatcagatggctttctggcctgcattcttcaatagctccccaatgtcctcagaaaaaccccaagtgcatttgcaagataccagaggtcctttgtgatctagtctttgttctcagcttgccatcccctggctggttacatagggctacctgtcagtgggtgtctcagatctccctgccttcgcacatgctgttcctgctcctcaaatacccttccctgcttgttccttaagacttctcaggctcattctgtggcctcctctgacctcttaggctcagtcactccttcctctgagttcccagagtgcttggtaattcctctattagcacttacctcattgacttagaattatttgtttacatgtctcttctccccagagtgggaagcatgtcttctgcatcttcatccccccaccccccgctgctgctctcgctgcctagcagagtgcctgaccacagcttgggctcagcaaatgtttgtggtgtgaatgaccgaaggacctttgtccccaaatgttccctgcactgtgcctgaaatgtcaccatttatgagtcctgcctggttcctggctcctgttggcttttgccttcccacagctgggacctctttctccaacagctggcccagccctgcccagactctgggggttatcacagacttagcccagggagatttaaagagccagcattaagaagtgcaggtgactcaacttcctgtgaacttggctgcaagttccactcccttgctgggtctgggcacctggtggcactatattccacgagactggtagctccgtgggagaccatttccctcggaccccagctctgggctagaacagagtccctgcggatgtgtgctacctcccgctgtggccaatgcccagctgccaagcttctctgatgcctgctgccccattcaggtggcacaccttccttgggcacctagcatgtgccgggcacaggatctctgccatagaactcacagccagagtgggagaggcagggccccagacatgacatgggctgtacggtgtggtcagagccaggacagggctcagagaaatgtgggttgcagggcaagggttcagaagcagcctcagaggtggggtctgagctgagaccgaagaggaaaggaagagcgtggcggaggggtggcttcctggctgacgactctgcagggacaggggctcaagaaagcgccccccatcactcacagacctagagccctcagccatgtctctgggagcatggtgttctcggaggagggattgaggggattagctaccttctcgcacatgactcaaa

SEQ ID NO: 53269 - DNA, 2284 bp, Homo sapiens
ggagatgagaaggtgctgcgggcctccagctgggtggtcatgggtcagactggctggggacaaagggagaagggctgcccacctcactggtcccccaaaggtacttctccccacgcactccccccttctcctttgctccatcttttcatctccctcccccgcttcaccaacttccccatccagacatcaacgagtgcgaggaggagagcatcgagtgtggacccggccagatgtgcttcaacacccgtggcagctaccagtgtgtggacacaccctgtcctgccacctaccggcagggccccagccctgggtaagggctgagttggcagggcctcgtgccctcaggaaaagcacatttttcagtcactgggggtgcaggctggccctgtcattgtcactccccacacaagtgatgcaggcaggaacgcacggagccctgggggcagggagaggccagagtgggagagaacggggacacaggagcacacacaccaaaccccagacacaggaccaccatgcagactcacacaaccccaggacaaaactcagacacgccagcaccaaacccatctcctccacgccactcacagcggccacggacactcatcaagacacacggagacatggggaccttaggggtggcagctgctgccctggaaaggtttctcccggcgggtgacctgccccaggccttacaactagaaacgtaggctggggttggaagcagatgcccgcggcaaggctaagcgcagtctccacctccaaccccgcccccgcagggcaaatccagactgggtgacttggcccaggggcacatcgctcccctgtgtctgctgggcttccctggggcatggatcccgaaagtccgctggagggaccatgaaagggcaggcctctggcttctctgggcttcagtttgttgaactctaaaacgggctagcgtgggagcctgcagagaaggcgtgtggggctctgcgggagaaggacgggcagcgcgtgggcggaactgcaggggctggcagggaggtctgagttacgcggatgggccacgctccgaccgcacccccgagtccgcctgtccgtgtgtctgtgccgcccgcaggacgtgcttccggcgctgctcgcaggactgcggcacgggcggcccctctacgctgcagtaccggctgctgccgctgcccctgggcgtgcgcgcccaccacgacgtggcccgcctcaccgccttctccgaggtcggcgtccccgccaaccgcaccgagctcagcatgctggagcccgacccccgcagccccttcgcgctgcgtccgctgcgcgcgggccttggcgcggtctacacccgtcgcgcgctcacccgcgccggcctctaccggctcaccgtgcgtgctgcggcaccgcgccaccaaagcgtcttcgtcttgctcatcgccgtgtccccctacccctactaaacgggagagggcattggcggccgccctggcgtgacccccgaggaaggggtcgaggagaagcttggtccacgccacctgctgtggcaagcggagcgtcatcgtctcccgccccgtgcgtcagcgagaccttgggtcaacacgaccctgcgcacagccttgacccccgacagcgaggacctgacctcacagagggaggcgtccagggcggcccttgggtggccagtcccgcaggcagggcccggggaagcccggatcagacctccaggtctgatccgcccctcagtgggagcgggacagggacacagggcacctggacgcgcgggagagggggcagaccccgcgttaggggtggcagcagctgtcgcccggccacacctggtggtgtcattctgaaccctgttgcaatataaagggatttttttttaaccaacttggtttctttgtctaattattttgctttgtagggaagggtttgggctgggaaggagaccatgccttctgttctgatccaggagcactgcagtttgagtctaccagcctcctctccttaggagtagggctgcctcaggcacctcctggcctcagttttccgatccataaactcttgcagtagggccctcccttcccccatagggctgtggggctattaaatgaggagtaaatgtgttgcaaagacagcaacagccggtggcaaaaaaaataattcttactttttagaggcagggtcttgtcctgtcgcccaagctagagttgcaaatgacatgatcgtggctcactgcagcctcgacctcctggcctcccgatcctcccgcctcagcctccagagcagctgaaac

SEQ ID NO: 53270 - DNA, 3845 bp, Homo sapiens
tgctcactatggagcaactgccttggatggggtcccaggacttgctcttttactggggctgtggttgcagtgatcagggctttggagccggcagaccaagctgggaaactcctgaggtagagaagctgttgaaggcgggcctggggtcacaactcccagctgctttttacaagcaagagacttctctctgaacctcaaccttccctcctgtctagtgggttcgcagccagacagtcttttactcactgcttactgggtgccctctggagtctgggcaggtgccaggctctgagaagacaggccagcaatcagccctggcctaagggatgaaagccgggccttcccgcgccggctcacctcggttttctcatccttactcggctaccagaggctatggttggggagggagggggctctgggggctgcagaaggcccaggctgccggcaccggatagaagtgagcacgaagctccctgcgccagtggaacttttatcccggctcccaccgcgaagcgtttaaattgcttccccagggccaggaggcaagtctctcgaaggacggctgcggccaccctccgcccctgagttacatgggtcgcagccactgccgccctccttggcgcctccagcccgcgggccagggccaggaaccgcgagccgcctgcgcccccgccggcgcgcccctgggagggtgagccggcgccgggcccaggcccggacctggtgggaggcggggggaggtggggacgaggcctggggaggcgggccccgcccatctgcaggtggctgtgaacgctgagcggctccaggcgggggccgggcccgggggcggggtctgtggcgcgcgtccccgccacgtgtccccggtcaccggccctgcccccgggccctgtgcttataacctgggatgggcacccctgccagtcctgctctgccgcctgccaccgctgcccgagcccggtaaggagccctcggcccctctcgctgcccactccctagccgagagcacccgcttcccgggcccagaggaggaggcgtagaagacgcccgccccggggcccgcggaggcagagggcggaccccgatcgccactcgccggggactgggaccgaggcaggagggaaggggctcccgatgctcaaacgcctggcaccggattccaggtttctggagcgtgggggacgcggcgggggcgcgagtccccgggggcgcgagtccccgggtccgaagagcggctcgggttatttgttccctgcgcagccgggtcctttctggactccttgtcggatccggcttcctctgtgtcgtgaagcccccacatggagacctggggagtccggagcgtgtgggggggctcccgattctctctccctctctcggactcgccgtctgtctccacctctatttctctgcgtaaaaccaggagtccagcccctctggggcttggacgtatcgctttccccgcagcctcagtttaccctggacagatgggcatggtggccctggctcccttccctgcagggggcggcagccacctggccctccccggtggggctggcggcctcgcggcggggtttcctgctggcctgggctgggctctgtgggaggggcagtgccaggaatattttctattcgggctgctgttgcctttggcccctgggcggctgcgccctccagggaggcagggtcattgtgaaagagaggaaactcctctcccaggcggccagggctgttcctgaggagggctggcctggcctcagtattcttctctgagaagtggagagtccactcccgagcagccgagtcaggctgcaggtctcagggcaggaacagacctgttctctccccaggggtagatcaagacctaggggacttgggctttgatcctcccgctcccagcaagcacaaacccagtgatggggagagctggtgaggccttggctcagcctccagattcccaagcttccttttcattttcttttctttctaaaaatttatcagagatgtggactcgtcatgttgcccaggctggcctcgagctcctgggctcaagcgaccctcctccctcgggcctcctaaactgctaggattacaggctcgagccacccaaagtgcctggcccccaagcttcagtctgttagagctggctggggctgagggctcaggaaacatttgcagatactgtgcggctgctaagggctctgtagactgttgggtgctgggcctgggtccaattgcacaataactgtgcctggggttaggttctgatgagagggagggagaagcagccacacggactgggaagcttggctaggagcaggaactggaggagtctccattccaaactccctctccctcccagaccccttaggcccaaggcctagggcggggaagtttgggggtgggggcgggaccctgtcctggcggggccatctgtgcaccatgctgagaagtaattctggttctgctctgtgggggtggatcaagtgaatgaatagtgactcctgcctgctgagcgcctggccggtgcgggggcagacacgtcgtgagagggaaggggaggccccactctcagcacagtctccattcctgagtgcttgggaagcaggcccagggccgcaggagccttggggtggagccaggcccaaaacagcctgctgcacaagcgcttccccctcccaacccgggcccatctcatctttggcctgctgggaggccagccaggtcaaccagatgcctcatctgagcactgactacacagtccctgaagtcagtggcttgcctgtgggcaccaggcacccatgtggaaagaggtaacttcgctggaattcagagtctaaggctctgatttctgatgtagctttgggcaaagttgatcttccagggcgtggctccctccccagacttggggtcgaccaggcacccataggcactttgatatgagtggaacgaatgaatgaatgtgcccttcgtccatcaccaaagacaaaccgagctcagctgagttagaatgtcagcgaggggttgcaggggaatcttccacggggcagtaggcctgagctatagcacacaggctctccagagaaatagtgggcaggttggccatgactcactggggggctggttttctggaaggtgtgtagagtgaaggggagatctgaggtctcctaggagccagggagtggaaggcctagtgcagggaagagcaagtggcctgcagtcaggctgggtttgaagccgctagcttgtgacctcggctggccgcttagcctctgcctcctcctttgtaaataggtggtaatggcagtctccaccttgagaggatgcacctgtgactgtgaacatagtagccgctcttgttgtcattccagctctgacgttttcaagtagcacgagttttccttagtgtcaagtgagcgcccaggctggcctgtttgctggaagctggacagatggctgtggctggggccacagagaatgccatcccaatgaaagccaggtggctctggtaccttgacgcgaggccaccttccctcctcccaggtgtctcttccggggaaggagggctggagggcagtgggcatttgccagggagctggagaaacctgccgtggccctttctgggggatgtggtgggggtggagctgggactaggggaggctgaattcagccaggatctgcctgccaggcgcagctcccaggaagaaagcccaatgtctgggagggtcagaacccagagggctgtcaggttgtacagatgaggaaattgaggcttagcaagccaggaacttggctgaggtcagccatagcagcggtgcacagagcttagtgggcacatacatgct

SEQ ID NO: 53271 - DNA, 2421 bp, Homo sapiens
aggcaggacaggtggctctggggctcctggacctcctctgctcagtgaggctgctcacaggagattgggcggctggaaagtaaggtttagggcctctgggatggcccaggctacctgcaggcagctgagtagctctgcttttgcagagtggttcactgcactgtgaaaacagattccagacgccgggaactcacgcctccaatcccaggtactgcccaccttaagtcctccctgcctgccttcctccctccttccctccatcctgcatggccaattgcctggctgcagttgccatggataccacctgctggctccagggttagggctggctgagtcaccagcaactcaggggcagggggttgaatgcccagtagggacgttgtgggcaccgaccagaaccatcttctctgccccagctgcatggtccatgaggtgtttccccttctaagtccaaagggcagcacaggcctgtgagccccggctgactggcaggtgggaccgtgcagcatgcacgggactgaattctcatgtgacggagctccaaagtccacctggctacacggccaggctctgcagcagaggacgggaggcctgggaaaggcacttcctctccccgagcttccaggcacacagagagtgctcaggatagcgatgcctgcatcactgcaatggtgatggccgggtgacccttctgggctccacttccccagtagtgtctaataaagaccctgggtgactctgaccttgtgacgttggtcagactccagtggaaacgttcccaggcagaacaaacatgccctgtacatttgggaaatgcgggatgctggggccaggtgtccacggaggctggaaccaggaggcctgggcccacatctgcccctgctgcttgttgatccgatgaccctgggcaggtgacctcgtctccctaaccctggtttcctgttcagcaaattggacacagtgaagacgcccaagcccagggccacaggaggcatgtgggggaggggggtgcagggcgagcccaagggcagcccaggattcagggagagccctcggggaagaagcatggctgcaaagatcaggagacaggaggccttggcgccttcgggaggcttcattgtgacggagggtggggcaggatgggagaccgcaggcacttcccggctgcagagggcctggctgcagagagccctcgtgcccatctgtccccccgggaagggccgctggttgcagaggtcttaggcctctgcctgtctatcgccttccctccctgggcctcagtttctctacctccacactgggggaagttggtctctgagcccctccaaactgggcattggcagagttgaattcagaggcgctcacatttggagacacgatgtctaaaattccagccagtgaaggttccatggggttgcaggtaggagagggactggggctgggcccctgccccacagcatccttctccacctgcaggtgggcggcggcactgcgtgctggggaagcacagattcttgtgccctctgtgaccttgagcctgccactgacctctctgagccctgctggctgcctccccaataggaatgacaactcctacttcatgaggttgtagtgggggctcaggggcacagggagatcccgctgaggctcccagggccctgcctggtgcttggcaaggagcagttctgatgggggatgtgtcagctgccagaggctcagagccaaggcccctcccacatctcctgcctgcgtgcattcctcacatcctggccttgggccaaactgctcagcctcagccgccttccctcgatgctggaggatcaggtccaagagatgcctctccccgaccagcctaggactgcagtcagcattcccaggccccagtgtggtctgtggggctgtgtgcagagtgtgcgaggtcagggttcccgggggtggcaggcactgaaggtgaacatcctgttcccgaccttcagtggcagcttgcccaggagacaaggctgtccaaggccaaggtcggggctgggctgtctgcaggggctggcggggggcactggctgtctcagggtcactcaggttgttcctcgactcccgccagacgctatgtccagcaaaggctccgtggttctggcctacagtggcggcctggacacctcgtgcatcctcgtgtggctgaaggaacaaggctatgacgtcattgcctatctggtgagggagcgacctgggtgtctgtcttcctgcgtgtcctgcaacctgtcctgtctgccccctgccagcctctgtctgggttgtcagcctgtctgctcaccgtcactcattcaagcctggcctcttctctcgaagcctgtcttgaactggaactaggaaaatagcttctcgttgtactgcctcactttctccatctgcaaattggccatcctt

SEQ ID NO: 53272 - DNA, 1816 bp, Homo sapiens
aaacaagtggaaatcgcccagcgggagggggccaagtatgtgtcccacggcgccacaggaaaggtgaggcacctgggaagggccgggcagagggagatggaggcggaggggtgtgggaaggagatgagcacccctcgagcggtttcctggtgtgcctccggggcagacttggtgcaaggcagctacatggctttgtttagaccccaatgagaggggtaacagctcgcccctgcgctctgtgcactgtggcacctgaacgcccattctgagtcctcacctccaccttctgctgtgggagcgatgtcaccccatttggcagacttgctgctgaggcctggggacattgtccaaggtcgcattggccaaggtcactgcgtgagtcccccaggggacacgcaggaaagtgttgaaaaccctgagttggcagagtagggttcaaaggcagctctgctgctggcttgccgtgtgtcctcagccagggcccttctccccttcctgaacctcagtttcttcatttgcaagatggggctcatgccatgtcttagtttcccagggcgagggtaacaaaatgtctcaaactggtggcttagaacacagaactgttctgcctcatggttctggaggcctgaggtccatagtgagggcatgggcagggccacgcagcctctgaaggtgccaggaagcctccggctcaggcctctctccagcttccagtggcctctggtgtcccttagcgtgtggctgcgtcactcctgtccttccgtcctccatcttcccaagctgtcttcttcctgtatctctgcattgtcttccctctgcttgtctgtttaccttccccttgctacaggaacccgtcttggattagggcccttcaatgacctcatcttaacttggttactttttgtgtgtgtgtgtgggggagagggacaaagtctcactctgacgcccaggctggagtgcagtggctcgatcttggctcactgcaacctctgcctcccagattgaagcaattctcctgcctcagcctcctgagtagctgggattacaggtgtgtaccccaccacacccggctaattttttgtatttttagtagagacggggtttcgccatgttgggcaggctggtcttgaactcctgacctcaaatgatccaccagccttggcctcccaaagcactgggattacaggcgtgggccaccatgcccagccttaacttggttatttctgttaagaccacatgaggccacattcggagggactggggttaggacttgaacccattattttgtggaaacacaaatcaacccatcccgtaccccttccctccgggccgtgtgtcccagtgcagactgcggggtccccgtggggtgcaagacaggaagccccctgcctgctgctcttcggaaggcagtccttgagaaaccagattcctgacaatgttggcaactgtcagccgatgtttttataaagacccaagtcatgagctctcagtcagcggacagcatgccaagagcctggtacaggaattgactgtttaccaaccccacagtcagaaggctcggaaactccccagtgacggggagctcactacctcgcctgcccgggctggtcagggtgctgatggtgggaagtcctggctcactgtgggaggtcctggctcactgtggtgcagggacacacacagctaagatgatgatggaggagacgcggttgatttgagggtggcctgggagacagccacccaccaggatggcacctgtcatgtctttgaaagtccaagtgttcatttcttcaccggagcactggttcagcaagct

SEQ ID NO: 53273 - DNA, 1044 bp, Homo sapiens
tcagccaggctcagagtcttcccccacttctttcccttccacacccagagaagtgggtggggggcagcctatgcctctctgggcccccgaccacacgtggggccaggccagcagcggcagctctgtggactctccctgggtcacggcagtggccctgtggctgaaggtgctggcaaggaccatgaaccccgtctagttcaaactctcaggtctcatctggggagactgaggcccagggaacagggacccccttctcaccccaacacaccaccattctgccatggagtgcaggctccgtccagccagccccggtgagggagtctgtgtccttcccctccttcatggggctccctctcaccctcacaacagcatcctctctggggacatgctggagacccccatgggcccctcccaggagaggccagctctgcagcttacaggccaggggaagcccacagctcggccctcccggctctgaccccttgtcctatgtccaggtcattgctccctggaggatgcctgaattctacaaccggttcaagggccgcaatgacctgatggagtacgcaaaggtatggccgagtctccccaccacccccaacctttccctatagcccccttcccgggcacgtccctgctgggggctgtctgagccagtggcctaggccgggactgaccccatgtgatgggggattgaacttccaccccagctgcctacacacgtggcctctgtcccctgggctgaccccacagaggtgtggtcatctgccagcccgttgccagggcggagccgctctgaggccatttcccagtcccccgagccagaggacacagggctcactctctctcctgctccctgggaggcggagaccagagccctgcttgccacctccgcagtgtgtgtgtcttggtgtgtgtcacttggggggatggctgggggatgtgatggccggccggggggatgtgatcgggagctgttctcccaattccctggatactaattgcccctagcgctttccccgggaacaggtaggcgctccaagg

SEQ ID NO: 53274 - DNA, 2834 bp, Homo sapiens
gcctcccaacaccgacccccgctacccctacctcgagaaccttgagtcagctttgtcccaaggctggaattctgcagacaagggtctgattcagagcaggacatgacaagggaccccatcctctcagaggctcagaggctggccttgtggagtaggaggcatctgagtccacgtgccctaagtgcttagcacaaccataattaatgaaggcaatgggtgattgattgcttcggtctggcccctccctgtggacaccactcttgctcttccttccttggcacctggcccagcatctggcaggcagcaagggcttaataaatgcctgaacaaatgaatgagtgaatgaatactgttagtactagtgggtgctcaccatgtgccaggcaccagctacattatttcatgtggggccaaatgtgacactgagagctaaccaccatcacgcatttcacaagtgcaaggctgaggctccgagtgcaggaatactggcctgggctctctggtggcgggtggcggaaacaggacgcaaaccccagtcagctggctggagtgactgccatggttaggaaggttgggaggagcagctaagggtggagagccccaaagcagaaggctggtgagtctgagaggtggaaactgtagagaggtaaaatctgctctgctgagtacagcagcagtcaacccagcattttccatgacacactggcagtgggtgcccaggtttcaggatggattaggtaaggtctaactggttggacacatgaggggaaaggtgacttggtgggcccatctcgctgtgaatgctggaggcctccctgcagcttgcgaaatgcccttgtgctattgcaattcacaccccaaggcctcctgagccttcaggtcactgcatgccatccacacagtcccaagggcacagctggcttggacgagttacccatttacagacagagtgctctggttggtggaattcatagggctagttctggggtggctgctcctagcctcctgccacattgtgtagcagggaagaggctgctgtgtgctccactagggctctccaacctttgggtgggtgcctggcccagaacagggttccctgagttgtacagaaattcaatggaaagccgacgtgcagggagggtttggacccacacaggggaaatgccctggcatctgggaggtggggctgcttctggccccagcagtcctcccttcaagcagaggccagggccaggctgagctgacaagcttctactctccttgcagcatgaacgtgcagggtgattatgagccaactgatgccaccgggttcatcaacatcaattccctcaggtgagaagctcagggccctgacgggccttcagagcctccaggtgtaaagggtaggctttgagagcccccaggtgtaaagggtaggctttgatgcgaccttgactgctgccctgccctgccctgccctgccctagacaaaccccactttcctgtccatctgcccatagcatcctcagaagcatgctttgatagccgacagtaacagagggtcctaggcattggggtcctaggttcctgtgtcccaccgggtgcctctgatacttgccctcccctcccgctaagccacagggactccactatgagctcctttgcagggcaggttaaacaaggaaatagcatagaggtggagagaagcctttgttttctgtcaccatacctgagctgtaggtctagctggaagccatcctagccacgtggatctccatggcccaggagggtggtgcacgtcatctgaagtcactcagacctttgatcctctgtgagtcaccagtaagagtgtcagctgtacctgcctcacagatgcagtgaaggttcaatatgagcctgtggaaatcaagcatgcggctcaggcttagaccctggcatgcaggaagagccaggggcagtgccagcagcaagcacactcagcccagggccggtgtgctcaagggcaaacagggtcgtttgtcaccagcagctaacatagactaagctgctctgggacactctcctaggatgtctcatttaattcttacacaaaatttgcaactccccgggaacaggctgagtggttaagtaactttccaagggtcacacagctaggaggtggtggagctgagtccggagggcctgtcctgctgtgggttctccatcaccagctcccttctcatggggattggagtctagaagaagatgcaagtcagtctcctcttgctaacaacatgccctgggcacagagccatcattttctcccagagccagtctcttgtccctggaggcacctcatgccccgagagatgttgaagcccgcccatctgcccagggtcctctcccttcccctccgtcacctccacctcccctgcctcctgcgccctctgtttgtattttatgactctataaacccttttaaatggcccagaacaaacagggcttacatagtggcctcttcatttctcctattgccagttaaacgctttgtcttcaacaatgacaaacaatgttttccccctaagataaattaattacattatcctgattggagggcaggaggggccagggcgggagagggaatagaaaaaaaggcaacttcacacacatcttaacaaacagctgccccagccaccccagctctgcctgaattaattgaacccagtgtgtgttgttattgttaatttacatttttctttgttttgaatctggtttacaggctgaaggaatatcatcgtctccagagcaaggtcactgccaaatagacccgtgtacaatgaggagctggggcctcctcaatttgcagatcccccaag

SEQ ID NO: 53275 - DNA, 584 bp, Homo sapiens
tgcggtgcccccgctacatgacgacaagggagagcagatcaaacccagcctggctgcagctggcgaacgctaagaatccagccgctcagaccgtggtctctcacttccctggcatgcccttcactgcctcctcccgccccgtcctcactgtccccactgtccccaggggaggcaggtccaccctcagatttaccagggcatgttaagacacagtttgaagccatctccgaggtcatgaggtcatggcagtttcccatcgatctatttgtccctcccttgcctgacgccctttgcccccatgggcccccagagccatatcaaacttcagcagtttctcccaaggtccaaggagccaaaacacagggcagggccttaaaacacagccagcgggcgatttaccagctgggctgcccaacccctgacctccggaggagatgtaatgcatctccctggtttagccggatcaatggtgctgtgaaaaacagccccatgtgggccagttgggacaggagggagacacccctgccgccagaaatcccacccggacagccgcggagtcagcctccgtgcacacgcacggcccc

SEQ ID NO: 53276 - DNA, 441 bp, Homo sapiens
cgattcttctgcctcagcctcctgagtatctgggattacaggcacagccaccatgcccggctaatttttgtatttttggtaaagatggggttttaccatgttgaccaggctagtctcaaactcctgatctcaaatgacccgcccgcctaggcctcccaaagtgctgggatcacaggcatgagccgccgcgcccggcctgcatcatatttcattatgggaatgcaccacgatttatttcacaacttctgttgacagatatttgggttgctcccagtttctggctattgaaatagagctgctagcacgtgggattctggatcagattttagacaatccaaagacattaatgaaaaaactgatgaaatcaaagtctgtagtttaattagtaatattgcacccatgttaatttcttagttttgacaaatgggccatggttataga

SEQ ID NO: 53277 - DNA, 2429 bp, Homo sapiens
gacacagtgaggggtgagggtggggtcatcaaggaaagttatatgggacttttttccccaagaaagggtcttgctctgtcacccacgctgtactgcagtggcgtgatcatagctcactgcagccttgacctccagggctcaggtgatcctcccactccagcctcccaagtagctgggactacaggtgtttgccaccacgcccagctaattatattttttgtagagacggggtctcactatgctgcctaggctggtcttgaatttctgggctcaagagttctgcctgccttggcctcccaaactgctaagattacaggcgtgagctaccgcacccggcccgtattggattttatttatttccttttcttggtgctcatcctccttcacaacttcaagatgggcataagatgtttgacaacatggttcttcattaagtccaactccttatcataatagggcttgggaaatattaaacacgagggcaatcgtgctaacacaaaaatgggcgccccctaaaccttgttacttgtttgctcacttataagaagagccaactcaaaggctcaactgaattctagcactaagattccttccttgctgtagaagatctgtacctggtcacttccattaaagttacataggcgttccaagaagcctcctgcaatacagttgtgactcagccggtatgggagtaatgacggtcctgtggtatttcctgcacccccagagtcccagagtttgttaaggaccgtgtaagaggacaccacgctggcttttcagtgggcgcgtctctcctgggggcatcaccagacaaccccaggcggaagtggcggtggcccatcctcatgcaaactgcagtgtaagaactggggcccgggactcctcgcaaatgtgggacactgacattctgtgatgctgtcccaatgccctttcaaagcgctcagcccccaaattcccaaccaacagccatttcagggaggggctacccaggaccaggcttttgatgaaccacgactgttcggggtgccgtcttgggagagccacgtcagtccctctgagattccaaacggccgacagcggacacctcgggaccacatccaagcctcggggacctgtcaagacgccatcgacggtcctggaccaaatcccgcccgggaagggaagggtcgcgaccggaccctggagacccacggctgcctggcgatctgagcccaccccggcgctgccgtcccgcccccacttccgatcggtcgaaggtcacgtgccctgaccccgccccgcagacgcgactcctccagctgcgagcgtcccggctttcccttccgccggaagtagggcgactttccttttccggctacgggtccccaagcggagcgggaggccggaccggggagccgagcggcggcgtcggcggcgtcggcggcggcggcgacggcggcgggggcggtaatggcggagctggtgcaggggcagagcgctcctgtggggatgaaggccgagggcttcgtggatgccctgcaccgggtccggcaggtacgggcgcagccggctggcaggagcacgagatcccgaggcggggcctggcgggcggggaagaggggttcgggcctggggggcgggaggcagcctgaaccgacgtctcagccgggccgggccgttccgtggagttcctacagccgggaggagccggggggataaggcgccactgcgaggcccaggcccggcctgtcgggcgggtctcccaggtgcctgaagtcgctgggaaagggtttgcttagagcgtctggccccatcgtgccccagcggccagcctggacccacagtgtagctagcgcggggttctgaacctcgcgaggggaggggtccgggaagcccacggggaggatctgggtgtagacataaagcagctgtctgacgcccagtagcttgttaaaacttggggaacatcgtctttagactttctgttgagtagaaggaactcgagggcatcttatatgtgagggtgctctttggagaggtgagagagggaggtgttacatgtgtgggggtggtccccaagatgtagaaatttctcatggcaagcttgcctctactggggagaatgatatggcctcattccgacattgaaactttactgtctgacaatgtcgtgcatttaatcaaagttaaattaactgggttttagaaggctccaggcttccccagagagtgaatatgggacctgccaaaaatacttactggcttctggcatggtacttagaacagaacgtgttcttcatttgtatctaaaacttacttacaagtcagccctaacacttcagcttcctcggttaagtgtcttatgtcctcctctcttcttatgtaattgtaagcgcactgatactttaaaagttgggctataactaattactgcttgattcctaacagaa

SEQ ID NO: 53278 - DNA, 1634 bp, Homo sapiens
gtccatgagttcaactgttttgatttttatattgcataaataagtgagaacatgtaatttttgtctttctccgcctggcttatttcacttaacataatgatctccagctccatccatgttgttgcaaatgactggatctcattcttttttatggctgagttgaagtgtttttaaatagacccaaataacacctccaaaaagttctagaggactgaactttaacctcgtaaaggttaaccctgcttcaagggaaagttagaaagttcatgttgctaaagaagtgatctggtagcctctgtcaaagaaaacccaagccaaaccaaacaaacagctacacagcctttggaaatctttattgctaagaaaaatgtgccagaattccggccgcttggtctgcctctgcttttctaaacttttcatcacgccatcagcaagactgtgagcctagaaggtggccaggtaaacatgaacatcacttcccttcacaggatctgcttattcacattctttgtctcttaagagagtggcccagtgaccttacccctaccagaagacaactgacaaaaaggggctgtggcagtccccagacgctgagatcaacacagaactcaaattctacacgtggagaacagcttggagaaaaaaacaatatgtgtaatcctgttatttaaacagtgctcaacagaagacacgattaattttatcgagctgtaatacagaatgtaagaagcctgagggaaattccttgttcttcaaatacagcctgttgttacctaagaccgggtgttcagggaggatgagagattcagcacgacacagaaactttccttcttgctataggagggcttcatatttagagggaagaaaaagataaaccatggtcattttctgtttgtgaagacttattccccaaaaggtagacatggaaaaaaatatggttatcaaaacaagtaagtgaaaatacgcaatataaatgaacccgaggttttaagtgagattctggacctactgggtgatctttggccaagtcagctaacatctgcctgtgacccagttctctttatcaatactgataatctctttattagtgctaatttctttcaaatgtatgtgcaatggactaatgggagaaaaatgtctgcaaaatgctagagggtttcatttgcaaatatttaggtattccttatgcagaggacgcagcagatacctgctcactgcaagcacaagttttaacccttcagcgccaggcagtgggtgaaaaaaacaaggctgaattgtgaaattgttgtgaaaggctgaatgagttgtgaaatatattgatctcaatttctggaaacactgggccaaagagacactgtccgttagtgaggtgtgtgcacagaggcagacaacttagttttgtttttacgttgctgtctcaagaggaaccaaagtatgattgcctcgaaaaggtaaagaggttactttgcattacagctttctgctaaggcaaaaatgcagttaatgcaatcatccctatttggcctagggaatcactaacaccagtcaaatataaaaagatcacagcgtactattttggataagtagtttaaatggttatcttagttccagtggccctggggtggattttctgt

SEQ ID NO: 53279 - DNA, 1804 bp, Homo sapiens
tttttttaactgatccttaccatgttagtattatctccatttcaggaaggagaaaaccgaggcgcagttccatggtacagagtaggcattcagtaaatgtttgtgggatgagttaatgaaaggtttgggggcaggggtcatcacagttgctcccctttacagaaggctgctccaatccaggcacctctcaggcactggctaaggcaggtcgggtgcttagcgcagagacctttcatagacgtcttttctcatcctctcgggcaatcgtacgcccgaaaaggcagtgctagctttccattttacagatgagaaagctgaggtttagctaggctgagtcgctaagtccccgaggtctcgcatcgcgatcgggagtccaactccctattggaccccccagccggggtacccttcgctgtccctccagtccgtctgccaccgtccaagcagcacccaccctcaaggacggaccggccccgggctgggggcgctgagggcccgggctgcggggcgccggttctaacggggctgctctctccccttctccgtctcccttcccccgccccgccccgccccgcggccagaggacttccacccggcggactcggcggctggccccgcgggccgcatgcgatgcgtcatctgccaccgcggcttcaactcgcgcagcaacctgcgctcgcacatgcgcatccacacgctggacaagcccttcgtgtgccgcttctgcaaccgccgcttcagccagtcgtccacgctgcgcaaccacgtgcgcctgcacacgggcgagcgcccctacaagtgccaggtgtgccagagcgcctactcgcagctggccggcctgcgcgcccaccagaagagcgcgcggcaccggccgcccagcaccgcgctgcaggcacactcgcccgcgctgcccgccccgcacgcgcacgcgcccgcgctcgccgccgccgccgccgccgccgccgccgccgccgcgcaccacctgccggccatggtgctgtgagcgcgcccgcgcccccgccgggccccgcgcgctcctgggtccccggcaccccggccccgcagcgcgactcgccctccagccccaacccccggcccggcgccgccgcggagccccgcgcgctggggttgcgccccggaggcggatctcaggcacccccgccttggcccgtgtcgcagatgaggacactgagggcggcgtccctcacccaggccacgcagctggtgcggctgttcggccgcctcctctgggagggggtccccctgcctggcctcgcccccgagtctccctgctgctgtagagccgggcgcccaggccggcatccccctcgtgggtggcaggagagcggacttagagcccccgagggcccctcagcagaggaaggggagtcccctcctccgccaccgagagtcctgtgcttcggaatgaagggagggcgacctccttgtccgggtgtggtcgggcgcgggggttgtgggggcgccatctcctcttccggcccctgggactggtgtcctgaagtgtcgggagtccttacgcaaccttgacatgtgcgggctactggggtccatcggcagcgggaagagacccggagagatgcatcttctgggcccttctctcctttaggccagcttacccccaaacctggctcctggggacggatgaggaaggagctctttgcagtgcaccaggcacgttgagagtggaggcacaatggaaatcctctgtgggaccccgagcaagaccctgcacctctttgggcctcagtttccccatctgtaaaatgaaggagttggaccaatg

SEQ ID NO: 53280 - DNA, 1653 bp, Homo sapiens
ggggagttaccatccccaattagtttcttgtgaatgcagggcaaggagagggagagggtagtgggggacggggagaaggggcgaggggtaccctcctattaaaacggagccgcagaaaaacccacagagacatccgtctgttccccgctgagtccttagaacagcgcctggcacacagagagcgctcaactcgctgtgtaactaaatgcaagccaagatcttcgcattgtgtgtgctcttcccttccctaccaaatatacctggcttgcaaggtttgacctgttttcttagacgatttttaacttgtttccaaaagaaatattggagtaaattagcttgttcaaaggagtccttatgaaaggacagaaccaagtgagaagtatctggagcccggtttggggttatagatgatgatgttgagccagcacccacggggcggccgcaatgtagaatcctggcgctactgggaaccgtgtggaaaggggctcttctttctgttcaaatagtgttttctgtagatcccatctctccatcctcctgagctctctcttacaaaatatcggatttcagcagcttagaattggacagaaactcagaggtccgtttctcaattatctctaaccctggtaaacaataaatgggatgatgagtacaagacagttttggtaaaaagtcacacgccacacaacgtgagattttattattccacgggtgcttccttgccaatagtagacatggcagctcggctcccttcccttcgggttcgccttattgttgccaattgtaaacatggcctctaggccgtgagttctcattggcagctgctctgagtccccgcccttccccgcccctccgaacgcggcctggagttgtggagtcggatatcgcagctcccgactgagctgcgcctgcgcaactcattggcgccaagatggcgatggagatgaggcttccagtggctcgcaagcctcttagcgagagactgggccgcgacactaagaaacatctagtggtgccgggggatacaatcactacggacacaggattcatgcggtacgtggggacttgggggagtcgaggcttcagagagcggcttcagggctctctgcacgtggtccaggcctcgtatccctgtgtgtgtaactccccgcgggacccagggcacttcgtctgagcatcctacacacctcgcttccgagcctcgtgcttcttgctccctgcatcttgtgtgtccccgtctgcatttgtctcagctccctgaaaccctccactcctgacctccggtggctgtgacttttgggtcttctgcctgaagtccaaatctttgatccttccttgtgggagacctggaaagctggggagggttaggtgcaggctcttttccagttttcagctctctgaggggacggtgggcgttcttggctgcctcctcttcagtttagaatccgtaattgttcgatcttagggcaaacagttacattgtgctgcatgcacccatttatacacattttgaatctaaggggtgtagtgcagtgtattgtggttaagagggaaggctcttgagtcagacagttggggttccggtcctgctaccatcacatcttattagcggcattgcctctccacggtcagtttcctcatctgtaagatagt

SEQ ID NO: 53281 - DNA, 1728 bp, Homo sapiens
ggcgtgagccaccgcgcccggcccgctagttctaatatttatgctttttggagggtgaagggcttgaaaggcatcaaaaaccttggtttctaggagcgagccaaattttctcccttagagactgaaggaggttatccgactccgcttccaggaaaatccaatccgcaatttttccctcgctttggctcttccaggtctcactactcgcgccggggagacgcggtccggcctacgctaggccggcaagaatctaccaggtcccaggagggcggggccgagccccagaagtcggggcccgggccaggagtcttggtgcaggcggactcgggcgcgtgccatgggaccacaactcccggcacgcaccgcggactgcgccgaacacggttggctgggagatccaaccctactgctcccaccggccaatgggacggaggaaagaggcctgacccggattctcggaggccaatggcaatacagaggaggcgggtgcttccttaccactcaccttgcgctcagagaagccacatttaaaaggtcgtgccgggccgggctttcgcaggcagtgggaccagagccgggaggggcggcggtgtcccgggaaagcggctcttggggcatccgggtcccctcgaggcgggctccggacgtcgccgtgggcggggccgagggcggggcctggcctcgttgtggagcggctcgtaatccatcatggcggccgcggggtttggtgtctgtgcctgagcagcgctggagccggagccggttcccgggtcctgcggctgaggagcccctccgctgtccacggcccctaccggcggggggcggctgggtccctcggcggagctcgggagatgtgactgcctgagggcggtggtggtgtcagcgtccggggccgggggagggggtgtctcgggcagagacccccgggcttggggcagctgaggcggccgggcctcctctacacggggcccgccttccgctgtctgggccgcgagagtccttcgtcccttacagccccgccccggctttgggacactgcgggtggtctgtttcccccagcttgggacaccccgttttctgaggcgtggaagagcgtcgccccggagtaagctgcccgtgccgcgccccgacagcttccctcagccccaagccgccccttattccggatcccggccccaactttggccacggagcctcccattcaaatccctcccttgctgtcaaggggtctccccttcccccaaggtggctcccgcgagcctctaatgccctgacttcttccaatgtcacctacggcccccttagtctcagctcagccaaaaactttaatgcaaaggaaaagtctggattggttccacaggccttttaaaaagcggacttaaaagttgctggcaatgcattccttttcgtcagagtcgagggcaaactcgctgaaatctgggtgacccgtgtccttttccggagagcaaagcagagaagcgagagcggccactagttcggcaggaaatttgttggaagatgaagaagctaagatagggggttggtgacttccacaggaaaagttctggaggagtagccaaagaccatcagcgtttcctttatgtgtgagaattgaaatgactagcattattgacccttttcagcatcccctgtgaatatttctgtttaggtttttcttcttgaaaagaaattgttattcagcccgtttaaaacaaatcaagaaacttt

SEQ ID NO: 53282 - DNA, 1252 bp, Homo sapiens
accgcatctctacagaaaataaaaaataacaataaaaaatgtgtagtcacaatgttaaagtgaatcagaagagttgctaagttatgatcctttaattgaatcaaagttttttgtttaaattggcttgctgaggagtttccagtaaattaataatgaattatgtaattaatattatgttaatattaaatgttattttaatcaggtcactgccctgcatgccaacttccactgaagtgggaatgtttcacagtgattcagtggccaattagcaatgctcagattcgccatttattgagagattcacacacacacaatcaatcaaacattcacaatgtggttattaaaggctgtaattagggggacaatgaaccacagggatggctcagaaggtcagagcactgatggaccctcaagtgggttggaagtcccttggatgctagtaagtgaggagtggctgttcctctcctggagagccgctgggcggcaattgtcatgctaggaggaggcctcagagttctcatgggcaaagattccaaaggcgccccagacatcatcagctccttgctgtgtgtatgattctccaaaggtctgcccagtatcatggtctcagccagctcttggctccatttttccatcggtggtggtactatgccacagcaggtgttattatctcaccaccttattctattagacgtatgtttatcacttcgaagaaaaacaattttactatgatctcagttgccaggctagtacacatgtgcttatcattctttgtttgcttttcttttgagtcaaggtcttgctctgtcacccaggttgaattgcagtggcacgatcatcgctcacttcagcctgtaattcctaggctgaagggatcctcccacctcggtctcttgagtagataggactacaggtgtgcaccaccacacccagatttttttttttttttttttttttgtagagaagggtctcactctgttgaactcctggtggcctcaagggatcctcctacctcggcctcacaaagtattggaattacaggtgtgagtcactgcagctggccttcacttatcactgtgaggagtaaacagctgcatggtgggcttaatgccatctaacacgagtgactccatgttcagacagtaggatcacaaatgattattatatagcaatgaatggccacaggtacatagactaaggagccacatccctgctcctgggatatcctttagtcaaagggctagaagggtcc

SEQ ID NO: 53283 - DNA, 1572 bp, Homo sapiens
accatgccagagtaacagttaccacactgatatactagttaccatcccagagtaacagttaccgcactgatgcaccagttaccatgccagagtaacagttacagcactggtataccagttaccatgccggagtaacagttactgcactgataataccagttaccatgctggagtaacagttaccacactggtataccagttaccatgccggagtaacagttaccgcactggtataccagttaccatgccagagtgactgattttgaccaagacctttgggttgtacagaaggggtgagaccatacctgtcctcaagcatttccaacctagtgtagagaaaaacaggagcaagataagaacaacgtactgaaaaggaaattggatgagggcctggaaaaaggggtaaagtgagctggttgggattggtgagtgccacagcttcctgccccttaacagatcagtgccatggtggctgtggtgtccctggcccagaccttctcagacagggcctgggtgccctttacagagcagttgggaagagaagggaacctagccttgtgaccttttgctccacagacctagtcctttgttgtggtgcgaggctcagtcgtcagcccaccgagtcatgtatgttctctggttgcccctggttttggctgaactcaaaggatggctgtctgtgaggagtactggtactttttgccacttgtgtgccctaactgtggtggatgccattttggggattatgctcagcagtgagtcacgtgagatgcacacgtagcttttcggtgattaatccaggtcaatgcccttacccacatacttctgagatgtactgatgatgactacatttaaagctttttctccattggctagaagttgagacccatttcaacaaaagcacttccacctctcctgaagtgcattgggaaaactggaggccattactagatttacagatgatgggccgtgcttaaataacccatcttagctagactccaggtttcgtcacatattccctacctgttgctgccattgagggctttctctgtgctaggcactaccaaataatgctttggtaactttggtaatttggtaaacttggtaatttggtaaatttggtaataaagagcctttattctaaagtgcaaatctaagtttggggttcagtagctcaaaactctctggtggttcccattatatagagtaacagtcttcattttaaaaaaggtcatgtacccttattagaattttgtgagcaaacaaatatgtgtgtatcgtatgtatgtttatatgtatatcagatgtacgcacattagtatgtgctattaagatactttatattatataatatatactgtataataccgtatattataaagcattcataaaatgaaaatgaagatgaaataaattgcattgtaaatatttaaaactttaaaaaatgcgttactggtacaaaatttttttgtttctaaaaaattattattaatgagcaatgggactgaatttgcttcaccgtttttttaaaatcttgatttaacatttgtcatacagctattttaacatctt

SEQ ID NO: 53284 - DNA, 2261 bp, Homo sapiens
tccttggagccaggcagacctgggttgagtccatctccgcctgtttccagctgtgggcaaggtgtctgacttctctgagcatctgtggggtttgtttgtttttaaacctgaagaattgggataatctgtttcctcacagaatcattacgcagatgcaatacagttaatgaaggtaacatggcacataggaagagcacaatacacgtcagctcttactcttcatggctagaagatgtggactaaacttccccctttacagttttgtgattaacaccatttatgaaagaaataaatgaaataaattccttttcctgtcatgaggggaacttacctgattttattgaattatttggtgccattgagttccttattgtttccctctgacctagatttctgggtgtgcgccagtaacacgactgtgattgttgctgctttataacattgtctgtggtcagtccaaacaagagtttaaaataattgaatgaaatggattttaaacaatggtccccccaccctcaccccgtggcactcggccaaaggaagaggaaaagttctctgttaaagaaaatgaatcagagaagaggcccagaccgtgcctccgaaaattctcattgtagggactaagtcctctcactctgaactcacacccgtctgttcgcagcctgacctcatatcctggtctggatgtgcggcctcaccggggtgtcgtgcgcacgtgtggttgtcctgtgggtgccagctctgacttcctccccagacacccactgcctcagccttaatcacaggacgcgcgttgagtagaaatgagaccagttagtattggtaactgcagaggaatatgcattttcaccagcgttctcgggtcagagggtttgcctggcaccgcgtactgggaaactcgccaaaagcggtgcaggttggagacgccccaggccgcggtggagttgcgcgcggcttctaaagtggagtggagcaggcctgcaccctccccgccggggctgggacggcgcttccaggcggagaaagacctccgcgggccgcgcgcggccttccccctgcgaggatcgccattggcccgggttggctttggaaagcggcggtggctttgggccgggctcggcctcgggaacgccaggggcccctgggtgcggacgggcgcggccaggagggggttaaggcgcaggcggcggcggggcgggggcgggcctggcgggcgccctctccgggccctttgttaacaggcgcgtcccggccaggcggagacgcggccgcggccatgggcgggcgcgggcgcgcggggcggcggtgagggcggctggcggggccgggggcgccgggggggcgcgcgggccgagccgggcctgagccgggcccgcggaccgagctgggagaggggttccggcccccgacgtgctggcgcgggaaaatgttggagatctgcctgaagctggtgggctgcaaatccaagaaggggctgtcctcgtcctccagctgttatctggaaggtaagcccgggccgcacgggttgggctgagtagccgcgcgccctcccgctgctgctgggcccttcctaggcctcgccgcccgcgcgctcccgcctgcgccctccccgggtcttgtcttttttttctttcttccctcttctcttctcttctcttcagttctcttatattctgtctctctttctttctctctgtgtctgtctcttttctcttctcttgtctctctctttttctctctctctgtctctttctctttctcgcgatggcccctaggcgccgccggcggagcgtggcccccagccccggcaccagccccggtagagccacgccggatggtgacggcggcgtccggggccccacagtgcgggctcccccgaaaaagtttgagaaagccaactcgccaggccttaacatccctgggatcccacgttgtggaatttccaccgttaattgggactgtgtgttaaaaagatcgacccgtgtttgtgaaaacatgcgatttccattaagcatcatgtacacaaggagcaccactctaccatttatggatacagaatttcaagtgatctttccatctcccccacccccatcttatctacagaccacgaagaggtcttaggaattcgctctcttttcaggggaggggagcccatttaagaaggcgtttccaaggagtcccccagagtactggggtgtcatgttcgtttccttaagtgaagctcagggccaggagggcttcacttttgcgttctttctacc

SEQ ID NO: 53285 - DNA, 1551 bp, Homo sapiens
ttcccggggatgtttttcctggaggtcaagtccccccttgggctgtgaagtagccggtactggggttcatgggcatttcccttccctgactgttcgccagcgtctggcacagcaccagcagcccctggaagtctaggccagatatgccatgtccgagaatcttttgtaaacatttttcatcagtgactcacagctttgagaaaggattatttttatataaaacgatctttcaattttactttaaagacccaaaccattttcttagaatactgtctaaacaagttaatcatgcacagatccagtgaattctgtggcctggttcttataaaatttccaaataattttatactgtcatagacagagccagagctttttagaggtttgaggcattttttagatgtattactgttctcggtgctcaactagctaattagtgattttttctgagtttagttggtgagtggaaacctttttgttaacattatgacaaaataacaatatggttttaagtggagtgagaggcacttttgaagatccagatcttagatccagatcttaaatctgtttaaagtatgactcagaaaggaggctgcagaaaatgttcactaaaaaaatttaagaataatagcagatgctaaaatttatttcccaagacaatagccaaaaagatctgctggaagaacagaagaagggaactagttggggcatcttttttttttgaatgaagccttcagccttctttaggggaatcttgcttcctgacagagggaccggtggaaagtttgtgtcttaagcaagaaagatttaagtacattctgcaactttggccttgtaagctgtgatcatttttaaggttgacgagcatagttcactatgaaatgaagcaagtaacttggcatttatacattgtgagtcaattttgacatcagcctggattgggaattgactggaaggttttggtgttggactgtggctacacttcagtgtctcggtccagaggcatgcatgagcaatacttccctttgggctttagccattaatttgtggaatagagcaagaactggagaggaaagtcgagagactgccttggatcgcctgacgtcctgttgaatcaaaaagcagtgggaggccctttccttcctaacaaaggcctcatcctcttgcataacattcccagcatctgtcgacatgttcgggaccatcccactttaacccacacttcaagtggatggccacctctgggcggggatctgcattctgcttattccaggtgttttccaggccacttccccgattatgtaactttgatcaaatccagatgcggcagaatgtttgatagaagaggtcaaatggcatttgagaagaaaagcatttctgtattcatgactttggtttaatttcctgtgtgggcctggtctgccaaagttgtatgctcatggccacgaggttgacgcaccagagggaggcactcaagtgccttttcaggacagcctgaaggaagcctccctccccagcatgctttttcatgttaaattatcaattatgtaagtt

SEQ ID NO: 53286 - DNA, 438 bp, Homo sapiens
aagagggagaatctgcctaagatgcctctgtctaaaagctagtatgtgccaggtgggtttgtttcattccaggtagagcacagggagcttatgtgaccaggcagtgtccaccattgggcaacacatcacacttcccttggcgtcttgcctcctccctccccgtctggcacagactctcccatcagccgtttgggcacctggggacttctgagcccacagcgtcatccagcagaccgtctgcggaggttccttcctgtgagggccgcactcgagggggtgtattgggtgggatcgtatcactggaatgagtgaacatcgttagagggagctcccacagctatgcgtgtgaccgtgtggctcgccgctgaaaaatgctgctcacatagcagaacttcgatgcaatcctttttggatttctaaggggaaattttaagaccg

SEQ ID NO: 53287 - DNA, 1063 bp, Homo sapiens
tcaggggtaaactgacggtggtgaaggtcatttgaggtggggccaggtctgcgtctgaattctgtggcagcctctccctgcgtaaattcaagttcactggcttgagaagaagaaaagagcctggccatgtccctcccacacgagcacagtctcaggatgcaggtgcttgggaccatgttggaagttgggcccaggactgaggagcagagtcagaatccttcagaaggctttttctttagacagttgtttgttcagttgggagcggagccacgtgttgaagtcctcgttgtcttgttggcaggggtctgcacccgggagcccccgttctatatcatcactgagttcatgacctacgggaacctcctggactacctgagggagtgcaaccggcaggaggtgaacgccgtggtgctgctgtacatggccactcagatctcgtcagccatggagtacctggagaagaaaaacttcatccacaggtaggggcctggccaggcagcctgcgccatggagtcacagggcgtggagccgggcagccttttacaaaaagccccagcctaggaggtctcagggcgcagcttctaacctcagtgctggcaacacattggaccttggaacaaaggcaaacactaggctcctggcaaagccagctttgggcatgcatccagggctaaattcagccaggcctagactctggaccagtggagcagctaatccccggagtaaggaatatttcatttttgaaccattttgggctaagtggaatattaaatgaagttcataaaaggcgtccttcctaataatcacagtcccctctgaaagagagtactcattgttcctccggggccagcgcccagcagtaatggcctcttcctgggagccgctggcattgcttttacgcaaactcatgggaacaaccagtacatggcttttgttttttagtgtgtgtgtctttttttcctgctttctctttattatcttttcattctccacttaacttgctgtcctctgattcagggatgtttccacaattgtcagaattgtgtatgtggaggtctaaatt

SEQ ID NO: 53288 - DNA, 1557 bp, Homo sapiens
gattacagcatgagccactgcacctggccgggaagctgccttttaacaagcacctctggcgattccaacccaggctgcctgtaggcacagctttgagaaacccacatctgtgctgatcagctgagggtctgggaagcttggaagggaggagttaggagcacggctcgctgcctctgaatgaaacataaagacccactgtctcttgaatcatccagtctgtggggaatgagtcaaatcaaacatttttggggaagtaaatatgtcaggtgagctggcactcctgggcccagaaaggctgttagtcttgtgggaatactctgtacctctgcgcaggctattgggagggcaggactctggggtccctccttctaaataccccaccccagctctaagggtgggccttcatgaactgggcctgagctgaccaggggctgagcaatttggagtgaggtgggggtcccaggtcagccagaaagtcaggaggtacccccagcccccagccctgctgatgaggcctggggaagttgcacatggaggggcagctggaaggcggtctaaacatccctctaccccgggagggggaagccaccttcccatcagtcacccagacagggtgatgaggactgtaatttctccagctgctgccttcaaagggagggaaagggcccattgctcatgagcagctgagtgaccaaatgcctggatctctcagtggctgctgggggcggtggggcggaaggggcttgggcgcccgtgggggcaggggcttggctcctagcctccagggatctgagtcaccgggagaacgtggcacagggccaggggccgggcagggctccagcaggggctggattccaggtctgacctggccacggcacccaggaaaaatcaccacccatttctaggccaccattttctgtcttggaaaatggtggaggcagatgagacgatcccaaatccctcatcctatgaaggaggaacttcttgtgggtggtgcttccagcatggtctcagagccgaagctggaaagccttcacccagacccacctggagctggctggagcctggcttggctgggggcaggggtggggagggtggaggtggtttgggacaggctaggggtctggctgggctgcctggactggtctctctgtccctgggaagctgtgggtattgcatggtgtgaactgggagggggtatggagagatggggtgcggctctgagggggtagcactgatcagccacatgcccttcagcaagtcgcatcccctctctgagcctcgatttgctcctgatgggggaatgccctgcctcacctgtaccctggagcactggggaagccccaagccctggatttactgagtgccaagtgccgtggggtgctgtacagtttaccgggtcaccgggaaagaaacaggatttgaatcctggctcccagtagctgtgcggccctggatgagtgactgcgcctccctgagcttcatgggcttgtctgtagatgggaacagcagtagccccttgtctggggccttggggattaagtgaggccatggaca

SEQ ID NO: 53289 - DNA, 1933 bp, Homo sapiens
tatttactttttgagacagggcctggctctgtcacccaggctggagtgcaatggtgcaatcacagctccctgtagcctcaacctcctgggctcaggcaattctcccacctcagcctcccgagtagctgagactacatacgcatgccatcactgctggctaatttttgtggttttgttttgttttttatagagacggggtctcgccatgttgccgaggctggtctcaaactcctggtctcaagcaatcctcctgtctccgcctcccaagtgctgggattataggcatgagccacccgcgtctcatcaattaaataaataacccctaggacgactaagatgtcttcaagattacatgagatcccacatctgaaggtttttgcaaaggacttggcacaaactcgtgcgactagacatggatatggctcttgctctggaaaggatcaccttgataggagcaaacaaagctggtcttcggtgccctttaatctcccctcccagccttccaccttccacactttaagagtcgtccctgccgaccccccgaccccgtttttctgaacctcccttcctccccttgcatagtccaaagcctctctctaaagcagccccccgaaaacatctgtcaagttccaaacttatctgaatcggaagctaccaatagccaacctacatctaaggggaactgtaagatttcagaagaacaagaagcataggtcgcttaggcgtgggccacccaagaagagagacttaacactaggtaagcccgcgctggctgcgaaggcgggagcggcaccaggaccatccagggcgcaggcgcagggacctcacggccacgccactactcagcccgagctggccaatggggagcggcggccggaagaacgcgcggcttcgctaggttccgcggcttcctctgaccaagcttgacgtcaccaaagcgcgccggaaatgcgaggtcaactgcgcgccgctggcgctgaggggaggaagtttgctgtcgagcggcctgggttccgtgggcaaggccgtgggaggcagcgttggctgcttcgacacactgagggcggcgcgatgggagacgagatggatgccatgattcccgagcgggagatgaaggtcagagactaaccggggcctccctcccttctttagtcctggcgttgccttggagcccagctgaaaggcgaagcgcggtgctggctgtcccgcctcctgcttgaacagtttaccgcgttcacagctctcaccagcgcgtctgccgcgccgctggcgtgatagccccaccgaatgcagtttcccagtcccatcctggtctcgtgcacggctgttgagttaccctagctacttcctggggcggtcacaatagtggcaataactgctgtttattgagtgttgactgtgtgccaggcactgtggtagtcatcgcggcagccctacgaagtagtcgttaacgtagaggagtaagttgaggctcggaaagtaatttccctaaagtcacatttgacgcggggctgaaagccagcatcatttaagacctttgctctcccagtacttctgtaaggtgatacgggcttgcctaacgtagagtcagggaaggtcatccatcctgcagaacctttagttgattggactaggaagactattttgacctcggtatatcagcctaaagtcaggaacctaaagggagggccaagtggtcccagtgatagcaacgtgggagtcccccagggataacttcaggatggtgtgtttaatagttcttatatgggttctgacagaatgagggtacaacagacgggctacatctgttttaaatagtgaaaagaagtaagttgcaggaagattttaggcatctgtgtgaacaataaatcactaaaatgcatttagggcatagtaataccatgtttagaatagtgatttttttttttttttg

SEQ ID NO: 53290 - DNA, 485 bp, Homo sapiens
cacacccagcctaattttaaaaaattttttgtagagataaggtctagctctgttgctcacgctggtcttcaactcctgggcttaagcaattctcccgccttggcctcccaaaatgctaagattgtaagtgtgagccacctcgcctggcccaatccaaattcttttttttttttttttttttttgagatggaatcttgccctgtcgcccaggctggaatgcagtggcgcaatctcagctcaatctctgtcgcccaggctggaatgcagtggtgcaatctctgcctcccaggttcaagtgattctcctgtagcacctgccaccatgcccagctaattttttgtatttttagtagagacggggtttcaccatgttagccagactggtctcgaactcctgacctcaagtgatcctcctgccttggcctcccaaagtgctgaaattacaggcatgagccactgcacccggccccccaatccaaattctta

SEQ ID NO: 53291 - DNA, 755 bp, Homo sapiens
caggaaaagatgcaaaatcccctgatggcacaggcagcccctccccagaatggacgggatggaaaggggacaagtggcaatggccccaaaccaggacctcagctcatgggttcccgggtccctggggaaagggctgaggtccttcctgcactcagcaaacaggaactgcgcgctgagcacccagctggaaatcagccatggacaggacagacctcttccctcccccaacaagctcacggtctagccgaggagactcatgttgaaacatataaatggccacttcgccaggtcatagccatggtagtggggctcggaaggagaagcccatggcgttatgagggcgtgtggagcggcggtcgccaaggagggcttccctgggggagtgacagtgaagcagagcccccagacctgagcgggacttgaccagaaaggagggaggaagagtgtggccggcagagggagctgcgagtgcaaggctgacaggcaggaaggcccgggcgcttgcagggagatgcaagtctgaggacgatggcccggctacggctgttccgctggggctgttcctgctctccttccgccctgggggagatgttccaattctacccggcgctccccagtccgtggactcagtctttccttgtgggctccatttcccagcttctaatctctctgcggctcaacccctcttcccctctgtgtagccatgaggcccggagccaccccaagagcagccttggaggcctgattgagacagc

SEQ ID NO: 53292 - DNA, 576 bp, Homo sapiens
gtgggctttggtgcagccccaccaggtggttgcttatgtccacacgtgtagcagtgagaaggtgccctggcatgactaactcccttctccattttgctcgtaacttccctcccctcccccgacaccctactggctatggtgatgatatcttttaggttaactgcttttgcctgtctctgcatgtaggccaaacttattatgggagaaatttagtttatagtttaactttgaagcaaggatgatgataatagtctctccctaaaactaatcctccctcccttcccccacagaagatgaggaggttgtacacacaagtaacaatgttatgttacaaatgtacataagctggcatgggtgactcgtgtgtctgtaatcctaccactttggcagtcagaggcagtgaagtggcatcgtttggggaaatacccaaggatcgttgtcttgacctaaggaaaatgaagacgcagacgcacgaggagtcagaaagttggggccgggcgcggtggctcacgccagtaatcccagcactttgggaggccaagacaggaggatcacctgaggtcaggagttcgagac

SEQ ID NO: 53293 - DNA, 560 bp, Homo sapiens
ctcaaaagcacctgcaccgagaaggcctcctccggctccccagctggaatccatttccccctggaatattgttcatttttccccttcagtttagatgactccactttctaaactgaacatgggaactcatgctgtgtctcgttagtacaactgcactgtggagaacaggtgcagagcatttgaaagcggccagtccaagaatcctggaacagctcatgactgcaccagctggaggcctcacattcctggatcagatcatattacaagttagctgtggccaaatccctgttatcctcctaccctttctcgggaaggaggaagcactagaccacgttaagagccaggtcccaagatattcaggcccagcttaggctgtgtctggcaggtagtgaaagaaagctcacgaaatcagtctttattcttgtagggtttttgtttgtttgttttggttttggtttctctttttttttttttttttttgagacagagtctcgccctgtcacccaggctggagtgcagtggcccaggatggagtgcagcggctcgatctcggcttactg

SEQ ID NO: 53294 - DNA, 2523 bp, Homo sapiens
ctcaaaaaaaaaaaaaaagaaaaaagaaaaaaaggataacactgaaaatgaccatggataaaatgtaggaaaattcagagaattataaataaggctataaaagtatccagaattctactccccaaaaactaagctttgttcaccagcctcagttctggagttaggctgaagtgggttaattttccttctgggtccagcagtgtggcctggggcacattctctcaaagcctcctttgtctcacctgtgaattagaacaataatatctgcccctgggttaggattaagtgagacaaaccacgtgctttagcatagggcatggcccgcagctggtgcttagagcaaccgtgactggaagagggtgggatgatttgggtgccaggccctaacattttttttttgtatttgctttttgaaattgcttttatagttggttaggtgtctaaaaaagtaagaaccctcctccgctctcccaacctcaaaccacggaggtaaccaagacaggagtgcagtctcccggaccttttgttttgcaatcacacaaacacacaacactcaagaggaggggcttattagttttcattttgtaaaaatgggacaaagtacccatattgtgcaacaaccttgcttttgaaatgaaaaaagtattatttctgcttcctttccgttcatataccgtatacatattttaacaaaatccgggcttagtctgttctgaggcgctgcagttttgaagggggagggggcggagatccgggctcgctcccccgtcactgccccctccatcccttccccctctttccgggcgcccttcccccgggcccaggccgggcccatgcccttcccaggccccttctcttggctcctggcccctcctccgggtctcctccccgatccccgctctgccccgttctctcccgcctctcccgccgtccccgggcccctccccactcccagccccctcccagccccctcccgccgctccccgcccctcccccctggccccagccctcgcccggcccccgggccgatcccaaggccgccgctcccgggaggcgcggcagggggcgctgcgcgggcccaggttgcgggcggcggcgggaggaggaggacgaggaggcgggggcggcggcaggcggggggcggggagccgagcgcgagggagcgagcggcgagacaggcgccgaggctccaccgcgcagcgacgagcgagcccgggaggagggagggagcgagcgagcgagcagcccgcgccgccgcctcgcaatccgccgccatcccgccgcccccgtgcccgaccgccgcccgactgccatcgcccggcccggccgcgcccgcggaaccagaccaggtgggtcggggccggggccggggccggggcgtgggggcggcggcgctaagatggaggcggcgcggcccggccgggctttgtctcccgcggccgccgccgggggcccgggggccctgcggccctgcccgacctttgtccgcgagcgcggccgccgccgcctccttcccgccgggcgcggggctgcggggctgggaggccgcggggcctgggggcggcgggcccgggcgcgctcgccattgttgtggcggcgccgcgcggcctcaggctcgggcggggtccaggggccgcgcgactccctcagggctcgcccgccacccccgtacccccgaggccgggccgggctgcagaggccggaggggcgggggtcccgggcccgcagccgggtctcggggttctggggccggcgtctttgctccccgccccgcccaattgacggagcagcgcgcccgaggcgggatcctgcggggtcgggccttgggtccggggcgctgagcggcgttcgcggggccgttcctggcgcggggtgggccgggccccggcggcgctaaagttggcggctgggggagggaggcgagcggccgcccagtctcggtgtgagtgcgggaaccagagggttattttcgaaatgctgaatgctccatgctaaaaatgtttaataataaacaggatgtcgccactcggggcctgccagatggggtttttttttttttcctcctcttttgcctcccctcaacccccaggagagaaattcagccctgttgaaactgtgggcctctgaagagtggatttgccttaagaggtggatttttttcctttttcttttttcctccttctaaatatcgtgggaggtcggagcccacctttaggcaagaattggaggtgttttcagtggtgagcttgaaggaagtgggagaaggggggctggggagtgtcttttgctaaatggcttcctgggagaaatctttaaatgcctttggtttacaggactgttaaactttccctaagattttttttttctttaaggtttagtgtgcatttgatgtggctttgtacagtgtcatccagtttggtttttgtaaccaattgtgtgcggtcttagcatggtttttccgaatctcgctgcagccatttagtcatgtctatgcacagcgctgtggtgtaaggtgggactggg

SEQ ID NO: 53295 - DNA, 1137 bp, Homo sapiens
agccatgtgtaatcccatggtggcaatgttgagccaccttgccctgccaaccattttactttctttctgtgaaaccgaatactcttaagtacctcatgtaagtgagatcatccagtatttgtcattttgtgtctggcttatttttagcatagtatttccaaggttcatccatgttgcagcatgtgtcagaactaacttcattcttaaggcagaataatattctcttatttgcatgtatctaccacattttatttattcattcagcgacgggcagcagcctgtagatagttttgttttcatgtattgaatggtcctttcccccagtggagtgagtaaatgcatccggaagcagaattctgttgtttcccattcatcactgtgtgccaggtgtctgagaagggggtcttataggagcccacgcagaaaccaagctcacctcagtctgggtgtggggcagtcagggaaggcattctggaaaatgtagctgactcgaaataagcacctattgaaaatagtgtgctgagccctggaacattaaaaatgtgttcctatgtggaaatcagaaatgtatgggtcccagaagagaacttgtgggtcagcctgctttccagagagtgccgaggccctttgaatggtgaacattatgcaagcattcttgtatggccagtggccagcagggaggagggcagagaatgactgtgcctccgggaagccggcgtcaacttcccgacacgcttcaggatcatctctttgtatagaaccatgggatggatcgctgcaggacctactggaaaaaggaggtcatctccaggactctttccatgggtcctttgtgtcttgcagaacttttttcggcaggtgttgtttacatatggttcagagcttaaagaacagctgtgttccaggccagggcagaaagcacaggcctgtctgggaggggcatcatcactcctgcctgcctgcccaaccgacctgtcggtggactgaatgggccaagtgttcagaagtccttgggaagaggatagtgtcctgaatcataatgtggtattttctggttttttgtttgtttgtttgtttttggtaaaatgttaattgcagaagtatacaggttattttatttatttatttatttttttt

SEQ ID NO: 53296 - DNA, 1151 bp, Homo sapiens
gtttcaccatgttggccagcatggtctcgatctcttgaccttgtgatccacccaccttggcctcccaaagcactgggattacaggcgtgagtcacccgcatcctgccgggtgtgttacttttctatcctgattgactgaaccttaatgtccttctctgtcaaacaggcagtagtatcttccagaaagtgctgttatgaaggggagtagagcacatgagggcttagcagggtgcctggcccttgaagtgctggtggccactgatctcccctgaatgcggagccgtagtggttcctggtgaatgacaggtcatcccagtgccctggtcaggcatctgacactggctggcactcaagtgtggagtgaaattaatcctgttacccggaaatggcttttgataaattaattacagggcagagatgttccctctggtggacagatagcaggaacctgttggacaggcgggcactgtctggagaggcggggcttggatgtgaagttgccgttgttggcgaatctttctggttgtttttgttccagcacagcctgggagcacttctttagattatgtgccaaaatatgcaacctggattctttttcaatgttcttttctccattgatttgttcccaaatctatcttcatatgggttttaggcccctttttcatctgcctaatggcaatattttcttttaggctggcaagtttcagaatgctctagctccccgtggcagtgtctctgagtggcttctgtgggaaaggagggcttacagcaagggggcacataggctggacttctttccagcaggcatcattgggttgtgtctgcttcatatgtcatactgaggttccaagtcagattctgttggagagaaaacgaattctgttgcctacagaagggagagaaggtgaggtaaagccgtggccataagccaggtttgacttatgctaacctgcgaggacttggtgcgtctatgccgggtctagtcccacagacctaggggtgagtcagagctggatggaaatgcctcagacccgctggagagctgttctcttgcctcagccggcttcctgcttcacacttggatgctcaccggtgctttctccctgcctccggataggctagtttagcttggggtatgcatgtgtgttgat

SEQ ID NO: 53297 - DNA, 951 bp, Homo sapiens
cgtgtgtagagatgagtgcggtggtgattctggtcaagatgaggggctgatgaatagaagtgctgtgtctcctggagaccacagagaacttaaccagctcagcgtggcagggtgtgtggggtggtggctgggatttggagctggatgacagattgagtcatgatttcaagtgcctggtagagttgaagttctggcacgtgtgtgttgctgctgccctaggccttagcaaccagcatgtaaaactgcaggacaaggcagaacttctttctgggatgtactcgtttgctcattatatatttcttttaaaggaactgatagaaataattaaatcaaacatgaacctttgcagtgtggaatttatttttggaaaggtatttgattttgcttccgtctgtatactggacatgattccatcatcttttcttttatcagaaaagaaaacaggctgggattgtctcgcccactccgcccactaaggcagctggtggagcgggcaccacggcccaccattatcaatgcggaaaacctgaagggccttgacgatctggacgccgatgccgatgatggctgggcaggtgggcagagaagcacgggtggtttagacgggcaggaccaaagtccatatgtacttaccagggatggaaaccccctggcaccaccgtgtgttttcccttggcaagatagggatgaagagccggacagggaagcagacctgatgccctccttcctcatttactccctgactagaggttccttcctggccaagccattagcttcttttggtctttagtcttgatcttagagttttgttgttaactttttaaaaattattgatgatgcaaaatttaaacaaaaaagaaaatagctcccaaccactgatcactcaggttcaataagtaccaatgttctgccattcggtttttgtttgttttaatttaatttttttccaag

SEQ ID NO: 53298 - DNA, 1275 bp, Homo sapiens
ttttaaaatctgcacgtctgcttagagtacacagaaatcctggcacacaaaacagtagcacccgagagaggggaggtcgccgcgtttcacacctgcctctcctccgggaccggcgccctcgcccgctgcgcacgcgcgtcaccctctcccagtgcgcacgcgcgctgctgcccgtctggccccgcaggctcggtgaatcgaacgttgagcagggcggtgggtggtgcggagtgccgagcggcctcacccccaaccgtcggcccagtcggacggttccgaggcgttgccgggagccgggcgcggctctgtgtggactcggagaaacgcgggtacatttggggacaccggggacgagagcccagcccggacttgggggagtccgtcagtgccggacgcgggtccctggcttgcggacgggctggggccgggggcgtccccgtctttccggagctgggggcggggttcgggcccgggcagatgcggcgttcgggcggccgagccccgaagtaagaactccgtggcgcgtgcagccctagggaggaagggcgtgctgcgggtgcagtctcagggtgaggacggagctggggccgacgcagcctcgggagttggtggacgggacaggtgcggcctgtggggaagaagggccggccagggagatgcggtctgcaaggggagaggaggcactcccaggacagatgggaccttttgggacgaaggcgctcaaggcagatgcagctcagggagggaagggcgcgtccagggtagatggggcctgaggagaccagcggggcgccaacggccagatgcggctttggtgtgagacagggtgtcccaggcctgatgcagcctcaagagaagcggagctcaagggaagatgaagcctggaggagaacgtgggggcgcagggtgcaaatgcaccctccaggcgagaaagggagcacccggggatgatgtgccgctgggatagaaggcagggaggcactgggggcagatgcatccttgaggagagatgaggaggccccgaggctcggccaggttggggtccctgggctgtaagcagctgagatggcacccaggagctgcccagggtcaggtagctgtggccgcactgtgggcttctggtcgtcggggagggaggggagaaaccctggcgttccttagcagtgttctcgcgcccaagacgtgctcggcaggttttgtggaatgagttgttgaaaggagtgaatgtccagtcctgagatcccctgaattcccacccgagttcactgctagtgc

SEQ ID NO: 53299 - DNA, 2403 bp, Homo sapiens
ggttggagacaaaggcaagacaggcagatgccctcgtgcagcggacagcagggaaccctctctgctctggggtcagcacagctgggtgctggggacaccgagaaccctagcacaggtagactaggactacggcagtgtatgtttggtagcaacagtgccctctgcagccctgcagaccacaggatgaccctgtccttgctgttctcgggctgtgccactgcccaagctctgtgcccctgagatgccggaacacaggggttttctgatcagctcttcctgggaggtgggtaggctgggcctctgcttctctctctttctgggactaactggttagactgcggctttgcaggccttcttcccacaagtccttgggaaaaggctgaccatgccagccagccagggtggaatcttctagcagtggcaggtgtctccctgccgcatctgcccgtttacctggcccggagcttcaagccaccagcactagtttacctaccgcctcccacactggcctctctgaggactttgccccaaagcacgggagggcacagtgggcagaggtgtgtgtggagggccctaaaggccccaacgtgggaagggaagatgggaggatttctccaggatcacagttgtggcagggcagggcagggctccccacagtgcaacaggcttcctgactggctccaaccacgctcctggggggacactcagggcccagagaactcagcaaagttcccctgacttcactgtgcagccaactccactgcaggctgcgtggcgagttgggggaacagcccaagcgggtctgcatccatccaaccttgggcccaagcgcagctggttagcggccgcccagaatggggtctgccctccccacatcgttgggctcgcgatttacctggatggtcaaaattgtactgtcctttcaaggccttggccttctgctctgccgtcaggaccttgtagaacctgtcctggctcaggatgaccaccttccgctgccgctgttccacctcgttctgtcccagcaactccatgatcttctcacacacggtcgactggagacacagaagcgggattcccgcctggaaccgctcgtcctgtgacaggcacggggccggcttctggagacactgacccacccgccccctggggggtatgctcggaaggcgggaggacaccaacaggtgtggatggtctcagcggaagggccgcgggggcccaacggggttagcacggacttggggctccgaggagcccggccggcggagaggctgtgggggagccccgaggcccagcgccccaacccctcgcccgccccagcccgccccggcccatcgcggcctgcagccccttcgctcccgcgccctgcccctgcctggcagggggcccctcggccggggctggggtctcctctctggaccgggccgcccgtaggcaccggcgagaggcgagaccccggcccgctcggccccttaccttcccgctggcagtgccgccgctcacccctatcaggaagggccgctggtgcggacggtcggcctccggcgcggggctctcgcagtcttcgcctcccgccgaagccatctcggcctccgctcccgcgcatcgggtccccgcgcccgccccttccccaggcccggcgcgcccgcccagcgccgaggtcggaggcaaccggagcgatcacttccgggaggcgcgcggggcacgccgggagttgtagtccaccgggggggggggggccgcgcatgcgtgagggtgcagggcccgaggccggcacaccaggagcgcccgcgtcccattgcgccgaaagctggctggcagggactgctgcgcccgggcctcgagccggctacaaggtctcagactcaagtggcccggaaggtgcccgttccgcaccccgaggctggggctgcgccttcgtccgagtgcttgcctctgcctcgcgctgcctctgcgccagtcccgggccctcccccggccgcccccgggcctggccccctccagcccaggctcctcttggccatcgaggcctccggactgtccggacgcctcccaccccacccgctgctggagccgtcggggcgccccggaacgtggcgggggctgtcgcctgatgactttaggctcgcgcctacagcgcgccaaggaggcagaggcccatgtgccgggttccatccctgccgcccccccgctccgtgcctggcacagagaacgtgacaggcaaattctgatccattgaaattatggatttccagccgggcgcggtggctcacgcctgtaatcccaacacttttggaggctgaggcgggtagatcacgaggtcaggagatcgagaccatcctggcgaacacggtgaaaccccgcctctactaaaaatgcaacaaatcagctgggcgtggtggc

SEQ ID NO: 53300 - DNA, 805 bp, Homo sapiens
acataaaaacctacgtttctggcttctgttgctggaaaattaaaagaaagctagagacaccatgactctcgtctgtgcagctcacatccgtccggctgtggtgtccagttgcccaggtccccaccactcctctttgtctcatgctgactcgctggccttgcgggcactctcgtgtgccaccctgccttctctagtccggcgtggctgactcgccctcctaccccaacccctccagccctgcacagcgccgcggagtctccaccgagcccgtcctacccaggcaggcagggaggcaggtccggccgagcgcagggcgccagggagcgactgttgttgacccagccttgggcaaacaaggcggtcaattattaaccggccgcacggcaggcaccaggaaacctgagcccgcggcgcaagcggagccggcccgacggcaggcgccgggccagggagccgcgcagcccttgcagccgccgcgggctcggaccatggaggcaggagctggaggggcaggtgccggaggggcaggtgctggtgggacaggtactggcggggcaggtactggcggggcaggtactggcgaggcaggtactggaggggcaggtactggcggggcaggtgctggcggggcaggtgctggcggagcgggtgctggagggggtgtaaggggtagataccagagggtcggctgctggaggggcaggtgctggtggggcgggtgctggagggggtttagcgggtagataactgcgggccatgttctggagggtcagggatcggcagggcgggcccaggcccggggctg

SEQ ID NO: 53301 - DNA, 995 bp, Homo sapiens
ggagttatagagcagtggccccatgtataatatggtaattttatacacacccacacacacatattaaaaaatggtcatagagctagggctaggtgaaagcacaggtgtaaagcacatctcgcctgaccagcaagtccttgacacgtgtgagtgacagccattcactgagtcaggcctgtgagcaggtgctctgagtaacagaacttgccggggacccgaggctccgccaatggaggatgtccacgtctgtcttgatagatcagggattctaaaggtcaacacgaggggagaataggaggccaggaggtctgcaggaggccctgagtggagcagtgaaggctcagggcacacaggaaggagcgggggcgcgggtggactcaggacttcctaccccaggtggtggtggctgcccagcagatggcagccgtgggctatgtgcaaagaggtggctgaggagcagctgacccaggctaccctcctagagcagcagctgcaggtcagcctcttaggatgggcaggtttggacttgaagaggcaatgggtcacacaagtgggtccttccaaacccctggggtcctcctcagccactactgcagagggtgacatttactgagggtgggcccatggggtagatctggggacaggagcccattccagttgtggatgtggcagtcgcagggtccgctccagggaaggtgactgtgctgacccctgagctgtctatttgggtcttggtatccttcgtgcccaacgccctggggctcagctctgagaagctgccggagccgaccatgagggtctctcagaggcgtctgcaggaccggcacacttacccctcccagtctggggcatgtctaattcgtttttagaatcatccaatgaccacaactgccaccagacacacattcccagactatgttccagcctcttcacatcatttcactcggcccttttagagatgaggaacttgcctgagctcaaagctggaatgcggg

SEQ ID NO: 53302 - DNA, 1214 bp, Homo sapiens
tatggaaatgctaacgatgtctgagtccatttctcttcctaccccatttttttctttctttctttctttttttttttttttaacaaatgaagtaggctgggcatggtggctcacacctgcagtctcagctctttgggaggccaaggcaggtggattgcttgagcccaggagtttgaggccagcctgggcaacatggcaaaaccccatctctacaaaaaatacaaaaatgagctgggggtggtggtgagtgcctgcagttttagctgctctggaggctgagatgggaggatcacttgagcccagaaggcagaggttgcagtgaggcaagatcaagtcactgtactccaggctgggtgacaaagcaaggtcctgtctcaaataaaaacaaatgtgatcttacaacagctttgatgccaccttgtagccacaaggctatactcccccagatgctcatcagagaggaaagacactgtgttgagaagtgacagcaaatcccatggcttctggggtccagtgagcacccccggctggggctctgctgctgaaggagggacagaggtgttccaggacctggtcagcagccaccacgtggagagaatctaatgatgtgatgtcatcgtgtcctacaaaggcctgccatcatgctgctaccatcatggggagctgggagagcgctgtgggggtggccacgtccaaagtccttgcagatatgggtgaatgaatgagtcacaaaattaaacaaaacaaagaccttgccgggctcactggcccactacagaggcagggacgtgaggaaagtcaagcccagtgcaaatgtgcgtgccactcgctcaaacattctctgtgtttgctgtggctggggattttcagaacccatggaaaagaggaagaagaggaagaaaaatgaagttttaaactaacaagaggtcaaagccactcatccttaagtagttttttgttttctcttttgagacagggtctcactctgtcacccaggctcactgcagcctcgacctcctgggcttaaacaatcctcccacctcgggttcctgagtagctgggaccacaggtgcatgtcaccacaaccggctcactttttgatttttttgtagaaacggggtctttctatgttgcccaggctggtcttgaactcctgagctcaaatgatctgcccgcctcagtctcccaaagtgctgggattacagggatcagcc

SEQ ID NO: 53303 - DNA, 953 bp, Homo sapiens
ggggatgaaaacaatagcccctcccccataaggtttctgcgacgttccgcgagacgcagagcgctgcgtgcaagtcctccgcatggtgctggtgcggacgacctctcggccagcagcagccgtcctctcctgccctcccaacaatccaggaactgccctaaataacagtactggggcattcagtaggggcctaatacatatttgctgatacgtattttagtaggcacctaatacatagtctaggcactgtattaattaaggtgtctagaatattacctgactcacagaagcgtctcagttttgagtgtggatgggtaagagacgaacttcacccactgcatgggttcaggtccagacactggggagggaggctcagggaaatgaccaggggtgtgggctgccaaggagggggcagctagcaaggagaaagcaaggagagtcggcctctcttggacaaaggggcctggcctgctctgcctctgcctctgcagctgtgagctcacgttctggtattcaagctatgcagtcgtgctgggacaagagccaaactggaaaggtaccttcacggggcagggagacacagggaaaaccttctgatcaccatgaagcccttgctgtgccccttgggctctgcagatgccaggagctgcatcagggctcatggtcacaccatttacaacaggcccccatctctaccgattccccagagcaatacttccagccccttatgatcacgcttacccacaggggcagagagaaaggcagggcgggccattccacagaaacgccgcctcatcacagcctggagtttattttaggatctggctcgtgcccgggtttgcttctgacgagctgctgctctctgtgcagcaggaacttttatttatagccagaataagactgtttgggctgaggattttagaacgggaagggctgcctgtctgagacttgca

SEQ ID NO: 53304 - DNA, 1503 bp, Homo sapiens
gagcccagatcatgccattgcactccagcctgggcaacaagagtgagactccgtctcaaaaaaaaaaaaaaaaaaaaaaaaaagaaaatgatcacagagaaggaagggcttaaataacagttgacaagtcaaaatacagctctggtgctcaagtaacacagtaaattacctggtgaagttgggaagaggtggggtaccgatttcaaaagatcatgctgggatatctctttggcctcgagtggctcggccccccagcatccaggtgctaggctgggtgtggttctcagagaaaaacattgagggtctttaaattcctcagatttccttccttcaagagtcataatcagctctgagctacaggctcccggtggaaaagcagccccagagccagatgaggggacaggggtctatcttttacctgagatgataagactacctggaaaagagccataatcactgtcaaaaatggtcactgtgagccgttagaaatgaacacttctccaggtaacactgtttccccactgcctcctggtcacctagttcttaccaggtactttatatactttatcttactgaatttcctcaaatcttcagggtaaatattttaaaacctacttgaaactcagggaagtaacttgcccaaggttatacagcttgaacaagtggcatttatgtggaggtttaaatgataaatgctaccatgcattcagggacaaaaccaaagtaatcctgttttacaacccatgttcaatcatttgaaaaaaaaaaaaagaggaaagactcccttgaacaactgaatgggttacgtaaacaacggtgagtcagtgtaagaacgtccaacgcccctcctccaagtgggctgacaacatcctcatgagtgcatttcccttctgcacagctccagtccctcccagctgggggaggctctctcacgccaccagggcatgggcttttaaggtgtcccaggcctgaaagggacggtgagagaggctggaagccagctagcttggaggtgggagtgcagagaatcctgtcctcccatgggaggcagcagctcagggtgtcatggtgcacaggagccggggagggggcagcaggttgggggtgggaatcacagccttgccactgactactgctccacctgagcctgagtctccacacctgtgaaaggggcaaggggcagccatttatgcctattatggagggttgtcatgagtattaagtgaggacagtgtacaaaaagcaccccataaatgttagctgttattactattagacaataacaacaaatgccagcgtcacagtgtctcgatcactctcactgtctgtaatgactccagcatgaaaagctcccagccacaggcagctcctgtccatcctccagatgctggcctgtctcttccttggggaagcgtctctgaccaccctgagaaaggaaggtcatcataccctttcatcacaccctgtgccatcttccttggcagcgctataccacatgggtgt

SEQ ID NO: 53305 - DNA, 2302 bp, Homo sapiens
ttgtgagatgggtaagaaagcactcggaggcttcagaagccttttcccttctaaactattcagatcatcttagcaattcaaggaacagctggtcttgagagatgagactcgcccacatcccctggaacccgttggacccaagcagcacacccaaaccaaccccagaaagaatccctaagcttttgccacaaagctctctccaaagatcatgggaccttgcataaactctcacttttatccaaggtcccctggactctttcctgaacaattcagcccacggtcaccacccagttgaacataataatagtgcaatagagttttttccatccccaaaaccatggaccaggattctgcagtagaaggcaaggcaaacccaattgttcttaatgttacactgaccttctgcctttgagacctggaagccacagcactggtggacataaattctactgcctgctgctccagatccaaggggagagggtagccctctggtagaaatctgtctgttgcctcctggaagagaggaaacctggattcctacagagtttgaaatggctgtttgaggccgaagggaggggttgatgaaagtcaatagctgtttcaacatatctggcttgactggccctgctgaggccactaactcttgaggacatctttggctgtgtctcaaggggtttgcatgtttcagagcacaggccctaaagccaaatgatggatgttctggacatcacagagttccctgtgtttgagtgtgcgccaaggcaacgtagggaactgcagggcagggaggcagcagcctggggtgtggacatgatgtgctgagctgttttaaatgcccagaggatgacacagctggaaaaggagaactgtcttagccaactgagcttggctaacgtggcaaacactcaccatcctaatggttcttattttacaaggacaccaaaggtcccgcccatggaatgctacgaagtaggtatgatgcactgaaagctcaatccccagggagggaacatacaaatcgcacaaactcatattgctggaagcaggtgaggccaggagaaacatccagagtcagcttactttgttcacaggcttctctggaatctttacggacacctcagctggttttcccttctttgatggcgttctcttgattttgggtgagtggaatttgtccatcagcttcatggtgaaggaagagagatgagaacgctgagagtctgaaaacaaagagggtactgactgttagatgggagtgggaagaagcgatggttcattgaccttttgtggaaatgagcaatgtccccaaacccatcttttttcttggctgttgagagtttcaagggaaaggacgtatggatccattacaaaacatttctgcttacatgcttcaatttttgcaattttcatcaaggaattgtggaaatcaaaggcagtccaaataaatatggaaaaagaacttgcaaatattcccaagtgtccttacagagtttgtgtgatgatctaactaacatccaagggaactggctgagaagaaagaacacccagtcaaatcacagatgtgtaggatgtgagaactggaaaggaaggccctttcgcatcaacctcttcattctttaagaaactgcaacaagtgacatgtgcaaggctctggagttggcagcggtgactgaatcagaagtaaggtgttcaaaatcctctgggccctggtgaaagactgaaagacttgccccaaagatcaggaattaagactaggacatctgttctcaccactcctatctgacattgaactggatcagacctaaatgtaagagttacaactgtaaacctctcagaaaaaaacagtttttgtgaccttgaatttgaccatgttttcttagatacaaaaccaaaagcacaagtaacaaaataaaaaaatagaaaattggacttcatcaaaactaacaacttttgcactacaaatactactactaagaaagtgaacaaacccacaggatgaaagaaaatacagtcatgtgttgctcaaggacaggaataagttctgagtaatgcatcattaggcaacttcgttgtgcaaatgtcatagagtatactcaaatgaacctagatgggatagcctactacacacctaggctatatggaatagctcattgctctgaggctacacacctgtacagtacggtactgtactgagtactgcaggcaactgtaatacaatggtatttgtgtatccaaccatatctaaatgtagaaaagtacggtaaatggtataaaagattaaaaattccacctgtgaaaggca

SEQ ID NO: 53306 - DNA, 1117 bp, Homo sapiens
gaggactgcttgagcccaggagttagaggctacagtgagcactgcgctccagcctgggcaacagagcgagaccctgtctcaaaaaaataaaggcttgggggacaagttccctgaggactgtacctgtcttgttcatgcctgttttcccagtgctgacatggcagttggcccatagaagataatcagtaaacatatattcaacaaatgaagaaaccaaccaacaacaaaaatatcccaggaagaagactgcttcttttagtaacagcagaaatacttgaaattggctgaaaattaagcaacaaaacactgtcctacgcaatggaaaaataaatacctgtagttttaaaaataaaaagcactccctctgtcaagtttttccagcaatttagtacaacaaaacaaaccagaaaaccaaacaaaacaaccctccaaataaatagcacggcaccttgcactacatggctctcactctgtctactattgctgcacgtgacttaacaaggccaaagttcagttcccttgctaaagaccttccaggtggccaggcaggatcagataaactacctgccctttgcaaattacctaggcacccactgcgctctggaccaaagagaaaagccagggcctgacccgcattcacatgtggtcaaaccaaacagcttcacagctgtgtgatggccagagctgcagaaagcccttcttagtccccagatggggacacaagtcaacaggaagctgctgcacctggctagctcacctggaacagctcaacagggtcaggaggctctcaacaccagccctcatatgtcagcagtcatccctcgcattcaaatgaactgggatggtgtgacttctcccgctcccctctgtcctgcctcttctctctcttcacccaagcagggtggatcccatttacagtttatacttccttctttatacttcaacatggatgtgaacagtctaatccttcatgtgatgcttaagagggtgtgcactgttagccaggcctggtggtacatgcctatagtcccagctactcgggaggctgaggcaggagaatggcgtgaatccaggaggcagagcatgcagtgcaagattgcaccactgcactccagcc

SEQ ID NO: 53307 - DNA, 1525 bp, Homo sapiens
acaggcagcccgactctgactttcagacttatcatcccttacttttcaggatagtttatatcgacatatacagtttaacttataagtttgtgaacgttacctaagtgatggcatattgtaaagattctcacgctcttgttttttactcaatagcaggcctgacactcaggcatgctggggtgtatcagtgatttcgttttcaatgctgagaaattccgtagattccataatcccagctttatttatctgctctcctgtcagtggacactgggtcgcttccagcatttttgctttaataaacaatgctgctcatacatgtctcctggaacacatgccaacagtcctctaagagcagaacggctggattgtagggtatatgccacattgattcttacagatattgcaaaacaattctcccaagtggctatgccactttacagtcccactagcaaggttgggagagtcctagttgctccatattcctcccggcacctggggttgccagacatgcaaactttcccacatggccatgtctaagaaaggacacaaaagtcctccttcacctggaaatgccatatgctggtgtattttattgtgatctatctaatctgtgagagcaacttcaagttcacctgaacttgagaacagaaagcctcagactcttgctccatgttacatttaccccaaggtcagagactcccagtgactaatctgctagtcattccttccagaggaagggtggcttatatgagcttacaaacaatttctgtataaattgactgtgatgttaccaacagcagccactttcttgggcaaccatcgcaggctacagatctggctgtcggatgaatgtccttctctaccgagagagaaagaggatgggccggaggagaggatgtagcctgctcacagaatcatgtctcaacagaaaaccaagcagagcaaaaagacatcaaagccaacccaatttcttcaagtggtctgccagatgccaatatttcattcttaaatttttaacttgcccctcggccaggcttaacaatggtctctgcctgttgctgacaaatgtggctatcaactggccttctttctgtgtcatttgtagcagcagctgggttcccaacttagcagtggtttctgtctcaacttaatctctcaccagggatggtggggagtctctaaacatcaaccacacgggatcacaaagtcaagggcaaggtggacaactttgaggcagccaatcttgagaaacgctgtggctaattcctcattccctgtcttctactgggctcagaagtcgagcactgggaaggatttagagatcacttacttaataaacattccccattttccaaatgcataaaaaggacaaatggagtggaggcgtgattgaggacattaggaaaagcttttttaaagatgaggatttccaattttttaaaagtcttttcacttgtctaggattttgtggaccgcaaggtaaagatggagacagagggctatgggcacaggaggcagcagagct

SEQ ID NO: 53308 - DNA, 1057 bp, Homo sapiens
gttcaatatgagtctgctctcataacagaatatagttggaaatatcagtttggcttcctagctttgagagtcctttaaaagtccaatctgagatttcttatccaaagttccagcaaagcaaactttgtgatcaatcactagcattactgcagttgtgtaaataatcaggccaagtttgacgagactaagctcattttgcaaaaaaattcacctcgctttatctttagtagaaatgagggtgactgtagagagaaaaactatgtttcagaagaaaaactatagtacacctgttattagattgtagccctgttcgttgtttttgagtttttactatttgtaggctggaacggatccagaattcttctactttcctatttggaaacatctggctacaactctccaaatacacacaagaactgctctgtcccagaagccctacaagctggagcttgacaactccatgtatattatgagggacaggtctcatacctgatatgtgggccacagagagttcacccaaacaccggacgttataatcacaggcagtcaaactgcaaaccaggacaagctgacaacttcatgctgtggacagcttttcccaagacatcagaacaagattctttatcataatgaggctctgactcctcttgatttttccttgcttatgcctacctttttcacttggcaggataatgctacattgccggaattgcacaatcagtagcttctacagagacttgatgaaaaaacggatctgtcatgccaaacctagtcatgggatggtaggtaacagaaatgccaccttctagccgaacaggaaataatctgcacagttgctaatgcttcttgttgcacatggataaaccgaacaaacaggctgcttggctaaaacaggtagattccccatctggctcattatttgatctaaatgatttcagttggtttggttcatggggaccctggctaaggggcatactccaaactcttggtattatcatcctcatagtcattagccacaacagtagtctccctggtgcactgtatcctctcaaaaaag

SEQ ID NO: 53309 - DNA, 3610 bp, Homo sapiens
acacttgagccactgcttcgtcccactccccatcttatttttttctgtttggggcctgctggaactcactgcggtaatacaaatgagtcagatttctcgaccacgagaagcatccattaatgtaaaaaacattttcttgtttggggttggtcctgagagctatcaaaaaataaaaaccagaaccataagtcagacagtataatggtcccctcatcgggtatgtgtcccacactgtctcaaatcactagagaagcttctctagcaggcatcaaatgctctgtagggtgacagcaggtggaggctgtaagactcatgtttttcacactagtgttctgcctctgcggcttttcaactccccaggtgtaggacatggaaacacacgtaaatgatctaaatggcagataacagtttcctttaaatttgcctttggaatgcactctgggcctgcccttcctaatcatgatcatctttggctctggttaaagtcttattctccagagctcctaacacaggggaatccgggcagaaatcaggggccgcctggtctgtcccaactgtctgtagcaaatccacataacgatatgcccaggattcccattcacttgttcctaaactagacacagaccatgctactttgccctggaacctggggccatcatccacccaccaagatttcacaaccacgttgaatgtgggctgcagatcagggtcatggtggtgccctgacattcttcttctttttttttttgaaacaggggttttgctctgtcacccaggctggagtgcaatggtgcaatcttgactcactgcaacctccgcctcctaggttcaagcaatcctcccacctcagcctcctgagtagctgggactacttgcgcgcgccaccatgcctggttaattttttgtatttttggtagagatggggtttcgccatgctgcccaggttggtcttggtttcgaactcctgaactcaagtgatccgcctgcctcggcctcccaaagtgctgggattacaggtgtgagccactgcatccagtgtgcctgggaatctttaattccagtttgtaaacactgttctataatcccatttccaaaatgtaagcaacctttcaagaaaaagacaaataaactgtgaaggaccactccctatccctgttatttcggctcttcagcaggacaccatgcgctatgaaaaacggcttttccttctgagatggactttggaccgcagtccccgggtctatcagcccaaacaaataaaaccctatgcgccaaagatgtgctcctggtcagtggggcctgtgaaggcttaaaaaccagaactgctctgttctcttctttaatctccaattcactgtggatcttgaaatccctactaccaacagtggtcctaccactcttctcatttaaattactgaacacaactaaacaaaaccacaaaataaaacatcaaacctgtctgtctgtatacccagctgcttccaatgaaaatcttcagacattttaactcatggttttctaaggagaaccagagacaatccaaacgtaagtaaacatattaaatttctattctaaaagtggtgcttttaagtagttggatcaatgctgattttctcctggctggctggagacaccagcccacacggtgctgaattcagaagagtaccgcatcttggtctgcttcagtaaataccggtgtctgctaaggcccattctgaagacactgtactatgtatgacacagtcagaactggttctttattttaatgtgtaaaaatacatgaaagaaagtataacaaacctcatatatcgatgacctggactctaacacttgttaaacttatcccattttgcttatcttaggtccccatttatttatacagtatattttgctgaacctgtttttttattttgattttttcttttttgaaacagaggctctctctgttgcccaggctggagtgcagtggcatgacctcagctcactacaacctccgcctcctgggctcaagcagttcttgtgcctcagcctcccgagtagctgggattacagatgtgcaccagcacgcctggctaatttttgtatttttagtagagatggggttttatcatgttggccaggctggtcttgaactcctggcctcatgtgatctgcctgcctcggccttccaaagtgctgggattacagtattgtttttaattggagaaaaggcatacaaatttattaacgtgtatacagggaaaatcacagagtgattatgattttagagagtaaattatagatagcataactcttcacccttaaatacttcagcatgactattcaaaaaagcacacactcctacatgactcagcaccgtttcacacataatcacatgagcaacagttcctcattataatccaccatggagttcatattcaaatttcccgaactgtcccccaatgtctttaatagccgttttgttcaaacttggatccaatcaaggattgctaaggagtaccctttccaaagtaacatgttagacaaaagaatgactcacagaaagtcagaagggctggaacctgacagtaaattagcatcccacctactttctttttaagagaaaatgatctatgatttgacaaacagcaactgctcttaatatttccatgcattttcttccagttatttgttttcttttcataaacacacccatatatgcagttgtgaaaaaactgtcttgctactgatcaaatgctaccgcaacttcttctggcaagaggaggcaaagacctggtgaagtctcgcatatgtcatctctggcatgcctgccagccggccggtctcctgggtcaataactgtgataaaaggccgctgagtgcgtcaacagactgtcctgcactgagacactattaaaggtccttgagctccaaatgtaccactgcactgctctgtggccctgccaacttcctcctcctcaagctgacatgaccccaagccctagagagacagagtaggtgttaagagaggctgttgtcccacttcctgggtgtccaggatggataaatgaaagattttacagaaagtaccttgaaagtactttggaacttttggaagtgctatatatttaaaagctgttaataacattatctaaatcaaaaaatatcacaaaagcctcaaactcctagatatcaaagctttgacctgggatatttctttttctttctttcttttttttttgagacagtttcactctgtcacccaggctggagtgcagtggcgcaatctcggctactgtaacctccacattctgggtttaagcgattctcctgtctcagccttatgcctgtagctggaaatacaggtgcccaccaccaggcctggctaatttttgtattattagtagagacggggtttcgccaggttggccaggctggactcgaactcttgacctcaagtgatccgcctaccttggcctcccaaagtgctgggattacaggcgtgagcccctgtgcctggctgacttggaacatttctaaaaaagtaaaaatgttcagccaggcgcggtggctcacacctataatcccagcactttgggaagctgagacaggtgggtcatgaggtcaggag

SEQ ID NO: 53310 - DNA, 786 bp, Homo sapiens
ggctacatttaaagggggaaaaagagcgggggatgagggacagaaagtgatgcgcaccctatctgttattctgggcccagtggttagggctgacctctctgggtggcatctgaacaaagatgtgaggcagctagggatagggagcaaaggacacaggaagaggaactcatgtttgcccagttcttccaatcgagtactccccagcatgaactcaccaaaaccctaccgcaggatccatcttatcaatgagaaactgatttttaaaaggagatgggtgagcaacttttcccaagatcacatgatcagcaaacggtggcaccagcagcctttaaaccgtggctcttgtccatggcttctcagcaggtgccctacaatatctggggaatgaatgttccagtaagagaacggcaagtgcaaaggctctgagggaaaggaacacctggaagaagagcacaaaagccagtgtggctgggacacagtgacggggagaggggtgtcagggagtgagttaagggccagagtccagggcgcacacaggccacgtcgaggacctcggatcgcttcacatgtgtggggaagccccaggcaatcataaagaggatccatgtgatccagttcacactctggctgtgaaatgcagaatgaatggctgtgagttgggagaagaaaccaagaagccggttaggaaggcatggggcagtccagggagaaacggcggtggcctggagtaaggggtcagcagaggaggtactaagaaggaccagtcaggatttattggagtaaatc

SEQ ID NO: 53311 - DNA, 5929 bp, Homo sapiens
ctgtcttctgaaggaatcctcaggatgatggggtgtcctgttagtgcagcagctgcctctgtggcagaggggtccctggaaacatgaaggctcattttcacccaagtcacacagccaagagaataatatcagaatcaataaaaatatagatgcatggggaatagtcagatgggctttagtcctaactttgccccaactcagtatatgactatgtgcaaatgttaactctttcaggtctcaaagaaaagctctgtgtcttagtctcctcctctgtaggatgagaacagttaacagtacctttctcctattgtaaggattaaatgcaaccacaagtgtaaaatatacagaagcgagcctggtacagcacgtggtaagtgcctaatgaacatcagctactactattatttgtatttattattgaaaggaggggttgagagtagccaattccatgactcatgaacaatcatccatctatttattcagaaccatcacttgaaggaggatgggcgcatgtgataaccagcaaataaatacaaccactgtttccaaccaggggttttgtttgtttgctcgtttggggtcagctaagtggctatttaacacggtcacattccactggatgtcagctgtcctctcttctcattccatgtccttccttctctcagttactgtcagtgtcacactcctgctccgtttttaacaatacagtgtgtggctgggaatcgcatctgtcaggtccacatcagtggcacaaattttaaaagctatagagcaaatgcctgaaatccgcccctctgaacccagccctgggcaaaccacacagcatcctgtgctcagtgctccatttctacgctttaaaagcactgcagaatcgcctgatcacaaaacttaatatgcagtaaagtcactgtgtggtttgggcaagccagtgaaaagcaaagagaaagctgctgctaagggactgtggggacagaagtctaagctgttacaggagtcgtggtgttccgggaagcagcagtccagactgcagggtgggacttgggttcagagaattgtcacctgtctttcaaactacagcctgggagaagaaagtgggagaaaggaattgtgaccagcagacagcagatttctaataaattcagatgaacctccccccctgtaccttagctcacagaggagggggaagtagcaagaaaatactgcccatgcctcttgacaaagaaggaagggggtgccagaggcacaccaacagcctgcaccccagccctagacagcacacgctgcacagtcatcctgggaaaagagagtaatgctgcaggaagccagtcctaaatcacattcaaaggccaactgaaaaaaaaaaaaataacaagtagggacagggattcctgggatggtgctcattatgggtgtcaggctgagtagagctggcacaggccttggtttgtaaacacagggcagaacgagcattacctaagagcgctttgctcctgcacatcccaaagaaccaggcagtcactacaagtggaagctcaaagaacatgcactcaagtggaagctcaaagaacgtgcactcaagtggaagctcaaagaacgtgcactgaccaatggatgcggcatcagaaccgagtggcggctcagccttcacggtgtcctggcgttctcccagtggtgttctgggaatttgatcctaacctcatcattagtgttcagaggactacaggaaaacacagaacccccaactaactgcacaccactgatcagatattggtcctactaatgtaccaagaaacatcctaattggcaatttgaaaccacaataagctacgtctaaagataatttgagacttggaaccagaaactaaaattcattctatgataatattaactaaattcactcattcttttagtaagtatttactgagcacctattgcgttcaaggcaccgtaatggcaccgcagtggtagacacactccctcacggagctaatcatctgtttaacatttcacttgttgattttttaacttgcagaaaggaaactggggctttgattttgaatgagtgaaacatcattctactcaagcattgatctggggcatttccatggaatttactatatgttagaggaagagaaggcacaaagagcccagaggaagttgattttggtagaggcagctgtgagagcatcgaggaagtgggttttcacattgtgtttggggtggagggtccaaggaggagcctcggccacagctaagcaggaaggactgcattcaaagaggcttccccattagtggttacctaatggccttcttatgtataaaaaagggcctgcagtcacgcatgcggggcttcaaacctagatgacgggttgataggtgcagcaaaccgccacggcacatgtatacctatgtaacaaacctgaacgttcagcacatgtattccagaacttaaaatttaaaaaagccggggcgggggcgggggggggggtggtgcggggttggcgggggcagtggctacagcttaaaaacacaaacagaggagcgctccttttgagtcccactccttcctggcactgatggggaaaataagccccaggaaagggtaagaatcacccaaggacacaactaagatgttctcaaacagatgaccagaaactaagatgactggcctgctggatgacagatcccttaataattcacaaacggtgggttttatttatttactcataaaacagcctttggggcaagacgggtgacgagtcagaggaacacctgtcccggcggcgaggcggccgcggggtggggcaggcggtgggttgtcaggcctctcctctttccagagcgtgatcttatcctggccatggggaacacgctcagctggcctgaggtaagacccagcctggcactcaaggcaatctccaatccgggctactttgggagacatttttctgcaagctcacacatgactcatctctacagacctcctataaggtctcttggctacaaggaatcccattcaaaccgcctctgccaacagctgctctggagaccaggaaacatttggggttgctgtggttgatttttctaaaaacacacttagctggcattagtgctatttcttatctctctacagcactgttaatgtgactagtattacgagtatcagacgcagtctaaagactgtagtgagcctcccttaatttcattggtagatcttttttttcaaagatcagaaaagagattgagaagcctgaagaattaagatggaaagctgtgtccccagcaaccagggaggctctaaccagtgctctataaaggcaagaaagggggccggttccccattccacttctccagggcatgaccttgggcaaacaaccaaatttccctgggccttagctgccctgaggggcaaaagagggatactccgccctgccctcaccccctgggctgttgtgaggatgaaatgaaatgaggtagtctataaatgcattctgaaaaccacaggaaattgcagagatgttcaagatcgttctgattctacccctggactgtggcctccagggacaggttcctgctggctccctgccacgaggcatcacttggtgtttgccaacaaggaggcactcagtaagtgttaaaacgggtgagtgaaaggaggcagagcaggtgccatcaaaatgtctcattgcttgactgagtatactttgacgacaaaaattcctaactatggaggaaaaaggaagtacaaatttgacgagtttaaaattgatcgaaatacaatgactgccaatctaagaggacctctttctcaggccacaaaaatgagtagccctacatcatagggcctgtactcttagtatctgttctgagaaaatatatcatgacaaaaatgtgaccatgaaatgcagtcattataaatttcttttcgatttacaataaaagcatcttcacacatttgaaaccgtagcacactgagcgtgagacacctatttattccatcttcaggcagcgtgctgggcaagcctgtggccactttagcaggcccagtgaactgctccaaggtgacaggagctacagcgctggcaggagggtctggtaaatgatgaaactcccagccagcctgtggttcgctgggagcacagagaggaaggaaagggactttaaaaacatacatacaaaactgcttaacttatggccagcccagttagaaggtatggcccaggaggccgggatctttgctgtgtcccaagaacaagaacaactccaggccctcaggaggttgctccgtgaggcaggcgatgagtgaagccactgaaggagggaagaaaggaatgagtgactgaaactgacacatgcagtccaaggaccttcttcccttcagctgaggaggccttggtctgctcccaccccaggagactggtcccctaccccactgcctgtgcccagctaagtggacccatcctccgcctctcaccttaagtcccattttgtcacaggagcacaggagtttcctgaccatccctccccactgcaagtctgatctcttgccaccttcctgctcaccctgtgacacacagaggatgcctgtattcagggcaggcagcacgacatctgctgagttcaccactgagtccccagagccttgtacggagcctgatggagccggtgctcaatccctgatgaatgagggatggagtaatgagtcaatgaagggatggggcaaaggtttcaaagtccagacaaaaacaaacaaacatgaatcatttctccgaggaggggatgcaaacgcaaatgtcaaaagtccaagtgggccgtcggaggtgtggctggctgtgggagtggtgaggggctctgtgggagtgtccgccacctgactcctgcccatagctgccttgtaggcaggaacaagcgctcagagttaccagagattctcatttttcaaggaaatcaggaaccaggcttttgagatttttgagtgacttcctgatttttcaatattgaccatcaattcttttgtttttttcctcaagaacacgtgcggatccaacccaacatatctgtggactgaatccagcccgcagctgccagtctgtgcttaagctccaaaaacatgacggtatcaactctcctcgctcaatgtctttattggaagatatatgagcaaaaagaaccacagtaactgcttgcacaaccagaaccatgttcatttgttctccaaagcagcctctaaacagctgcatacatctcccatcagtcttccagaacaaatccctctgagctcctagggaagagcctcttctcctctgcaggcctgcccacaagctcaccctgggagctccctaatctgtccagctctcttctactccctacctcctcgtcatctctagaagcactgtagagtttagaaagcctcccctgcatcccagcttgttcctggccctccaaattcaacctttctccaccaggcctcacttgacaggcccccaccagcccagcaagttgtccctgtgccaccctctggcccagactgtcttgattccccatggcacttgggacccccaaatgtgaggcctatgaccttgtgtattctctgaggatatacataggtatggatgaacccctcaaggccctgccccagccaggcactgctgcatgagaaagaaaatgtcccaaagaacagcaatgactcaaaagatctcccccaggggttaaggagagtcctgcacaccaaggaggtatcaggcaatgcaagggggcgggatgaggaacaggccagagctgcacactatgcgggatgtgaaggggtttcctgtttacccaaaaaaccctggatgccttaagcactgagaactaaaaacgctggttcttctactttcagggagaggagattatgaacatatttaagcaacgtttctgttgctttgagat

SEQ ID NO: 53312 - DNA, 1846 bp, Homo sapiens
taaagcctacaaaaatgtccttctgtgcttcaaccacagcctgcaaaagtcatattgccttgtgggtccgctgcaggggtgcaccccacagaagtatcccagattcaacccaggaaacataagcaacttccacaatcaaagccacagacctcctttgcagctccctaaaaatctgctttccctcattcagccgccaagctaacctgctaccggggttatgaccacagggcatgctcccagtacaggagcccaggagcacccgcccacttcaccttagacccaagaattcgcatttgccctgcaaggtgctgcaggctaataaagcctggggccccacaggctcgacagtcattgaatctttggagactctatttccaggacaggcaaacccagggactcggaaggtaactcccccagatttctaggaacacacaaagagacgaggtctgcatcaagatttaccatctactccaacccaccggtcccccacctgccctccttgcagagctgagcttgatcggggtggggaggggaaacttgactacctcctcaaaatacccccactcatccagcctgcttcctttgaagcaaccgaagtggacgcttctcgttaaactcgaagctcgttagaaatgacacattttacagctcagctgggttcaccctcctagcgccgagcccaggccgggcaccgatcgctgcagccgcagcagcacgcggcccgggctgttcttcccctgcttggggctcgagccattttcggaagttcccggggaccgcggagcggctagcgcgcccggccccgggttgcaggggccccgcccggcccggcccctggcgcccccgcagcggccgcttccccccgcgcccggcaggcaatgggcctggaggagaagctgccaggcgccccggcgaggcctcggtggcttcaccccgccccggcgcacggagggccgcacatcccgggcgacccgcgctcggcccggggagcggcggagccccagggccgggcccggccggagggagccgccccacgcccgcgcctcacctgctttctcgatcttgccggacatttccgggctgcgccggaggccgaggccgccgctcatcgggcccgggccgggccgccgcggggcgacaggggcggcgcgcccgccgctcgcctcggccctggctcgccacgcctcagacccgcgccggcatggcgggctccgcgcggccgcggccctgcgctcggcgaccgcgctccagcccgcccgggcccagccgctcccgccgcgcccgccgccgccgctccgcctcccgcgcgcccgccgccgctcccccggcccgcgagccggccgcagcgcagcgacgccgcccgcccgcccgccgggcctcggccgcggccacggccacagcgccacctgccgggcgcccgccgcgccgccacagcgccccctgtgggcccggagccgcccgagcctcccgcgcgacgcgcgagacgcagcgccccctgccgagccggagtccccacgccggggcctggggcctggggtgtggggccgaccccgcctgggactccgcattcctctgctgtgggaccagagtcaccagctccagacctgggactgacagctccaacccagggtcctcggttgcccaagagcctggcctgccccctcaccagagacacagagaaccctcctgggtcagattttccaccccaggacgtggaactgacgcccaccccaccctagcatcatcccggacccagcatcccctgtgggccagaggctccacaccagggcctagaactcactctcaccaggactcaacaagctctgctggctgggagcctgtcctg

SEQ ID NO: 53313 - DNA, 1402 bp, Homo sapiens
aggactgactctcttataaaacagaaggcaagttcaggacctaagcaatcaagaagtgcctactatgtgccaggccctttacaaacatcctctcatttaattcttacaacacttaaaaagtgtaagtgaagaaggtactttgtaaggaagaggaggaaaagtggaatccttaaccctaaaagactacaaattaagaagcaggggcgttaagcataagtaattaaactggttaagagattagagagtaggtctctactgcggaaggaactcccacaggagtgggagtgaggaaactgatcaggtggtttgggagcggttaggggaaaaggtgaagacagctcaaggcctggccggtccgtcgtggttgcgggtgggtggtggtggaactgatgaagtccaagttcagggccggggaattggggctaatcagatcgggtgcacttgggtttggagccgactgaccaggtcctgtctgtactattactacattcggatcagacgtgatggggcacagagggcctacaggtgagaaacctgccaagctcagagaagtggaagttcatgggaaaagcatgcctccttgttaggaatggaaccgccacagaagaggtcgaggatggcggaagacaaacaggaccaggaggccaggagaagcaagacgagaaagcggggatggtgttaagatgtccctgagggacaggcagaggcttggagaacaagaagagaaagaacagggatcaagggaaacggagaacagcccctgcctgggaagactcgagcgacgtaggggcagggtcggagcggggccggtccccgaccccggccccttcagccggtacctacttgaggtcccggttgaccgaatgtaagttgtcctggaagtgcgcaataaaggccttctcccggccctccagcgtctccttgttccgcatcccatccttcaggcagtcgaacaccctgctcacgctggagcgcagcgcctggatggcactaatggcctgggaaaaggcctccaggttcacactgacatttatcacgtccgccatgttgccgccgccacagcagctctccaaagccggcttcgcaagcaaaaaagccgcgctcgctgatgacgtatctccgaagacctctgggaaatgcagttcgcgcggggctacccagaaagcactttcgaaaaagggtttccccttgagctaaactaatgcatgggcaggaaagtgatttttctcaacttggggaagtcaggttgcactcccggtttgcttaatggtgacaaagaaatacagaaagttcccgcatttccccaaacttgcactctggggaatcatagggaaaagaattgctcagagcaatagtgtaaaaaggaaaggaacatagcccattcaataaaatgagtccatat

SEQ ID NO: 53314 - DNA, 1162 bp, Homo sapiens
gcagctgcgccctccttgcaagccgcagcccggcgtcctggttgtcccagcagccaggagatccctacctgttagtgaacagttaggagtcgactgctggaagaattaattaggaacgtgctgtgctctgggcagcgcgagctcgggtagaggcatccaaacctttgccggcggcgctattttatttttactacattttctcaggttgcaaaaatagacaccgggcacgttctgtcttagagttttctagcaaggagcgccttcaaggccaggcaggctctgtaacaggttcccctttaaacagccagaggtgagacggggaaaatggtcctggctgggttctcgttcatctccatcagcagtccttcacccagagagaggggcaggggtcgccctaactcagatgaatgagtcccatgcctggagccctggggccctggctgggggctgctccgagcctgaggtgctcagggcgctcagggcagcaagtgtccgccacttcggtttgtcatttttggcaggagcgtttttctgtctgggtggagaatggagtttcacggaaacacagttaactcttcaggggccttgcaagtacaggaggtgaagaggatgtcaggggagagccaggtccagactggacatttggggtggtttgggaaatcaaatgcaatcatcgaagacatattaaccagaataattaatcatgcaggcacttttttactgcagtaacctttgccctattggccaatatttttggccagaatcccatgctggctggacttggattctccgggtgacgtatccagtgtctggaacacaccacagtactgcagtcgtgttatttcccaatgtaacattcatgtaactggtatctattttgatataatatattaattatatctattttgattttaaataattaacagaagcttaaaatagcacagcaataatcgtaattgtaacccatttatagacctaccctctaagaatgatttgcaaaatgctggccttgatcagaaaaatctgaactcacaaagcattgttacctctttggcagtcttcaatatccctagtttcttacagttaaaaaaaattaaatttgccatttcagattgtgcctatgattggggggctgtttctcagtgcctggctcttcatggtt

SEQ ID NO: 53315 - DNA, 734 bp, Homo sapiens
aacccccatggtcctgcaaagaggtgctttgagacaagttggggactagctctcccagcccagcacctgcccaccccagttcagagccattgccgtgaacactctgaaatccccgtggggctttgcctttgcagagagccagccctggggcctcctcctccctgcccagctccagcaccatccctggctcgctcacccaaactcaccgcttcctccgtcattccccgcaaggagtggatgacatcactctttccggcagccaggagttgacctacattccacccgccctcctgtctgggagactctccaaaccccccgctcctctctccctgggaggagggaagggccccgctcacgatttttgtggagtgacggtgccaggcccgggtccagatggtgcccccgcagcagctcccaggcactgcctgcccctccctgcagcgcagggcacgctcctgcctggcacgggccagggcccctgtcatccttcatgtggctgtcaggcccccagctgggcctgccacgtttcccagagaactggtgttatctgggctgggctctcccctggaggtgaggcccggtgctgcctactaacagttgtggtctccaggggcttactagggactcatccattcaagaaaaagggaaacttagctgaaaaggtggctgtggctctgtccttgctggcagcagggccagcttccagcaagcaagtgagtgcgccccatgtcagg

SEQ ID NO: 53316 - DNA, 2682 bp, Homo sapiens
tgtaataattttaattgctgtattttaaaatgtcaatattgataatacatcagaagcataatcttcagtaatatttaaacttacaaagattttttctatcaacttaaaaataggaggtacataaaaataaacggtacacagcttttaaaacttccttcagagcaggcacacagacgacaaaggctggaggtgatagaggagtgaaacaagaaagaaggtgtatctgagcgccacctggtggcaggaaccaaaaccaggggaaacagccaccaagttggctcttcttagatgaaatcaatgacttcataaaaaagagaaatgaggaaaactacaaagttattacccctaataagacaaacagcaaatacgtgctacatctagctgtgatatcagtgaattaagctgtaccatttgtctactgaagttggaaactcgtacacctcttccagaggggcgcctgtcctggcagaagaatgccggaggcgctaagtgctggagaaacagagtgagcagcacagctcccagtgccagcagaaaagcagagcagagcacgcgcctgcaaactctctctggcattaagctgggccaataacagccacatttactgagtgtttactaagtgccaagcaattgctttggcactttacatctgtgggtttaatataccttcttaacaataatcctatgatgtggataatttgttttaaaatggtcaccttgagagcccagtgtagatacttgggttctgggctgaaaaaaggcgaatggttcacgtgtacacaaaagctcctaggaagaagttgctggaaaacataacaaccattattttgtaatccagaaatcatttacactttgatggaaaataagaacaaaaactcaatccaacaacagtaacaatgggtaaacttctgagctctctggtacctaccatcagggtcctcaaatgtccgaggatgaagaggctgtacttggctcgtgtgatggtgacattcaatctctgcaaacttgccaggaatctaggcaataaaaaaagagttccttctttgtctagaatgacttaacatgcccatgtgagacaaaggtggactctagaatgactcaacgtgcccgtgtctgacagaggtggaatcttgaatgactcagtgagcccgagacacaggtggactctagaatgactcagcgtgcccgtgtgagacacaggtggattctagaatgactcagcatcctcatgtgagacacaggtggactctagaatgactcagcgtgcccgtgtgagacacaggtggactctagaatgactcagcatcctcatgtgagacacaggtggactctagaatgactcagcgtgcccgtgtgagacacaggtggactctagaatgactcagcatcctcatgtgagacacaggtggactctagaatgactcagcgtgcccgtgtgagacacaggtggactctagaatgactcagcatcctcatgtgagacacaggtggactctagaatgactcagcgtgcccatgtgagacacaggtggactctacaatgactcagtatgcccatgtgagacacaggtggactctagaatgactcagcgtgcccatgtgagacacaggtagactctagaatgactcagcgtgcccgtgtgagacacaggtggactctagactcagcatgcccatgtgagacacagatggactctagaatgactcagcatgccagtgagacacaggtgaactctagaatgactcagcatgcccatgtgagacacaggtggactgcaggcagcttttccgggactccttcactcctctagaagtcacagtgctttcttactctccgtcccaatacagggtaccgggcacagaagaattcctattaaaaacaggaaacaaaccaaaacctcggggcttccttcaaagtgatgcatctatcaatttcctatttttacctggataagataattggaaattttaacagtgcaatcttgaagccttgaaaaatcctaaaaatgtggtaccagcctaatcactttattcttacatttaaatatatctagactgttaagatattgtagaactagtgtagaaatacatgaacaccagataaatatttcagtagatcagaaaaagagctcagaaatagaattgatgtatgataaaagtgaaatttcaaattagctgggaaagaaaggtctatttataaactgaccctgagatacaactgggctctgtatatgcagcccatcccagggaggggcaaagattactttaattactattttatttgaaaacgaactaatttataacctgtaaattctgtctgcttctcatgacaagaaacaaataatcatgtaagagtcttgggcttgggatattttctgtcactcatacaggtgtccttagcatcttaaataaactgacagtagttaaggtgaacaaatttagccaaagcaggaaaacacagaaaacaatgacactttgacacataccatggggagtaatatgcctctgcaaagtataatctaattatttatttgaatcttattaaataaaagaacagattcacactatgaaatgggttaatataaaagacaccaaggccgggcgcagtgactcacgcctgtaatcccagcattttgggaggccaaagtgggtggagcacttgagctcaggagtttgagacca

SEQ ID NO: 53317 - DNA, 1941 bp, Homo sapiens
gaaattaaaaaacaaaaaacgaaattggtaagtggcatttatactctatatcccatctgagcctggtatcgatcctattacagacagatactgctggctgatgaggaagcccagataggttagacaacttggctgtggacttccaggaaacagcagaactgcaattctgactcccagttccacaaggggctgtccccactcacggggacagctaggcaccgagccaaaaatcccccaagttattagcccgcgcaggtaacatcaatcctaggatcctcagctgtgtcacttatcaaataccacactcggccttctccttgtggagctcttttccctcaaggcagtcacccccgtttcacttgggtcgtgcaaattgctgggcacatccttagatccccagaagttggggaggacggacaaagtcctgtggccagcagcaaaagctccagcccctccaagtgggagaaacagactctcctccaaacgaagggaccggccgggcgcggcggctcggaggatccctggagcagctgagctcagcctgggaaacacagccaggccctgtctctgcaacacattttgtttttaattagccgggcgtggtgacgcgcgcctatggtcccagttactcggggggatgaggcggaaggatcgctggagcccaggaagacgaggttgctgcgagccgtgactgttccactgcacttcagcctgggtgacagagcgagaccccgtctcaaaaaaaaaaaaaaaagaaaaaagaaaaaaaaacaaagggagggactccaggcgagaggcagacgagcgtgtggagggaaccgacactttccaccccgagacctcccgctcagccccaaggaaactacgcagtatccacaccaaaaacagctcacacgagaccgcagtgtagacaacggaaggacagggggtcgcagcggccgggtccagcgcgcaggaaggcaacaggcggccgccagccgtcgaggggtgctcccgcccccgcaccgagggaagcggccgagcccgcgccgactcttcccccatccgcccaccgggacctaggcgccgcgatggttccccgaagcggccctgcaagcacaagccgcgcctgcgctcacgcccgcccgacctacggcctccagcccgccgctaccctcaccgctctctggctggcgtcggcctctagcccacctccataccgggccccgctctaggccaccagcggaagtgcgggcccgcagccgcagctaccaaccagctgttgccgcgaggtaggccccgcccccgcgctgagtcggccggccgcaggccccgccccggccgctgctttctggttttggtgccccccagggggcggggcatgggaagagcggccgcggtgcaccgcccacgccgggcgctggcgtcacgtccgggcagctggggcccgaccaatcccgagtccccgtcagggtggacggggagagtttgccgcggaaccttgacctcggccccgcccggggcttcctgcgggtggggcggctccgggatgagctctgctgcgggtggggtcagcccttacccgctggccatttccgttccctcttttttcttcttttttccacgcctcaggtgtctcagcggatgtactacggtgacgaagtaatttttctctttagatttcctttaaagacctgaaatgtaaattacataaacgtgtaatttcggaggaatatgtgtatatcctttatattacaagaaagggagaccttaggtcttgcgaacaatgcgcgcgatgcgcaacacagcagagtaaatccctcgctggtgcggtggctcccgcttctaatcccaccactttgggaggcccaggcgggaggctcgcttgagcccggagttcagagaccagcctgtgcaacatagcgagacacccgtatgtacaaaaaaaaattaaaactcagc

SEQ ID NO: 53318 - DNA, 702 bp, Homo sapiens
ctctactaaaaatacaaaaattagctaggcttggtggcgggcgcctataatcccagctactcgggaggctgaggcaggagaatcgcttgaacccaggaagcggaggttgcagtgagccgagatcgcgccaccgcactccagcctgggcgacaagagcaaaactccatctttaaaaaaaaaaaaaaaaaacacccaagcctcagtttccccgagataaggcctggggcaaagaccgcggcctggagacctcaggccaaaaggcgggtctcccagaagacggggaaacccaccaccccacgctgagtttttacgcgcgcattttgaaaaacagaaacaacaaaggcgctttcaacttaccctccgaaagcgccgccacctttctcccaacccggaagtgctgctgttgaggaagcggaagtagtagtgcgtcgccttccggccccctcggcgtcacgctgccatggtaacacggctgccgctaggccttggaggcgcgcacatttgcctacccattttccttctgggtcctttagacgtcaggtggggtagagagtgctcctgaaacgaagaaagtaggacagaatccccctccattgacgtactaatgcatgcgtgcattccatttattccagtttttggtgaactccaggaacaacttgggaagacagatgacaaatcaactaagataatttcagattatct

SEQ ID NO: 53319 - DNA, 2573 bp, Homo sapiens
cctgggatggatacaaagaaaatgctcaggttaagataaaagattgtggagaccaaggttcttttcaagtctttagtggctgcccttagagacaacagacaagtgtttcctattcagatctttgaaaggtggtagactcttaatctctttaggattgggagggcctggaagaaaaagatctagctatgttaatagagattctttgcagatgcaaatgtccaccccgcccgccccccccaaagaacagctttgcaaagccatttcaaaatgtggcaaagaaacatgtttaggggtaatattttaactttcttctttgtcacataatgttaggccagagccagtttggaaagtaagtcacgatatatagggttaaatgaaagccatctgatgagaatttatggtttgtagggcatgactcttcccagacaggaatgtgggcaagataaaaaaaaaaatcagagcttagtccgcactcagtcgaggaaactggcttagagaagttaagctttggcctgggacttgcgccggaacttcaggtcctaccttccacgggaaacagcctctaattccttcctttacttttctaggcgcaggagccagctccccgcccctccacaccgctccactccccgcttccaggcgcatccctgcgggtggtgttccggttagagacacgtgtttcggcgcaacttgtcccgaagctgcccggtgtctttctcccgcttaactccgtgaatgactcgaaacccgactccaaggcacggctgcagctcgcggcgcgcccacagccgggccgcgggtggggacggagctgaagccgggtcagaactcacccgactcgcctgggctgggggacgtctggagaacgtcctggggttgtcgaagagcgaaccgtcggcggctgccatggtctgcgtgggtgacgcgtggtgcagcagcgagcccggtgcgcagactgctgggcccgggaccccacgtgggacgcgcgaggaccctgcgccaccgccccttccgggtccggaacggctccagctgtacggactcgtcccgaggggagccggggacggcggcaccgggcgggtagggacaagactaccgcgcgtgcccccgcctggtggcagcccctctctgcgtccctcgcggcctggcaaaattacattcggccgagagttcacgctggggaagctctctgaatgcctctgagaagcgagatccggcgccatctcaccgacgagcctcccctttaccgccccgtgcgtttcctcagcactttaggaactaaagcctgtctgggtagctccctaacaggctctggagctcaatccctgggcagggaaaagggggtcctcggggctccccgctcgctgtcctttttctggacaggcagttccttggccacctggtagggccgcgttgcctggcaacggcggggtccttcttggctcggcggcgctcggggcctgaggggagaaaaccgccgcggagggcgctgggggtggcggcggcggtccgggaggtggtcgcgcgactgcgtggagcgccagggcgtccgacctctgcacctgagagaagatgaacacggccgaccaggcccgggtggggcccgcggacgacgggcctgcgccgtctggggaggaggagggagaggggggcggcgaggcgggcgggaaggagccagcagcggacgcggccccggggcccagcgctgcattccgcctcatggtgactcggcgggagccggccgtgaagctgcagtatgcggtgagcggcctggaaccgctggcttggtccgaggaccaccgcgtgtctgtgtccacggcccgcagcatcgctgtgctggagctcatctgcgacgtgcacaacccgggccaggacctggttatccaccgcacctcggtgcccgcaccgctcaacagctgtctcctcaaagtaagtcatcccccgccatccctggggtcttcccctgtccccctctcgcggccgcatcatccgtcccaggggaatccgatcccacactctgtccggggatttccctcttcgcaccgagcgctggggatttattaagcagccagggttaccacagcttaaaaaaaaaaaaagaaaagctctgcagctgtctgcaccctgtttccccaggtcacccgccgccgcaaacacaggtacacacccagggggcttcccggagttgagtcccaggaacccctccttcgcccctccgtcgggcccgcacatggagcgggttactcgatggtgctttctgagactccaccccctgtagatccaacccggggcctgcctctgtcgttgctgctattgtttggggccgactttccgaggttcttggctggctttgtctactgtgtgtgtcctcctctcgcgcctctttagcttcagaaaagaaaaactggtcccatccattgtcttaattgtttcagtgactttattatgaatggtcctcgcctctccttgggcaaacgggtaaatactggatctcggggtttgtactttagtttttctttactagctaaacatctttgggatgttgaatgaaaataaagattcgaaacaactac

SEQ ID NO: 53320 - DNA, 1900 bp, Homo sapiens
ctgcaaggcttccttaattggtccaatcatctatttattagagtgagtgcaatacagttcctgcccgcatggggggaaacaggctgggaggagggccaggggcaagtaagtgctaggaggggaaatgggagggggctgggcgggcactgtggggaggggcaggggttcccaaggcaacgtcgaaatctccaaatacagtgggcctgacggggatgacagagaggctgaagagacagagccgtcctgcacagtccaggcaccaccctgccctgccactgcctggcgggcatcttgagctccagacccttagcctctccgggccccccagttttttccgggtaagagactcgaactgatgctctctaaggattcttcaagctctgaaattctctgctgacatttgccagcagcaaggttgactcgaatctgaaacctctggggaaagtgggggcctctcccagaatggaaccctctctgaacactttcccgggagggaccttagactgtgctgcctgttgccagcgtcgcaggcaggaggagcgcagtcactatgggtggggtgagtgcatgggggagggagtgaaagagcaaatgtccaaggaagggcataagagaagggctccagcaagaatgcaaaggaagatttgtctaaaatggcttttcaaggcggtcatgagcttgcctctaacccagcaaagcgtgtggaagaaacatcggcagtgagggctcccatctctcatttctcaaagagccgagactttcagcgaggccacttgccattcctggtaggtaatcagatcgctgttaattaataaagctgtcaggtggctcgtcctctctggtcattagtatcctttcagaaagagaatcctgccatcaccgccttgtccgcccctccgcttgccagcaattaacttaatgctatgcaaatgagaggctcttctcatcattagcttatagccacgaatgttaatcgcataattgggtcttcaacagggtaattagacacgatttcctccattagtcttacaaggctaattattgttgagcggagagggggactgctcccagggctccaggcgaagaggggcatctggttaaagcgaattcgggcgcatcgtccgccaggtaaaaacagcagtcgcgatccattgtcacagcccactgtccccacccatcgtggggaccgggctagggagggaaacggaaccaggggaaggcctgggggggtcacactcgtgccccttgcctgggtcctgggatgcagacaacgtggcatttaaaagtgaaagcggaaacaaacagcagccccgccagcccgggcccggaggcccagccccgcgccaagggccacccctcggcgcgctcagcttccctgggcctctgctgcttcctcagtgccatgaggaccgcgctcgatggcgtccaggggcctctgggtttgactttcatggctatgaatctcggaatgaataaagagcccagaacgctggctggggtagggggtggggcaggggcgaggggacaccctgtggaggagcgggctgggagcgcgggggatgcccctcgccctgcacgcgcgccctgcccctggctgtaacctgagcagcccgcgtgagggtcagtggtgacttccgggattgaattggctgggaagccggtcccatttcaacagagacctggggcagcgcggtgggcagcgggctgggccgagatcgagaccgggacaaggcagggaagagcgggatgggtcggccccttcaaggggagccctggggcgcagtgtggggcggtcttgctccctgttgacccccattccccctcccctggatccaggaacccagtgggctctggaagcagctgctgagtgcacggcagaccccctggcatggggttacac

SEQ ID NO: 53321 - DNA, 956 bp, Homo sapiens
cttcgtgggcgcgcgactcggccccagctgcgggtcccggccgcgcacccgacgtcgcagtggaggctcccgagccgccgccagcgtcgcgacgggcaggggtgtccggtcacctgcatcaactcgaagatgtggttctcctccccgtactggggcatctcgggggggatacggtgcggggcgatagtggcgtccatgtagccgtctcggctcgccgctccctagtaaccgcgtcgctagggccgccgcgccgactgcgtcatcagcacgcgccgcggccccgccctgcaggctccgcgccgggcccagatacccgatcctcggtcgcgcgggtcgcccccgccccgacctccccggctgacgcgctctgcggctcgggcaagttctttccccaaccccggcctcgcttttcccatttgcgcatcttagcgggggacaccctcaggtggcttccagctgggcctcctcgtatctgagacccccgacgaaacccagaaggggcaagtcggccctccgaggggacgggaggcagaacctgcttctggttctgtcagtgctccccggcccggctccctgtgcctcagtttacccatctttaaaacagacgcgggaataaatgtgggggagggtgtttgaagggggaggggcgtccatgagatgggccggaggttcgaggatcgggtggaaatcctcagcccaactcctagagtcgagccccggtagacccctcccagctccccggctctggccaagccgccaagtgacccgattgctatggcaccggcggtaacaatcacgcccgcggccccgccccttctcgcccgacgtccccacccaccctcgcctcccaagtcctggaacgggcctccccaccctccggggcaccgacactcacggagtcactccaacttctctgggtgctccgtggagcgaagagcgctctaggacaagcaagg

SEQ ID NO: 53322 - DNA, 2067 bp, Homo sapiens
taggcaaagtaccctgctctctccgggcctcagtttcttcatttgagaagattggaggtgttaacagtggctgcctcttctctttgtcgtgaggaccaaaggagataatgactgccaagcactttcacagtgcctggcacacagagagcactccattaacgttagctgttgttcttaggaggaccgcgtcccctcccaagtcctcaccacacatccaaaacacacaaagcaaaactctttaacaggaaacacaaagaaagagctttaattctacaaggtccctccgattgcaggctcttcatcctccagttcctcaaatgaatgaatgaacgcctaggaggggctctgcaaatagctgtctcttaggaatcccctttgcccactttaaggtaactgtctttcaccaccaattaaacacccacaagtacacccagagcgagtcatgcaaatttcagcggagacaccgaatccaggcgagtccttgatccccacaggcgacctccattcattctccacgcccctataccccgacccctctctttaagttctgggaccagccccaccctcgcgacccttcccctcccgccaagcgtctctaccctgccctccgcacctagcgtgaacctgtcaccccaccaagtgagggactgacgaaggggcccacctcgcccctgcccgagggaccgaggcccagggtgcagccgtcccctcgggggccaaggaggggcgaagtgctccgtccggctcgcctctcctccccagggacccgccagtcccggccgggccagccggagatagcgtgtaataagagggaggggagagctctccgaaccccccttccccgggatccctaccaagcaagtgagtctcttgctccagcccctccgagcctccccggctggagtcatggtgccggggctgccccaggaagcccccataaaaaggagggggagacacccccatactcacccaccgtctcctccccctcagctgtttacctcacagtccctccagcctacagggcgccgccatcttggacgtacagcacctcccccgtcgtgaaagggccaaggccgacggcggcctccgccacgaaaaagagtccccctccggacctcccctccttctcgaaaggaaggatagacggccgcgctcggcagccccgccggaaggaagaggctcttccactcataactgacgatgtgggttggacgagaaaaaaagtaaggagggtttttatggaggggggcggggccgggcggaaggatccgaaaggaggctgcgaagagatcttgtgactccgcgaaggaggcaaaaagaagggccggcgcggcgggaggagccacgcgagagcccgagggggcggggcgggcggtcacgtgactggcgggcggggggacgcggcggagaggcgtaaacaagctggcggcgcctgggtgtggttggagcgccctgcccctgccccccgagtcgtttctgcccttcgcttgcgtggcgccctccgagggtctctctgtgggcggcctcagagcagcgatcctgtttcccaaggagctgctggggcccgcgtgggtgaagggcctgcttgggagctttggagttgcagctcacctgggaaggggcggaaagctgcgggccagggcagccctccttcctgggctaaacattttcagaagcccgcctccgggattgcgggggacccccctggcttctgccttcaagtagctcacacttcacacctactcatgacatctaggggaaaccagccctaataggagacagcttgaaaatcagaacgccttattccgtttcctgctgaaacaaggctttaagtcctccaagcctcagtttcttcctctgtgaaatgggcataatgacatctgtgacgtgaagaatcaaggagatgaagtatggacagcgtttagcccagagtcctgcgcctagtaaatgctcactcactagataggtggcctttattgcgaggctgagtatgatgggctccatccagcacgaacacaaagccctgtgagaggaggcagagtgagatgaagtcgaactgtgggatat

SEQ ID NO: 53323 - DNA, 705 bp, Homo sapiens
taatgttatttttgataactgttaagtgccagctgtcagcatccatcacttccagaaacgggtccaccaaacactaaattcttctgtgtcaccacccaagcatagtctgcatggggtccagagatggaaaggtcgagggaaacggggaagggtctgggttctctcagttccaccaatctgcaaactactttacaggaacagactcttccctttgcattcacaccagggaagggattcaagatttctgaaatcttcagagatttctgagaccaccagtgatgggagacctaaggaggagggcagggggagcagcactgctctggagctctgacccaggaagcccccccacaccctgaccttccttggctccatgacctcatcctgcaggaatgcattctgccatggaggagagcagccataagcagagctcatcaactgctcactttccagggggccataaccacattgtcactgtttctacactgtctggaagaagaatgggcattgttacctcaatatgggaccaccaggggcttgcaagaagaggctgaaggtgacaggcagagacagctctactaccatctcctgccacttaccaggctgggccacctagatgttttctgcttctctggggttgatttttgtcatttgctcaacagacactattcagaccactaccttccatacaccaccctggagcctccc

SEQ ID NO: 53324 - DNA, 2197 bp, Homo sapiens
tgagccactgtgctgggccatgattctcatctcccaatattctcaaacccagtcccttcatctcttgactggattatgcagtctcggagctggtttatctgaactcactttctccccctttgatctgttctccacacaacagccagagaggtctttcaaatgcatgaatgggatcactgctccgcataaaacccttcaaggggccaggcgcggtggctcacgcctgtaatcccaggacttggggaggccgaagcaggcggatcatttgaggtcaagagttcaagaccagcctggccaacatggtgaaacctcgtctctactaaaaatacaaaaattaaccgggcatggtggcaggcgcctgtaatcccagctattcgggaggctgaggcacgagaatagcttgaacccgaggcggaggttgcagtgagccgagaaagcgccactgcattctagcctgggcgacacagcgagattccttctcaaaaaaagaaaccttcaggggctctccacggcactgggaagcagccagcccgacgggtggacccttttcgtgggtgcgggtctctgacctcggtcggcctcggacctcatctcctccctgtttgaggggccacactcctcgctccggggctttgcagcagccctgggcgcctaccggacagacgccgttctccccgcctgggtcttgagtagggcccagcacacagtaggcgcttaatgtctgcctgcctaacagacgaacgccggatgcccgcgttcggccccgagccggcgcttcggggctttctgtggaggcggggcgatggttacagcacagttcccccgcgctcgccttttccacatccacctccgcgaggccccccgcaagcgccgttggaaacctagtcccgagggggctgcaagagcttgggagaagaagcgccaacaccgacagaataccaggccgacccaatgcggaaatcaattctcagccgggaccttttccccaccaagcaggcgggccggaagtctgcctctggcccgcccccgaggtgtcattgggtggaatacccagaagagggctgggacgtggttaactctagttctttattggttaaaacgtacgaagctggaggagaaggtgggacctagcttcctccggacttctcattggctcaaaaaaaaactcgctcggccctcggattctcattggctgaagtcgagggaggtttgtgtcttattatcctccgggtccctcgctggctagtaggagagactggtgcttgccccgcccggtggactaactcgcttaattttaaataaaaagtcgaggacacggcggtcgttttcccgaagacatgggccctcccatgggccatttgctccctggaggccctcgcgtcttgctgagcccggggagttaggatgacgcgagcggtgagggagcccggaacgattccttcgcggaacaattgaggcgaggcctttgggagtactttgtgggacggaccctggcgggccctgccagacgcacagggatggcggcggaggcggccgatttggggctgggggccgccgtccccgtggagctgaggcgggagcgacgcatggtgtgcgtggagtacccgggagtggtgcgtgatgtggctaagatgctgccgactctgggcggcgaggaaggcgtctcccgggtaaggggctgggaatctcggtgttggaataagagctcggagtcgcaaagaaaacgagcactcaaaggatttctcagcaagggaaatttagcaaatttacttacgcagaagggtgctgctcgctcttctggccgctgcaagagagccaacagaacaaagaagggaaggatttttgtttttgtttttgtttttttgttggtttttcaggcggagtttcgctcttgtttcccaggctggtgtgcggtggtgcgattttggctcactgcaacctccgcctccagggttcaagcgattctcctgcctcagcctccagagtagctgggattacaggcgcatgccaccacgcccggctaaatttgtattttttagtagagagggggtttcaccatgttggtcaggcttgttggaaataaattttgggtgccgcaaagaagaatcagcactctggcaaacagttttctcagcaaggcaaatttccttctatagaagggtgcatcttgcggatggagcaatggcgagagcacacc

SEQ ID NO: 53325 - DNA, 2118 bp, Homo sapiens
tggctgacctagcaggaacgcacagctcctctgggcccagccctggtgcgttggcagcccaggtctgggcaggtgtggggcaccccagacagccacatcccagccacttccttcccctctgctcattcatgccctcgtgcctgcttgggcaatgggagttcccagttccctgaccatcatcacgtgaggggacgggtgtgagaggtgacggtgctggtatccaggcagatgctggggttccacagagccctaaaccacaggcctagactggaacaggaagggggcatctggccccaggcagtaaggaaaggccgttgtcttaggagacagacttcccccacctggcaggctggcctaggtcacttagccacaattacccccggcctcacagccccctatgccacctgctctgtccagggacggaatgagcttgcagcgggtagaggagccggggggttaaggacatcaacctcagaggttaggaaggagctaagaggtactggcctggcccagggtcattaaccgcccagtcagtgccccagcccaggtaggcgtggagctcagagaaggcctggcagacagtgctgactcaggcccttccctcaaccccagcaggagccaggtagactgtccagcatgctgtggacgggaccctggcctcctgcctcctgcgcaccctcagaggcccaggagccatcctggaagtccacttcctccgacctgaggtcgcctcccacgctgggctttgtacaacaggaaagctgcgggcattgtgccgggctcctgaccgccaccgcctctggacagagagccagccccatttcttggaagttagcagggaacccacaggcacactcacacccacaccccacaaacagccccgccaggggaggtctggcccttccactgacaggaaaagagacatacgctcaccccccttttcctgactcacacatctctcccctgcctagaaagttgttcctttgaaaagaaaagcattagaggttacagcgaccagggcccccaaccacccgggcctcctcaggggtcccagactgcctcctgtgaaggccgttggctcagctgggagtctctctctctcccagggattttagccacatctggaccagctgggaggcagacagtatcctgagtgtccaagtcaccggcagtggctctgagatctcgtgcaggacaagcccgccacaggggactaaacattaaccctgggggagcccagcacagcacccaggtcctggctgagcaccatcagtgcctgctggacagaggtgtccccaggcaggccaatccccaggaggggctgaagccaggtggcctcggctgtccctgagcaggtctagagagcggctcctccgtgagctggcaggccagcagctggcccagccctgcttggtgtcatgtgatccctgcacccttcccccacccccggggggccctcttctgccagccgggtggtggggaaggatgcaggcccaacactgagagccatgcatgcttggggtaagggagttgccaccctgtcacacagtcggggagacgctctagcccgcgtggagctggcctgtcttctctggtcgcttcccgtcacagcagcagcaggcatggaaccagaccatagagctacgtggagtacaggggctgtttaaaccatctgctcagatggtggaggtgcaggctccagagagagctgccctggggtctgggaacaaagtggcagagtaaggcctctatcccttgccccctcacaggacagagaaagaaagcagccaacagccctggcagctgccccagaaccctctgcagcaagaaaggcagggttccagcacccacaggccaccctaggtcactctgttagcagacagcccatctgggcagcgcctgggccccagggcactctggccgggctgggagctcagagcgggaggagcaggaacggcctagtgaacagctgatgcagagaaaacgctttcccctgagggcaggtgcccaggcagccgctatgagctgactgctaggaggagaaaagaacaccacgtgcttggctgtgtcctcaagggacactcctgtcccacccctagcaggcatgctgatgtccct

SEQ ID NO: 53326 - DNA, 1282 bp, Homo sapiens
caccaggacatctggtcccacgtgttggaggcctgctgctccaccccatcccccgaccccccccccaccccgctctgagcagccccgatgtccctggtcaccagatccacatctgccccaagtagggtctgtctggaaggcccctatggtctcatcacctctgaggattctaggatttggccttcccgaccacttgttccacacctgcatcgtaaaggctaacgacgcgctgcgggccctgggtgggaactgagtgaaataaggcacaggccaccgatgtaaacagggacagtgccgcagaaaaaggtccacctgggctgcagcggccttggtgacagcaggccctggaacggtattgaggggcgcaaaaccccagccgtggtccctactgttggacggggcgcggcggcagcccccactgcccaccctgctggctgatttctgcagaaggccccgacccccacctatggaggagagaggagggaggcggcccgctgggatcgcccggccccgtccggggctcgccccgacctgcccagctctgccgcgggtggggaggctccgacgcaccccccgcccgaccgccccagctcacccacctccgggcgcggcaggtcggggtctagctgcgtgaagctgtgcagcaccaccgggcagctgtcggggacgcccacctccaggcgcacggcgtcccacacgctgcggctccgccgggagcccggaaacagcggctcggcgccgccagcaggcccggccgcctcggcccacatgcgctgcaccatggaaggctcgcagcgcgggcgcggggccggcccggcgcgcggcgggggcggcggcgcggcccgcgcggctgggctttgccaccgctgtgagcccgcggcccggccctgctgatgtcaggctggggggcggggccggaggggaagagggtggggccggggaggggcggaaccggagagtccgagggacgcgtgcgtgcgcgcgcccgcggccccgccctcgccgaggtcagacccggggcgggaccgggagcctggaggggcggggtctgaacaaagagggcggggccggggaggtcgaggggtgcgcgttggctgggtctcccggaggaccggctgtcacgtgtgtcgtggggccttgggtaccccggttaggcaccgtttgcgtgtcacgctgctgcagtgcgtgtgttgcgtagggctgaaatgtgtacgtgctgatcatgtgtggggaagccgccctggagtcagctaccccgaattccagcaaagcctctccccaa

SEQ ID NO: 53327 - DNA, 2325 bp, Homo sapiens
cctgtgcttggcggttggagcctctgctgggaggaactaaggactctcgagatcactaagcactgcccggaagtggggggttcttatgaatcggcattgatcccttcctccctcctgccccagctcacgcccccccacacccccacctagccttcccaggttcccaacctccccccgggacgtgcacctgcctttccttgggggctacaaccacaagcccctggagagcacggctgcacagacctttcggaagtcgggacgctgctcgcagaggaactttaaaaggcaggctgtgaactgacagctggcagccagatcccacccacacatgtgttttgtttggcttgcgaagtgtttttaaaattttaagccaacagtaaaaggtcaggcgacttcacataaaaacccacatttccctcttctcctgtaactctgggtgacctgaccacaccgggtctgtgttcccaagtgccgccggaagctgactgcagctgccccctgtagccagggcatgtgtggggactgctctgacaactgtcccccactcccgcagtgcccagtgcccgacaccctggggagtcactgccaccccggaggggccaccaattcaacatgtgacaacccgaagtggagggaagcagaggaggaagagacggagggggacacacagatggaaactgagcccaagaaccaagagtgagcctgaggaccacagcgagggacagcgggagagggaggcagcaggcagacggaggcgaggagcgattccttgggcatcttaagtcactctctggcccctgagcagctgtctcgtttagggaaaaggtgtgttcaggctgaatctctgtggtccctcttctccctgctcccatacccagacaccgcggccagtggggtcttgatcccgcaaagccccccactgccctcaggcagaagaccactggcttggtgtggccccagctccccactccaggttccctctcagcagaactgctgcagctccttcttcatgccgccccttctgtctggctggtgcgtccctccttccacccattccttggccagtacatccttggccggtacctgagaggcagatcataaaagctgcccctgtggaccttcaagtcgggacccaggcctgccttaacgcagggccccagacagtgggctttgggcctggggtgcagttctgggggctgccggacacacagcagttcagagcgggaactgggcacagggcagtgactgggtgactgtggcctttggccatcaccttttccaacctgggcttggccaaggccgggaggaatggcagccaggtaccctgactcaggtcaggccctggtggaaaacctgtcacctcctgttgggcaggtggaggtcactgacccctttctgtctcttgtgatctatatttagagcctggggaggacatgaaaagggtgaggcctggacacgctccttggtcatttcccaacactgacgtcaccattcctagcctgcctaggtcctggggtggccctctgtgggcgggtgagcacacaccttggcaggaggtgacgcagctggaccacgcgtgggaactcccggcacagcgggcgggcctggctcagccccacctcccctgccactgggttcctggcaacctctggtggcttcttcctcctccttctgccgccaggatgcaggggtccccacaggcgagaggctgaactcagagctggccaggtgagaagcgaagcaccgaaccactgaaatctccaggagaccacactgggtggcagatgtgacagcaaccctctgacctcacggggcgctgccgtcccagcacaaccagaacaaggtgtgccgatgccgggagcagtgcaaacggccctggacggggatgcagagggctccggatcagcctggggctcgctgtggggccctgctgtcatcccttggaaatgggtacacccccggcatattgagggggaggcacgcagaggaacaaacgtgataaatgcatccatgggctgcaaatcgggggccgctcggacagctgtcccccactcctgcagtgctcgctgcctggcactgtgaggagtcactgccacccccgaggggccaccaattcaacatgtgacaggccgaagtggagggaagcagaggagagaggaagacatagagggaaactgaacccaagacccaaaagtgagccggaggaccacagcgggagagggaggcagcaggcagacggaagcgaggagacagggcgcagaggggctgcggggggtgctgggcacacctggctgaggaagggaccaaaggcccagagggtcccat

SEQ ID NO: 53328 - DNA, 1555 bp, Homo sapiens
actgccatggacagccgaggcgctggggcctgggggtgaggccagttggaggagctccacctgcagcctccccaccgcaactctggctgccttcaggagctgggcctagtgagggccatacatggcacaaacatttccagctactgtgcatgaagcttacgacgaccctgaccccaggcttctcccaggacacacgacctaccagtggtcccacgatgctctgcccagcacgccgggtggcctgggataatgcacctggccacacacacaagcccaggctagcaaaacccaacccacaggcacctttctaggtaggggcaggccctggctgggtgtgaggcccattgtttacaaacactgtgcagctgtcgctaggagctgtgactcagagccagagcagtgactcctcgcgaagctgtttactcggcaccacatcctgtccaggaagcagatagcagaggccgaggcctggcttttgctcctctttcctgctgctaacttgactcagggagctgctggccagactcggtgtccagctggggggacactccagctcccctccccctggcttctgggaacctgaggccccgtcaagtcgctcaacacacattcaggcccagccggctctgctaggtagtgatgctgtggtcgtgcaggagacagatcctgcccctggaggctgcacctatgcctggcatcccctccctctttggctctgactaggagactcccagggacgggggcatcactgacacctgtcactgtgcagcccagaggcaaattcttgccacgttcagaagcctggcaggcaggatcaactcctgacaccccttcgtaccctagagcctagtctggcgccgcctttagcacacctcaatggggacaaagcacttttccagacagcctctgccagaaagatgaggccacagtcatcatctctgttgtaaaactgagaaaactgaggcccagagagggcgaacaacttgcctgatgtcacacagcgtgtcagtgccaaggcagggtgtaagtccggcccccaaggctgcttgctttcctctactctgttccaaattaaggatcacaagtagatttgttccaggcagcacacagacttgacgctgctgggaccctgtccctggggtgggtggtctgtcccctgtaggaggcctaggctggggactctgacttccatttctgctgatcactgctgcctccaacctggcgcctaaaccagagtcaacaaccctctgataatttctactacgcactgccatgccaatgcgggtatcatttcaccatcatgatatgtgacgcaggttttgcaggtgagtttgaggatgaagctcagagatggcacaaagctcatccaaagccacacagcagagcagggcttccaatcctgtctgactctcaggtttgcgctcccagtcactccttcctgcaaactcctagcaggaagactctttatgacttttcataaagagtcaaaggtgattttatcctcacggtgcccttctaagttcagggtgcaagtatctcaatgacctccagttca

SEQ ID NO: 53329 - DNA, 1692 bp, Homo sapiens
cgaggacgcagtgagccgtgatctggcccctgcactgcagcctgggccacagagcaagaccctgtctcaataataataataataataataataataataataacaacaacaacaacaataataataataataataataataataataataaaataaaggaatggcttccactcattccactcctgggccagcggcccgctgtgcactccgctccctttcgctgatgccatgtgagcagctccatggcggggacctgacccctgctcctcagccccacactgcctcgcccctttgtatatcaaaggcgcctctgaggggctgtgctgacccccaccaggagcagcaggaccacctcaggcatcccagctcccctgaggcagggtctggggctggggttggggggaaggacccctcaagtctctatctgcacagacagcccacccgtgcccagggctgccttccgagcacccgcagacctgggcctgcagtaacaggagagctatctgcaaaccgcagtgtcatcagccgcacggcctctggagaggcctgagaaaggccggctcagcttgcaggcgaggaaccaaacgaaaggcaaactcctggcccctgcagcctcgcaggtcccctatccctcctccctgccttcctttccgccccgctgacaccacggtctgcaaaccatggtcctcctcgccacccctgtcacctcctcctccgccccccgccggcctccgacgcaaagtcgccacccagtcaccccgcctcggccccgcctggtttgatttcctcccgtgtgtgtcacccatgaggtggccgtgcccctggcctgtttacagctgtgcgcaagctcctcgcgacccgaaagcgagacctttgtctgcggcagctccgcgccgggctgggcggccgcacgggagggcacagcgccacctgctggtgctgccgccagagcgcgccaagctgaggagcaggcgggctccgctcacgcccccacaccccctggctgggggctgggttcctgcgatgtcttccgactccccgctgctcccctagtccccgtaggcacgcgggtacccggcctttgggagggggatcattcccaatactcctgttacgggttgaactgtgtccctgaacaaaaagatctctggtacccgtgaatgagatcttatttggaaatagggtctgtgcggatagaatccggatgaggtcatactggattagggtgggccttaatccaatgactgctatccttatgataacagggaaaattggacagacacgcacaggcggacagacacgaactgatgaaggcacagtttgcagtcacacgtctacaaaaccaggaacgaatgccaaggaaactggcagccaccagaggttggaagatgcaaggaagtatcctctcctagaaccttcagagacagcatggccttgctgacccctggattttggacttctggcctttagaactgtgagagaatacatttctgttgtgttgagccacccagcactttgtgacagcagcccaggaagctgacccgatagacactggtcccagtcatcaccctctgtgccatcaccacacctcccctccacgaatcaaccacgaccacaggacacctccttctggaatctctctgtgcccacgcactccccagatgagcacttccccttcccctggcaactccc

SEQ ID NO: 53330 - DNA, 1547 bp, Homo sapiens
cccttgccccccaccccgtgccatggccccaggcatgttgctgggtactggatgcccctgcccgtggcagagtagcccccgccctctttcttctttcccccagtcacttccccagcgtcccgtcctactctgagccccaggaagtgtgtggtgtgtgtgtctgcgtgtgtgtgagcatgtatgcgcaggcctgcgcctgtacgtgcgcggagaagcccaggcaaatgagcccacatgggagatgggcaggggtccccaggatcttagaggctgtcattcccaaagcaaaccccacgggaagggtgagccgagcccttcctggcctaagaggccggaaccctcccttcatctctggactccgccaacttcgtgtgccccgggcgagtccctgcccctctcctgtcctcagtttccctactgtcccgggcggggttggacgcggagctgcgtaagcgcacgctcagcgtggacgcggcgccgggctccctccccccggtgggtgtgggctggggcatacggtcctccctccacccgcgacgcgaggctggggacggcgcgcactcacctggcaatctaccatcatcctcagcctcggtggcacatcgccggccccagggcgggacccggggctcgcagaggccgctcgcctgggcccgcgcgcggcgcaggggtgcgcccggctgcggggctcatggcgcggcctccggtccccgccgggcccaggactctgcggccctcggggccgccccggcagccgccagcgccgctcccattgtctgcgccgcgccgcgctccggccgctcgggcctcgccgctcggttccgccccggctccccgggctcgggcccgggtgggcggggacagccgcggccccgccccagcccgcccgcaggtgcgaggggcgcgccccgccgcgtgagctcggggacgcgctcgggggcgcgctcaggcctccctcccgcgggccgacgcgggtgttccccccgcggggcagccgggcctgttgtccaaggccgggcgcgcacacggggcctgcgcgggaccgcagacagcgcgtgcacgtcactccgcttcgccgcgcgcacgcgccacgctcccagcgccatgtgcggccgatctcacgtgtccgtccgccccagccgcctgctcagtactccccaccccgctaggacctagggccaacctcgccccagccaggcgggggccgctgagtcggcgcgccggcgtcaccaaatatacacgttcaccctggcgcccagcaccccgatgccacctgctggactcggctcggcggatggctgggagctgggggacccgaggtgacagcgaactcagcctgggcagggagaaagtcaggtctccccttcccctcctcttccccacctccctccttgtcttccctgacagcacccgggaccacaaggtccagctgcagcttcagctggtgtaagatggggctcaagggagcctgggggaaggaggcctcacactggggttgagcgactgttgggggtagtcagtgttattagggctaactgatttcgtcc

SEQ ID NO: 53331 - DNA, 1739 bp, Homo sapiens
gagaaagacagacggaagacatactaggtaatgagaaaattcacttaagattttggatttgctataaccaatatatcgtccttgaataaaaaggaaaccccgttttacctctggtggttccagagaccctgctgctctcctctcctcctgggcccagacagcactgacacgtccccgctgtcggcttccccacccgattatctacttcccttgtgcagcgtggtcaccaggccatgagaaccctaagcgcaggagccctctgccatcctcctcctccccacaccgcaccatgcccgtagtgaagggactgaaagggtcttttcccactgactgaccattactcctgtctctactaaaaatgcaaaaaaaaaaaaaaaaattagctgggcgtggtggcgggcgcctgtagtgccggctactcgggaggctgaggcaggagaatggcgtgaacccgggagacggagcttgcagtgagccgagatcgcgtcgctgcacgccagcctggacgacagagcgagactccgtctccaaaaacaaaaacaaaaacaaaaaaaacaaataagggaaacggcgataatttcacaagtcacttagattttttttctagtactttacagactcgtctacaccggctccggccgcgtcccccgtttcgcaggccccttagtcccggcccggccctgtgcgttaccccgcgtgcgcgcctgctgttccggggccgaatgggagcagatcttcttggccaggctctgcaggtaggcgtccttggcgagtagagaggccatggcggagacccgggccgttcacgactcacaccttccccgctgcgcgtgcgactctcaccacctccgccggaaaccaccacacgggcaggcgcggccaaacgaacgccgagccgccagcccgcgcgctcgattagccaagcctgactccgccggaagcggcgcgcggggcggggcgcacagcattgcgggccgaggacagccaatctccgcccggagtcggtgcagcagggcacccccggggcctggcctcagtgcctcaatcaccccggtcccgcacgtgttcctgtgctcccctcacccccaaccccgacacagcaggcgctcatgagtaggggcgaaatgaatgaatgaccagcagtacattcattccgtcctttggagtggggggcctcaggtctcaggcggacacagactgagcgcctggcacgtggcaggccctaggttcagtcctaggggacacaagcagtgtgtcacacacacagatgtgttctcggcgagtgtctgccgtagaggtgactgataaacctggcaagcgtgtgactgtcaggtgaggggagcgccaaagaaagcccaggggaaaagggagaagtgttgggcgggagggagcctgcatgttcaaggaagaccccctgggcagtggcttttgctctgaaaaatagaattacacactacgattccctcccccaccccggtgacggagtctccctctgtcgcccaggctggagtgcagtggcaagatctcggctcactgcaacctccacttcccgggttcaagcaattctcctgcctcagcctcccgagtagctgggattacagacgtgtaccaccacgcccagctaatttttgtatttttagtagagacggggtttcaccatgttggccaggctggtctcgaactcctgacctcaggtgatccgcccacctccgcctcccatagtgctgggattgcaggca

SEQ ID NO: 53332 - DNA, 2958 bp, Homo sapiens
acactattcactcgcgctgctcagcccctggcctctcctgtctccaccccttctcagactctgctccccttggtgggccaccccacccccaccttggcggtcttgatgatctcggtgaagttgtccatgatggacttaatgtcgtccttcagccgcttgttgtaggactgcagcagcgtctccttgctctggggcagggctctctgctgggccatggctgagcctcaagcagcgcagcggggagacctgggacctagagtgcagcacagacctctgagtgcaggcagagtctaccccagccaccctctatgccccaaccttagcagaacacgcagatttctggggattccctttctgccaaataaagtcaatcactgaaacacagatgaactcattccatcagcagacaccgcagggggtgccaggactggccccgcctttgccagagcaagctcatcctggaactcctggccagccctccaagccctgtccagggctccagtccagacttcacgtccaggcccacagcgtgtcccagggagccctgcaaactcaacaccagctccccgtccccagcccttggcttaacttcttagcccgccgccaccttcgccacgccctcccatccgaagagtccttccaattcgacccctctgcaccgcctacatccacgctttccttccactcccactcaggctgccccgctccagacctcatccctgcactgcgggccccgctccctccagtctctgcgcggcagggaagaggtcctaaaaagtggtcattccaaccgggcgcggtggctcacgcctgtaatcccagcactttgggaggccgaggcagggatcacctgaggtcaggagtttgagactagcctgaccaacatggtgaaaccccaactctactaaaaatacaaaaattagccgggcgtgatggcaggcgcctgtaatcccagctactcgggaggctgaggcaggagaatcgcttgaacccgggaagcacaggtcgcagtgagccgagatcgcgccactgcactccagcctgggcgacagggggagactacgtctccaaaagaaaaaaaaaaggggggtaattccactccctcgcttaacatccctcatggttccccggtgcgccgggacaaggggctcaagttccgcgccgcgcctctcggcctctgccctccagccgcactggacggcctcggcgctggagttgcctggccctggggccgggcctttgcgcgcggtgctcagggagggcccggggccccctaggttcggagtctggcgcacgaccgagcggactcctggacgcactcgcattgtttgtgcccatttttggcggggtgtgggaaataagtcacacgcaggaaaggggatctccgaccccagcgcctacgcacccacccacccccactcccgcccacacacccaccccccctccatccccaccccccaccacaccctcatacccgccccagcgcccgcacaccagacgccgcgtccgccgggtcggcctagggcggggtggtcaagtgcctctgcgacccgcactttcccgcgtctctcccacggcctggccctcccgccgcagtctctcttccccgccgcgccgcggtccgaaaacctagtcagccgccgcagcctctcagccccgcctcgatttttagctttataggaatgctgttgctttaaatccgaaatcccgtgccggtatcaactctcgcgatctccgaggccgcatacatattacccacaattccctttcctttctctctcctcccgccgcccaagatggtgagtgagctgtagttccgtggcactatagccaggttccggctgtatccgctgccatcctcctccaggcgcggcctcggagggcctcctgctcctcctggcgctaggagagccccactcggtgtggcacggagacaccgaggtggattagagccccacttggtgtggcacggagacattgagatggactagagccccgggcggccgagagcggaatgcgttgttcccggtgtcgcagggctgggtgtcgcaggcctggagcaccgcagtgcggggctcggagccctagcgtctctcgggcttgctgggggccgctccagaggccttgtgagcgacgagttctgagcccgcccctgttgcttctagagcctgtggggccgcgactcagaggagtcatgagtccggggtgtctcctgggtgggcgacgcgaagagagcgtggtctcgggcttagccttgctctggccactcggggttcccggggctgcatgcttgtgcggctgaatgtgagatgctcctgtcgaggggtggtgctggggggttgcagaaagctgctcgccagcttagttcaggcaggtgctgtcagcgtcccttgttttggaggagccagcctgagccctacccccgacgaagcgagtggaggcggcggtttaactgacgttttctttctgcccagccgaaaggaaagaaggccaagggaaagaaggtggctccggccccagctgtcgtgaagaagcaggaggctaagaaagtggtgaatcccctgtttgagaaaaggcctaagaattttggcattggtaagtaacaaacggcagaatgaaaacggtctatgtttttctcaagggaaggtggtaattgggttgtgttgtatcttgtaggttttagtgggtgtaaagtggtcgcagtccttaatttgtgtctcttagagacgggggcaatgatacatgcttcttgctttcattgggagttgctgagcgagcattcagctcaatatggtagtggccttgaattcagcttagccatctggaaacaagtacagtagcagtgtcgcagcgaggtactaggactgcaattctgctgtacttcgtggcaccttggcttcttgttagatgaggaaaagcatcgtgctctttgttctcaggtgtttgtgtgcagatgat

SEQ ID NO: 53333 - DNA, 2007 bp, Homo sapiens
gagattgcgccactgcactccagcctgggcaacaagagcgaaactgtctcaaaaaataaaaaataagcagctacagttactaagtagcttagtcaggcactagtggttattgtgttatgtagaaaaatatatcaattcagtaatggctcacagagctctcttaacagctttccatttttacaactcatcgtaaatgtaaagagggaagaatgtacacagaaagtgcctttaagctctcagaggatgagttccatccgctgaaaagcaccaggggccttgcggatactatttttttttttttttttataaaaaggcaggcctggggcaggcttgcacagcactctacacacggcaaaacagccctgtgctgcacactgagaggaacacgtaagccgcggtggttagatacgctttactttcagagccctgggctttcagcctgggctggccacccattagctggatgggacgttcggaagtaactctcgagccttctctgtaacaggggaacgaccaaggagctacctctcgcgttgtgaggacaaagcgctcgctacatgcccggcacacgaccacaattccactgaaagcattttaatacggaacttgtcactcccagggagcctccgctcagccggcagttggttcatttcaatccccacgacaacccttcaaagtgcagggcagacagcaggtggctctgcccaggcgcctggatcacagcccggcctgcagccctcacctgggcgcggggagaccctgaggacgctcctccaggcggcgctggccggggcctgcggacacggacgggcgggctgagctccgggacccctccccgcgccccgcaccccgcaccccgcaccccgcaccccgcaccccgcacccggcgctcacccgtcccagccccgccgcccgcagccccagctgcaacgcagccaccgccgccatcgcacccggccccgcgggcgcttccgggacgcaggaggcatctgcatccggggcgccgctgagtcccgcccagagccccgcccccggctccaggttctgcgagcggcttccgccgggctgctccgcgggcgcgtcggccatgagcgagttgccgggcgacgtgcgggcgtttctgcgggagcacccgagcctgcggctccagacggacgcccgcaaggttcgcagcgcgggaggggaacggagtggcggagaagggcgcagttgggatgaggggctgaggggagggcaggggagaggagagggcaggggagaggggagaggggagagcaggagagaggggagggcaggggagagggcgcggcgggatcaggggaggagagggaagggggcgcggcaggagggggcaccagggagcggagccctggccctcctgacgtcctgcccgcccacgcgtccgcaggtgaggtgcatcctgacaggtcacgagctgccctgccgcctgccggagctccaggtctacacccgcggcaaaaagtaccagcggctggtccgcgcctccccggccttcgactatgcagagttcgagccgcacatcgtgcccagcaccaagaacccgtaggtggtccgcggcggcgcggggaggcccagggcaattaggacagcccctccgctggactccgccagtgctgcagcccctactctttcagagttgggagccctgggacccaggtgggcgcccgggtgctggaatcacctgcggtcccagcggcgaggcctcttggtgagctcgtttgctcacctgaggtttgtcctgtggggtgtggctgcttcccagatgagtagaggcttgtgatttgtcacctgaggttgtgaacagcgttgggttcttcccttaaccccagaaggggtctttgatttagctgggagctaggctttgtaataatcgtcaaaacagagataggatgtttccattcattgagcccttgctccaggtggagccatcctcttgcatgaactcatcctggagcagtcagtgaggctgccatgcgtgcttttccg

SEQ ID NO: 53334 - DNA, 2513 bp, Homo sapiens
aaataaataaataaaaataaataaacaaataaaattgtgtctttaagcacaaaatcagaatcttagggaaaaaatgcttcgtcaagttgattactttttccctccaaatttaaaatattggctcacagaaagtgttgcaatgagaaccgatggtgaggtcacactagaaagagatcaccccccaggaggaacggaagagctcaatagctgatcagaaaacggtcacttactcttttcttttttttttaaaccacacatatacaagccttccgataagtctaggcctcagagtttgatgactcactaccacctccagaaaaatttaaaaatttaaccatcactacttaaaactctagcaaagccacacgaacacattaagtaaaccgaggaaaaaacggcaagtgggccacacaaggctctccctgcggggataaggctgttaatttgtcgacataacgggattcttttagaagtaaaaggcataaatctgcgtaaccaccaccaccttttgtttttgtttttttgttctgtcaagcttaatcaagaaagagggaagggagttgtgtcccttcactttgtaggatcggatcctgtccacccagttcccgaatgctctcaacagttacccaaccgcctgtttcaaaggcttccctgttgctcagaatgccacctggacacttctggaaggagactatcagggagataggcttcccctcctcccaggctgtgtacaggtccccactcaatccagcccagggcagagtccaaacggggagggagacgcagacagggtcaaagggaccccaagagtccagcacatctgggaaagagaaaaggaaaaggtgctgtggcttcctgtagctggggcgcacgccagcgcgccccctttcctctgggaggacccccggcccccgttcgtccccgagctcccagcccgcctccgggagccccagtgagaggaaaaacgtgcggggaccccccagcagctccaaacgccgaggcgctccccgcgagcctcagacccgacccaacgccaggactcgcgccgccggcccgggaagaaacccccacagcccgcgccccgggctggctggagggtgggggcggctagccaggcagggcgccgaggcccgggctccgggagcggcccagcgggcaggggagactgggcccggaggccgggtttggggctgtccagccgggacagagggcccgggcgggggggtccctctgtgggaacaaggagtcagggggcggcccgggcctggcgccctgcgctgggaggccgactccggagcggcccgggcggcctgggtcgggaccggggccgggggaggagcccgcaggccgcacctggtcggcgaagtcctcggccgtgcccatcaggtcgttctggcccatggcgacggcgggaggctcggctcggctcgctcgctcgctcgctggctctcgcccgtcggcgcccgcacccgctgcggcctccacaggaagtgcccggcggccggcctcgctccgcgtcggctgcggctccagcggctgccacgtaggccaagccttaaaggggccgcgcgccgcccgggcccgccccggtgcgtcttaaaggggccacgcgccatccccagcctcccgacccatccgctcgaagccacgcccgccgcgctcgacgccacgcctctcacgctggaggccccgcccgccgcgcgcaggccctgcggtccctcccggcccggcggaacgcgtcccttttaagggggcggggacctgggggtctggggccagcgcgcgggagggacgcctgagtgcctcgagggcgccgttcgggcggggaggatcccgcgggtcccactgacccacgcggggtggggccaggggtggacgctcgcccgtacgcggtcgctactgatcatgcttgggccagggtccaatcgcaggcgccccacgcagggggagcgaggcccagggtcccccggagagcccatggagaagtaccaggtgccgagtgttccctgcggggaggcgggagctccgtggggtaacggtcgcaaccctggagctacggccggcggttccgaccgagggcggcgaggggcccgcgccctggccagtgtcggcctgcagctcctaggttgaacccggggggcctccaacggtgacctcctgggtgccctttgccactcagtttccccctttgtgaattgactaaggattctccagccctggctgagtatttgagggcgtggggcagctcctctatccttcgtgcctggggtctgtgcgcttgggtccaccgaggcaggacccccgggaacatcccgagtacataattgggagcccccagtcccctaaaaacacccctgcagcgtgggtctgtgaaaatgtttgagacctaaaaaattcacaaaacacaaaaggaaagctgcaaaataaaagtaaatgtttaattaaatgcttctatacatgatatatacactttattaaatgttagattcagcatttgtgaaaaatgcattcgc

SEQ ID NO: 53335 - DNA, 1641 bp, Homo sapiens
tcttgaactcttgacctcaggggatctgcccgcctcggcctcccaaagtgctgggatcacaggcgtgaggccccgcgcccggcctggtttcgggattttaagctaaatttctctttgtaaaatccattctagttagttcattatgcaaaaggtacaagggtttatctttgcttttttgtacttgaaataattctttcatcaatttctttcaagcaaacaagttcgagacctccctcaacaggccacctttcttgtgaaaagctgtttacaagatttcgattcaaatctgcctttacaggtcttttggggctacccaagtctttccctccgtcgcgttctgcgggaatgagctgcgcagcgctccgcccgggccccctcaagcctcacctcttgcagcgccttccagttttgagaaaagtcttctggtgcctttggaggtcgcaccacagcaccggggccgcttgctggcttcttgcttacttcccgcgccttgcttttccaaaacctttttttcttcttgtttttcttccgagtgagcgtcttgacaggacccggcttagccacggggctgctcggggcgcgcttggaggcggggaccttcgccttccccatcctgctgccgtccagcgcctgggccggcggccacccgagaccccggcctccccgggcccggcgccctggcagcacaagcgcctgcccaggccaggccgaaacacacccaccgcagggaccccgtccaggaaaagactccggaagagaccccgcacgcgttgcgcatacctcagcacgcacgctccagtccccggaagcgctcgtctctccacaaccggctggaaaccggatccctgcctctggttccgcgcagcctgggcggttcacccgcacgggacttgggccgccgccttagccagcggcatccggggtcatcgacctcgagtttgactggggcaagccgaggacctccccaagatccgggatggggatgagagatgcgaacgccggaagggaactggggggccgctgtgtgtgtagcacccggtagggcagctgagctgggggcactgggcggtggggctagtgagagccgggctaggtcgctcgcctgcgtcctggactctcgagcctttcccgccttgggctgctccttgctcagcctcacagcggctcatcttccacgtacagtggggaaactgaggcccaggcaccgggaggagttcctgccagttcactctgtagcaggacgagccgcagacaagaacccctcagacaccgaattgtagaaggaaagggctttatttagtggggagcatcggcagactcacgtctccaaaaaccgagctctctgagtgagcaattcctgtcccttttaagggcttacaaccctaagggggtctgtgtgagagggtcgtgatcgattgagcaagcagggggtacgtgactgggggctgcatgcaccggtaatcagaacgcaacagaacaggacagggattttcacaatgcttttccatacaatgtctgaaatctatagataacataaccggttaggtcaaggattgatctttaaccaggcccagggcgcggcgccgggctgtctgcctgtggattttatttctgccttttagtttttacttctttatttgg

SEQ ID NO: 53336 - DNA, 697 bp, Homo sapiens
tactgtgtgccaggcacttgttatcttcccttttaaaaatctttataaatgattctgcaaggtagatgccattatctttttttctaaatctaagattcagagggttaagtcagttgtctgaggtcacacagctggtaagtggcagagccgggattgaaacccatgcgggccttatgtgctagaggtgtccagtgagcctgggctgcagtccttgctgagcctgtcccttggggctctgggtctctgctttgtccacgcaggtctgatggagctgcgtttcctgtgcatggactctgccctcagggtgcctgtccaggaagagctgtgtggcctggcaagcaagcctgggagccggcgggaggtctgccaggctgtcccgtgccctgctcggtgagtgaggggagcaagactgtgtgctggccttctccctgtaagtgggagacccgagccttggctccatgcccggtgacctgcggaggggggcaggtgctgctggctgtgcactgtgtgaggctggaccatggccgccccatccccctgcctcactccaagtgcaggccagagccccggcccagcccctttgaggactgcaacccagagccctgccctgccaggtgggccccttcccaaggagacagggggtgctaggtctgcatcctggctctttcctcacctccaagccagaccttttgaccct

SEQ ID NO: 53337 - DNA, 1917 bp, Homo sapiens
tgtctgcgcgcctccaggccccgccccctatgctaataagcgcccgcctcctttgggagcaagtcgccgcaaactgcgagcccccgccccctacgctaatgacgcccgcccccctcgggcacacctctccgatgcctgcgagccccgccccgtatgctaacgagctccccacccccagctcctcgccgcagcctgcgggtcccgccccctacaataatgagcacctacctcccctcaaacgcccctagtcgcggcatgagggtcccgctcactatgttaatgagcacccgcctcccttcgggcgcgcctcgccgcagcctgaaagccccgccccctatgctaatatgctccctctcccacaaggcagcgcgccggctcggacgcggccggctaccgagccctttgtgagggctgtgagctgcgcctgacggtggcaccatgagcagctcaggtggggcgcccggggcgtccgccagctctgcgccgcccgcgcaggaagagggcatgacgtggtggtaccgctggctgtgtcgcctgtctggggtgctgggggcagtctgtgagtatccagtcggggagaggggccggccccgccgcgcatgcgctcctcgccctgccctgccccgccccgccccggcggccccaggggaaaggacccgctgggggtcgggggtctgccgggcgcctcccggggcggaggaatggcggggccgccgggagccggcgtcctggggttgccatggttacccgctcgggcctgggcgccttggtaccccgggctgggctgggctggcgcttctgggaacattcccggagggaccagaaaccccagggcgggggggcggcgggggcgggggtggggcaccggcctggggcacgtgactgagccctccccccgctccccaggggcttttgtgagactttctcggtgatgctcacggggcgcatgcccacctggcccgtactaaagcgtcaactgttgacttgggcgtaggtgacggcagccacattgctaacctttgggcaaggattgtttgtaagggaggcgggtgcacggctggctagatttctggcaggaagccactgggcggaagtttgctgagggtcaggtggtgtcagggcacaggtggcccctggggccgcggggcagtgagctgagggcccggcctctccctgggtcctctgtccgctctcatatctcccccgttgctgctgccttagccgcctgtcaccggccttcctccccttctccgcacgcatcccagtcacagaccctgaccttaggctgccagggaagctaggctcttaagcacagccagaaaaggacaaagagggaggcaggtcagctccaggagtgaatggaagccgtacagctggccttccagggaaagacaagtctgtctgagtgataccctttcctttcctgtctgccctcaatcttgtggattactggagtgggcaaggtcttagagaatgtctgtcgaggatgtctgcaggttttaaacagtgcctgcctggcagagagggctagctctgggcctgggcagggcaggccccatcagcaatcctgccagaaggaccaccttttcagggtcaccttgggttccacagcctttccaggtgggtagagggtggagggaggttgaggcaggagggtgctgggctaggagtgtgctgccctcgctaggcatgcccttatccagaggcaacggatacggtagggcaggccctacccccaaatcacaaaaaggccccgagtttgtgtcactgctcttcagggcaagtacgcttttgactttgtaggagagactggtgggtttgaagttaggcattggatccagtcctgtcatgtctggttagctgttttccctgcagattagggtgggcagtgcagtggggtgacatggtcagtggtga

SEQ ID NO: 53338 - DNA, 883 bp, Homo sapiens
accctcctccagaggatggtccttaccccaaaccaggatgcctgggatttggtcagatgcaggtcaggatccaaggagcgctccagggctgggatgacaggggatgtgtagaccagggcatacccaaagctgaaattgccgagcactgcggcgaaggtggccaggaacacccttttgttctgcagggtcctggtgatggtggcggacaaaaagaccagggtctctgagtccctcctccagggaccattgccttttctgaacccagtggctgcccggctcagcgggcagtgctagggaggcctgggtccaaggccattcacgttcccagggcctgagccccagctcccctgggaaattcccaggccattgttagctcatccgcagtggctgagcctctggtgctggggccttttctccggaagaggaggctctggttctgcccccagggcggcggctggaggcttgctgtgtgacctcaggcagaacccctgctcgctggggcctcagtctcactgtctgtggcagtggggggctgggcccggtactctcgtggatcgttccttcccttagggggaccagttccttaaataggagtagcgtgtctgggacaggagggagccagatggcccctcggtggcgactaggtcaggggaggcccagggcgggagcctgccgccggctggagggaaccagggccacccccaggccccacccgcagcccccaacctagcgactctcacccgacccgcgccctgtcccctggcgacgggggcggcttctcggggaaggtgtcgtagtccgggccctcggctcccagcagcggctcctgcatggccgggtctctctcggggcgagcggagggcgctcagactggagcagccgc

SEQ ID NO: 53339 - DNA, 1302 bp, Homo sapiens
tgtgcgggtggggggcgtggggtcatgtccctatcaccgtagacaggatggcagcttgacaacatggtgcagtttgccgatgagcctgaggggccggtgcacctctgctgccttcctggcccagggcgggactgaacccaggccaggttctcagtgggggggtgggtggggctgggtccgatggccccggcaggataagcaggtgtcactgctggaagttttggggactgaagggccttacccaaggacacacagccccagggtgggtactccagagccagttcctttctggctcatggcctgctcccgcctgcggccggtgtgcaggtcagcggggtcaaggctgtcttctgtggtcactgactaactgttttttgcatgtggactcgtcagggaggcataaacctgcccttgccaagacagatatggaaaaatccactcatccattcatttgacaaatatttgttaagtgcctgcctacggcccgccaggcggagcgcgggaacgcgatgctgatttagacactcccagcctgggtcgagcttccaggcttcatgggaccacatccgcccctggcctgctgggcatggtcttggcctgtgtgatgcaggctgggccctgagcgacggctctcccgccacctccgtcgtacaaaggctgcaggggaacgaatgactaggtaactgggggtgaccttgactctgtgtggctttaagacacaagccagctgtccaaaagctttgagctatgattgctggcaacaatttgcctcaatacccctcccagaccagggcagctccccgcaggctgggggccatggctgagaactgctggagggacacacgtcccaggcaccaccagtcaccgatgactgggctttgcaccactggaaaaccagctgggggactggtgggcccccagtgagccctgctgatgccaccttcgctctcccagcgcctccctcctccccacactcctgcctggtggacttggctccctcccgatgggcagcagccttcctggtctctttctgccactgcccacctcttcatggaagccagacccactgtcaggctcccccacctaaaaccctcacatccttagaacctgcccactgacgcccaccttgtgcagttcccagacaaaccctgttagatctttctccctctccctgggccactggccccttctccttcgggtctcccagcagcgcccgcactgggcagcctttctgacccagcgcctcactcccccaatcccccgcgatggctcagttctgggtctgcctcccccatcagtctg

SEQ ID NO: 53340 - DNA, 838 bp, Homo sapiens
accagggtgaattcctttcccggcgtccagcgtgcttgccctaactacaatcccagccccgagagcgggacagtctatgaagtagatggggagctgtaaagcctttttaaaaggggcaataaaagttttgggtttcagatcgtcttactggagaagagaataacagagacaggaaatttcagtagcagacacgacaaaggccacagcacacagactgcccttagacaaaaacgcctccgcttgtgcaaacagaggacggcctggcagggggcactgccccgtgccatgccagcctcacacgagctgccgggagctggaggtggctgctacaatagcctgttttgtttacattgctgttgagtgtttagaatacgtctccgcgttggtgctgcctgaggtgtgcagcactctcccctgagctgggctcctgctatgtgtgccaggagggggtgtggtgtgtgccccagcacggggcacaggcgtgggcaggtcggggccggagtgtggggctggggcgtggctgaccctggcactgggatgggtggggcccaggctgcttctgctcccaggctcggggaggctgttgctgggtgtgtgcccacccatccccccagagtgggaaatgatccagctgtgggagcacatggtcattcagtcaccaagagtcctcagagctgtcccatcccttttgtttccagcagatgcaccgtcctatgcagtaaccaccagccacatggacagggctgcctgatcaaacagaacactctgggataaactcgatttcagatacacgatgaatcattttttggtataggcgtgtctcacgcaagtgtctctc

SEQ ID NO: 53341 - DNA, 1611 bp, Homo sapiens
tgcctcagtctccccgtctgaaaaatgggggtactgccgagcactcccgcagagggtcctgtggggattaagtggcacatgccagcgaggtgtttaggggctggggtgtgccaagggttcactcaatgtcacctcagcagaattcgctcatctgcactggcaggactgggcggagactgagtggtcactcaggtgaagcccgcttaggtggggcggtctccgggagggaccctacacggctctccccggaccttcagcatctgtgcttccttgaagcacacagctgcgtgttcactcgccaatctttggatgtgaggtcagagcctctctgggggctcctttgctctttgggggctcctggggccttctcttgcacaaattacccctctgatgactggtctacactgcagcagcgttctcaggcttgagtgggcatcagaacgcctggggccttgtttagacacaggttactgagccctgcctagggttgctgattagggagggctgggttgggtagaaaatgtgcattttgaacacattccctgtggcactgctgaggctggcagggcccacactgagagccgggctgtagctcctggtttctgttgccttaacgtggacgaagatctctgagacccccttgcagaagctgaacacagccccctaggctcatccatctctgccctatactctcgtcgtcgcctccccaacacccactttcatggcaatttttaaggcaaaaggcttatagggagtgttttcaaagcagtcaactacttttctacggaaaacaactctctctccttttgcattcgcatttcatcattttaggtaatatttaattacatgacataattattttgacaggttcaactggcacaaacaagcttgggaaacagcacggtggactcttggtcagcccagctcagcgggaggagcaggcgtgctggaaagcagcccgtgtctggaggcgacagggacagcacagagggagcgggggccctgggtgatctggggggcaggcaattcggggtcaaagtggagtgcttctactgatggcaattgtacacggcctaaagtgacggtgcacctaggaggcattaatagggatccagcatctaaaatgagggaggcggcggtcctgcttctctctgttcttgtcaggctcatccagaagactatgccgagctctgtgtggtgcacctttcttgaagtgagactgggaaagacgcggctagaggagggtgaccagcggtggacatgactgtttaccttggggacagggaagcttcaggaggggcctgatcaaggtgcttacacctctgtgggaaagaggagcgaggaagactccggccctaggctgttctcctgttctcctggcttcttcccatcccccaccccagccccatcacctgctgtctgtgtgcctcaatgtagcacagatggtcatgtgtgattaaggcattcactgtgagattgtgataaggcctgtgcccttgccctgccaggagcaggaatggctctgtctggtcccagttgcatggacggctcccagcatagagtgcttgctgcatgtgttcagggagggggacgccaggctctgagaattct

SEQ ID NO: 53342 - DNA, 1109 bp, Homo sapiens
tacctcctgcccccttccttgcagggtgaatggaacctgcagcccctgcccaaggtcatctccacactggaagagcccaccccacagtgccccaccagccagggccgaagccctgctggccccaccgttgtcagcattggtgggggcaaaggctgaggggggacctactcctccccctcctccatgctgtccctgtgggctcacaccggcactgtgcactctactctgcgacgatccccatggaacagccctgcacgcccaggatgaaggggccagaccacgcccctgcctgagaccacggtccaatccagccttcttcccccagggtcccctgcatggctgagagggtgtgggtgccctgttgacctaccctggaccgagtggaccacgacctcgtccatttaaacccggctgactcagtgcagggacagcctgcacagtggtccagggtccagccctccgccagccctgttccgcctcactgggtgtggcctggcttctgggacaggcaccatgctgggccggggtgtggaatcaccgggaacgcccccgcccccgccccgctgctcccggtgtgcagcgggtgcgggtgccgcttaaacatttccctgctgagtggctcgtgtttcacagtgggcggcttccctgcgacggaggcaggaccaggcatttagctagttagagactcgcctgggaaattgctccattcctgagtaaacagatattttcgcccacctaaagggaagccctgacaacaactatcaccaaaagacgaggcggcaaagatccagcggggcttctgggcgccggttccacgtggggtggaattattagcaccagcttgcttctctgccggtggggccagcgctgaacagaccggggtggagtcagggctgtgctttccgcgtggttctgccacttagggagtgtgccttgggcgggccatttcacattcctgaccctcacttttctcatctgtaaaaccaggctgatgccgtgcgggctaatgagccaataaagctcacacttgggctggcacccactggaggtgggtatgtttgcactccgggccgtcgctccaggagagagaagcttgctcctgagcctcc

SEQ ID NO: 53343 - DNA, 526 bp, Homo sapiens
tggggaggtaacctgggctgggtttggggatggcccagggagcaccttgggagggctggaactatttctaggcccagggagggcaggaaagaagctctgaacaacctcacagggaatctgcggggagcgctatcaagagctagcggaggggcagctgcagggaacaagggtctcttggatgtttcacaaatgactcatgcgggttgagtaacccgaggacacatgggacctccaggcaacatggccaggggccaggcctgcggctcccaccctgaccttggtgagctccaccatcctggaatgagagctctgcctgccctcccaggcgctccctaagtcacgggggcctgggacttccctgctctttcctggaggccaaaggccattggccgtgcctggcaaggagaaatgctgattccccaccagtctcccatccagccgacagaccagatccaagatgtccttgcctgcacatcttccccaaaatagggcttcgtggggagtaccggctccccaggctaattaa

SEQ ID NO: 53344 - DNA, 1035 bp, Homo sapiens
acccactctcttgccccctccaactctgtctcgtacctgagtcagcttcccaggagtgagggctgaggacagccctgggcttgggatcagacagatgggtgggggttttgtcacaggactggggcctcgagcaacaacttaacctcactgcaaagcagaggacccaggaacgccctcctcctcccaggctcagggggtggtgggggtcaagcgaggagagcgcctggcaccttcgcctggtgagggtaggcagacttgtggggaggagcggcagggggcggggaggcagctgcccatatggtgaaccctggtcctgctcatgcagctggatggtccctgcagccagaggcagagggagatcccagccagatctgaccaggcccagccccgcccacataggggaggccccagcctcgtccctccctgggggtgtacctccaagtacctcttgtcagctgcagtgcccctcggccctaagagtgcttggcccagcagaggtgccttcaccttcttgcttcccaagcagtggcctggccggaactccaggcctcccccgccccccaccctcgctgccagccccatgtctccgcccaggatctgggcggagcgtaccgcccaccactgcggcttctaggccagcttagttggggcttctaggccagccctgtgggcagctccctctgagggcggcagagcagggttgtgaaccccatgccccattacccgtaggcgacctggcagtcacccttccgctccaaccctcatttcctcgtctctgaaacaggcgcctcagggttgctgcagtagacccaggcaccacctgcctgctggagccgcccgagctccccgcgcccagaaggagctatgcacaggcagggtgggcaggaaaggtggggtcagcagcagcttgggccaggggcccgtccactgcagggaggctcctttggtgaggtcatctcagcacatgccccagtttgctcacccccagggacaggatgctcactgccttcagaggcgagtgagaaggcctgggtc

SEQ ID NO: 53345 - DNA, 1361 bp, Homo sapiens
acacagcaagctggtggaggaggcagaccggatgctgcagcctgactctgggctggggcaagttaccccttcccagacagaagtagacacccagaggaggggtgtggaggaaacccagaaagaatacacctctggatgcccaaagaatcagaacaggtgctgatggaaagtcacatctcctcctcgcgctggatcaaagacggggcatttcaatggcagtctgttaatattgtaatgatgccagctgccaataccggaagcgatcgtatagtaaactgctgtaattaataccaatcaaatcattgtgttcttattcacaccgaggatgtccgactgtcttgttgccagcttgtctatcctctacatttactgaatgcccaatgtgtacaaagcactgctgggaaacctatagtgacatctaagacccagcccctgccctcgaggggctcagggtccacgaagcagacagatccagggagagacacgacaccacaaggctggcttccttccagcagggaatccaggaggacctcttagaggagggggcctgggctctgggcctgaccacgtgctgacaccattctcagtccctgcctcaaaggcaaagggcccactggcttaggcccctggctgcccagtggaaagctggccccgccagtttgaggcttacctggggtggtgtgggggtcctggggcagaggacctcctctttggatggtgtggcttgcccagtggcctgagctagggctgtgctcacccaacagggtgacgaatgagctcaagagggcaaggaaggagtgtggcccaagttctcccaggagtcctggacgtgcaagtgcatgggagaaaaacgcagcagtcaccacagctccagggcagtggccgggtagcccacacttctcctgtccctgcactcaaagacaagttgcaactgttgcaaaactgttacaagccaagagggcagcacaatgaacctgcactttggacaaggggtggtggctgggggccggtcccggcctgttagctgtctgttagtatcgtaggattttcatccggcagggcctgttagcacccagctccggtctgggagaggtggaaaggctgtctccccccagggactagtagtcacagctctggagaggccaggctccggacaaggaggccaagacagggtcctgtacgatctcgggctggtcttatcacctctccctttgctgagacttagttttcccatcttggaacaggaggctggaagccctgccatgtcagtttcacagaagccttgtaaatttccctgagtaaatttccttcagtcctgctctagatcacaccaacagaggggctgccacctcaaagaagtc

SEQ ID NO: 53346 - DNA, 827 bp, Homo sapiens
gaggaaggatgtcaagcagaaaggctctggagggacacactggcctccaatcccagggccccttgccctctgggtctggggacacagcacatccaagtccctgcaatgaggatgttcttagggacaagagcaggtgcccaggctttgaccatcatcattccagtggtcccccaaatccaaccagaaacccagtggaaccagcttggcccagatgcagaatcctgatagacaggtgacaatgaccatggctgagggcgaaacacacacagctgctgggaagggactttgactctggcagccgaaagccatgaggtcaaggctgactgaaaacccctcctccctgcacccaagtcccacagctcctcctcgtggccacctgctttctgctaccagaggcaaagctcttgatgaacaaggaggaatgacagtggacggggctgggaaagtggccatcagggtgggcgtgtccacagggggtgggtggtgacaatggcagggccaagcctgacgtgtcctcaggtgctcgcagcagcctctgcccggcctccccagcccctttctcccctccacccagtgccagactgcggacaactgtggccacgtcaggcagggctgtggggccagtgggcagctccgtgctgggtctcccaaggcagctgccacaggcccggtccccccacgccctggggagcagcggtacctgaccagaagggagcggaggggccctgagaagcaaagctgaggccctgaggactgagaaaagaaaagttgtaggaagcacaggaagctgcaaagaggcgagagagaacgtgaggcgggcagcaggg

SEQ ID NO: 53347 - DNA, 916 bp, Homo sapiens
cgctgacgagaaggaaggaagcaattaaaactgaacaacacaaagccaccgccaggcagctctttccacaggaaggcctggcttccagagccacttaggagtggctccctgggagggagagccagaccctggcgggacgccacccagcccacaacacgcgccctgctcacctgtcctgcttggtgtggttgactatggaccggactttcagttccccgtcaatctttggtcttccaaattcctccagtttcacttgctgggaagaaggagaggggccgtcagccggggctggagcagccccagttctcctgaccgcacgggcagggcagactgtcgtgcacccaagggaactccccacaggcagcagaggcgggacgaagggaaacagcccctgtggctcccagctggtgctcaggatggacgagggagggtgcagaagaccgggaagggactgggcctggcagcttctctccctttcctggccagccctgccaaggggctcccttcagctctggggacaaagggcgattgacggtgccggttgtgttcacagaggccgccgctgtgtggagccccaagcgggacccggtcggaaaagccagaagcccaagccccacgttcaggagagaacaaacagcgcctatctgctgcagggcgggtggggccggggtcctgccaagggtgaggcttcgactcagacccctgtgtggttcgctgaggttcattttcgttgtctgtctggttttgtctctgtgactcttctgattcagagagagcttctcttgacatgttccctgcgtggctttcaaagtgtccacacagacaggaaaaggtggaggaaaatgcttcaagacacgaacagggccctgcctgggaggtgctcgaggcacaggctcagtgtctccttccaaggtct

SEQ ID NO: 53348 - DNA, 943 bp, Homo sapiens
ctaacatgatgaaaacccgtctctactaaaaaaatacaaaaaattagccaggcatggtggcgggcacctgaagtcccagctactcaagaggctgaggcaggagaatggcgtgaacctgggaggcagagcttgcagtgaggtgagatcgcgccactgcactccagcctgggtgacaaagcaagactccatctcaaaaaaaaaaaaaaaaaaatgggtggacttgctctcttctgaagttgagacatccaccgtctcctgccctcagacatcggaactcctcctgggtgtcagatcttcagactccagaacacacaccagcacctgcccatcccacaccaggactcaggcctttggccttgggctgacacatcactggctccctggttctctgacctttggactcagacttaagttaaatcactggctttcctgggtctccagcttgcaggcagcatatggcgggactttctggcctccataattgcataagccaattcccataataaatccccccagccatctacagagatcccactggttatgcttcttggaagccactaattgcaacatctgggtcatctgagggttggcttctattgactcttcttttctgagcatgactcactttctcctgtttcttgcgtttggtgatttctttcttggacccgagatgctatgaacgatactcagcctcccgagtagctgggattacaggcactcaccatgatgcccagctaattgttttatttttcctggagacggggtttcaccatattggccaggctggtctcgaactcctggcctcaagcaatgtgcctgccttggcctcccaaagtgctgggattacaggcatgagccactgtgcccagccacgcctgtgttgtttttctttctttaatccatgactacgaggaacattccttcacacgggctcattcttcat

SEQ ID NO: 53349 - DNA, 2386 bp, Homo sapiens
acccactgaggacaggtggccaggatgtttgatgtcaccaggtgggacaattaaacccatcttgctggcgggatgagctgctaagcatataatgactgccaccttccgtccccatctcctctcagcccaattacctggaattaagcaggcaacaccagatgggaaaagggacaccagcccagatggaagaaaaagggacaccagcccggatggaagagagtggagagagcaggggatgctgtgcccaagagagaaggctacaggagccacagcaatgtcttcaaacacagcaaagactcaggggagaagaggccgggactcgtggggcaggacaaggtgttggcgtgcggacccttcaccttggctcacagtgtgcagagaggatagcacattcgttcacggaggtgtgggaactgcagagtctgccaaggcccattcacggagcctccggctgagatgtctcacatgagaggtatttggtaccttgtaggtgatttgggaaggcaaaaccaggtttgggagtggaagtcaaggacgcagccctcaccactgcacaaacagactttctcattatcagggccagccagcaaggcacggggttccagtgctctcccggccactgcaggagcagaggctaaaaggaaagaactcagcaagaggctgtctctgcaagctgcctccgtatcccgggagggcacccggcctctccctgcacgagccgcatcttaggtctcgttgcccagtgctccgggataaagcctgccacccgccaccagctccccccgcacatgggaagaccaaaaggtgggtccttgaagccataaggaaatgcgaggtcactgcttccagttcctaatgctttgtcgtgcttagattcaatacgggtatgtctgatattctgagaattcacttcaaattgaagcaggaagttccagcttacttccatttctctcactccaacctcagcctgacccctgtcccctgccttgcagccgtcacagcaatgctagtcacaggagccaaaaggtggaaacaggccagagttcatcacgtgataaacggatacgcaaaatatggcctagccacacactggaatgttccacggccataaagaggaatgacgcaatgaccggctacggctgggtgaaccttgaaaacaagatgcggggtgggagaagccacgtgcgaaaggcacgcaccgtatgattccatggacatgaaacatccagaacaggcaaacagaaagcaggctgggggctgcctgaggctggggagggcggtgactgctcatggcgaccggtttcttcctggggtgtgaagatgttgtgaaagcagatagaggtggtggttgcacaacatggtgaaagtactaaatgccactgaattgcgtactttacaagggttacatttatgtgatatgaatgtatttcaatttttacaagtcagaaagcagaagagagggtggcagggctgggccaggatgagacaatcaaagccaggagcccagcccagtgaggagccagggttgagccccaaccgggtccccatgctggtatgtgccccccaccgggaccccatgctggtatgtgccccccaccgggaccccatgctggtatgtgccccccactgggaccccatgctgatatgtgcccagacacgccacatagctgggccttcagacagcctcccagccaatccagggggctctgctcctgctctaacaggtcaccagagagttggagagttggtggcttcaagcaacacagactcttacagttcagggggtcagaagtctgaagcgggtcttaggggctggcgtcaaggtatcgaggggctggtccctttcaggaggtgccggggagaatttgtcccttaccttttccagcttccgaagctgcctgcattcctgggcccacagccccatcgctctaactctgccgtcacatctcctttttctgactctgaccttcctgcgtccctcttaaaattatgtgtatttacatctgcgaaaacccttttcctcgtcacactctcagggtttgggggttaggacatccacctagcagccgcgggccttccacaaggaccaggtgctgcgctgcacgatgcacagacacagagcaaccccgcgaggcagagtcatgctcccagcctacagaagagacaaaggttccaagagcatccctgcccaaggtcatttggctgacagaagcttccttcatgggacctgacctcccagcctgaggacacctttcggtttccttctcaggaagtcctacccttcaccatctcctccctcccagccgttcagagctgtgatgaccccaaattagggcacccccaatctggagggctagctctggccacagcaagacccacatcccca

SEQ ID NO: 53350 - DNA, 896 bp, Homo sapiens
agaacagagcagctgggaagcaggggagtccagcagagtccctaatcaagcaaagcaaggggcaggagatgtccaggaatcagagaaggccctctggaggggctgctgtcaccttgaggcctgcaggatggacaagtgtgtgtcagaggctcaccataaatgtgggcaagcctcctataagaaggcatcgatcagtaggtggccccggggcactgccacagccttgagcacctgacattacagacccacagggcaaccaagtgcacatctgagtcctctgccaaatgcaaatctaagcaacaagccgcacacaccaggacgaacagcactgctggctcagatgaaccaccaagaacctgctctcccttccaaagcagaacctatccgagaatccctaccgccttgcgagctgcaagtccgatctgtgcaatgtgagcccctgcaggaaaaaagtctaaagtgatttttcctccccggtgctttgtgtttatggaaacagatggaaaccggccgcagacgaagctctggcatccagatttgcttccaagcggttttaccttgatgactgcttaatcctggcccatcaagggacttcccaaaatggccactttatggatttttcttttcctgtctaagggtaggattcaaaaatgcacttttcccagaaaagattttctaaaccatgagagtgaggacacggataaggacaaggccatctggaagtagaggagaaagaagagacgctgcatggggaagacaggccaaggaaggacccacctggacccacctgcgccgtctgcaggaagaggggctaggcatccctccaccagccccttgcccacttggcactcacgagcagccctggacaccagggtacaaggtgtgtccccaagaag

SEQ ID NO: 53351 - DNA, 3432 bp, Homo sapiens
caggaagcagctgagctgagagggagcctctgaaccaggcaggtggtgagggacctgtcagccaggctcagggactcatgagatgataaaggcgggcagggaaggacaatggccttaggggcagccatggggaactcccaggtcagaaaaggctggatctgaccgatggttttataaaagatgccttttacacgaagcaccagggacagcttctccagtaggaatcttgtatatgaagaaggggtgggtgcggggggcactgccaatgccaccgcccaggggaccaagagatggccaagtgaatgtgatgtgcagtccctgatgggtcttgggacagaggacataaaggggaaactgaggaagccagagtcacttcagttagtgacaatgtgtccacactggttcattcattgtaaccaaagcaccaactactgtgaggtatggatgggggacccgggtgtggaatacaatcttcttttgcactagcttctcaattttgctaagtctaaaactgctctaaaatatctaggtaaagcaggggctgcccctttggcaggtcaggtgggcagcaggtcagcttctgcggtcggccctccaggacactggccgtggctcaggatggaggcaggtgaactgcaaggatccctgggcatgagcctaggtgctgccttcggtggctacagcacagtccccccactgtcaggtgctcccgggggcagcaacacccccctccatacaggggcaggttcagcaaggggccagcagcccagagctgggggccatggcccacccacgtcccagagaggctgggcagggagagaggccctgctggcacagggcccgaggtggtggagctaggactggccttcaggctgctgggcttcccaccatacgacccggagaacttgtccccagaaaagctgccttggagccatgggctccagacacagagagatgcggccttcccgcaggcatgatgctatctgcagatagcggagcgcagacgtgggacaaggccctctggaatgtgtctggacttgccccacaaggttcctcccagtgagacggggcttgtgaacaggactgagaaggaggagcgcccagctctcctgcatcccatcaggggcctgggtgacaggaggggaggccctgcatgaaggctgcaaaggagtctccaaggcaagctctgacggattcccaggcagctcgagcctccagcagaggcagcaggtggagacgaggaactgacgaggaacacagtccacagctgggaacacaaggaagggggaaggtgcagagaaaggcctgagatccatggtgggcctggcagccagccactggaaaccgccgaggtcccagacgtccttgagggtggcctacaagtggccgggaactttgagaggccctctcatgtgtctgataccaaatgtataatttaatattctatattttcagcccagacaggaattaattatttaatgtcctatcaaaaccaactccatccttcatactactccaggcagcgtgtgggggcggaagagttcagtggccccggctggcatcacggcaacactggggagggcgcagatcagacacgcagcaagtacgtgctgagaacctgccagggcgcctggcacaggatcccagcatgacgcctcctgcttgccaggtgcccagcgagtgtgcggggctacaaaggagggcgtcaaggtttcaacctagtctccactgactctccagaaggttcctctcccaagagatacagtgccgaaaacaaaagaggcaagaggcagccatccccagatagctgtgtggcaggccccaggctgtacgggacacagtggacagacaggcccagccatgccctgcagagctctcggagattccagggcaggaagcagactgtcaataaacagaaagcaaggcaaagaacatgctgggtccagactgaaccctgcagtgaagcaggtgaagcacgcaggccgccaagggcacagaccctgtccgctcagccttcacagccccaaaggggcggccctgctgtgcctggcccgaacatgctgccgtcacagccagccgacatctgtacggggctggagagcatcccctacggttcatgtccttcctggaacctcagaatgccaccttctttggaaataggatcacagcggatgtcatgagtgacgatgaggtcaccctggagtaaggtgggcccttaatccactgtgaccagggccctcaaaagaagagaaaagacatagggagaaaggggaggccatgtgaagtcagatccccacccccgcgacctctggaaggagcgtggccctgccgacaacaccttgagtttggaattctggcctccaggagagggcagaataaatcccccttgttttgcggcaccaggtccgtgatacttggctatggcagagagtggacgccagaaaaaggataaatgtcacaaacacagcgctcagcccttcagagcagacagactcagggatacaaatgtcataaggtgacccctggggcccctgaacccctgcagcagaggcagccagccactgagacaggacccccagggagcagggggcgacagctgagaggcccaggaggacaagagggactctgccatgccaagaagtcagggacggtgtgctgtgactgcagggacaggggttccaccttccccagaggcctctggcaccctgggttcgggatgtgggccccacacccaccccatgccaggcttggccccctaatggccctctttcccagggaacaacctccccaggctccatccctatgtccccaccccctgctgctctctctggatccttccctcctaattggcatggaaagtcaagtccctgagcctgcaaaagactcggctgtccccacacaccactcctggagcagatgggcccttcatcatttgctcatttcacgttcccctaatcatgcgaagagccctggtaattgacaacgattctctgcacaaatggcggacccacagaggagcgaaggcgcagagacccatccgttgagacagcctccctgccggggtgtgccaagtgagtgtggggctgacgggtgtgagccacagtgggcagtcagggccagggagaggaacagagccgagtcagctgctgacctgctgcagcagctcagccacttaaaaattcgtcggaacatgttgaaacaatgaggggatagaacaaccactcaccctgcagactcccaagtcatccccagccacggcaggcagacagcccagcagagactcccaagtcatccccagccacggcaggcaggcggcccagcagcaggcaggtttcagctcggccggagcaggccctcaggcactggacctggggaggcttccggtcacctgtgcaatgccaccagcagcttcttgcatgcttcccatgacag

SEQ ID NO: 53352 - DNA, 2400 bp, Homo sapiens
gtctctactaaaatacaaaaaaattagctgggcacggtggcgcacacctgtagtcccagctacttgggaggctgaggcaggggaatcacttgaacccgggaggcggaggttgcagcgaggcggaggttgcagtgagctgagattgcgccactgcattccagcctggcaacagccagactcagtctcaaccaaaaaaaaaaaatgattctagcaactcatgagcaaagagagggaatccaaaataaatggtaaccaacccccacgtgcacacgtgcaatgaagccacctagatgagcagcacgggagcacactgaatgaacatgtgatcattacccaccaccaccacgcgtcctgcctcccagctggaccccaggctcctccaaagtacaactcaaaggacgctcatcaaagcagtgcttccttaggcgcttgggtgctcactgcagtgggctggctgcccttctcaacgcccgccacactttgtcaattaattagggaggggggtgccagcctggggggcgtggtggggactccgcaagcactcaacagatgctggcccacccaggccagcctctccacccaggccagcctctccacccaggctggttcccaggctgttactttatggaacatcagcaagctgaccgcttggcacagctgcctttttctatatgcataagatgcttcaataagaagcttgctaaaaagaaaaacaaaaaaaaacacctctggctttaaaaatgttttaactccaaagatttttaattagctttattcactcaaaacacacggataagcttgacggctccgtgagaatgctggtagggagcagaaccaaacacccagggaaggaagcaccactgggcaggcagctctatcagagaccacaggtgcacacaagcatcccctcccactcagccagaggggcgcagcgctgtccacaactcacaccctcagccccacttccagcctgatgaacccacctgagccagccacagtgacaggtggagcctagatcattccaaagactccaaagataatgccaaaggctccacttccaggccgatgacaccatctgagccagccacagtgacaggcagagcctagataagttgggcccttctggagggttctctccagaggactggcaagcacagccaatattcatcaaaatgcatgaatcttctctgaaccagtgacttcatttgctccagtgtcctgcgattgattcttctgaacttctgagcccactcaaccaagggcggcccagggaagggcatgtatgcagcccccgcggctgtctacttggtccatgtccagccgcagtggaagcgcctgccctgcccagctgcactgtctgcctctgcttcttccccacaagttcaaggtcggtgtactcaggcatccctgtcacatcgatgagcaaacatggcccagcgatttgtgtttctcagagccctctcattccaaaacaagtcttgatccaagggcacagcggtggccggtacttcctgagggcctgccactgtggactctgcaagtgtcgtatttactaataatggtgcaccgccaggagcgtgcaatgccattcagattttacacaagcaaggtgctcaggccgcaggggagacgtgaccccagggcggacccctcccaagcttggtgtggtgttctgctgggcccccacctccaatttccatctaacagctctgaaatgactggactctgcatctggcctcaccaggtgatgctcagctgccccaagatggaggtgggcacacgctccatgccatctccctgacctcgcaaacccaccacggtgccggcacaaacccttcacaaagcactcacccacttacccttgggctggaaggaaccacaggcgccactgggacggcccattggtgacaaccaaactcaggtgttcctgagtgttcctgagaaccagagttctcagctacctacaaactcaccattaaggggactatgctagacaaccaactttaaacttgttacaaatcccagagagagaagcgtgtgcaggagactggtctggtcccatctccgtactgacagctggggggcgggaaggcccagccgggcccagagccaccctgggaggctgagatgcagctcagaaaccaggggtgaaggggctggagcaggcggggagggaaagacaggaaggagcacccatgtgggacccagggtcccagacaaccccaaagcttcctgcaggtgggaaagctccgccacatgcaagaaactccgcaagaatagcacatgaggggctgggcctcgtctgatgcttgcctcggcccagaggcatctgagcagtggccacaaagcctccatcctggaggaggagtctcagagcctaccgcgtgcctaaccctgcca

SEQ ID NO: 53353 - DNA, 4177 bp, Homo sapiens
actggagacaagaaaacaagatgggcccagagacagcacagagcccactcagccctgctccgcggggcacctgcacacattacacaccccgccaagaccttcctcttccgctggcaacacccacgtccagaacaaccccagtggctgcacacagggtcagagctctgttaccaggagagcaggtgaattctgcaagcacaaaagcctgtgttcataatccatactccaggggtctgctgggcttacaggtcccctggcttggggcaggtggacaggaaaaggtgtgttccactcttccaagatgcacaggaggcccaggggcagaggcggcccttcaggcaggactttcccagtcccatgggggagggaagccagacaaggcaggtgccaagccccccctccccaccccgggccctcctgctctccctcagcagtggtggttcccagaggggttccctggggctcagcccaactcagaggagggcccagacagcaggccccacgcagaaatcgcacctcctttggggcagggtgaggtaggggccatctgctgggcccattcagcaggaagggacctcttcacctccacagccctcagggactccccatggaaactaattgcctcaaagcataaaaccaccccaggatgggggtgggggaaggggcagtgagggccccagacccccttggatgggaaacaaagctgaacgcagctgctccaagcccacccacctgctactccagggagcgcatgccccagcagaagctggattttcagaggtgtggacatctggccccagggaattcacagggcctaagatcctgccctaactctaaaaacagcaatggcagccccagggccatggtcggatcccaccctaccccaccccacaaaatgtaacttcttaaccattttcaaatgcacaagtcagcagcactgaactcactcacactgtgcagccatcaccaccgtcacacacacattccccacgcgcctccctggggacaccacggactccacttacccccagcagagaccctccccaaccccagcaccccagggacatcagaggctgagggatgagatcacagcagccaggacacagaccagagggatgacggccagcctgacacggcgatcagcgaggccaggaaccgcccctgcccctgcctctgcctcccatcccccgccccccacccaggggctgcttttgcatcttcaggggagggaaggtaaggctcctgcgtggccagcctcctcaccaccagccctgaaggaaagacgaggcgcattcacagcgaccctcttccacgtagagcaacgcagcgtccacagaaggcagccactcctctatgctccccaccaggaacccccagttcccaagcccgagcttaggctgaagggtagaccctgcccaggagcaccccttggatgagccttgagggccttgtgctaagggaaataagccagtcacaaaggacaaataccacgggactccctacaggaggtccccgcaggactctcttacatgaggcccctggagccggcagactcacgcagacagcaagcagaagtggggagccaggggccaggggaggctggggtgagcgctgaatgggggcagagtgtccgcctgggcggatgaagcagttcgggagacggacggtggtgacggctgcacagcaacgtgagtgtgttcagagccaccgacctgtgccctggaaaatggttaagaagctaaatgctatgttctgtgtattttaccacagtcaataaaacaaaacaaagcagcagctgcatgtgggggccacgcacacctggatcttccaggcctccagctcttttgaacccaaggccaaacacggacaggcaggcccagacatgtctgtccctacaccaccggccctgggtcatggggcagtttccatagaaaccgctgtgtccaggagccacgtcactctcacagatggacagacagacggatgcagctctgggaagggcttttccagcttccacatctccaagtctcagcctcatcgtggacacgataagaccaacgtcccccaaacagggtcagagctagacaaacaccagactccaccccaattagtatcatgagcctgagccgactgatctgttccaaagggcgtcatcccagcggctggctgcaagatacttaacatttaatttctaggtccagggaggctgccattagcaagattaattgtgtgcacacacaatttaatttcccccacctcagaaacaaaagtgacacttaccccaattacaggacgctgggccctggcggacagcccgtcattcgcattcgcaaggagacgacacgaacagcatggaaatgaagcgcccctgccaggggggcagggacaccgcgtccccgtccctggggaagcctcacttctgaggagctctttgctgagatcaagatggcctgaggcaggtccggcagggatctggagctgagctgaaaggggtctcagtgctgcctgctcttccgccctcggggtgggaaaccgaggcccagcaaaccacaggcttggggtcggataccagatgaccccagacaagctgacccccaggtcttggcctgggttcctcgtccaggaaactagagtcatcacagtgctcctcttacagcgggtgccgaagggtgggggctcacgggcacgagcctagaacatgcccacgcctgtgtgggagacagcatgcccactctgggtgctagctgctggctttctagactggcctgacccctcctaagagcctaggagtcaaaggggtgggggaaggcggccactggcacagtgatctgcggtcctcggttcccttctctccccaaggccaccctgagacccctggaaagactaagggatgcttgggagggaaaggcactgggtccagggcctgggggagcacatagcttgccttggggcaggtgtgggcagcccacagctccgcagcaaggaccaccccagtcccacactgcaactgcacaaatacattaagccagccggcccgtcagcacctgcttcctcagcgaccgagtgcgtcatgaaatcccaggaaactccccagggcacccaacgaggctcggctgtttgttcagaagacatttcatttacacacacacacaaaaaatttttttcttctctgtcccccgttaaacctaatcaggcttccccgatgtgatggtgttttactcatgtctcaactgttaatgtcgatacaaggctgaagaccccacagcttccatgaaaaaagaactccaggctggaatattagtgtttcccatgaataatacatgaccccgcagggccactcctgggatgactccacgaattactgtctctgcagtggaaggacctgtcatcctggctgggaaaattagctagtaactaacaggatatgggcacactccgggaggctatggtgccagggtgtgggatggtgactcgcaggggctgaggcaggtccccaggcaggagtggcagccagggcatgggcagcacggatcgtgccagcctggcacatccacagggcacagagccctccacacagccgagactccagggggtggaaccagggagcccaggccgggagtctgggcagtggtttcttccgaggagccagaactcggctccaccgcgaccacacggagccttgctgcctgtcacagagggactgacggcgcgtctcacgcaggccgtggggcaaccaggaggaatcgtggctgtgagtccaggagtgagcacggactgcagcttcccagccccggactacatttcttccttccaagaggtgcaggaagaaaccacttgggagagcagaaatgggaaaagtgccgagggtcaaggggccacggctctccctagctggagcaaagacgaccgccccccaccaccccctagagtccctctcccctttgtccatgagaggcagatgcttgatggctcaggactgcctgctaaagacagcactccccaccctcccttgcagaaaggaatggccccagaaccacgctctggacactgtgtaagaaaggaaggggaggtgaggaagggtcatgcacttaaaaggaaacagctgcctcccctgcttctttcctgctgcatggaacacggacgagatggcaggagctcagcagctaccttgaagcac

SEQ ID NO: 53354 - DNA, 1835 bp, Homo sapiens
acgaaagggatgaaagaggtggggtgtggggaggagggggaaggagagggatgggggcattgggtacggggtggaagggacccaagggcggggtgggggatgatggaacagaggccagtggtgcaggggaggggtagagggggataaaggggagatgaggggaggggtggggatcagcaaggggcctgctcaggtgccagtgggaacaggtgtcccgggttggctgcatggggctgtgctgctaggaagtgaggcctcctggtgcttccgcagggctgcagggctttgtgagccaggagtgtcctttgaacacaaacaagcctctgtttattttggaaatgtgggggctgaggaggtggggagtgaaagctgacactcattagagcacccttaccagtgcacacacctctgtctataagcacactggggaggagacagaattaagtcacttggccaagatcatcccaggggtcagcaaaaatcaatctgcatcaatccctgggccccatgcagggctcggccaaagggcagccgagcacctaacccgcctggccgtccctcctgggtctccgtgcctgaatcgggcgtcagagtccagcagagacaactgtccttcggctccaacagggacacaggggcacaaggagctcaggagggcagggcaggctgagctgcagggctagagggaggagaggactcacaggccagagatgcaagaggaggggcgaatccgggccaggcttcagctcagaggccattgcagacgagaaaagcggacctggcccagccttggcaataaaaagcattccaggttcttgtaagggggaaagaaagagccaagcggtctccatccacggggaacttgcccgagcccacccccagaattatcatcaggatgatgtctcacaaaaagacttcaaagtgagaccaggaacaccatcttcctggtcgtgaggagcaggttttgctgggcggtgaggggccctggcccttagacacgcagtaaggcggactcagctgccctttctctcagaggacagcacggtccaagatctatggctctgagtccgatctgggcacttaccagacagcctgagtcccacctcccgcgaagactcctcttgccaccctcccaaatccacaggcctctaaaggtgggagtctgacagccaggtgccttcaggctgtggaggggtcacacaaaggccccacagctgcagggtggagggtggagagggctgaagaggaagggaagaaggagaaagggagggaggaaagaaggaaggaggctcgggtggcgaaggcggcggcaacagcagctgggcctcagctggtcctcggtcccacagtcgggcagcgccacggtggggcagcgtggaggaggaggccctagcgacaactctggggtcctcaggtggcaagggacctgccccgcacggccgcctaccaggggcgagccctccctccccggccttcataaaagcaaaatctagacaaaggagccaagatggccgacacccactccggccagctccaaaggtcaccttcaagaaacggagtttgcaggaagtcaacggtgcctgcagaacaggggcgagcacccagcccagccaaggccaggaggagcccaagccttcctccgtcgccacacggcagctttcattgcctgaacctcggagggtggcgggacggtgattccacccacagccgcgatgaccgaggcccagcatcgcagcaagtggcagagaagccagagtccaactaccgcccctgaaacccaccgcacctgacccacacagcagcggcgagagtcgggcgcccacgtgtaccacaca

SEQ ID NO: 53355 - DNA, 846 bp, Homo sapiens
ggggaggaagcaagggatgggggagggaagcgggaggggaaggagaggggagggatcacgggagggggaggagagggaaggggaggggagaggagaggaggggaggaggggacgggaggggagaggaggaggagaggggaagggagaaggggaggggaggggagaggttggcattcacttctctatctctgttgccgtcccacagctccacaaagtggagagggaggtttgggactttggaacaggtgaatgtgaccaaggtcaccggtccactcagcgccacaccagtgctgggccaagcggcatcaaacccaggacagctcgcacggggggaaggacctgggagggagcagggaagcacgggtgctgtgtctgggaatcttgaaaacaccaaggagtgctttgaaacaggccgcttggccggaagagcaccggcctgttctccattagtgtccccttttcctggctcagggagttcacacccactttctgacgccttgactctagtcctcattggctctggggacatcagggaattctccatggtggggcagagtggggacatccacagctggaagccacagtcagcccccacaccaccgtcccgccctccttgtgatcacgtggtttcacgactacactttttgaattcccggcagccaccatccacacccctcaacctgatattttcaaggggattcagcacgatctggcgttctacagactccacctgccaacggccagctgactttctcccaaggagcacaggtggtgcaatgaggaagtctctactgaaaaaaatgccggacaaggggctgtgcccactttacaaagcaccctgaaaac

SEQ ID NO: 53356 - DNA, 1635 bp, Homo sapiens
acgacactctccctcccaattccagtgatcaaggtggcaggtgaggaaccctagataccccgcacaagggtgacgccctcgccctttgtccctgggacattgccagtgtgtggctacccacgcctacccacccatcaacacccccatcatgagaaaggacacctgcgtgtccctaaagaggaagacaaaatgcagggcccccccaggccttgggataagcatcaaattcccactcagctgactgctgggaaagaacctcggggcagaaaaacaacatggcaattcaggaggaaaatgaggacgtggaagcaggatccagcaggtcagagtcctgaccccagattaccaggccaggaaggtgggggctggggtgttgtgaacctgttccagaacgctcccttcacgctcacctggcgcactgtcacgcagggctcagctaaaaggtcacttcctccaggaagccccagaccctgccccacccacccgctgccacattcctggcagggcccagcgtctcctcacactccctccacactgcctgtgtggtatctgcctgtgtcctcctgggccgcaagcagggctgcctgtctgcccggagccaggcacggggtagcggtcagtaacgcttgctgggtgagtgaatacccaggcccaccacaactccagctcccttgcacaagggcctagacagggaggtggtcccagaacggcccacagtgcccctccaacctccagcctccccttgaggcagccactcgccgggtgggagtggacgtcaggtgaggtgaccagggcacaaagcagcacagtcacatcagcagtggtctccgtttgctacctgcttttgcgctgggccaaacacacacctgcaccctgtgtcaggtgtgaccactccacatccacccgggggacggggagtgcaccaccttcctactgtggaaatgggtaaactgaggctcagaaaggtggagcaagttgcccaaaggcatgagcaagctacagtttccaagctggacttggaaacagctcccttaacgtggtcctcttcctcactgtgccattcacccactcagaaaatccacacactccctgcgccctgcacccagcagtgcgccgcggacagataggtcacgccctgcacccagcactgcaccatggacagacaggtcagcacacaaggcttctgcttccaggacttccagacaggacactcacttttctgactggcccccgaagtcttccaagaacctccaatctctcaggccaacagtttccctcaaggtctgtaccttgtggtaccgtggggagcgggcctcacccaccctcctgcagggccttccacgtgattcatgcccctggcagaacccagcgtgcgtcatggcccagagcgagtgtggtccatctcaaggccctttttacggccttttcctgctgacgccaaccaaggcaggtgaaagcaccaacaggccgtttcacagaatgaagggaatgaaggcctcatttcatcaactcctaccccgaggcagaacccatccccttactaggaaaggcaggcaccccagcctgccccggcacccccgccatgtccatggcctcccccaccaggagctaggagggctggacacaaacccatat

SEQ ID NO: 53357 - DNA, 2304 bp, Homo sapiens
agaagacaggcaggcaccccctccccacccctatgcagatttcaaagaacacagggctgggaggccttgaggaaacttggagacgggctccccaatcctgggaaggccacagcccgcaagcacctggcgggtcacggaaagataccgcgtgttcgcgctgcctttgaacccaaaagtacaaaacaaaccaacagaaatactgatgacttcagggccaagctggcctaggggacaaggagtaggtctgtgagaatgatttgtcttcatccttacacaaactctgtaaagactgacagatgaaccccacaaaacagaaacactgtttccagcagcatcaggattgcaaaacctgcagctgccaggcagcaggagacctaactcaggggcgcagccgctcagtctggcccaaagttcaagctcccactgcccagtcctgtcccctccacggtcctgtatttgtcattcttgtttatcttttggattcagaagccaaacagcgtccccagctccaggcaaagagtccttcagaacacgaagcttcaggggaccaaaaaccgggcacctgagcctggggctggccccggtgaagaagggggctcatcagagctgagggggtcagggcaggggagttcgctgggtttagggtctcctccagccagctcctgaccccagtgtgagagcaggtctgcaggtcccggagcgcccaccccagccgcgtcaagtgggcacatggggaggggcactgaggcttcggaagagctttcgtgccaggggtggtggtgtcggagaggcgagctcatggctccaccctgcaggggctgggagacatgtccgccgagcacttcccacttgccaggcaccgggctgacagccgggtcctcggccaacccttgggaggggctcctaaaataccccctttgacagcggagaatgcagggtccagagaggcgccacgggtctgccacgaggtgctgagccaggatctgaacgcggctgtcagaggctcaacgctgtgtgtgcggtctccaccctaggaatgtgtcggccgctcagtgcccaaccacacacgaagccaggcccagaggagatgggtccccaggcaggggctgcatgaggacggctcggctcccagggcagcaggaaggagcggacgccgcagccgtccggaactcggacagaggatgttgacagggagggaggacaagcaaatgaagacttcctgcagcagagacacagagcccggagccacggccgccggcaggacaggcagccaggcactaatccgggcccggccccgcctccggccatgtcccagagccccaccactgacctctggcccacgaggacctcctgctgtcagcctgctgactttgccagggccccgagctccccaacaggccccagctgaactcactcagctgaaacggcattcggggagcacaggtgctagtggtgaggggaaggcggcgccagctgcgcaccccaccgccctgtcacctcatcagggagcctgccggcgtcacctgaaggcagccctgccttctgcctgccttctctctctcatctgaaagtgccatcttcctctctccattcatccttattctgtgccccctccagaaagccagcaacaccaagcacagggtttctgcctctgcggctcaatgccacgagccagtgcgcgacacacagagtagggtggagaacaggctgggccaccagccacccgggagcaggaggcccaggaccggaagccatgtggccagagggcagagctggtcagccctggggccatctctggactcaggcacctggttctctgtctcccaacctcccaccaacccaaggggccattttgccggtggaggggggaagtgaatggcgctccagaggcaagagacctgcacgggctggcacgaggcctcaacccccacacagctgcatgacctcagactggcccgtcacctgtccctccttcatccattaaccagggcagagccgcccccacctggtgctgcccagagtcttccaaggaccaggggaggtgccagtgctgggcggtcctgaaacaaacccacccagaatagagaaagggcatgtgtcagggcagaggggccctggcaacaagatctttccccagggcactggggtgctgcccccgaccctgacaccgcagaggctgatcatcacccagctgcccgaccagccatggggcatggccacctctctggaaccttctatcacgcatctccctgggtctcagactcatcatctgctgcagggaaacaccatcccctgcaaggcaga

SEQ ID NO: 53358 - DNA, 5056 bp, Homo sapiens
gtgcaggagctgagccaagccacctgccacagccacggccccctcctcttcccatcttcccaaaccacagctggggaggggcagcccccggacccagcgagtccaccaggcaaggctgggctcctcccaagcctcctctgtgcggacccagctgccctgcctctgccctgagccccagcctgcaagcagcagggaatcctgcccgagcaagtcagcctgggcagcccctggaactcatatcaaaggcagccaccttggttcgaggcccagccctgctccccaacagctacccttctcctcagtttctccagccataaaatggagtccagacttcccagtccccgtggggctctgagaacagatccggggaagccctctgcagcagtgaccgccacccccgccacctgcacctgaccactgacatcctgcgggaagaggcgctggctcccagggaggcctctgagggctcctgctaagccggtccaggcagtgctgggtaatcattacccagtgggaaggcggccccttcccctctgggcttgcctttgtcagcgccccccaacccggcagagaaaggcccggtctcctaggaaacgcagtcaccgccaaagggcagaggcctcgctgcccagcctggaatcgctggtgactcactctccctccttcccaggaaccacgtcctaagtcccactggtgaatggtccctctccacatggagttgccactgcgcgcggtgaggggctgctgagctggctggaagaccgcacctcctcggcgctgggtggacccggctgccacccgctctgcctcccccgacctcttctaagctgctcccggtaaggattccgcgacccccggagaacaggacggaagcctcgattctctcaagtcttagccaagttccctcttaagaggccaagaaaagcagcttcgttcggctgggcaggcattttcctgcctggccctgcggccgcacgcgtgcctccgccgcgacaaaggccacactcagcgcccgaaggaggggtgggggtgttgggaaagcgatgggggccaggactggggccaagtggccctggggatcctcgaggcggctcgacccgggagccaggactggcgccaagtggcccgggtccgggtccgggaagaggcggaggccggcgagggggcggtgcccggggccaacccagctccctccggccccgagggctcccgccccgcgcccctcccgggccctccagccgcgccccgggccggcgcagcgaccgcgcccgctcttccaccggcgtccggccaggaggcgcgaggcccaaggatgcgacccacgacgcgcacacccggctcggcaggctccctgggaaatgaggggccactcgcagggccccgcagagcgagcgcagcgccggagcctcccccatcccaggccgcgcagaccgcggaaccggcgcaccagagcagtgcccgcgggcggcggcggcgcgacccaggctgaggggactttggccaacttcgcgcctcctgaggtcgcgtctcggaggcccggggcgcaccctccagccgcccgcccgcgtcccggagcccggccgccccagccagggcgcctgggccgccgccgctgcgacctccgcgttcagtccgcgcgtcgggcagcgcgaacgccgcctccccggggccctcccgcccgccgggcgctcacctgggacatctgcggccggaagttgatgtccttgaggtcgatggagccgggggagaggttgtgcagcagctggcacagaaggaccccgtcgcgcagcgcctgcgccaggtcgaagaccacggccgagggccacaccacccggtggttgggcggcaggaccttgcaatcgatgagccagcggccgcactgccgccactgctccatggcgcccgcgggcccgaccggctcagggcagtgctcgagccaaagtgcagcggccgcggggcatcccgcccgcgcgcgcgcggggctcagggccggggcggggcttcgcgcgggctgccccaggtcccccgctgcgccgccgtgcgtcccctcctcttcctcctcctactcctcgggctcctctcgggccgccgctcccgcccacgtgcggccgcggggcgggcaacgggcagcgcgccggatctccccgcttcacacacgcaagtgcctgcgggccccgggccgggctccacgcagccagtcgccgcagcgctccccaatccgcgccgccgggcgccgcattctgcgctcggggcgccccgcggccgccgcggctcctgccccgcccgagacaaaggcccggcggggtcgctcgctccgcgcgtcccgggcctgggccgcccgcgtcgccgccgctttgttcgccccacccgcagtccccacgcccggcgctgcgactcgacgactcggcggctcggcggctccacggctccggggcgctgggggcgcagggggcgcggccacggccgggcggggcaggggcggggccggagcactcgcctggcacctccccgtgtcccaagcgccgcccccgcccccccacttcctgccccgctaccgcccgcgaaagttgcggtgggcgggggttgcggcgcaggcccaggtccggccgactttctccaagggcgctcggactttggggagcccttctccctgggggagcgacctcgcccgtggagtgatggccgggcgtccccccgggtgcctttggtcctccgtggaggtcaggaggtggtccctgtcgcgctgggcgccctcgcatggccgttcggtaacgacagactcgggagagggcaccgggctgggccgaagcttactgagcccccttggcccatcaagccgccccggcgggatacccgaggctgaggctgaaggcacacgggcccaggactcccagagccctcttcctgtcctccgccctggccgggggcccataggaagacccccgaccctgcataaaggccaggattccccagcttttggccaaagtcctggccactcgcagctgcccagcgggcagttcctggcgtccagggcggaatgcgtgacatgagtgagggcaggaaggtgctctccggcccagggtcgcagccggccccggtgctgatccgccctgatctcccttctaggccacaccctgggtggtgggggcgcggtctgtccagctggcaacgtgtgacggtaggaggggcttcaaggacaaacagattctgcaactgaaattatatggatcctggctcagctgccgggaaccgcgggttttcactgctgattcactgggggacaccaggcaagtccaagcccttctctgagactggctcagcccggaggctggggtgcggtgtctgagggctcccaccctggactccggtggaatcctgggcctgtatgagctggggctgcactgcagcccccggaccccttaccccgtggcttccctgcgcaggggccggaacggggatgcgagcgcagagagggtcccctgggcccagggcctccgatgggggtcctgtcctggaaattggtctctgcagagtcagactcaccccttctccactgaggtggaagcagggggtcccagcttagggtctggcccgtagagagaggtcaggaaggagctggcccctgcagcagtaaactcaggccaggtggctggtgaggcgggggctcaggtctcttgcccttccccgaggaagcagcagtgggcacctttagggcaagggggagagctttcctcaccgaagcaagatggggcagcaggtggacccatcagcatctccctaagaaatcagaaagccaggagtgaaacctgagcggggccctccagccccatctgagagcctacactgatccctcctcctgcaaagcctcatcccctcctctctagagcggggagacccggctcccactggacttgcttgtgaagaatggacggataaattacccagaggcttcccactgtgctgggacagaaagggctcagagaggaagaagagctacccactctcccaacccctcgcctggaccgccggcgcattgatgcactaaatgtctctttccccaggtggctccctcagcaagaagggggcctctgtcctcacggtcctgggcctgcctgctctggccaagaggaccagccaggtctgggacccaggcagccgcccgccaacaatgccatgggtacctgctgccccctggtggtgctgtcaccacggggcacctggctgcacccaggaggggctgcacagaaaatctggggttgaccgttgagaagacccaactcaggagacacagacttcaccacagtggccctgagccactcaggcctccctggttcccaggtcctgatcggcataggacattcaccggccctgtgcacctcccagaatccttggaggctctgagggcaggatggatgtgaatcaaagaacaaaagtttggtggggccaggtacagcagctcaagcctgtagtcccagcactttgggaggctcaggcaggcagatggcttgagtccaggagttcaagaccagcctgggcaacacagtgggtccctgtctcaaaaataaaataaaaggtaaagaaaatggggcaggagctccctttgtaacctttagtgtgagtgtaatgatgaacaggttgagactgtggactcaaggcacatgccaggaagactaatagagaggacgctgtttgggaaaatcctaccaccatccatgtccacttggactcagggctgtctgccaggactgcctgctgcacacctccagggggcgagagtcccatcacaccttggagatgggctccagggggagctgcttacacagactgccagtgagcagctgccagtccagccgagcagattaaaccagggagcaagaagtgccagcatgggccacataccccaagtatgggggagggtcacaggtggcggaggagggcaccaggcagggcacacccggggagggagcagcaaggcttccaggagaaactgaggtttgagttgacaaccagagattgatcatggttgcagtgactaggagagggtgacatggaggat

SEQ ID NO: 53359 - DNA, 577 bp, Homo sapiens
ccagtaggacaccatcacctggggaagcagccagccaagtggcagcaggttgatgccattggacttcgttccccatggaggagaagggggctcggcctcattggaatagacacggttgcttttcctgcacacagtccttctgccagccctgtcatccatgccaagatgctttgccagctgccatggtgtcccgcacaacatggcttccaagcaagaaactcactcctgagcaaaagaagttaccggactgactacaggcccctttcccgaagtgccgcctgataaaaggaatggacaggccacgtggttagcgtgctgttaccaagtgaggacagtgacggcacctctggaaaaacgccatcatggaagttcgagggcctcatctgcagattaaagtgtatgctttgaaccagagacaaacagatcacgctgtcttcccagcagctggacgacatgtgtccaggaaccagggctcagaagggcagtggctcctgtgactggtacttctgataagcctttaacttggcagcctgcccacccacagtggcgggctctgatggctcagaagtcttggttc

SEQ ID NO: 53360 - DNA, 1131 bp, Homo sapiens
ctccagctcctgctcctctttcttttccagtacctcctcagccccttctcctctgccagcccctcctcccacctccgctcccagcccctcctcctttcccagcccctcaccatccagcccctcctcctccatctcctcctcctctctcagctcctcctcctcccccagctcctcctcctgctcctccttctcctccactcctccttctgctcctccttctcgttcagctcctcctctcccagcccctcctcctcctccagcccctcctcctcatccagccctttctcctctcccagcccctcctctcccagctcctcctcctcctccctcctcctcctccagcccctcctcctccagcccctcctcctccagcccctcctcctcctcttccagttcctattcggggcgggcccagcccctcctcgcggagcgatcgatggcttgggctcgtcgcacacgcctgcccagcctctgcgctcggctcgccaggcctgcggcgctgccatggagacacggcccagcggccgccggccccgccctgggagccccgcagtgcgtcgcgccgctgcccgcatctccgaggcccgcgacgagcggtgactggggcgggcgacgtgggggacccggggatgcgggcagacgatagggggctggaggatggggcgacccagagcgcgcggggtctggggcgcggggatgggggccgcgggccacgcgacggggaccccagggtgcgcgcaggtggcggggacgcgcgatgggggcccgggaagctgaggctgacctagcgcaggcatcccaggaggggaggtccctgacgctgcgcagctgggaaggcgttcgggagtgggttgcgatgcttccctgtttgttttctcctgacatcgtttttgtttgggtccaggggcctcacgggagctggatgctcggagcagcaaggcggccctgggggccccttccggtcccggggctgacgcctggcggcgtctccgggaacccgcgccctttcaagcgccgctggctcctgtttcacagatggagaccctgaagccccaacaagcagcctccccagcacctcccagtgactgaaaaagctggcactgggcgcccgtctcactctccacccagctc

SEQ ID NO: 53361 - DNA, 615 bp, Homo sapiens
ctgccaatctcaggtgatctgcccacctcggcctcccaaagtactgggattacaggcgtgagccaccgcacccggcccacttcatgcttttaacctctgactcgcagctctcccgtgagcccacagacgggcacagtgacagcatccaggttgtcatctgtgcaaacagcatgttctgaatgtgcctgtactctgttcgtgcttctctttgcagctgtgcaagttcattcgcaaacgtcctagaagtggaactgctgggtcaaagtgcattccccaaatgtcctgccagaggcctggtcggcagcagcctcctgcacagcccgagtcccttctgcgagagtcctggcttgtttgcagcctgcagctgggagatttgaagtcagacttccaggattgccgcatggagctgcagagggagtgagcatggggctggaggacctgccccgccggctgacactcccacagcaaggcgggcccgccaaggaagcactccacatccgctaggtagggtttgtctgcatcttttcagttcttcagtttaagtcctgcctgggaagaaagcaaactccagaggcaaatctggaatgcctgtgtgccaccttctcaccgcaccac

SEQ ID NO: 53362 - DNA, 763 bp, Homo sapiens
cacaagttttgcgggacaagagggaggcaggagagcattccagacacagggcaaggggcagcccaaccaggaggcatgaagcagccacagcagctctgggaacaagggacctcagggattgagtgggcaagtctggactccatcccagcagcagtgggagccaccgaaggccatttcaagcaaggagaggagggagatgacccacagaaccttctgtgggtgtgtcctggggacggagccaggcaccaggcagacgcgcatgtttaacgtccaggcctcctgggggtgtgcaggtctctctgggcagcctgcaagggcctcagcacccagcacccatgggcatcacctcagcgttccagggccagggctcagtgtgcaccctgagaccagctcagccagcttctaatcttagcccagcgggagaggagccagcgggagccacggctcccagcccacggcacctgccgtctagagagccacccacagtcactgcccagccaagccgccgccctcagactggcaggggccggagccggctatccacaaacacttggcaggcacccacgtgctgccaagcgccaggcgcgtgccgcacagggcggataggagcggggacagactcgtctggccgtggcaaatgggacatgctccagaaacagcccccactgggggaggcggcttgaccaggggccacccataagtgcaggcagtgaaggccacggggaggggaagcaacggaggtggcattttaccttgggcgagc

SEQ ID NO: 53363 - DNA, 2063 bp, Homo sapiens
aggtgagcgggtgcctctccacctcaccgacccggtgctcacagccccaggctgcaaccctggtgcggagggcagccccaggccaaagcgtggcagcactgcccctcgccaccaccacttgcaaggatttccatgaagccctcccagcagggctccctgctctgccccgcaaggaccgcctagcccgcaccgcagggtgatcctgttaaaaccaagtcggatcaagtcaccggtctgctcaaaacctcccaggggctccacgtgactcagagtgaaagcgagtcctgccccaccctggttggtggggcctggggtgaccgagtcctgagacctgtgtcctgtctcctgtgacttgcggccctccctcaaggcctggacagcagcaggctcctgcccttccaaggcctccaggtagctcccagaacacccttcctgctgggcccccaggcagcacagacactggggccagccacacggcctggtccttccacttccccacgaggctcctgagggtggaggagtcaggcacagagagagctcacgccagttatgggcaccaagcaccacacgcagctccgctgagactgccgggcagcaccctgacagaaggcccaggctgtgctgctgctgcctcccagggcccagatgtcagctcccaggtgtcggtcaggtggggacattcccagtatccactgctgctgcacaggcccagagccaggaaatggggctgaaactgacctttggggatgtgggggtggtcagggcacaaaggaaggctcccaggctgcaggccagcttcctccaagcatgaggatggacggtcacagctcaacatgggggcctgcttatgctgccgtcaggatcccacgcctggccagatcaggccctctaagccacccacttccaaccacctgaccactgtttcaaaccggagactgagaaggagcccagctccagccatggacaccggagtgcatgcctcgtcctgggtggggagggcagccccgcccggccatggactgtgagcttgagcaaggcagaaggaggggcgccccaggctctgcttggcaccagcccacgagccacggcagagccgtccaaggcccagcccagaagccctcttgctgctgccagggaaatcccggccaatgtggttaaagctctggggctgcacctggtgccagcatgtgctcactgaatgccagtggtcactacaggccctgagggtgcagtttgcctccagctccgctacctggcagaaacacaccaaccccaacaagacctggaaggctgaggggtgcagtataaaaagcccctggcacacacgggcaggcgactgccccaccctcggtggtgaggcatggtgatctcacctctcctctcctggaacacaaaccctgccctctgagacacctacaccccacacactcagattttgcaaaaactcgaggacaacacgatgccatgataagtggccctgcctcccccagaagcccttggcatagaagcggagcccccaggcagcctggcaccagccagtgggaggggcagggagggagggcagccagagggcaaaggggtggcatccccctcaagccccctccgctaccaggtactgggacccaccacctggcaaggaccacgccgggcaggaggagaccaggaggcgacagtcaggtgagagcccggggtgacccctccctgtgggagaatgtgcagttcccagagtcccagtggggagggagggctgagacgggctcagtgcctcaggtccccgtccacagcacattcacaccatgtcatcccctctggggccgagggctggtcccgtctgcagacaccttccctccaagcacagtgggtggacaggctagagccacagccagggcctggctctgccaccctcagtgtctcaactgtccagacagagaagctgaagaaaccagaaggcgtctgtgcaagagagccccacacagacactggaaagaaccagggcaacctgcagaccaactcgaaagacctcccctagggcgacggaaatgagatgaggcaaacagcttccc

SEQ ID NO: 53364 - DNA, 2995 bp, Homo sapiens
cttcaggcatgcccccacctcccaggcagcaacgctgggaagagtaggccccggttccccataccccgccccggtaccgtgtgtatccacagcaaaacatggctcttcccatcgacaactgggcatagctgttggttttgtgccaatcaccccacttgggaaaccctgagccaccatgcctcagggaaagtggtggcacttcctggtggcaccaggaatcgcacaaggccatcactgccgcctggtgcacagggctcccgcggctggcatctccagagcctggaggaagagggtagaggaaggtagcaccggctgcagcaggcctggctgcttcgctctgcacacccccactttcactttctgggtatgactacttcggagtgtagggcaggcactgtttgcaagtcccgtccttcattcaaagctcactcacttccgaagcaggcgcgagctgttgtcaaaggaaagtaattactctactttctaaaaacaaaacaaaaataaaaatggagtgactgcccactcggagaaagcttttgaaatccctcctccccggatgtcccaacggcagggctcaggctggagctgctcccacagtctttccaggcacccggtgccctgctgaggcaccgggcctctgaggctacccggaaggtcagaaagaaatgcccctcgctcgcctgcagcccgtcctgttacagcgtgtgccttatctttcatgatcagtaaccaccagcacccatcaaggcctcaacagagaaaacggcaaacacagacctttatttgcaaatgagaggctgcatcagggctgccagggaagaacccggagggagggctccctaacccccgaggccagccccttgcaggggttcagaccttccttagaccccgttggaagccagtaacaaactactttccccagaaaaatgccatacaactttgcatagattccaggatctccccaggcatactacatggacccaggaaaaaaaaaaaaccctccattttaaagaaaagagtaaggggaaaagcctacaaaagagcagggtaaaaagaaaactcttttcctcttctgttccttctcacagggtagggcgggggaggacgggacacacgaagctgcctcttgcagttccagcccaattactctgcccaccaatgcactacagtctcccctcctggttaacttttgcagacaatgaccaagtttaatgtaagggggagaaatcccagtatctatttctgagcagaaagctttcaaccaaaattaaagatcgcaaccactcaaggattgggtcgaacggaggaacccacacgatggacgccgggtccctgcccccggtgggtctcggcgggccgagttctcgccctccagggaaaggaggccgcgcgaagcccccatcccggccctgcccccgaacgagcaaccggtggaataagacttcccgcacgccccagctttattcacagagagcccaccagggccatgtgggtgtacacggttcggggtgcgcatttctccccggatgggcttgtatcacgttgtcactccggcgccccccaaaagtgggaaggaggggaagcacccccgtccctcccgctccaactcgccctcgcccggattaagcgattttcaggctgatttcaaaacgggaactgggtctccccctggtttgggtgcaataatccggcaactcaggggggctcaaagtcagctctgggcccgtaactctgggaggaggccgcgcagagcccagggccgagcccggccttgccccccgccccggccgcggcgcgcggcgacggtccccaggcgcgggccccagcaacggctcgggagcgaggccggcggaacaggcgcggggaaagtggccccgcggagcgcacggccgcaggccggggccgccgcgcgcaccttccccctccgcgtcctccctgggttcccccttcgaaagatggcgggcggaggaaagggggaaaaaaatcccttccgtgagggagggcgcgcggaggccgggctggcgcggggcgcgcgggccgcgccaactccgggctgcgcgccccggccgcagcgacgccccgagtccgggacggaggcggccaagcgggagcgggaggaggggagcggagcccgcgccaccgccgccgccaccgccgccgcgaccccgggcggccgccgcgctttgttgcatcgtggccgcgcacaaaggcggcggcggcggcggcggccccgggcgcccggttcacccggacgcgccggcggactgcgcggggcgctcggggccgcgctccccggcccagcccggcccgccgccgcccgcgccgcccgccgccccgcgcgcgcaaggaagcaagagaaaggcgtacttggcctcgcggctccggcggccgtcccctcccggcccgcgcggccggctcctctttggctcgccggccccggcagcataatagacgcgccggagccgagcagggctcatgcgctgcgccgcggcgcctggcgggagtcgtagtccgcggccgggcccgcgccggggccgcccaggggaggccgcgggcgcgcggactacatgtcccggccccgccggcgccgcgccccgccccgggggcccccgcccgccccgccgacccggccgagagcgggcctggcccggggggcgcgcgggggcggggctcggcgcccgcccggcagggcaacaacgctgggaccccgtgggccgttccccgcccgggcccgcacggctctcctcaccccgtgtcggggacagcgcctggcggcggattttccggtgccccaggacggcatggaagaagcgggcacgcagccagcaccgcagcccccgtccgggcaccccgaggcccgcgggagccaccctcgaaccccggccgcgcacgggcggggcggcgcgcacctgccgggagcccgtgtttgtaaacaaaccgcgcgcctaattagcctggcgggagcgcgcgcgcggggcggggggcggggcgtcgg

SEQ ID NO: 53365 - DNA, 457 bp, Homo sapiens
ttctgatacagagatgaaccttggagacatgatactaagggaaatcagccaggtacaaaaagtcaagtattgtgtggttccacttacgtaaagtacttagaataggcaaattcatagagacagaaagtgtaatagagatgatcaggggctgggggaaagggaaaataggaagttagcgtttagtgtatacagagtttctgtttaggatgatgaaagtgtcctagaaaaggacagtggtgacggttgcacaataatgtggatgtgcttcctgtcactgaatcacacacttaacactggcgagaagggtggtacatttcatgtgtattttaccacaatacaaaatgttgggaaaaacccactatgagaatctgctacccacctattagagtgggaggaacacctggacacctaacacgtgctggggagggtgcggatcagcagaacccgcccccactgc

SEQ ID NO: 53366 - DNA, 741 bp, Homo sapiens
aataaatgaagtccttaggtgggtgacaggcacacagtaggcactcaggaataacagctgtggtggtttttaatagctcggacagatggaaatagtttggtatgatggggaagcacgggtggagtactactagcagctgcatatagagcccttaaaaaatgactcctacaaaccaccactgcactagccacactcctcccacccggccctgtcaaacaaaactaaacaaaacaaactaaagcctttgaaaaatcgccttggctctttgggcctctgatttccacctggtctgtcccaggagctgtatctttcacagtggtctttgccgggaccctctgtaaccagtgggattatgctgccgccaccagcaccaccgagaacccgaggtggggaggggatttgcagactgcgccaggtgcagcctggctttggaaacaagggtcgcattcctggaattctggctgggagatccgcccagcttggcctgacccaaactggtgcctgcatggcttctgggcacgcgcagctgagctcccagcaccacctgggggaagaggggggccgtccccggggacaccctggcctggagtggagtggaaggtggggcaggcagacagtcatagggacttttaagcaagtttaacaggtttaaatcccaacaggaagtggaagagaacatgccaccattcattcattgtgagggtctttattgagcacctgctgtgtgtccctcctggcagg

SEQ ID NO: 53367 - DNA, 2744 bp, Homo sapiens
ttctgagttttaaactggggagtgacagatcagagctggatttttaggagtttctctgtttggaggtttagaaaagacccaggtgggaggtagggctggggtggggagggagagaagtggacgatctgagagctgaggtggggtggaaggagagcagcgtgtcacgggctcgggattccggcccaggcggccaggtggacggagataaagatgcgcttcttcatccgaactgggtttgctaacctgtgactgtcaccactccatgctccagggcacctggcccaagggatccggcctcttgggcacacaaatccatatggagccctgaaggaccagacagggaccttgccttctctgtgtccttcctgggaaggggactccagaccaactgccagtcttccggttccacctctctgacaaccgctcacctcaccctccttggcatttttatttcaaatgctctatccctttgtttgcatgggttcctgtgtcatattctgtgttcccatttttaattggagaataagggactgtatgttattctacccacaggcctagctgaggggatagggaggccatgcctacctccaaggctctaagaagtgaagcaggcggcgagaatgtgcagtcgttgaggccagaggaccgggcctcagcttctccttaagcccctgagtcctcctctggggaccacccccttgtacctggaggtgaaaatgcccgcccaggagggaagggctggccccgggagagcccgctgcgaagtgagtttgcgcactgcggagcgggcgcgggtgactccagagcggccctgccagtccgcggggctggcggggagcaggttcgtgcaccgcgggctctgtgcatgcagaggcgggaagagcccccagcccggcagccggccccgcgggaaggcgcagcccgggcttccgaaccctgtgaacgcgcaggttcctggtcttccagatgggcaggaatcgtcctgcccgcccggggtgggaggccacatgggggcactgcgcccgggcgcggccccaggtgctttccaaatgcccactgccgctctcatccgtaccagcgatgatcaagaaggggcctggtcgcccggggaggtgccccggcccgaatcgactccggagacaacgccgggcgacgccacctgcgcaggtcccggagggccgctggtgtctgtgtacagggcgtgctgtctgtggaaacgcgagggcacactagcactttcctgtatgtattattatacttcagtttttaggaagtgcattagaagggcctgcaccagtcaaattcggggattaaagcttttaagcgggaagcgcgcgccccgtgctgtccctttaaagcgttgggccggcccgaggcattctggccgctgtcgctgcccgtagcgctcctccgagaggccggctttgtgagctcgccccgccccccggacaccgccccctcccctcgcgcacgcgcactgcgcccccgccgcctggcgcccgcccgagctgccgccttgtcgagctgagtccgcgctcccgcccaggcggcggccgacgcgacgccccgagcgcccggccccgccgccgcggcccggcaggtaagcgggcagccgcccggcccggggaacacaaggcgggcagcggggcggcgccagaagcttccaaaccgcacccggccgccgcacgtgttccccgccgggcctcgggccaggcccagccccgggcgctgctcccgctgcagcggccccgcccgggacccccgccccggcccctcggtggacggccgcgcgcgcagttccctccacccggtccgcccccactcgcgcccccacctccgcctccccggcggaccgctgacaaggccagagcgccggcactgggtcctctttcccgcaggcagcgtgcccggcctcacatcgcccctctccctccactgccccttcagggaaggaccccagacccaccaagccactcagtccctggacgaggtgcgcttcccctcctcgtagaaacgcccccagcccgctcccgccgctcaccccaacccgaggcagccaggctgcagctcgctaggtggggtcctggggtgcgggtcctcggtcctgaacggtaggcccaccgtgcctcctcgcgcggggccgcagacctgtcctggccggtctgcgagagccattttgagcggttacgttcccggaccaaacagaggtcggcctgttacatcgctaacgacactccctgctgtctcgcttgcaagtttccactcaccccggtccgtttacccatctcctcaaatgctagtttaatctgtgacctgggcaggtgctgtcctagccggtggggaagacaggaaagcgaaggacccaggcggggagcctgtccaggatctcagatagggagagccaggtccccacctctgttgggccggccacccggctggtgtttaagatgcagattaattcctgtctttgcacacagtatgcttttctgactgcatgtcacaggcagattcctgggctccacctcagggactgagggactcaggaatcggcctgtggcatgcagtccaggagggcacactgaggtttggttgctcggcttcaggtggtcaggcttacctggatgaaaagcagtggctgctaggaggagccaggcagcatctggtctaggggccgccaattcatcaccgttcccgtaaccttggcccccgctttcctcaagatcaagtctccaaccttcctgttc

SEQ ID NO: 53368 - DNA, 2864 bp, Homo sapiens
cttttggggagggaaataccagaatatggggtgaccccgaggggaggggctctaacagatgaaggccgcttggtagcttcattgtcggggtgcagggggcgagctgggctgcggtttccagcctccaggctgagccctcacctggatcggcccactctctcctaagggatgcagccaggctgtggctttaacgtggctggtgtgctgactgcgcagtcctgagccctggagcggcgcgcacttggcctgcctattttccacatcccaggcctcagtgccgggccctccagctcccggggcctgcgcctcccgcagccttggctgtttcagcaggtggcaccgcgtccttccccggagggggactgacaccctgcagttacccctgaccctgccctccacggctgttggcacatcttctccagaacccagggctctcagcccctccatggtgcccgcacccggcctccggcctcgccccgccgcagccgcgaaggtcttcccgctgccatccttgcccgctgggctgttctcagcgtggccgccagggatgtcctttgagctcattcggtcccgtccctcccctgcgggaggttctccaaggtctcgcccttgccgagggtcgaagctcaggtccttgcacaggtccctggggccccgggccaaacgggtcgtcccctgatccctctcctggcccctggctcccctccagccccgggaccttgcggggccctccctgcgtctcagggctccgaggtcctcgcgccgccttggatctggacttgggtgtggacctccccgtccgccctgctcgctggagcgggtctccacggggctcggggcggaggctgtggaatggccgggaatgcgctccggccgggcagcggcttcgctcggtagctgccgtatctccgggccgtgcccagtgcttagttttctgtgaatgaatcaatgttgagcggaaacttccgtcaggctttgaaccaggccctgaacgtttgcgatgctagggacgcgcccgtcaacccgccgagccgccctgtgcctcatgcggcgaccgaggcgccctcgggagacgggccctgtcgggtgtcgagacgcgaacacgacccaatgccaagaacgggcggtgaagatgaacggaaaagccccaagcagcggcggaacggcgcgcccgtgcacaagtgcgacccgcgcccgtgtcccaaggaaagaagataaaagataaaacgaaaaatgccccggggctttgcggtgactcacgcctgtaatccccgcactttgggaggccgaagcgggcggatcacctgaggtcaggagttcaagaccagcctggccaacatagcgaaacctcgtctctactaaaattacaaaaaaattagtcgggcgtggtggcgcgcgcctgtaatcccagctactcgggaggctgaggcaggaaaatcgcttgaatccagggggtgcaggttgtagtgagccgagatcgcgccattgcactccagtctgggcgacagaataagactccgtctgaagaaaaataaaaaacaaaacaccaaaaaaaaaaaaacgatggttagatgccacgaagtaggtggcaatgccttaaccgtatgcgtgttgtcaggcccgagggcctcttccatccttgtcaaggggagtgctaaccttctctcctttcatacaacacgcctcggcttccctgcgcactttatttaaggacgaaagctccactcgcctttcggtgagggtgacttcttgttcgctatccatggaggtacatttataaaaatgtcacggttcagtgggaaaccacaaatgttcgcattcaattaatcgtcttttttaaaatttgaacgtgtaagaaaaaaatctaccacttttcgtgccctaatatattcataaaagtagccaattagaagctgaggggaacaaacggaagtcccgagcgtccttcagagaagtagattcccccggaaacaaaacagggcgggcgcgcacctcctgcggcgacacgcctagcagacggcggaaggcgggaagaactgtctacggaagtggaaggttggtaacgaatcagagaacaaggatcggaagatccgttccacggacttccggacgcggccctgccccgggaactgcgggtgttcaggaccctgtggtgcgcgggacgccgcccgcgcatgcgccgcgccggctcagccccgttttcgcaagctctgcgtggtcttgggtggcgagttcgagccttagaacggccgagtgccctggaaccggtttcggctctggcgtcctcgcgtgtcctccggctccaggttacaacgtcagtattggcgccttggcgcggtcccgtcctgctctcgtcctccgttccgtggaccccggggctgttctggcgcctcgcaggccgggcccctcccatcgactcgatgggcagggctctgcgaggctcggggaccggggacgcgcggccttcctgacaaggagcccgagggtctgcacagcctggggcaccacccggcctggtgaggatgatcgctgtgcgcgcgatgcacatgcgccctcaacacctctgcacattcatgcacgtgtccatacatgggtgcacacacgtccttacacgtatgtacatacgcatgtgtacacacgcccatgtctacacgcgcacatgtctgcacacgagtcacacgtgcaagtgcacgcatggatggtggacacgcgtttacacacgtgaatatgtgtatacacatgcagacacatgtgcctgcccacatggatgtgtgcacaaacaagcacagaggtcctcagtggctcactcctggtggccgtgtgctgtgggctgggaatggccatactcatttctcagagctttt

SEQ ID NO: 53369 - DNA, 1093 bp, Homo sapiens
  modified_base (928)..(1093): a, c, t, g, unknown or other
atgatttctggatttgagccattcaggttctgggagctggggaaactcatttaggggtgggcagagctcgttcctgaggaaacagcgtggaggacgagttggagtttgccagggaagaggggaaggagagggctctggtaagaagagacagctctgcaaaggccctgaggctgggaagagcagccgctccccaaggacagctaggcgggggcggggcccaggcgggggcggggcccaggcgggggcggagccagggaggaggaaggtgatggggtcagattccacaggacccagcttcctcccttccctgagaggtggtttgggcagaggtgggcagcatggaggcggtggcccagggagtccctgtggttgcccgggtggagtgcggggctggcctgccccggtggggacatacgcgctccaggcacccagcagccctcacccagcccatccgtcttgccccgggcccccgggtgctgccgtctggagggtgctctgtctgggccttgccctggggaggtggccagcccagatcctctacaaacagctcgcccctcccagctgcccccatcccctgatggcccccactgtgggagatgctgctttggagaggggcaggaagtgtcgctgtgttggaaatctgggggcgtgggtctggaggtgcacgctcgatgcccctgcccacacggggtctgtcacggtgccgggttctgaggggctgggggggcccagggtgggctgaaggacccagcgcagtgggtgacagagcaggaggtgctcccagagctgtccttggtgagggaggtgtggcggtcactggtgggggcttctgttggtccctcctgctgtgaggggcgctgcgtccacttgggggcagctctgtcccggctcccacctggaggcaggggaagcactttgcccaagatcnnnnnnnnnnnnnnnnnnnnnnnnnnnnnnnnnnnnnnnnnnnnnnnnnnnnnnnnnnnnnnnnnnnnnnnnnnnnnnnnnnnnnnnnnnnnnnnnnnnnnnnnnnnnnnnnnnnnnnnnnnnnnnnnnnnnnnnnnnnnnnnnnnnnnnnnnnnnnnnnnnnnnn

SEQ ID NO: 53370 - DNA, 913 bp, Homo sapiens
gctgaagggccacagcccccagggtggccccagttgctgcctccgccgcagaggctccccagcagccagaatgagcacccccagtggatttggaaaccgagtctcagtgccctcccagtttcttcatcatgtcacccatgaacacattgcaatcatcattcatggggccaaaatgctctgctggggtcaaagcagccccagcaaatgctgactctccgctttcctttgtctcctttagacacagccagaacactctctgccaactctcttctgaaaacctgtttgggaaattatttggcaagggaagtcttggcacacactgggggacaagcagggcgaagagctcagaacctcggctcccaggtccacagcaactgggtgtgttactcgggccctggacctcccacaccagtgtggcagggtctctacgcactagaggggcccccgagggacctctcctggccacgttggagccagttcgtcccgctggttggagatttccagttcccctctgagttctggcccatcagcctttctgccacaaaccaacccaaccacgtggacggtgtgtggccaactaggccgcagctccacggaggcctcccttgctgggggtgctggggctggagctgcctgaacttggcagggctaggcccatggggccctatggattagcagaagtgagccagagccgctgcccagcggcctccaaggctgcagggggtggggggctgagactcgggttggtggctggagagaagtccaggcggtggagccgggagccaggggctcacccttctcctcaggaggagagctcgggtggcttgtgccgagaggtggggtgctggggcattccctgagctccatgccactgccttacttattgtgcctcactgaaaacataccacatcct

SEQ ID NO: 53371 - DNA, 3883 bp, Homo sapiens
acgccattctcctgcctcagcctcccgagtagctgggactgcaggcgcccaccaccacacctggctaatttgttgtatttttagtagagacggggtttcaccgtgttagctgggatcgtctcgatctcctgacctcgtgatccgcccgcctcggcctcccaaagtgctgggattacaggcgtgagccacggcgcccggcccactgggattggttctaagcatcctctgcccgggccacactcaggccagtaaaatcccagtctctgggggtggtgtctgggcaggaatgttttagagtctctccccaggtgactctaccattcagcaaggattgagagcccttgggacccacctgacctgcctgcctgagtttgggtgaccatgcttctgtgtgggcggtgccactgctgcctgtccctttctcggagaggcctcacggccgaggcgtgcgttcttttttcccggcaccgtcaccacccgtgttgtcctcacttgaaaggtggccatttgagatctacaggaccgtgcctagttcacagatggggcggccactaacattcttacggtcttcaccttgcgctagaactttccaggtgtgttcttaaagctctcaggggagccctgggctgtcagcactctcctattgccccatttgacagacctggaagccgaggggcagagggcccaagtctctcggcccagtccctggcaggacgaggagagagggagctggaacccgggtctccacactcgctccagcccctgccccacgttctctcccttcagggtgagacctttctgtgccctttctacgtcacctggagcccgtgacgcccgctcatctgtctggctggaatcgccgcctggcccctcaccacggttattgcctttcgtgccgagttgcccgggtttgctgtgttattggctcgtttttcattctgcatctgcagtagccagacttggagatgaaaagcatgtggcgcctaaccatgatgaaagaggggcgcctgcgagtgcctgagcgtctgaaaaggaccttttagaggcggaggagcagaggaggagagtgactgcgggctcagctggccccgtggccccgtggccccgtggtctggatggcgtggctggagtctggcctctcagagccgaggcttcccgagctgtgaggcgagagagagagagagattcaccttgcagagttctacggcgcggcacggagcggccattccataagcatcgttgccgtagctgtaatatgttatcactataacgtatatctatgagtcataaaataatagaactattttattttggagatctcttagaaaacataaacaggagaaagaaccatgaaatgggtgacttgagaatagcttccgctccgatattcaattacccttcccgctctctccccctctctctccttctgcaatttgattatttcggggcccacaatgcacctgtgccaacatccctgggcctctcctgagggcgcacacgagtgaaataaacaggccttgtctgcgccctctctctttgggagtgtcgtgggtatggagaccccctacaaagtcattttatctctcaggttcgtgggtgagcaggagcgttggggacacagtgccagtctgtgtaccctggtggtgttttcctcgttccgagagattaagtaacacgcaccaggttacagaacaaccgaggggcagggctaggcttctaactcaggtgtctggaacacagtgttttccatttcaatattcagtcgtcattcaacaaacagtgatcacatgggttccagggcgctatgcgtggggggctgggtgagtaagaacccggtcccatggcagccgcattgtggtgggagagtgagaaaataaacataggccaggcaaaggcccaggataacttcaacgccaccgagggctttgggaagaggccccaaggggatgtgtcaatggcgatggggtctgatacgcagggtgggcagcagagggctccgggggaaggcagggccgcagacacctgctgctgtctcgacagcttgtgaagtttccatgtgggctcatgatttggggaaatttgtcccttgttgtagctacagatgagaataggatgagggtgccagctattggtcagtttgccactggccaccgtctagccctgcccttcagtggctagaccctcaccagagacttgggtgccagggacccatgagacctgccccttgcggtatatgggaattctgtaccttcctcccagttttgctgtaaacctaaacagttcttaaaaaatagaaaaaaaaaaaacaaacaaccccacagaactccaccccactaactggccccttggagaaaatggtgagcccaccctgagaaaaggccagtgctctggaaatctctcttgttctgttcatgaggcatcatcatgggtgggaaagaaatgcatagattttctgtgatatttctctgcttttccggggggtaagtacaccccaaagggtatgtgtgcatttggaaggtttgcaggttctgtggcaggcctatttcctgccagtcaagcaaggttcccaatactggaggcttcctccaacctggtccgaaacaaacgtggtgagtccgtcacagcgcagctcctggagcctcggaacccccacagccccggcagccactgaactgcaataccggtccctctgtgcttctctcctggcttcgctccacctgtgctctggcacctgaggtctgttgacagtgttgcctcaccatgcatgggtgctgccatgtggcaggaggcaaaggtctcagcatcttttttttttttttttttttttgacagtctcgctctgttgcccaggctggagtgcaatggcatgatctcggctcactgccacctctgcctcccgggttccagcgattcccctgcctcagcctctcgagtagctgggattacaggcacccaccaccacgcccagctaatttttgtagttttagtagagatgggatttcaccacgttggccaggcttgttttgaacttctgaccttaggtgatctacccgccttggcctcccaaagtgttgggattacgggcgtgatccgctgcctcggctaacatctttttatcctgttaccgaggtgggcaaaagcccaggaggccgggacggggtgcagctggtcagcagggatgctaatggctgagagggatcctgagatccacctcactggtggtcatgtgtgtctgggaccctcctctgtggccctgggccatggcagaccttctctctggacaagttgctatgtactgtgcagctctgactcaccgggggaaatttggagtgggaagtttgggagggatctggagaagtcaggaggggacagcatagctggaggacaatggggagaggagtaggccccctgcaagcctgggcaggtggcagctctgccccagcccctgcaggttggatcccatggcagtcactgtctggcatccacggccagcatacctgagagcttgttcgagccgcccttagccgtttataacacatccccccatcgatgatctccagcttaatttagctcttcctgcagccccaggaggcaggcttcgccactgcacttcacagatgctccaacctgaccccccatcctcccgccggccataaccactgggcactggcctgccagcctctgtgctgccactgtcagctggagagagagccgatggctcctggcacagcctggagggttaaaggaggcacggtgtctggggctggcccagtgggcattccgtgtatcatgcttgtgtgtctgaatttccttcattaaagcatttgtttttattgaagtgaaattaacacagcataaaattaactattttaaagtatacaat

SEQ ID NO: 53372 - DNA, 499 bp, Homo sapiens
tggaaacgagaaatggtccagccctgagtccaaagctccattctgccccatggcccagaggaacctgacatttcagcccctgctctggggccatagtctcccaaaccttggcagctccaggggggctgggaggcagggggctggggagtcggttccactgggaggcctggccccagcagcatctggagggccggtggcgcgggaatttgaaaccgttgcgacagacccgttaggcgattcctgtgggggagacgttgtctgctgggagctgggctttcacatccactgtttggataagcgcagccacggctcactgtcactgtttatgtggccagcccccatctcctcctgagcccctggagcgtgcgtgtctcttggccgcccagccccctgcctgttgtgacatcccggggtgggaagctcccagacaccctggtgcctcctggctgggaaagggccgggctcagaggcctcctggggcagcccaggtgggatggag

SEQ ID NO: 53373 - DNA, 1200 bp, Homo sapiens
cgctgccccattgctagggctcgcaatgcccattccacagccatctgggcagatggcagagcgggatgggccgtgggccagctgctcctggcatggccgggccgaggggaggcttgccctctagggcactgtgtttgtccttctaccacaaaccacatctgtttctctcagtgagaaccactagtgagcccctgagcccccagccccctgacactatggtggtcagagggactggcctaggtcttggttttctcagaagtttctggaaggccagtggctgtcggagaaaagattcaaagcaaaaacactgaagagttgaaccagttctctccctgaagttgtttggacgacagcctgggttgggtgctctgggtgagatggggctgggggtgcagcagagagcagggcaccccacctcccctggccccccgatccccaagccccaggcccccatgcctcggggctccctgtccacatactagaggactgagcaggcaggaagctggcatgcagccctggcactgcttctgatgggtgcccgtgtggtgccagcccttgtctctgggccctggtgttcctgctgtgggatgggggatgggggccatggtccctgggcagggggcagccctggggagggcctctccttcaagacctggtgcccactctggccctggctgcatctggccagtgctcgctgcaggcccaggcccctggccctcatcccccacccctgcccctggcttctcccagtgggggccgccccttgccccttgccccgctagccctctgggctgtgtttacccactgtccatctgccccaatgtgggcaaacagactgaggccaggcccgagacaggggagataaggcccggctgatgggaccaaaggtgaaggggtcacctcgctcccctcctgtcagtttatttactgtcctcaaactgtcacctgcccttctgggaacacaatggccaaaaccatgagggtgtttccaagggccccaagtctcggctccaggaaccctgtgggctgctgagctgctgaggagatgcccaaggagaacagcaggagggaaggggctccccactcactttgacctgcacactaacgccaggcatggccctgggcacactgcttacctcccactgaggcgggtctcaagacaaattcgaattgtcagcgtctccatttttcagatgaaaa

SEQ ID NO: 53374 - DNA, 1734 bp, Homo sapiens
agggtttccgtgtcagctgggtccggcggccctggggctcccgtctcccatcctgccctcctgtcccccacggtggcctccttggactcaggagaagggcagcctctgcgggtctctccctgcctctgagctcagagtcctgcagacgcagctggtacctggagactcagggagatggcccgaaaattcaaagcccacacccggctccaccatcacctggtgaggccacgtggccaggctgggcctcagtctcctcatctctgaaatggggatggtggagtgttcctggcagttttccaagtgagcagagctaacccaggagctgaaggcagtgacagcaaaggttcacccacacagcccctggctcgtgggatctgcagaatggcggcgggggtcactgcgccccctcttggctttctgcatttctctggccacaggagaggtcagctagaggtgctgggagttgatgcccctgaatggccctccagccagggagatgacaggcaggtgtccctcccggggacaattccagggtgtgctctgccgtctcacagaggcctgcggtacggagccaccttgcccgcagcagataccccccccaccccatgaaggcccgttcctgtccctgtccctcccaagctgctcctcacggcacttctgggggtctccacctgcacctgcatccttgtcccgggggctgctttcaggggaagcccggctaggaaaggtgcttgctggttcatcaccctgaccctcagagagtggaggagacaggacagtggccagggcccagccccaagagtgctgactccggtgggtgcaggcagagtggggcgtcagctctgtgggcagacttcttggcggagttcccttttgagaaactgggaatggtgggtggaggagggagttaggtgaggctccaagctcctgcggcccccactgcgttcccaccccgagacagctggggaactaggatggttttttaccccctgcccctagactgggcaagccgagacccttgtggccagagggactgtgacggcttggctgacacctcacagattccaggtcggctcctctgaatggtcttatttgttcaagttaatgtcgtgtcattagcagttggaagcctcacaggagattaaacattaaatggtgtgtgcttggaaatgtggtctcgtgcccagggccaagggtcaaggttgtggcccttggtcttcgtttagaggttctctaacaggcaggttttctaagtggccattactgaaaagtgatgaaccaggagctctacctcccagggtgccccctagagatgagccagttccttgaagaaactcccaaatgcccccactgggctgagaatcgctggggtgggggctggttgtgcagggcagggccaggggctttccaaagacttgtcagtttcctacggctgagtctggcaagtctcctacccaggaaggggtaggtcagtccccatccagatgtggggatcctgtggcctggggctggggacagcaagagggcaccttcaccatgggctaggattcatcctcaaagaaggtgccaggtgtcacatgcagatccacagaagagagggaaggcagctcaccaggccagaaggacagacggccagggcccagaatccctggtgggtgggtcaccaaagggagctctgaccattccccctccttccctccctaccttcatttcttccttctgcaaacacttctt

SEQ ID NO: 53375 - DNA, 915 bp, Homo sapiens
agaacccctggttctcttctctcacacatgtgccaggctgtggacaaattcgggctcatgtccacatctgttggctggacatggtgtcagcaggcaaggcctggggtcgctgagggggctgcagagtggccaggaaggtaagactttggttgctttggaagaacaggatggtgtgcttgttagtggggccccagctgtcttcctaggtggcatagaagtgactgtggcctaaaataggaacagtttctggaatgagcagggaggaggtcggaagggcagggagcaaaggctcctgctgctctgggtctaaaccctgtgcttgttgctgtccagccggcgaggcctcctacccgccaggatggagggttcagggccggagctgcagccagcagcacgctacaggcacaagcacctcaccacgtgagggctaaagtcgcccgcttaccctgaccttggcaaccgattgtcatgcatgtctgcctcatgggactgctgctctccaagtgtcactcttatcaggagccagtgctggagcacacaaggaagggcctgtcattgtgaaaggcaccagtgtccccaccaagcagatcctggtgggcagtctgtccctgccacggcccagctctgagtcttgggctgggtcatgcttctgcttcctcgcctggacgctgggacagtggggcttccttctgcaggtcatggaaggatccaggagagagtgctgtgggcgcctgtgaatgagaaggcccaggacacggaggcggccatcagactgttcgtaaataaatggaaacccgatctccaaagctaacctcgcttcttacagtgtctaaacctcacaaacatcctgccgtttgagtctgcaatgagctgccaacacgagcccctggtgttgctcaccacaagtgaacctga

SEQ ID NO: 53376 - DNA, 943 bp, Homo sapiens
cgccttccccatttggaggtggggaaactgaggcccagcaacgtggaaccactggccagcaatggcaccattggtaatgacaggtctgggttcaggccccaactgtctgactccaaagcccctttgctgtgccgtcaggagggcagcaagacttggggctccccacagagctggggactaggacacagaagactccaagccactgttcccatgtgtgtccccccctccccccccgccttgccctctggcccactaagcgtgatcggctgtgttgctgtggctggcgcgcccgtgccgccatcctgcccctccccgcctctgctgccaaccctcccagcgccgtgtgccgactgggcccgtacagctgccttcctggccgctggcttccccgagccccattgttgggcacctgggaggtttccagttctttgctgtatgaatagcgttgttttaaccatcttggcacaagctgcctctttcccctccctctcacgttctttccctcttgcaagggtttgggcactttccctgacacgttcattctcttacgcagccaggagctggcgggacgcctcccaggagaagttggcggtcgaccaggaggcctcagtctctgcctcttgctgcggatgagcctgtcctgggagcgtggggctcctgcctccttggcgagtgagtgtgcccagcatggtgcccattgctttacatgcacattggttcagtgaggcgagagccagcgtccccatttcacacatgaggacactgaggctctgagaggttcagcaatgacacagaggatgtaggagcagccagacttgacccaggccagtctaagcagaggccaggctcagtgccgagaccctgtccttgggagccccgtctacatccacctgtccttgtgcccactgccctgggttcaccccagtccccttacttccctgtc

SEQ ID NO: 53377 - DNA, 3692 bp, Homo sapiens
cctgcactgctttgggtttggggtgtgcagggccagccagctgactgctaccagggcagacgctgtcagtggtgactgccctgcaggcctgcaaacattttgccagagggccagacccaggagcagaggggtcctcttctcttcctcctcctcccctcctgtcctctcctctcccctccctcctatcctttctcttcctctccactcagcagaacagactggagcccaggtgtggacaagtggcttgagtgtttccctctagactgatggagagacaagctatgactgagaaagggggttcgggctgggacccctgggcctagtcccagttccatgtggacctgccgggtggccccttgcctctctgagctttcggctctacttcccagctcgagtcatcatcggtcaccacagacaaaaggtgttgtccccaaaggagccacaacggatgtgagagagagtccccttaggctgaggtgcttggggacagatcgggccaccttgcccagcagtacccaagcccttggcctcccttgttggaggctgagctccccaaacccctgtgaggtcctgctagtgaccagctcaggaccacagggaacctctggaagcagcttagagccccgttggtgtcctgggaacttctgggagcagtccacccagacgccagcttcctcatgctcagccagcacagagaccagcctttaaaaatattattcaacaagcaattcccgggactgtttacaagactgagccgagacaggcatatgaaataggccaaagtaccttaaaaagcgtccctcagggaaattaaaaaaaaaaagacccaaacaaaaaaacaaaaaaacaaaaccttcttagatcgcaggttgtgaataaatggatactactataaaaatagttttggctgtagcagcacatggtgggaaggctggggtgtttttttccatggctggctcagacctggccatttcatatggggcagccactatcccgggaggtttcgtgtagaatcatttgcaccaaaaagctccaaactgagggggaggataaaaagtagtggccacagaaataacaagcggcatcgtcattttccatcaaggacctggtgtgttttcggcggccgagcacccaggcccctgccccatggaagagaagggcggggctgagagccattcaccgtctgtgggcacagaggctggatgtgagcccagatctgcaggactccggactccgtgcgctctccacgtggtctctagagcaggggatgacgccttccggtgtttcttaggaacagagggcccttctggaaccttcagccttcccaggaggaacccacatggaaatctgtctgcatgtgcctccccgactccaggcaccaacagctcctgagtcttgagttttcagggacaaggagtgagatgggggtggggtggagagtccagcatgccacaccgcccactattgggaggtgacctcagacacttcagcccagccttcccaccattgcctggcgtgtcctgacctgccgtccgcggcctgctgctccttctctctgcaggccgctgctcagccggccctgctgcctgggcggccactgcctgatggaacctccctgctccaaaacctgactcaagaaccagtgatcccaaaagctgcctgagccctttggctggatagagccttgctctccctgcactgagcataggcgaacggcctgcctaattcagcgtcatttcatcatcatcatcatcacaataactgtcacaccgagctcgtcctcccgagcgcagactctccatattatctcacttagtcatctcagtgactcagtgaggagggagtggttgttcccactttacagatgagaaaactgagatacaaggagggaagtgacccagctaggccacacggttggtaggaggtggacctgcaatctggcccaggccttgtctatctgggactcccccccaaccccccaacctgagtacagtcaggaggggcccaagcagtcacagagacaggcctggaacgcggcgggcacatggcacttttgcagtgtatgttggtgcttacgggggctctttctcagtcctatcctttgtttgccgcccccctccctggcaggaggaactcagttttagaagggcagtgggttgggccggcatgccatgtgcagtggggaagtgggtctgttgtggctgtaaccacagtgggtgaggaccaggtgtcaacagtggccctcatcccggagggagtggggcaggctgcctgttggacagggtgtgtgaatagggggacggggtggcctttggtaggggcccaggggtcagtgaagagggggagggggagagggctgccttgggctctggctgtgctgggggtgggctgcccaaccagggcacttctgtcccaagtggaaccaagacctcccaccggaacaggccaccggagccctcgtggaacccagctccgggtggcccgacttgaggggcacccaggcagcaggacacctctctggtctcgggctgttatctttgggccgtgtcatggctgtccacacgcggtcatcacctcctcacctccctccccattagcgtcccctgacccgggccaccacgcgcagcctgcgtgaatggtcagtccctgtgcctcgcagcccgggcccttaggtctaggtggtcagcaagctcgcggtgggggtgcggagggagggcgcggcggggcgcctcggcgcctgctcaggaaggctgggcttggcggcgcgcaggtagctcacacccaaatccgaattccagccgcccgagacggcgggcggcgggcggcgcgcggcggaggcggcccgagctgtcccggggcaggagtgcttcctttcgttttcaaacaaatcgtgaatttaaaagtcaggcagagaactacccagggtataaaaatagccaccggccacaaagtctgtgtccaactccgggcagcgcctgcccagcctggtgcctttgaagaggggtcccaggagtgcgggtcgatgaggaggcgaagcgcgcacccctcctcgttcccggtgggctcgtgggtctctccgtgggggtagggcgtgaaagtgtggggtggaccgggggtagcgtccggaagacgaaaccttccccggacgaggagcttgtcctctgccgttggggcacatcgccactcccgggcctcagtttccccacgtgtccgccgcggcggggtgcgaggtatgggtgccgcggccatcccgcccggctctgcgcttgcctggcccgggccggggtcccctcgcggccaccgcccggccgctttgtgtggccgcgcagacaatggcccggccgctgggctcccggcccggctctccgcctcctccgggcccttgcgcgcaagtgtgtgtgtgcgcgagtgtgtggcgggcccggggagggagttctgctcccgcccccgcccccgccccgctccctctgcgccccgccccctcccacgccgcctcctcgcggctcccgggaacccctggcggaggcgaactcgcaagtttgcacggcgctctcaactcggcggccgggcgggcggcgatcgcggggcggcggcggcggaggggggcgcgctccgggcggggctgggcgggcggggcgcgggccgagcggtggcggcggcgctgcgccgagtcagcgcccgtcgcgggcccc

SEQ ID NO: 53378 - DNA, 4375 bp, Homo sapiens
gcgcccgccgcccgctgcctgcgccgccggccgggcatgagttagtcgcagacatggacaccaaacatttcctgccgctcggtgagtgctcgccgggccgggcggggacggggccgggggccgggggccggcgggcgggagggggccgggggcgcgttggcggcgcgcgcggggggtcgccggcccgggccccgctcggacccctcgccgaccttcgcgtgagttcgggcgccgggcccggggagggtcgacccggggcaacttttcgcggggccggggcggggctgggcagcgggcgggcggcggggccggggggcgggtggcaggttcgcccgggacgaggaggggtctcccgctcaccggcggccgcctgcgccccggcgcccagctgcagccgcgccgcacaggaacccggccggagcgggaggagcaacttctgcgctccgcggctccggcctccctggcctggggaccgggacggcgcgctgggccccgagcggcctctgcgccgcccgcccgtcgggctgcggcttctagcaggccgctggcccttgggtgtgtgtccgcccaggaaacagactgggaccctgttatccccaaagcagcccacgcccgggtgggcagggtcccccggggctgtatgaacagaacgtcagacctgggaaggccccattccagaaatggggcccctcactctggcacccccgggtgttctcccaggctggctctccatttgtgagcaggacagcgcagaggcgcgtagggtcagtttccctcctcctcctgccatcccgcccggtagcttcctatcccagactgcccgccaactccaggcccagacctaccgagaagggggagagggcatggctggggcccccacccattgccctcccaagggtttggaagctagtgagaagggggagactttataaattagctccgggaaggatattaatttggtggtgggacggcagccaggctgtcaggccgggtgaaggatttgtgctgaatggaaatcgaaacagctgattatgaatgaagcccccgccatccgtagcccctcctgcccaccctccctgcagcctggggtgcagcttggccaccccaggaggtgctcagaagccaatgtagctgcagggatgtttagtgagatggggcatcaaggggagccagcatggacctagcccctcctggatgtgagggtgagagtctgagtacctctgctactcacaggcaggtgtgctgccccgtgaccggggcaggcggtgggttccaggtttgtcagacctaacgcttactccctgcctctgtcatgatggagtggtgggctcgaggccttgaatgagctccagggctcagcctccaggggtgggcgctcatgcccattttgcagatgagaaaactggctgggagaggctgagcccccaggatacaaggtggtggatttgggattagcacccccagctcgtggtactgctgagtgtgaggcaggagggaatgctgcgctgtctgtgaccgagtgcagtgtggagtgggctggggctgcctttccctgttaaagctttgcactcacacatgtgcacacacacatccacacacacagagctaggctctcccagacgattcctctggaacaagaatgctcagctcagtgtctggcccctggacgtggcaggggcctggctggttgcacttcagctgagtactgagaaccgaacaggtccctgtttctaatgctccgggtgggacagggatagtccacggagttggtggatgtagggcgagggagcaaggggtgcccagtcgccatggtggcttgctggagtccctgtgaggaggagaggtcgtgcctccgagccactgccccagggatctccctgggcactcccctgccacaaggaagctaggagtcttctgttctcgagcagcagctctcccgaccggcccatggcctcccaggcagcccacgccccagggctgagcagagagccctgggctctgattacattttattttttttctaagcttgtgaccagctctgaagtccagagcagtcgaaggtccatttaagcggctacttttctaagcccttttgtcaacacagcctaatccctcctcggggtgagtggtggtggagggcctggcttgtcttggcccggctggccgaccggtcagacctggagctgctggggagactcggccaccccttacagctgcccagccgcttttggggtctggggtagagagggcttcctcctcccagcattcactaccgctgggcttggtgggcagggagaggatcccagtcggtgtccaccgagccgctcagtgagggcagggatgagtgcagcgtccagatctggaaggaaagcaaggccgagggactcgccagaggcagccccagcttcctggccctgctgcccggggctggccgcgctcccacgcctgccggggagaaggcccccgctggccttatcctgaatggtgggactcaggcggagtccacagagtccaaaggtctcagaccacaccagaccccatgcgcctgtggagagacccggtggcaaagctgtaggcccgctgaccactcttggagttggggcacttgggggcctgggtgagcttgcagcctgtgtgaggggcttctggtaacatcagagcccttgggacccaaaatagagcacattccggggcctcccgaaataacagggtcatgtgactctcaggaggctgggcttggagtcccgctcgggcctgacgagggcgtcttttagcgcgggcgctgcccgacggcagggtgtttgttttggtaaactctggaggggccctgtttgttgactggggaggtgtcagggagagaaaaatggcccagtccgatggtggccctggcttgctagcctccaaccttgcctagggctggctgctgggcctggacccgagcatgcagctgtgaccctctgcccagatgtggatgggacgagctgggcccctaggaagggctggtggggggcgggtgctctgagtcccttggggtgtggggtgcaggttgagccggcagccctggtcacgcgggcagctgctgtgactggctcccggctctgccagcacctggtggttcttccagctgtgcctgtccttcagggcctgtggggggctcacctccaccaggaggcccctctgactgccctctcttggcccctgccccatctcccccgtggctgtgtgggaggtcgctgtcagtggtctttgtttcctcccctgggaaagggtgcctgcaggatttgctgtggaattactgtgggaacagggggtactcaggggtgtgcccctctgcccctggggcctggtcgtgcatgtggcagggggctctggcatcaggagagggtgggacagacctcagctgcatggaaggtggtgtgggggcggggtgaaagctttacaggtccacccagtgccagtggaggctgcctggggagtttcctttcttgggtgacgtttggttttgccatgggtcaaatgtttcagggctgggacctcgagtggtgagcaatgcctgtcctctggagaagagggcacagctgtcccagcagacacagggcagaggccctccccaacccccagctggctcagggctgggacactgtccctgggacccgggctttgcaagccaagacctgcccctccttcccttctctgccaggcttgagtttgtgttttttagctggctttggtggccagggccttgggttggcctgttaactggtgtgttttcataggaattggccatttgctgggctagggatgaggctggggtctagggccacaagggcctggggggctggcctgtggctgttgggggctggtgtccatttgggggtcaccttccagacctttgtcctgagattcttaagctgatcagtttcagggtgctatggtgtgggtagaggggtcaccctcctcccccctgcaccttgcccacctgcctgtatgtttccattttatagggtgcagctctgtctttcatccttccttcctctcctctgccccctcccattcagggcctttgttacctgcaggatggaggtggtggtggttttgcagggatcagcaccttcccaggaagaggttctgacaggtggtgtcccattgctgggcgggtggtcaggccacctggggttgggccttctgtcctcgctgcctgcctggtctgctctttggcctcttggggctttggctgtccatctgaaaaatggacatactcattggctcttccaaatgctggagaaggcagcctggtgtgttgtaggctggctgggagtttggggagtctgtttgtggggcgtttcccctatcctgtggctaggtcctctctgtg

SEQ ID NO: 53379 - DNA, 1349 bp, Homo sapiens
aatggccttgcacccttgccctggctgggctcctcagcatggcagcctgggaaggggggaggattcctagcatcttcctgggggcttaggccaggtccctgggctggcctgggggtcgtctttcccgggcacgggtatgggtgaggcaccttttccctggccctggctccggccccccctgcactccccaggctctggatgaagtagggggcaggccgtccagggggagtagagcagccgggcctcttggggccggatcagggatgctgagaccatggaggggaccagactttggggctggggagtgggacattcaggggtccttcaggggatcagagcctctcagggtctctgtgtgagaagttgccacggggtctgtcctgcacagcccacatctgtctttgatgataggcttcagccccagctcctcttccaggcactgcctgctggggtgagggatgccgggaagcccttggtcacagtcctacctctggggtgacccagaggccgtgcctggcctccccgcacctctgttggccctctaagccatagtaatttccagctgggcctcggtttccccagctgtacccggggccagggctgggggtgatgggtgtcggcgcagactgctgccgtgcgtgcggggtctggagcctctggcgctgaggggaggggagagtgagttgggcctgggccaggccgtgtgtaaatcctccagccgccatggataaaccctcggagttcaaagacaaccccgggtgcggccgccggctgtaatgaggttactgattcaacaggcttcctggtgctgcagcccagaatgcagtgaggctgggaagccccggggagggatctaagtatcctgtaattgaccaatttagcttaagtgtccacactggccctgggcagaggtcaggcagtgacagcacaggtggctggagtcgctggggtgggctcccaacagctgctgtgtccgagcccctctgaatcgggcgctctcgggcctgggcagccctgtgcctctgccgggactcccgctgcctgctcttccctctccacctgtgcaggctcagccttccttcccagccagagcccacctgccatccttggtgcccagcagcccccttggtacagggcttggggtggggctgcagctttggacttggtgcccagagcctgcattcagctcccgctggcaagcctgctgggtctgtgcctgactattgcccagtttcctcccgcctgagggccgtggagtgatcccacgcctgtgttaggtgttgaggccgctgctggtggaggtgcctggcggatgggagctctccacgtgccagccacccatccagcct

SEQ ID NO: 53380 - DNA, 2632 bp, Homo sapiens
cctgcctgtcagcagtggcttcagtgcctgtgcttggggaggatgtatctggtaccttggagagaggctggcaggccgcatccagctcctggtttcctgtcaacccaggcctggtgtgcagagggccaccaaggtgacagtttgctcctcagaaataggactgggcattgggcagcagtgtcattgactgccgcagtgatagcatgggctgtggcggtggcagtgtgtgctgagccgtccctcgaactcagctctctacatggtggggctgctctctgaccaggctgctgtgtagccctgggcaggtcccttcccctctgtgggcttcagtttccctggggccctctggctgtcaaagcctctgccttgccttcttggcaccctggctttgttctgatatgctgttggccattggtcagggtggcaccctggggaccagctccctgggaaatggctctatgccctccccagctgaggggacaggacttgggctggggtagggcctgggttgctggcgtccaggaagccgtgggctctgagctagccagggtgggtgtgggtctggatgtggactgggcatgttgtggtgaagcgctttcgggatgtgcagcttataatggggaagaggtggcctgggggcatggcagagcagaggcagtaggggccacagatgagtggggtcagtccccatgacggttatcactcaaggccaggctagtccttctctctttgggcactgaccttccttgcctggaaccttccatggcaccccattgtccccaggatggaggccaggcctccacctagtgtcatgtggctctgtagcctctcccacctcattaggcacctctcactgattttctcatgtctaaaactaactggtgaggtaggctgccccatgcgatgagtgagcgcccctctgagtcacaggctgtatggccctgggctagcaaattcacctcactaggcctcagttgtctcacccataaactgcctgggggaggtcagggaagcttcacagaggaggtgatgtagttgggttttgagggatgagtaggagtttgttgggtgggaagtggggaaggaatcaaggcagagagaatggatggattctttccagggggatctggttctagccaagggtatggggaagggatgcccgtgcgggcgtaagtaggggcttccctggagggtttctgagggtctgactgtgtgaccaggctcctctggcctgccccttgctggctggcttccaggtctgtgctggtggggacccctgtgagcatgaggctatggtcagctggcctgggaataattaaccctgggaggagctcaggctaggggtgggcctcgctgcagcctggccgcccccagctggcctgatgtcccctctccttcctgcccaggtctggagtgtgactcctaccggcgcccatgtgcggtaccccacctcggggccctggctcccagggtgtgtccactactgggaggaacggctggggcccttccctaccacctattcctataccccttggtctgtccctgtagtgccctgtggtcctgccttggtccctgcctctccctgtgggcagcttaggcgccatttgcccgggagccccctgtgtgagtgcaaggctattggatggcttctcgccctctccccacccggagggaggaaaacagctctgaccgtgagcagagtccacgggaggcggtggagctgcccctaccccaccccttcatggactttctgcccaggatcaaggtcgaggtgtagggcagggaggcggggccttcgtcaggggtgccaggtcactctgggcacagacagtggcaaggcgggcctggcaggcagcaccaccgcaccatcccgggcccagtggaggggtgaggactggaagggcagtggggccttcctcttccctcccctcagtctcctgggcacaaggtcagagccatccacccctctgtcctgtgtgacccaccttctcctgaggctgggatcacagggggcgtcaccccttagcggcaacgtagagctggtctccaggcccctgcagacagtgggcctgggcaatggcatgctcacagcccgggtcttctctgccacatggactttgtgacttggagcacgttccttcttccctcttcgtcttgatttcctcatttggaaaatagaaggaaggatgccaggcagagtccacggctggaagtgtgccgctgtgcccctgtggccggccggagccttggtggatgtcgctgaatgggccctgctcctcttcccgtggggccctcagacctcagagtctttttcaagacagggctggctccaggcaccccctctcatggctcggagctggctctggatctttgtggctgcggagcccacagtgccaggtgccatataagcctcatgaagtttgtggcacgaattcatgtggtcagccaactgatcccctccgcccctcaggttcagaaatgtgacgggtgagcccgttccttgcaaagttgatttctcaaatcgtgaccatgacttgaatccccctcgttctggaggccggtccagtttccagggaagggaagtcctgtgtgtctagctcggtgtcggtttctgggagtgggagtagatgga

SEQ ID NO: 53381 - DNA, 1424 bp, Homo sapiens
gcccgatgcagggcgagggttccgttggccctcagaattgcgggtgactcctgtcttttcccctggcttggggttcagtaatccaggaggcctggagagcttttggtgtgctgcccacctcggagcccggatgtggcgagtgctgcctcaccccggccctgccaggcatcttatctgatgggcaggagctggcccttcgctgtcagactggactggcgcacgtgccctgccatctgactcatccaattaatgccgtgatcattttgctaattccctcagctaactgattctggaaccttttccggttgggcactgggtctcggagctgggagggaacctggagacccttttcaatgtcctcatttcactgaggggtaaactgaggcctcccaggaagcacagccctgcctgccatgcctcctcccaggccctcccctgagcccccaagccgttctgtactgagggcctgctgtgtgcccggcccctgggcatctcctgtggggaggccccttccaagggtctgccttgcctacctggtgccgaccctgtcgtttctctttgtctcccggctgggtggctgggacagggatggtggtggtgggaaggtgcgggtgacagatgaggccatgggcactgaggtgttgcgtctcctgagactaaatgcctccaacgtgcgtgattcatcagggccttccacaccgtcagtggccgtcgcccgtcatttgctggtaatgagctttttcatactgtaatttgtgtctcctaattgccgaacaagcacctaatggctctgattaacatcggagggactctgagcttccgtgtttgggagcaggcctgtggcttccaggactgcctgccacctgcctgtgtgactgggggaggcagaatgttccggaacaggggctcagggcctgagcacggtgggtctccttctggtctgacccaggtaggggtttcagtgctggtcctcagggtccccatctgtagaatggggacagcagtgtgttcatgccctggggggccagggtgtgcacatagctccggctgcgctgggtttctgatgccgccgggctccggtcctcccctcctgctgggcttggcagggctgccattggtgggaggagccccaatctgtctcccagcctggagctgccccctggcttggcactgccctctgtgcctctgtgctctccctggactgcctgctggctctgcccgccctgggccttctgtgcgggttgggaggggatgggctcagaggagtgagcggcacttgtccagggcccagtgcgtggccgctgctcatggcagcctctgcctagagccctcagtggctcccctgtgcccctggggtagctcccagcaagccttgaccctgaaccccctccctgcctggtcgcccctccttcgaagactcttgc

SEQ ID NO: 53382 - DNA, 761 bp, Homo sapiens
gggcatggttctggtggggcctcacctgcccttctggccttggcccctgcagaccctctgggccacttcctgccaggggtgtggatatggcagagcagccctgggtgctctgtggctcccagctccccacaccccctaagctgggctcttccgggcaaggctggggcggtaaccctggggtgttctgggagattggagaccccctggggttccatgctttgcccagcctgcccctgctgacgttagggctgcctgggactcagctgggtccctagtgttggtggctgggggagaggagccaggagcgtggactttggcatcccaggctggggctggcctctcggcccctagctcgtggccctggctttgaatgttacatagatgaggcctcatgtgggtccctccccttctgcttacctgccctcttacttatgaggaggctgatgctagagaggggtgtgccctgtcccggttgcccagctgggggatggggcaggcccacagcttctggggagagcgtttcccaaggtggggtctggtgctggcaggagggggcggggtgagccaatggctccggggccaccacagaggcggctgttgctggagggctgatggcacgctgggcccgggaaagcccctcgtgggccatctcccggagttctcttgagggcccctgtcttacggatgaggagatagaggttgaggatcacagccccagcctgcaggcgctcgagctgaaagccctcgcccctcgtggtggg

SEQ ID NO: 53383 - DNA, 11955 bp, Homo sapiens
gggtatcctgtctcagagctgccttggtgcaccctcccacagcctcacatttggaggcagaggtgtgggaggagaggctgagtccagaggtcccctcctcctagttcaaggctcactgtaacctgaaactttacagactccatttacacagtcccgtgtgtgcgggtgcatgagcccagcatgtgtactgtgtttgcacacgtgggagctcgccacggagtctgcctcctgcccagtgggatgagcagggtgtactcagagcctcggtgcaccgaggaaagcacagcccgtttccctttgctggactggaagtcacagtggggtactgggggctcccagacaggtgggaatgggggcccactgcctgactccctgggacccagctgggatctggtccttggtcttctgatgtcccgggtcggaaggatgactgtctgtcccatggctatggctttgaggagccccggaggccctgtggggtggtgtccatctgcatgggacgtgggggagcacacgctctgagcttgagcactggctccgccgctgctgggcagtgtgacctcgggcagggctgcgctgagcttggcagggctctctgccctcgccgtgtccactgctgggagcacgtcaggcctccctgcccggctggttccaaggcctttctggtccctgtgtgcagacgaggctcctcacctcgggaccccacattactttcttatttgtgcgctggtttactttgtctctcgccgtggggcatcacctctacaggacaaggccaagcctttgccccgtagacgaagggctcatggtgagcccctcatttgggattctgtagctctgttggggcagcctggtcatgccagggcctttcagggtttcagagtgctgcctgctatgtgacctccctggtcgtccttcctcgccacctgcaagccatccccgtgtgctggctgggccctgggctgcagactggggccagggagatctggacagcagcgtccaccccatgcagttcgctgtgtggcggcgccgggtgggccttgtgcacagcccagctcagaccacggagggtctggggttggaggtggtgtggacatgatgagtgctctcactccaggagagaacgctgccaagagaagggtggctggcccggcgggtggctgctgaggggccatcgcggaaggtgggtggtcagcagagagtacagtgtcccttcttccactgggttccacctgagggagtggcaggagccggagggcttggggaagaggccgcatcagcctcacttgagggctgagtgctgaagacagtgtggggggccctgggctggcaggtgggtcaccctcgctctgggacacgctcaagagagtgccctggagaggggtttgcatccgaagctgatcctgcttccccatcacattcccacccagttacaaaagtcatccctcccaccggcccagtgggggctgctggggcttggggctgagtggggtccttgctgcctgccttgtctgatgtgtggctttggaaaagtcccttgacccccccaggcctctgtgtcctttgccgtgaggtctcaggggaccagtcgtctagagccagggtgctcttgggcagccgccactgtctctggcccccctggtgttcattcaggcagggccagggtagccgtggctatgagcccaggtgggtatggggcttggcggggctgccgtgtgtccagcgagagccagctgggctgagcttctcctcaaatgctgatgggggccagacttctgggggcaccgtctctttccataacatgatctcccctaggcctcgcccctaacaagctggcagagaactctcgccccatttcatggccatggcactggtggcttggggcagggcctggcggccagctcttgggccggtgcctctggttcactgggcctgtggcctggcccttggggtatggaggacgggcctgggggtggcgtgcgcccccttgaagtggtccgcccttgtctctgcctgtcctgaggatgagggtcatcaactgagtcggggccacagggcagccatgggtgcgcgagtgcagggccgggcctgtctcctccgggcggcgtggcaggtggctgggccaagatggctgcagcgcttcctgggcgctgctgcgtgttgaaacccgtctgtgacgtggccagcggtgttgaaataagtgcctgtgcatttcccaacatcctgccagcctggtgcaggactgggtgccaggcccagcctgggcctcccttgtggggtgctcaggccccacttccctccctggggaggggaggagaggccacctcgagggagtgacgtcaaggcagggtgacattagtctgggcccacgggatccttgctacttccccatttatggaggggaaactgaggtgtggagaggggtgaggatgggtttgaagcccggccatccagtctcagtgccgcttgtagaggcagaagggcgtagggagggagagggagagccaggtaggccgaaggcgcctggcagtgtggcaggacacgcgcccactggggaggtggagggccgcagccagggcctcagctgagggcctcctggatgctggctttgctgttggggctggagcatggacccgtcctgggccgattatgggagatggtgtggagtgggggccgcaggcgagggtccctcttcctttggctggaggaggcctggccctgggactgtcccgtgaggggagacagtggttggacccattgcagaattgatttgttatcactgggttccaggcacacggcttagagggcatcacggaggcctccccgtcacctcagagggcatcacggaggcctccccatcatcttatggggtgggtgttattaggcttagtttagaggagacagaggatcagagaggcccactgacccgccttggggcccccagcaggcagaggaactgtgtccaggtgctggactgtgagaccctgctcttcccgggactctaccacctcagagggtggcagcacagggcccagcagggcgtgtgctcctgtggggcaggcgagtcctggctctgcccttgtaggctgtgtgaccccaggcggtagctcaggctctctggtctggactgggcgcggagctgcttgagatctggaatctggctttctggtgaaggggcagcaggagaggggctgagacccagccttcctggttgcagagctgcggtaggccagaccctcctgcctgctgggtggggcctggcattccaggaacctgtggtcaagcctggcctgggctgtggcgtctgccccgggttcgtcagcaggggaggggccctggagaccagtccgttatggatgaggaagcgggtgcccagagagggtgaggagctgggctgggccacacagccaagtggccacagagctgggggtggtcaggagccatgctttctggtaaggcggaagtgtctggggcccgggtgggatgaaggactcgggtcccagagaccagcctttggtgctgttcttgggctaggaatggcagtaacaggaagggcatggccaccgagacgcactgagttatgggcacctgccgtctgccaggaactgtggtccacgcccgactgtctttaacagctctgtgcctgctgctgtgtgccgggccctgcgctcagcccttctcgtgtgtggtctccaaccctgtgttttcccaggccgttggcccattttccagatgagaatactgcggcccagagaagcagcattgtgtgctgcggtccttggccacgaggtggtgtgggtttttttgacccagatcttcctgtctatcaccctccctgggcctaccttccttatggtagacacatgtgcaggtctgtcccatcccccagctatccacagagaggccagggtttggcatggggaggtgtcggagcctactgggttgtagctggagggaggtgagtggcacctcccacaggaagccccccttgatgtctcctccaccttgccacattaccagccgatagccaggttcctggaaaaggctgtctttctgactctggactgggtgcccctgggcagggcccacctttgttttctaatttattttaattaaaaatttaaaaattagagacagagtcttgctttgttgcccaggctagacgtgaactcctgggctcaagtgatcctcccgccccggcctctcgggtagtggggacttcaggagtgcgccacctcacctggcctcccagcctggtttttctctgcctgtttgtagccctgggttcgacgggggaagcagtcgcctgatgggcaagtgctctctgagtggtgcatgaaggtggctgtccacgtggctgtctgtggtgtcggttaatcgtcacggcttccgggagttaaaggtgagggtgccatcccctttctggggacaaggacgtttagaaccagcgaggttgagtcagatgcccaaggccctacccagccgagagcgatgcagccaggactcaaacccagatccgcaggcggcggccgctgtgccccagtggagcttgagcctgggtggtggttggcactcaccacctgtgggatggatgaggaaaggccaacctggtggtcactgccacttccgcagtgtgggctgctcccggcctgagggtggctctggtccccagctgtcctgaggggtgagggggtgaatcgcaggccaccctcctggtgtgggctgcgctggtcactggtcgctggtcacagggatcctggctctcggcccagggccactgtttcaatgggttctggcttgagggaggcccccggggcaccccccgcctccggtcttcctcccagaccaaacccccacaacctccacatgttgagccccgagcaaatgccgttccctctgtctacccagagaatggccaggccagcggctgcctggggaggcacagcaagtgggtggtaaaatttagaccttttgcctcctggcgacttccttcttcagtttcattcctacagaagaggagatagaggctcagcgagattgtctaacctatttggggaagcacagcttggcagtgcctcgtgttactgcttgggtctccttggaactcggcgcctgcctggctagttcttaaggactcctgcagctggcgccgacctggtcccgctatcctgtaggtctgtacttggcacctgctatgtgccaggcactggccagggcccagggtgtcacaatggagtggccatggctctatcctcggtagccctcagccttggcacccagggtgaggggctgactgtgccctgcactgcagggagtgctcttgagggggtgtgtaggagatgagacccctaccccaactgagagactctgggaaggcttcctggaggaggtgttatataaaacggagccaggctggagtgagccaggaaacaggtggaggagtttcaggcccagggaacagcatgttcaaggctagaggcgagagagcctgacatgttcctggaatgacccaaggctgggggtggagagcaggccgggccagagcgcgtgtcactgtggggaggtgggagctgcctgctgtcttcctggcctggttccgatggctgtggctggctgggcacccaggaaaccttcctgcctccagaattgcagtggcttttggggtctgaggggggatgctcttcatggagggcagccgagggctcccgggtgggctgtggacactgtgaacagttgctccaggcagtgggcaggggattccaggcaggtcctggcccggaataaaccctggttcatctgagggtcagcccggagactgtgtgtggatgatcggcctggcgggagagctgggagtgacgctgggttggccgtctagttttacagctgggaacacgggccagggccagcgggcagcctggggtggccagcaggtgggcccggggccggcagctctgggccctgtgtgggttgtcagggctggaggagaagcctgagggctggggtgagggcgatttggaagcagccactccctggtgcggagtaggagggctggcttctggcaggagagcattctcggtgtgagagtttgtgttagtggctgggggatgctgagattctgtaaaacactcccccaaacaaacaacaaacaccacgtgccctgcgactcgatggcagaggccacgtagagaaaacaagctgccggccgccctccctccctccctccctctctctctctgcttcccccccaccccaccccgccaggctcgcagcctgctggcctcccttctccgcatgcgggcagatcatgacaagccttgctatttattaattttttaaaacaaaaatggaattcagatttgtgtttcctatcaaagttgggatcttccttaggaaggaaggcaccctcccaccggccccgctggttggggcggaagaaggcggcccctctgcaggcgcagccaggccttcttgtggaggcccagaggggcaccctcagccgcggggcctgcccatgccagctgtcgcacctcgcagtgcccagggttgtgggggtctaggagcttcggtgcctggcagggtgcgtgtttatgcatgtgtgtgtgcctcgtgctctgatctgtgcgtgtgcctgtgtgccccatccacactgctcccgtctatgctgtctccattccttcgcgggggcagaggtccctccagtggcccaaccacagcccccactgctgccctgtcctaccgtttcttctctctcctcccctgccgcccgccacactctgctcaggcagccctgggctcatgacttgacagcctggccagctgcgtggcctcggccagggcgacctttgtgtgttggagccttgccgcgttctctgtctatagaaggtgatgcttagggagctctcagagaaccagtgagacctgtgctggctggtgcatctcgggtgctcagcgcgtgggcagtaccctccctggctgtgctcctgggggaagctgggcactgggcatggaaatgaaagcgtggtagagagggacctcctggctccttgcagctgagaccagccaggggcgcagccctagggatctggctgggcctgcaggctgcagggtctcaggagggagggaaggggcatggtgagggcaccttgggcgtcgagtctctgagggggtgcaggaagcatttccttacctgtggcgggcagtcgctgggctgacctctgggccacgtgttcactggctgagtgtgcgattgtgtgccctggccctgtgccacgcccactgtccttgacccgtcagccgggttttcctggcagccctgtgactgctggcctaggggccgaccctgtgaggggctggcactgggaatggggacctggccagtcttgctcagcctttggggacggagccccaagctcgctgcatccgtgctgggcactgacagtacccattctcaccctgtctgtgctccgctttcatttctgggggcctctggcagtgttggggttactgatctccgccagccccaggggtgttgggtccttgatggcgagctggctgccctccctgggccacatgctgtcccacatggaaggcgatggcgttgtccccatcactgcctgaccaagggcaggtggcccagagcatgggaggcctggagcatgggaggcccagagcatgggaggggtccccagtgtccagcacagttgtggggctgggccctccttagaactcagccctgcgtgtgctggcatcaccgctcgggaaggcatgcgtgtccttcctgcacagctgggtgaagtctccgtgtgtgtgtgccctgcagccagcacacccacacccccagctcccgcgacccctcggagatatccgttttcccaacttccctctccgggaccacttctgtctcttgttggcctttatgaaaacagaggtcagtttggatgtgggggtcagggaggagcactctactcttgcagagatgtaacatttttattctgacttccagctgctgcccgatttccaccgtctgtgtgtgcgttttgatctgtcataccctcgtgctctgcagaccagcttctgtccccaggaagccatctcgctgcccccctccacacccacctccatcagaaccagtatgggggacgttgcgtgagctgatggggtgctgagtggggaccctcctgctctgccccccttggaggggctgtgagaatccaggtgtgtgcggaagggccgagctggggcaggttatgtgcagctcagcgtcggccacacccaggcctggcccctgtgctgtcctcctggagtggtggccatgggggcacagtggtgccctgggtggcgagcaggtttcacgatgactgtggctggcgacgaggagctagctcggcaggaagctggcagccacccagggttctgggcagggccggggcagagggcacaggcaaggcacagagctctggaagtgccaggccaccccggctgcttcctgggagatgagtccctggctggatgctgtcatcctaggcagagaggcgagttctctgtctgctgggtcagcgctggggagccaggccggtgctggtgttgctgccttgctgccgccacctgaaggcgtgtgtgccggccagcgcctgtgtgcggggtccttaccactgtgtggtttaacccttgccacccaagagggctgtggccatctgcctccagaacgcagctggtgaacagagctggcctggtcccgaagggtcctgtggcctggaggcaaatgtggatgcttgttggtttatttgcttagaggcagggtcctgggtgccgagggaataggctgtggcccctgtcacctgtccccaaggagcagtacctggggaaggtaccgaagtggtggccctccctgcccctgccagcctcaggactgtggccattaggctgggtcggccgctcagagtcacaggaggggtgggtagggagctctgaccctgggcagcgcgtgccgtccggttgctcccaaaggcagcctggagttggggtttgccgagggaggctgcccccgcagaccccaggctgtgaagcaccccagccttgtaggggtgcctgcaggagtcccggcagcttcaggagcggcctctggagcctggagggcaggagccagaccatccttggctgtgactttgttttgtttcctcaagtcagattgtcctgcttcatcctgtgcccggaagagaggtcctgctgctgtcctcgggtgggaacacacgtctcttgccttccctccttgagggtgggggtggacctcagccgccacccatttgtcagtcagcaaatgcagctcctgctgggtcacttgcctgccagctgagctcctgggatgcagcccagcctgtggggccacccggctcctccagccttatagctcctccccaccacacctcctctgcacagcaggacccggaattatgctgttctcggttggacctgcttgtccgtgcttaactgggcctttcctgatccctgtgggctccctgagggcggggctcgggcctgccccatcagcaacagctgttgccgagggcacagatgccctgtgcatggggtggggatgaaggagggctgggggctccgtgacagacagtgggaggggaggctggctgtcctgtggtgagctgcttctggggcaccctgagatggggcctcccttcacttcctggccatccaggcatctgtgtctgtgtccgggaagtggaggagggcccccaggaccgagtcgctgcccatcactgaccgtctgtggcaggcactgccagtggccgtggcccagggtcttggtggctcggcctcatggggggcttgctccaggccttgggtgatgctcctgtgctccctgacagccgcagggtctcaccctcctgctccagcccctctctgaccccaccctgcggtcctgggaggtagcaggacagccccagtatgcggatgagaaaacctgaggcccagcctgggcgggttcgtgggtccagctcagcccctctgtgcctgtggtctgtagggacctgggcccagctgcccctaaggatggagctcagtcttccccagctccaaccctggggccttgtgtgggaggggcagtggccctgggatctggccttggcggctccagccccctctccagtatggcagagcctggaggcctgctggtctctgggtctgagactctggcctcccagcctgctcccctgggggttggtggaggcctcggggctgtcggagcttcaggattagggactgaagcccagcaggggctcccttttctgtgccccctgcctgagcacaatcttcctgccctctcccctgcagcccctctgttgtcgtggtcagtcgtgccgcctgagggccaagtgtggccttggcactgccaccgtccaccagcggcaagtcagggcaggtgcgtgtgttgggggtggccccccgcggtgtaggccggaggtggcgtgccggccccgtgagtcacgccgatcccaggatgggagtgggggtggccggggcactgtgagctggcgtgctgaggctggcctgcccgtggcttggcctgggggcaggggtagggtggggtcctgcccgggttctcctggagaacctgggtcaggagccaggggccagatcagggctggggacttcgcctggggtcggataggggctggggtggccatgagaagtgaggagcctcccatgacccagtggttgcaaggagcagatgccgcctgtcaggtgggcggccccccctgggaggaggctgcaggctgggaggtagacaggacgggcccctcggtgtgatggttggggtgtccagggactggacttgggaagggttggtgacctagtgccatggggtccctgctctctgtggctgcctctgtggccaggccttggccctcctattgctgccccacgacacctggctgtggcttgtcccagctcctgggccaggtggggagtgcagctggccaccgagcctcatgaagcacctttccagttccccggcacctgggtctggccgaggtctgaggccagaggaaaggcctcctccagaatccagggctgcccgtcctgaggtaaggggctttgagctgcaggcagacggcaccttctacccatggccggatccccccctgtcaatctgcagtagagacagcagagcccccgggaacccctcccagcagctgagggttcagggggtgcccctcactgtactggggaaatgtggccccagcgggcaggaggtgcagggcccagtcagagactgagtctgaacccggtggggcctcaggccagctctgtgacccggacaaggggttttccttctctgagccccagttgctgctgtcagagcctgcggtgggcactgatttgaggaaggacagacatgggctgggagggttgagggaggccctggagagggggaccctggggagggagatcttggagctgcagaggctttgaagaggcaggcgtatgggagtgcgtggccaggttgcccggcctgggctgggggctgggtccagggatgcagctggcctcacctgctggtagagccctgtctggaggagttgagctcagaccttagctagtgctgaccgcgctggggcagagtgctgagaggggctctctcagggccgtctctcagggctgggccctgttggatcttctaactgtctgagcgggagagggaaggcttcctggaggaggtgtccctggtaggaagacgcagagggaatgattgtgtgtgctgtaagggccaggcccagggctgagaggggctggtggagatggtgggggctgggtggggcaggacaccatggtctatgtggcgcccgcccttctccctcctccatggccacaaggcccctctggtacagagggtggtgctggccttgagggatctggccggcaggtaggcaagtgaat

SEQ ID NO: 53384 - DNA, 1258 bp, Homo sapiens
ctccccctgggctggcgtctgcctccccgcctgctgctgcccctgtggccggccgcatgtggggaggaaggaagaggtttgggtggtgtgtgtgtgtgtgtgtgtgtgtgcgcttttgactgggctcggagggctctggctgggacccaagctcaggcctttagcaccttggctgggaggagtgaggcctggggagacagtgggggccaggagctgggtgctgaggagaccagagctgggggctggggcggggccagggcagctggtaggaagtcctgcccttgcagccggtcctgcgagaaagcccctggctgctgtcttggctttgctggactggcaaggtggaccagaggctggggactggacaccatgggcctctgtgcactgatggagcagtaggtgtgtgggattcatggggtgctggggtgtggattcacgagggaggggccttttgggttacgaatcagcccctccagttatccagggtggggtgctgaggcctgagtgggcagtatgagggtgggcagctaactatgtaacagccgggtctctgggaggccctggtctgtggcgttgccgtctctgagctgggaagacatgtgcctgagagctggtccggggtggcctctggctttggctggggaggccctgcccacctgagagcagcgttcggcgagtgtggactctgccccggtgctgggcgcagcacctgtcgagttcttggagcgtgccgaatgcaggcgtagcttcgggctgtctggacaggacctggttagcgagaccctggctgaagggcccagaaggggctgcagtgggactggagccacctggctatgcccctgggctgctgggatcacatgctgtgggtgattgggcagatgtggctgtgtgtgtgcacactgtggggacagacagggtgggcccatctaagccatgtcctgccagaggcttccccagtgtcagcacacacaggggggccatgaggggccgagagcccaggccgcttcaccccagagggctgagcagctggtcagctggacttgctctgggggtctttgtctcactgatgagccatgtcagggtgaggcaggatggaggtggggctgtcttgtgtggcctgagtgggtgtggcgggctgggagcctgttgcaggtcaggatgtgtccaggggccagcaccagacctgctgaggtgggaggtcagtctgtgctggctctgtgaggggccctgcagtcttggaccttgcctgtcccctctg

SEQ ID NO: 53385 - DNA, 869 bp, Homo sapiens
tgagcttgtctggctgggagaccccacctgtcccaggccccactgagggggtggctccagctgtgcccggggttgggcaggtgagctcctggccacccgtgtgaaggttcaggactgtgcagtaagcttcctgctgctggggacctgggtccagctggccctcagggcccatgtgtcttttgccatggtcaccatggtgtccagtcttcatctgtgtctccgtgtgggtttggggctgggaccagagccctgtggccaccgaagaccttatacaggccgaccatgaggttgccccaacctctgtccctctgtgggcccaggcacaccagcctgccctccgtgctgggtgcgccctgcaggtcactgtctccccaccccccagggccttcgtgcttgcagctcacgtggcctggaactgggccctctggctcttccccaggctttggtctcagctgaggtacctccggccttcatctgtgcccctgccagggtggggactgcccctgtgatgtgggctgagagcacctgatcttttctctgtggcccctggcactggccaccacagggtgaggtgtgttcacagggtaaggtgtgtggtgggttaatttctgcccccacgaggctgctggtgatggctgtgctgctcctcaccaccagcttcggtcaaggacagcgaccccaccctgctcgttggcactcacacaaggccggcatccccactgcctctgcctgtctgagggtgggggtctgctcttgtctgaggccccgtggctgggtcagggccaccctgcttccctgccctttctggataggacaacctggtgcccccacgtccccggctctgctcagacctctactctggctggggg

SEQ ID NO: 53386 - DNA, 1014 bp, Homo sapiens
gccctggaagggctggggctccctcatttctgagtccacagtgctgggtgcacagtaggtgtccaggaagagaaacgtttgtggatccctgcctgggattcaaagtcagcgctccagattctgcctcttctctctaaaggggcatctcctggcctcttgatcctcagactgtggggcggggagggggtcgggggaggtggggcccagcagacctcataggacacccaggccttcccgccaccagcacatacacagttaaccgtgtccccgctgcctgcccagccctcatctggcttggtttaaagtgaaacttcccggaggacgaggacaggagggggtggcaggcagcttgtttttcctggctttctgccctggcccatctcgccagctcagcagaaaacagcttgttctctggcccaactccagcctctgcgctgtttttgcctttaaaacaaggcctgtgaggcagccaaccacagagcttttccctgaaagaaagacttcgttaataattaatgaggtcctgcagcccctggaggggccgtgtggagagactcaggccgtgcacaggggccctgggcagacacggccagccggaagggacacctggttccgtccccatagcaccctgtcctcagcggcagctgctgccctcatgcctggccctgctatccctcttcccagagccccagacttcccccctccctcccgcccccccactggtccctgccccaggaaactccccagggatgggccaggccctgaggaccaacccgtgctccctccctccccggccagccttctctgaccatgctgtgcccaatgccagcagagctatttctgaggaaggggtggccctggtctggggcccacagccctgcacaaggtgccgtgggaggcactcatggggtgctgatgctttatggaaagggtcttgcaccgttacacagctcccaagtcaggcctggctccacctgcagtgggggtgcagcctgactccccctcccccgcctg

SEQ ID NO: 53387 - DNA, 1727 bp, Homo sapiens
atcctgctgcacatctgcgcacatggctgagtgctgctgtgtgagacaccagcggttggaagctggctctgtgccctggtggccccctggactctgggcacagcctccacggacacccgtccttggggtgagagtgagccctcggagttctcaggccagagcgcagggacaaaaggggaaagctgaggtctgtggttgcaggacacggacccctcggggctctgggagaagcccaggaaggggaagcttcccgtaagttcccagggccttggtgcttgttttaataatggggcagggtgttactatgggacttcctggggtgagcgtggggggagtttggtgcccctccagggacacgaacaccaccccgtgctcccaccagccaggcagaaactccaggctgctggctggcgcggcatcgcaggacaacccagctttgggcctcccttcggcatttggttgccacggtgactcctgcccagggcagtccctctggaccagagatgctgggcttgataagttcttcaccgtcactctcaggcaacgacagcaagccagtgtgggctggaggtttgtgaactgagaggcaagggagggggcaggggctcaggcacctgcggtgggggcagggacacatggctcctggatgggcaccgctgagctccctgtgcttccgtccctgccatcagccagcagacagcatgatgggaggaagggcgcacgtggggaatggggcgcatcctgagagcacatcctgagagaacggggcagcccctgcactttgtgcaggcagtgcacactcagggcggaggaggggtcatcgctgtgcccaaggacagctgcacctgggtgaccagaggaggccagggaagtctcaggggcctcaggaggaaggggctggggcgtggagacatcgggaagggccacatagagccttcagcccagtcccctggattctcagatgggcacagccgccccctggcagggactcagacagcatcggggcgggcaggccattgagtctggcattttctacctgcctttctgcagcgagccccctctgtaaagatgcccggagggagcccgcagcccctgcagagctgtgtccccacacttcgcagaggccctgcgaggaaggagtttgcccaaagggaggccaaggcaggaccaggtcccatcccaccacctcggttatggagctgattaggaacccgagtgtccccaaggacagatgccccggcgcctgctgcggcgtgaagcagccctgccccctgctggcgacgctgggacagcgcgggtcctccagtcccttcttgctcctccaggcctgtgggtgccacagtggcttccggcagtggggttgattactgtgagtcagaatcacctgggcgctccgccacccagccatacccctgctcactgcagcaagcggtccagtcaggagccggcttcatcccagtttcaccaagatgcctcagcagtcagctgttcgggaagctgggcacacagccctactgggtgccaggtgggcttggcctgcagcaggagcagggtcagggaaggtgaggacagagcgccaaggagggaggggggcgggtcctgccctctctgagcctcagtttccccatctccccacctccaaagtgaggacaaactccccactttccagggctgttgtgaccagggccttggtcacccagaaaatgctttaggaggaagcagccact

SEQ ID NO: 53388 - DNA, 2178 bp, Homo sapiens
tctctgacactttctagacaggaaccgaacccacaaattcatctcccagacacgtgtggatcagggcccagggggcttacagaagcagcgcggtgcccctgcgcaccatctgccccttccacgagtgggcgctgagggaggatccagtcgggtctgcccgttccccgccgcccggggatgctgagcacacccgggccaccgccagcctcgggcacacaccctggaccttttataaaacaaaactgggaagactttcaaggtcacatggtcagtgcacagcagaagcagaaacagcagcggcctcaaggtccggggcagttcctagaaactgttccctcccccgaacctggcggcaggtgtgctcgaggagccgccgccccgggcaggtcgtgcgtccactccccgccgcaagctcgggtggggcagccgcggggacacgcgggggccgcccccgaccccggcccaaggctgtggggctggaggggcgggcgggccggtctcagcccggagccccgcgtgaacttcggggaggaactcggttggcgccggggccccgcacgctcccttcccgcggctccgagcgctttcccacggccacgccccccgcgcccagaacttcccggcgaccccgcgccccctgcgcgccccccggaggtggccgcggtacgggaggcgggcagcacggggctcggcccggcccaagcgccttcgccccgcaccccgcggagggggccgcgtccgaaccgggcggggcggggcgggggcgtccccggggcgcgggcgcggcggcaggtgggcgcgctctcgcgggcgggggtccggccgggccgcgcgcctcccccggaactcggccgtgccattcccatgatgcccagccacgggcacggcttccggagtgcggccgccgccgccaccgtccggtaggtcgcggggagggggcggcttgggggggtcgccccgccccccgccccgcccctcccctcccgcgcttcccacggcgcggcccgggcgcggggcggcggcagcggcggcgcgcggggaggcggggaggcggggggcccggccggacgcccctgcgccccctccccgcgccccggccgagggcggagcgcgctggccctgcagcctccggcccgcccccggcccgccgcctcccccgggacgtgggacgcgggcgcaggcggggtccgcgcggcgggcggcgggggacgggcggaggtgagcgggtgcagggccggggccggggggctcgggggctgggaagctggggggtcggggacaggagggccagccaggccggggccggcgcgccgtgcaggccgcggcgggcgggcggcgggggctccccgaggcaggcggacggggatcggcgccggggctgctccgttccccgggcggggatcctgtctctggcctccgtgcgactctcggcccgcgcgccccgcgctcctggagccccaggtgaggcgcaggtgagggcccgcggtggggagctttggcccggcccggggcggccgctgccctccgagaatggccgcggcccggccggcctggagactgcggttcacgccctgcgccaggcggagcttccgggagggtggccgctctcccgggccccaagctcgctagtcctcggatcccagaaacataactccgggggtgcagacctgcttggaggcccggcctcttccctgggaggcgttcactcccgccgggccgaggaccaggtcgccgatcccagcggctagggtgagcgcgccctcggggaggggagctcccttgggggaccctgcccagcccgcaggccgtgagtagcccaagcttgggagtcaggggaggtcgggccggggcagccgggaggggctcaccttgccttcagttcccaagcacaggaaatggcggtgcagctttgctgggggacgcttgtagtgaggttgtaaaattgcagcttctggaaggctgggagctgaattctagcccacgcccacttctgggtggctggagcgggtcctcctgctgccccgcccgctcctgcaccggggctcctctccctggcctgcagaccctggcctccctaccctggggggaaaccccacctgggaggtaagaccgctggctgagctgcttttcggccaaccgagaaatgtagagtatttgggggcgtttctcacaggtggg

SEQ ID NO: 53389 - DNA, 3257 bp, Homo sapiens
aatcccagctactcaggagactgaggaaggagaatcacttgaacccaagaggcggaggtggcagtgagctgagatcgtgccattgcactccagcctgggtgacaagagtgaaactccatctcaaaaaacaaaacaaaacaaatttcttttcttgcacacaccaataagcactgctttgaactttggtccccagacacccagggcagagatgacgtgcaaaacccagtcctggggataagcgttctccatacctgccctccagaaacaggagccccgtcagaggtgtgcccgaacaccaacgtcagccctttgggtggctttctgtgggcgcctcccaggacagaatgcacagggccctctcctgcactgtggcgtggttaaaggtggcggcctcaggtccttggtgttggtgccctgtgatgctgccctggtattctgtgccttctgctctgaggccaccgcagtgtccgtggctactacagagacagaagcagtgctgggcactgatgggccgtgacatttacattgtaattgtccagcaaactttgatgagtcactggagcttcccaggtcagcctcgtggcttagctgccatgcggggtttctttggagctgaatcttgttggtattcgaacatgcgagtggcttgtctacacactgtgcacccctgggttttagcaagaattcactcttgtatccagatgcaggcatgtgccacctgccatccacagatgcaacgtctgctgggtcagaagccgtgatgagggtccctgtggttgctgttcctgtccagccccgtcttttgtgtgtgatatcttcgttgtggcatattgcttcacttaagtgcttccaggagaaacagttccatgtaatccatgctcttttatttatattgctttttcttattttttattttttgagacggtgtctcactctgtcgcccaggctagagtgcagtggcgcaatcttggctcatgcaaccttcacttcccaggttcaagcgattcttgtgcctcagcctcccaagtagctgggactacaggcatgagtcacctcactcagctaatttttggatttttagtagagaggggtttcactgtgttgttcaggctggtctcaaactcttgacctcaggtgatccgcctgcctcggacctcccaaagtgctgggattacaggcttgcgccaccgtgcccggccttatttatatttctaaatagtgcctgtggggatgttggctggaaaccaacccccttgtcctgggcccaccaggggaggagccacagccacagtgcacgtagcactgagcctctcccactcctgcccccatgcccaccccagggtcgcttgtctcatctcttccccaaaccccggaccctttacaccttccctgacgttcacatgtcctctgccaacactccacatagcagtgcaggtcagagctgctgctgccccagaaagaagacctcctgaggttcagggacatggcatctgtaacacggtcaccagctctagttagcgtgttctgcccgtacatgtgtgtagggcatcccctatccacatgcagagcagttgccaattggcttacagtcactgtgggttaatcactcactaagaatgttccaggaacctgcatttctttgtggaacactttggtccattttcagtttttgtaaagaggtgccgtgtcgtcgcgggggtcaccctggtggggtggactcaaaactgcacaagatgtccccagttcagagctccttaccgaggcccttggggatcaggctttgctgtgacaaacagtggcttgcttaaataccgaccaaatggccctcctgatggggttaaaacaggcgatccatgccagtcttccctggagcacgggggggcttcctcccacctttgttctgccgatcacagttgcccttggagctcctcttgtcctgctttcaggagtcactggtgctttaagactcagctggagatgagtcggttggtgccttctttctcttcacaaactggaattccctggaattgcccatgggccatgtgacctgaaagtggtgcttcttcaccccctgcactgtcctgtttgttttagagaagaggccaagatccaaggttcgtccacacctgccagcgggttttcctgtatgggagggggctgcagtcagggcagccaggagctgcacaggagggatgcccgcccctgtgttggcagtctgtctcccagcacctccgcagatccgggtgtgacgacgcggctgcatcccatgaatacgggcccggcgccgctgtgggagtaagtagatgtgtgcccgccctgtaggagtctccggcggacagtgtgtcagtaagtcaagctctttgcaagtctgtaattattaagacctagaggtaagtcatgtcccaagagcccctctcttcccagggagtagggccagggtccatttcatccaatacaaataatcgggagaggccaggttttaaggtttctcgtcctctgggatgagtcagcctgatgtcggggaacggggatgggaaaaggaaaaagctctggcgggtcatgtctgatattctccacccacctccctatgtagggggagaagcttcctttaaggaagagtcccccttaatttatctgtcgctcagaatctgaaggctcagacagcagattttcccagcttgagatatatttgctttggaaaatcaagcagtacatgtaattattagcacctgtctgctcatataaacatgtaaaaggcattgccccctggatcccccctccctcaaaacgaatgaaaggacctgtttaaaggggcgtagggaacagcacaaagtccacattccatatccgcaaatcacaaccaggtttattcccaggcgtggctgttggggagggtgggggacagatcacattatttgcaaaatctttgaggcttctggtattttgtgtactatatgtaagagattttttttttcaatgtcaagatattttactacataatagaaaccattctaatattgactgtaatgaaaagataaaggttactgatgaaaaatacagaaatataaatgaaaatgtacgtttaagaagtggctggttttaaaccaacccagcagtaaaattcagtgattagtaaagcgacatgaattttttttttttttttttttttttttttggagaaggggtctcactctgttgcccaagctggagtgcagtggtgtcttggctcgctgcagcttccacctcccgggttcaag

SEQ ID NO: 53390 - DNA, 2245 bp, Homo sapiens
ttgcggggtctctcacacacggggctatcgagcagtggacgccaggaccaggcgggccccagcttcctcacctgtagccccggaaccaccccgggttgttgaacctgcccggcaggtccgcgctcacgcggtagtagtcgctggtcctctccggcggggccgtggccttgggcgccacaggctccgcgcacgctctggggcattcctcagccattgtgcctggaggagaagcgggactcggcggcgtcctgttgccaagcgacggccaggtcacgtgactggggagcgagcggaggggccttaaaggcgccgcgcgtgggccgggttcctctgcgggtgggtccggaacctgccgggcgactccccaagggccgggaaggtcgggacggcgagagattccctgctgggaccgtcgtgtgaggcagccccaggcccccagccacccgcggggggaccgggccaccccagcatcagggcgtggactcccgggcgaaagaaaccccagggcctgggaccccgccagccgggtgacggggtttaagcactgcaggtccactcggcaggcaacgattggacttttgctgtccaatgtactccagggatgctatgccccccagcaccccgagtctaaattgagacccgagatctggctaactttatgaaattctcctaagccaaatatcgtttaaatattacaaacagttttggagagcgagaggttgcgcaggacgtggttcacagctcacttggcgggaggcgagggtccccatcgcccagcgggcttccccaagggtcaggggcctcccgggctggccggtcccattagcagggcggggcgagctgcagggcgaggaccgtggctccactccccgcccgagactctcaagcccaggaccccgggccctgacccctcgcgtgccccgcccccgcagggaggtcccagccgcctggggacagcgctgtggctcctccgggcctgtaggcggcactgcggccccgcgcggatggcgacggaaggggaggccgctcggcctggcctggagggagacctcgctctgccccgcgtcccagccatggcgacatcctcggccgcgctgccccgaatactcggcgcgggtgagcgcgcgcttgcgggaccctggggaggagcatgcgaggaggatgcggaggggcgcggggacccgatggagcggcggggacgtggaggggacccggggcgagcgcggaggggactcggggagggcgcggggacgcggaggggacccgttagggacgcggaggggcccgttggggatgcggtggggagcgggcgtggtgcattcgggactcggcgccaggacctctatctacttccccccaggtgcccgggccccgtcgcgctggttgggctttctcgggaaggcgaccccccggcctgctcggccgagccgcaggacgcttggaagcgcgacggcccttatgatccgcgagtcggaggacagcaccggtaacactgggcgcccagccgagttgggtgggaacgaggagaggccggcagccgcgggggatgcgaaccctagaggggcctgggcgctgcacgcggtcgaaactgcgcgctccgctgggctcctcccactcccgtgctcgccgccgctcggtcctgcctgacgtagcacagcgggctgaggccaccgcctcaccatggatagggtgagagggagcgggcgggccagtggttagcacaggcttcgctccctaggggggtgtcactggaccaccgaggcccggagccccgagctcgcccaggcgggcccaagtgacctgggggcactgggcttggagtctgcccaccttgctggactcctgatggggactttctggctggccacctgagaccacaaggcggggaggtgccagaaagacctgagcaacccgctgggcccctctctttttctcctctgtcttccaagtaagaccaagggacggggttgaccaggttcgaccaggcttacccaggagcaaggtcgggatcagaacctggctccagccctctgtttcctgaaaaggtccctgtgcttccaggtctttcctggggctgctgggctcccggctccccacctcggtgtcacagaaggcacttgggagcaggggtgggcgggaactgcgctctgcctgtctctgctgccaccggtgggagacgcagcgtcgctcctcctccctgccgtagatttcaacgacaagattttgaatgagcccctcaagcact

SEQ ID NO: 53391 - DNA, 2644 bp, Homo sapiens
gagtctagctggggcacaggccactgtcaaacagggcaacgcctactcagcgttttccaaactggtcaactgaactcttctctggaagggctgtctcctttagtcttactctaaaaagggtaatttttcaccagaataaaggcaaatattttaagaatgcttcaaatgaaaagaggattgcagaaatattaacctttaattgtacctgaaacaaagcacctgaaattaataaagaagtcagccactgacgagaatcactaggtctgtcctgttcccagggcacgaaacagaagcgtcttaatccactaagcacattagggcctaacaaactggactgagtaacaaggttacctagttcttccaaacaggaattaaccaaaggggatcattatgattaagcacaatgcgcggaatacgcaatttctagttggggaattcaacagctgacagcttgtaagcatcaaaattcataacaagtgcaaggctcggaatcacaggtccagcactggacgatgcccggcgcgccgggaagcggcgcctcagacggcggccccgcgtccccatggtccctccctgcgcccagaaccgggcagctccttcccgccgccgccgccgccaacgggaggctgggggcactcccgaaataggagcggaagccccgacccacgccgccctccgccgcagggacgcccactcgccaggtgaccgcgtccccacgctccgcgttgcccgggcgccgccaggacctcggaggcggccggcccagccccgaccctgtgcggacgcggcacaaaggcgcggcgcgcggaccccgacccggccggaccccggccgcgtcccccggccccggcccgcgcccctggcccccgccccgcgcccctcacccggcccacctcggccgtaggccttggcgcagatccactgcaggttggcggcgatcttggcgcgcgccgcgtcgtagcggtccaggggcacgaggtcggcggcgccgtccggcggggcctccatcttcctccagccctcggcggcggcgcggccgctcgcgtccaccatctgcagacaaagggctgaggcggcggcccggccgcaacaaaggcgccgccgcccctcgccgcgccgggcccggtgcgccccgagccaccactcggccccgcagccggccagccgggaggggcgcccgagcgcggcccccgcctcacctcacagccgccgccgtcgccgcccccgcggctgctgcatgctgcgggcgctgagcccgagcggaggaggtgccgagcccgcggcccaaagaggcggcggcaggagggcgcgggccgggggcgggggcgggcgcgggggcgggagcgggccgggggcggtggcagcgcgtgcgcggtcccgggtgagcggcggcggcggcgacagcggctgaggcggtggccaaggagcgggagcgcgctcaccgccggggcctcgcacaggcgcagtaggcaccgcccgccaccccgccctcgaccccgcccccagctccgctcccttctcgcgcctgccccgcccctttccgcaggcgcagtaggcaccgcccgccagcccgcgcccgccccgcccctttccgcaggcgcagtaggtggcacccgcaggcctgtgcctgccccgcccctttccgcaggcgcagtgagcgtcgacccgcccctccccgcccgcttccgcaggcgcagtaggacccgccctggtccgcgcctgccccgttgctttcctcaggctctaaggcccgcggtgtggagcgcggcgtaggcagcggggagtgggcggcgcggggtgggtggagtgggtcggcggcggggatcctgccgagcccgcagctgccctcttttagcgccgtgtctcctccccggccctggctcgtcccacctcagccacagcccggccccctggccggccgaggtctcgccgccggcgccctggggacctcgtgggtgtggccggcggcgacctcggcaggcgacagcccagcagacgggcaccaggtggacgtgccagtctccagacccccgtcccggtgcagggaaggtgggcgtttggacccctgaggcagaaacaggtgcggccccgccggcgcatcccccggaagggacgctgacttcgttcccctggagcctgcgtcggggcccgcgctgggctgagaattacgggaacgccgtgagagtttgcattccgaggatttggtctgagaacctcaccagcgaaatagagaactgcccccgggagagccggcccacgtgccgcccaccggcgccttgacggcagggagaggtcgagcttccagggagcgggcgcccggcgcggggctcccagcctgtctgtacctggtcgagacaccccgtgccagaggcggaacatgtatgaaatgccaggtgcccagaggacccaggcagtccgtcattcacataccaacccacgtgcaggcttcaattcaaccttgaagccatttgggcctgggcttttttgatgacttatttgattcatagttttttggttactaattgagtctcttcacttgttataggtctgttgagattgtctattttttcttgagtcagccgtctgaaaagaacacgaggtggacagggcagagcggtcaaggaaagccataggaggagggcac

SEQ ID NO: 53392 - DNA, 1481 bp, Homo sapiens
aattgcagcctccttcaacctaaattctgccaagccctcagatcatgtcaggtatagacaggaggtcagtctgacacacagacaggcttcttagctgaccttactgagtcctttagagactcgagaactagttccaaaaatcagcaacctaaggaactaaatacacaggagtatttcaggtgaataaactttaaaaagtgtctccgcgaggagaccctactcctgggacttctctcttgaccaattttacctctgcagaaaagcaggggcgcagggccttgtcccgcagcggcactatttcagggactccagctaaaaggcacagtggcctggggccagccaggaaaagagctccaagcagccggctctgcgggaaaggggaagaggaaggagaaggggcctcttcatgaaggagcctacgttaattctcagctctcaaagatgctgctgaaaaaaaacctcaccccaacagcaaaaaggtacaactgccggaaagtcccgaggccctgctccgtcggcgacttcactctccaggcctcagtttcccgatctgcccctacctccctgcgtggctgcagagttaactgagaggctggcgtgtacagggctcggccgggcggctggcacggggcgagcgcttagtgaccggagtccgccggccgaaaggccaggcccgggacgagcgtccagaggtgtgggatccgaaagggggagagtcgggcaaacgggcaggaggcgctgcctccacccccggaggagagggcctgggagctgcggactgggcggcggaccccaggtcggggcggttcggggactgaggcggggtccgcagtcggaggggtccggagcgggtgttgggggcaggggagggggcccggccttacgtgcttgaggcagcgctccttgagcttctccaccgaggtgtcctcggtggcctcctccagccactcggcgccgtcggacgcgcagatgtgcagccgcagcaccttgcccgcgaagatcttctcctcctgcacgaacatcccgccgccgccgcaggggcctgcgcccgccacccgggcccctgaaggtcaccgggaaggcgggcggggagggggcggggccagaccgcccgcgcgctccttcgctgggccgccgccccgccccggctcccgtcggccgggccgccgtcactctccgcggcctcagcggtcgcctcgctcccgccgccgcagcagccgccgggggcgcgccgtcgcggccgcaccggaagtgcgtcacgggcgcgtctggcgcatgccgggagatgtggttctcggacaggcgcctcgctcccgccgccgggggcgcgctgtggccaccgcaaaggaagtgcgtcacggggcgcgcccggagcatgccgggagctgtagttctctggtagcttcgttcctccccgagctgcaggcggttcccacccggggcactcaccacgtgggacctcatgggttctaaaggtaaaa

SEQ ID NO: 53393 - DNA, 1375 bp, Homo sapiens
aaataaacaatgaatttttaaaatagaaatatgcccccaaattggatgggtcatacactagagattgatttgttgttagtatgaaatgagaatttcactgggtgttaagtattcttatgtattccctctggccaccctacccagagggtgagggacagacccttggagctcaactggccacagggaagacccctgccacggctcacccctgccctgggggtcctgatgttcccacctagggcagccacctccctctgggatctcccggctctttcatcccaaggtcctttcttggaggtgacaaagaggggcagaggaaagcgctgagcctggccccacgccagggcccccttcctggaggaaggcagggctttaccttggttggcccggctcccaggtggcaggtggcccctggctagacgctctgaaggcccctgacacttccagcatcccagcctcctgcccaggctaggggtgctcctgccttgctgggcacctgcagggccttaggctaggcacagagaggccatgcggctcccggggcagcccagccctcggccaggccacccgcctgcactgaggcctctctgctccccggagcggatgataaatgtctgccaagcagtgattacaaacagtgcagctgccggttacaggaactgtggccgggcgggcgtggctctgccggcagttgcgagggctcaggcttcgtccggtgtggagacttgactgccccccttctttttctggagggacaaaaagaccagatttatcgtggccataagaaatcgtctgagcacttagcagcttcccgcccctggtttgaggggaagttggggctgtgggggctgagatgggctggcctgcggggagtgggggctggccagctcccagaatcccccttcccgaggctgctccacccaccaggagcacagggaggctgctgctgggggaggggctgtggccgggaagtgcccccgccccctttccccactgccctcgctcagcgaggcttttctcctgggagagacggaagaagccccgaccagccaggacaggctggggatttaggcctcaaggttgtccttgaggcccaggatgtccagcggcagcaggctcccctcccgggccagcctctgccctgcagatgggtgtcccctctcccagcccggtcctgtaagagtggcctgggccacatggcttctcccctctgagccttggtttcctttcctgcaaaatggacaaaacgggtggattccagggcatctgccaggccgccgaggacagctcccggccgtggggggctcaccccgcaggagccactgtgatgtcctgcccctcactggcctcctgggccctgaggaaggaacggagg

SEQ ID NO: 53394 - DNA, 674 bp, Homo sapiens
ggagaggtgtctgctcctgacccagccttcaaggctgcaggagctctgtggctgcctggccctcctcccttcccggtggggctctggtaggcctgggctctgagcatcgcgcctgggttcgggccatgccgctgcctgcccgcccttccctcttgtgtcctggacaccctgcagagcctgctcctggccatctccagcacgaagacttcccctgctgccctgaccactgccctctgcctcctccctgatgtgacgggagccgggccgctaggtgaccccctggggttcctttcctgtgaactcactggtacctatggctgtctctgcagaggccacccaccctggaccctggactctgagccgccagccctggccaaaaccacccctggcttggaagggagggcaggcggccctgcctggggccagagtacccagggacagcccctcctccaccagggagcccctggccttgggccagcccccgtcaccccagctcctccctgtgaccaataacgtcccatgggtgggactcccagtccaggccaacccttcaccatgccatcctctgcaggatgaagttagagcccttggaggggccagtgttgcccccagagcgtcttcaccacagaggcgaatgcattgggggcagagccacgtctccacctctcatccct

SEQ ID NO: 53395 - DNA, 1884 bp, Homo sapiens
ctcacccacggagctggctggctgacatgacaaaagtatgcagcagcaacattctgaaacagtagttacagctgaggacagctacgagctctggattctgcgcttaggactcgctgctggcagaggcagacagagggttcttggagttttcagttggttcatgggccatagatctttttccacttgctgccaagatgtttccataaaaatttccctttgaggggagcccaggcagtacacggctgggtggggtggggggactgggccagcgcttaacagtttcagctgtcgaatgaggacaggtcagggtcaggcactagagccccctcagagggggaccagccctccctccctaccttccgccttcctcctggctctaaacacaaatgccaaagaatgactcttcctggaggagaaaggaggccaggcagccggctcctatgttctaggagccccgacccgcagtcaccaacgccggcacccccaggcgggtcctgctgacctcttgcccacagctttgtccacattcaggggcaaagtacaacaaccaaatccaatgcaaagttaagtgacgacagagaactcgggtggacagacacaatgcggaaaacaagacagaattcaagtaccgaggcacccagccaggcgcggcccgccgggctcacagtatctgtcacacctccggtccctcctggacctctccatgcaacccagctgcctcctgggcccatccccttggggaagaggaaggcagggcaggagaggcggctagatcccaggcccaccacctgccaggcggcagctccaacacggtccagtcccttctgtcctcctcaaaaggtgtggagataacgtagctctgtaatagattctatataggatatgcgtattgctaatagtcaggcttagggataaaggtgcagacatctcataaatactgagtggctcgtctctctctacagggtctggatgagtcagggtcacactcacaggacaggacaaccccggattctagaattagtcatcttgtaaacaaaggagggaagggtccggctttcttaattggtttccttgggaaaaatgatcaaaggatgctaaggcactctggaaggcccctctgagcccgggccgccgcccccgccccacggtacattcaggacgtggagggagcacacagcaggtccgctcagcagccacgcacgtccacagacactcccgactcacgcccaccgtgggacacattagtgcaaaatgctcggcctggcccgcccggggcgcagggagagctcagaacccattcacattaaattattattatttaagttttatctatagctcttgccttccttacccagaacaaaacagacggcgattacaaacgagtgaggaaggggcacgggacattgtgcgggcctgaacagcagtcaggcgtcctctgtgcagccaccacctccggcagcagccagcggctccctccctgtcctggccaagggtgggggggcacccactttggagtggagggcagagagagcccttctgtcagcagccaggcccccagggatggtcaaattaaagtgcaaatttgggtgtggggcagatgaaggaaactccagagggaactcaagtgcagctcaacctcacctacctgcccctgctccaccccgcggcttcctcccatctccgaggaaggcttggtccaggttcccagcgggccccatgggggctccaaccccacctgtgcccaagacaggggaggaagaggcagagaaaggctccctctaggctgggtggttcttagttcagcagaaggtctggatgcctctgcaccactgagccacctgcagccctaggaatgcaggtcttggtccccctggacgtgggccc

SEQ ID NO: 53396 - DNA, 2099 bp, Homo sapiens
tcaggagcctgccagacgaaaagaggggtgggtgagaagaaggggcgacctggagggacacggactctggcaggagagtgcggccgcgctggcgggcgggaacaccaaggtgcacgcgctcccggaggcagctccacgggatgggagtccgggctgccttgggcacccccgggtcagcacccccgccacacacaggaaggaacgcgcagcagagaacacagctcagggcacccagcggcccagggagacgggcccaccagcacgtgggtgaaacacctccaatccggaggccccgcgcgggggttgggggagggagtggaacggcctgggaggccaactccagggacccggcctcgcggccttcagacccacaggtttaagcggctccacgacgagagtccaagaccaaacttcccccagagcctggcagaggggctgggaggtgacctctgacctccgaccccacacgatcccagcaagagaagcaggaaactccgtcggaaggcctcggtccgccctggccgtgcggggtgcgcggcgggccccgggctccgctgagtttcttagagaaggagctggggccccccgacctcagctccgcagaggcacagaagctggcaagaggcagagccccctccccctgcggccggaccccagtttctccccaggctggggcccgagtgggggaggcgcgggaggcggtgacgacccacgaacgggcccacctggaccgggagggcgaggcgcgggcccggctgggccaggcagctgcgcagatgcgccgggaggggtgggtacctccgccctggccccgggccagtcctgccccggcttccccacccggagggctggatcggccagtcgggtccctggggaggccgcgcgggtccccagaaatccagggaaacccagcaggcggcggggagcgccccgggacgcccggagccggggtctccccgaacgcgcggcgcggcgtcccggcccggggtcgcgggcgcctccgccgggaccccccggccccgcccggcccccctccgcgggctcccgaggccggttcccgcgcgcacgcccgggccggcgcggaactcggccgcacccgccccgcgcggccggcactgcggcagggggctcgcgccaagttgggcggccgcggagtttgcgggaagtgcgggcccggcccgtgggacgaccccgcccggcggcgtaacccgggggcggccgcgcgcgccaagttggcggtacctgcgggcgcccggcccggtccggcctgggcagctgcggcgcgccgcccgcggcaggaagtgcttggcgtcccggcgctccggctcccatggactttctccgacctcgcccagcaccggcggccgcaccgcggcgggggcggggcggcggcgggggaggtgcccgcgggccgttaaagggacagcgcgccggccgcgcgcgcgcgcgcactggcagccaggtgggctcccggggtcggggctggggtccgggggccgggagggtccccagtgggggccggcggggcgtggggaaccccgagcgctggggaggggaggcggcagctcctcgcccctcgcgcgtcctccttccggagctgccggcggtcgaccctgcgcgggacacccggcgggagccggacgccgcggcgcagaggacggagctcggcggccgggtcgggaaaggacctggagcgccgccctccgccctccccgggccccggcctcggccggactcgctaagcccgggagagcccccgggcccccctaccccgcccccggcgcgcgccctgcccgcggcagtcgcgtccgcacggtgcagcctccgggatccgggcgggggaagtgcgcgcatccgcagccgccctggacgctcaggcgggccgtgaaagacgaggatacgggagcgcccttgggcgaacgtctgcggggctccggcgcccgtccctgcggcccgggaactgcaagctgcctggactgggcctggcgctgccttcaggcctggtgtgatccgggcgcactggggcgttgacagtcattccggcaccggccacgcagctctccatctgcccaaggccacgctcctgaggacagaggtgc

SEQ ID NO: 53397 - DNA, 1327 bp, Homo sapiens
ctcaggagggtggaggcagcaccgccatctccaggccccaccagcacccatcctctgaccacggacctcccaggcaccccacctgccccctggcctttgcctaccaccgtgtccttacctgacccaacctcgaccaaatgcccctcttcctcaccgctcctgcccctgcttctcctcctcagccctgacccctctgccctccccgccctgcctcctgcccctgcttctcctcctcagccctgacccctctcccctccccgccctgcatttaccccacgcccacagccctcacagggcggggacaccgaggttctcccataaattaaccaagcccctttacgaagccccttcccaaatagagccggcgccctcctcccctgggcccgggtcaccgctgggtcagcgcctaccggctccccaggcctgccccatgccctcagctagaggcaaacccaagctcatgggcgcagcgaagctggcaggaggggccctgggggctgtggctcacccctgcatggccctcctgctgccctgagagccccttggctccggctgtccccattagtcgggtaggactcttgggccccgccccacctgccccttccagtctccgcccaggtcaggacggcaggtggccccagcagggctggcctgagatggaggaacgcggccccgacccgggctatggggagactctggatgtggcggtggatccgctgacggggctttgggatgtgattatttcctgggggctgacggtagcccaggagcaccaagacccagctctgccttccgcctcccacggggcctctcctctgcaggaggccatacaaggactgcacggaaggggagcggccccgcagggagggggcgcctggcagcccgcccgccgcagcagcctgcaaccccgcccccaggcgcagtgcgcgccacagcagccctgccagagcccgtgtgacacagctgccggcatgcccgggcacgctgcccagctgggctgggggaggggcgccgggccaggagccgctgaatcagctgcacccggacggccccgcctgggcaaggatgctggtgcggcggggcgctctctcttttgggaaccgtcaggaggcgcgccaggcggtggggtggggggtgtttctggactgcggcctctgcagcctgctgcatgggaagtgcggctcaccggggctgggtgcagggcagcccccgcctccgagggcatgagcggaggcctgcagggagggcctgggcagagaggggccctttccaaaggagacccataaggaagaagagaaacgcactggcctctgcagatcgaagcacg

SEQ ID NO: 53398 - DNA, 3288 bp, Homo sapiens
agggcgggatctgcaggcactcctgggctcttttccacaaaccctcccaaggatacttccaaggggcccaccacctggggaagccaaagtgcttgttctagggcagcactggggaaagggggccttggggacagtggccaggggaggcccccggaagtggtcaatgccaaaacggatgggaaggggcaagagtggctctttcctgcaggatcctcgcagctccccactagctggaccacactctgctcttaggcagtttgcccgttactgccctggtcttctgcggctgcctgacccagggctgatgcaagcccttaaatggcatctgcaagaagccaccacagggccgggaaaagggactccagggctcgcaggtgaaccgaaaacgagcccggcgggagcaggtgactccagcaacctgctgggtgccagatggacggctcgggggccgtggggtcaccttgctgggcctgaaccctggcactgtccttccctagcagtgactttgggcaggtcacctgaccccaagacggctcctgctctgtccaatgggggtgccaatagcactgcctttgtgggtagctgtgggagggaaggggctgggcctggcgtgcacagtggggtcggcccggggcctggcagcggcccttacagactgggctgcaaagagcagaggcggcatttggctctccagcttcacctagtaaaggccgtttataccttgccgaaataatctgtagacggaatgaactcaaaggtcaggaaataaaatctgagcaggaaagttggtaacattacaggggactgttgccaagagcttcgcctgccttcagattcagcctggggccctgccgtggggacctggccagggcggaggagggaggggccggggccgcctgaccctcccgtgcccgcaggggcccgacctcgccctctccctccgcccggctcctccacggggtgcaggggccagagcggccctatttaaggccggccttggcctggagctcgccccggccgggaccccggccatggcggtgccactcaaacgcgactcggcggagctgtgtccccgcagggtctcgcggcccgcggctccatccgggtccctgcgtttctgcagacgcccgctcggcccggcccatggacccaggactgtttcctcggggccgcagagacgcaacgggccccggccaactccgcgtgagcaccgggcctgcgccgcgccgcgccgggccccctggctgcagagcccctgccggagccacttccgggtcccgcgccgcgcgttgccctggagacggcccccgcctaggccgggtccccgaccgcagctcacccggtgccctctccgcggcggcgccggcgtcccggacctcggggccggccggcggtgctaggggccgggcctgcgggtgcccctgtccctcggggctccgtgcgcagggcggccgcatggtgctggggcgcgcggctgggggcgctggcaaggcggctgagggcgtggttcacgcgtcgccggctggggtcgccctgcaggtgaaggggctctcgggcgcggccgccggaggcgtttggcctagcgtgggagccgtagcgccgtccctcgacggccaccgtagggcggcctcacgccccctccacccgcgccgaccgagccgcacttcccttccccctgctccgggcccgcgctgggcgtcccggactcgtcgcttcccgagggcgtgcgtgcgtgcgtgcgtgcgcacgctgcgagcagtccgtagcgttccctcccccgaacgccctcggtgccgcgcctggtcttctgcgcctgcgcttgccgttcctgggccgcgcctccgcgcacgcgctaccgcatcccgtggagaggcagtgcgcaggcgcgcttccgtggagcagtcctttggccccagcagagggcttgaccgtggtcctggccccggactgaggtgtctgcgacccggcgcgctgctgccgtcgctggggtggggccgggccccggaggaagccgctttcccggcgggggtgggcggcccagggaccgggagcaggtctggtcctcgcggggccgtgtgcgaaggcctcctgcgcggcctggggctgggaggacagggcggcggcgggaatgagggcgccccccaggctccaggagggcggggaagggtgggggcggctgacgccacgcggacccgggcggcacggatcgggtgtgtagctgcgaggcccggtgggccggcggcgacgtcggcagccgaagtagggacagccccggagcacgagcaggcccagcagcagccccagggccgcccccccgccgccccccagtgaaggaaggggacttgtgttagtgtcctcacgcctggttcgtacaggctggcggttgtcctgggggtttccagcgaggaatgtgttggggagcgctcctgggtgtggctgctgggtaggaggggaaggcagggtcagcagcccctggggcgaccgtaaagtgggtggcccttcaaattcaaggcactggaacaagggggctgggccctcctgcccaccaggcccgtcattggctgcaggcctcccgggacggcgagctggctcctgggcccctgtcctttggaccagggccgccctgagggctggcacagctaccttctccactgtggccccatccccgccacaggagagagagccgcctttacccgacatgagcaggagttcgaggaacatctggacgagcaaaggccaccaggaggtagcacagcaaaaaaggccaagagcctgttttctttaccgatggctggcggcaaatattccgaaagaaacgtgtcaggcaagaagcgctagttcacgcctgtcattccaccgctttgggaggccaaggcagggggatcacttgccccagaagtttgagaccagcctgggcaacatagtgaggcccctgtctctacaaaaaacttaaaatcaataaacaggtctccttccttcctcaatagtcctgttggtggctcacctctctgcctctccagatgtgaggcagatccacacgtttagctattgagataaggctgggcgtggtggctcacacctgtcattccggcctcagatctcttgtgcccaggagttttaagactagcctgggcgacctggctggcaacatggcctccacaaaaataaataaaacattttaaatatataaacattgagataatagcatcttgatgcctgtcttcattttttgtcttctgttttaaggactattagagacaaactaaccaaagataattctcccctccc

SEQ ID NO: 53399 - DNA, 1601 bp, Homo sapiens
ctacttcagtgatttaaataccattttaagggaagggtgttgtgaatgccccctcccacgccaactctaacctgtagagcaggcgagtaacttcgtgactggttaacaacgtgcgaccagatgaaagcactaaacaataaagtgcggaacactaccagcagtttggtgaaagatttctcaaaggctgtgcatctgtgatcaaggagcccaccaatgaaattctttgtagagttaaaaaaattgctttataggttgttttggggtattatagagaagtctccagagtatttggacttctaagttgtgggttcactttgagcacccactatatggccagcgatccgaaccagaaagttaatgatgaaggttcaaagggaatggggtggctacgagtgtggaataggaatgagggatcctcagagaacaggaattctgggcactggggatggggtgtgtggacgctaggaaacaggtagggtaggaggcctggaaggtcaatgaagttcttggggctcaaaacataggtattttgagagctgggatacgggagggcttccctatccccaagcgtgcggtgagggctgcgggagaatggtttcattttgacttcagacagcccaactcgtcaggatctaacggggattaactgggagagacatggggagcagctggcttagtctcccgcccctggaaaggccagggttggtccgagtcgggtgcctctgtggggcagggactggctctgcggtaaggaaagaaatacgggggaggggccccgggacccgccttctggggcggtcgcaaggggtcccggaaggccgcggtcccgggggtcggggggtccccgcgcgggggcgcgcctcacctcgcacatccccagccagggcccgccaagtgggcgcgtagccgatgcagtggccacaccacgacgagtagaactgcacgagccacgcggccgagctgttggcggtggccccgcgcacgctgccgctgtccagcacccacacggcgtcctcgcccgcgcggtacagccgcgccgcaccgcccgcgcccggccccaccgccgccgccgctagcagcactagcagccgcggcagccgtgcggcccgcggcgggggcgagcgccgggctctcagcgcaggtcccgctccgattcccgggctgcgcgccaccgccgccccggccgccgccatgttggaagtgccgccggcgcgctgaactttcaccctggcaaccaccgtcacgtgcgccggcgcgcccggccccgcccccgcgcgcccagttctgttccgccccgccccctcacgtctgaccccgccctctctccccgcccccgcccccgcccatgcgtggcagccccgcccccaagagtctgatgacgccatctccccgcccaggcgcggcaggctccgcccaggccccgccccaccccgccgcgcgttccccaaaccccttccctgaacagggccaggtggccacatttagcaaatggaagtgcacgacgccaggttcaacgtgaatttcagacaaacagtgagtcggtttttcagcctaggtctgtgccatgcctgaaatacaaatttaacaagacattcttagac

SEQ ID NO: 53400 - DNA, 1075 bp, Homo sapiens
ataggccagcttggagatgcgcttggaggacctagtcccgcagacctggctgggacagggtagctggtgaggctgtgagggccgccacgcccctcccgggaagacccgcccctctaggggtagctccagccacctcaccctctccagagaaggccccgcccccgagggatagctccacccacccccaacctcgccctctcccgggaaggccccgccccagggacggctccacccctcctcatggtccgcctccgctccctcccagaagccccaaggggtggctccactccttcctgtgacttgaccacgccgcctcccggatccccggcgggccgcttctccccgcaggccgtgtagcgtcagatacgggtctgtccccggttccgtcccgccgcgcgcctaccttgcaggtgtagacgagctggtagtgcgccgcctccacgcgccccagagccgccgcgggccccggcccctgctcggagcttgagcgccgccagccccaggcccaggcccgccgcctccccgcgacctctggacgggccccgcggccccacagccgcctcaggcagggcgcccggggctgcacgcgactcagcaacctcggcgcgccgcgcagcgcagtccgcagcatcccgctcgccggctccgtccgccctgccccggccccgccccgccgccatcttggaagtgggcgccgggcggaagcggcgttcttgggcttccgtcttccgggtcgggggcgcgctgcgctatgccgccccctggcggcctgagggggccctgcgtccacgtgcagctcgcaccccgaggacaccgcgggccgcagcgaggagggacggccgcggggctgcgcgcgagtgtccgagcgggaatgcgggtcacccgtgctgtttatttacgcagctgtgttttctaacactaatacaatgcatgcatgtattgtgtgttacatggtgaaacagaacagatcctgaagttacacagatggcgtgtgcatgggggtggtgagcacccgcatggcctccgcaaaatgagtgccgcttaacaaacggccccaatgcccggcagtccggct

SEQ ID NO: 53401 - DNA, 668 bp, Homo sapiens
ctgggacaccgaggcagctctggcatagcaacacccaatgtggaagcaggaagtgaccctggtgggcagcgggagggcgtctgagtttgggagtggagcctgtcactctcaaggcggcctgtgtgcgcctttcctaatccacggcaggcagagcctccaacctggaacacgccagggctgcggctgctgcaaggcagcaggcagctttccaggaccacaggcgtcctgtgaaccctgaactctgtcctgagcccctgtcgtgtgcatcaccagcaaagcacggggagcaagcctgtgtgggaggaaagtctctgcagagccaggaagtggacgcagtgaaaatgcccactgggaggtgaggtgcccacaggctacagcagggtgctcactcacagaaggtgaaccacacagccacgcaaacatgaggaaactcagtacccactaactttgcagaaaaaggaagcagcaaatcgccaacgttttccaaagtaaacaaaaggcagctaataaaataatcactggcctcacagagcagttgccaggtgctgtttgggtgcttgtgtatttttcttttttttgagacagggtctcactccatcacccaggctggagtgcagtggtgcaatcacagctcactggagcctcggcctcctgggctcaagtgatcc

SEQ ID NO: 53402 - DNA, 1615 bp, Homo sapiens
caaagggaaggctggctgttctctgtacatccagaacaacgcctggaacgtggcagtgcctgacactaacaaatgtttgtcaagcttttttcttaggaactgtggtccaggaagtctgaagggagaaggacgctagagagagagtgggagaatgaaacattagcagagaaaatctaaaggaatcactagcacagacccgggagcccaaaacacccaacaacaaagagaaacgccctcccccgtccttggcgtggctctccctgctggaggctgactggggccctgcccaactggaacaaaaccaaagcatccacccgcgagcaccgttagccgcatcagcagcccaggtcccctcactccttcacaaagccccttgtttatgcccgaaatgcttgtgaacctgtaaactcagttaacagccggccagaggcagagctggcagcgaccgcaggctggttcagcgcctccgggccggcggagacgctttcctctggaagcctcacacgaggctgctgcctccccctccccgtgtcgctcaggtgagcaatgatcagcaggaaggaggtcaaagtcacacgtgctgagccactgacatcaggggctgtccctctccccgcacccctctcccaagggctggtcatgagggctgcccaccaagacggagcgcagcaggcggtccctccagccccagctgcggggacgccacccagactcggctgggcccagggaaccccaggatgcgccaggacgatgggcgtttaggcactggcttgggagacagacccggcccaggcccagttccgcctcctgctcgctgcgtgaactggggaaaccccctccgaggctcggccaccgcggaatcgccggcgcagtccccgagacgcacgcgggcgccctgcagccggggccgccccgccggagcctcctcggagcccgcagcccgctcccagccgaggggctcccagggccagaatccccgcgcgcccaggctcggccggacgggggccacgccgggcctcagtttccccgactttgggcgctgccccgcccccgtcccgggcctcggctatccgctcctcgggacagcgccccctccacggggagagccctgaagctgccgacgccacccgcgcctcacctgctgggcgcacaccttacctggccgcgcggaccccgccgtcgcccgggcgactgcagactcgacgcttccggcggctgcagaacaagagcgccgcgcgccggaagtcccgcctcctgaggcgcggggcacgccgggacggccgctgcggcctgccgggactagagaggcgaacggctcgatgctgccctcgcgcggccgccctgggggccgcctccgcgcgctctggaggggcgcgggtggacgcgggacctcaaggcaggggacagacagggacaggcacccggccacctggtcacgatccggaagaccggcccttactggctgtgaccttcggccatcgctggacctctctgtgcttgtttcatcctctgttaacggacatgttggggtttggttaagcaacggatgagaaagtctacgtgaaaggctttttccccagcctgccctgcatgctcaggatcgccgaggccaggc

SEQ ID NO: 53403 - DNA, 2411 bp, Homo sapiens
gaaaactttaaaaaaaacacaagctcccagacttgtgaccctggagatggcctgacttgcagactggccctggtgtccgtggtctgaaagcggctcctcagcagattttgaagcccagccggggcaagcgcgtcctcttgtcttgtgacaacccccgaatgtcctcagatcctggcataaccacacaaacactcctgcacaccccgggcacccagcagcacttctgcttgggtagaacgaggacgaaccagatctggccactgcccggctgtggaggcagatggaatgctccagctcggtttccaatcactgcccactaggtgaaggcaccccgactccagccccacgaggaaagcgggcgggctcctgtgctccccgggcactaaccatcctgtactggaactgtctgtcttgggggaggtctccccgcaaccagactgtgagctcctagcaggggactccgcctttgaattccgagtgcctggcacgcagtgagcgctctgcacattgatgggtcaatggacgagctcgtgctgcagcggaggtgccacacgtggcgcgggaactggaagcgtccccggggccggcgccctcgtctctcacctgtgtctcccacggaagccagcaccgggctgggcacatagcacataaaggccggccgaatgccgaagaagggggagtccaggtccctgccatgggggcgctcacaatttagctgggggagacaagaccggcgctcatagaacgctggagctggaagcaacgacaacagcgactttactgcgtgccggggcggccgccgcccacctggaccgctggactcggcccctgccccgctcaccgtcgggaatggcgaggctccgggctcgggacagcggggtggcgcccgggcggcgctggtagcccgacatcgccgccggcccggcggggcacgacctgcctagcccggcagcggcggctccatggccccggctccgcccgtgccgcggcccgcgtcgcccgcccccgtcgcccgcccccgtcgcccgccgctcggccgcccccgcgcctccgagcctctcgccgctgcttccgctccgagcaccgaaagcgcgtgcctgaacgccttgggccgtcggcgagggggaggggaagccgtgggcggaagcggaagtgacgactgaagcggggcggagacgcaagatggcggctgtggtgctggcggcgacgcggttgctgcggggctcgggttcttggggctgttcgcggctgaggtgagccaaaggcgaaccaggcttcggcctggggcgggggcggctcgagtctttctggacgctccgtcttcggtttctacaggtgacatggcgcccgtgggacgggctcgcacttcgggacactggtgtccccgaggcgacgggggccctgccttgctttgcgcctcgagcccggggacgcagtcccatctgtctctcctctccccggctgctgggtcctctccccccctcacttcccgggtcgacgggccttctccgaggccatgcctcatatttgcccccgcgcttcacctaccgcgtgctccttcaggaggctgagccggtgggggcccagctctgttagacccgcagggttctgacaccagggtccaggctctcggttgctgcggtctgtccgttgatctctgacgtttaagaaccctttccgtacccaccgctcctcccacccaagtgaccgggcctgcctttccccacgctggaactttgttccgacagcacaggcgtcgcccctccccacacaacgagcgccgtttcaggggtgcggaggtgctgcctccaggagatggatacaggctggagcgtaaacaaaatatcggcagtcgcgtaaatgctttggagtaaacaagcagcctttcatgatagaaaatagcaggaaagactagactggtgagggatagtcctccatcagggtgacatttaagggaagagctgaagaatgaaagaaggggtaggcatgggcaaagggcaagccctggaacggtgaagaagctttggggttgatgagtcaaatgtgttccaggaattgacaagaatcagtgtgaccaggacctatgggagtgtgggggttcaagagatgagtttggagagggagacagaggccaagtcacaccccgccttcggaccaggttaataagggatatggcttttatccaagacttcggtggtgctgttggagggcagagctgttaagtgctttatgtgtacaaactgcacttagagtgagttactgttaataagccctgtttttacagagatagcaactaagacccaaaggacggaaccagcttgctccaggtcccgtggctgagcctttgttgtcagcctctgctttgtcttccaaagtctgtagaaataagtcctgtagaaaggcagatgctc

SEQ ID NO: 53404 - DNA, 838 bp, Homo sapiens
tggatttctgtgtaaccactctgaagatgatctcatctggggtttgcgagccctcattgtttttcacatggcgacacttgcttgttttcttggttacagctagaaagagacatgtccaatgtcagcctgggcccgacccccatccccgagctcacgcacatcatggttggactggagagctgctccttcctggtgagtcctggtgctgggtctgatggcgttcctgatgcagtgtggccggctcagccagccctgccctctgtccctggcatccgacagcgctcctgatggggcgtgggcggctcagccagctctgccctctgtccctggcatccagcaatgctcctgatgcagtgtgggcgactcagccagctctgccctctgtccctggcgtctgacggcgctcgtgacacagcgtgggtggctcagctagctctgccctttgtccctggcatccgacggcgctcctgacgcggcatgggtggctcagccagctctgccctccgtccctggcgtccagcggcgctcctgacgtggcttgggcgactcagccagctctgccctccgtccctggcgtctgacggtgctcctgacgtggcgtgggtggttcagccagctctgccctccgtccctgcaggaggaggacttcatcccctttgcagtgttgaacatgatgatgggcggaggtggctccttctcggctggtgggcccggcaagggcatgttctccaggctctacctcaacgtgctcaacaggtgggttgcactcttttctgtatcctcaggccaccaggccaggccaggtgtgtttttggaccatgaggccaccttccaggtg

SEQ ID NO: 53405 - DNA, 2121 bp, Homo sapiens
aacgctgctgatgggaacggtctcacgaggttccagcagcctgaacactacaacgaaggcggcgcgggcgctgcacccgccaggccctccctacctgctgcggacgtccttgctgcggatgggcgccaggaggctgaaggaggatttggccgagcgaagggaacagtcgtcgcaggccagggggctccgcggccggccggggcccaggctgctgtgggcccgcaccaggagcggctgcgcgcggagcttgtagtctgcaagatccgagtcgaccttgtttgctgtcctcagggagtcggaggcgatgtccaggctcagggcaggcggtgggcgcgggggcagcaggctgggcagcctgggcgagctccccgccacggcggcgtctctgtgcgggaggttcggggagctgctggccaccccagagagagggttaccccccgaggacgggctccctctctcactgctcaggaccccgcgggacttggggatttcctgcaaggaggtgctcaggcagggcggggagcagctgtgggcgggggccccggggccctcgctctgcactgagcccctggagggactggtcccattccgggcttccaggtcctcctggctgcctcgaaaacgcctcctcctccagcccttgtcgtccagggacagggctcgctccagtcgaggcctggcggggggccgcggggcgatgggtgctgctcgggctggcgggtcctcgccgctgggcgtggccggagtgctgcaggcaagcgcggggctctcggagcccggagcatcgggtggggaccccgcgcgctgggccggcggagcgccgggaagctgtccttggagcgtcctcccttccggcggctgcggggccggctcggagggccgcagattctccgccttggacggcatggacggtctctcccggggcaggcctcggcgcgaggccgcaggcagcgcgaggggtcacgggtgccgggtccggggtcgccggcgcagcgaggagcagaaacgccgctgcggctcccgcttgggccggggatggtcgcggaggggcgggggcggctgccgcatggcccgggccccgagtcccgccagcccctcggggctcccagacgccgttcccagggcggtccgcaggcaaggcctgggggaacaggcggctgggcgcctgtcgcgggggaggttcgaccccgacggggacgccgctcggggagaggggtgggaagcgggcacccctggctgggctcgcagactccgaagtcgacccggtactcgcggaggcccggccgcccagaagcggagtcagcccggccgggacccagcaaccgccgccgcggggccgcgcccggtccccgccccgcgccccggccccgcccacagcggcccctggcggccggaggactgcgccgcaccggacccggacgggtctcccacgcccctcccaacccggcagccccgcagtccggcaggtcccagcgaggcaggtgcaggtccccggagaggacctgggtgcggtccaggacagcgccgaggcctgcggacacctgcactcactcgcttccagcaaaccaaagggaaccacaggtgaaggtgcttgaaggagcgcaaaatattttattcaacaatttgcaatgtaacaattctcatttaggaaaaatagccgctcccgcctggaggaagcttcttgaatcaaaagtcgtggcagtcgaccccagaacagcgggcagagccgaccggaagaggtcccaggattcacacgagctgaccgagggacagagagggctgccccgtcacagggactggcctttctccaagtgacaaggacaaatggatccagcgggacacgcctgtggaacattttggaaaacatcctgggtggtctgggctaaatgatcaagtgaaacagaaagccaggaaggatctgtgctaattccacattctacaatttctacacttaaatttaaaacaccaaacagtttgtattcctccagcagaacctacagaaattatctactgatttttattagtatttaaatcttttcttcagtctctttagacttgacaagaatacgaagagtttcagaacagtcagagaagccttaaagctttgcatcagtgagagga

SEQ ID NO: 53406 - DNA, 1295 bp, Homo sapiens
tgggcagtgactcacagctgggcttggagaggccctggttactaccgaccatgtggctctcctgtggcagagacagctccggcttcaatgaatgaacattcttaaatgaccaggaatactatatccttaaatcatcctaaatgactaagaaagtcacatcattcttttcggcaaacaattctgagtcaaagattcagtctttccatccagaatctgaaaggatggtggaattaattttcaaaataattcattacgatgggcggtgaggagggaggcacagtgtgcgaccagctctgagtcactgctgtgtctccctgggggcgggacggagatcgcggaggtcggtcgggttcttcggggagaacagcagcgtcagggctccaagtgcaagttcacagcagggcaagcctagttcagcaccaggtgcttcctctggccaatcctccctagccttgagctcccggaggtggcgcaggcctggaatgaaatcaacagcatgacctctgcatgcctgcccccagggtgagcagtgctcggctgcagcgtggcaggggctggtccacataatgaaccacacgggccattggcgctgacaagctgaaggcttcgtttttgtttccaaaagcctctggaaaccgacaagtcagtgccaagtcctgggctcccttgaaagcactgtatccttaaccatcaatgtttactgtgagggtggccaggaggtgccgtggtttcatcagggccatgagacctggagctgctctgcagagccagcctggctgtccagagtccagggacaagtggtggccaggcctggcctactgcatgggacgcggggacctcagttgcagacagctggccaatgcaggcatccactcttgctccctcgcaaagcctcatggaggggaaagccaaggaatttttgtaaaggcactaaccacatggtaaagggagcaggacaataccaaaatcgactagtctggatgctgaaaagcaggtgacagccaggggccagcttgggggcagtggtcctgggagcctcggcctcgtttgtagaggaccagggcaggagtgctgggccccagcccaggaagcctgcagtcaagagtgtgtgaggctgtgagggcaggctggggtgacaatggggctgaatcccaagaggccccagaccttggaccccgctcagctcccctacactggcagccagtctatactccacaggcaagggagaggggaggagagacgaggctgagggagggaaaccacaggaaacattctagaacactccccagctgaag

SEQ ID NO: 53407 - DNA, 3809 bp, Homo sapiens
ttgcttcgtattgccacatgggggatgggaaatacctctttggttaacatcggcatcacacatgtaaaacaaaatcttaatatacaatccacacccaacttacaagccatttaaaagtgttcttaagcggcaaaaactgactttaaatggctctgatgtttctgaaggctctactgtaacacttccatcacaaaggggcgagccggatcacacacactcctctaaccctcggcctctgttgcaacatcctgatcgcccaatcaagaaattacaaacaaacaactctgctctttggttcaaatgtaaatgtgtctcttcaccagcatcgctaaggaagccttctagccggtgaggacaagacacgctcatttgaaaagttaagagtcttacgaggggtgcctgggggtccagcctcccgccccgggaaccggcgtcaccgcagcccagccgggtccacgtcagtccctcgagtcccacggcggcccgcgccgcgtccggccttccgctctggcccgggggcccggacgtctgtcccctcgaccggccccggcgggacccgagatgcaccgcccgctcggggctgggcccagccgcctcctctcctccgcgccccgacctccacggcctggctccgccggccggcctccgccttcctcctcccgcgctcgccccctcacccgcgctcgccccctcacccgcgcggctgagaccgatccctcaggagccgcgggcgaaagcccacccgacgctggcgacgagcacagacacctcagccgccgcagccatcttggcacatccggctcgggtctccgcggccgccgcgccgccgacgtgtccggcttacgacatcagcgcgcgccccgcccctggccccgcccctcggctcgtcggcccagacgcgttctctttcagcccttcacagcccatccctcggccccgcccctcgccggcgtccgtcctccccgcctcatccctctgtcccgccccctctgcccccgcccctcgccggcgtccgttcttccccgcctcattctttcgtcccgccccccgcccgtcttccacgccttatcctgtagttcccgctccccttggccccgcccctcttccgtcgttcctcgcctcattctttcgtcccgcccccttagccccgcccgtcgtccgtctttctccgcctcatcctgtcgttcccgcccctttggccccgcccctcggccgtccttccccgcccgtggccccgcccccctccggcgtccgtctgccgcctcaccgcttggccccgcccctcgccacctgcccggccaggcgcgccggggccgtcccagtacgtcgccctgtttacgctggctctttctcccagtcttttttcgttttaagatgtgagaagagatgggattcttcaatcaaggccacaagcgggaaatcagtctgcaggaccgatgccagcaggctcacgcaccgagaacggctactccgcccagctgagaagcgcggggccctgacgcgggcgcgctcctcgcattcttccgttgggctgggaggctggagggcaggcggcggcggccgcgcatgcgccgggagcggccggagctgcgggacgcggagggccgactgcgcctgcgcgctggttgcctggttacggcgtggccgcgggcaccgagcggcgccggaagttggtcgatggctgccgccagtccctggccagcgtcctggggtttccccgacgcatcctctactgtcccttcgctctgcacagaggcccgggcagggaggggcggcccggccaccgcgcggagccgggtgtccgccgactcgcaagggggacgcgcgggctcctcgtccccaagctccgccctgcgcctttgctgcgccgggccctcccaggcccaccctggccccagccctgctgtcctcccggggaggtgcggcctactcggttcgttcccccggccgccagccccacaggggcgctggggtcccagccttggctgagtgcacgtcggtggcgagtgggcccgggcgctcgggcggccagagcgacccagcggaggggtgaggcgggtaggcgctcctgtgcctgccacggccaggccaggcagcatccacgccctcccgcggaagatcgcagggaacaggtgggcactatcctctgtgccctcatttttcggaggagccgagggaggctgagcggttgaggaagcggccagccatgccgggcccactcacctgcacacctgcctggcaagggcagggaagagccgcggccttcctctgctgctccttccagagggcaggcgccgtggtgggggtgcccgcccgatggcatcgcgggaggctgagctcccagcagcggctgaggtcctccctgggtgggagccacccttgtccccagctgggccggcggctggtgagggagggggtgatatccgtgccacgccagcagggccgcaggcggtgcagggagagcttcagtccggctgacgtggcaccagggccaatctgctcagctaacatttgcctttcaggagtcagattcctgacctgtttgaacagagttagggagcacgtggtagggcccagccccagccccgctgcccccatctgcttcttcccagtggtcgaggcgctctgcaccctccgcggaaggaggtgtcattgtttgccctttccaaagagggggatgcagaggtggatgctgcctctcaggcgtggggctcgccttttgccgctcgcgagttcaaagaacccaagagccaggagcccagggctcgaccctctagggtcctccgaaaccctgtggtcccaccggggtgggcactaagctatgggagagaccatagctgcagaaaccaaccctgccctaggcataaaatgcaaggtctctggacctcagggcagggatgttagacagcggcttctgttggctcctaggggtgtgaatcaccacatcacctgcagggggcgcggctgtctttcttccccctcttctccctaatcctgagtgcacggagacagctctcagcagtttgtagcctgatgtggagtggagggttcctgcaccctacacccgagcccatccagcctctgggccatagacccttccgttgaaggcccagcctgcccctgagacgctgtgtgccctttttcaacttccttagtctctgagcatcaggtcttcatctctaagatagagcaagatgagcacctaaacgtttcagggctgaaatggggttgccaggacaacaagcatggcaggggcgaatggggacatcaggtgactgactgcgagccagcagaggcctccacccagtgctgggaggtgtcccgccggtggtggccatcactattcctggtggggctttgctgcttttgcctgcagcatccgctggtttctccattctccaagtctctgcccctgctcacacctggaggctggacacaagtgtcaccacttccctgaacccccctaggtgggctggaatcagcatctggtgcaaagctctgtgaccactgctgtaccacattatgcagagcacacaggacaggctggtgcacctccaggctgtgccaggaaacccgctgcctttgcgtcaccacagccttggtcacagcgtgaccttggtgcctccgacgggtcagctcctcccattagccatgctgtccagcacgggggccgctggtgcttgctgtgagactgagctgggctctgagtgtaaactacatggtaggttgtgaaggatgcaaatatcgaatcaatcattttttattgcatattaaaatgacaatatcttggatgtatcagattaaacaaa

SEQ ID NO: 53408 - DNA, 408 bp, Homo sapiens
tcctcctccccctcctcctccacaggctgccagggccccctcccccgaggtatggccccacccaggcctccaaggcagccagttagctattaatccactcaactcccgctggttcaatgatcaacccagaaaggcgcgttcggcaacagccaaacctgcagccggttactaattgccgccctcccgagatgcctttgaacccccgttgcccttggagctcccacctgctcggcccctccctctgagacattgccccaccgccaccaccccgtccgttctgtctgtctgctggaccggagcaaaagcaggcagccagagacaaccaaaatccaaaatgcaaatcagcttggggagcacccaaaaccagaccccagccctggcgcggtggctcacgcctggaatcccggc

SEQ ID NO: 53409 - DNA, 3010 bp, Homo sapiens
ccacactcagctcccgcccgtgggaaaatgcgacagctgctcgcccgctaccccgcccgccaacaaagcgccggcctccgcctcagaatcagagcggcccattgtggagtcggggccgcctccaggggcaccgggacagcaccctggggacgcggccccgcctccgccgacacccaatacctgcctccgcgggcgcgcatctccagggcagcccccatacacccacaggagggggatgaaggtcccccattcggaaggaattcgaccccatctcgagaagggatcaattactcaagcccctccctccccatcttaccggggctgagaaacgggggaggggggtgtgacacagagccgcactttctggaagaggacagataattctcgcctccaactctcggagaaagagtggattaatcactcgattccccagagaccccgctcgctgtgcggcggggagaaatgtaagagccccccacccgcgtcccgctctccgcccccaagctttccaaacttcaactccgcaaagcaaaaggaaagttcagtccccccgggcgcggcggcttcttacgcaacccctcccccaaactgagagccgggctggggggcaccggcgggcggggcgaccgggagcccggggacccagcccggccgcgcgggtcagtgaaggcgaacgcggcgccgcagagcccacactccgcgccccaacatccgccccggcgtgggccagaggcgaagaagaaagaagataaatggcccggagaagcaacaggaaaccaaaaccgactctattcaaatcgaaaaatagtaggcagcccgcccgcccggccgaccggcggcaagccccacgcgcggcgggtgaagggcgggcccggagtagggcctccggggccccagcaccccacaccggcctcctaactcggctccaggcacgggcggcgcgagtccgcctccacggggggatcgagggggaaggtcggtcctccctgatcccgggactccagaaccccacgccccgggccgcccgcttttccctctccatgctggcctccccgccgcccgctcccagccgtggggcgcgcgcgccgggcgccgccaaagtttccaaagggcgcggaaagtgggggctcgcgggtgggtgggcgcctacctcgtgcggcgagcgcgggcagcagcgccaggcagagcaggggcgccaggagcggcggcatgcctccccaccggctgccctctgcgcccgggcggcggcctcctgcgctggccggcggggctgggacgcacacgcgcggcgtacggtcccggggcggcggcggacggtcccgccctctcttccccggctggctggcggcgctgtgctctcgcaggcccccgggcccggctccgcgcccggctcgttccttcgctgcgctcgcgcccgcgcccgcgccccgcgccccgcgcccttgcgctccctcccgcggccgaggcactagtgaggctcagagtcgaggtgcgctccgcccccgccggccccgccccgcccggccccacccccgccggtccccccgccccctccgcggccacctcctcccgcacgccccgtccgcctttgcgcctccccgagctgagccgcgcgtcccgagcccagcctctccggggaggagggacccggcggcgcggcgtgggtcgggagcgggcgcctgggactacttctcgtttgaaagttttcagaggccaaaagtttgagccggggctgcggaaggatccggctctggcggttgccgcgctcggcgacaactggcgactgaaatttgcatgtgaataagcggaggagcccggggcggaatggggagggcgaggccgcggacagccgtgtgcaccgtgcgctgggccgggcggggagcagctgaggccacgttgggggaccccgggcccggggcagggctctgggagagtggcctagccgtgtgtgcgcccctagcccagcggcttcactccctcccgagggccccgtggccgcggctttaggcgtccagaggatcgatcgccgccagacatccctggccgtgattgcccgagcacttgaccgcgagggatgggggcgccgcggcctctgggcaggggactccgggcgccccgagggagcagccgggaccagtgcctcgcggacggattgtgccccgctcccccaagggggacccgcgtcgacacgctcctcggtcaccgtcctcctcctgcccgggcgccgcctgcctaaggtggccccagaaagcacaaacgggtcgggcggatctgccgctggcgccggcgcagcccttcccacgtgctccttccggctgatttatttctccaccacgatgccaggcacgggcaccctgtgccaagcctggttaagcgccaggagtccaaaatgcctgccatagtccctgcgcaaagttcacggcctcgtgccagggacagacagcgccccctccccaccccaacacagggtggtgagtgcgatggcagaaggcgcgtgtcccggcgcccctcctggagtaggagggctaagcctgccctgcggggagaccgaaaggctgggagggacctaggactgtgggggcctggggggagggctgcagaaaccccagagcatggtggcagaggcaggcacagaaagcaggacaaatctcacacctgaccccagcaagcctttcctggcacacctcttgccaaatgctgagcactctggaaacagccagtgcaggcggcctgtcccgcccctgtagctgctgctgggagcctccctcgcctgcgtcctcccagaatctggcctcacttctgcaggcctggggtaacatcttggggtcagcgccccaggagaggaggcgcctggaggcagcagagatgtttatgtaacagcagccaggcagcctggaggagcagattttccatagaaggaagcgcggggctgtgcagctcccaggctgaggactctgcccaccacgacgtcctctgctcctggtgggtgggggtggggtggggcataggg

SEQ ID NO: 53410 - DNA, 1941 bp, Homo sapiens
gggccggcccttgttctgagaacagagaacggcccttgttctgaggaggctggggtctggaatctgcttcctggtcccctgctgtgtgcagacagccaccgtcacccaggcccaggggtgcctgcaggtgctgggcatctcaccctggcccccacaggggctccccatgccctgcacccctcggtctgtgccggggacttccctgctctgctgttgcaggcctcgtcctttgccgagggggtctctttcccacgtgtccctgagactcctcagccatcccagaggctctcggccgtctgagcacccctgaccatgaagccttcctggcccactctctgtgtgtgaggcagagcccatccctaccattccgacccacaccagaggctccggaaggtttgctgactgacctgtgactgcaagaagctgaaggaatgtgggcgcagacccggcaggggcttttcttggtgcaaagtcaactggctgtccatgcaagcctgctgctgtggccagccctcccgccaggcgcctggtaccctccctggacccagttgccaggacagtgatccccagctgtggccaggactctgcccggggccctgtctactcagtgtctccagtggtccccatgcagaaactgccccccttgctgcccatgaggcatgggatagggtcagcatccgagaggcaggccctgctgttcccctctgcacagaggctgggggagtgagttgcccgggcaagtccccgggcaggcactgggcctcctgagcaggtgagctgagaaggccccagctggtgtaggcctcgagagctgcaggactggccatggggcagacctggcattgtcattctagagctgggcctggggggtggctggtgcagtgcagatctcaggtggaggccacctgcccgtcctttccacgtggctcagggctcagacccacctgcctgtccctggaagcccctagactgctcagagcacagacctcagtgggaaagacagtagataggcctgggtatggtctcccagccctgagaagtggggagcccactcagacctttccaggaccccaggtcccctcagcagcccacagagcgtgggtggagcctgggctggggttgggtcacttgggagccaaaggcccatttctgctgcttccagggagtcccagggagacggcagaggcagtgcctggctggggccctggttggcgtgccgtttgaggggtgcatgcactgggaagttggccaggcctgcccaaatcagggggcttccaggaggagagacatcaggaggatgggcacagaggcggcttagcaccagggctggcacctccaggtaggggctgtggggggctggaccagacagggaggctgtcacgatgcctggctgttggatgggggcacagaggctctgagtggggtggcagagcttggccaccaggtccatctgcaccccccatgccccctcactacccccagacccccatgatcccaaactactcagtcccagggacccctgcagagcctgtggtgggggtgatcttccaccctgcctggcccctgcccacctcacctcagaactttctccaaaaagtaagagccccgggggacgaaacttcgaggctccaccccttgggctctggtacaaaccccgagcctcctccgagggctgagtcactgggaaagccgggatgggctggcccctccccctccctctccttccttcctccttccccctttctcggtctccctctttttctctttgctttacttctctttcttgcctccctctctccctctcttctttcgttcctttcatcttcttcccttcctccgtctttgcctttcttcttttctgagggtaaaaatagctggaaaacccccttaaaaaagtttattttaatcttagagggacaatgttggtgtcccaaagcacag

SEQ ID NO: 53411 - DNA, 960 bp, Homo sapiens
atgggagcctgtagtcccatctactcaggaggctgaggcaggagagtggcatgaaccagggaggcggaggtggcagtgagccgagatcgcgccattgcactccagcctgggtgacagagtgaaactccatctcaaaaaaaaaaaaaaaaaagaaaagaaaaagaaagtagttttttttccccctatgctaaaaattcaaacaaagcaaacaagcaaatttttagagaagaaaattccattggccacaatctgtagcagggagagctgttttttttgttttgtttttgttttttttttgaggcagagtcttgctctgtcacccagactggaatgcagtggtgcaatctcggctcactgtaacctctgcctcccgggttcacgccattctcctgcttcagtctccaaagtagctgggactacaggtgcccgccaccacgcccagctaattttttgtatttttagtagagacgggatttcaccgtattagccaggatggtctcaatctcctgacctcatgatccacctgccttggcctcccaaagtgctgggattacgggcgtgagtcactgcacccagcctgagggctgtgttttaaatgaaacatgcacctctttgctccttgatatggtttggctctgtgtacccccacccccaatcaagttgtaatccccacatgaaggagggacctggtggaaggtgatttaatcatggaatggactttccccttcgctgtctccctctcctgctctggccgtgtgaagacagaacccacttcccctttgcctttcgccatgatttcctgaggcctcctcagccatccctcctgcacagcctgtgggactgtgagctgattaaacctcttttcttcataaattacctaattctcaggtagttctttatagccgtgtgagaagagactaacacagaaaatggtactgggagagaggcactgctctaaag

SEQ ID NO: 53412 - DNA, 1206 bp, Homo sapiens
tgagtgcgaggatgatctacagccccagggagctgcctgggcttgcggggagggtctgccagggctggggggggaaggtctgcccgggctgtgggggggggagggtatgccagggctgggggggagggtctgccagggctggtggggagggtctgcccgggctgggtgggggagggtatgccagggctggtgggggagggtctgcccgggctgtggggggagggtctgccagggctggggggggaggttttgccagggctggtggggagggtctgcccgggggaaggttttgccagggctgggggggagggtctgcccgggctgttgggggagggtctgcctgggctgtggggggagggtctgcccggccccctgtgaatttcgggcctataaggtgccccgggtacggcagacatttttctcaccattaatcatttccatacctacataagatgcaaacgaggcgaggtgagatgtctttctccaccctgcacagcggatgggatgggcccaggctggcctcccccaggctgctatgcgtgggaggggctccctcggcccttccccaggtgctgcagcctctgtccctttcactgtgctcagggccacaccaggcccctgaggctggagagtgcagtctccgcctctcagaaggggctgggtggcaggaccctcggggaagccctgctctgtgactgctgatgagcccattcgcccgccgcgcctcagtcttctctcctgaaaaccaggcagcgcttccttccttcaggggggctggaagagcccctggctcccgggcggtcctggggaccggcagaggccctcagacctgagcacttccctgagcatgaatgggaacgaccaggaacgaagtctgacccaggccacgtgcggagaagccccgaaaaccctgtactctgtgaggcagcagacacccaggccacacgcggtcacattccattgccatgagacgcccagagcaggccagcccggggatccgggtgcagagagcggatgggaccagggagggggtgatggctccttagcgggtagggagctccttaaaaaacgtttgggagtcagaggcagcgccacacgacctccggctgcaccgaatgccacggggctgtacggttttgatggatgtgagtttcaactcaatttgaaaaacagaaggggtgcaggtcgccctctctgggcggcagc

SEQ ID NO: 53413 - DNA, 773 bp, Homo sapiens
ggcctcctgcctgcccagctctgccagtcgctgtcacacaccgatgcttgcagagacataacagggtgtggaggtgaccgggtggcctggcaggacccccaacaggcacagtcacccgggatccggcagaggacaccttgtcagggcaggccttgtgtgcaaaaacaggtgccgcgggcccagcctgcccagcctgcccagcctggggcccggactccacaagatctggggctgcacccagccccctgccagccccctgccagccccctgccagccccctgccttccctccattttcaccaccacatgcttctctctctcctcgttcagtctccctcccaaagcttcattcctgcccgttcatcaagccgtgtttgcacatgaggtgctgtgccaggccaaggacctcactgccagctgggcctggcaaggagaggggaactgactcatcctgggagcccagggtggtggggctttccccacttgggccagggtagtggtgaggaggctgtctccggagaggctgaggtgagggcaggagtagcgagaagatttagggtcgtggcaaggctggcctaggccctgtggggtggcaggagagggcagagcccgggactcgggtccccacttccagcggaggctgggctgtcaggagggccacaccctcatccactcctcagtgccccctcgtccactccagaggacacagtggtccctgcctcttggcctcccacccttggctcacagcgctctgctgggaactcccctcactcc

SEQ ID NO: 53414 - DNA, 1697 bp, Homo sapiens
ctgagccacagcccaacagccgcagctgggccaggacatgccggctctggacgcaggagcacggggcagtctgggcagtggagactcagcctgggcgccaggacactgcagcccccacctcagatgtcccctggggccaaggagggagtgtgagggaggcgggtcccaggagaggaggcggaggcctggggtgcctgaggtccttggcctgcccctgctctcccggctgccactttcctgcgggaacagcttcctggctttctggctgacggcacgttgggagcaaaggtggggaggccaggagaccagagccctcgctggcacacatacgctgtccgggtggagatgagcacaccttccacctagagaggcatgtgagttgggccaagcaatgggcaaacatttatggagcgcctaatgtatgccaaatccagtggggggagacagggaagaactggatgcaccaactgtcctcaaatagccagaaaagggcatcagtagggggtgccccattgcccagggaggccgagaccccttctgggtgaggcagtccaggaggacttcctgaaggaggaggaggaagagggggaggagccttagggacccttggaggctaggcacctctctggatctcattttctctgaggtagggagaagaggccagtcctgccacgggaggaagagggggaggaattttagggacccttggaggctaggcatgtctctgggtctcagtttctctgagctagggagaagacgccagtcctgccacgtgggtttggttgggttcttttcaccagaaacagatgagcttatggccaggaagcactggagcccccgtgtgcatttccccactttccagatgggtgtaagcgtcatgtccctgtgttcactggtgaggccggtggtctggggactgagccctggcaggcacagggagccgccttgcactactggcacccccagaggaggctgcggtgcttggccccgacccacagagcccagctgcttcagtgacttgtgaccacagagcagtcagaggccggcacctgaccagggcctgggccagcggcgctcaccgtccagaggttgcgcacagagtggagaggaagccgggccgggaactctgtggtgcaccgcggttgtttgtgttgacccaggaacttgtgcaacgaactggggcccggaaggctggctgcccatggccacacgcaaggggcaggccgaggggccacccaggaggctgcccaagagccagggtggcctgggccagtcccaccaggtcgaacccacccagctggggtcacagtccaagaacagtgaaaactgaacatctctcctggccccgcaggaccctccccagtctctgcccctgcatggtgagggaagaagagaggcaggaggcccgtgtctcccggagtgacggccttgcagaggacagcctggagtgtgcaggggagaggaagtggggagggggctgcagaccctccctcaggactcccgggcctccgccaggctgacctggggttgggggtgccgcttggaccgtgtctgtctcagctcccctgacagagctcgggccacagaccccaaaggcccagccaggccagttattgggcccctgccagacccaggccggaggccggagaggggtgtggggcatttccagccccccacaaccagcgcctgctatctgg

SEQ ID NO: 53415 - DNA, 2771 bp, Homo sapiens
cccgtccagccatcacccctgcccactctgttcctggggaaaccgaggcccagggagatacagacccatggctggcttcctgagtcacagaacctgggggaagcgcccggcctctcccaccttggtctgcaggcctgcaaagccctccatctccccggcccctcgccctgggcaggaaggcgggaacggggacactgggctctggggaagggaactcacaggttaggagctccatctgcaggaatctcgtgctgtcctcagagctgggcagggtgagaggcaggtcccctgggaggcagcccccgacacccagccactctctggcagcctcccaggccggcgtgggaatgtggctggcgggaacggggcctctcccctggggaatcagctgctgggtgctggccaagaacgctctgatccaaagaggaagcaaagttcagctgcagcaacttgacccaggacagctggggaaaaatgggcggccggggcaggggcagagactgtccagaccaggttgaactccagcccctgccctggtctgatccttaatctcagctacagtctgagccctgatccgagctacagattaagtcttgacagacacagtctgcgtgtctactccagctatggactcatccctaatcccagctacaggctggcctctgatcccagtcacacactgaaccctcatcccagccatacaccaagtccttaccccagccgcagactaacccctgaggccacctataggtcgacccctcaccctggtcacagactgagcccccatcaccagcccaaattgacccttgatcccagactaagctgagccctggtcaaaagcatagactgacccctgatcccagctacaaactaaactctgctcccagccatagcctgagccctgacccaggcacagaatgagttcccatcccagccacggggtgacctctgacctcaatcagagcctggcttctgatcccaggcacagactgaccctggctccaaaccaaccttagcctcagctctgcggatctccaactcaaactctgcccaaaccccagactgagtccatcccgagtggcatttgccgagggcgagcgcctcccgccactctggaagtgactgtcgactctgctgggccccatcatgcctccctggctgccatgtcccctcctggccctgcactttcaagggaactcgggccagctggagcgggtgcaggagggaggccaggcgcaggccggagggcagctgagggagccaggcaggccagtgtggggctgggaggccaggtcgccggcttgccaagtgcctgctgtgtgtcagcacgtcccctccaccacctcaactcttcctagccagcaccaaaaggtggagagccaggctggacggggcagcaacggcaaagcagacagcaggtgcatggtggccgagctccaaccatgtccatccaaacccaacctggttggcccttgctggagacaaaccccaaccccgtccggcagatgcccacctgcagggtgggactgcgggggtggcaggggctcctgggttggtggtgtgccccggggtgccggagatgcctcggaccgggaagccagagccacgacgggtcggggcaggggtcggggcagggcggggcaggggtgggggcagggcgggggcaggggtgggggcagggcgggggcaggggtgggggcagggcgggggcacctgcactctcagcccttgcagctgccagcctggggtctggtgctgggaatcccatgctgggggagaagaagctgtttattgggagctgagcgatcctctaatctctgccttatcgccgcctgtttgcccagtgagagtgcaaacacaggggtggaggtcacagggctgtggggaggggcccacactatttgcctgacttctcccagtggtgttaaaaatagcacagagctctgggctcagaggggtctacggagttcccgcctggcccctggctcacgggcaccagctgccaggtggaggcctgaggtattgacactccccggctctgtgtttggcttctgatagcggcccaggagggcgtggctggaggggccctttctcaagaaaagcccagagaagtggtgtccagccccctgccctgcccacctcgccgccccccacaccatcccagcccacacctggactgggggcaggggggacccaggaagcccagctggagcacggggaggggctggaggctggctcccagctccctgctgctgccaggactggctggggctggggtagtgaagccccagggagaggcaggcccagtgccgagtctgagcccatccagggagccccgtgctctgcccctagaaggcagcattgcctggtggtggcggcacctgaagggttccatgacctggtgcagccgcggaactgtggagcctgtttccccagctgcaaagacgggtactcatggttcctacgtcctgaggtgtggcagagatggatgcaaagctcattgcaatgcaggcatcagcactgctccacagcctccaagccgaggccctgcctgtcctagcgtgcttctcacggtcatccccgcctggtggaggacacaggctggtgccggctcctggcaccccgaagaagatccttttcctttctgagttgaatgagatttaatcaccctcattacctggtttacagtgcctctggggtgcttcaaagctctcctggcaccagcagcgtggggagccctccctgcccccgggagacggatgttggctgga

SEQ ID NO: 53416 - DNA, 719 bp, Homo sapiens
caggattcccggagggggtgctggcgggccgcggctcagaggcgcgtttgcgtcagccccgggttccagcagagtcactgcccgcccgggggcagctcgtccgccgcggggcctcagtttccccgtctgcgcaatgggggcggggcggggccgccaggtggggcggggccgggggcggggcggggcggggctcggggcccccacggcgcgggctcgggcggcagtggcggcggcgcgtgcgcgccccggatccggcggtgagtgcggagcgagcggggcgcgccggggtcggggtccggtcgccgcccgggctgggtcgagggcgggacccgcggagcccccgggggcggggaacctggccgcgcgcggagctgggggcggctccgggacgaggcagcgcgaccgctggggccgggggcggagcgggccggggcgcccgcggctgggtcgggccgggccgggagaatgggcccagcggccccgggaaccggctccccctgccggcggcgggcgggcgggcggcgcggcggggagggccggggtcgccgcggcccctcgtccgacccggcgcgactcagcgcctcggggcccagcctgtgccgcctgctccgccccccgcgaaccccggagccagcagcgcggctgggagggggcggcgggcaggtccgtctcgctccgcctctgcgccctccctcgtgggccccgcggtccccagccct

SEQ ID NO: 53417 - DNA, 2600 bp, Homo sapiens
ctccactggggacgtcagcgccagtcaccacctgggccagccctggagtgtgcgctccccgggaccccggcctgggccacctggcccacatcaccactggtcacacacgtctggctgagcagccagcaggcccttctcggactctccatgctcaccatcaggcccagggtcctccttcatattcctggagcttctggggctccgttggaagccatgactgtaggcccgttccagcagcctcagtgccctcccagggctggcaaggacagcgagtgcagggagctagcaaaccctcacccactgcccctggaaccacggggaagggggcctctggggccacaatgcccccaccccaggccattgcaaaagccactggctgggcagtccaaacagggcagggagaaatgtagcaacagcctggggacggctaacagggagagggggcaggcaagagccttctccagcagccaccccgcccaggagcaggcagcccccgccgtctttggcagcccagtctgacctctggcccccaaccccagcctggcaaaaccaagctcccaccttctggaaggcgtccaggggaaaatttcagccccgccgaaccctagtcctaactcttccttcccttcgcttggaagctgggcccccggagctgtaggccaggggcgcgctccccagcacggaagcaggtcccctccgggtcccccacctccctgcgaagaggaaagggagagaaaggggaacccgccccacaggtgcgcccatcaccgggcggacagtcaggagggggtcggagggaggccgaggggtgcccccacgccgtcgtgcgccctgatcaatagccctggggcaagtccccgccgccccggcctcggtttccccgctcaggaagcagggctgagcctctcccagcgcggaccggccccctttctctccgaaagctgctccacccccggaaccccacgccgggctgcagggacgcggcggaggccgaaaccggtgtagacgcccggggccagggcggggggtggggtgctgggcactgtgacgccggctccttgaccccgtgactccgggaccccctgactccgggaccccctcctgtgcctgccgccggcccaggcgcgctctccccggagccccggagcggggcgggacgggcggggcaggaaggagggaagcccagaagaaagttagggaagcggaagcggcgcggcggttccccggcccctcccggcggcccccggccttgcctcatgttctccaccgtccggccgccgtggcgcagcaggcagacgagcgaggccacggcggacaccgtgaagcacagcgcgcagtacagggcgaccttggcgtagaactcggccgcgcggctcagctgcaccagcagcagcagcaacagcagcgccgcggccagacacggccacagctccatggcccggcccggcgcccgacggcgccgccagctcgctcccgctcccgctcccgcttctcccccgcgcgctcaggccccttattgcgagggcggcggggctgggcggggcggggcgcggcgtgggggaggagcgcgcggcagggaagggctaggtgcggcgccccgccccgacactgtccccaacaacgccccgacacggtcccctcaccaggccccgccccgccactgtccccaaccccgccccgacacggcccccccttcccgccctgggtcacccggcccggacctcccctccacgctccctccccacagccttctgccaggttaccgaggctctggcgctctgctcccaccctcccggtcccaggggacccccccatcatggcttgccggtggctcgggctctggcgctgccccccatggtctgggcctcctgccccgcccggtgccccctccccccgctgccggggcagccacaggctcccgcgcgcagaaccacagctccccaagggcgtaaaaccagcggggatgcgcccgtgccaggccggtggccacgcaaagggccgccggaaccgcccccgagtgaccagtggccacctggcagaaagcctggctcttagggtgttctcggtcccctgcggggagactcgtgggggcgcgcaggccaactggggcgtgtgtctgggcggggctgggttgccccaccctgggtgccagaagtagccttgtcaccagggacgctccgggggcaggcgaggtgggtgtcaggtggcggcgttcacatccgcttggcagcacggccagcgtggcagggcaaggtgcagctgggacaagggcagcagtcacctggcccggcccccacccggcgtcccacctcagggagcagatggagattgaaaagcagtttcctggggtccctcctcatagggactcttgggtttgctgcagttgcgggagtgctggccgccctgcgctctaacgggtcagcaggggagcacggcccctcttttttcagatgcagagttgagctgttaaaacatttccctgaacattgtaaccaccccccaaactgtactgagagaatgacaaatacagaaactgctcttcaaatgaatggggaactgcggtcctgaaggacgtggggtctcgctgcctgggctcagca

SEQ ID NO: 53418 - DNA, 1382 bp, Homo sapiens
agcctagaaaagagattttctctaaaatgagtgcttctcacccagggagggctggcatgggctctgctgggtttatcccaagagtgtggtgagggactgggagcctggttctgttgtgtagggatggccagcgccctgtctgacccttgagatgccctcagctaccaggggcagggagtgctgggccggtggtggccgtgcggctgtacccacccaaggacagctgagagtcctcctgggcatttgctgggacccggccagacagcgcatgacaccaggtgacagtgagagctgagttggcaccggctgctgaggcccggggagcccacacagctcagggagcgagtgaggacggaaggaccagccaagcctctccaattccaggaagcagagatgaagccagtgctgtgtggcccaggaaggactggcaggggcagggcagccgggctttgaagaccagtccatctggctttaaacctaaaccctgagttagccaaggcaccagagcctcggtttcctcatctgtaaagtggagacgtgacgctcgccgtgcccagtgtgtgacaggaggcagctgccgggctggcggggcacatgggcctgactaggcctctccccaaagacctgccccggagagacaccaggacaagagccagggaaggggagagcttctcggcagctggagacacggggacgtgtggccagggggcagccacggcacagctgggcctcgggctggacccttcaggggctccttccttccagggaggacatcaaagcctggcttgggggctggacggggaggccaggctatgccgggacctcagcctgcacagagtggctgaggtccaagccgggcatgcctggggctctcgggcagagcgtaccctggccgacgggttgtccggcctcctggtgggtgtgctgggcgcaatgccattcccaccacctgtaaataaagcagcctgtgaatctttcatgggtttgtgcttaaaaatagatgaggtgagccctctgggctggctgcccagacctctgcagcaggcggggcggtccacactctccctagggagtcagggagggcgggtgagggctccaaggggcgctggccagggcacgtgggaccttgggacatatggccccagatgtaggagccaacaggaggtcacgcctttggatgtcccatccggagctcttaggtcacaggctggggtgggagtgaggggcagagcacaccccacagggtccttctcctgccaggatgatgtctgggctgggagacagaggacagaggtggatggagaggacaggggcggggaggcatcaggagacagaagggaggagacggcccagggaggaggggcccacactgcagtagccct

SEQ ID NO: 53419 - DNA, 3679 bp, Homo sapiens
ggcagcctccgagatccagacaatggggcaatgactgggacccagtgagggaggagaagaggatctggagcctgggaacctaaggctgtttcacgctgactccgtagaacaaaatcaaatggaaacacatcagctacaacaggaaataacctctccgtttacatagggcatataccaagtaaccagtggaaacctctggagcatatttagaccccaggcagttctgtaacagggctcccgaccccctgtgctcagcccggctcccactgcactgtggagtgcgcgttcatgttccacacgtctctgcctttgctgcttccttcttccgttgctttgtgcattttgtccaattctttgttcatgatgccaagaacctggacaccctctgccggacatgaggctgtgctgacctgccctcggctcggccggcgtctgccccacactctccattttcttcttttccatcccagagggttggggtgtctgagcccaagttgaattccaggtggagctgtgacttaaatgtcatcaaggagactccagcaggagtccagaggccacagtgagggcgggcgcacggcaggcagggagagagagaggagggcaggacctgggtgaggagggaaccagaggagctgccccgggcgcctagcccagctgtgcaggttgtgcactgcacaagcctagagggtgtcagcaacactaactacacctgcagccgtgccttccggagcagaggacacagggctctggcctttgacctataccacgccccttaccaccccaaggcctcagcacaagagccctgagtgcaggtgagtaggtcaggtcctcttgcctctgggtaagaggtgagggttaaggtccagcagctcagccacccagctcccaccctccccgccctgccgcaccctgcctgagtcacagccccgtctgagtcacagccttgggcaggtgtggcagacggtggccatccctgccgagctgactgcagccctgcctgctcctgggagccgccttccgagagcctgcaggtcacctgtgctgcccctggcagggttgccagatttatcaaacaaaacaaaaacctagggctcaggttagatctgcacttcagattggcaaggaagaatattttggcataaacgtgtcccgtgtaatatggggacatacttatactaaaaaatgttatttgttgtttatctgaaactcagatctaactgggtgtcctgtatttcagctggcgaccccttccccagcctagggccaagtccagcaaggccgcccctggattctccccaaggcctctgcgaagggctgggcagcactgccctctggtggacaggccccgggatggggtagggtggggtggggtggaggcagcgccaggccacagggcagagggacggagggatgacgggggacatgtggccccagacgcgggagcccacaggaggtcacgcctttggatctaccatccttcgtccttaaagcgtccccaggggcacttgccacttgccatgctccaaccttccgcacaatccgagtcctctgatgagcgctgggctgggcgggtaccaccccaggaatccgcggcccctccaatactcagcagcgccaggcaggagcctcccagccccacccacggggtgcgtcctccgagcagtgggtgcccccgggccgctagtgggaaccagcatggagcggccctgagactgcggctctgcctgcatgactggagctgcacaggcgcctccgagcgtttgaggtgcactgaagttcctcccctctgcaagtccacccatcgtagtttctgggcttggggaattagttttccctccctccctccctccctcccttctcttcctttctccttccccattcctgccagtttctgggtgtccttcatccgcatccccggcgcccccagtttgctgttgctcaatggccaggaccctccgcacagggcgcgatgcctgggggccccgggccctttgccttcaggggctccttccttgataaaaatacattgaaaattatattttatgagtgtgttggtgtaaagacagatacaatcttccactctaaacattcatttccagccgggcgcagtggctcacacctgtaatcccagcactttgggagttcaaggcgggcagatcatgaggtcagcagctcgagaccagcctggccaacatgtgaaacccagtctctaccaaaaatacaaaaattagccaggcatgctggcaggtgcctgtaatcccagctacttgggaggctggggcaggagaaccgcttgagcctgggaagtggagattgcagtgagctgagatcgtgccattgcactccagcctgggcaacagagtaagactctgtctcaaaaaaacaaaaacaaaaacactttctttaaatgacattaacctcgccctgttgttgctcagtcacctgtataaataaaggcagacacattctcttgccagcacactgcactgcccagcactgtggggcctggctgggcacagtgcccgggccctgggccttcctcctccccagcctcccagagaaccctgctgagagcacctggctgcggccctggggcgacgtcaggtggctctgttttcacgccaccttcttaataagcaggcagaagccaggcgggccaggagaatgtgtcctagcccgcaagacagatggtcaagaggcctggcaggagcccagtgtctgcctggtgagaccacagctggtcaggagcccatccccacaggcccagggtcatggtaggctgcaccccctggggaaagcctgccttcagggagctcggccttgtgggggagccccacacgtccccccaggcaggcacccgggtcctgatccgtctgagctttaggtgaaaccccccttccctctgtgcatcctgctccatctcctaggctcaccttctgtcgaggagggctgagcgtcccccgcggagtcgagcacagcagggccaggatcttctcagggaccccccgtgccagctgcacgcacggctctccgcagggctggtgaacctgttccctggaggaatttacacaccacgggctcacacggccagtgccgatgtgcactgctccccttacgtgacatgggacggtgacaggtgttcggccgcctgctgtctttgcacgtccatgtgccctgagtgtctccggccagggccacctggcaccagctgctgtctgtgccacagcaccggttctaaccagccccgccgaggggccccgggcgcccaggaagccacacaccaacactcccaccaagggctgtgggttgcacagaccaagcccagaagcccacgggagggcaggaggtgacagatgctgggaggtgagggtccctggggccccctggggcctggccaccgcacaccctgtaggacacactaggtctagacaggtagactgtgattaaaacacaataggaggcctggagattcgacctggtgcagaacttccctgggcgacaccagaccctgcaacacaggccctcagcagattctcaccgcagccccgacagcagggtgggctccaggctgtgcgggtgaacagctggggtgtcaagaggaggagctgcccctccaagtcacgtggttgaggccgtgcagccaggactggggtctcctaggccagtccaggactca

SEQ ID NO: 53420 - DNA, 2257 bp, Homo sapiens
cctccctggcctccttcccctccccctcctccctcccctccccctcctccctcccctccttccccctcctcctcctccttccccctcctcctcccccctccccctcctcctcccccctccccctcctcctccccctccccctcctccttccccctccccctcctccttccccctcctatcatccctctcttttcccctcttccctctcccttctcctccttcctccatccttatctcaacacccttgctggtctctcaggagcttctagagggaggaaaagaaggtcacagctccactgagggaccctgatcaggccgaagtccagccaggctcagggggaggccaaggggactctggactgggagcgtcaggagccgcagggtcagcggcctgagcccaaggggcccttcgtagcagagctgagcaagccccagggtgtgtgtgtgtgcacgtgtgtgtgtgcgcgtgtgtgtgcctgtgcgtgtcagtgagctctccggaaggagtgtgtgtgcatgagtgggcgtgagggagctagccctggcgtgcgcctgcgtgtgagagcgtgtgcgtgcgtgcatgtacatgcctccacccctctgctgaggtatggaatcagcggtggtcagcacggggacagagacaggcaaggtggttcctaccagatggggcttgggggctagtggggagcccagcaggaacgggtgtctgcatgacctgttggatcaggagggcctccacgaaagggaggtcataggagctggtcccccagggtggattgctcacggggccatcaggcgggtggttggaattcctggcatagggaatagcattggctccaaggcaaggcaggaccagatgaattctgggaccaaaagaagacgggaccagaggaggatgggtagggggctagtgaggctggggtcccagggaagggcagtctgttcccccgaggttgtgcctggggagagagggaagcagccccccgaagggccgctgccccagagtccagtcagcgctgccaccagggagtcccacgagactggggtgggctgcgtctctgcctcagctacccccaggggtaccctgctctctggagcaggttatgatagaaagccacccgttcaaagtctctgacccagaaatgtcacctgcaggaatctgtccccagttaataattaaggaacgggacacagacatagccagttgtgcaaacagtgtgtttcagaaaaagagacagtttagacatcctaagtacccaccaagagacacttggttgcataaattacggtcgatccaggaaacagaacattatgcaacttttttttttttttttgagacggagccttgctctgtcacccaggctggagtgcagtggcgtgacctcggctcactgcaagctcctcctcttgggttcaagtgattctcctgcctcagctccccagtagttgggactacaagcacacgccaccacgcccggctaatttttgtatttttaatagagatggggtttcaccacgttggccaggctcatctcgaactcctgacttcaggtgatccacccacctcggcctcccaaagtgctgggattacaggtgtgagccaccatgcctggcagcaacttttacggtggagctgaggtccagaatgtcctgaacttgaattcatatccctttaaaggaggtgcacattccccaggatcctggagatcggcctgaagacccacagggatctcacggtgctgcctggtcaccctcacgaagtccacgatgttggggaaaaaacagtctttttgatgcccaagggaagctttgcttttatgttagtggttacacaatttcttttacatatcatcagcaggaaaacatcatgtttaaaactttgcttagaacatgtgattccccaaacgctgcgtgcggaaggccgcagggtcctctgcctaggaaaaccagagacctttgttcacttgtttatctgctgaccttccctccactattgtcctatgaccctgccaaatccccctctgcgagaaacacccaagaatgatcaataaaaaaaaaaaaaaaaaaaagaacatgtgattcccaataatatggctgagaccctcagttcttttgaaaaaagcaacaaggtaaagtagcccctttatgccaaatgcatatgtctgtgcctgtgtatgtttttacggctgtgtgactgtgtgtgtgtacatatagtcaaaagttcccaatctgtcatgcctgtaatcccagctct

SEQ ID NO: 53421 - DNA, 2816 bp, Homo sapiens
cccagcgcgagagttagaaagcccactcacagggcccaccctctctcccagataccagcgaaggaaaacagatgcctgtccacaaaacaggagtgtgagactatcaaacattcaaacgttcacggggcagaacgctgagcgtagacatagcctctctaatctctgccacctaatgacacagatgtgacacggcagccacagctgcaacgcctctaggggcagtgtcctgttgaagactaaataatccgtttttactcccctggagacagcttctagcctcaatgtgaacacaagaccgactggtccctccagtcacttaagatgttgcacaggagggcttagttacattggaggattgaccctgttccagctccaatgcaccaacttacccaacaccccacgcacgtgtcatctccagtgagcagacgtcctagagaaaaaaagaaaccgcaattttgtataaatcttgcaaacaccacagaggagcatcacataaacactgcgttttttgggaggccgaggcgggcagatcacttgaggtcaggagttcaaaaccagcctggccaacacggtgaaacccgtctctctaaaaaaaaaaaaaaaaaaagttagctggcctagtggctggcgcctgtaatcccagctactctggaggctgaagcaggaaagtcgcttgaacccaggaggcagaggtggtagtgagctgagatcgcgccactgcactccagcctgggcaactgagactctgtctcgaaaagaaaaagactgcgttttgctgcatctggtctccaggaaggcggaccaaagaagctccctgccaccaaaaagctcactgtcacaagggccgttctagaaaaatccgacccatgttactctctccccttactctacgcttaatttgcgggaggggaagttggagttacaacacagtggccacgaaacgcgggctgctgatcccctgcaggtatcaagggaccaggaccacgaggcggaatgcccaccagacaaccgagcagtcctcctcccgccagaacagcctcccgctgagcagccacagtgacaaggaaaccacctgacgcagcataagaaatcaatttttcaaagatgccgacaaacatcttcccacagcctgagcgactcagggaagcagcggcaggagcggaagggtcgtgggtgaacggggtgcctttctctaagatccgaattcgcgcactcagctctcaccaggcttcccgaagcttcctggctggaaaccgcgcagggccggcagcgccctctccaccaagggacacaccagcggcgcctcctccgcggcccgggcccccatcccgcggctcgcgcggccaggacgccccaggtcggagcctgcccccaccccgcacccggaggccagcagcccagtcccctaggccgcgcagcgccagcgagagcgaggctgcagggcgaggcccggtgaggcgctcgagaactggccgggaggagaagtcaggcggcccacccgccacggcagcctccggcgcacgcagaggacgagaagggaagcgccgcgccttttatagcgcgtacggcggcccgcaagagtcaatccgccccgcccaagcagcgccccccagcggtccccggccgttcagctccccgcgcccgcacgtgggcgctgctcagtggctggcgggcgggcgtgtgggttcgccacgcagagcagcggcagcgccgtgacccgtgtcctgcaccgcgaccgccccacggggccagcagccagggccgcgccgtttccgacccgccgggtgccgggcacgccacggacacgcgcggctccccgttttcgcggaggattcccaggccgggtcaggaggacgctccacgagcccgtgggtcccggtggtcccagccattggggcggctcccgtgactgtcgagcagcgcccaccccgggcagcatggggctcccgcgacgcgctccgtcccttccccaccaggggctctgccggtgtcggccatgggcgcgggtacacaccaggcgcctaatgagtgctgaggcgggcgagggtcccggcaggcgggattaccgcggccaggcctgactagcgccctgtctgcgctgtgtcctgggacctcggtcaccgcgcagggcgggacaccgaggcctcgcggccaagcgactcgccgcggtcgccgggctgcgaacggtggagccgccgggactcggaccaggacgcgagctccagagcaggggatgacaggcctgagccgcaggggccgggaggaaggccgcgctgctgtcctggggctgggcagcctccgcattgcacagcgcagaccgctctagccttaggcctggaggggacaccaggagatgaggcttctggctcagcctgctctctgcagccacaggcaaaggccaggaaggccggggtgcgggagctggcataggagctggctccagctcgggtactggcttagagggagcaggagctggtgataaattcaactcaaattttcattgcctttgcaaagccagaaaacaccccagggctcctaagaaaagccccagcgcaggaccccaggacactttgcaactgggctgcaactgcgcggtctgaggctcctccctgtgtggccccaccagcaggctgggttctagctctggtgttggggctggagctggcaccacagcaggctccacctccagagatggtgcaggctctgtcctagcactgacacggttgttggagacaagctggctctgccccggggaccgatgctctggagctgcctctagctgtgttgctgttgctagtctttgccctgggaaaagt

SEQ ID NO: 53422 - DNA, 1332 bp, Homo sapiens
gcccgccttcgccccgcccagtcgtcgccggaggtcacagggcccaagctcctagaggcgtggccaggccccaggccccacccctctcccctgcgctctagcaggctcgatccatgctccgcccccaatccaaggccctggcccctccgcctgcacccggcaggacccgcctcttagaacccgacacctccgcctgcgcaggcccgctccccggtcctgtctctcaggccccgcccccaggtcgcgtctccaaagtcccgtctctcaggccccgcccccagatcacgtctcccaggtcccgccccctccgcctgctgccgcgcggacccgccctcaggcgccgtctcctaggccccgccccctccgcctgttccagcgcgggccggtccctaggcctcgcccccagatccgggccctgcccctccgtccgtaactgcgcaggcctgtcctctgggccacacccccaggttcccgtcccgcccttccgcctgcgcctgcgcaggcccgctccccgagccctgccaaccatggtgaacttgggtctgtcccgggtggacgacgccgtggctgccaagcacccggtgagaaggccggtctgggacgcgggcctcaaaccccagaagctgacctgagcgaggcggggggccggggcgtgggggtgccctcgtcagggaagagtggcggaggctgggggcactctcttgctaaggggctcagggcgtccgggtgggcataggggaggtgggacgtgtccaagcgcccagggtctcactcctccacagccagggtgtgcccagaggagggacaggagaggcggtgaaggaagagggcaggggatcgagccttcacccgcctctgccaccccagggactcggggagtatgccgcatgccagtcacacgccttcatgaagggcgttttcaccttcgtcacaggtaggctgcgtccaggtgtcctgcggctgggagagaacgcaccctcccgccctgccctgactccccagcagggggcgccaagtcacctgcccgcaggtgctgggggcctggcaaggtgggccctggctatccccgggtacaggttgatggggacctcggctctttgcaggcaccggcatggcctttggcttgcagatgttcattcagaggaagtttccataccctttgcagtggagcctcctagtggccgtgggtgggtactccagggcccctgcctgggctctttgaggggtgggtttctgctagggttggggctgtggttctgcgtccctgactctgacatggagccccaggtctcggcgggagccccacctgagcccacccaccacgtctgtcag

SEQ ID NO: 53423 - DNA, 844 bp, Homo sapiens
gatgttgcggagccgacgagggacggagcaggtgcccagccccaggttccctgtggggttgccacgagcctccacccgcccgcctgctggcgggctccatggcggccccctacgcaaccacgagtgggcggtgcccttcccgacccaggtggtgcgggagaagctgcgcaagtacgtcttcgaccgcgtgaacatgcacaacctactgatccacctggtgcggcggcgcgggcagaagctggagagcatgcagctggagctggacagcctgcggagccagcccgacgccagcaaggaggagctgcggctgctgcaggtggagaggcggggctgggagggcggggcggagtccactggggcaagactcacgggaggggcggggccaccggggggcgggacttgcgggtcccctggggagggctcacgggaggggcggggctaagagagcacgaccctctccggagaaaacccagccccgacaccctccgggcggccggtccccacgccctctcactgcgccctcggtccgccccagatcatccgccagctggagaacaacatcgagaagacaatgatcaagatcatcaccagccagaacatccacctgctgtatttggacctgctggattatctgaagacagtgagcccagcggcccgggaagggcgggggtcaggggctgggatctgggaggggcgggagcgtcctggggcggagccgccccgcacccgccagggagagggagctctgcctgaccaccggctacgcaggacgccgaggcatgtggaaaacgtttttttaaacttcatttttggctattccaaaaaagcatatcgtggggtatat

SEQ ID NO: 53424 - DNA, 1859 bp, Homo sapiens
gctacagggtgcatcagttgtacctgcaggactttaattgatggaggtgacttagtgatgccatggggaggctaaagccactgaaataccttgttaatttctccgaaaggaggaggcatgccatgccagacgggcccggaggagaggcaccagggctggagcagggaggagcgcggtgaaggcctgggccggagcttccactgggggttctgcgggaaaggctaggcagggcagcgtgagccgctgcgaatgggctgggctgagtcctcccggcacgctggggctgtccctggggcaaggcacctggcccgggtcggtggagggcgggggcgagaggcgggtcgggcggctgcgcctagctgggctagccccgtgtgcgagccgccgcctccgcccgcagacaccttccagttccccgacatggaccacagctacgtcccttcgcgcgccgagatcaagaggcaggcgcagcggctaatcgaggggaagctcaaggcggccaagaaaaagaagaagtagccccgccgccccgctccctgctttgctacacaaataaacatttttccaggactgctgcggacgctggggcgaccggggtctcggagaggagcacgggacacgcaggatcgggggaggttctgcgtaaggaggcagcccgggcccggaactgcgcgccagaaccgcgtgcgcatgcgccgaccgcgcgcgccgcgcccccgcggccctcgcggcgccccgtagccgcgcacccctcccgtcccgccgagccggcgccaagatggcggcgctgactcctggagagcggtcgcgccggaggccgcgggggccggagcggagcagccgcggctgaggttcccgagtcgccgctcggggctgcgctccgccgccgggaccccggcctctggccgcgccggctccggcctccgggggggccggggccgccgggacatggtgccagtcgcaccccttccccgccgccgctgagctcgccggccgcgcccgggctgggacgtccgagcgggaagatgttttccgccctgaagaagctggtggggtcggaccaggccccgggccgggacaagaacatccccgccgggctgcagtccatgaaccaggcgttgcagaggcgcttcgccaagggggtgcagtacaacagtgagtgcggcgggccgggggggcgcgggagcgccgcgcgggtctccgaacccaggccccgggcgccgcgcggtggtgggtgtcggtctcacctgcttgccggttgtggggtgcgctgggcccgccgggcgctccgggagcgggggcgcgggccaggggacgcgaggagaggccaggccagggccgggtcctcgcggcccccgagccgcgggtcgtttcccagccgcactcgcctgccgcgtgtcgctcccgccgcgctgtgcagtggagcgggtcggcggcggcggggttggcccggctgcccggcccgggggtgattacataatgccaagcagggcccgccggcccggggcgccgcgcccccgacgctccacggtgcccagccccgggcaccactcacctgcaggaggtgcggggaacccagccggccttggcgctttcagcgggatttttctttgttgacttcctactgagtttgaagacagaatattagctacgccacacattctcgcctttttttttaaaagaagcgtttgtaagagacgtatctagaaaagctccagaaggcacgggctgacttgcgactgtaggagacatcccatttctcgtaggaaggaggagtcatttacggactcctgagtgcctgggacgctccattcctttgttataaattgtgtaaattgtcctcgacctcttatgagttt

SEQ ID NO: 53425 - DNA, 442 bp, Homo sapiens
cctgtttcactctgcgtgtgtctgttcttctgcctgtacctctgctcccgctgccccgggcccaggctgccgtgggttggcaggaggctgcccagcagtggtgtgaggacgtcccaccaagtctggccacaccctgggtacattccagcccacctgtgccagggctcagcagctgcacgcagcacgcttggcgacctcagccccaggaggtggaagtccactctgcaaggctcccaggcagccgcctgcagccctgccccccgccttcaggctcctgccccctccagctgtcagcagcgcccagcctccacccccacagctactgttgccatgagaaccctgcagggcaggcaggaagagtgtgccagtgaaggggaggaggtggccaagctggaggctcctctgcctgggagccttgtggccccagggtgttgggcagtca

SEQ ID NO: 53426 - DNA, 2885 bp, Homo sapiens
agtcggtcctcgccctcggtgctccccgctgggaggcggggtgggcctgaggaccgccgagctctgccttcactcggaggggtcactactgcacagaccccacccgtagagatccggtccccgtcggtccgcggggctctcgctggagcctccccgactccggtttcccctcgtccagaagcccgacgtaaccaaagcccagtctgtcactttaaacacgccccgccccgcctcccgcggctgtgttgcctcctcgctggagaacaccctggtcgacctctgtgcgtccgtgtgcgcgagcgcgtcccgccgaggcggtgggcagggcggacggtgcgcagtgcgttcccgctggtcggagccagcacactaaccacgccacgcgccctgccgtcccttcgcctccagccgctgcagtctgggccctgcaggagctgggaaaaaccgcagggaggtcttcaggccgatatgcaagtctcccagccgaaggggcaggggacctgaacaggggaagcagagcacctgggcctggccagagctgacacctggctaggagaggaaggaccaagggacggggcgttcccaggtgggagcctggagggcaaagcgtggtgcgagcaggtgagggagagagctagttggtaagcgtggaagcccacccgagggggcttgacctgtcccgagaggtccccgcacacccgctctggccgcacgccgtactgcgggcgtggaggcgcaagcccggcggcccggcctccacctgtcccccaagtgcaccctggtccgcgcccagagctctctggagggtggggtatgcgggagaggggtggaggccaaacgcaagggccctcctggagtccccagccctacttcggagccaggggagggggcaccaagtgagagaaattgggcacccccgcctccgctcctgctttcgcacccggcacgcccatctcgtccccgcgcgtctgcaccggccaggcgtcccgcttgcccacccgccgccgcgccccgcgccccctaccccagggcctctgcattcggccccacccctgagggccggccgggaacgcccctggaccggaataatttccagggggcaagagctttcgaaccaagtaaaatagaacttgaatgtagcggctgccgttgcctccttgtaccggtagcggggttggggacggaagccttcggtcggtggagaggagaaagggagaggccttcgggcggtggacggggaagagagggagtccttcgggcggtggagggggtggagagcgaggccttcgggcggtggagagcggggaggggggaggccttcgggcggtgggagggggagagagggaggcctttgggcggtgggggccacggggagggtggtcttcggactacgtgcgggacaggaggtcagggctggcaagtccctcaggcctccctcgttgccccagcctcgcgggccgcctaactgccccgttccaagggtgccaccggaccccgctggagaggaacttctccgttggctggatttcatcaccacccattcccgattccacgtttcctttaagcggggctggcggagccgcaaggcggcaaggaactggattgcgattggtcagcacgtgcctcggtcggcggtacaattggctgaggcgctgggccttgggaagcattccccgacgggattggtcgtcgctctcgcagagcccgcctcccgcagtacaagcggcccccgggtcgggtgggaggaggggactccgggaggaggaacatggcggtggcggacctcgctctcattcctgatgtggacatcgactccgacggcgtcttcaagtatgtgctgatccgagtccactcggctccccgctccggggctccggctgcagagagcaaggagatcgtgcgcggctacaagtgggctgagtaccatggtgagggcgggacctgcgggcatgccaggggcacgcctggcgaggcgggggcggggctggcgggacggagacggggctgacgaggcaggggcggggctggcggggcgggggcggggctgcgggccgtagcggactgcgctctgctccgagtcctgcccctgctaggtttgacccaggctgaggtcctgggcgggaagggcgtgacacggcctgacaccctccccagcagtctcccagttcccgcgccctccccggttccaccctccttcgctcattcatccctgtcccagcctcaaggggcttcgtctctcctggggaaggggctgttcagagctgggatttcagaccccttcggctgggagttcctcccgcggcctccaagggcggccagggcacgtcctgaggccgccctcccatcccagcggacatctacgacaaagtgtcgggcgacatgcagaagcaaggctgcgactgtgagtgtctgggcggcgggcgcatctcccaccagagtcaggacaagaagattcacgtgtacggctattccatggtgagccgcagccccgtcccgccctgccggaggccccagtaccagcttcgaggcccacctgagcctgctgccctgacccgtggccccagctgagcacgcaggcttcctggggttctcccagggtcggcggcagagccctccctccagggcccattgtgttcctgcattcccccatggagcacacgccagacctgaggggtgggacggacacccccagacatggccggctgtctcctctccctgccttgggaggccttgctgggctctagctgtcctccagcactttgggccctgggcccccagaggcagtcagtacctgggtggagctcagagtccccacctgtgctcttcacaaaaaccaccagcagatgagacccacgtgcgtccctctgggcgcctcaggccccagg

SEQ ID NO: 53427 - DNA, 1962 bp, Homo sapiens
ggcttgggccgtggggcagcaccactcacccacccatgtcctgcaggttcctgtgattttgagtctggcctgtgtggctggagccacctggcctggcccggcctgggcggatacagctgggactggggcgggggagccaccccctctcgttacccccagccccctgtggaccacaccctgggcacagaggcaggtacgtgcccactggagccaggtggggaggcacacacagccacctggcctcctgctgcccacccacagagtacatgccccatccagaggaggccctgctcaccgagcctctgctcgggccctgagggctggctctgcccatcagctgggcatcagcctcctcttgttcccaggccactttgccttctttgaaactggcgtgctgggccccgggggccgggccgcctggctgcgcagcgagcctctgccggccaccccagcctcctgcctccgcttctggtaccacatgggttttcctgagcacttctgtgagtccggctgggccaatgggtgcctgggcaacgggggcagcaggggtccaggagcagaggtggggaggtggcctccccagcccgcccctggttaggcgtgcaggagccccaggaccccaggcctgacacgccctggccctgctctcagacaagggggagctgaaggtactgctgcacagtgctcagggccagctggctgtgtggggcgcaggcgggcatcggcggcaccagtggctggaggcccaggtggaggtagccagtgccaaggagttccaggtgaggctggctgtgggcaaggagcctcctcctcctccacccagggcccacacaaactcctttccttctccatcagatcgtgtttgaagccactctgggcggccagccagccctggggcccattgccctggatgacgtggagtatctggctgggcagcattgccagcagcctgcccccagcccgggtgagccctgggctgcagtggaggcacggaggagggcccaaggggccagcctggctcggggtttgccaggcttaccagtgtgtggtcccaggagctgcgagcatgctgcacccagacaggacaagagagctgccaggcccaggccctgtgccctcctcactctgccctgctcacccctggggccgctgcctgggctgggctgtccctggggtgcagcctctggggcctgccctgcctggctgtggcctctgtgctccctgtgcccacacccagggcaaggtccatcctggaggaaccgccagccgggtcagggcagccactgactgctctcacttggtgagggaaagaatctcgcctggggccatgagccccaccaagtctgcagacagcagctgcctgtctgccaggccccatccttgtggtagcagaaccaataccctctgcctttgaaataggggtgaaccccaggagccagcagaggctgagggaccatgcagccccaggcttcctccttagccccagatgtgggggctgctttggagggctcacatgtccctatggcccacagggaacacagccgcacccgggtctgtgccagctgtggttggcagtgccctcctattgctcatgctcctggtgctgctgggacttgggggacggcgctggctgcagaagaaggggagctgccccttccagagcaacacagaggccacagcccctggctttgacaacatccttttcaatgcggtaggagcccctggggatgggtgggcaggagcctctgtgctcagctgtgacgctggagggcgggcagtggcgggacacaaccccccggggaggagcccccacctgtgcaaggcccatccttgccctccctgccctgcctctcccagccaccactgtcaaagctcctcctccttggccgggcgcggtggctcacacctgtaatcccagcactttgggagattgaggtgggcggatcacctgaggtcaggagt

SEQ ID NO: 53428 - DNA, 2668 bp, Homo sapiens
tggcctggtgtggccttcctccctgaatctggttcctagtaacacagagatgacacatctcatggaagcctgcaggctctccagaaacatcaccaataacagtgatgccatctcatctacagtcactgaatattaatataatgtatttattaactttttttttttgagacagagtctcactctgttgcccaggctggaatgcagtgacacgatctcggctcactgcaaccttcgccctccgagttcaagcaattctcctgcctcagcctcccgagtagctgggattacaggctcctgccaccgtgcctggctaattttttgtatttttagtagagacggggtttcaccatcttggccaggctggtcttgaactcctgacctcatgatccacctgccttggcctcccagagtgctgggattacaggcgtgagccaccgcgcccggccaacatttctaccacttcagaggagtgacttgtggagcatcctaagtgtgatctgctcacagatgctgccacgcaattattcccatgactcctagcttgtggccattaagtttcctttaaaagaaaaggagagtgaatttggttttgactgtgcaaccagtaagggtagggcagaccaatgaatccctgtcaccagagccccagcgcatcctggcccaactggcctcaaaggcttcagccctaggccacctgagggtacgaatgaggcagaggcggtgactaaactgtcctccctattacatcagactcacaactgaccctcggatccatcagccacattggtaatctccttccacaagtactgttcagggcacgcccatcttccacctgtgcaacagggtccacctgctcatggggtcccctgaagcaggcactctctacagcctgtgatgcacccaggcaggctccctgggcagtatctgaccagcggagaccagtagaaccaagcaggtcccaggcagagagaaaactctcagggaggagcctaccccctgtccccagctcccactcaggtcactaacctctgccccgtcacccagtctcccgccccaggccctcaactgctgtccaatggcccccagccctatcccaaccccaattccccaccttcatcgctggttcctgctgcttgccccagtccccacccctgtcctaagccctgtaccccactctaccctgttcttccaagccctgtccccatctccatccctgcccccgttcccagtgcccaccctggttctctgtcccctatcctcacacaaggcccccagccttgtccccgtccccgtccccacctcctgcctctgtcctcacacctgtccccaccaacagtccctgcccctatcccctccccgccccaccctggcactggtcccggccctatcgcctgccccttgccccgtccggttccctgctcctctcctcctccagtcgcccgccccctgcctcctgggtccgtccatcccctcctgggtccgccccccaccttcccacccctgtcctggcccggtcctcctacccctgcgattcgccccgcccttcgaaccccgtcctgcccccggcaccccagccttgtccccgtcccctgcgccctgtcccaggccccgcctgcccttccccgagccccctgccccacggtccgtggccccggcccagcgtccgccccgcccggcccggccgctcctcagtcagcaaagcacctgcttggatttggcctgggcggccgtagggcccttcttgcgcagcaccgtcaccgtgtcccagtcgctctcggccatggcgggcgaagacgagcgtccgtccggcggctcagcggcagctgctagagacctggcgcggcgacgctacgtcccctcggcacctccccgctttcggcgtcccattggctggctgcacgcggggggcgggcacttcccgtgctcggggccattcggcgttcggctcgtctgagggacgtcgtggccgggcgccggcgacgtagggaaggcgacgtcggggcctggcctggcctggcgaggcgcggtagccgctggggctgcaggtcgggaggaccccggagcccgggccccgcggcctccgagcacacgcgggcggcggctgcgccccgacgcgcagcccccgtgcctccccgggccccgcaccccggccgggccacgcgggcggagggggcgcggggtctccgctctagccgtgcggccgcccccctttgttttgccgcctgcgcggctgggacctgcgctcgaggaccagggccgtggggcccgaaacgcagcgtggggtgggacacttttttttttttaacttttattttttgagatggagtcttgctctatcgcccaggctgggtgccgtggcgcgatctcggctcactccgtctcccgggttcatgccattctcctgcctcagcctcccgagtacctgggactacaggcgccagccaccacgcccggctaatttatttattttattttattttatttttagtagagacgggccaggatggtctcgatctcctgatctcgtgatccgcaggtgggactctttaagaaaaagaacgcaagccgggcacggtggttcacgcctgtagtcccagaactttgggaggccgaggcgggcgtatcacctgaggtcgggagttcgagaccagcctgaccaacatggaga

SEQ ID NO: 53429 - DNA, 2203 bp, Homo sapiens
agccccaggcttgccctggacaggcgggcttcagattccccccaaggttctatgccattgagttggaggacaagagcttccccactgtccagcgttgaagcaaacctccctccaggtcccacccctccccaggcctttgtccttttatcagggattgccctgggggagcccccctggggagctgatgaggagggagcctctgtgccccgtgcactggcctgagggggtgaggccagggctggggctgctgcaggggactctggcccggagctgcggctgccttcctggaaacactcctgtcagatgactgcagagtgagagtgaaaccagcttccctcggaggctgcagcacagggctgacatgcaaacgtctgaaaaagaggcaagctctcggtgtgagcaagtggactgcggctatttgaggtgggcacttcccctggggacagcaccaggcacacaagggtcccttgttcatggtcccgtggggggcccagcttggacattctgcctcctggctccatgtgcaagctgggctctgtcgtcccaagacctgagtaaaaggacatgaggtgtgagccttcaagggtgccaaccacgcccaagggaagccaagcatccacagagccctgctgggcacagagggcagacgcagccgctggatttcagatgcatccacagagccctgctgggcacagggcagatgccagtggcatggcggcccctcacctcccgtgctctgcaggcccagtaggtagctgtggggtcctccctggccaggccagtgagtggctggcatccacggcagcatctgctgtggtccatggtcatgccgcccctccagggacactggcaccctcgtcaggacacggagcccaggacagcagctgcatgtgtccatctccaggttccaactgctgccctccttcctgctcctgcaacccccatcctcaggcagtgagagggtgctggggcttctcctgagactgcccggggacataccctccccctgcccctgctggaggcctgggtggctgacttttgctttcttttcggcaggaaggagcccacgtgggaatcccctgagctgcgccatggccagagtgagtcacccctttccagccagcaaacaaggcgagtccccaggccaaggtgtcacagcttccaagctggtgggcggggtggggaggccgcttcccaatcagtgtgtgcctctgcctctcagtcaggctggtatcaacttgctatgccttacaggcctgtcatcacaatcaatattattagacagagtcttgctctgtcgtccaggatggagtgcagtggcgcaatcctggctcactgcaacctccgcctcgcaggttcaagcgattttcctgcctcagcctcctgagtagttgggattacaggcacctgccatcatgttcagttaatttttgtattttagtagagacggggtttcaccaccttggccaggctggtcttgaactcctgatctcaggtgatctgcccacctcagcctcccaaagtgccgggattacaggcgtgagccaccatgcccagccagttttttttttacgtgtctgtgccaatcttctggaaacagagcagtataaattaaacaaaggcattttcatgagagcagcactggggcaagtactctgagactgggcggcacggggcagtcatcctggtcactacctgctctcgagggctgtgggcatttgccaagcttgggaaaccttttctggacttggggtggggctgaggtggtctcagactcagcccttcaacactgtcatcatccaggaccagtgaggtgtgtcaccccatgttggaggccactgtctgaaagctgttagaatgactttcccgttaccctgaaggaagtagagtgtcctaaaacaggtgaaccccttcttttttctttgagatggagtcttgctctgtcacccagggtggaatgcagtggcgtaatctcggctcactgcaacctctgcctcccaggttcaagtgattttcctgcctcagcctcctgagtaattgggattacaggcatctgccaccatgcccagctgatttttgtatttttagtagagacagggtttcaccacgttggccaggctggtcttgaacccctgacctcaggtgatccacccacctcagcctcccaaagtgctgggattacaaacatgagccactgtgccgg

SEQ ID NO: 53430 - DNA, 2181 bp, Homo sapiens
ttttcacttgaggtcgggagttcaagaccagcctggccaacatggtgaaacctcgtctctatcaaaaatacaaacattagccgggcgtgatggcgggcgcctgtagtcccagctactcgggaggctgaggcaggagaatcgcttgaacccgggaggcggaggttgcagtgagtcgagatcgcgccactgaactccagcctgggcgacagagtgagcctccgtctcaaaaaaaaaaataaataaagtgcacaacccagtagattagcacaccggccatgtcgggcggccgtcaccactgtccggttgcagagcattacctcaccccaaaaggagaccccatagccttaataccttacttaagtgtgcagtattcttttagtcctgtttctcataaatgttacccaaattgaggcgccgctctgcgcccggcaccgggggaggcggagggacccgcaggtgtcgggtaggtgcggccgccccgccagggccccgcgtcccgcgcgcgacgcgcgcctcgtgggaaccggtgtcgcccggcttgggctcccggctcacctctcgggtgtgcggcaggggtctccgccccggggccacgggaggggaagcaagggcctcgctgtctcgccgcacctggggaagggacccaattagcgcggaccccacagcgcagcacctcaccagctccccgcaccaacgccccggcgcgctctttgaggaaaaagcagagggcgacttaggtacccacgccgtctcagcgccgaccaatcggcgcacgctgcggctcctgcgggctcgctggttggctccggcgtcagtccgtcaggcgcgctcggagcggggcgtatctggccaatggctctcgctacagcttcctgagggctggctggttggctcccatgtccgtccgtcaggcgcacgcggcggagcggcggcggcggcggcggcgttgggggcggtagctgggcgggcccttagttccgggcgcgctgcgaccgttgggtgaggcgagcgcggggtcgggtgcggggtcgggcgcgggcgcggggtcgggtgcggggtcgggcgcggggtcgggcgcaggcgcgggcacctctcagggagactccgggccggagcgggagcgggggcgggagaggccgcggggcgggggcggggccagcccgaggggatttctctgagccgctgggccggaaaccaagtccgagcgtggctggcgcgggaaagttcgggaacgcgcgcggccgtgctcggagcagcgccagggcacggtccggggttttgcgcggggtcgcggctcccagtaccgcctgaggcccgtgggcggcccacccggccctgccccgtcccgggtccgtcgctcccccgcaccctgtcgcccctccacgctcagctgtgggcccctcgtgtccccgaagccccgcaccctcagccggctgcgtgctcgggagggtcaggggcgcctccgacccctgagtttgccagcgccccccagccaggggtcggggaagaccagtgaggctgggggcggagccgactctgctgccttcctgcccagtggctggggagacccaggctgagcctgggtgaaaagtccctctggctgctgggagggtcgggggcagcaaggagccagtgcggggatgggctgcggtggaccgggccgggatcggggccggggcctggtcctggcagtagcaggggatgtttgtggaaggtagagccgagaaaaagaggagttgcaatgtctgcaagaatctggcgtgagcagctgaaggctggtgcttcctaggccaagatgaaggagtcacagcgcccatggcctctcgggaggcggccagatgggcagcctggggtcaggggaacggtcagggccagagctgggtattttggagttgtcattttgaggccccgagggctgagggtcagtgcagaagagcaccaagcctccactcggtgtagggccgacagggggtggggtgtctggcagccggtgaagacggggctcggaggaggagggagtctggtctgggtcaagtcaagggaaactaggactgagaacggaccctgctctgtggccacatgattttgaagggacggaattactgccctgtaactcagtctctctccctgttaatagccctagtttttaataagaggaactgaatgtattaatgggtggac

SEQ ID NO: 53431 - DNA, 3475 bp, Homo sapiens
ctgtcccagtgatggatgcacctggaaggggaccctgaaagaatacgaggtaaagatgcctgcgtgtggcatggtgacagaagctccagcagtcgggagtcgtccacgctccccaagcagttatgaccttgtcctgcacgttcctctcactggggctgaagcctgtctgatgtctgtggaggaagagacggagctgctccttagagtatgtccatttagaaactcaagtagtgcagagcacagacctgcaccatggagcttgggctgtgtgacctcgggcgaggtatttaccctctctgtgcctcaggtttcttgtctgtcgatgggggtgcaggatcccaccatcgtggggtggctgtgagggttggaggtgcctgtgtgagccctgggaatgccatggttatctgagcagtagcatttcctgggaatgaaggggagatcgctgtgcaccaggacctgcagctttcaagtttggtgggggtttttgttgtgtctcttgtatccacaaaggattgcttattttgaattgtgttgacactggaaattgcagaaataatggacacacttgtcctgtggtcacagcaacataggcagtggcccgcacttcacttggctgtggtttgtccctgtgtgctgggcgagccgtgcacgccttcctgcactggggatttcagtgtgattctcacgtcaccttttaggcatttggaaacttcacctgtagtgtagaggccaggaggtgccgagagagctcgtcgaggccactacagctcgccaagttatgcagtcttccttcttgtaatgaatgccctttaagaggtttctctctgggatccttgtacaggattcctggagtaacactgtccacagagcccaaaggtagaggcagcccagtgtctgcggatgaatggataaacacgggaagtgtgatctgtgcacacagtgggatatgattcagccttaaaaaggaaggcgattcggacacacacaccccagggatgaactctgaggacagtgtgctgagtgacatgagccagttaccaaaggacagatcctctgtgattccacttaggggccacccttagagtcatcagatccatgggtacaggaagtagaatggaggagacaggggtcattgttcagtgagtaccgagtcatacattggaatgaggcagtaccttgatgccatccaatccagccccaggttggtgaggctgtgagggctgtttgctcagaatcctggctttctgcacttaggggagcttcctgcccgggccagagctgggatctcctgctcagccggaccctggggtgttaccggctgggttggaattggacctgcattactgtgtgtttctcctctcctgctccccgccctgtgagcctggccacgcctccctcttctcctcgcccactccccaccctgtgagcctggccacacctcccacgatcttttgacagactctgctttgtggtctttgggctccaagtttcgttttttcagaagaactgccccagctgtgtctggggtgaacaagatgtgctttcctccctagcacggggattgcgtcctggacacggagcggtagctccagggcactgccctagagtgagactcctacctctgtgggcagagatgccagaccgccctcagccacgacgtgcgatgcaaagctttctaggctcctgtgtggctctgccgcacaaacggctgtggcgcatggcattgtaccccccactccctgctccttgaaagagatgcagcttggtcattgcccagtgctgtctgcaagggagatggctccctggggaggtggcccagggtcagggtctccctgggagggttggggtaccagctggctgcagggagtaggggtgctatgcgccatgccaccctttgagaggactgaggagtgtctgggggacaggtgggataatagtttccagctctgcactggaccctgagtcctctggggtctctgccacctccaggctcatgggatgccacattgacaattatgagggcctccggctgagggccaaggactatagccagcccctggcctggggcgccacgcggtcctgcaggcacgcagggtggaaagtccctggctgcacctttgagagctctggaaagtccctgagaggagccgggtttggtcatgtgggaggggcgggcactgctctggaataacttggctgtggcctttgattttgttgataaaacctctcactggctgtaaatgtcacacatggggacggaaatcaacccgtctatacagttgggagccgctctgcccctcggagccgcctctctttgctctccgggtgctcggagtgtgctgctagttggggccttattgtaaacacagtacggaggctaaggctgcctttcctccttgatggtcggaactttattggaaaaggggaaaatcctgcttagcttttgaatgtttgtcctttgcaatgatgcctttctaggaactgaatgattttatttatttatttttatttttttgagacggtcttgctctgttgtccaggctagagtgcagtggcgtgacctcggctcactgcagcctccacctcccaggttcaagtgattcttctgcctcagcctacaggcgcctgccaccacatccggctaattttttatatttctagtagagatggggttttaccacgttggccaggctggtcttgaactccttacctcaagtgatccatccaccttggcctcccaaagtgctgagattcctggcataagccactgcacctggccaaatcgaataattttaaaactttaggtaaatgttgatggagtgcttgctgagtgccaatagcagaactgaattccccagtgggcccctgagctactcgttctggcagctggatgcgggggtgcggggagactttccagagaggacataggctggctgcacgagcagcggaaaggccaggaaaagccaagtatgctcggcctcatggacattctagtgacattcagagggatgacgactgtatttgcgtcaaatgtgtagtttgaattctggctgaataaatattgatttttttttttttaaactgtgtctgctgtgggtggggagaagactgagacagatggtgctggtgtagatgtatctgctgcaggacaaccctggtcccactggagatttcaagtaccgagtgccaagagaaaggttttttttgtttgtttgtttgttgttttttgcgatggagtctcactctgtcacccagactggagtgcagtggtgcgatctcggctcactgcaagctccgcctcccgggttcacaccattcttcctgcctcagcctcctgagtagctgggactacaggcgcccccaccactcccggctaatttttttgtatttttagtagagatggggtttcaccatgttagccaggatggtctcgatctcctgacctcgtgatccgcctgcctcggcctcccaaagt

SEQ ID NO: 53432 - DNA, 924 bp, Homo sapiens
tcattgccagcctgggagagctgaaggcacgagactccaacctaagagagttgtgtgaggtctgagcccagcaaagctctaggggtgaggttcccaagagcctgaggacccagccgcaccccacggcgtgcagaaggcaggatttggagtcaaagatgatgattctcaagccttaggatttagtagtattctccctgttggactttggacatgcttttgaggcctgttattcctttcctctttataatttatccctttggaatggaaatgtctgttctatgcctgccctaccattgtattttggaagcacgtaacttgtttaatttcacaggctcatagtggagggaaagttgcctcaggatgaatcatgccttgagtctcacccatgtttgatttagacgagactctgggctttggacttttgaatggggccattgggatggaatgagtatattttgtatgtgaaaagaacatgaattggtgtaggggcagggatggaatgctacggtttgaatgtttttatctcccaaactcatgttaatatttaattgtcattgtaacagtgttaagaggtgggatccttaaagggtgattaggtcagagggaagataggctggaattggtgctggtataataagatgagcttggccctctcttgcccttccaccttccacagtgacacaacaagaaggattgcaccagacgctggcaccttactctgggacttcccagcccccagaactgtgagccaataaatttctattccttataaattatctggtctcaggtattcggttatagcagcaaaaacagactaagagaagacaatgtttgtgccccccccacccaatttcctgtgttgaaacataatctccaatgtgatggtacttggaggcaggactttttagatcatgagggtgcaac

SEQ ID NO: 53433 - DNA, 1364 bp, Homo sapiens
aagtctggttagcaggcacttggtcctgtgaaggttgggcccacattgttcctgcccgcatgagtatctttggttagcaggcacttggtcctgggatggtcaggcccacactgctcccacctgcgtgggtgtctttggttagcaggcacttggtcctgtgagggttgggcccacactgctcccacctgcgtggactcctgtcttcagagctgctggtctttggtctgggacccaaggctggtctgcagttccccacgtccatggtgtgatcattagacccatgtgtctgcatgtgagctgagcccggcatccacagccaccccatgtgggtgcttcccaagctccccacgctgggtttggttgctgggctcactcactgtcagttcagacagtgacatgcccttgactgggccgcgttggagtctatgtggcaggaggacaggggaggaaagctaatgggggtggtcccaccctcaatacagccgcactgagctgtgagggactttctggccccaagtttggctctgatgggttcctgtagccaccactcccactgccatcagggtcacaaaagaatggagaagagggtaaacccagggcattgcctcactgaccctgcgcatcggcgtgggttcctttccctggcccttagggctgctctgggctttctgcctggccccagcactcacgtccggtgttgcggctgcgtggagttcaggtcatggatgttaggtcaagcaccagttctgcgaaacttgggatcttgctgctgctccctgacccagctctctggcagctgctccaggccccgtgcacaagtttcatagctgcagtttcacagagttcactctgtcgcccaggctggagtgcagtggcgcaatctcagctcattcccgggttcaatgaattctcctgcctcagtcccctgagtagctgggattagaggtgtgtgccaccacgctcggctaattttttttttttttttttttaagtacaaaaggggtttcaccgtgttggccaggctggtcttgatctcctgacctcaagtgatccgcctcggcctcccaaagtgctaggattacaggcatgaaccaccacgcccggcctgacctcagcatatgttttctgaggacttctgttcttttgctaattcagtcactttctctttaaacactgggtctccacccctgccccgtagatggggtgggggcatgcatgccgctccattcccctcccagggctgtgtttctttcgtctcctctgtgccatcttctgctgcctggtcctctcgtcgagtctgtctggtccagcactttccacatatcaagatttttttttttttcttttccttttttgagacagag

SEQ ID NO: 53434 - DNA, 1744 bp, Homo sapiens
tcccagctggagaccaggagttggcagggcagaggctccgtccctctgggtggcgcagcctctctcggtggtgctgtccctgatcccgtcggtgctcgagctcagccccagggtctctacctgcggcccacgtggctcaggggaaccatcacctcgacactcactcgtctcctctgcgtcctttctctgtacggggttgcttgctgccatgtttggagccacaagctctgtgtgcttcctataatgggcagctgacccgagtgccaggctctactcctgccatcttccttgtcaccaccatcgccccgggcccccgagctcccggtgcagttccaacaaagcctgtggggtccagctggagctccacctctgctcccacttctgggcccctggtcccatcctcgccggcctgaactgactgtggagaccgccctggcactgggagcgacacggcctgccgactctggacccagcagccgagggactccctcaaggacgggactgtggggggccgccctggcactgggagtgacgcagcctgccaactctggacccagcagccgaggaactcccttaaggatgggactgactgtgggggctgccctggcactgggagcgacgcagcctgccgactctggacccagcagctgaggaactccctcaaggacgggactgactgggggggctgccctggcactgggagtgacgtggcctactgaccctggacccagacggcaggccctgcatgctgccagccccggcacatgtgccaggcatctccctggaggtcatggaggacagggcagtgtgacaaagtctggcaccagcacatgacctcagacgcacatgtcacctgtcagcagtgactgcaacattcactccagtaggaccactgtgccagcaataacagcgtcacccgtcagcagtgaccatgaggtccactccactgtgccagcagtgcccacagtctccctccctgcagacagagactggacaacaatgtgctgttgccaactgtttattcagggccctgaacgggtggtgcgtggacatgcaacacactcgggcccacagcagcgtgaccggccgctcccaagccccgggcgcacaaccacagccaggagcagcccctgccaccactgggccaccgtccagggccccacaggaccagccgaaggtgccccgggccgaggccagctgggtcaggtgtacccctagcctggggttgagtgaggagcggcacccccagtatcctgtgtaccccaagttgcccaggaggccgagggggccttgggctccatctgcactggccaccccgtgccaagcatcacagctgcgtgagcaggtttgtgtgtgagcgtgtggcggggcctggttgtccccttcctaaggcgtaactgctataagcatctccacctctcccgctcgggaaaaagccacagagcctggcgatgtcctcaaggggtcccggtggctccagtgcacccagcacacctcagcgcctctggctggcaagccaggagaagaaggtgcgaggccgtgggcgaggtgcctggaggacgcgcatggtgcgtggggagcgccaggctttgatggtggcgtcgtcgctggccgtgagcagcagctcctgctcctggggactgaagaccactgagttgaccacatcctcgtgccgcagcctggccagacagatgttgtagtggcggtcccagatgtagccgtgccggtcctccgccccgctgca

SEQ ID NO: 53435 - DNA, 3721 bp, Homo sapiens
cggggctggacaggctgtcggcgtggggcgggggcagggtcaacccgccgcccgtgctcacctaggctgatgacagcaatctcgccggatgaggagttgtgcggccccaggaacacccccgaggccagcagtagcgagtcgtccttgttgaactgggagaactgggtgtagctccagttgtagggccgcatgtccgcgctgtgcagcagcgagatggtcaggtcgttgctccagatctgttcggcaggggcggctgtagtgatcgcctggccaggtcgcggggcgggggcctgctactacacagccatgaggccccagctctgccagccctactcagaggccaccagggagcagggaccccttccagccactgtcatccactcggggggcattggtatagagcggaggagcctgcccctgaagcaggcggctgtgtgtgggaccctctcctcagcactcagggccaccctgcaccgctcctgatcctctgtggtccctccgctggatgcagggaggctgctgtcacctctggcctgacccacccccccccccaccaccacctggttggaacgcctgggtcctgggacctccgtgctgcggcagagctgggtggggtgtgcaggacacctggccgtcctcaccttcacagtgcagtccttggagcaggacgcgaactggtacccggaatgggagaagctgaggtgcaggacctggtctgtgtgttcccgcagcgtctgcacctccacgcagggcaccgtgtcatacagccgctggaactcctcgtaccaggacatggccgctgcgggtgggcagttgtcagtcctgggcccgggccttcctcgcagtcacggccatgagccgagtgtggccccagcagtcctggcaggccccgtggtgcccctggaacccactagtcatggcataggcctcggctgggggattcaaccctgtagctcacagagacccctgtaccccccaccccccaagtgacccaatgaaccctctggcctccaagctctgaggggcgcctgcgctgtgtcctgacaggcctctatcagggtgtgggggggtgagcatggacacgcggggccgcggggcgggcccccagccaggctgacccccaagcgcaggggcccggggccctggctgcagaacgtgggtaggggccccacacgccactgacctgggtgtcggggcacgtcgcgggccacctggtagtagcggtagaactgctccctccacaggaactcgtcccgcgacacggcctgccattggcggcacaccagcccggcggccagcacgtcggccgggcccaggctcaggaagatctggtagaccaggctgtcggggagcaggggcgtgccgccctcgtccatcgtgacattctgcccaggcggccctgaaacccaccaacggctgccctcagcccaggcccgggaagggaggccgagagcgggcgtcctgttcctccagccccaaccgtcccgccgggagttccacggggctgcgtgtctgcaggggacgcccgggtaccgccgcccaaccaaggacccggcagctccgggcgggccgggccggcccctctccgccgcgtcatcccccggcctcctgcggccggcagcgggcgcccctcagcccgccagggcccggaccgccgcacgcgaggcacggggacaccaggcgccgtccggggacgggcttccgccgagaggaagctcggggcggccaggcagtggcctccgccctgcggccctggagcagctctgcccggcgggctcggggcggacggcggggacgagcgcacgggcggcctcggggctcctgcactcgcccaaggcgggcggggacgacaaggcgggacccccgagggccgcaggcgcactcaccacggccgcctccgcccgctgcgccgcccccgccctgcgcgacccggacccgcttccgctgccgcagccgctcggaccgccgcccccgcccaacggggagcccgccaggcccgacgccacgagccccgaggcatcgatggccgaggaaggcagagcgcgcgggtagcccgcatccgcccctcgtgcgcctgcgccttgggctccggcggcctggccggcttttctttgtgcgcctgcgcgcactcgggcgcattgggaacagcgccccttgtggccagcgggcggcggtcgtgggcggggttgcaggcgaggctcaacgaacgctggttcgggacccgcctccggcgctccctgttgccgggccctgagcaagtggcttcatgaaccccgtgacgttggccatggagataagaccactgggtgatggtttaaggaagataacgtgtaaagggctaaggactgtcggtggaaatcaggggtgcaggagaaatggataaacagccagaggtcaactcggactttgtacataggacatggtgccagggccctgccaggaagtgcagatcgaagctaggctcacgaggaggctggaggtggggggtggggaggcaacggatggacatggacttcctgggctgggctctgtgacagcagagtagactctgtcctgggacttggtggtgctacccttggcctcccacagtcctgccaccctgctgccgccaccatgctgccccctgggactgcgaccctcttgactctgctcctggcagctggctcgctgggccagaagcctcagaggccacgccggcccgcatcccccatcagcaccatccagcccaaggccaattttgatgctcagcaggtagaagttggggggggtagagggaggcaggtagaagttgtgggaggggtagagggagacaggtagaagttgttgcgggggagagggaagcaggtgaagttgtggggggtgtagagggaagcaggtgaggggccctcccacagtgccctcgagttctcccatggtctgcccccagtttgcagggacctggctccttgtggctgtgggctccgcttgccgtttcctgcaggagcagggccaccgggccgaggccaccacactgcatgtggctccccagggcacagccatggctgtcagtaccttccgaaagctgtgagtcccagagcagccctgcaccctaaccccaaccctcctctcagcccccggacttcagccctgctctggcccctgaccccaccccggctgtggcctggactaggattcctggttggggtctcccagcctgtggtgcctcctccccgcccccccagggatgggatctgctggcaggtgcgccagctctatggagacacaggggtcctcggccgcttcctgcttcaaggtgaggcaggggctgcagggcatgtgggtgggggatgacgcagccactgtggctctctgacatggctactgtggctctgccccagcccgagacgcccgaggggctgtgcacgtggttgtcgctgagaccgactaccagagtttcgctgtcctgtacctggagcgggcggggcagctgtcagtgaagctctacggtatgtgggggccagcctctgtgaccaggcaggcgctcaagctctgcacactcactgggccaccccgaggggctgggtgagcccatggggacacacttcctttctcccatcctgatcctcctgctaagcaggggcccagggagtagtgacagacaggcctggtgtgggagcagggagagggccccgagggggcaggggacacacagaccccgtttccagagccctccacgccgcct

SEQ ID NO: 53436 - DNA, 1980 bp, Homo sapiens
cccccactctctgggctgatgtccagcctgacccctgccttgggcccccaggcttctgcgaggctgcagaccagttccacgtcctggacggtgagtgcacagcggggcaagcatggcggcgtggtgaggggggccactgccaccggctgagtctcgtctctgctgcagaagtgaggaggtgaggccggcacacagctccagtgctgagaagtcagtgccccgagagacgaccccaccagtggggtgcccgctgcctgtcctccgtgaaaccagcctcagatcagggccctgccacccagggcaggggatcttctgccggctgccccagaggacagtgggtggagtggtacctacttattaaatgtctcagacccctctctgactcttctgtccactctggaccggcgccagtaccaccaaggccctctctgcccccaccccgcctctttaaaagcccggcgctccctgttggctggagtccacgcagtgggcactgggccgatttcagcggctcttgggatttgggaggggagatcctctctggcatatgcccatcttgtgccctgctgggacctgggggcgtccagcctcactccaaggctgctcttgcctgggccattgtcctgcagcccccgggctgctcttccgcccccgtgggaggccagctgtctcccgtcactgcccattttggcctcttccgagccgagctggcaccagctggcccgtgttggtggcagcagttggtgctgtccacccacagccactgcactctctgcacacctcatccactcccacgtcccccgtgaaaccaggaagcagaagagaatgtgggggtgggccagctctgccctcggggcagcccctgggctagggccggagaatcaggaacccggcatggcttgaccatgctgggcctggacctggccgctaagctgctcctctcaggccctgcctgcggccactggcatttgtttgataagcatttctgaaggcccactgtgtgctgggccctgggaccaccaggtgggctggtccctccccctaggaacttacaagtccagggatcagccaccaatcggccacagtgggcagggatgggaggagaaggcaccttggagttggtcccaaagcacacggcctgggtgggggcagggaggagccagcagctgcttcaggggggtccccatcccacgggcggggctccccctgccgtgcccacctgttcactaagctgctagaccccaggagggcaggcaagtcaggtggtgggaaggggaggcaggggccctgactgccgggacctgggaaggagaagggcccaggaggtcgtacccttgcatcgccttcccccactccagctccatgtcccagagacccatgagatagcagggcgcagcagaagggctcagggttcagagctggcaacgccgggaagactctaggcctgagccccaggaaagcctcctccatgcctggccccacatcccccaaacagaaagtgagggtctcatctgggggcaggaggagtcgggtagctggccacggtcacaagcttcagggagggctgaatgtccgaggggtggcgccagagacccacccgatgaccttgggtgctgtggttggtggcagagtggcccagcctgaccctccacgcctctgactgcagggctgggtgggttcccgcactgagtgaagtgcgtggccacttggctgtgtgctctgggaccagaggatgtgcagcgcaaggattacaaggcatttcattttcacagaagcattgaatgagctctagttaaatttcaaacactacataaaatcacgatagctctgtgtgaatcattgttctttaaaatagtttgcataatttggctgggcgtggtggcttacgcctataatcccagcactttgggaggctgaggcgggtggatcacttgaggccaggagttcaagaccagcctgtccaacatggtgaaaccttgt

SEQ ID NO: 53437 - DNA, 2224 bp, Homo sapiens
acttgaggtcaggagtttgaaaccagcctggccaacatggtgaaaccccgtctctactaaaaatacaaaaaaaattagccaggcgtggtggtgggcgcctgtaatcctagctacccaggaggctcaggcaggagaatcgcttgaatccaggggacagaggttgccgtgagccgagatcgcgccattgcactccagcccgggtgacagagcgagactctgtctcaatttatttaaaaaacaacaacaaacaacaacaaaactatgcaaactggctgggcacagtggctcacacctttaatctcagcactttgagaggctgaggcaggaggatcgcttgaggccaggagttcaagatctgactgggtgggcaacatagtgagacctcatctctatttaaaaaaaaagttttttcatctatagaaactaacatttaattgttagcagtcttgcccaagacctgcggggtcaggagtccaggactgtcctgggtgcccccgccttgcctggacgtgagagtgctgtgtggggccccgggagcccctggtcccacaggcagggccgacaggcaggtgccgtgcccgtcctccctgcccacgcaggtgctcagagggacaggtgggccaggactcctccatgtggggacgaggcaccctcctccccagccacgccccaaccacccctggccccccaccccacccccaaggggcctcccagcgcccaggaccgtgtctgggaaaaggtctttgcccggagagtgggaagagagaggggagggtgagcagaggacaggccgggagttttccgggaacggaggaagagcagtggagggtaagtctgtccttgttgctgtggggaggccgagatgaaggcgatgggttgggggtgggggtgccggggagcgaagcagagggaagagaggacctgatgggaggggtcaatgggagaggccccagggaccggtccccacggtgggctgggggtccagggtgctgagtggaagcggcggtttccctcccgcctctcaaggacgccttgcagaaggcgcggctgctcctccccgtggcacgcaagctcccgggcaccgcctcccgcctcggcctcccaaagcgctgggctcactggcgtgtgctgccgcgcccggcccgcccaccccaggcggtatggaaggccgaggtcagagccaggactcccccgggagccccgcaggtgcctcaaggcccgcgtcctgcacggcccgttccagcgccgccggcccagccaggcaaaggcacctgcagggccctgattgggcggcggaggtcacgtgcccaccctccaccaatcacgttagacgggaggagcagcacctgcgtctgccccgcggtggggggaggaggcgcgccgaacccattgtcgtgtccgggaggctcctgcaggggacgtggggggcacagaggttaacggcagcagccagtggctacctggaggcacacacagaccccccagggcggcaggagtgggtctgggggagggagcatggggcctgaggcgctgcttggagccgagggaccctcctctgtgtcgaggactcggcccacccgacctctgctgctcagtctctgtgggtctcgggctggccagggaaggcccggttttcctcccgcagggccctgcatgggcggggtccgtagcggggactgtcctgtacatgggctgtgtgctgtgatcccaaatctccccagtgccctgcgataagacgggctccgggaggggtgcctgctgcgctgagagcgggaccctggggctgcggacaggcgctcctaggctggctggggccagggggatggtggagagtcgaaggcgccttggggagttcaggggaatgaacagattatttccaacttttccttccctgggccagcctcctgaaacgctagcgttgtgctggtgagacaaggcacagcaagctgcccttctacgtgggcagtgaggcctgggacagagcccagccctggagccctgaagtcctgggggctgggctcttcgagtggccaggctggggctgccacccagggcaggctgccgaggcccagggcacctcctgggatgagcctaagtcccttgtaagcagggctggatgaggggaggaggtggccaggacagggaatctggggtgggagggggcagccaggacagggacctggggggcctggacagaggctcacaggccaggcacacggtgagt

SEQ ID NO: 53438 - DNA, 1617 bp, Homo sapiens
taggaagcttccggtttgtgtgtgaagacgatggaagggcggggctccaggatgtatccgcagagccacggagggaacctggactcggctggacttggagccggggcgggggcgggagggggcgaggttcgagtggggctgctcgcgggcgcgagggccagagcccgggatcgcgccgtggagcccacgaccggcgaggccagcgctgggggcagggcctctggatccctgacccaggacgccctgctccggcccgccccgcgcactaaactcggcctctagtcgcctgaagcccgcgcgggtaccgggtccgcgcggcccggcctgtgcctttagccccgccccgaatccccccaccctcataaccccgcccctaaccccgcctccacacacagaccccgcccccaaccagactccgccccgcgcaagctccctaagcccgcgactggcctgcacccggctccggaagtcgttcttccgcgcaggagccctgagcccgcacagccccgcccctcccggcgcccaagccccgccccgccgggttcccgctcgcccggcgccatggatccgctgtcgccgccgctctgcacgctgccgccgggccccgagccgccccgcttcgtgtgctactgcgaaggggaggaaagcggggagggggaccgcggcggcttcaacctctagtgagtgggggtccgcggggaggtaggggtgcagggagctccgcgggcggccccgcctgacaggccttctcccccagcgtgaccgacgccgcggagctttggagcacctgcttcacgccggacagcctggcggccctcgtgggtaactgggcgggtctgggagccgccacacccctccttgcagtgcagatcgtctatggggcgacagacatctgggattccccagaaggctctgacaccctctgcccgccctgtagctgtagtcctcccattggctagggctctggggtcgggcaggtttcgggtgcccccagtgggcctcgggttccaggcagctcgtgacaagcccctgtgctctctagaaagcccgttttggcctgagtgcggctgaggacatcaccccccggttcaggtgagacccaagcagggaggaaggacgggtggggaggaggagggtctgccacagctctccgcacctctcctctcccagggcagcctgtgagcagcaagctgtggctctgactctgcaggaggacagagcatccctgacgctttcaggggggccctcggcactggcctttgacctctccaaggtaccaggcccagaggcagcccccaggctgcgggcgctgacactgggcctggcaaaacgcgtgtggagcctggagcggcgactggcaggtaggattgggggtgggcacctcataccttcactggggtcccctgctcttgcccccactcctggcactgagtggggttcccatgggctttcctccccagctgcagaagagacagctgtcagcccgaggaagagcccccggcctgcagggcctcagctcttcttaccaggtaaggcatgtccgcctgtgactcaagtagggctgtgctctttaacctggaactcagtttccccccaaacaagactcacgctccagag

SEQ ID NO: 53439 - DNA, 1941 bp, Homo sapiens
gggcgtggctccgatggacgtgtgggggcgtggcttagatggtgggggcgtggctcagagagtgggggcgtggctcagatggtgggggcgtggctccgatgtaggtgtgggggcgtggctcagatggtgggggcatggctcagagagtgggggcgtggctcagatggtgggggcaaggttcagacggtctgggcgtgactcaggctgagcatcctgaggatggctcagcaaccagggggcgtggctggggcagaagggagtggccagggctgggagctgtccctgccttacctcgggcgggtccacacgggcggccaagagtgcttgggccgtgctattgggcagcgacaagttttgcgtcaggaaacgccagagctcctgcgggtttctggccaccgagtccagagagaaggaagacactggacaggcaggaaggcgaggctgagaggccgctgcaccttggcaaggtgcccccacatgcgctcggagccgagcccaacaccacagctctgccactgcagcctgtgcgtggctgggaactcagtgcaggtggaggggcccagagtggatgtgggcttcagcccagtgacagcagagctttgcccgcagccctgccccccaacttccctgcacagggcacacctgtggatctgtccaggtggctccccgaggtgcccgggcccgcactgagggcctccagatgctggcgtagggcctcgagctctgagcccaggctgggccgcgctgggtcaaacaggttgccttcctccaccacgcggtccaggcgctcaagcagctgcgtgaccctgcaccatggcggatgtcactcactggatgggctggggaggggtgggtgctccgaggggcgggtgggcactcacgtggagttggcgtactgcaggaagccgaactcgtctcgctggccgtccgggcacagcgattgcatgacaggcaggatgccggcagacgtcaggggcgccgctgtgtagaaggctggcagacccacgggagagggcagggtcgggggtgaaaggggagagagagagagaggaatccagaaggggagggagacagaggccgagaggagaaatttagagaaagtcaggaaggagaagcagcgttagggagaaggcggcacagagccctggccccagctgggctacaggccaagcgttctggggcgaatgactccagcaggtcagaggtcaaagagccactcaccaccccttctgccataactcccagagcattcctttcctttcagccagtgcaggcccacatgccctggcactctccccccgaaaacgtttcaggtgtggcactgcctacagagcccaggggaggacaaaggaccccctctgggcagtgacctctgacctctggccagctggttagcagagtgagtgcaagagcctgaaggagtatgaagggagagtagccaggccgctccagccccagcccaggccagcccagcctcagcccagactcagcccagaagccgaggcaccccagccctagaaggcaaggccaggcagagagatgccgcctcagcttgacccaggcaccagctgtgcctttaggtggccgggcctttcactccctaccacctcccacttcactgcctgccaccccccatctggagccagctgttcctgaggccggcagggggcccgggagggctgttaatgcaagcggggagggcgctcaagccaggacggcccatgggccccccgcagctgctgcccaggccagccaggaggaggtggccgctcacttacagactgcatgccagccgaggacaagagaccatgcggggagggagggggatcaaaacagaacagaggagaccagtgagtgcccacatcaccaggaagaggcgttggcatcatcattcgcggccacaggccagccccgacctccacagcccagccaggaggcacg

SEQ ID NO: 53440 - DNA, 1206 bp, Homo sapiens
ctttcggctctgcagcctcacaggccccgcatcccagcccggccaggggccaccccctttgcgcctgctgcaaagtgggaattcttgtcccaataattccagccacacagcgtcagggagccacgaggcaaggccaccagggagtgcaggctgctggggcccaaagggcagccccatggggcagggtccagaccatgcccggccttctggaacgggcagtgacaattgtgctgggattgctgcctgggctgagggtctggcgccacaggcccagtaaaggcatctttcttccagctcaggaccccaaagggaggggtgggaaccctgggaagcctctctgctgcctcagcctcacagcccagcctggcggggctccagcaggcaatctctgggtgttgccggtgctaagctccaggccccaggccccagtttccccccacacaccccaggcctttcttccacccctgaccgcccagaggagggagaggcacgcacagtgcacatcatgcctgaaaaggaaggaacaaaggccgcccagaggcagggtgctgcgacccccactggcctgcggtaccccgcttccctccaggcccagcggggcttcctggtgttctggactcttttcatggacaaaaagctcaagccagggagtgggaggtctgccaggcctgagaggatggggagggagaggggagctggactctgccccggggagacaggctcatggccgagtgcccagcttcgcctgcggagggagaggcagggagcccagagcggccaggacaaaggctgaggctgagctctctttgagacggagtgagggcgggggaacgccccttcctggcatggactcagggaccctggaaggcagacttgggagagcgtcagagggaagctggcaggagctgaaggggtggaggggcctctgggtggggcagctctcggcttccaggaccctctcggggatggggcctccagatgtgctgcacatgaccccggctgagctgggaacatgcggatgcagagaggttaggggagaacccctgggggagggaactcggagcctcccgcccacgcagggctcagacctcccagggaggggggctttcctgaggcctgctgacatcttggctgccctgcctcagtctccacatcagaagcttgtgctgtgtggctcacgtctgtaattccagcactttgggaagc

SEQ ID NO: 53441 - DNA, 2502 bp, Homo sapiens
ttgagacagagtcttgctctgttgcccaggctggagtgcagtggtgccatctcggctcactgcaacctccacctcctgggttcaaggaattctcctgcctaagcctcccgtgtagctgggactacaggtgcctgccaccaaccatgccctgctaatttttttgtgttttttgtagagacgggtgtctcaccatgttggccaggctagtcttgaactcctgacctcaagtgatccacctgcctcggcctcccaaagtcctgggattacagaagccaccgcgcctggccccaaggggaatcttttaaaaaagagaagttcccataaactgctttgaaaccataaagaccaaaggttagaagggtttgccgcaggcgctccgttgctaatgtttttgtgagggcttcttcagggcctcttgttagagtgtgacataaacgacttcatttgggtaccagcaagtgtcacagggggcagagaccagcagaaacctaaagatgacccctagaagagcaggaggccaggggaacagagttagacgagccacgtgctaagcaggacgtcgctgccgggggagctctccagacacgcagaaatgccacagtcaggaccgtgggacgcagcggattcgcccaagggcaggagcagcctggccaggagagaatgaaggaggggccgggcgtgaggttcggctggggagaacccaggcagggagggcctcgggcggccacggacgccgctttgccattttgggcgtttctggggaggacaacgcgtgcaggaagcgcagtcatctcaagctgacctccaaggttaccgagttcgagggctgggagccgggtctgaaagccccgacccgcctatggcgcggggactgtgggtccagccggccgattggccgcctcgctcggcgccggtccaggcgcagcgctcgggccccggggaccgtgagatgcggcgcagccagcttagctcggggtagcagccaccccagcccgggtgccgcccggcctggtccgcgacttcgggagggtccggtccttcccccggcccccacgcctgggtgaggccctgggcttcttgccggtgaccacgcggccagggtgggcaccagcccaggacggcgcccaagggcagcccagctccatccccgcgccgcgggttccggaaccgaggcgcgggacgctgggactctctgccaacatggcggccccgcccgggcgcctccccgggtccctagtgtctgcgtctcccgtgagggcgtgggcaaagtcggtgcagccagacgacaggaggcgagagaagcccagctccaggcccatgaggcgaaccacgtgggagccccagacagcgaccacgccccaggcgaaccaaggcccgccccgttgctacagctacgctcgtagcacacctgggcaggcgctgccggacgcatgcgcaatgaacctgagggcagggcggagtcgcagcagttgtctgacgcagtcgccgtaggacgcagccccgtacgctggagcgcagcggagacaggcgcgggcgcactggccgcatagagacgcagcgcacgcgcagtcgcgtatccgtgtgatgggcgggctgttgacggcgctgcgatggctgcctgcgagggcaggagaagcggagctctcggttcctctcagtcggacttcctgacgccgccagtgggcggggccccttgggccgtcgccaccactgtagtcatgtacccaccgccgccgccgccgcctcatcgggacttcatctcggtgacgctgagctttggcgagaactatgacaacagcaagagttggcggcggcgctcgtgctggagggtgagggtcgcgccgggctgactggggcccggggctgccgtgcccgccgccctcccagactgcggctccgagcgggacctgggcgggcggactcgactccccaggcgccgccctctccaccccttccccgcaaaaaggggcaaatgtgcgttcctggttggggcagccgtgggcggctcgcctgcagcggtctcagcggcccaaattctgcggggcggtggtgggaagagggctcagagccccagcaggttttctgggcttcgttcgcttttctgcaaggtcctggcccaggcgcctgcccctcttggagcggaaaccggaggttccccgtggtgtatgctcccctcggtacagtgagaaatgagcccctcttgattggctcctggtctgttcgtggtggtctcaggccgaagggcattgataaccacatgcggactgtgcatcgcctgggcggtgcctgggctacatctgtgggagtcgcaggagtctttctccactgttgatgaaatgtgacagaaatgtttctgcttttttcttatcctcgtctcatctgcaccactgtattaacgacatctgtagtattgtcccagcaatgttcctactccctgctgagagggaacttctccccattcaaaataaatagagctggccgggcacggtggctcatcccgcg

SEQ ID NO: 53442 - DNA, 1023 bp, Homo sapiens
cacccgcgtgccccgcgacccccgcccgcgaccccgcccggcacccgcgtgccccgcgacccccgcccgcgaccccgcccggcacccgcgtgccccgcgacccccgcccgcgaccccgcccggcacccacgtgccccgcgaccccgcccgcgaccccgcccggcacccacgtgctccgcgaagaccagtagagccccccgctcggccgccagctccgcgacgaaggccgagttgttggcgaaggcccacacgtcgccctcgttcccagtgtagaagaagatgggcccctcgccccggacccagaacctgtctgtggggagggcggatgaggcgagggtgccggggggcggcgggacggcgggggcggccgggccggggccggggtctcacccgacaccaggaagcgctgagggaaggtcttgttgccgaagcgctcgaagttgaagtggtccagacgctgctggaagaagcgctcctggaagccggggtccggggccctgcgggctgtggggggacgcgaacctcagaggcggggccgggaccggggaatgggccggggggcgccgccactcaccccccgcctggaggccgcgcagcccgagcgccagcagcaggaccggggcccagggagcggagcccatgtcgccttccgcgggcgcccgtcacgtgggcggggtcacggggccgccagggcgcgctcctccctccaggccccacgtgtttcgggcgcccgcggtccccacggagaccgtcgctgcttcagcgccgcgccggggctgtgccccccaacaccccgcgccccgcggccgctgcccaggggtccttcccgggcacggcgcggggaagcagagggcccccgggccatctccgcggcctcccgccccactggctcgtcctcctaccgcggccccatccggagctgcgctagggcgagtccctgctgcgcccgccaagcctccccagcacttgctcctggcaggtgccccactccaaggcagggccgggagagtgggggccgttctg

SEQ ID NO: 53443 - DNA, 1544 bp, Homo sapiens
cagggtgagctgtgcgttccctgcttagaatcaagaagaggtcttagttcatctcactttgtcgtggtgtctgcgtggcgcttcatgcctcacagaacatgggctggctacgagggtcaaaccaggccacagcaacgcgtcaggggccgcttgctttcttaggagcaacaggtccagaggcttccgctccaagagggactggggcctgggccaggaccttgccgaaaagcaaacgaagcccagacaacctgctggggctccaacccttcctcccaccaccaccgccccgcagaatttgggtcgctgagaccgctgcaggcgtgccgaccacggctgccccggcccggaaagcagatttgcccctttttgcggggtaagggtggagagggcggcgtcggggggagtcgagtctgcccgcccaggccccgctcggagccgcaggctgggagggcggcgggcgcagcgaccccgggcctcggtccgcccggcgcggtcctcaccctgcagcacaagagccgccggcagttcttgctgttgccgtagctctcgccaaagctctgcgtcaccgaaatgaagtcctgatgaagcagcggcggcggatgcgtggaagggggcctcgaggaaccaccggcggcatcaggagacccggtcctgtaaaagactgagagctccgcctctccgatactcgcgggcagccattgcggcgcacagaaccgtccgcgtgtgagcagcgcgcacgcgcacgcaatgcgcctcaaccccgcagcctatgcgcctgcactgagagctcacggcttgcggcgcctgcgtctaccccgcgcgcagtcgccacggcaacagggcgggccttggttctgcttcgggcgtggtcggtgcatggtcctccagcactgttcgccccgcgggtctggtcctgggttcctttcgcctcctgtcgtcggacggcaccggctttgcccacggcctcgcggggagacgcagacacccgggacccggggaggcgcccgggcgccgccgccatgttgtcagggagcgcccgctcccagctcttcggttccgggacccgcggcgcggggatggggctgggccgcccttggtagccgtcctgggctgggggccaccctggccgcgtggtcaccggcaagaagcccagggcctcacccgggcgcggcgtcgcgggggccgagggaaggaccggaccctcccgaggtcgcggacccggccggctggggcgaggctggggtggcccctaccccgagctaagctggccgcgccgcatctcaccgtcgccggggcccgagcgctgcgcctggaccggcgccgagcgagggggccaagcggccggctggacccacagtccccgcgccataggcgggtcggggctttcagactcggctccagccctcaaacctggtagccttggaggtcagcttgagatgactgcgcttcctgcgcgcgttgtcctccccagaaacgctcaaaatggcaaagcggcgtccgtggccgccggaggcctgtgttctcccctgccgaacctcacgcgc

SEQ ID NO: 53444 - DNA, 2325 bp, Homo sapiens
gctggatcatctcttggaaggttctgggggtgctaaagaacaagactccgcgcaacatagtgtggacttcttctcgcagcccctgagcaccagtgcccatcagcaagcccaggcgagtccatttctccagcagctctaggctacgcaggtagggatccaggcggctctccagcaggccaaaagcgtcaaggagtagcaaaaggcactggggctcatccgcagagttctcgcattgggagatggcattccagaactcaggggagatgttggcctgcagatcgttctgcagcacctccacgaaccactcctccaggaccgagtgtagcccgtggcccctcagaacctccaccgccgcccggagctcctcttcctttggcgggactgcaccgctggtccgggaagacacctggggtgcagaaaaccgtgaggcgaggggaacacaacatagaggtggggagaggcggggaagggaagaagctgagggggaggctgcaaaaactccgctgccccctgtccgtgctgcccggacgttgggccgaagctatggaagggctgtcagcggagctgaacgaaacgaaacggaaaggtggtggaaaatggcaggacaggacagaggcggatgatggacagagccgtatgaacccgagggtagcggccccaaagcgcgtacggtcccggaaactccgcgcggggccgcccctctcttcccaggcctcaccagccccagcgcagccggcggcaccaggccggtgctcacggtgttccaggccactaacaactcctgtccgggccgggagtcgctgtccccctccgccaccacaactgccgccgccatctgcacccaccgactccgagattcgctcggcgcggcgcgcggcgatgacgcacgtctgcacgcgcagccatgacgcgcacaaggcgctcagcgatgacgcgctagttcggcgcgccgtgggggagtcgtgcgcaggcgcggacagcgctgcttccgcggcggttggggtggtggggccccgggcggcgttgaccatgacccagcagggcgcggcgctgcagaactacaacaacgagctggtcaagtgtgagcggcgcagccgggacggggaggtcgggagggccgcagggccgggttcccggctcgcagcggggtgcccctggacccgcctcgctgcgggcatcgcgcggctgagcagagccctccgtgccggaggccgggtgtccgtggcccgagccctcgctggctcgcaggccccgcgccgggcgctcgggggtggtgcctgactctggcttcctcgggtggaaggaggcccgccctccgccgccgcgctcctgccctgggcccacagcgccgcccctcccggcccccaggcatagaggagctgtgccagaagcgggaggagctgtgccggcagatccaggaggaggaggacgagaagcagcggctgcagaatgaggtgaggcagctgacagagaagctggcccgcgtcaacgagaacctggcacgcaagattgcctctcgcaacgagttcgaccggaccatcgcggagacggaggccgcctacctcaaggtggagctcgggaggccaggccgagcatcaggggataggcacggcaggggtgttgccacggcaaggcgtcaggaccggctggggctcccggctgtgggcagtctgtgcctcgctggcatttcgggcaggggcagcgtggccaggcccattgaggaacccaggctgctgtgggagtgactgtggggctgtctgtggggcctggggcatcctgggtcctggtctttatccggttctcgctagccatgtggttatttctgctcagtgtgaagagccaggtcttgggcagagcacccagcacgggccagtgctaacccagcctggctttgagggtggagaggaagtgttttgggtcagattccggagggaagagggccctgccaccccgtctgccagtccccttgggcttccgccttcccccacacaggatcccttggctacagcacccccagccaggtcccagcacctgagtgtgaggacagctggggcttaggaccttaccaacaggtgaacattaacaaccttctcacttctctggccccagatcctggagagctcccagactttgctcagcgttctcaagagggaagctgggaacctgaccaaggctacagccccagaccagaaaagtagcggcggcagggacagctgaccagaccacgggcagggcctgcctccgtgtgcccctcagctcagccccagcaagtgtgtgctcagagcatctttgttcttcacggcagcagctaccttccctcactgt

SEQ ID NO: 53445 - DNA, 1784 bp, Homo sapiens
cgcgcccagcccagttctgtcccttctgagggcaagatggccagactctaggcagtggcctcaagtcccaggaagaagccaggctcccagggatggccacacaggttaaggggaggggttctagaaacagaaacctgaactccgtactcgccccacaagccccatgaccccgtctgactcccaagctgaggcgcagtttctctctacaaagggggagctgtccccactgccacctctggggcaagcccaggaggtgcccacctcacacagcagccagggccaaaggtacagacgcaggggagggagaggcagacaggagctggaggagagaggctgtggctatcagactgaccccaccttgatgggctggggtgatgctcgggcgagggtcggggagatagacccacgtggctccaggagtgggaggggccctggacccagccccaagcccccactggaagcacctcaggagggttagcacggatgcctgggccggcagatagagccggcaggggcaccaacgccctggttccaggaggggagtatggcacagggagaggcgcaatgccaaggccaatcccgggcaggaagcaaacagagggaggcagcagcctatctgctgagggagcctgcaaggtcccatccccagcctggggaaactgaggctggaggacagcccgcctcaggggtgagcctagccagcaatggctctggggcagtgcctggataggaagacccaagggaggcgccccaggcgccccccctcagtccccaggaaaggtacacctgcttcctgacaggtcaccgcagaccgggaagtcacatggagctgcccttggaatttgccccagggaacaaatacaggtgcaggaattaccagaaagaatctgaagattttttttcctgtgcccagaggattccaggccactggccaagagggagactcccctgcctggctggctcagagcctccgaaggccccttctccccagcaagcttcccaggcccagaacaggcatacacggcactcctgcccagctcccaaccagtgtgccttctggggagctgatggccctctcccaactggctggtgggctgcaccccaaggctgactgtgatgcgaggatccagccaaccccgatcatctggcccttcccattcatagcgtggcgcctggcgcccatgcagcgggcctccaggagaccatgtgaggccacccctcaaagccaagcccagggaggaacccacaagcccaggtctgcttctttcagctggactcacaaagggacagacccgcccagctaattccagatgagccacaacaactggcaagggacatagcactgtctgccctgtcgctctccagcagcctggcaaggcacacagcaggccagctgtccccacggcccaagtcagggggctccactggggccctggacccagcacggcccacccagccccagctcgcctcaagtccatgtagaaaccatcctttgcccaggccaagcgtcctgggatcagggcaggtgctgcccccacagttctgtgagctgtcactctctccctgccagccagtggccctgcccccaccactgaccttctttcttgaggagccagccttggtgaggcaggacttctgcagggccaggtagccgccaatcacctcgatctcatgcacggtggggtagcgcttcttcaacgtgggccccaggaggcaactagcctcctcctcctcggcctcccgtggccgaggctccctgttggcctgactgaagtgctggtcct

SEQ ID NO: 53446 - DNA, 1125 bp, Homo sapiens
gccccgtacaccagcacctcggcggcgcggatctgcgcggcccccggggcgggcggcgcgggcgggaagccgggcaccgtctcgatgatgaggacgctgtcggcgcggagggcgcgcacgccaggcacgcggcggtaccgctccagcagccgcgcccccgccgcgcccccgccgcgccgccgctcggcctccagcagcatgaacgggttctcgcgcagcgggcccaggctctcggccagcacccgctgctcgggctccgccgccccgggccccgcgcccccgcccagcgcggctagcttggcccgcttccgctccaggatctcacgcttccaagcgggcaccgcagcgcgcggccccgagcccggccgccccagggcggccatgctgcgaacgcggcagcggacggctggactgagggccggagtggcagccgccgccgcggccagcctgggcgccgcggccacgccccctcccgggccaccgaccattggggaaagcccgctctccccgccccgtgcgggaggcccacctatggcaggggaggagggcgggcccctcaagtgaccctaccgattggacaacactcgcctcaaccccgcctcccaagggacttcattggacaacgcctatcaccggagctggcctccattggggacggccccccggacacaccccggtgcctcgcgccgctcactggcagaccccacttccgcctctgcgctctcagctcccggcgtccctgggggtagccgggtgcgcggcccctggaccctgcgccccgagtgaccttggctgagcttgggacttcctcatgctgccagcaccgaggccgcctgttccgtccgctgagagcgcggtgcaggaagggcgctgctccaggaccgaaggcacccgtgtccgtggacggtgcacaggccacactctggcccggaccctgctttcaccaggggtcctccgacctccggcaggtgcctgcggggcttggaaatgccaattctggagccccgagcagccccaacgaaccagtttctcagaaatccctagtttttataggctgcccaggtgggagcctcttaacccaaccttgccatccgtggtccccaaaaagcatctgcaggagcaggc

SEQ ID NO: 53447 - DNA, 1773 bp, Homo sapiens
ctggacattttacttatattcagtttccaagtgtcagaggggttcaggactgtctggcctggggggcctcctcatgacctcaattcaggattatctactcaaagcattaaacaaaaggaaatacattttcaggatgaaggctgctcttttaagccctgctgaagaaaccatttcaaacaggattggaatagggaaacccggcactcagctcggcgcaagccggcggtgccttcagactagagagcctctcctccggtgcgctgcaagtagggcctcggctcgaggtcaacattctagttgtccagcgctccctctccggcacctcggtgaggctagttgacccgacaggcgcggatcatgagcagctgcaggagaatgaagagcggggacgtaatgaggccgaaccagagctcccgagtctgctccgccagcttctggcacaacagcatctcgaagacgaacttgagactcaggaccgtaagtacccagaaaaggcggagcaccgccagccgcttctctccatcctggaagaggcgcacggacacgatggtggtgaagtaggtgctgagcccgtcagcggcgaagaaaggcacgaacacgttccaccaggagaggcccgggaccaggccatccacacgcagtgccagcagcacagagaacaccaacagggccagcaggtgcacgaagatctcgaaggtggcgaagcctagccactgcaccagctcccggagcgagaagagcatcgcgcccgttgagcgcgggccggggcccggccgagcgtgccacccgcggggctgcgtctcctctccccgtggccctcgcccgcgcctgccgccgctgctgcgagcgagaggcagcgagcggccccgccagccccagccctcggccctgatgcgccggcaatcccccggccccgacccgggactcaaccctggccgcccgtgaacgcccgcctcgatcggacgccatgcccccacagggcgcgtccctagtgcgtcacttccggtcgacggcggaaggcggaaggcggagcggtccctgcaacccggccggcgggaactgccttctagtttttagtctcagaccagaccaccgggcgcaccccgatgccgagcccgcagcttctggtgctcttcggcagccagacaggcacggctcaggatgtgtcggagagactgggtcgcgaggcccggcgccggcggcttggctgccgggtgcaggccctggactcctacccggtggtgagggctcgctagggcctcggcgtgggggacgagcaggcctggcgtgcccgcctcgcggggtcatcgacccaaaaggcgtcgcattttctctgagagcgggtctttcccttatggcggatttagggaaggaggtttgggaaggggagttcagtttagcacctggaggaggttggaacctgaaagagaagacggtctggctgctcacataaatccctctgccctgtcagcctgagtaaaggagaagggggtcaagttttgggaaggacgcccggtccttacagccggaggtcttacgtgtgtgtgtctttttgttgaggtgaatctgattaacgagcccctggtgatatttgtttgtgcaactacaggccaaggagacccccctgacaacatgaaggtaaggctggcctgatgtggctcctcagatccctgccctcgaccctcaccccgttttcattgcctggcgtctaggtgcagtaaatagctctcctttatctcatgcaccttcagaggtggatttgagagaacgtcc

SEQ ID NO: 53448 - DNA, 1113 bp, Homo sapiens
ggtccagtcctgggaggaggaggaaggggtgggggagggggaggcaggcgggggcagggaggggtgggaggctgccctgggctgggggtctggcccagggtctcacccagggtctctggctgctgaggctggcgagggggcgcggggggggctccccctgcagccgaggtcagcaggccgcgggccgggacatcggggcaggcaggggctgggtgggccccatggctccaggacagggcgcccagggaaggcagctagccgaagcgctggctgcaggaggaccggggcggcaggctccgcggcaggagcagaggcgaggcctgggccaggcctgagctgcaggtgagagacggcatgagggcagtgccccggccacccccaccctagccctcgccctgcacaaaggaccgggcgcccgacctctgaccctgacctcagccgtgggatcccgacctccgcgggcctcagaacccaaccccctccccggtccccgcctccaaggccagacgcaccttcccgagggccgacccccgtcgcgtggggaggggcgctgagtccgcccccggcccccgccccctgcgctcacctgccccagcctggcgtcccggccgcgcgccgccgccgcagaggttgtctcaaaggcaggcccggacgcggcgcccgcgcctcggcccggcagctcggggggctccggcggctccggcggcggccgcagcgacctcaggcgatggcggggcccgggcggcaccgaggggcgcgggcgcgggcgtggggcgcggggcgcgggtttcggcacggcggcgacggcggcaggtgcgtgcggagcgtggcgcgctctgcggcggaggcgcggggaccgcagtgcgcgcggcgcccgcccgcgcccgcagcgccaccccccgtctggggacccgcgcggggtccgcggggcggggccagcctcccggccgcccctcggtccgctcccggcgtcgctctcgcccgcggactgcgtggggggcaggacccccgcgtcgcccccagttctctccaggctgatcctgggtcctggtcaagcccccgcccccccagattcaggaggagaatccggctgttctcctccctcacagtagg

SEQ ID NO: 53449 - DNA, 1180 bp, Homo sapiens
gcgggtgacaggggcgctgctggaggggtccttacggggccctggcaagatggtggggcaactgaggcagcctgggcctggggagggccgggagcccagctccgccgcagactctgctcaccgacccggcgtgcgcccgaggaagcaccaggccgcaggccccgccccctcagcgagaccccaccccgtaggggatgagatcccgcccccgccacgaggccccgccccccaggccaggccttttcagacccgccattcagagctggagaaccccaagccgagtattggtcacatccgaaccgggtctttcgggaaaccccggagcgcgtgggcttctgggcaataatatttccacggccggttcctgccttgtttgcgcatgcgccataggcgccactcaagtggcaggcagggaggtgggcgggacttccggcgcctgcgcagtggacttccgtcgccggcctctcaagttttgggtccccaggagcacccagttctccccaaatcggggccgggttgcctgaactcatgtcccgaccggtctgactggccctacacaggccacgtctgactggaacccgcccttcctggtgctcccctgggccccaagggccccactgccgtgggtcgtccccgcggcactcgccagtgcccgctgcacccctgcctgcgccggtgcagatggagcctgggttcggctggaggcggggggcccaaggtggggacgctgggggggcgcgtgtggcccccacgcccgccagccagagggtaactgcagtttgagaaatgagctaaaaatgtcagtagtgtctaaagcccgtgtcactgattgtaagataagacctgtgacaaaacgtgcaaatcaaacattttttatcagtgaaaaaagcagaaaagccactgggcacgctggctcacgcctggaatccagcactttgggaggtggaggcaggcggatcacttcagtccaggagtttgagatgagcctaggcaacatagtgagacctacatctctataaagaattagccggcgtggtggtgcacctgtagtccttccagctactcaagaggctgaggtgggaggatcactagagcccaggaggttgaggccgcagtgagccagatcatgccactgcaccccagcctggatggcagagtgagaccctgtctcaaaaatcgg

SEQ ID NO: 53450 - DNA, 2742 bp, Homo sapiens
ggccaacatggtgaaatcccatttctaccaaaaatacaaaaattagcggcgtggtggtgggtgcctgcagtcccacctactggggaggctgaggcagaagaatcgcttgaacctgggggggggcggggagccaagatcgcgccactgcactccagcccgggagacagagcgagactctgtctcagaataataaattaagtaaaataaaaatgctgcaaaaatacagcccgtttgtttttaaacaggcgcaaccacatgtaattcattttaagtttcttttcccacccaagtaaaaatcaagtcataaattaggaaaagcattaacagaagtatgtttcagccccagcgcgctgacctgtggttggaataccggccctggagcccggaggtcggggcccacccgccgagggaggtctgggcgctgtcctggtctccacggagctcgcgcactcacggggccgaggcaccaaggcgaccggcgcagagccagcgccgtctccacaacagggcagggcgcgcagctgcgggggaggcctcgcccctccgctcccctcccctgccctccgccccggccctcggggcgcggcgtcccccacgtgctcccctcacgcgaccgcgagggcagtgggcgtgcggcacccgggagcaggaaactccgtggcctctgcggctctgtggagagctcccctccaccgccgcagcccccgagcccgtgtatcttcctgcctttaaggcatcgcagcctcctcggcctggaggccccgggctcgctccgtgcggaccccgctccagaacccgcccagcgcgcagatgccgtgtcccggcgcaaggccagagagggcgcaactctggacgtggggccgccaccgagcctgcccttcccggctcccgaaaggccccgggctcagagccaagactgcgcttgcccgaggcccgtcgggcccgccctccctcggcgcccccagcgcagctgcccgccgcccgaccggaagcccgcactcgcgcctgcgccccaccccgtccgcgcgccggccgcggcactgcggcggttaccaggacgctgaagcagcgcagccaatagcgccagcctggcggcgtgctcccggcagccagccaatgagacggcaaatcaatcatttgaaacacccaatggacggagcactgcggcgccaggagggggattgtgatagggagataggaggctgcggctgaccaataaagaccaaactggcttaaaaaggcggaccttaggcagcttgattgacgggggcaaggccaatcaaacgagggagcttgccagcctcgttctggcagcccattccgagactagcggaggcgggcagggagggtatataagcgttggcggagcgtcggttgtagcactctgcgcgcccgctcttctgctgctgtttgtctacttcctcctgcttccccgccgccgccgccgccatcatgagggaaatcgtgcacttgcaggccgggcagtgcggcaaccaaatcggcgccaaggtaagttgccggggcgctggggccaggcgggcctgccgggcggtgtgggcgggcggccggggaagatggcggcagcagcggccgggcggcgcccccgcattgcggccgccgggccccctccgcggggaattggccgagccgggcgaccgaagcccccaggaacccggcggccagggcgcgcggggcgggggaggggcggggagggccgggctgccgcgcccgtccggggcggggctgcctccctgcgcaccggccgcggtgactcagccccggcccgcccgggcccgcccgcgtcccttgtagttttgggaggtgatcagcgatgagcacggcatcgaccccacgggcacctaccacggggacagcgacctgcagctggaacgcatcaacgtgtactacaatgaggccaccggtgaggccccggccccttccccgaccgccctccggggaccccgcggcccctgccttggctgacgccctcccgtccccgcaggcggcaagtacgtgccccgcgccgtgctcgtggatctggagcccggcaccatggactccgtgcgctcggggcccttcgggcagatcttccggccggacaacttcgttttcggtgagccgtggctggggactgggcggcggctcaaaggtcaaggggctgctccaagggcaccgccgtgggaactgcgcagccggggcccctggacgccctcctcttctctgagccactcaatcccctctactaaatcggctttgggagcaaggtccagctgtctgccgaggcgaggagccgccacacacgtaatctccctgcagggagctgagctggggcagtggctgttcctctgtccttgggaattggcagtggcccccccggggaggggtttgttaagctgtcaggtttggcccctgacttaattcgtagcagggcaggctgccgtcttttggctttgaagggtccgtttgctctacctccagggtgaattctgtggtcagctcacaccatgtcactcggcttttttcgcatggcggtgaccagtagtgctgtctacctggctgacaaatgattagctgtgttctctcacaggtcagagtggtgctgggaacaactgggccaaggggcactacacagaaggcgcggagctggtggactcggtgctggatgttgtgagaaaggaggctgagagctgtgactgcctgcagggtttccagctgacccactccctgggtggggggactggg

SEQ ID NO: 53451 - DNA, 831 bp, Homo sapiens
cttcacctgctgggaccctgcactgcccctgcctgcaacttcgcctggctggggcctcccttgtcatcactggcctgccctcctacccagggtcgggccccaaggctgccaccttgcaggagccttacctgcggtgccgtcacccgcacctccccaggtcctccccagacccaggacccagaccaggcccagagctcaaccccttcaaaaaggctctgggcagctgcttctgtggcctcagcaccaccccctttctcagagaggaatcccaggctcaggattgtgtgtgtgctgtgacccttgtcctcctctgccaccgaaccagctgggggttggatcaaggcactggaaccctcgccctagggctgaccaacttggccagcggcaagagagctgtggtagccatggccttgggagctcggcccggcttgtgggaacaggagctctgctcacggctgcaccaccaggcacccctggtgagacccaaagctaggagtgggagcggcaggaaagatggagcgatctcctccagctgggctgaggagggagggcttcctggaggaggtggtggaggaagaagccttcaaggaagagcaagagtttgctgggcagcgggaaagaaatttctagagaaaatttcagcagcggagaccgaaaagagagagggtgtgtgtagggggcttggcgcggcacagcctgcgggagggcggcgggctggagaggcggggaggcccggggagcccacccgcctgggataagaagggacactgtggaacctggactctccttcacggctccgcggagctcggtgggcgccacagcctcccggtg

SEQ ID NO: 53452 - DNA, 1424 bp, Homo sapiens
ggggtgggcttcgtgcccgtttcacgcggaggaacccacgctcaggagggagtctgcgcctgtgtccggcccctgcggggcagaggggcggggagctcaacccccggcaaaacgtccccgctgcgcgtggctgccgcgagatctgcaagagcgttttccacgcttatgtacacgaaattcactcggctgcgacgacgtccgttcccggagcagacggaccctgagtccgccccccacgccctcacccgccctcttctgccagaaagcccgggcgcgggcgggaccgggtgggcgcatgcgcgctgggctggctgggcggggtctctcgcgccgggtgagggcgctgctcccaggaacctgcgcgcggccccggcggcgtttcccgggggccggttggcgggcggacctgggcggtgcggggcggaagtgggcggctgcgggacgcgcgcggagtcgcgcggcgggcgggacctggccgagctggagggcgccggggagcggggctcgggcggtccccgaggcccggcggagcgggcttctggggtgtctgcggcggcgccgggggaacgggctggggatggggcgcctagccgggcggtggccggggcctcggccatgttcgcggggctgcaggacctgggcgtggccaacggcgaggacctgaaggagaccctgaccaactgcacggagccgctcaaggccatcgagcagttccaggtggggcggcccccggggcggggggagcccagttggagggccgggccgcctgctcgggagtcgggcctggcggaggcgccggaagttttccggctttctgctggtggctgagtcctgttctgggggtggagtccggagccagcacccctttgctggacggctgggtggctttcggtggctgcggttaccgccagcacggctgggaacacctgggtgcgtgcctccctgtgctctcaggacctcggggtgcccgggcgcactgggctgcgtttgaggtttctcttggcttcctcagacagagaatggtgtgctgctgccatctcttcagtcagccctccccttcttggacctgcacgggacgccgcggctggagttccaccagtcggtattcgatgagctgcgggacaagctgctggagcgagtgtcagccatcgcttcggaggggaaggctgaggaaaggtgggtcagcgggaggggtgggcaggtgagatgtgcagccggcctctcagccttggatcgactcaggggcatttattgtccttttggctccacatccttgctcccagaggtggcctgggcctgtgtctgagtgaccccttgacccatgtgtcctgggcgtggaggcttgtcctggtagctgttatctgtgtagggacaggcaggtagctgctgcgatttggcgcatcgctgcaccatcaatcctgtga

SEQ ID NO: 53453 - DNA, 2669 bp, Homo sapiens
catcctggcatacaaattggttatagtcctatgtgttacttctgagaaaattaaaattaatggtgtttctaaaaactagagatgattcaacaggtgacagcagttgtataaattaatgacttcactgagacctcatgtttgccaccctgtaatgccattccaattcagtttgtggtgttcttaaaaaaaaaaaaaaaaaaaaaactccctgaaatgtctcctccttccctgcttggcatgggacaggactatgtgggaatgagccttcccagcaagaggggacactctgaccctcagattttgataatcaatgctttcaagaagaaagattttgatcaaaaggggggcaaatgagaaagaaaaaaatcatttatctgaggaatgtaaagcccttttaaactgtgggcccagaaagcttgatgttaagtgccagaaagcatttcaaatgaaaccgcagcccctcactacccctcgagccaagtaactatccactgatgacaccaagccgtggtcaatcgcgaaccaatgccatttctacaagccagtgagctcctgggcaacgttcgaaaccacctgctctccgatgggctctgttttctttaaaaacctgagcctctgttttgttctccgttgcacctggtgacccaggccgccctcgacctctgtgcctgaataaacccaccgggcaccacattctgacccttttaattattttaggttgacaactaatacaggactcagcgccggtggacaggaagccagggcccctgcagggaggcgcccgtcccttctcccggggagggcagggcgggcgcgcgcgcgtcccaccgggagcgcctcctcctcggcgagggagcgaagggcctccgggtcctgtgatgtccgtgctcggaaggcgcggaggagggcaggccctgcgggacagggcggcggggtcgccggggtcggctcagctccccgcggcgtccggctgctcggcggcctccggagcggggccctgcgggagaacgcaccttccccgccccatcggggcctcagtttccccaccccgggagagccggcggcccgcccccggctcactcccagctacggccctcacctcaggacgcgcacccggcccggccccgctctgcccccggcgcccagaccgcccacctggcccgcgcggcccggggtcgctcacctgcggggccgggaccgccccacaccgtccacgcccggcgcggaaccttggcccgaccgcagccgctggcccggagggctttatccggcgcaccaaggccagcgcgggcggggcgaggaagccgggcgcacaaagctcccggcggaagtccggccggggcgggggccgaatgggaggtgggcgaggcctgagggtctggagtgggcgtagccgtttctggcgggggcgtggccttaccggggaggggcgggcgcctgccgccagggggcgccgcggggcagcggggttgcacctggcgcttggcgcccgcacctctgcccgcctcggagaccccgcagccccgcgccgccgcctggccccggccccggcccctccgcgggatcctggcccctcctcgagcgccgccaccggccgccatggcctctctgggggacctggtgcgcgcctggcacctgggcgcgcaggctgtggatcgtggggactgggcccgcgccttgcacctcttctcgggcgtcccggcgccgcccgccaggctgtgcttcaacgcgggctgcgtgcacctgctggccggggaccccgaggccgcgctgcgggtgagcggggcgtggggaggccggtgcgggcgacgcctccgcctcgagcccctggggagggcccagcgcccctccccgaccgtcacggggtcgccctgccgcccccgacccagcgaacgccccggcaggtgggagccgagcaggggggccgcacctgagctaagcgaggccgcgctggggggcgcggcggtcaccgggagaggccggggcccgagggtgactcacaccgggaagggggaagctgctgggctgggtcaggcccgagggaccgccctgccctaaggggaaagcgttgcgcctgtggtcatggccgggagaccgggtcagtctcctcctcagagccctcagccctcccccagcccactccccgaaacagccaggagtccagggtgccagggtgcagcggccgaggccctgcacggagcccggtgcccttctcgtgccccctcgcgttccggggccgcctgttcctgcgcatcccaaacgccagcgctgcccacccccgctcagtcccaagcaccccgcagaagcaggcaggtgcccacggttactgaaggctcggtgacagcagtgatttaaaggagagggaactgcgcgctgtgggagggtctccacgcccctgactggcaaaatatcccccttggaggagactgggcaaagcgcatgagacccccctctcttgtgtcttaaagctgcgtacaaatttacaatcacctccataatgatttcatttttttgtttgtttcaaagatggagtctcgttctgtcacccaggctgaatggagtgccgtggcccaatcttggctcactgcaacctctgcctcccgggttcaagcaattctcctgcctcagcctccctagttgctgggagtacaggcgcccactaccacgcc

SEQ ID NO: 53454 - DNA, 1045 bp, Homo sapiens
agtgctcttcccgcgacagccttccagggctccccttcaactccagaacaaaggtgcagtgcctggcgctctggatcaagtctcctcccgagctgcattcccaggctctgaccttccgtcctcgcccgggacttacgccctgagcctccacgcccatgtggcagaggatccagcctgcctgcgctgcagcagagcggggctcctgtctgcaccaccccatggcgggctgggggcctgcaggagccccctctcctgctctgtgtccttgagccacctcaggggcaggtcctctcctccaccaaactttggaccctgccaaggcccaacatccaaaacgggcaaaaaagcttcccagacacatctgtgtgattggagtgggggaggggggccttgctgctggccccagcccagacagagacacgtgccctcggagtgcaggactgagggtgagatgctttcctgcagcccgggccacatggcctctcctgcctgccacgtccccagagcagggccaggccagtggtcgccaccacccttcccccatcaggtctgccagggccgagggggcccaggccaggccagcacagaccagagatggaccctggtggcgagtggctggcaggccctacctctggattacagacgcggaatcattctcccgtttccggcgcttcctctccgcgtagcccctgaacaccctgggaaaccaccgcgagtcagcactgcccttggccggaggcaggagggacacagacgtcgggacagtggtgcgagcagagggcccagcagggcgtctggggcacggggcccggcagaggagtcccagcctgcctcacctgtcgaggcccagctcccagcaggccctgctgcgacctcggtgcccgctgggagccaggcccgcagagagcggcactccctcaagacccaggtccctggcctgcccaaacctatttggggtgggagggtctccccagggacaacagctgtgcccttaggcaccaagtcatacaggtacttacgagatgctgaagccagggccagaagg

SEQ ID NO: 53455 - DNA, 1312 bp, Homo sapiens
gtaaggaagccaggccggcagggcgccgggcccacgcgcaaccaatgcccctcacgctccacccccggaggcagggatcagcatcccttgggctggggggtctgggcggccctggcacggcctcgcgtgcccctacctgcgccgttgcggttctcagggtgactctgggacaggtactctccaaacgctcgggctgctctgagggtggacagagggcacggtcagaggccacggcacgaccctcccaaacaccgggccgcgcaagagccgggggtccggtccccagccaggccctcggcgtctggaaggagggtcggggtcgtccccctccgggagcccacacacccttggtcctggtgcgccctggccaggcctgcaggcccggcccctgcccgtcggaccgtggagaggggtcgcgaggccggtcggctgctgttccccgggggaaccgaggccactcccgacctggggggtgcgctcgcccaccacgcgctcgcgaggggaggggagggaagagcagggcaggggaccaggaagagggaggcgcggggcgcggggagggcgcctcagtggcagaggccggggcccgggagcccggggagcaccgcggggcaggggcggactcgggcggggtcggaggtccagggcggggtgcgggaaggcggccccgccgcactcaccgcactttggccgccaccgaggacatggcctcgctcctcagcgccctcctcctggaggcggcggcgcccatggtcgaggcggcggcgcatcccccgggcctcagagcgcgccccgcgcccgccgcctccgccggggtagccgcgccgcaccgggggtcgcgctcgggctcgggctcggggtctcgctcgggctccggctcgggcttgggctcggggtcgggctcggggtcgggcccggtccccgcatggccgcacccggcgctccgcgcgtgccgccgctcccgggagagcgctgcccgaaccgagggccggccccgcccatcgtgacgtcagggcccgggcgggcccagaggggcggtcggccccacctaccgtgacgtcagggccccggagagctcggagaggacatgtggccccgcccaccgtgacgtccgggcccgggttgagttgggggcggggccgggcggcctggctccgcgccctctcgtccaggcctccagagcggggaaactgaggccagcggccccctggtcgcaaagtcctgggccctcggccctcacgatctgctgctcagacctgcaggatcacagggaggccggttctccctccccttacacaaaagggctccctgt

SEQ ID NO: 53456 - DNA, 988 bp, Homo sapiens
tacaactgaactagaatgccccctgggctcaagagacagctctgagctgaaaatccagcccaatgctggtgcgatgtgcagcagccgaaacctgctcactgctgtgggactgcagcctggtgcagcctcactggaagtcagcttggtggtttcttctacaactaaacatactccgaccacaggatccagcaatcatgctccttggtgtttacccaaaggaactgaaaacctctgtccacacagaagcacgcacacaggtgtttacagcagcttcactcataattgccaaatcctggaagcagccaaatgccctccagtagatgaacagatcaactgtggtgcgtccaggcagcggacgatgactcagcaccaaaaagaactgagctccaggccaggaaaaggccaggaggaactttgcgtgcacgtgactgagtgggagaaggccgtctgcagaggctacaccgtgtggttccatttccatcactttctcagaatgacaaaattatagagatcgagaacagatccagggctgccggcaagccggggtgctgggtgacaacatggcagccacctgcagggtctcctccgtgacagagtggccccgtgtggtgcaggtcacagaaacggcacccacaccacactgcaccacacacacccaggagggcacggacgggctgctggggcccaaggggtctacagatggcgtaaacgccaacgtcccggcctcgatgttaccccctaaggcgctgcccgtgaaggagccctggcgaagggcacatggggtctctctttactattccacaatttctccgatcctataattatttcaaaataaagtgggttttttgtttgtttttgttttgacacggagtcttactctgttgcccaggctggagtgcagtggcaccatctcagctcactgcaacctccacttcccggggtcaagcgattctcctgcctcagcctccctggtagctgggactacagg

SEQ ID NO: 53457 - DNA, 570 bp, Homo sapiens
gagcgcggcagagcagacgccaagaggacccttctctgggtccagaaatgccccccaactgggaaatccaggcatctggtcccccgagttacatacctgtgggctgtcatctttctcttcctccatggccagaaacagaaaaaacagtcaggggcgaaaagcagacagcctgaagcaaacaagggcacacctctacccgctcatgctcacacctggacacttttccctgggttcctttcaagtcaaattatgtttcactgaaaggaaaatcctgctgaaaaagtctgttctccaggaagaaaagctgtcttttgagaagtgtctgtcatctgctaggagccacctccttccctctgtaaacagccctcacgtggctgtcccggaacccagaacagcagccagatggggcgtatccaagcaggtcaagaggagccaggcccagcgcggcggggatgggggcagcgctgccttctggagaagcacggctggaggggaggtgacgctggcggggcgtggatccggggtgtggggatgcagctggggaggagggtgcagctggggagggggtgg

SEQ ID NO: 53458 - DNA, 1837 bp, Homo sapiens
ctggggaggggatggatctggggtgtgggggtaccgctggggaagggcgtgcagctggagaggggatggatctgggctgtgggggtgccgctggggacggggtgcagctggggagggggtggatccggattgtgagggtgcggctggggggcgacttccgcgtggggtgagaggtcgcctgcgagggtgaccgggcaggagggctcagtgcgcaagccggacgtgctgggtccaagattattgattaatttgggcaccgcgagggctcgagtccccccacaccactgcccggcctgcgggggagcacagacagcccgggccctcccggctgcaggtcccgggctttccccgcgcggttgccggctccgcccagaggagccgcgcccggcggaggggtaagaaaggcagggtcgcggcgtcaacgcggcggccgtctcgagtccagggcccgcgtcctccccgacctcccgacgccacctcacggcctcagggggactgggctcccgggaaaccgccggccacctggcggacgaacacaggcagtggcgggcagtggagacgccagggaccaccgcgctgagagcgatcactcatccgccagccccgccccgcgagccccgccccgcgagccccgccccgcgagccccgccccgcgagccccgccccgcgagccccgccccgcgagccccgcaccgccggccccgcaccgccagccccgcgagccccgccccgccccgcgcgctcctcgcattggccgagtccccgcggccacaccccctaccagattggggccgctattggacgcggcggccgcggccaatcggagccgctcttgctgcgacgcagcggtcggaagcggagcaaggtcgaggccgggttggcgccggagccggggccgcttggagctcgtgtggggtctccggtccaggtgagtctgtcggattggggcgggcgccgcgcgcggccaggggcggggctggccgggttcccggggccgcgactacccgctctctcctcccgcagggcgcggcatgggcgtcctggccgcagcggcgcgctgcctggtccggggtgcggaccgaatgagcaagtggacgagcaagcggggcccgcgcagcttcaggggccgcaagggccggggcgccaagggcatcggcttcctcacctcgggctggaggttcgtgcagatcaaggagatggtcccggagttcgtcgtcccggatctgaccggcttcaagctcaagccctacgtgagctacctcgcccctgagagcgaggagacgcccctgacggccgcgcagctcttcagcgaagccgtggcgcctgccatcgaaaaggacttcaaggacggtaccttcgaccctgacaacctggaaaagtacggcttcgagcccacacaggagggaaagctcttccagctctaccccaggaacttcctgcgctagctgggcgggggaggggcggcctgccctcatctcatttctattaaacgcctttgccagctatacggtgtttgttttttggcctcaggtcatggcaaagtgtgcagcatgacagatttcagtgcaggcacctaagccgagttctcatgcagactcggcgctgtgaacctctttggaggtcatcttccgagtccgaaggttctgggaacctgccaagggcaaacatcactcagcttgcaggagaaagaatttacaaggcagattgtgccggatgacagcactggtcagttcatcccccaaattattcacccagggaacaaagatacagagatgggggtctcactatgctgcccaggctgagaactcatgggctgaaatgatccgcccgcctcagc

SEQ ID NO: 53459 - DNA, 1651 bp, Homo sapiens
actcagggggttgaggcgggaggatgccctgagccctggagtccgaggctgcactccagcctgggtgacagtgcaagaccttgtctcagaaaaaagtaatttcttttttttgagatgtagtcttgctgtatcgcccaggctggaatgcagtggtgcgatctcggctcactgcaagctctgcctcccgggttcacgccattctcctgcctcagcctcccgagtggctgggactacaggcgccgccaccacgcccggctaattgttttgtatttttttagtagagacggggtttcaccatgttagccaggatggtctcgatctcctgacctcgtgatccgtccgcctcggcctcccaaagtgctgggattacaggcgtgagccactgcgcccggccgagaacaatttttttaaaaagattctaaactgtttccagcctacctcctggccaaagggccaatatcccctcttcatctcctgggcgattcggtgcgcctttcggcctcaacctcgtggccggccccgccctcccctcccgaagccgcggcgcgcgcaccttgttctgggggccggcaggccggtcctccggccgccgcagctggtaggtcccgcacgccagcaggtgcctgcagccttgcagcgggcaccactccaccgagtccgcggtcagctcggtgtccaccgtttgcagggcgaaacagcccatcatccagccctcggggaagggcgcggagccggcagtagaggcgggtcggcggggccgggctgggtactgcgcggggcggcgaggccggggccggccggacgagcgcagagccccagggacaccgtcagcgcgggccgcctctctcgcgactccttccggggtgccggggcgggacatccggcagggccttggcctccgtggacgcccctgggaagccaggctcccacgccccctgtcggccggctgaccgcggcgggcttcaggcgtcagacgcgctgctccctgcggggccgtagagaccgaaggcttcgggaaatccgctcctccacaaagcaggtttggagacggcaagttagtgacagagccgtaggtttgaagccgcctctgcaaaatttctatcactgagaaaaaccccaacagcgagctgcggtagcgcaccccgtggcgccctcccggttactcctggccatcgggccgcgctgacttaacatttaggctgcagtttccatgacaggccttgccccggaatcaacgccttcgtaaagctgatgaggagcccgcgccccactaagcccagcaccccgaggccgcaggcgcgctctgcctgcctcctgtgaacccgccatggcggagctgcccctcagagaccgccttccagggtctttgcttgtctgacacccgtggctgcatcaggaccccccagaagcggctcagcaggtggacggctccgacccctatgattatcagcaccagtcgcctggccgccgcccccctcccccaaaactgcctttgaaaaaacccctaacctaggagctttggacaagatgatctgaggacgaactccatctcacatgtggcctggccggcccgtgtctattaatttttttgttttttttttttgagacggagtcttgctctgtcacccaggctggagtgcagtggcgcgat

SEQ ID NO: 53460 - DNA, 1735 bp, Homo sapiens
gggctcccatccgggtaaggaccctggctggtgcagctgcacaggtggctccgagaaaccgccaagcctcaatgcccacaggtgccatggaatccccagcctcaaacgtggagcgtgggggccaagtaagaagagaagtcgaggaaggccctgagtctgcagcatcagggcccaggcttcttcctctctgctccgagtctgaggctcagcctaacgtggccaacccctggcagcgttaaaacgagcctgaagccctgctgagaactgggaggcacagaagagcccacaccagacccgcctcggcgagaggtgtggaagtggcgctgcctcggaaagggcgctgtgtttaaaccgtgtggccgcactggcagcccggacgccgcgctaggccccggatcgccgacaccactgggagggctccgggagaacgcggctcgggctcgagccacgcatctccgcacccggctcgggacagggccgtggcctccacctccggcagggcagggccgagggtggccaggtgcaccccagagccgaggggtgcgtgcccgccggcctgcgagaggaagctgcacccgcgcggggccagcagccgggcccgcgcagcgtcccccgccccgctggggcccatcccgggctccgcgcccccgccccggccgccgcccgcacaaccgcccccggccccgcgcggaggcctggacgggcgagacgggccgggtcgcgggctccgcgccgctcaccttcccggccacccggccgagccgcacgatacccaatttgaagtcggtcatggccgggcctgcgctctcggccggcagcgccgctccctcgggaggcgccgagcgggggccggggcgaggccgcggcgcgccgggacaggacgggaccggagccggggtcggggtagcagccaggcgggctccgggcgggacgaggctgggccgggctcgggcctccgccgccgcctcgcgcccgccggacctgccacgcgccgccgccgccgccgccaccgccaccgcgcgcaccacagcgagcggagcggaggggcggggcgcagccccggacacaccccccggcccgccgccgctcggccaatggctaggcgcgcacggcgccgaccggcgcgcgccgccccgcaacaaccaataggaggagggcgagtgcgccggcgctctggggagcggggcgagcgcgggggaggggcgaggccgggggcggtgcctgcgcgcgccgacgtcagtttcgcgggaagctttgtgcgggcagcggcgccgcgcctagaggggcagtgcggagtgtggctggggactcgcgccgggtccgtggagctctgcgagctggctgcttttcgcctcccttgcggtagcctccgtaagctgtttcccgccgccgtcctggccccgagcgcggaaggaggaggtggacggagctcgtgcggggccctctgggcgggcggggagcgggcgaggcgggctaggaagaggccgttgccgcgggacgcgggtgtttctggagagacagcggacgcccggcccacgcgacccggagggcgcggcctcccgcgcagccttctccgagccgccggctcttcagcctcgggggcggctgacctccagagcagcctggtccaaggcgtctggaaacggaactccagtgaggcccattaggctccgcgggaaagccgagacccgctcagggagggactgggtacgccgtggtgggcagcgtggctccc

SEQ ID NO: 53461 - DNA, 555 bp, Homo sapiens
ggagaaggttgggggtgcggggcaggagccgggggtgggggttgaggcggggcaggtcctacgcggcggagcatccccgcccaggacgcccgcgcggccccgtgacgtttttccgcgactcggggtgagggagacccctgggcgggacgggcggagggtgggggcggaggagtgggttctgcccgcagcagagtgcagcggggagaccttcccagtctcagagctcgcctcggccccgcccccagccctgccccccgacggagacgcggcggtgactccctccgtgggggacgcacgggacgcttgcgcctcaagtcccttaagcggcgcccgacgcagcgcagcacctacccagccgggacagggccagggccggggatggatgagcgcggccggggggcggggcaggggtggggcggccgaggcaggggcggagctgggaaggcgaggcaggggcgaagggcgggggcggggcgaggaggctgtcagaggggcggggaataacgagggggcggggccacacggacggatggggcggggaataggggctgggcc

SEQ ID NO: 53462 - DNA, 1614 bp, Homo sapiens
ggcagggcctgggaggggccggatgggggtggaggccgggattgggacggatgggggcggggcataggagggggcggggccgggcctcggagccgggactcgcgggcggcgggcgggggcgtcgctgcgcggctggccggtgaggccgcggcatggggcgagtgcagctcttcgagatcagcctgagccacggccgcgtcgtctacagccccggggagccgttggctgggaccgtgcgcgtgcgcctgggggcaccgctgccgttccgaggtgggcgcgggtcctcggggagggcctttggccgcacctgcgcggggccagggctcccggaagcggctgccgtcgcctggccccgggttgggcccgcggagtcgctgtcttcgccgcccgggactgctgggaagcgggctcggcggcgccggggaggtccgggcggcgccgcccttccgcgtctgcccttcctgccctctcgccgaggggcggcggggtcccggcggggcctgaagcgggtccactgtggaggacgccctgagcgcgggcgcacgcaggcctgcgaccctccccgtccgcgctcgcacctgctgggctccttcccgcaccctggctcccggcgcaggcgctcccgctgcagagccgctcctggcgcgggcgtgcggtcccggcggggtgcagacacctgctgcggctccctgcgccccctgccacccgccagcaggcctcgccggccccccgccgaggtggacgcctgggcctcggggactgggtatcgggttgctgcagtggccgctggcagggcgccctggaggtgagggccggcccgcgaggtgaggctgcctctgcccggcccttggctgtgagtgccgcgtccctgccggggacttctctaccttggcctcctgtgggaaccacctgggctgcttggcctgtgccacagcccctggacttgccgctggaccttgaccgctgggcccgcgcgtgggtaacagcaccgattttgtgcctgctgagaacccacagtctctgttctgtcctctcagcctcctgggacaggtgatggtgctgtggccctgaccctgcaccgcctgaggctgtggggcctcggaagaagccgggtggtaggtgcttctgtcaggctcctggccccactgggcctcctgggatgaccccacagcctcccttcctctgtcccaaccttgagtttggggtctgggtgggggcaggtgtggccgtggcagggcagagatagcacacacatctcttgggtacaggtgtggtgtgtggtgaggccggctggatcctggttgagggctgtgcaggaccctgtcgtccttcccctggcgtggcctggggtgagcaggccattgcttaccacagggaagggacggccccgcggtgcgtgactggcctgggtgtgcaggctcccctggcctccgggtggacgtggtgggtgggttgaatgctcacgcctgtaatcccagcactttgggcagctggcccaagagccgagggagcactggctgatggtcctacctcacagaggctggtctgaatgagggagaaaaaggagggtcgtgagctaaggagtaggagatgggccctgatgggccagagagc

SEQ ID NO: 53463 - DNA, 2156 bp, Homo sapiens
ctgtagtcctagctacttgcggggctgagatgggtggatcgcttgaacacaggaggttaaggctgcagtgagccgagatcgtgccactgcacactagcctgggcggcgggagtgagaccgtgtctcaaaaacaacaacaacaacaacaacaacaaaaaaacaaaaaatggaccgaggttggggtggcaaggctgggctggaatggaggctgaggacaggccctggcagcgcccgggggtagagggcgtgcagcaggaagcaagggccaccctcagggatgggggactgggcctggcagctgccgaggggtaggcaggatgcatgtggagagccacgtggggctgcggctgagccaaggattgtgagaggaatcctgctgctctgggtggcaggcagaaggcctgggccacaggtggggcctgctggggagaccacaggtgaggcaggtatggctgaccctgggcgctcggcacaccggtactcctcctgcctggctgctccctcagcaggtgtcagagtctgagtcaccttttcctcacgtgacccccaccaggaccaggcagggaggtggccatctttggccctgactcagccctgcagggagaagaggggctggaggtgcaggtggcctgccactgtctcccccaacccctgcccacctgggtcttgtgctgtgtgtacttctgctgcgtctgtcctcccttgtgaccagcttctgctggacctgattgtccagccatgatcttctgatcatcatggtttctggacacacatctgttggactaaggaatttgtgttcctggccacagaacagtgccacctctgcctcaagcagttcctggtctgggcactcccccagggaggccggagaggactgagccgtctcctgatgcagaaagtcagccccgctgggcagtgctcgcccaggaagtagggccccacccaacggtgtgctgactgtggaacactgtgtctgcctaggcgggtctggccacattcctgcagcatgatggttggcagttagcttcctggagtgtggacgggtccttccctgcctgactgacttgtccacagggcagcaagaagatgcgccccttggtgtgtcccgagtgtctcctgtaggcagctgagctttcgcaggtctggctgggagccaaggttaccaatctggggggtaacccagccatcatctggatgagcgttggggtctttctgctctggattgcagggcagacgtcgttttgtgctggtcaggcccctcgcctgcctgattcccttggagccccccaagacaggagatgggcagatgtcctctgaagtggcatgggctgcttgctcactggccttcccaggaccctgcccaggtggtgctgcttggccccaggtcgaattcctgtgctggcagcaagcaggggcctgggccgtcggctggctggggctcatgcagccatcccctttgcagccatccgggtgacctgcataggttcctgcggggtctccaacaaggctaatgacacagcgtgggtagtggaggagggttacttcaacagttccctgtcgctggcagacaagggtaagtttgggagccagttcccgagtggtgacccctgggggcagcccttggagtggggcctgtctgtcctgtcctccccctttcctagatctgcctcttggatctggcactggcccatcttgtcccagggttgtgggccctgatggctttctcataggcgctgggtggctgaaggggccacctcccccttgtgctggatttgggtgggctctgacccctggcacagctgtttcacccttgccccattcccaaaccactctcctgttcaagccaagctcttatcctcagtccttcacccaagccacagccctgtgctgctgtggcgctggtgactgagacagggagacccagtgtgagctggtcagctgcagtgcccactcttatcctggccctgtggccacctcaggccacctcagggggggactgccccccacctccctcctgtctctgcagggagcctgcccgctggagagcacagcttccccttccagttcctgcttcctggtgagagcccagcctggacaggcctggtgatgaccaactggtcctgggaggtgggctctgcagggtggaaggcagccag

SEQ ID NO: 53464 - DNA, 2973 bp, Homo sapiens
agtagggagacaatattccaaatcaggatgtgggagagtcacatgacacacactgtgatggagccaagtaagtcaacgaagacaggtatgggggggcagtatcattttaactagggaggagagggaaggcttcccttaagaggtgatatttcaactcaaggatggtaaagagggaagccacaaagacactcgaaataaaggtttcagggaagggacagacagcaggggtggcggagaggtgggtgcggggcaggagggccatgaaggcgctcgtgtctcctgcgagggctcagggtgctcggcctgtcataaatggacttaggctttgacagagcagtttagctgccctaaagaaacctgggaaggttcccttggcacttgggattgtccgtttccttttctgtctatgtgcgctgtctatgctggacttgagataattctccggagtccgactcaccaggagactcgggtgtcacccagattgaccttcaaggctcatttcttgtcagtccagtacccgtcccctcggttcacacgaccatccagaaacctcaaattcagtccatgcttcttgttttgggtctcggggctgggataaggcgggctgaccaccgcggggcatgtaggtagtttccgtggtgctgggggcgctctccagggaaggctacttggtctgcagaaaaggccttgacttgtgcatacctgggcagcgggcctatgagtggcagcgagagcggggtaaccagagagggcacaccccccaaccggagcgccccccaggttggcatctccacaactgtagaacctcccccatcagggcaaccctcccgattgggacaccgcccccagccagacacatcctcctagcagaacacccatgcttagccggagccgctcccccgccagacacctccccaccgggaaaccctccccagtgggacaccccagccagtccaggtattcccgccgttagggacaccccctccagccggagcataccctcggcaggggcattcctcccaaccgagggaaccccgccgcaacgggaacctgcctgaaccagagcaccctcccgcgccggggacaccccacaggcggctcccgcgccaggccgcggcccagggagtcagccttccgcgcaagccggcgaaatcaaagtgcgtccggggttagaggtcagaggtcggagccgcgggtctttctccttcttcggccagcccaccaaaacgtcaatttagaatgagacatgtgttgaaaatgggacggctactccccatccactactacgactctggcgggcgggttctccagctccaggtctcctaccccgcgggcgcgcgttccggttccggccgccgcaggcccggcgcctggggcgccgcacgcctggttccagtgcgcaggcgccgcaccggtcgagctccaacgcgcaggcgcgggcgcaggcgcaggcgcagacgtaggcgatcggccccgccccgactctgggccgcgaggcgcgggcggggcgatggcgcgcgggaggggcggggccacgctgcgggcccgggccatggccgccgccgatgccgaggtgagcagcggggccggcggggggcggcgcgggggcggcgggcagcggcggaggcggcgcgggggcgaagaaccgggcggggcggcggcaggcggccggcgggcgggcggggccccgggtccccccgccgccgccgccgccgctgccgccgcctcaggccgaggccgggccgaggccgccgggcgtccggcccgcgctcccgccgggcgcgctttgtgcgcggcgcgggccgggcggcggctgggggagcgggcgggggcgcaggtgagggaggcgaccgcgtacctgtgcccgcgccccccacggaccccgtgccgccgccgccgcccgcaagccggatctgcggggagggcctcggccagggtgccggggaggtgcggaggacaaaaggaaaagtagcggggccggccaactttggagcgccggccgaggcgaggctgtccctcctctcggagctcttccttcgcttcgttgacctttcactttgttctgagtaggatggcaccatctttaacgaaaagttggccagtcccggcgtgtttctccccagacaatgctgctccagccctgctggctgtcagaagcaggaaagcacgctcggtgggaagcttgcggactcaagtttatttccaaaccagcagctttaaagggctctcgatgtaaaaagttcacattcttttgttaatggtctcggccttccccgtgctcattctcaaggatagtttgtttccttgcttaggaaaggaagcagcgtagagattaaagtcttgcgagtggaccactggcgtccctctgaaggaaaagcaagcaggaggtggtgtgtccgtggagatgcagaaatagtgtggtcctagggctgagataagggaccggtttggagaaaactgtcagcgtagaagtatttctttgaaattaactgtctagtaacagttgagacttctaaagcttagaaagttaaggtgtagtaagaagccgtacagtatcctggtgcatagacttaacactgtattttaactcaggtaatgtatggcctttttgtttatttttttcctgcatttttggggggtgttgaaataagtaaactgggaaggtgcaggggaattcttaaattcaatgcaaggagtttttgctgagtatctgcagcattcaaggaattaatattagtcactgagaacaaaaagcgaaattagaaaatttcaagtcacttctaggcttgtaggggagaagacgtgtagtgatgaattctatcatttatgaagtacccactggatcccacacactgtgcaagacctttagatcaggcgcctccctcggttttcttcaccctgtgcagcaggtgctgttatttccttttttaaattattatttattattattattttttgagacaggatctccct

SEQ ID NO: 53465 - DNA, 1249 bp, Homo sapiens
ccaaagtgctgggattacaggcgtgagccaccgcgcctgggctgaaaaaagcttttcttgatcctgcttcccaccagcttcacgtcagttctttgcccttctttgcgccaaactcctccaaagatttgtgtttttttcatggtgtgtgcatcctccctcattctcccttagatccttagtcagaccttgcacctccacccccagggcaacaaaaccatcctggttaaggtttctgtcggtagccttcctcccttggctagtcccctctcctgccctgacccggtagtgtcctcacttagtccttgggccttgctatcctgccccctccccccggtgctgggtgcagctcagcctctggactctggtgtcctgtgcccacgtgcgagctccgtttcctgctcccttcatggcttcccatctgcctccctcctctttgcccttcttgcaggtgcttctgccttctgacttcctcagtctcccatctgcgcctctctcttctgactggtttccctggccacctgtccttctgggggcaggtctgcagcatatcagcccagggaaccagttagtcctcactgaggccctgcccctcctggctccagttcctacgggcctgtctgcgcgtcttcctcgtgtagcctccctggggtctagcggggcttagcgctctcctgggggctgtgtccaggggaaggagaagccagagctgcctttccattctctgtccgctcgcctttgccgccgtcttccttctgggagggctttctcggagtgcaggctaccttttctctttcttgctgccctacctcctgtggccacaccctctggcctgtgggtcttggcttggctttgtcatcgtccactgttgtgtgactcttgttccagggtaagccgctgtgcacgtggttgaatgtaacagagggctgtcccgggccgtgagctgtgtcagaactctgaacccttccagggccaccgtgtgcttgacttacagattagtgagggtgtcttgcctatagttaactgttttcccgtataattattctgttaacccttttatagctaataagtgagcggaaattcttaattttttttcattcagtgtaagaaaaaagcagaaggaaatatacaaaaagttaacttggttatttctgaattgtgggattgccagtgattttgtatgttttggaatataataaagtttttttacagagagcatgtattagctttacagtaagaaaaaattaatgga

SEQ ID NO: 53466 - DNA, 1094 bp, Homo sapiens
gaggcggaggtgggtggatcatgaggtcaggagttcaagaccagcctggccaacatggtgaaaccctgtctctactaaaaatacaaaaattagccgggtgcagtggtgcacacctgtaatcccagctactcaggaggctgaggcaggagattggcttgaacctgggagacagaggttgcagtgagctgagattgcgccactgcactccagtctgggtgacagagcaagactccgtctcaaaagaaaaagaaaaggacacataacagatgtacacatttttttgggtacctgcgattgtcatttgatgtgtgaataaagagctaaggagggtgagagagataagctgcatagacatctgggaggaaggggctccaggtgggaatgactgcagttgtgggggccagctcctgggcaggtgcccaccatgttggctgctgtgcctggcgtggagtagacgcgtggagatgaggccgaggaactctggtcagtcgtggtgaacagaagcagtgcacgcataggctctcagaaagaacttgcctcttattccgagcaagatgggaagccactagaatgttttaaacagaggactggtgcatgatctgacttacattttaatgggatttactatgttaagacccaaggtgacgtggggaaaactgtgagagatgagatggcaggcagtgttgctggtgtgagaagtgatgggatttctcatgtattttgaaggcggagactagatttgccgatggacgtcatgtagaatttggaagtgaggaatgcagggtgacttactcttgtgtatttgcttttctatttcacagtatttcatagagctcttcccatgtcagtacatagagatcaactttatgagctgttgcataataatcagacagcaggaggctgagcttagcggctcatgctgtcatcccagcgctttgagaggccgaagtgggaagattgcttgagcccaggagttcaagactgcagtgagctgtgattgcctcactgcactcccgcctgggtggcagtgagaccctgtctcaaaaaaaaaaaaaaaaaaaaattacagactagatgtcgaagaatatatcttg

SEQ ID NO: 53467 - DNA, 3574 bp, Homo sapiens
gaattagaatagctgtcagtatttattaatagttttatttcttctattgtacattatccatggcttttgcgttttatgtggggagggatattcgtattcatcttagtggataaataccaccttacttggaaaatagagccaagggttaaattctaggcaaaaccaacaggaaaatcagggtaagttatctaacttacattaggttgaatgagagatggtatctgcgtataaaattttaaatgatccctacaaagtataactgggaaaaaaatgtggagttatgctgccacttctttcctaaaaggtaagcttccttttattgatacgatgttgtcttactcgagtgccttctctaaaatacacagaaccatgcagtcctctattttacagatgaagtaacagactgtttaaaaaggtgactcactgaaagctcttcattgttggaattcctggcccaacattcaaaccaggcatggcttgcttttcttctgacacgttttaacccctctactaaatttttagcgatatatatttactcttaaaatgaattacaattattctgtgatgttctttgagataatcaaaaactctctgggatgtatcagattgagggctgtgaatagcatgaaagattgtgtttatttgactagtgtatatcacagacctattcaagtaccacccatttctaaattctaacagtcttagaaaccagctgtagaagcagattgatatattttatcagaatccccaaattcctacaaccgtctcttcctaatgacttttcaggtggggacacgtgccaagacggccaatagatacctgaaacccggggtagtgctgaaccttacttacactacgttttctcctatacacacctgcctataataaagtttaatttagaagtcaggcacaatgagagattaacaacactaataataaaccagaacaattataacactatactgtagtaaaagttatgagaatgcggtctccctgaaaacaccttgctgtcctgtactcaccgaatttcagagcagaggactctgactgacaggtgttccccgactcccagtggcgaaaggtcctcagggaaaacaggtgaacgctatcaaagtatgcttatctccgaacctttcttaaaccagagtcttaagggatcgtctctgattaggtctagaattcctctccatagaagataacctacttctcgcgcaaatctgcagtgttcttgcagggctgctgatgggtggtcctgttcttttcgcggtcctgtttgcgcagagatgaaacggggaacttagcgtatccctaccgctctttttgatgacaggagtaaagggctgttcagactacctaaacaatgttgttaagagaagcactcgtacttctcagacttcgctgttccggaccccgcgagccaggggcaggcaccgggtccacccggggctgagctgcggcggcgcctgacaatgccccctcgcgccccggcctcggcgcccgctcccggctccagcgcgcctgcacgtacgtagccttcacgtgtgtgtggatacggagtgcatgtgtggagacagaggaatatgctccaacaaatttcggatagaggcgccgaagacaggacgtggggaaggtaggagccgcgtgcacggctccggccccgggcgggaggcggccgcgagccgggccggccgcgcgcaagtccggcgccagccgctagagcccccagtgcgcggcccggccgcggggcgcctcgacccgacacaataaactccgagggcgggcgggccgaggggccggtggggccgagcggccgccccgcgcgcatcgccatgtgagcggctgccgcggcttcgcggggacccaactttcccgggcggcggcgcccaacttcccgccgcccgctccggccccgcaggcccgcggcgccaggggaagacgcgagtaagtgcgggcggcggtgccctcccggccctcaccccgcacgcggcgacccggccgcctagcctccctcgctcaggcgcgaccgcggcgttctctgaggtggagtattacaaacatggcgcccctcgagcccggagcccttcgcgcggagccggcggcggggtccgggcgggggggagccggggaggagggaggaggccggcagggaggaggaggaggcggcctgagcgtcccccccgccccccgcgcccgtcgccggctcaggcccgagaggcgccgggcggcgggaaggaggcggcaccggaggggagggccgggcgcggcggcggcggcggtggaggagccggagcataatggtggggaaagctcggcggcggggcggcggggcgggcgggggcgtccgtggagatggcgcggcccgcgcggtggagcctgcctggccgcggcctctggggcggcggcggcaccagtgggtgctgacggtcgctcgcccgctcgcgaagagctccgagctgccggggagctttgtggatggcggggcgggccgggccggcggggcctgcgagggcggcggcggggcctgcggaggctgccggcccgcgcccactcgccttgggcggccgcggaagaggccccgggatgaggccccggaggaccgcgcggggcctgctcgggccgggaagccgcggagtcgcgtgagcaccgcccgccgggccctgtgccccgctttcggtcaggcctcctgggcccgtgcgcagtccgggccggcggggaacgcggctccgggcgtgtggcgggcggagaggaagcgtttgtcggcgcggcacgtcgtgtgctagcccgggagcggcgggcagggctggccccgaggcccggggcggagattcgtcggtcccccggggctgtgagcgaccccggcagcgaggccgccgcctcaacaggtcctcgcggacctccgggacagtcctgtggggtccgccgccctcctcccacccagagctccggggagaagctgctgaggacgcggctgggacgagggggggcgccgggacccggactttcacttgcagtctctcctcgcgcttttctcccgagccgggaggaggaggagctggcgatgtgtgcgccgtgcccggtgtcttttgcagagtgaccgccgtacctgttttattcgtgtgtaccagtgctcgttgtgcagtgcggtgtcctatgcggtgggtacgcagtaccggggattatatatggtgtgtactctgtgtcatatgcagtgtgctcgaagtacccggtgtcgtaccggctatcatacacggtgtgtacatgtatcttcctcgcttaggctgtgcactcagcccccggtattgtgtgcagtaggtgcctggtaccctgctgccatatgagctgtgcgtgtggtactccatgttatatacgagtgtatgtagtatctggatagtattgaatatatttaccttacctgttgtcacatacagtgtgtatgtagtacctggtgtcatatatgcggtgtgtatagtaccaggtgtcatatactgtgtgcacacagtacttggggtcatatatggtgtgtacatagtatcctttcacactgtgtatgcagcacccagtgtcatatacagcc

SEQ ID NO: 53468 - DNA, 1198 bp, Homo sapiens
agggttcaggggtgcctgggcggggcccagcacacggtccatctggagggcagcagggaggctttgggggtgcctgggcggggcccggtgaaaggaagtcactttacagccagactttgctttccttctttgtatgtaaaatgccaggtctgagtctcatgaagatgtctggcatccgaggagctcccctcggcactgctcaagggtgagagcctaggccagctagcagcgacggtcagcggcgtgggtgccgaccagaggcatgcagtggtgtgtgggaaagtgaactgcaccgccagctcctgttcctatgtactctcacttccatttcagatgctttccaaagcagctagcagcctagtcagggaaaaggttacgctttgagggccaggccacagacagaactgcatacatgtgttattgatgagctactgctcactccttcaggaagttatataattatgagttattttccaaagaattcttatggggagtcaggtgaatttgttttaatgcccagaagtgattatttagaaaactgtatgcccagaaacaagttacctaatctaaaactacatttctgatttttctaagtgttccagactgaactttgtccctggcagctggtggccttgggggcaggcgttgcctctggccctcagcctgcagggcctcctgagggctcctacgtggccaccactcttctgtgattttataactgtgcagccagtggttctgtcgaccagagggcctgatggaagagccacagggccaggcatgcatctacgagtgtgaaccgtcagggcgggcgtggctcctggccctggcgtgtgagctctcagccactggccgtcccatgcaggctgttgggacacccctggtctccccccaccagatgccagctgagccactgcccaacttgtgctgatcgaaaatgcctccaggcatgtcagacatccctgggggcacaggcacacacagcaacaggtcacggagcggctgctgacggcgataagggaaggcaccatgtcccacgcacttcacctaagcaacaatgaacgggcacctctacagtcaccaagtggaagatgatctgtttcaacgggggaagtctgcagtaaaaatgacgccttctttccttcctctctggcatcttagtgggtcctccttggcgggcagagattcctctaaagggctt

SEQ ID NO: 53469 - DNA, 896 bp, Homo sapiens
aaaagcttcaaatgttttttaaaatttaatagaaagcagcttataaaggagataaattatttttgtatagttgtataatgtgtttgtgttataagctaagtgtttttatagatgagtcaaaaatgttacaaattaaaacgttaaggttaaaaagttacagtaagcgaaggttaatttattactgaagaactaaaaatatttttgacaaacttggcgtagccaaagtgtctggtatttacagaggccacaatagtgtgcagtcgtgtcctggcctcacgttcaggtgccgcttactcaccaactcgccaactcacctgggcaacctccactcctgccagctccagtcatgggaaatgccctacacagtttttttttttttttcccaccttctataccatctttttactgtaccttttctgtgtttaaatatgtctcgacacacgaccacttaccatcacgttaccgctgcccacagcattcagtgcactaacacgctgcacaggactgcggactgggtgtgtcaggctgtaccagccaagtctgtgcaagcaaactccatgtttacataatgaaatcgcccatttggaacgtacccccatgactaacgcctggccgcactgatttctaattccccacacggagccgatctccctcggctgctgccgattcttagaacaagctctgactcccccacgctgcaccctgcctggctggcactgcccacgccacctgcacgctgcaccctgcctggctcccacagcccacgccacctgcacgctgcacgctgcaccctgcctggctcccacagcccaccccacctgcaccctgcaccctgcctggctcccacagcccacgccacctgcaccctgcaccctgcctggctcccacaatgcacc

SEQ ID NO: 53470 - DNA, 1566 bp, Homo sapiens
gcaggaggtcccaacacacaggcgggcacagaagcacgggtgctcccgacacacaggtgggcacagaagcgcgggagctcccggcacacaggcaggcacagaagcgcgggtactcctgacacactggcagcctcacagccccacctccccacagacgtggtgtttggggccaccccttaacttctgacctggtggtgctgatgcctccccctccagatggcaaaccagtgccccaggggtaccctccgtgtgccaaatggttctgactctttcatgcatagggactcgcttaaaactcaccataagcctatggctattattcctcactttcagatgagaagattcgggcacagaaaggttgacttcactgcccaagtgggtggtggggctcggcaggactcagacccagagcatagcccctgctgacctgagtgcccgcccctccctggtctttgcctctgatcccaggacactgagtgaatcagtctactgctctcttctttttataaaaacttagaagcaaacagcacaaccaacgtcagcacattcttagtatgaacaaggcaaacatcacagtcaaaaggcaaagtccctgtttctgctccaatcctatgccccacaaataaccacatacagattttttaatgtcaaagtttagactcctagatatgcagttaagtataaaatatgtatgtataccaatacattgatttttaaaagaaaagcagaatcaagatgatgcttattctatgttggcagaaaagctgagtgttgggagaagctgcggcagggcttgcaggtctgacataatgtaagagtctcagaacatgtctggggtccacggtctaaaaccccttgtggtctttggaacaccaagctctgtgctaaagggtggaaggctgccctgacacaccataaactaagcccagggcataaaatccctcgtggcttggatagaatccagggcttgtggctctggaatgtgtctagacttgctggctccttgctctcccagggtcgattgtatcctgagttaaaagaacctgctctccattatctcaagcagaatatgttccacatgcttcaaagaaaatgctaaaccgtcacagctgtaagatcatgcgcttgccctttcaagccccacattctcaacacctgtttctttgtttgatcaccaataaatagtctgggcttccagagctcagggccttcgcagcctccatactcgcaatagccccccggatccaatttctctctcaaactgtcttttctcattcctttgactccaccatactttgtcaccccaacaacctggtgttggatctgatcaccccaacattctaaaactcactctcttcactaaacatatctgcagatctttccatgtgtctgtgtgtgggtgtgcatctgtgtaggtgtgtgcaccactgaattcagctggtttgttacacacagtgtttagtaatacaaatataagatcatatattttctttcattcaatttttatacagctggaaatgtatctgtaatatacatacctagaaagaaaatggagcatcacaaagc

SEQ ID NO: 53471 - DNA, 475 bp, Homo sapiens
attactatgtatatccacagctttaaatctttagaaaaacccatacccttcacttccatcttttgaagtcataaatcacaatccatttcctagagctcctgccatttgcaccaagctcacagcattacacagtgagcacacacacagcctggggctgctgtccaatggcaaagacaaccatgagtcaacagaagagaatgttcctccaaggtagatacgtggcttcacagcagcagagcaggaagacgtaggttcgggagccaggccgcaccggttcaaaccccagctcctctgtgaccttgggcaagttgcttaacctatttgcacccccatttccctgggtgcaaatcaggaacagtgagtccctgcctgaggagtggcccatgaggagtaaatgagatgaaaacactctgcagtgagtccctgcctgaggggagaccgtgaggaataaatgagatgaaaacactgcagtgag

SEQ ID NO: 53472 - DNA, 1432 bp, Homo sapiens
tcccaattttatatgttttcccaacatcaccttagtgataatttatcctgtaaattccaactgccttcacacctcacccccgctgtctcccagcagaccccacacccgggtctgtgcatgccgccctgctctgcccacgcgggacccccccccccccaccctttctggagaaatcagctggcgatcatctcctcgtggaaggctgccctgacttccaaccctctccagcagaggcaggggccctcctcggtacttccccccaaaagctgggccaagcatggagacggcacatatcctagctgtgcctgggatgtcacgggcggggtccccagatgctctgcacacggcctggggcaccacctgaacacagcaagtgctgaagaaataaaaccgacatgcactgacctccgatagggcctcctttaccatccacatccgtctcccctctggacagtaaagtccacaagaaagggagagcttgtctcactcaccttcaaattcccagggtcaccctggcaggtaaaggggactcgaatgtcttctgaaagcagcagctggttagctgccgagttaaagggcctctgaatttcagagctctgtgtaggagtccagcacactttatcatgaatgactccaaccacggcggaactggccgtggaaccagtgccaaccaattcagggtgtgttcaccgtttctcagttcattatcacaactcactaacagagcagccgtgcacagatcctcagacgtttacgcagtgggatgacagaggggccgacggtgctgagtcacgtgaaggtcccgttgcagactgggagagaacggccagacatggacccagggagagcacagacctcggttaagtcagctccatgtaaatagcactcctgccaggccctttcctatctgcacagcttctacaaattcaactctcacacctgacacctaagaatactgcacaaccccacatgaaactccccacttacctcccaaaatgacctggcacggccgagtacaaaccatttcaacataagggaacatggccaagtacaaaccatttcaacataagggaacatggccgagtacaaaccatttcaacataagggaacatggccgagtacaaaccatttcaacgtaagggaacatggccgagtacaaaccatttcaacgtaagggaacatggccgagtacagaccatttcaacgtaagagaacatggctgagtacaaatcattttaacataagggaacgtggctgagtataaaccatttcaacgtaagggaactggagggcacgtggtgctttctcgagtccctggctgcttcctgacaggaaggcccaatgcttcaacacccctagtgaagggcaggtctcgtcggccccctcagagtcaagaaaacccatgttcactttctcaagaccacacacaacc

SEQ ID NO: 53473 - DNA, 2383 bp, Homo sapiens
ggacggtgggagagaacagagcgaaacttagtccacgtccacagtggacggtgggcgagaacagagggaaactgagtccacgtccacatttgacggtgggagagaacagagggaaactgagtccacgtccacatttgatggtgggcgagaacagaggaaaactgagtccacgtcaacatttgagggtgggagagaacagagggaaactgagtccacgtccacattggatggtgggagagaacagggaaactgagtccacgtccacatttgagggtgggagggaacagagggaaactgagtccaggtccacatttgatggtggcttttaatgcactgcagggtgtgtccccttgaccttcacgaattttcaggtagtaagaaagcaatttttcttattggaaaggagaaaactaagtgactgtaaaataatataatttccttaaagcaaaacaacagagaaccaacttttccttttttcacattacccaataattctaagactcagggttttgtcacgttacagcaaatgccattcattgggggaagtcggaagtcagaacagtgtgtgctattcaaattctcgatgaataattaactcaaatgtgttcagagtgctataaaatgaaattaatttatttttagtttaacccaaaatccccaatcacttgccaaatgatcctctatgtatcctacataaaagacagggtctttctggcagaaaaccattgaagtttttatttgcagtaagagaagcatgccttattatcaaacaggtgcatggtccccttgtgggggggtgcccgtcacctgcgtccccgtgcgtcacggcgttgccgcacaccattaacacatcaaaacggaaaaggaaatgtaagcagtgtttgccgtccaaagttcacatcaacaattccttattaggaaggcaattctgagcctttcctcctgcatctgggagctgccagcaacccagttccaggagagaaaatagcttgacacctcctgcggcccatggagtcctcccgttgggacaaggaccccccaggagagagaagaccccagcagagtcaacactggaggtcctgcggggtgggtggtgctggggaggccacacggggagggctgttccctgttcccttcccctcaggagacagctggcccgaggtgacacagcactggatgcgatttcagggccagggaccatggtgcccggggctgtggaccacgccagcccacagccactgcaagccccagaccggggctgtggataacgccagcccacggcagccacacgccccagaccaacacgagaagaacgcaggccgacaacatcttcatctatggtaggtgacccggttatcgttcctaagagagtccacggccacttctactgggttccctatactcttcccctgccccagctggtccccccatgacagccgtgtccctgagaatgggatgcagagccaggagggacgtgggccccttcagtttgcaggggctgccaggcagcaccttccacctgccgagggccggaggcggggaagccattccacagcacgtgagctggcaaggggcctcccagccttagagcccagatggcttctggccagagtgctctgggccgaccccccctcatgctcacttccctgcataagtttaagttgttttctgtaatttgcaaccagaatcctggctgatccaccatggaacccagatgtcctcagttctgcctcagcccccacttgtgagaggtccgtggcataacacaaactccccctgggattcgtgggcctcacgggggaagctgagggtgtgtccatgcaggaccccgaggctacacagctctggctgtttctcttccaaagccggcactgccctctctccatctctcccggtgccagggctcaggccccagcccccgtttctgcagaagcccctttccatcctagcccctgccacccctcctgctcttgtctctcccacacctcccaaactctctcctggccagctctcgccacactcagtcaatgtccactgggggcctcaggggcacctccacctgcccaggtctgggaccaccgtcctccacgcatatctacagaccctgtcctcacctgcatcacaccaatgatggcgtcacagcgtgggttccggtcaccagtcggcctcccccaccaacgtggactccttacaagcagagccaccaacgtggacacgatcccatcaggaaccacctacttttgcatccccagcactgtgctcaggtcccagggaggccccagcaaactgtggaacaaccaaactcgtgactgaatgaacaagtatgttaagtcgttaagtaaaaatagcagaagacttagtagaatgtatgagtaacaattac

SEQ ID NO: 53474 - DNA, 2174 bp, Homo sapiens
tcctcatcctcagctcctcaggagggcagcagccaagcccacaggcctggaagactctgccccccgccaactgtgtcacgttacaggacactgacacacctcgcggaaccccacatctgaaactgaaaaacagtaccatttcccgtccccagaagtctggaaaggcagttggctgcacaccatggcccctgctcactcccttctttgccctgaaagtgttaaaaaggaaaacataaagtcaacaccagctcctccctgccggtgaaaattggcacgaatgagtttactttctggctgccggccctcacaaaaccgttacccaaaaaaagttcaccatgctaaactgctccaaatataaatgtgagacgcgccggcccacccccaccccaccccacgttacaggaatggcctgaccaggatgagcccagagacggctaaatgcacatcaaacatttcagatttgggaacttcagtggttttggggaaaagacctggcaaagcccgatctgaaacttatgacagttgagcacatgatctccgccatgaagagcaaataagaggcgtacacaaccctccataagaccgcggtggctgatctgccacaaaccctcctacgagaggaccaggacggcaaggccggagcccggcccggggggaggttgacgattccgcccagccctccccgcgcagcgcccgcgaacaatgggggtgggatcccccgggccgcgccaggaccgctgcacggcctgagccaccagagatcgaacccggggtccaacgacaagtttcgcattgaaatctggccgggcgttccaggccgaacccgccagcgaggaggtggcgcgcaccgcgctgctgcaccaaggacgccgcggctccagcgcagagcgcacgggaaggccgatcccgccgggcccgctgcatcctgcgtccccgcgcggcgcccaggccccacagacacccccagggcgcggggggatcgcggccccacaaacatcccagggcgcgggggatcgcggccccacaaacacccccagagcgcgaggggatcccaggccccacagacacccccagggcgcggggaatcgcggccccacaaacgtccccagagcgcgggggatcgcggcctcacaaacgtccctagggcgcggggtctgggggtccgggggacgcgcacgctccgggctggggtcgcacctccccctccgggcccggcccccgccccgccgcaggccccgcgcccccagccctccgcgcgcggccctccccggtgacagcgcggcccggcccggggcgggggcccggttaccttccgacagctccagctccagctcggccaggcgcgcccgcacctccaggggcagcgccatgccctccaggctgcggtccgccatgctccgcgggcgccgcgccccgcacggcctcctctttgttcgcaggcggaggtctcggcggctcctcgcgcccggcggaaccgcaccgaggaggaggcggcggcgcgggcgcgggaggcgggcggcgggcgcgcagggacctccctcccctcggcgcctcctcagcgcggccccgccacggccgcctcgcgcgcccccgcgccccacggtccccggcccgccccgcgcgcgctcggcccctccccgcaggcgctgcggacccggacccggccctgctgctctcggccccggcccggcgggagcgtctctgcgcgcgcgcgtcacggggccgcgggggcagggcgcgcgcgcgcggggcgcgaggacgcgcaggagcgggagcgcgcgggggggcgcgcggccgcgtcggcgaagcgcgcgctcccgggggcgcgctcgggggcgggttgggggctcggggcccgcggggcggggcggggcggggcggtcttgtctgtcctgggctctgcgcgtccagcggagcctgcgggcccggccccagagcctggtccacccggctccctgcgaaaatcacgtcctggagccgcagcttgacgtctgcgcgaaaactcgcagtgccccgggtcttggagggctggttttttgttaatgaacattttaagaggcggagacggagcgctaggctggaagtttcgaatgcaacgaccagcagatgaccttgagcgactctgagcctttgcctggagggtcagtgtccccatctgtgaaaaggggatggga

SEQ ID NO: 53475 - DNA, 860 bp, Homo sapiens
tacccaggcttgggtatgtatttctttattagcagtgtgagaacagactagtatagtgtggtagtgtgcacttgtagtcccaactactcaggaggctgaggtgggaggatcaatagcacccaggaggtgggggttgcaggaggctgaggtgggaggaccaattgcacccaggaggcagaggttgcaggaggttgaggtgggaggatcaatagcacctggaaggcgggggctgcaggaggctgacgtggaaggatcgcttgtacctggaaggcagaggttacagtgagttgtgattgcaccactgcattccactctctctgggtgacacagtgagactctgtctcaaaacaaaaggtcaaagttctgagtcactacttcagttttctctggattatggaccagaggagttaacgcaggttctaaaaacgcctaacattaccaggagattaggctgggctctgcaagaatccagttcaatagctattaaaatatattcttctccttgaataagtgttcttagaaaattgaatagtattgttttataggcctccaggtcctagttggtttttattgctctgtttttaaatagttcacggaatcaagataatagaagttcagacagtacagtccctgcattgcttactactaaatctcctaagctactgcatagcactcttcccaggaaatgtggaaaagtgagcacagttacgcaatcagagactcatatgctggaaggacccttaaagattttctgaagcaaccaatcaattgattttttaaaagaaacagaagaattctcaaggttaagtgacttgcctcacattaaatctgcagtgttaaattgcagagcttcaactagg

SEQ ID NO: 53476 - DNA, 2668 bp, Homo sapiens
atttcaagtgcatttaaatattcaaacaactgaaactaagagaaaaaaactttcgaaagggaaaataacttgtctgtccccttcaatgttcaccttggagttgctctcatctctagaaaaaggcctcacgcatactgtttatacttacaaactccactgccctgtcaaggaaaaccttcctgttttctcagttatccaaaacttcaaacttccaatttactattaagacaagttattgggcatccacttagagaatctcaaacgaaagccagataggaggtagttttctacagctaggtttctcaagtttcatctcagccaagttttaagaacgttttacgtaaaaataaggggaaaagcaaaattacattcgcatgaagtttcgacgcacaacggcactgaaacggaaagactcttcacgttcccaagcgcaccctgagaggcaggtgcagcagctttccgatggcttctctgccgcccatgtatcccagccccaagaccaacacaggcaatcttcacatctgactttatttttttaactccttcagatccacctctgctcaagtctatcaacaggaaaacaggagcgttccaaacacacaccgagcaacaggatcccaacttcctggttctaaaggaatgcgatgccctgatgacccgtcccgccccgcacccgcacggccgcctatccgggctccggcgggaccgaggagcgagtggcaaggctggcgccgcactgcgggtgccggcgcccgcccggcctgggggcgctcgcggcccgcgaccccggccccgcccaggccctgcccgacccccgtcctcgccggccttcgcccaaccccggcctcccgaccctgaccccggcccggtcttccgggcacccagctccgtcgactcccgcctcgcctcaacgggtcctcctaagccccggccccggccttcccctgccccggcctcggccatcctcagccccagttttcccctgccccggccccggtcctcctcagccccggctttttcctggccctgaccccggtcctcctcagccctggcccttcccgtgccctagccccggtcctcctcaacccggccccggccttcccctgccccggccccggccccggcccaggcccggccctgcccgccgcggccgcgtcctccgggaagatggcggcgcagtgacaggcggcgcggcgcgggtccgagctgggccgggagggacggcccgccgcggcccagggtgcctcacctgtcagcgccgccgccccgcccgaccggccgcccgcgggctcctcgcctcaaccccggggcccggcggccgcgccacacgcggggacggcgaggagagagacggcagggagaggcggcgcggccgggccgggccgggccggaggtaggggagagggcgggcgcgagctggcggcggcggcggcggcggattcttcccctttcgggcccgaaaatgtctcaaccccgggactccagatccccaacgctccttcccgttcgcatgagaacacacagctcccacttccggggccctgcggaagtcccgcccccgcgcggacccgcgcctcgcgccctgaactcgcgcactcacccgccggtcccgcggactggcgctcagccccgggagagcctcacgtcatggtgttgcggcgcgctgattgggcgcacccgacgctcggcccgccccgccgccttcttggcctctccgcgcgtacaccctgctcgcggccttgcgattggcgcgtgcgcgcacatcgccccgccccgcgcacgccgcacgtccgccccgcccgccccgcccgccccgcccgccgtccccggcgcgaccggagcgcctgacgctggggggccgtgtgggccctgacttccggagggctgggccctggtcctccgccaccgcgtgcgccccttaaagacccctgcccgccgcccaggacggatggcgaccccggccctagcctgtccccagaccctggaccaaggccccggccctgccccgaacccctcatcccacccccaggacccaggccccgaccctggccacccaggacacgccctggcccttccccgaactcccaccccacagctgggatcaaggtcccggccctgcccggaacacctcaccccacacccgggacccaggccccggccctgccccgaactcccaccccacacccgggaccaaggccccggccctgccccgaacccctcaccccacccccgggaccaaggccccggccctgcccagaactcccaccccacacccgggaccaaggccccggccctgcccagaactcccaccccacacccgggaccaaggccccggccctgccccgaaggccccaccggggacccaggccccggccctgccccaaactcccaccccacacccgggaccaaggccccggccctgccccgaacgccccacccgggacccaggccccggccctgccccaaactcccaccccacacccgggaccaaggccccggcactgccccgaacgccccaccagggacccaggccccagccctgtcccgaactcccgccccacacctgagacgaaggtcccggccccgaagtcccaaccccacacccgggaccaaggccccggcactgccccgaacccccgccccacacccctaaccaaggcctcggctc

SEQ ID NO: 53477 - DNA, 805 bp, Homo sapiens
aaggtttagttactgcaaaaagaaatgtctaagcattgtcactcccagcagtaggagagtgcttttggaagccggagctcctgccacagggcagaacactaacacccatctttcaggggcgttttaagggaaaattccatgatgggtgtcacacactggattaagcaatatcttccacccctcccaaatctggggttctgtcattctatgaattatcagaatccctggctcacaagtgggactggactgagtctctaagagcttgtaaatatttgcacagccgtcctttgaaagcactcatcgggacttctgtgccataacactctgccctgagtgaccactgaagtgtttattttactctggatcctcgaatgggtgactgaattcatttgcaaacagggaaaattcagccgtgtcagctttgattgctctcaaggtcagaggtgttgttttctttcttgatgtgtaaggaatgtgtttttttcttcttatggtaactgtaagaccggactgagcataaagagagaagacatttgaagtacatgttgcaagcagagccagagggattaggggcaaaggaaatggaaggcagagactgagaagagacagtggaagtactaaggttacttcccagcccagctgagcgttttatgatggatgtgtcagggctccaagcggtggccttggctccactgccctgagattgctctgctgcgtgtcagaggacatcatcagtgtttgcaaaatccaattaaagcagcattagtgcacacgggcacactgagccgcccagcacgtttcatgc

SEQ ID NO: 53478 - DNA, 1897 bp, Homo sapiens
ggtttgctggagccaggctgcctgggttcaaagcccacctctgctgcctgttagcttgtcagctgcacaaccacggggtgctttcgagccttgtgtgcctttgtttccccatgcacttcatgaggctgttgcagaaattaaacgagttaatatatagtcagcagctctgaacactgcttgactgagtcagccctacctaacgtttaatttaagggatgtggccctgggttcccaaagggagcggccactctattcacaaacataaaagcagtaaaggctccatcctcatcaaccttctcctcagttggaccccacaggactgtctctcgcaactgttccctgggctctcctaaggcactgcgcggaaccagctgcacctcttttgccttagatcaggctttcccttctccgcccgttttgggatttaacaagcacgagaaagcagggctgcagggaagccgcgagggcctcctcaccacggcccgggatcaagtcccacgcgcgaggccggggtaggggcgtcatctgctccacacccagaggctgggcacgccccgcacgcgcggcttcctcctcctttgcggggctcgccgcgacccaggacccccagactcccggatcccctagaccctctggactcctaagccccgcaactcccaaatcccaagaccccggaccctccaaccctggcccagggcgcgtggctgggggcctgaacccgctccagaaacccgcagggcagtctgtcggaaacccccgctttactcagcaggaatttagtctccgcgctccccctaaaacccgggcgtcctctcctctgtaccctcgctcctgaggccctcacacgccctccgtggctgacctccaagccgggcgggtgcgctgtgcgacgcggaaagcgccgtagagcacgcagaacacgattggctgagctcccggaagtgacgtacctcaaccgcccgacagtggaagtcccacctgcgcccgacggcggaagttccgggagtgccaagtacccgcgtgcatacggctgccggcatggcacattacaacttcaagaaaattacggtggtgccgtccgccaaggtaggcggccccgggagggccactgcaactttcgcgttctcctcagctgggtccccggggagggtccgggcctgtagccgtgggagagcggtcgccttccgctcgcccatcccccgctcctgggcctgaccgtctggccgcgtactcgggatcatttcccctcccccagcagaatccggggtccaccagagatcggatcccccagagaccggggtccacctaagaccgtggtccacccaaagactgagggcccccagagatgggggtacacccagagttgggttccctggaggggccccgggtgacgatgtgggcgagtggagggggaccccgacatgtgagggaggaagcgttccgtggtccgtgatgagccttcggattctgggtttggcgtagccccctcccctctcaggaatcctgggttcgttgttctcgtgatttaacgtttcataatttttaagtcattctctttcactgttagatttgggaatacctgttccttttcagaccatagtaggcccagactaaatttttacagcgttggttggtgtggcaagaatgagtcaacaagtgttgagtattaggactttttttttttttttttttttttgagacatagtttttcgctcttgtttcccaggctggagcgcagtctcggctcactgcaacctccacctcccgcgttcaagcgattctcctgcttcagcctcccgagtaacagggattacagtcgtgcaccaccacacccagctaattttcgtatttttagtagagacggggtttcaccacgttggccaagctggcctcgaac

SEQ ID NO: 53479 - DNA, 2390 bp, Homo sapiens
ttgacatgactttttttccggggggatggggctgggtcttgctatgtctgtcgcccaagctggagtgcagtggcgcgatctcggctcactgcagccttcgactccgcctcccaaagtgctgggattaaaggcgtgcaccaccgcccagctgtaatgacaattgctctttcaggattttcagaattcagattttaaagctaagctgcataatcacaagataaaatgaatacgtctatttatgcgtttaaagaataccatgtagtagacgcgggaacacatcatccaacccaagaaaaaggtctagttccatctatgcgatgctccccatctcttctcctgctccattcccaggagaagcgccttgagtgtgttgctgtcaccctcttgcacggacgcaggtgtatgcacccgcgtcacacgcgtggactcggcacggggaggccggtgtcgtcacgctcgtgtttctgacgatgctgtctacgcttgtttctgaattctctaaggggagactcgcaactcttagtctcctgcgactcggtttccagttccacgagttcctaaacctcaggtgactgtgcgcagacgacgatcttttccgctgacaaagaatggcaacgtctctgacgccccgactcacgcctccgccttccacggggcgcgggcgcccaccacagcccgggaaggcccggcctccctccagttcgggagaccaacgccgccacccccagctgtccaggcctccgcgccgagacctcacgggtggctcagacctcgggcctcctccccgccccgtcccgcagctccccgatgccgccctgcccctgtctcccgaactccgccgcccgtccacagtacctgatcagcctccggccacagacaaccgccggtcccggatggcgcccgctttgagcacagtctgcggcgcgcaccgcccactggccccgcccccgggccgcgcagccaatcgctcgcgccagcgccagtccacgccacatcgcccggccaattggcgcccgtacgcgcttgacgacacaatctcgccaagcttcgcctggtggtgccacctccctggcctgtgacaacggcagacgcgcgaagcaccgggaacctgagccgtgaccgcgggctctggcgcctttaagggggtcaacacgccccacccccagttccgcagaggcagcgtcccgcgactgggcggtgcccgagaccacagacgccgccagccaatcacgctttcgatcctgccgtgcgagcccgaggcgctgcgaacggtgcctaacgtcagacgtctcgaggctcgcgttccatggaggaagccctcccaatccgaaagcgcccgggcgccaagccctgcagccggaagctcggcgtcccatgggagcgacctccgcatggctggaccaatggaaacggaggaaaggcgggacgtcactgctgactggctggttgggcactcccccccctccccccccccgagttccgccgctgggactacagcgtttggctgcacggggagttctcgtatgtctagaacgatggcctttctgcggtgtctgcgaccgggaccaaggcggagcaaagtcgccgggggtgtggggtgttccacgctatgttgggagtgttcgctttcgaggtacatgactacgttctaaattttttttttttgagacagtttcattcttgttgcccaggcttgagtgcaatggtgcagtctccgctcacagcaacctccgccgcccgggttcaggcaattgtcccgtctcagcctcccaagtagctggaattacaggcatgcgccaccacgcccggcttatttcgtatttttagtagagacgggtttccgcatgttggtcaggctggtctggaactcctgacctcaagtgatccacctggctcagcttaccgaagtgctgagattccgggtgtgagccaccgcgcctagccctctaaacttttaaataatcgtgaaatgtatgcgcagctgaagcgaattcagctatttcctctaccttttgtgtggaatttaaaatactgaacttgtgagatgaacctggtgggcaccagttctcaaacttcttggtcacaggacgcttgcactctcttaaaatgtactgaggacacctaaaagcttttgctcactgttgtttactactgctatttactaacatagaaattaaacatattaaaatattcacttaaaaaacacacgacactaacataagttatatttttattaaaaatcttttccagacaaaaaacagactttgattttgttttatgtgttgacagatctctttcatgtctggcttcacacagataagaaaatctggcctcccgcatgcgcagcaagtcctcactgctgtcagtgcgttcttgggaatcaggacttt

SEQ ID NO: 53480 - DNA, 2127 bp, Homo sapiens
tgcatactaggtactaaataaaattatgttacttaaatgtcacaacctctaaaagtttaaaaaatgacttctctaaaaactcaaatatttttttccttggcgttcctcttacagaattgtttttagtgataaagttttattaatatacttaatgcagaaataacttcacttcttttttttttttggtaatctggatcccctaaatagaatgctaaatttgtttcttgtgcaacaaacaagttaccacttctgactcttcatcttgagcttccttatttttttttggagacggaggctcgctctgtcccaggctggagtgcagaggcgcgatctcggctcactgcaacctccgcctcccgggttcaagcgattctcctgcctcagccttccgagtagcaggggttacaggcgcgcgccgccacgcccggctagtttttgtatttttagtaaagacagggtttcaccatgttggccaggctggtctcgacctcctaatctcgtgatacgtcggcctcggcctcccaaagtgttgggattacaggcgtgagccaccgcgcctggccttgagcttcctttttaaaggaaggagcaggaatgttaacctacacagaaaaaaaaaatgctttcacgctcttgatttactctaggtgggcttcaaatgcgcggttagcgctttctgtagagcgttgagacggctgtttacgtaaagaccatcatgcgacgtttccaacctagattctaagaaaaaagcggcccaagtcccacctttcgcagggaacagctgattctgtttttccttcccagccaatggtgatcaaaagcttcaggacgctggtgagtcactgcggaggagccgaacactgaccgcgccgtccccgccaggctcccgcgcggccggcaccgcggccctgagcgcaggcggccccgggtctcaggcctcaggcggaccgcgccccgggctcgcagccctcccgccccggctgccgggctacggggcagatggactcggagcgccccgccggtgagtagctacgacccccgaggccacctcccgcgaaccgctcggcggcaggagtacgtgaccaagggtgggggcgttggcccagcagccgaaggggtcttcagcgcgcccagacccctcggggctgcggggcggaagccggggcgtgacttccggcgccgccgggtgtggggcggaggtgtggggcggcttccggagaacccagcggcgcgggactggggcgggacttccggcgacaccggaagtgcattagcgccaggttggggttgtggggtcgcgtcagtgcggagacagcggtgtcctgcgcgtcttcgggtcagtacggggggccgcgtcgtagggactcactggcggtgcgcgacctgggctggctccgggggtggcgggcgcagctgctgtgacaggtgagtgccgccatcttcctacctgtcaggcgccgagtcgttccccggatgccccgaagaggagtcgggacactgcagggctcaagggggtgcaggggcagtcggggcatagtggcggatggggtgcaggtgggcttggaatgcagagggtccgtggtggtgcaggaggggtcgggtccctggaggacccgtggcggtgcaggaagggccgtggtgcagaagggttcagggtgcaagagaagtcggggcgcaggagtagtccgtggcggtgccagagggaccagggtgcgggagggatgggggcccggggcggtgcagaagatgtcggagtccaggaagagtcggggcgctggaggggttgggggcagaagggttcggcccggggtctctccccgccccctttgcttcggcctgggcatcccggggaagtgcgtctccagggaagcacttgggaggcccttcagagaggagaatggcctttcttctctccaaagagtggggatggtcggcttcaagaagggtggtgagtgtggagtgacggatgctgaagtgattaacacagcgccatgatattgttccccttttgaagacttccttttccttcccttccccctgaaagcagccaccgctggagggaaacattttaagacagctgttcaccggaataacacaagagcaacaataataatgtactcatttact

SEQ ID NO: 53481 - DNA, 1411 bp, Homo sapiens
gcagtcctcctgccttggcctcccaaagtgctgggattacatgcatgagccaccatgcccatactattttattttaacatgtaaactgttcacacatgtaacttatttacatattttaatatgtaaatatgcttaatactttagccataaattttctctgacaagctatatattctgtcttcatgtttcttaagcatcatgggtgtattagttttctagggttgctgtatgagcctaccataagccttcaacaacagaaatgtgtgtcctcacagctctggaggctggacgtccagggtcgaggttcgggcacagttggttcctcctgaggcctctctccatggcttacgcatggcccccttccttctgtgtcttcatgaggtctttcctctgtgtgtgtctgtgtcctaatctcattttattgcaagaatacaagtcctattggattagggcccacccatatgacctcattttaacataattatttttttaaataaagaccctacctccaaatacaggcccattatgaagtacaggggttaagacttcaagatgaatttttgtagttcacagttcagtccataatcagagttactccaggtccccaaattcatctggtgatcatccatttccaccagctgtcagtcagcatacctcattcattaacaattaactaccgctagtacctaatcactcactcatttctaccatgtgcttactgcttcagaaaacgtactgtttcaccaaaggctattgaatgtttgtgaacaacgaaaacacaacagagagaggtctatagttagagggaacatctggagtcctgaacaccctgactgcaaagtcaaagctgctttgttgcaaaggcaggagggggaggaggtggacacggctcacctgggacactgtggcatttcttggtgattgattacctgaagtcagagtccaaagtctcaagctctttgaagctcacaagtaaaacatgacctttaatatcagctgttcccagcccagagggacagagtcacaaagcccaactcctacacttgtgagacaacatggatgtttattgtttatgctagtgagggcttgtggctcatgaccttagtaaagggatacagaggttgggtctaaagaacctagatctgacataacaagacccttttctgtgtagcactggcctttggactggagatggggatgtgagaaaattgtgcacaaatcattgaaaattgttgaggaaaaatactgagaaaattgtccctggaggccaaaaaaatgtgaaccacgtgaggtgactgagaaatgatcacaattctctcacctgcaaaatacctgatgaactttcagatgtgaccaacgggatctccagccaaaatattgaaagtgccagctacctgatctcggctgttta

SEQ ID NO: 53482 - DNA, 876 bp, Homo sapiens
ggatcatttccccaatcagtaagaaactttcaaaatattttaataccttcttttaaatatgattcactcaaactatttttttaaaaccatgaatcacgccaagaaatgaatctaatttgacccacacgcgggctgaaatcagtttcacaaagaggttgttactcttactcaatgtggtgcattcaggtattttttgttctatttcattgcattaaacaaaaagaatgctggtcactgcctaccaagaggctcatacagctcactgactaactcaggggtacttgtcattcctggacacttggtccccagcccacccggctctcctctctaggaagcaagctgcctgaggctattttaagtgctctcctttctccaccaagaattggaatctgcccagctgagccccagacgctggaggggtcccgggggtcagtcagccctgcaccaccctccagctcctcttctggccatacaaggaagtccagtgtggggatgactaagcagctgacccggggcgggggagggcagccctggagcgggaggcagggccggcctctcctgccagccatcagcccctgcgggcttgtcctgtggtgaaaagtcccaggcctccacccaggcagcacctgacctctctgctccctgagaggagtgaagtggacctcaaggtctggaggtggaggcacagccttgcactgacatcaggccctaagctctagttctacacagagatagcccatctgtcctggcctcccgggggctcccaggggcagggagatctggcctggccttcccagcaatgcgtgcctcagtggagaaaccccagcttcccagcattaggacacacactctctctcacaccctccgtggttccca

SEQ ID NO: 53483 - DNA, 1969 bp, Homo sapiens
ccctgcccctagccgcgcccgcgccccctcccccgcagcccctcccatacgctcgggccccgcccgtcaccgcccattggcgctggggccgggcgggggcgcgggcggggcggcggttccgagtcaggcgcgcgcgggcagggtccccattgcctgctgcgcacccggacgtgcggctcccctcggcctcctcgccatggacgcggacgactcccgggcccccaagggctccttgcggaagttcctggagcacctctccggggccggcaaggccatcggcgtgctgaccagcggcggggatgctcaaggtgcgcgcccccctcccggcggcgagggagggacggacggacggagctggggagaaccgggcgaaggcgatggggtgaccggagagaagaggggggaagcgatgggggggacccggggaaaggtggcgaagcgatggggagaaccggggagaagagcggggaagcgatggggagaaccgggaagaagcccgcgcccggaagcggcaggggtacctgcggggcggcatgagccggcgaggcagccccggggtccttgcccggtggggcgggggaggaagggacatggcggtaggaacctccatccggaagatcagtgagttttccaccttcggttttgttttaaatggaacctggcagagggagtcgcctgaagcgccctcgggggtcgttctgcctctgagctgtaggacggggccgggcgtcccctccgaagcgtgggtacagcgcgatcacttcctaagtgcccccccgccccccaactccgccgcacgccaccccctagaatgtcgaggaagaaacggctgggtccccgcgcgcctcctgtcgcctcgtgccctgcgcggcgtgggcggggtcctggctgctgcaatgcgggacgcggcgggggtgcgcggggttcccgcctggcgtctccagggcggtccggcagcccctcgcgtttccgctgggagatttttaaaaagggtttcctgcgctcgcatgtgctgtcgccttccggctcgtgacaaaaacgaaaaccaaaatgggtcccaggccctccccgccagcctccgcagacgggaaggatcaggaagcggggactccgggatgtcagcggcgccgcggcgcgggctccgggcttccctgccctgcaatgtggaagctgctctctaggaggggcccgaggctgggcccacggacgcgggcgcgccgggaggatatttaacattgaagagcggaaggtggcggagactcggcgcgccccaggccccgggtgcacgtgggggcgccggtgcccggatgatggagtgtcccgatccgtgcaatccctggcgggtagatcggcgcttcccaggcgaacgcaacctgggagccttagcgatcgcgcaggctggagacgcggcgcgccccgagctgggttttgatttttgttttcccggttcctcctgccgcagatgcgtggaaaggcccggatggcggatttcctcccgtttcggggccgcgcactgcacagggttggagcggggatgcaccccctgcccactgcgcgggtgaccttcccttcgcccttgagcgcgcggggcgggcgcgggtgccgcaggttgaggcgctgtgggcgccgccccgcccgccacgagcgcctacgtgatgcccggcccgtcgtctccacgagccccggccccgacacccgtgcgccgcgcgctccccaggcccgcagcgcagcctccccaggcccagcgccccccgcgggagacccgggtggcagcgccaggccccgccccgcagcccgccctgcagcgcccccgggaagtgctctggcgttagcattccagtaaaaggaccccagcatcaacgttcttcctgcagggctgggttctcagagaaagaaaacgtgatgcagcagaggatgggattgaagaaacaggagagtgaagtggaaatagcctggcccgcgtgactta

SEQ ID NO: 53484 - DNA, 1870 bp, Homo sapiens
cctatggggggaaaatcactcttttgggggaccgctgttctagacctatttgggctcaaattgaggggatattatgttttatttttttaaggatgactcagtaatttatccaacagatttttttcacctatactctagtttctaacctagagctctctgggttaccaacagaccaggacagttaaacaggttactattaattaaaggggtttgttttttccttcagtagtgcatgtgtgaagaaagtattaacctgggaacagtggcgtttctgctgaaagcctggccttcatcgagggacctctgctgtctggccgctgcttgagctcctataaacctgggccaagcctacgtgtgaagcatgccaagccttgggctgcattccagggagactcggggagggtttgccagttaacccattcctttctacctggtgaaccaattgttgcttctttcttttttctcttaagctaaggtttttccttagaagcctacaaatggctttagcttcttggagatgatgatactaagtatatcagatgctttgacccaaaggccatgcccagggtaaactaccctggctctggtgggtccaaaccaagctggggcgagtcagttggttaatccagggctgccactgtgtctgcaggaaacagtcggctccttgcatttggtttcattcatgaatttcatatcctgttgttgaatattcttctgcagatttcagaaattgttcatattattatagctcttcaaatatgactcacttaagattcttgccgagcaccgtggctcatacttgtagtcccagtactttgggaggctgaggcggatggatcctttgaggtcaggagttaaagaccagcgcggccaacatgacgaaactccgtctctactaagaacacaacaggtagctgggcgtggtgtaatccttggaaggctgaggcttgaactcaggaggtggaggttgcagtgaacctagattgcgccactgcattccagcctgggtgacagagcgagactgtgtcaaaaaagaaaaagaaaaaagtcttttatcttaattttttgtttgttttaaagtttggttctgctctagacagctgtttgtaaacaatatcagagctgtctttgtcatagtccacaccctaaagaaaggctaggaataattctgatcattttatcgctagttttttccatgattaaaaataacacattcaaaaggtgtcagataagtgatgcctttttatgttgaaaggataaagggtgttggtacagcatcagcatccagcctctggtcttcccagatgtgctgccatggagcctgtgccacctgacccccgccaccggcccccaagcttagctcaggtgcccgagggtctccatctccccatggcccccggtcagcagccctgtccctgcacccagactggccaacccttctgagcttgaaatatcagcatgtgatcttagcttcccttgtttcagccctgagcattacagcttgacttactataccaataaacaaaccattaacttatcaatgaattgattggcatcatgcttcccttctttagttggtctcgtggaggtagagaggaggatgtagatagcagaggctgggaagggggtgtggacaggaggggatgcagagaggtggatgggtgcaaacatatgcttagataggagtaggttccagtgttgatagcggagtaggctggctgtgttagcaacagcgtattatattaatgtatttcagagcagctgggggagaggactggaaatgttctgaatgggttgaagttaaaaatacccagggtgacagacaccccagtaccctaatttggtcattacaggttctgtgcatgcaaca

SEQ ID NO: 53485 - DNA, 3204 bp, Homo sapiens
tagtagaggtggggtttcaccgtgttagccaggatggtctccatctcctgaccttgtgatccgcccgccttggcctcccaaagtgctgggattacaggcgtgagccaccgcatctgtcgtagcattatcttttattacatgtttatatgccagccaggtcccatgctgaattcttcatgtatgatctgccttcatcccaccaccatttacaccattgcctgtggcttcagacaatctagtttcagtgaacatttcaaactgcagaagagcaccatctcccttcaccaccacctccccaccactgtggtcagctgaatgagcctcaaggtggggtttgctgtaaggtcactgccaggccagtgcttgggaccctctctctacaggggaggaagggcgaccggcctcgctcctgctggggctgttggttgtacaacttaccggaattgtgcactcttagctttggcttaaagaaatctgtgatgccagagggctaaatacatcatgctgttgcattattggtcttccaaagaagcaagtgcaggaccacatgatggtgtgtcgtgtgctaacctattttagaattttacagttgactgagtctcccaagaagaaatcctgaggctgctctatagaaattttctatcaagtaatgaaatcagtgagggtgctttgctggggtgattggtagggtctctggacaagagcgttccttcagagtgttggtggggaggtgagcagggcttgggatgtgtgttggtgtggggctgtttaatctcaggctctgcctctgaatttcctagagacaggataaagccacgattcctggcctttgaaaaccattgacatagtgaaattcctgccgcctctctttctcgcacacctagtttggaacgctggtgtttcccaagtctaagcctagagagccgttcagagctgacctctgcatgcatgctctgaattctaaaagtgaaatgctttaatttattaaggaatgttgtagctttaggttctgtgggggagggaaaaggattaaactagggaaagcttgattctgtaggaaacaaaaaaaatagtatttactcagaagcagcaaagcccctacatctctggatgcagtaactatgtctgcaggaagctggtgataacactatctggaaggcacttttaaagtctgttatctctaggagcttgttttattctggtagttggaatgttcaccatttggagttagttgagtgaagaattcaggaaatcagattggaaaaaagcattatccagttgagaagacacatggacccatgcaacaagcattctgaaagaaaaagcctactgctgcaacacaacggtataatttccctttgtctgtaactttaaaaaaaaaaacttacatatgagacgtccgagaaagccacccataggtgaactacgcgcataggtgaactagcttactccatttatgatggattcggcgattgcctaaaaattctagtcaaaaccacctctacatatagaatgatctcctacatggttagaaggctggttattttgacacagctcaaaacaatttcgaataagttgaaatgacttcagagcctgtggcatgttcttagatgtgatcgaatgactcaacgtaaaaaattctgtccgacgatggatccgatacagccaacgaggagctctaaggttcatcttgtgagtcagagtcaacaagacagagaatgttactttggccaaaaaactgagataaggttaaaggttttatgctctgtttttcctatgtgagtcataaaactggcttggaaggcaaattccaaaagggtgttttaggaaacgtctgggctttggctgtagtaagataaatattcagccttctaagaagacttcaaaagagaaaactcatctgaatttctacgttgtagtacgtttgggcaaaatgagtcttcctaatttagtaatatcttccttgttggtgaaagacggcttagaactgcggctggtagttgcttttcacatgttccatgggcgtcgtgactttgcaaattaaagaatgagtcatttcctagcaacttagctcacgcatgcactagacagggagcattggaggtggcactcagaaagccctccctttctattttttaatggctttctttgccacatgcatctatgcaacacaaaataatgaaattactttcagagaacattttacttttcaaaatgttgtggtttgcagagcagttttcttactactccagaagcaagaggattcgttaacatgtttgattaaatccgtatttaaattctgtgaactcatgcagggaaaggaaattgtatggttcccactatggcatattaactagtaaaatgctgggtggcggttgacttggaagcagcgtccgggatagcgcgtgctccaggaatactctgaaagctgatgccgttaggggtgcatggttgactcctgggcctgagacggcctcaggatgctgcagcggccttggcatcctcttcagcagggtggcggccggaactggcaccttccccccggtctctttatttaccaaaaaactgcatgcacagaaatgaccgcaacagctctgggtgtgggaatgtaggaactgtctgtttcagttttgccggagccccaggtttacggccgctctacatcccagtcctctcagggaggtcccggtttctgctgcagttcaggccccatcatgggtcatcttttctctcctcctgagatgtgggcttggaggatgggaggtcgtgcctctaagaagggtccgtttcacggtggcccaggctacatgcctgcttccttgtttccttgcccccccgagcttcatggaagtcaatctggaaagtcaggatcactgcagatggcagtttgttcagtgttgctcccagacctgaagaatggagcgctctgttgtgcttgcagaatgaagcataattcttagcagaaacctgggaggccgggtgcggcggctcatgcctgtaatcccagcactttgggagtccgaggcgggcggatcacgaggtcaggagatcgagaccatcctggctaacacggtgaaaccccgtctctactaaaaatacaaaaaattagccgggcgtggtggcgggtgcctgtagtcccagctactaaggaggctgaggtgggagaatggcaggaacccgggaggcggagcttgcaatgagcca

SEQ ID NO: 53486 - DNA, 1865 bp, Homo sapiens
agcctgggcgacagagcgagactctgtctcaaaaaaaaaaaaaaaaaaaaaaactgaagttgccacaggactttaatttatttagacgataaatctctgccaatacatcatccagtaccaactttggcactacttaggaaagcgtttctgagagccctgtgtgtatgtggtttatttttgttttgtttgattgtttgattttgtttgttttgagacagagtctttctccattgcccaggctggagtgcagtggcacgatctcggctcactgcaacatctgcctcctgggttcaagcaattctcctgcctcagcctcccaagcagctgggattacaggcatgcgccaccacacccagcttttttaaaatttttttatttattttttatttttagtagagatagggtttcgccatgttggccaggctggtctcgaactcctgacctcaggtcatccacccgcttcggcctcccaaagtgtagtttttctcccttgaagcggttatgtaatttcagtgcaatattaaatatgaccagggaagcatattgtttaacagcaactcgatgagaggcggcattgaggcaaagcagctgtccccaggtttgtgaacatcctcgtaggggatggagaaggctgcccgttggaagcagccaggcctcacggttcccgcttgtccacctcatcccgtctggcacagcacagtgagtgcacagaccgggacagtggccacaagtccgggcccaagcttgcccctggcccttcagtggttccgattccctttatgcagaactgcccagcccaggtctgtcctgagtgcgaggcagatgctcacccacgatccagcttcccacagatgcatgagaaatcagtgtgaagatggcctagtgtcttagattcttaattccgtaattgtaacgtatcctgttcaaagccgtgtcattctctgaagctgttgccaggaagtactgagatgtttgtttaccgattgcaaatgtggatcctttcttttatttttctaatccactgctcttgtctaagtgccaggtgacagagtccattgtgtgtaactgctgccagctttgtctggcttctctttccttaactatgcagaatccggttgccttgagttcggagaaaataaagaatcggccagggcagtggctcacacctataatcccagcactttggaaggccaaggcagaaggaccacttgagcccaggaatttaagacccgcctgggcaacatagagtgtgggtctacaaaaaaaattaagaaatcagccaggcatagttctagcttctcaggagactgaggcagaaggatcgcctgagcccaggagttcaaggctgcagtgggctatgatggtgccactgcactccagcctggtcaacagtgagaccctgtctcagaaaaatgataataaagaaatgataccaataacaaagagtttagaatggttgatttctctacccatggccattctgcctcacccctagtggggcaccccccgaacgcgccatggttacggcgatgagacgtgctgtttgctccccgcgcaggccagatcgataaggaggccgtgcagaagtacgcctacctcaacgtggtgggcatggtgggctccatcgacaatgatttctgcggcaccgacatgaccatcggcacggactccgccctgcacaggatcatcgaggtcgtcgacgccatcatgaccacggcccagaggtaaagcgctcagaggaaccggcgggaggccagtggggcccgacgtgtgcccagctcagacgttaccacgggctctagaacattctgcagattgggtgtcctggtgctggtctcgtaacttgacttttaggagctattgcc

SEQ ID NO: 53487 - DNA, 2222 bp, Homo sapiens
atctgcggtggtgatgtgagctcccagtcccaaagagctctcttccagtgagccacagccgccctgctccttcacccctgcccctctcctcacccctgccactgccccttcacccctgcccctctcctcacccctgcccctctcctcacccctgcccctgtcctcacccctacccctgtcctcacccctgcccctctcctcacccctgcccctgccccttcacccctgcccctctcctcgcccctgccccttcacccctgcccctctcctcgcccctgccccttcacccctgcccctctcctcgcccctgccccttcacccctgcccctctcctcgcccctgccctgccccttcacccctgccccctcctcgcccctgccccttcgcccctgcccctctcctctcccctgcactgccccttcacccctgcccctctcctcaccctgcccctgccccttcacccctgcccctctcctcgcccctgcccctcctctcacccctgtccctccctgctgtcacccagcacacctttcaccaccttctgatgtcattgggaagcagctcttaggaagttaggcaaagattcctgcccagaaagaggccagttcagtttgagacagacttctgtggttttgttgcatttgttgctaagaacaggattaggaatttgagagctttaattttctgtctccacagaaccgtgcccggaaaaaaaggctgaatattattattgtggctgaaggagcaattgatacccaaaataaacccatcacctctgagaaaatcaaagaggtgagtgtgtgtagctgctcactttctctcggtttctgcctggaagcaggggaggctagcgtcatgggcaggcttggtttagaacattgaattattaactttttatccttgatatttaaaacattttcataatgactcagaagttggacggcaggggaaacacgcagctcccgctcctgggagcccattccgcttacgtcacctcttgccgagcccgtagaggttccgggactccccagcagacagagggggtcagctcgagtggccacgcgtgttctttggattagaatgttccggctcttaaacatgagctgctctgagaatgaggactgaccacttggcagccgacccgggcttctgtttgccacagtgggaaaaggcggcgtcttgctattccctgtgccctcccataacccagagcatcagctgagcacattcttacaaagccactgtgtcctcgtggccctgcctgggaacaggctttggcaggctttggcaggcttcgtgccctgggacttgctcaggccagtgcctgcctgtctggagaggactctgataccatgggctgtgcccctgctgtagacggggctgcaggctgccggggctggggatgggctgtggctccagcagccacggggcagaagacgtccccacctggctttgcaagtcggcttctttattgtgctttgttatggtcagttaaggagcaaagcatatctctggatatgaaaacagtgatggacacctgggaaagacatctgccaatatttataagtggtcatccataaagtccaggcaaagattttatttcccgcttaactgtaattaaattataggacaatggaccgagaaggaaccaaggaatttacgtagcccagccccactgtccttacagaggaataagctgagttccagagacagtcagtggcctctccagatcaccgggccggtgtgcccatgggctggggcgaggggaacgccttgattgggctggcttgtgctgttcaaatcacagctgaacaaattaaagctggttcaaggaagatgtttacattttttgtaaaatataagtaatagtttaaatgcaagctactgaaacgttacttttttatttttcttttttaaagcaacgaacatattacttgtattcattttctaggtgcgagccaagatcttgtctggtaacaacagtattatttttaaaaccaattttcagctgcctgttatatacactaaacgttctgctaggaaacaaaatttagaaataacttttcccatttagatctgaagaaagagcgaaaaaccttttccagtgcccagtacctccttccagatctgggctgctgtgtccgcatcacagttccgcatcctaacgagatgtttccttgcagcttgtcgtcacgcagctgggctatgacacacgtgtgacc

SEQ ID NO: 53488 - DNA, 729 bp, Homo sapiens
gtcttcctgagggtctgacatgcttgaataaccttagagatagctggaagtaggagtatttttctcatcttacagatgaggaaattgaagttcagagcgagaaagaacttgaccaagatcctgacgttgcccagggctgcctggcgtgcatcagtcccagccccgtgtcccagggcctccatccgggcccctctgctcccccgcccgctgtgacctcgctcccatcccacatcccccagtgagctggtgtgttctgttttgtttttccccaccataatcaaattgagaattccttagaaccatgcctgagagatttcatttcctctggctttgttctcttggagttaaatcttcacagtgttgtgtccacaaacagcaggtgacaccttctctttttcctcagaagcctcctgagctaagcagtcccagggctctgacctcacagccgggccgtgtggggctggctgccaaccagcattaggacacacttggcggccggtcgtctagaccattaaccctggggctgctggctgcccgggtcagactggagggggctggtgggaaggaccgagccagtctctacctaccccatccatgatgcaccaggtcctgacacattctttcttcttttcatcattgttttaaaagactcaggatgtgcagaaggcgatggacgagaggagatttcaagatgcggttcgactccgagggaggtgaggtgctttggag

SEQ ID NO: 53489 - DNA, 1573 bp, Homo sapiens
caatctcgactcactgcaacctccacctcccgggttcaagcaattctgtctcagcctcctgagtggctgggactacaagtgctcactactacgcccagctaatttttgtatttttagtagagacagtttcaccatgtcggccaggctggtcttgaactcctgacctcaagtggtctgcccgccttggcctcccaacatgctgggattacaggtgtgagccaccgcgcccaacctatttctaataattattctcacctgaatgagatggctcacacctgtaaccccgcaatgcgagaggctgaggagggggatcaaaccagcctgggaaacagagcaagatccctgctcttaaaaaacacgtaattattattctctccaattgtattatatgtcgtatgggattttctacattaatgtatcccaccgaaatatttattttaaagataatatgtacaggaagaaaaaacctattcagtcactggcaatattatgaagatatgctataaccaacatttgcttactgatttagcaaatttcagaattatgggacagaagcgttttaagaagttacttatcaaggacatgataggaaactcctgagcggtaaggccaggccgaactcatgccacggacgccccgtgcctcccggcctgggccggcagcgctgaactattaccttatattaaacacgggctcgtggattaccatgaacactaaactgcttcgtcatttttttccccataaattgagtcattaaaaaaacaaaacagttcaattccgggaggcgtcagttctctgaacacagcgagactttaagtatgggctgtgggcgcctcgggtctcttaaggactcggcctcccaacaaaaatgaactaggagcaaagctgtcagcgagaaccgcaaatgccgaccccatttactacccccgttaaagcccacgctaatggagggccccgccgggagcgccgcgggcaggcccggcccccagcccggggcatcgcccctgggagtaggaaggagctccgaggtcctccggcctcggagcctcggatgcgggagctccaggaagggctcggggtgcgggacgcccacagcttggggagctgccagccccgggcgcagggacgaggacccctacgcctccggcctgccctggaccctcccctcccgggtaccagcgcgccgagcgcctcccgtcgcagcgtctcacccgccgctcagccgcctcagcacacacaggccctgccgcccgccgcagcgccacattgcgcatgacgagcacctggctggcgaggaaccccctcttaacccgacgcagggcgcggggcggggcttgccgtgacagctaccactcctattggtcaacgcgaacagcgacgtcctctgcgataggctgtaggtgaaaagggtaggcctccactgctctgggacgggcgggagggcggtgcggacggagatgggcgggaggggcggggccgacgtgccgaaggaggcgggcaaggcgaggggcgtggtacgggtagaaaggggcggggccgtcttgccgaaaggggcggggttcggccagcagca

SEQ ID NO: 53490 - DNA, 1900 bp, Homo sapiens
gggaaccagttttcagttgtagcctttctaaagaggcgtcactattgtttctgtttctatttcagctttctatcacgttccctcagtccagggagacctgggcatggaattcccatctcagctcggcctctgccgtggtctgcaacttgctggcggtctcccaagagtcatcccagcaaacgtgggggctcttttgtcctgttatgtgaatggccaccacggggaacattcccgcccactggggcctgtgggggctgtgttcaccccggggtggggaggggggtctggccctgcaggtgggtcctcaggccccaggcaggggtgtccttggatgagctgtcctgctggggggccatgcagagctgccgaggagaaggaacaggcaatgaggccgaggccaggggcgtcccctcgcttccttccaaggcttccttccgggacctctcatcttggaggctgctttttcttttggttcatttcatctggattttaccaaggagaaaaatgcactgggggaagcaaggagttacaggccgagggctgagtggtttgctttagtcctgcacaccccagacaccccggccgctttcccagcagtccaggaattaattccaggaatgctctgcgtcccagcctcctgcagcgggactctctgtccgctgcttccagccgaaggccaccggagggcagcagaggcctggctgaaccgggccgggcgctgccgagactctgggaacgtctcccactcagtctccctcgttctacagctggtagcaggcaggtgctgctggttccttccatcaggagggagtgaccgctgaccattgcgttaccacatggagcagcgaaaggagacgtccccatcaggtcttccagcaacggcagctcagaattttcactgggatctctcaaaaatgcattcatttaagggatagctgtctgtttgtggatttcttagggttgagtcattacacgaggcttatcagggacagggatcagtgcttcggtgtcactggtgaaaagaagctcataaaacaactttcgggattagctcattcgccagtgattgcgactgtggcaaaccacactgcccccagcacggcgggtgtcaattatgtgacacagactctaaaacgaggtgatgttaaagaggcttcataaaattgtcttgtatacaactcccagaatattacttaggaatatagttccactgagtgcaaatgcagtcaatatttatttgaaaatgtgaaaatctagccaattggatatatgcaggtgattgagataattcaaactttaatgtctttttgaatattgcattctcttgtttattctttggcatttaaaccagtctgaagctcagctgattctcatgatttaggattggaatgcccagtgtttcaggtgaatcgtgtttagggctaatttgggctctgagaagggcccattcgttacttaagaagtgcttggttgtcttagccagctcgggccgtgacaaaataccgaagactgagtgacttcagcagcaaacagggattcctcacagttctggagactgaagtctaaggtcaaggcaccggcagattcacttgctgatgagggccttttcctggttgagagagggcaccttctcactgtatcctcacatgggggtgggggagagagagagaggagagacagagagaggagagggagagagagagagctctgcccccttcctcttctttttacagcgctggtcccatcgtggggccccaagtcatagcttcatccaaccctcattgtctccccaagttcctgcctctaaatactgccatatgaggggcttgggctttgacatgaatttttggggtgaacacaagcattcaatgcatgcccaaggggacactggtggtcatgt

SEQ ID NO: 53491 - DNA, 454 bp, Homo sapiens
gataaatatgcaaacacgcgaggtcagctgtgatttttgtcagttcctttttgtggtattttaacaacaatttaccttttatctgcacatattgtctataccacaaggtcccctgaaaagtggggcaggtgtttgagtcataaaagataaatatatcctgaaatggctattgtttcgagtctgtgaatcatttcaaaggacatttgccgtgcaaatagatgatgtaactctatgtgttttcaatagcacatctgcaagttaagtcgtgtgattccctggatgatattaagtctgcaaatagactgccactcacaaacaatattgtaagtgagatcggtagagtccctgttctagaacaaggacattgacctgtgttttcagctaaagcaatgttcactcccttaagggaacatacctgattttattttgttaaaacttttattactgcaaactt

SEQ ID NO: 53492 - DNA, 1224 bp, Homo sapiens
taattccctcacatcctacgagttaaatatattcttaaacatctatttatttatatgtgtatgagaatgataattttaccttttctaaaaactactttttaactgtgcgtatctgcatgtgtttaatgatcagaagtgatcagtagtttggaattaaccttcctttcggattaaatcagtctggtatttcacaggtgtgtgtgtgtgtgtaaggcagttgttcctgtccacaatttcgcaagtaggtggtgacagcattgtgtttacatagcattttcaaaagtgctttcctaaccataatctcatgggcttctttcaacgcctctctgggctttgttaggacaaatgattatcaaaattttatcgagaaggaaagggtgacacatagaaatgtaagtggttagaggaagaacaaaacaggttataaaaggatttccacgtcttgctggagaaaaagccttattgaacatattaagcctggtaaccacccactcccctttctgtgtgtgaattctgactgagcgagatgaacactcttcccaacttctctgtgctagcctgggattagcctaactgcgctgccttttctggtgcaggctgaagagcgtgtcacagttgaactctggagtttacttgggttggtctgtgtttatgacaagtatggaactcattcaaaagttaccaaagctgtacttttctcattctctgagtctccctcatcagcagggtgaagtcctcatattatggtcttataactgtcaacctgatgagcattttttaaagtgatctctggacaaacattctcctggctgtgaggacaagctgcagttcggaccagcctcctgtggaagcaaacatgcagtcactggcctccagagtttggcttaacacagctcttcctcttcctgaaagttacagcaggaagccgttttcaacgttgcttgtaaaactgtaacttcagcattacacaaacttcaggaatgaaagctcacctgcaggaacatgagtgaatataaacaggggtgcctagaaccactgctcacagctagaagcctgcgcgggagatgggggtgacaggataggaacggggcggctcaggccccagccatggcaccatcacagagtgcgtgcctccctcctgttttcatgcacgtggcacatgccggaggcagccaggtcaccaagtggtcagagctttcctctgctttacaccacgtaggaccc

SEQ ID NO: 53493 - DNA, 1734 bp, Homo sapiens
gcatcttggcatggtcagcagaggagggcaagttttctaaaaccttaaaaagtatcttggtgtcatgagccttagagttatttgaaatgcagttatgtgaaacccccctctatctttcatgaagcctcagaaaggagtccagggagccggggtttgtggaagttagaatttatctgatgatccagagctgcttctcccccacgataggtcaccgtgaatcggagtattttgtggttggccttttcaaacaggcaagcatttggtggtttgtcttttgtttaatttgttaccagatcacacaagatatttttcaacagaatttcagaaagcatcttgggaaatccacaaaaatgggctgagtcatctaaccagaaacagtccacaccacatctgactctgaatgcctggcttttctttctttggggagaaagttctcagcatcagttggatgaaagggcagggaagtcgagattgatttggggtttacagggacataaagagaaattaccagccccagactctgaaaatttttaaggtatcagaaaagtgcttgtgatagaacctgatgattgcttttggtgcctgggatggttattaagggtcaaaataatgtggagatgccatcatggaaaagtgactgtgatatgaatctgttgctaaaaatgatgatttcaaggagcagaatgacattccatccacctatgacacgcacttcacatttggttaagggttaggccaagagctttttttctttctttctttctttctttctttctttctttctttctttctttctttctttctttctctctctctctctctttctttctttctttctttctccctctctctctctctctctcctctttctttctttctttctttctttttgtacagctcttgcagctctaaacccacaaagcaggttaggtttcctctggcctgtgacctaatctttagtattagaggaggcactgatttgtttgctctgatgtaagcccaaagggaatttggcttcttgatttataacaggattgggtttcaggcctctaacagttaaaaccggtcttcagcagagactcaagcagggggaatgaaagttacacagtgcgtggattagtcctttggtgtttttgacacagtttcttttcataggagaatcttatttcaaatagggaggcgtttccccgttttagaaaatgcttgtgaaatgcatgactcattacgcccttgcaaagagccaaaaaaagttctgcagagtctaggacaggactaaaccgcagctaagtctaatatttcagtcttgctgaaacagctgttcccactcgggtccgagagcgggtgggagtagagatggtgtgtgggggggtccccacttcagttccccaaagcatcagctgctccctgtcttgaacagaatcagctccaacagggagaggcttggacatgcccgccattgacgctgccaggcctcgaactctcctgagagttggatttttcccagtctgtgctatctcactcttatttgaggaatttgagtcagagcaaaatgtgggcagagaaggagaaggaacaccaacacctcaattattgagggaaaagacgtgcaggttttctgtagcagtgaacctgaaggaagacactgctttgtgtctggctcccaaagaaaaaggccaagttgatctttcctgtgaaacagctgaaggtaccaccttgaaaactggatgttttccc

SEQ ID NO: 53494 - DNA, 1195 bp, Homo sapiens
cgggttcaagtgattctcctgccatgacaggcacccaccaccatgcccggctaatttttgtatttttagtagagacgaggtttcaccgtgttggccagactggtcttgatctcctgacctcgtgatccacccaccttggcctcccaaagtgctgggattacgggcgtgagccaccgtgcccagccttttgtggacattttaaacagcagggaaattaatcctgagcaataaaaaataaataaataaataaataaatcatggtttttatttgaatcttaaaaaaacaaaacgaaacatgttttcacttttttttttccttatctaatttggctactgcttcactttctctgccacctctcttactgcagtttcaactaaatgactaagcaaattagatcttgagttgcttttctggaatgcggagagttggagaatcagataaaagtcgaggtatctctctcttcagcagcttccagatcgggggctggagctgagcgggggtgttgtgcaatcccgtactgttgtcgagcaggcttcagttcagggagaccaggcaggctgaggcccaggagagtgcccccttgcatctgccctgggggaaactctagaaggggtagagaaaatccgagaagaaaggatatttttacacggtaggattgtatttttatccccggaggcttgctgaacgcaagtttctgggtaagttacacaatacaggaaaagtaactgtttagcgtataggtgatacgtgttggaggccagagcgctctgcaaagccccgcccctgtgtgtgttgtgtggtctgaaaacaaagagcaggcatcaccttctggaggtgaggctggcccgggactcagatggctctaactctgcgggtcgcctgcccagaggctgcacttcagccggcggggaagccaggatggatcttaagtcattcgattctcaggccataggttgttgccaaactgcagcctggaaaaatagtctattgattttctgagtcaaataaagttatgttaatgtagaattaaatagatagtcacatagctgtaacatccccaaagatggaaatactacacatcaaatgtgcctgtggtctctttgttcatctgttccttcctgttcttactgctatcagaaaaaaacatacctagcattgctaaataaggcttgagaaacaagcgtgttttgtaaa

SEQ ID NO: 53495 - DNA, 1295 bp, Homo sapiens
ccccaaaccaatttattattcttaatgtcattaaaaaccacacacacacacaaaaagactggagactcagcccaggacagtgagcatagttagaaagaaagccacttgagcaggaccgggtagaggttaacttccaaccacagctaaagatgccagattgtcattccagttcagtaaagcccacctcaaactgtatttattgattcatttcacaataatctgctactgtattcaacactctaagggagtgaggagtttacttgattcagcggtaaacgcagagctctggtaggaggtattaatactacttatcagcaaaggttactagcttgcaaaatgtttgaatcatgttaccacatggttaccaaagctgagttatgaaatgccaggggctgactctgggtgcacagcacttacgtaagtcactctgcacagggcgctggaggagaagttgagttctattacaggaagcagaggaagtttcagcagacagtcacttgccaatttgaacagtccaaacacatggtcttccagtttacatgcccagtggtttctaaataattcacatgtcagctgcacagacacattgatagtgtcatgggttttgatgggttggcccaaatcccatcatgagtacagttccatgttccccctgaaactggcgacgagaagtcctcccgggggaaggcagacaagggcagcagtggagttttggggttgagactgagccagaaagcaaagtgccacttctgcccatatgatggtgagattttggaagattccaagtctgagagactgggtcatattgagagaatcgtggaaatcatttggaaaccgggcagtggggagggaaggataaagccgtcttccatttaaaagggaaacagatacaatctgaatgtatctccccggtttgtctgctaaggagagacactcttgtctgccgataaagagctgagagcctcaagtaggtcaaaaataaagaaaacaaattgaaggtgagattgattcatgacacatgtgttacaaggtctggtgggagcctctactttttctggaggataaaaccatcaaagcacactgcccccgtttcatcacaccacttgcgtattatagagacacaatcagttctcaaaatccctaatttgggcattttgtgcctcaaaaatatttgttcccttagtattcaatgtggcaccatagtacgagtgcaggtgttttgaatttacacctatcctagctttcacttctgatccaactcatgggtttggtacgtctgcttagcagtacaattt

SEQ ID NO: 53496 - DNA, 2484 bp, Homo sapiens
gcctagtcaaagctttttttttattttatcctatttgaggttcactaacgttcttgaatatgtcaatttgcatctttccccatttgggatgactttgagcatgattccctcactatcttttctgcctcatcctctgtctcctgtgtcctggggtccctcatgtgtgttctagccccttctccctcaagactcctcttcacataagctagacttctgaaatcatctcagggttccctaaaattccatccttttttttctttctcacatcctcagattctgtaccatttacggatccatcttcctgtccactggccctttttactgccggccctgctctgccgttaagttcttccagtcaagttgttcatgtagacgttttgtctatgcactcttaattttccacttggtcatttttatggtttcttttttttttgagacagagtctcactctattgctcaggctggagggcagtggcgtgatctcggctcactgcagcttccacctcctgggttatagtgattctcctgcctcagcctcccaagtagctgggattacatgcacacaccaccaagcccagctgatttctgtatttttggtaaagacagggtttcaccatgttggccaggctggcctcgaactcctgacctcaggtgatccgtctgcctcggcctcccaaagtgctgggattacaggcgtgagcaactgcacctggccattttctatattttttagtgacatttcctatgttttcatttgtcatgagtgaattttcctttgccacaccaagcatagttttgataactattcatgttcttgtctgatcattccaacagaggtcatctcaggcctcatatcgattgactatgttttcccctgagatgaggtcacattttctaggctttttgtaggttgagtaatcttggataatatctactatgtcattagactttggattctctgttattgctcagaaaaacgttgatactcttgttgagtaagtaattaattcaactagattctgtgcggagagttacgccagcattagacgagatggctcagactttattccggctctttgagccatcatttcaggccactttcagtttgatctatgcatgtggggttcaaacagcagccggagctgggggcggtggggaggggggcatttatgctcagaatcagatgtcccccgtccccctccgctttccgaggctgtcctttctccctctctccctcctggctgctcttgggttttctccctgattgccttcagcggaggagatgctgggcttggtaagctctgcctcagtggaagcttctgtaagataaaggcgcagtagaaaaatgcaaacgtgttctctgccccccgcgcgcttcagggttggctccctccaaaagcttcctgagcttgttcagtcgccacagctctgagagagcagtttgttttgtatcttgttaaagtttatagctgttaatgataattgattgttaagagttcaccccatctaaggagcatatggcccacaaatggccggaagagaaacttccgagcacttgcccctcctcaactgtcattttctcacttatctttaatagaatatgtatttttcttatataaaattatacatatgctaaaatataacatacatatatgtaagaatatatatatgctgcactctaaacacttactgctttcttatgtttcaaatattttcttctattttatgacttgactttccattttttatgagaagcaggttttttaaattacatatagtcaaatatatcaatcttttacatgtacgtaatggtgtgtatttttgtgtcttgtttaaaaagacattcgaaaaaatgataataaaaaaacttcctaaatcccatagtcatattgatttttgttttgtatattgtcttaaaatttttaattttgctttttacacttaagactttaatcagtctagaattgatttttacacacgatatgaagtggagatctaatttcttcattttcattttggttttctggatgaatgaataagggttaaaagttatcatttactaaatagtccatttttctcctacaaaaggaataaatcaatttccaatcatctatttctctatcccttgtcaataccacatttacaactgggcccaaccctaagtggtacagaggcccacagataagtaaatgattgcagaataaactttgccagctttaggactttggctagacgtagctggttctgcgtggcattttttagcctagaaactcaaagtgccccatagcctgattaggatacacgtgtcatcttttcttctcctattacaaataaactaaagcagggacctgggtagcttgcatatgcatgggtagcctgcaggggctttgaaatgaaactgcctgagttcaaagcctgatttcaccacttactaacttagatcacttgtccttgagaaattaccggatgtctttcagcttcaat

SEQ ID NO: 53497 - DNA, 3739 bp, Homo sapiens
cagatctcatgagacttattcactatcatgaggacagtatgggggaaaccaccccaatgatttaaattatgtcccaccaggatacaattcaaaatgagatttcggtggggacacagccaaaccctacatgaatatttaactgtgcgagaggtcagtgcctataacgcttgcattgttcaagggtcaactgtatataatatatagttaaaaaaatacataaaagtatacacagcaaagaggttactctggagtggcagaattttatattattttaattttttctctgttaatctatgtggactatttttcctttaataatcatgtgctatgcccttagatgtatttattatgtgaaaaaagatagttattcctttattactaaaaataaatgcttctagaataaataagtaaaagtaatataattatttggtacagatttttaataaaatggtgttaaagaataaaaattcttacatatgcaaggaagaatcagaatgtgtataacaaaaaagcaatagtcttcatgtgtgattatgaattgtgagatgtttattttcttcttgttctcatccacactgtctaatttctctgtaagaatgttgattactttctaagaaaacatagtttaattggcaccttggggttgtggtgaaacaggcatcctgatgccagtataattggctacagcctttcttaaaaacaattttcaaattcctttcactatccttaaaagatgacagtgttttacatagtgattccattcctgttgatctatcttaaggatataatcagaatattgactcaagactgttgtttttccagaattctttcaaattgaaaaaaaaaatttaaaaagaaaagaatatctaaataaataaagtatatcaatataatgaactattgtgcaatcattagaatgatttctaagtgttttttacatagtaacttgttattgaacatttagtttgagtcatacgttatatcaaaagtttcaccatgcatgagttcatttgattctctcaacaaacctgtgaattaatattgtgaccatgattagtcacatgagaaaactgaggataagagaaaactataagactcttatgtgacaaaatgtctaaacagagtaactatttgaatccagcccctatggattttgctactactatctggaaatgataaagcaaaatcagacactaccagtgatttaatgctaagaggaaaaaaagtcatcacctaaattgtatcctattaaaatagacatataggcataggaagaaatagagcaaaacattcatagacacaatatgggcatggcaagttttcaaataatttttatttttttaaaattttgttcctttctgtgtttctcaaatgtactacaatgcacatgtattataagaagaaaaaaatagaccgggcacggtggctcatgcctgtaatcccagcactttgggaggccgaggtgggcagatcacgaggtcaggagatggagaccatcctggctaacacggtgaaaccctgcctctactaaaaatacaaaaaattagccgggcgtggcggcggatgcctgtagtcccagctcctcgggaggctgaggcaggagaatggagtgaacccgggaggcagagcttgcagtgagcctagatcgtgccactgcactccaacctgggtgacagagcaagactccatctcaaagaaaaaaaaaaaaaaagaagaagaaaaaaataaggtagctgtaagtaaccaaaaaaatacattttcaaacgggggttattctcatgtttggcatgtgtcatataaacactaaacagtgctagaataatgggtaacttgactttatacacactgtgctttatcataattctgcagaaaatgatacaaaatatatcacttgacttagaatatgaaggtcaatatattttgtaattaggtatttgacaaatgctttcctgtaagagctcctcgctttataaatatggactcactgatatcgatgataaaataaatatcaaagtttgtcatccacaggggaaggatgttgagataagattttcgtttcaccctttacccactcatatggtatgagaggaaccccagcagagcaggaagttcaggtaacattactcagcattactcagtctcttctgagctgtttctttctcacttgctgtcttacatccttcagatattactttttacaagacttcaaacactaataaaatgatacacattagtaaaagagaaaaatccattatataacccttcagaatagactaaaggagcagagtccataaaagctgaatcatcccattgtgtaggtccctaccaaaaacacttgacttatcagctgagccaggaaacctcatcttcagtacacatgagatatcagtagctgtttcacaggttggtcatcaagggaggcatttaggtaaagattcgcattctgactttatcactcactaactggagaattgcagcaagttactcaagcccttaatacctctgttttctcagtattaggaatgcagagtaatgtctattacatagggcagttgtgaaatttgggcaagagagtgtgtgttaaatccagaggctgacacataattaagtattcaactcagtcagcgaatgtgtttactaagtgccaagtcacccactgaaatcaaacctgtccgtggtgccacagatacagctgtaagaatgcagccaaaaccctgtcctccgccagctcatattttagtgatccttattgtacaggtcttgaatttgaccaatcagcagacatagtggtttttgttataataaaatctagattaaacatatttattggataatttttaaatcttcagaaaaagattcacaaaataatattttatattgcaatgtatatttttacttgattggtaaaattaagatctttaatccacttttctttcttttttttttttttttgagatggagtctcactctgttgccccaggtgccccaggctggactgcagtggcacgacctcggctcactgcaagctccacctccccggttcaggtcattctcctgcctcagcctcccgagtagctgggactataggcacccaacaacacacctagctaattttttgtatttttagtagaaacagggtttccccgtgtcagtcaggttggtctcgatctcctgaccttgcgatctgcccacgtcggcctcccaaagtgctgggattacaggtgtgagccactgtgcccggctaatccacttttcagaaagacttttttgatagttaattttatgtcaacttgactgggcaaagggatgcccagatagctggtaaaagtccattcccaggtgtgtttttggaagagatttgcatttcatttgacttgatgggattgatttttgaattggtgaatggaggtaaagaagacccaccctcgccaatgtgggcataatccagttcttttgtaacctcccagcgggttcaccttgttcgctgcttagacagaaccgatttatcaagacaggggaaatgcaatggagaaagagtagttcacacagagccagctgtgtggaagctggagttttattattactcaaatcagtctccccgaacatttggagatcagagtttttgaagataatttggtgggtggggaggggcagtgagttggggagtgctgattggttgggttggagatgaaatcatggagcatcactgtcttcttgggctgagttagctcctgggtgg

SEQ ID NO: 53498 - DNA, 1653 bp, Homo sapiens
tgccagataggagcacaattttcatcaagcttggttcttaggagtgacactcactttatgacataaactcaaatttcttttacacaaaaatcaggggcagtaataaaaaggtattctatgtgaccgggaagcatggtcaaccgtgaaaacagaacttcaaaacaagaggcagagccaatcagggaacgcttccatacaaacaacgtgcacagcaagggctgagaaaaataaggccttttcctgggtattgttttgtgggactgcatcacggttgcaaaattcgtgtgcctcactggaagcacaatgttctgcacttacaccctagtaaatatttttacaagataatacttcatgataaaggtgtttggctcacaaaacctctccctgtcaacaactggaggttgacctgtcacttgcccaaagctgtacaaacactggtgggggatatttgcatctgtcacttctaaaacaccctcctttttaaatctagtatgaaagacagtttcctccaaaaaaaaaaaaaaaaaaaaaaaaccaaaagctgtttctttttttttcttttcttttctttttttttttttttttttttaatgttcctaagactggggaaatctgaatcttttcctgaaagcagaagtgactggctggcatgaattaataggattcattggtgctgactcccccacctgcacattcctgcccacagtcgcgaatcttgacgatgacatccatgagcacaaagaattatgccaggcaatcctagagaatgggagtgtttaaccttttcctcgccatcttgtctacttttatctctgcagaaccctctgtggaagcggtggtctgacacaagcatttctggatgacgctgaacctgcttacaactccctgctgctgtcaggcagaacattctccaaaccgcatgaatttggaagtctggacacttcaggcatcatcaggtttatggttttgtcataaccctgctgaaagtcctttaccatctccaggcctccatttattttctataaaataaggagtttggaatggcactgtgttgatattctccagttttgtgaaacatcgtactcaacaatcgcgagcaggcattttacagaccttgctttcctagacctgctcaagtagaacattcaggtcagtgctaagagttaatatgctgcctccgtctgacctccacattatgaaaaaaaatataaaggaaagagcaaaaggtagagcaagtaggtttcgggcttggtggagtagctctgagtgctgccctgtccttggctgtgtgtgccaggtgaagcgtctgtgaaggtccccagtggggtgtgcagagcacaagggctgcttctgaatgcaggcacgtgatctaaggacactgtgcatcaccagtgtgaccccaggagtagtttcagagctttgataagacctaggccaggctcagtggctcacgcctgtcatctcagcactttgggaggccaaggtgggtggatcagctgaggtcaggagttcaagaccagcctgaccaatatggtgaaatcctgtccctactaaaagtacaaaaattagttgggtgtgggggcgagcgcctgtaatcccagctacttgggaggctgaggcaggagaatcatttgaacccgggaggtggaggtt

SEQ ID NO: 53499 - DNA, 16358 bp, Homo sapiens
tgcctgttcactctgatggtagtttcttttgctgtgcagaagctctttagtttaattagatcccatttgtcaattttaaaatcaattcaagatggattaaagacttaaacgttagacctaaaaccataaaaaccctagaagaaaacctaggcattaccattcaggacataggcatgggcaaggacttcatgtctaaaacaccaaaagcaatggcaacaaaagaaatgggggactttctagtggtctcttgccctacgcatcctggagcagctcctgtctcctatctccaccttatggcagggcacgatggcctttgaatgcatggctttgaagtttggatcctaagctgactgttttaaatcggtagctaacacttaagttctctttaatttacatgaactcaattatttgtatatttgaatgttgctcaaaggcaatttaccatgaggagttagatttaaaaaaaataaaaataaaccccagcaaacacacatatgtgtcatggtaagcccacttgatctagcttctgaacctgagaataaatcacctatttggggaggatagcacattgcacaaggaaggtggggatgatagtgaaggattttccattcccatctgaaaggattcagaaggctgcattctactgcagcccaaactgccccactttcttgtctcctcaccaacagaaaaatgccacctgggtcatgccgcctggctctggagtgagttaactgataatgtcagtgcatgtcattaactatcttgcacatctggaagcagatcttgcagaaccaaatgaaatgtggtaacgcgaaacttaagaaatcaaggggagcggcgctgtgcttggttgatacctgcaagtcacccataaatgtgcctgtcgtcaacaaagggcaaatcttggaaaaatggcgtgcaaccctgtgttcagttacccattagccaagccctggagcttcgaaagaagctcgttgtttgttcatggcagatctgaattggggctcttagtttaaaaaataattccagagatcatgtgatcattgacatatatatatatatatgtatatgtatatatatatttgtatatgtatatatatatttgtatatgtatatatatatttgtatatgtatatatatatatttgtatatgtatatataaaatgtatatacatacatgtgtatttgtgtgtatgtatgtacattttatatatacatacacatatatttaaatacaaacacacacacacttacagtgttttgtacagatcatgtaaaggaaagtaaatgcaacctagcaactgcagctgaacgggactcgtaggccaatgggcattctggttaaatctgtcttttaagattctgtggtgatcgtgccgcctggcgtggcttctctcaggacatgtggaacccatatttactctcctctttgtctcttcatccacagacgtttagagaattctcgttaaaattacttagaaacagaaagaccttgttataaaataaatctagttaaacacactttgttgtggtcctcatttgcgtgatgcatgggcctcattttcgtctctctgtatcttaactgtgtgcattaggtgattcatgccaattaatgcaggatgtcacatctccaattgctttctctatcttcttaaacattaaaaataaatatgtgccatctgtctcatatcttgaaagcaattcaaaatggttacttttgttttctcaggattacagcacaatttgtagctggagtgcttctgaattgcgagaaagccctgtctgcatttcatacatgtaatgtcatattatggtggctgctgcagatcgaacagcaaaggttgggcgagacagcagtgtgggatggtgacaaaaagcacggtctttcgcatctaagagacctggaccagtatgctgagcctgctgcttcctagctgtgacctcaggaaagttgtgttgtctctcagggcctcagttttcctcatctgtgaaatagatataacatctactgcagcggtctccagccttcttggcaccagggattggtttcacggaagacaggttttccacggaccagggatggtgggacttgggggtggagaagggtagggataggtgggggtgggagacggtttggggataaatctgtttcaccttagatcaccaggcattaggccattatattcccataaggagcatgccacctggatgcctcgcatgcacggttcacaatagggtggttcatgctcctttgagaagctaatgccaccactgatctggaacagtatcgatccgtggcctgggggttggggtcctgtaatctacagcacaagaagtaggaagcagacaccattatctgcatcatcatgaaattttgctaggaaagtaattccgtttggcaaggatggttgtttaaaagtagctcctggtggcataatattaacagaaaagaggggagttaggtgtgaaagctgtgttctttctccgtagcaattacagcagaaaaggaagacactttcctccgattgcctgtgttgtcctttgagcactcaggtcaacttggatagggaacggggccggtaaagtggggacacttgggagactttgggtccatttacagctacaacagcacttttcaaaaatggtgattttaatttaaaaaatggtatgctataacgcaacaaatgtctaaataacttaactgtaattagacgggcaaagggcaatctgagaaagtcctagtttccatttgagcacagttttcctcaacaattctttcatgtagcacaagagaaagctttctcgagctgaggccagcactctgaagatggcgaacgtgtaatttgaagtgcaccctatacttacacaccacagaattgtagtgctatcgagaatgctggatccacgtgacctagccctattttagcaataagcaaactgagggtcggtgtagctcagcaaattgtccaaagcacacagctcgttcaagctagaacatttcctttcttcttttagctaggtttcaaaaaatttgttaagcagactgaaattttttatacttctataaataccctaaggttgcagccgattccttgcacggcagcgctaacagccttatttgaacataacttagctgtcctgcatagtctttccatgacaaagtggtcaagtcttaatagtagccgcgaatgactatcaagactttaaatttagactgtacattcggggcaatccaaccatgagtcatgttgacatgtgcttggggatagaacacgcccacgaatcccggcaataatgtcgtctgctccccacgtcctgccctaccacagctccctccaaactgctgacatttttaccacagttatagaaagaaaattaatgaacattcctagtctgggcacacatcttaacatccatcccctctccaattataaaattaaaagcaaccactgtaaattccccacgtttagcaaaatgaagagctatggagaggagtgagcgcttaagccacctcaagtagaatatccttgttgtcacactaagaagctggttcccacggaaacacattgatttaccccattgctactgattggcttagtgtaatctgaaaatggactcctacaaggatcaaattgtcctggtccacacagtaaagcaaagctgagattacttgctaaacattgctctaaaaaacaaaaggctgcctattttcaaacaaactctacatttaatgtatcttattggccttaaaagaaaaaaaagagatgtaactcctctggcagtgatgtcatcttttattttctgccctccttgactgagagtgggctgaggttgtgagaacagccctctggcctggagtccctctgcctcctccacccctcccagacatgcctcagccaggtgtgtggcagggctggctggggaaggtaggcccagctctagctgcggaactggagcaggctgtggaggcacagaagtggcagggaaacactcaagtttgtcgttgtgcaggtgcctctgcaatgcattccctggcttgagcaatggaagatcaaaccggcatggttccctactgtgcccacagccggggggttgtttttgtcagtccttggagaagagtatttgatgcattcagggagggcaatgtcaggctcgctgacatcctctccagctcccaggacaggctgtggaaagaggaaggggctgaggtcggtgagttgttctcagggttgctcaatgaagatttgcccccaggaggaagccagggtgatgaatgcaggaggaatctgttccaacaacccccttcccccaaaaaaaacaaccagactcaagatgctgataagaattcttttatgttattccaataaaaaatacattcatacagaaatataacaatcttgcaaaaaacaatttcaaataaaatcttgtaaaacaaaattttacaaaaatcttacaaagattctttagataacagggtgcttccaaaaaaaaaaaaaaaagaaatttcactaatagaaatttttttttaatttcaagcaaaaagtttctgcttgattgaggctcagttatcacctgaacagaatgtacttctttatgtacgtgctaattatgaaaatcacaggcattgacaggtacggtacccagccccacccaggcaaacagctccgacatgtttcgtaagtgagacaagccagtgcaagtttttttttttcctttttttttttttgtcttttgcttaccttcttgcttaatggaattgttatggctaagcacatagaaggccaaaaaaggagttttccaaacccagcaaatcaagtgcttggattctgaactgccaaaagaaaactgcacttcccctcttaagtaaaacgaaatgagtttcttaggtaaatgtattcatcagcccagataaaaaaaaaaccagttatgtgagcgttagtcactgctcatttccaggaagatcaaacaaaataccagcccagccagactcacatgtgtgtatatatatataaagcaaagagccacacccacaagccagcagctgggtgaaatatcagctgtccacgccgtggtatgccaattcggggaaattactccttggaaaaactggaagaatctacttgctggaaaaaatagcttcatctgcataaaaagtgttctacaaaagaatccctgtggttagcttactcttaggttagatcttctaataaggctgaaattcaaaatcaaaaccttagtgtgtccgagtccagcctgggttccagcattctgttcaggccacttctgaacggccgaaggtgccccattccagacctgcccatttgatggacagagcagacagcccggaacagattcaagcaagaaagtcctccgcacatcgttaaattaaagataaagcctctataaaagttaggttatggttttcatttttacctcctttatggccattttgaaatatttcttcacaggctgtggaattttctagctaaacattctagtttctccttaaaaaaaatatttatatattatctatatatataatatatatatatacacacatacacatactgtacacacaaatatacatacacaagaattctgcccacttttttaaaaaagtagtatactttctgtattaccaacagatagctagacagatatgtgaaacttgtgccttttaagcaaatacattaacattgggggttttttaatacttctgtatctttaatatgtgtgaaaatgttacatattaaatacagccggtgtgtgatctatacaattgttgtgcaaggtctatatgaaagtctcaaggtggcagaattggtcagatttttccattttcctgttttccattttaacactgacagtcaagttgcctaaagtgttgaacaaatactgacatgtaaagggagtttcactctatgtctttgtgaaggaggaccttaaagagattttttttctgtattatacgttgatacagtacactgccaggtgaaacaagagccttaataaagcatgcatcgcccacacccctgtatgagacccccacagaagggatcgcttgcgtaaggcaccattatgaaggtcaacagtgcattaacagctagaaaaccagaaattagtcctcaaggcataaataagagaaacatagctgcatgagaaaacagtttctaagcgttagtggttttatccacccaactgagaaaaattttaggttcttaagtctaatgaaacattagaccagcaattcccagccccagctttgtgacactcaatacgtgtccaatttcttctaagggcatcacagaattctccaaaaagttaattcaaattcagaatcatttaaaaataatcctgtgttgcacaatgcctttctggaaggggagtgttacaaacttggaggggaaaaaaaattgtatattgccaggcccggatggctagggggtcactgtattagacagattggatcttagctgctcattaactggaatcagtattgcagtcctgacttaaaaatggaaaagcatatagttccccagaccatgcatgactttttgtattctaaggaaaagttaaattgttgtgttatatttgtaaatacacagcttatacaatgggttacaaatgagctatgttgtagcgtgtaaaacaagctacttgacacattgcacatttaatagctgcaccagacactaagagttcctctcacacagaaaagggggagagaggctctccctccccacaccactcgccactctggggtcctgagttcccacgcccaccctccaagattttccttctttttttgtttttgtttttttgtttttttgatttttctttttttttctaaggtgcagacaccccctccccccaaggaaatgattggtggtcatctcatctcatggtatactccttacacacaaaacattcaaactactttttttccatctcttgcagtcttgctaaccacaaggaaaaaaagttggcctcatcatacggtcagtaatagatcctcaacatacaatcaacccaaccattagcattctcagtgtgcatgctcacggcaaaggcttaggcgccgctcggaagggcgggtaccagtggcgagtccagggtcacccacataccatgcaccacgggtgctatgccgcttcttacaggacctttttagccctcaaaagaccttccaaggagaggccctggaggcaactgggtagggtgcagaacggcatgctttggctggaacacgcatccctccttccacggccggctctcagcctggaagccttttagcctacaggatccacctctctgctccctcagaggtgcctcttcatgtgcagggccaggtggtcagacctggaaaaacacctgcaagggcaaatcagaagcacagaagaagttaggttcccatcccttgccagtgttctggaccagcgccctcacctccctgccctgcccagcctaaccccctgcagggaaaggtgggattctcctcccaagcctcatcagtgtcttcagggacaggagataccaactgataggaatgtgaattaagaatgtcccccaccagtggctggaggttctttggagaatctgaacggacttcatttctaattcttcaaatatgaaaactgttgaaaggccaatctccaaacatatcaataaactgactccaatgtcaggtgtatgtggaacagttcttcctaaccatggacaatgagcacaccagaaactttctaaaaagtcccaggcttgaaaagaaatgttcacacataggaaactgcatgccttccttcgaatgtgccctgcacacctactcaaccctggtcatcacattcccaaggccccacgctccttgcccagcattgtcctcaggcacgtacctgtcacagtgggagcatttaaaaggcttggccccggtgtgctttcggaagtgcctggttaactcatcacttcttgcaaaacgccactcacacccttcccatgagcatctgtaaggcttttctcctggggagagagcacaggacaagcagcccatgacttcactgacccgcagacggaaaggggaaattcaacaacacacacagtggtgggatgcaaggccagggacccagtggcttctggcatcggtaacacacaacaactggcagcctcagagagacaacagcagctctctcctgacccagtctcaggcctcccactgctgtccaagggacacagcttcagccaagcccatggtgctgtcatcaaagttaacgtggaagaacgaccacgactcagaccagcaaaatgcttgcgggatgaggtgtcagcctgccggacccacagccccggcaaaggcagagctattgctttcttcatggcaactgtttctcccaaacacacttctgttccatcctcacttccctatggaatgtgcctctgcagtttcctcagggacgttctacctttctacaaagctgaagttacgagcttctggaaagccccagtacagggccccggaatcattctctaaatggcaattgaacaactgggttcacttcattccttggtcaaatcataaatatgaatttactacaagtgctacctgagaaaacaaagttgtcaagccaatctcagggtatgttgagacaggcctgggcctggatattgggccacccggatctcaatctcagctgtcaccaagcctgtctgggactgactctcagcaatttgctctcctactgataagagaagagcctgcatcacgtgatcactaagacccttcccagttctaaatgttctgtgattcctcaccaattatcctagaacatgtcaaggtatttttaaatagcactttcacctaggtatggcatttcattaagaaactgtttcaagcggtatcagaaacaaaggctgcatgagacacggagaagttctcaggaaacactcgctgatcaatgctgctgcttacagagcaggccggtcccactcgggcctcgggccgtcagcatcaaacccacacactccacgctgcccagcaaccctctgtcctgacccttgagtttcatttaggaaaccccagggccgctcgaggtagcctcgtgcgagtgcactggtgaaggggcagtggcctcggatccccagcactactaaggggtggggggtggaggtttgggtgtccgtggagaaaaggatctagtctcttgtttgtttaatctgaaaattgttacacatttatccaactcaaaagtccagtctttaggattctactctgaactccaaaaagacctaatgctttggtggaaaacatctgaggaagtgaggatttgtctgccctgaccacatcctgtgcagccaggcccggctccctccagggctggtgcaatgcagtggcgcccaccagcggccgccctccggggcccgcgtgggcactgacctgtgtgcgtccgctggtgtgctttcaagtgggagcttttggtgtaaactttcctgcagccgttaaagtggcaccggtgcaccctcctcctgccgtcgggggaggcatcgccatttcccttgtcacctggcttccccgaagtcccgctgcgcaccttccctggcgagggcagctccccgggcacgcaaccccacagttgagaaggttccctgctcagttccggagaagatggaggcgtggaggtgacagaggagctcaattttcccgagctgaccaaaacttcgccaatggggtcggaggtaaacttggccgtgggagaaagttcctcggagctgtcagaggattcgctgctgacatctgagttcaggctgttggtctctaagttgtaacaaaagctcgggctgatgagagtgtcctctggaggactggaagatatcttcagttcggattcctcctttttctcccgagccagaatgattttggtccacagatcttcctggctgtcaaatttgatttctgaggctgaaacatagcagggctcgctctggaggtaacgttccagctctaggcaggtctgtgcaaaatgaaccagagaaggcacgtgattgccatgacgaccaaaagtaaaagcaaaagcaatttccaaaaacatgcaagaatgaaggacagataacattgctgcccggtcactacaggggcaaaaccttttgtaattaagcatccgtgtccttacggaagttagaggaaatctgtttctagaatggtaagaattcagaggaaaagtcggagggtgaaacctctcctggctttcccaatgttgggccaagggccacaatgagtgatgatcactaagccggtttttttgttgtagttaccagtgttgatgtttctcatgaaaccagaggaagagaaccggccccatacacatactcctccccaacaggttcaaccagattatctgacattgtcaagaaccatgtgttttaaggaaagccccagccatccacccttcacactccacagatacccacacaggacagaaagactgcacggcacacagcgtgttctgagggacccccttggggacacggctgacaacacagggccacactcgggggagaggagacagcagctgtctgtattcaggggcatcgaatggagctgcagaaaaaccacccatttcctgtgtagcccagaccgcctatgttttcacagaatgccgttcccaagtgcaggcccttgcatgacacagaactttaattacttctacagtggtcagagaaaaacaaggaacttcaacaacaggagtgcagaaataattccagcatggccatctgctattgtgaagggtgcaaggggaaattactccacggccctgctgggagtcccacaatgaacaagaactttatctactggccaagagtacaactgcatgagtcatcactctgatttctttcacgcaatgccaaaggagacttccttttgaaattctcatcagcagccaaataaggacccagctcaaatggacatgcagtgtggcatggacagtaccccttccccagccccgcaaccaacctttcaagaagctacaactgccgagatcagcatcccctctccccaccatttcaaactttctagccactggaaaagaaaaatggtaggaaacattttaggattaaattatgtctgccctgattttcacgaggatcagctgcctgcatgtccatataaggttgtctatactactggcaattctacagatttcagtttctacaccaaacggctctggtgagcacgtcatttttccgggcagggaccttcctgagcgcagcctaccccaggggctcaggctgacttagcagtgtgcctctctcctgccacaggcaatccctccccctccccaggctcgcacacagccggtgggagcaagcacacgggagaatcatgctttcccctttcccccgaaaccaggcgtctgagttacaatgcacactacagcgttctgaagagaggcagcagcgatgtattttattgatttaacaaagaaaaaagaaaagcacatttatggagatcttgttaaactttaataatccggccaatttaaaatctccattacgctgatgagcacccgggacctgaacgaagctctcggagagtttaaaagcctccaaaggcgaccaagagccaggtctggccgtttgcccaaatcccaaacgcccgaaggaaactacttagatcaatttcaatcacgtcctagggagcagcttctttgaggaggaaaaaaacaggagggggagggggaaaaggcaggagaggactgtgaacaattaagcaggcgtgtgaaggttgcaacaccctgcatttcatcttccttaaagctttcgaggcttggaaacccacagcctctatttgatctggcaattcactttgtgacgaaaaacaaacagcacagcagggcagggagacaacagtaaaccctcctgcgatcgctggagagacaatgggaggagtgtcagtctctctcccctcgggcgatgctacctataagcacggggacctggtaagtttcttaaatttccaatgcccccaaattccagttctacgacaatgtcggaaaccgaggtccttctttccaaactaagacttgaagcagtttggacgggctcattgtcacaagactgacaagtcactggggtgtacacagttttatttttatttttcttggtcaacaagagaagcagggaagacaaataaggcagatctaggggaaatgttaggcattccaaagagcagaaaacacattggaaatggtctacagtttaaaaaagacaaaaataaaagagagctggtctacgttctgggggcaaaatgtgatttttttaaaaaactgttaagtacaagcaccaagaaacaaaacaaaaacaaaatccgttaaaaaaaaacaacaaaaaacaaacaaacaaaaaaaaaacaccttggcaggcagagcaagttggtccccatgacaagctccagctgtggcgtctggagcggggacaggctccgaactcgtgccaggggctcggccgggctgtgccgggagttggggcttccctgggcggacgctgatcgcagcctggaggatcgatcggcgggggcgctgcgcccgctcccccggtgacagcgcggggcccaggcccagcggaccgcagagagcaccgggtctgaaccccaaacagccgacccggcccgcgccccggcgcccgcagggaaccgcggccggctgcgtttacctgttgccagtactcctccagagacggcagcgccgagaagtagccggtctcgtgcacgatctggagctcctggaagatgctgcacatggggagcacgtccatgtcgggccgggttggacggagcccgcggtcgcgagggcggcgaggcgcgcggtgggagccggagccgaaagtctccccggagcgcaggtgaaagtttcatgcaaactccaggctcgcagagacgcccggccggaccctcccgcagcccgcagcgcgcggagcccacacaatatttgcaaacaccggactgactgcaaacgtaacccctgcaaaacttccctattcaaagctccgctgccagcctccccctccgcccccgcctggctccccccactccccctccccccacgtgactcgccccgcgcccgccccgtgcgcggcccaatcccgtggctcccggcccgggggctgcgcgccgatgatgtcagctccggccaatcgcaggcggcgacacacagcggccccgcctggcgtgaccgagactctccatcacggcccgcaccattggctcaattcgaactctgctcgttctgattggaaagtggcctcgcaggctatttttagcagggtatataaggcgcgggcggccgcgcgccggaggagtccgcgctgtgaggtgcgcggccgagccctgcactgcgcccgcggccggagctaagggagccggggctgggagagccggggcgggccgcgtcgcctgtccccagtcccggtctctcttccccgctgcccggtcccgccaccccacgcccgtcccggtcaccaagccgggccctgtcgccgcgcgagccccggttccggcagctcaccctgcgggcggccgtccggtcccggggccgcccggttcccccccgtccccttctatgcccgaggccgccccgtccccaactgtccccttctacgccgggggcttcccggtcgccaactgtccccttctatgcccggggccgccccgtccccaactgtcctcttctgcgccgctctgtttccctacatccccctagtcatcctctgttctctaaccttggggtacccctctctgtcctcctccacctccgggtccctctctgtccccctccatccctgagcccgtctccgtccccctccagtcctagggtcccctctgtcctccgggccaccagagtgggggaggggagcacgcaggctccccttggaattgggagaaacgtgtttatcttgtagagggcgatcttagccctcaccaaggttaacagctaggttttcccatgaacgtgtaaacaatttaggtgcaagccgacatttagtgtgtgtgtttttttccatataaattatctcctaaaatataccgtaatgttcatttttaagaaaaatgtcgagactcgaaccagagcattttaaaatccaaaatggaaaactgaattgtaactgtattatagtttttgtttcaaaatagtttaatgaacattaaacattttgaaagaatggactatgtaaaaaaaaattagagggttttgtatgttaagttttagagggtccggcagaagcatgtggctgtaagactaggtggggaccttagtgagtctggagtggagaaaggaggtttgtcttgtacctgcggtatgtgggcggtgaaggttatgcagagtgaattgacagtgttcttggctcgtgttcatcacatttaccccagcaactgagagccaggaccagcccttcttggggacctgcaccttaactctgtttccaggaatgcaaatggctttgttttgaaccatccacagatttgcccaagcgcccattgaccggggcccagtgactggcagccgagagcatctgggcagccgttgtgttgggggcagggttctctcagtaattagcgcttgtgaccttggccccgctagttcctaagtaagcaggagtgtggagcaagtcccccgctgagggccaggcacgctggatcagggggagcccgagatgaagggggaaggctctgtctgggccagggaggacaggacggctgtctttgcaaggcgtgtgggcgtcctggtgagggtgtcccattttatctttgggacaattaattattgtcttaatgttttttaataaatccacattcctatagaacttaaattcatccttgtctcttaacatgctttgcccggcactatgaagattatatagtttatttttacaagagggaacctgattagtcataatgcagatacagtacaatggccattgtcattttcagaaaaaaaaaagatttgaaaacagggtacatatgaacactaaatttcaaatagaatagatcctatggcatcctgctgcgctcattgaccattgaacacacattactcacaccctatgaatggccaggtattggtacacagaaatttacaaaacaggcacaaatccctattacggtgtgggagaggtgggctgccaggagtatgtagatgtttgaaaacaaaagtccttattacgagtaagcatgtaaccagttggtgaaaaaatatcattttctttgatgtgacaaagaatatgcatcgcatctgaacactaatagttgcgcctgatttttttaagaagagcaacaaagaatcgtagagggccagattaattcagaagggggaagtatggcaggatataaaaagatgatggattttacactttagttgtccatgctgtgcgcatggccctggtcacgttatttaaataggagattaaaatgactattagaatgagtttagtataatcagaagagttaatggattaaaattcctgcttggtagcaaatagtagtgattcaataaattgaaggcagtgttcacttattcaccatttagccatttgtaagtttgctcttggtaattattttataatcccccacccttcttttaacatatgagtgaatgcagacagaaaaatgaagtcaactttgcaggccacaaagcaaatcagagacaagagttggacctcgacttgtccaataatcccacaggtgcttccttctcctgccggtcgctgaagagccctgctctgttttcactctcgcagtcttggagagaaaataatcagctccatttgttggacgtgacccttgttctctgctcaccttgagccactcctgtctctgccactatcttcaaaaggtcaagatcccttctgggtgacagtcgtaggctcctttcgacgttcctgggggccacttcacccccctggcaccccgctgttacttcctcagtccccacttaggcctccatgccctcctccactgtttttcttctcctcttagacctccaggctgtgctcatttatttcataccaggaagctctctttgttgcctctcaaaaataaaagtatacatttgaaacctaattttaaatttaatttaaagattaatgggataacatgttggtattgagtacatttgatcttcctgttctagatcattcaagacgggctcttgggggaagtcttacaaatctgttctgaggataattccaataatgccccctaattatattgacagagaatgctccaattttggggcaagaagccaattttgttgttctgttttgttttggttttggtgtctgtaccaatatattgcctgttttggagcaaactacccttttat

SEQ ID NO: 53500 - DNA, 12352 bp, Homo sapiens
gacagcggtgggtttttcttcccttgggtgccatgagggtgaagagctggggcgaatacttggaggacgggcacttggtttggttctgttttctacatgtccatctctactgggttatccatccaccgggtcacatattgtccttgagttgcccacaagtcctggggatctaccaaaatgtccctctcaacagcggtgacttcctggtcttgggtgggggacagtgagctggattgtgtccccgaagttccgctcaacccctccttttgactcggcacttgttcttcccacctggtctcaaacatagactatcttcacagacttctcggcttggttccccctcccctagaaaacgtcttggttgggagtggagacacatactcacacagacccacaacagacacaacacacacaaacacacagagacacacacagacacatacacaccctgacacacacagaggcacacatatacatgttcacacacatacacagacacacacaaacttagagacacacagacacatacacacactaacacatacacagagaggcacacatacacacgttcatacacatacataggcacgacacacacaacagacacaacacacacatcatacacagacttacacagagacacacagacacatacacacactgacacatacacacgggcacacacatatatattcacacacatacacagacacaacacacacaaaagacacaacacacacaaacttacccacacagagacacacagacacatacacacactaacacatacacacagaggcacacatacacatgttcgcacatatacatagacacacacagacacacacattcacacacagagacacacacaaacactaatatatacagacacacagagacacacacacacagacacaaacacacacagacacagacacacaggcacaaacacaagcacactcgttcatacccaagagggtctcgtggctactgtggccactagttcatgagatgctggagtttgtcagctggctgaaggcaaattataccctgcatgagttatcaggttgataattgccattacttttaacgcaaaaacctcaaatacttttgcgccaacctaaaagctttagatttattttcaaataaagtattgttgtgattaacagattaataaaaacatgccaggtcttagttttaatgattaactttggggactgagtagacagtaaacatttggctagaatttcctgtcctcagataccgtgcgattgaaagaaaatccgcttggtgatgtgctatttataacactattttaaaaggttatcttgttcaaatgcagcatgtgcttaggagttaaatcccagaactgcctgaccaagaaaaaaaaaaaaggtgctttaaagtagcatgttgtcatagtagtgtgaaaatgtgaaggtgcgactggccgtatgtgaaatgaacgcattcccacagtgactccagcctctggtgagaaatcccgagtcactctcatgagtcgagaagccctcaccagatggcagggcagagagttgcttcctcagtgctttcaggtaaaatcttacatgacagagcacaagaaaacacgttactctaaaaagcaaattgacggaatctgtcattaaaaaaaaactaaaattatacaagactcttcatgtctcaaggaaaataatggagaagaaatgtcaggcgctgtggtttttctgaatagatttgagcacatatgcaccacaagccattttttaggaaagtcaacttttcacacatttacagaaataatttgcttcagatctgcaaagaaggcttgaagccacatgtgttttctaaactgccaatccacgataatgtctggagtatcttttttttttttttaaatacctaaattagatctatgcagagtgtggaaacagcagataactagcaatacagagttagtagaggaaaaaaaaggaactttcttgaagcgtctcccctcccccagacaaagtaaaatgactgtattgtgctgttatcgacagagttgcacgcagcaaatgctcgaatcatttcagagataatgagacattatgtttcttagttcactatttaaaaatataaaaccaacaattacagatggaaactattcattctgagatttatggagggaaaagcagaaaaacaaaaaaaaagtccatgtctttctaatggctgcgtatactgcagataattgagccacagaaagggagttgtgtttacagagagaagccagcgggcaaggaagatgtgctgtgggtttgggcctggttctgacacagtctcagcctcagggaggcctctgtggcttctgtgcgtagaggccacagccatcacctccctgggtctctgatctttcgtggtcttgcaatagtttccagcagtgggagaccccgttacaaaataaacggtacctcaggcagagactgatctcactagggaagcccatgattgcaagaaatgtcacacgtctaactacggagacaggaaagccttgctatttgaatcattgaagtctgggtgggtgtactagtgaatatctcatcatagaatttaaatgatctttctctatgtattttcagcactgttcagcagcacaggcattgttctggagtagcccgtgaactgtaaacagattctcagtatgcagcaggcaaatcgccttgggtggatacctgaaactttaagtgttttaagcacttgtcctgagatacattttttagattatcaatttgcactgtgtagatgtcaaagcttaatagacaaagacaaacttcagcccagccctggtcataatgaacaaaatttctgaagttaataaaatccttaaaaagtacattataatgtgtttaaaaaaatccatttttagttaatagcagtaatgctactattcagtgttataaacggttttacaaccagattcaaacactagaatctatgcccttcaaaaacattaaacatgtatttactttcattgaaaaatactcatttgattttattatatttgtgaaaacatattttgcagtatttaaatattggcgtattaactgataaattatctcctggttcctagaaaacgttcattaagatctcaaaggctttatctgtattttacatgtttctctgaagaaaatgtattatttagaaaacaaacagtgttgccatgtgataggttttttttcaaatgagacaacacaacggaataaaatatatgatctgtagctgctgaggctgagtcagttcctgtttcaataacaagagtgtcatctgctaaactctaaccagcacaatttgtcaccgtggatgtggctttatttgtacatgttgccagaaagttcttagggaaaattcactcatagttttcataccaaaaaagaaacttttggtgagcagttctggctccggctgtggccttgtttattatttatgctgtaaccaatgcttccctaatggaagggtaatgcttgcctagctacataaaataatgcctcagttttctctggggaattaataatttgctcatgtcaccccaaagctctcacacgcttgtgcggtagttttccaaacagtgagcagtgcgccccaatggcatggcagagagaattcccaagctgagaatcagaagacctgcagttttgtctggctttgctaagtgacttttggatcttggacttctgttttcacatctacagaattatgccattgaataacatgttctctatgctttcttctagcgaaaaactctcttaattctttttctagaatcatgaaattgagttggcagtctttgcttggtcagagcctgatgtttcctgaatttagaacttggttcccccgagaccctctggactaatttaaaatgattcatccgcgtgagtcattgccctgctgccttcaggacaagatgtctatctattgtcttgctgctaccattttttacaaataactccagctcagcagctgcagactcgagaccctgcacctggtgacatcggccggaagacatcagctggctctctgcagacacacctggagggagggtttgggaggaagggggctggggcctccggtctgaccacctctgaaacaccatcccaggctgtctctgaggttcatgtggtttgggtcagattctcagtagaatgagaggcatttcagggaccttccaagtcctgaaagaagccactgggcaaataattgggtgtcacattccttttagagccagaaggaaacaacatcctatcagaaggaaggggaatttcctgccatgaaaaggaatcttagagcaaaaccgagtcatggttttgcccgaattttaaaatcctgttgcttatatggaagcatatgggtcctaacaatttctctttcaaaatcctcatagtgaatgacattatggccatgtttctccctcaagtgtgtcttaaaaatgcatctagagtctaactataaaggcatcattcagttgtaataattaacatcttatttgcattcagtacaattctaagttccacataagtgtctaatctggtgatgggcgttgtatgattgctaagtaaatatttgccgttggttataaagaatgaataagatgggcacggccctgttttcctgttgtcgtagcccagggttgccttctctataaactatgtgtgactgcagctgaatcagtgaagccatcaccaccggcctcatgcatcactgtcctgtggacctgtgagtagttccaacactcccatgtggtcagcctgctttacttgaaactcagttacataaacctgttgaagataatgctgctatgtgattgctgacaactttccaaatgccctgtttgctgctcaagctgatgttcccaaggagagagttgcaagtattggaggaagcaccaccctcagggaatgagcttgcaatctgcttctctgtggccctgggtcagtcccaatgtgagcatgccaaagaggacccaggctgacgttggggtttccatccgttcagaatgacttgatccttccctaccaattagaactaattagggtctctgggtgccatgaagatcacgagaaatgcagagtctactcctgaattgctttgtttcatcaaatgtctgtggctagatatcaactagggttgccatttcctgcttcagttcaaatcagaccgataattgcgttctgcagttgtctccagctagctggtcctcccttccaggccctctctctgccagtctgctctgtgcttcaggagaataatcctcctgccatagattgatggatgcctgcacactgctttcacttcccattttaagacctcatccctccaggcagcctcccttggtttggaatcttggctgtgaattgccaaacctcaagccccctgcagacttacttagctctgcgtccctataacatcccatagctccagccgtatccgtctgcatcccagcccgcagtgcggtcaagagctgtaaagtcacttctctccttctggctggttgtttatgtggactgactgtcctgctggctgcctttgctgatgagagtgttgccttccacagagatcaggccacctgggagagccacttctgtccacccatccctgaggggatgcttctccgtcccttctgcatgcctcctgcactcggtggctgtgctctgggagagttaccctgcgatctacactttcggctgcaccaccctctgcagtgaagagtgtctaaggtttccctactgcacagaacactcgagatccgtggtgtgacaggaagagctttccagctgcgtggccttgggccgtcttactctctgggcctcagtttcctcattggtagcatggagcactgaaagctacgaacaggagctgtgagggtgaatggaggattcatgccagagcctggtgggatgcccctgcagagcagatgctcaggaaaccctcctgccagctcctggggagcacgggaggcgctggctccttagttctctatggaaggacggttctgcaccagatattattattagagtctcttatttggaattctggacttgtgtgctcgacaggggcctcaagtccccagtgtcgctcaatagtgacaaacccaaataaaagatcctggcaaatgattagcagcctttcctgctgctgtgctcataaacgctgttgctatttttgggccagcattgttcaacctggatttagttctcctttgctgtctattttggctctgacctgctctgaaagggcaggctccacgccgggtgtcacgcccaatggcttctccacggtctttgtccaaatggactcagtgaggatatcaccagcggaaaagtaaaagatgagaggacttgaaaaaaatatcttccattcagaatctttttaaaaatatactttcaaacaaagaggtattatagaaagcattttgctttttcgtttaaagctaaagaaaatcagagtcacctagaaatgtgagttactggaggaagagaggaatggttaagatcattctacagtgtctatatgtacttatatatcccagtgtctgtgtgtacatgcgtgtatgtctgtgtatgtatgtgtgtctgtgtgtgtctctccatgtgtctgcctatatatctgcatgtgtatacgtgtgtatgtatatctgtgtatgtacatgtgtatatatgtgtatgtccgtgtgtgtctctgtgtgtctctgtgtgcatgtatgtgtatatgtgtgtctgtatgtatacatgtatgtctgtgagtctctttgtgtgtctgcctgcatatctgcgtgtgtgtgtgtatgctctgtgtgcgtttgtatatgtctgtgtgtctgtgtatacacatgtgtgtctgtgagtctctctgtaggcgtctctctgtgtgtctgcctgcatatctgcatgtgtgtatgtgtgtatggtctgtgtgtgtttgtatgtgtgtctttgtgtctatgtgtattcatgtgtttctgtgggtctctctgtgtgtctgctgcatatgtgcatgtatgcatgtgtgtatggtctgtgtgtgtttgtatgtgtgtctgtgtgtctatgtgtacgcatgtgtgtctgtgagtctctctgtgtgtctgcctgcatatctacatgtgtgtatgtgtgtatggtctgtgtgtgtttgtatgtgtatctgtctgtgtctgtgtgtaattctttatctcctccgttttctgagcaggctggtcctttgaatcccaggagataatttttccttatacttactagaggagtctgtcaatacagtagaagcacaatgtaaatgggggattaacaccttgagataatttgaatccactgtcattcaccctttctgaaatgcacaagcttgcaggcacctaccctcctgctacaggacagaaaaaaacacggtggttttatttccatttcttatcacacggtgtccactgcctgagctgcacagggaggcattttgtcatttcactgtaggggtctcctgtggccccgaatctcatgtgtttgtgtccctaggagctgcagccccaaccatgtcatgaagaggggtcggcacgggggcttctggctgtggcacacacacgtgttaacctataaggctcacttcctgcccacaagggtcagagtgttgtttttttttttttgagacggagtctccctctgtcgcccaggctggagtgcagtggcgcgatctgggatcactgcaagctccgcctgccgggttcacgccattctcctgcctcagcctcctgagtagctgggactacaggaatctgccaccacactcggctaattttttgtatttttagtagcgacggggtttcaccgtgttagccaggatggtctcaatctcctgaccttgtgatccacccgcctcggcctcccaaagtgctgggattacaggcgtgagccactgcgccctgctgagagttttttattgatcattcagtgattctgaagggaagacagttctactctcactgccagtgacagcacagcccaggagagcaagggcaggctcctctccaggtgtggctgctctccatggcctgggtcatagtctggagatgactgaagagttagtcttggggctgttgcttgtgagaactggagaggtgtgtgtcattatctgaatcggccaggcccacgccagggtgaactgggcttacaggaaatgcagtcacaggtgagacaacctttggcaccagctcccaactttcagttcagagaacggtgagttcccggtacagggagtggaagctgatgtcattgaaaagatattgccttgctttgaaatcagcaagcgtggtcaaagttctccagtatatacacacagaggaaaaatgtggctctgaatcaccatgggcagctttttgataaacagatattcaaaaaaaaaaaaaaaaaaaaacaacagaaaaaacagcccatgtgtggtttttctgagaatgctacacggctttcatatgtgcattttgaccctaatttcacttacaactttctcataagatactgttaggagtgaaaagccacaattagctctaggccaagagtgaataatttcaacagcctctctaagatggtttatatttttggagccatatatgggtgaaagtaacgatttccacaggaggacaaacaaaaggagatttttgcacacaacagggaaaagaaaaaggtttaaactttcacatgtgaaaaagttcaaattcccaagccttgctgaacacaaccccaggtagttttaaaatttgctttcaataaaaatttatttgaaatgaaatgctttactaactttcatggctaaatcaggaaacaccgttttcactaattaatattaaacagttggcgagcacagcacttctggatgtgttccttcttcataactaaaaatgagtgaaattgtaattgaattctgatgataatcttaatagcatcattctctacgttgactccttaaagcaattttatatttgcaaattgtctttgccttccttttagcttagttatatagcttgctttgctcaaagagtaaaattaaagtcttaactaatgtcaaatggttttgcttttcctgtgtaaacataaatatgttaagaaatgtatagtaagttatcttattttaatagagactcatcagtgctagttatttagtgcctctcaatagtatttctggcaaactgcacatggccttcctcatagaatgaggagtgggcattgacatgaatttctaaattgtggcatttcctggcatgatgtcagttggcttaatcatctcaactgtcagctcacacccttgacagccagctcgggagctggggagagtccaaatttggtgttctgaaggagctcacaggggtctctggcacgtaatgatcaccttgaaagtcatcgatttcaaaaagaacattccactgtggaagagcagccaagagaagcaaacctcaggcacacacagtctgtaacagaaaccgaaactcctagcaggaaaataccatgacctgcagtgacagggccagaccatttcagtgaactcagcatgcagaactgtgtggggaagggccccatgagagagttactatgattattattaagaggtgaaaaacattctctaaaatggtgcggtgtcagagttagtttccagaaggcttgctaacctgcaggggctggggtagaaagtcattctataaaaggcataggtgcagctgtgacttcgaacgtttccctgtggatgagatgcccacacatttcaggacacatgtactatgacgttttgggtgcagagaaacgctgcaccaatcactcagctcctgtctctctgccatcaattttgtcaaatgtcaaaaatcatctattcagagatgcctatgtagaacagaggaggggactctgagtatttaggaatcagtttcctaactcagctcatcaccctctcactcaggacaacttccgcttgcctagtggggagaagcttccaagtgcagtgtgggcactggagggaatgcctcggccacagttcccgtggaaatctcggggatttaagtctttaaccagccccccaaagaccacaaccctccctccaccatccactgacagctttcttggctccctaagctgttctgcactgagtcctcaacttatcttctctgctgacatttcccctagttgtggtggtcatgcccgccagggagctgctccctctgaaggtgatcctgccccatctccgggcctcacgggcatggctgctccaaagaccgcgaccaatttcctcctctaaatcacgtgggatgcatccaagggctccttggggctcagcccttgttaaaagagtgcagcttacagaccacacacttctttgtaaaaaaaaaaaaaaaaaagaaagaagaaagaaagaaagaaactctcgttgtattcttcaaattctggaaggaggcaggacttaaaaaaaaattactggtaattcaagttcttctccttaatgtagaaataaaccgtgctgaaattccggtcacaaaggccattggcttgggccttcttagtcaatatgtatggcagacttttgagagcttcattcacctgtttatgataataattagaagatagtacaggttaggcatctcaaatccaaaactatgaaataaaaaatgctccaaaatctgaaacactttgagtgccgacatgatgctcaaaagaaatgctcattggagcatttcgggctttggattttcagatttggaatgctcaaatggtacgtttatgatgtaaatattcccaaatccaaaaaaatctgaaatctgaaacacttgggtgccaagcattttggataagcaatactcaacctatatacacctatcaatttgttcccagctggagaggaaagaaaaagtcaaccacactgatatatcagcaaatatgtaccaagcatttctgagtaagtacaagttgtagaaagtcagggataccaagaaaggacatgaacaattctgaagcaacttcaaaacgcagataactgattttttttaagtagtaaatacataagtatttacaatgtgcaaagtatcttgataaattctattaatacaaatgaaggtacactgactcctcttctaagggaaattgcagatgaaggtaacagcataaccctagatcccaaaggacactgggttctgggttctgcttgttaacactcaggttctgttgtgttgtcacatggccgttgtgtaggtcactgtcaggagagttttcaacagaggcttctagatcagtggttttgtgtccagtttatttactcatgcctcataccttcattattgacaccgaaggttggagagaaatgaggttgaatcactgctgttgaaatttaaatatcttcctgtctaatctgttattatttcagatttgtatgtgagggaaacccacatgtagagaagttaggaaatcttcccccaaatcgcacagctggtaaattccaaaatcagaattcaagcttcagggagttgaatcccaaggccagggacctggtttccatagctcgtcatctctgtctctgatgttttcctcccctccagtccctgccgggacacctggggtgctcacggggcatctagctgtctattttcacagtcacacacatctttaatttatcaaggtagaatggtgtctatcatactgttttaattcttctaagaatgtagcctgtatattatctatatcaatgaattaatatctatttctttaattgtaaggtctacataattgtatgaaaacaatgtatgaatgcatacccggtttatagtgactatccccattgctcatggggaaggctgggattagaaatgctggaagacagaacacatacgtttttaaggctttctgtatattttctcaaatttgctttaaaagtgacatcagtttgcattcacatcaactgcattttggagtagacacagggcgttgattttacaaatctgccggcatttgaggagtaagcgtttgttctaaggcttaagccactacaagaacgcacaccacaatgatcaagccacacaaagtcctctggtgactcatgaggttggagagaaattgctgctgttgaaattaaaatatgttcctctcaaatctgttattatttctgatttatatgtgagggaaaccaacacttagagaagttaggaaatcttccccaaatcacacagctggtaaagtccaaaaatcagaattcaagctcaagggagctgactcccagggccagcggcctggtttccacagcccgttgtctctgtcgctgatggtttcctcccctcccctccagccctgccaggacatatggggca

SEQ ID NO: 53501 - DNA, 7251 bp, Homo sapiens
atatttaaatattgtgttataatttgcttaagaatatttatctcaccataaatttgcatctttgattgagtgggctgcacaaatagactataactttattttcttcttcttttttttttttttttttgagatggagtctcactgtgttggaggctggagtgcagtggtgcaattttggctcactgcaacctccgcttcctgggttcaagcaattctcgtgactcagcctcccgagtagctggtattacaggtacacgccaccatacccagttattttgtgtgtgtgtgtgtgtgtgtttttactagagatggggtttcaccatgttggccaggatggtctcgatcttatgacctcatgatctgcctgctttggtctcccaaagtgctgggatagaggtgtgagccaccgcacccggcctattttcttctttttaagagttaattcctcagacaacaaagaatctgaagtttagagctacaccttaagcatggaatattaaattgttttaagacaccagcaagtattaaaattcttcagcaatgtgatggtaacctaactagatgtagtcattaggaatgattaaatatcaaatacattttcctttttaaaaaatcagttagaaatgggacacagtgagagtgttatcttcaacatcagctaataatgtttaaaggcagtctcatgcctgtgataagtgtgtctgtttcatagatgtcattggtgctctgataagtctacctcacatactgtgtgggttaatatcaatatttgtaatccttctaagagactatgatttcgtaagcaagcaaggcagagcaaagcataccttttgtgatttgactttttgtaacttgtgagtgattcacaaattctgatcgtgtccttggaacatgaaattgcacacatatactactgtgtagatacctgaagacactaattgttccctaatttgcttattatttcagcctgggctctaactgatagaaaacttacgggcctttgatatatgggatccatgtgcttcaaaagacaagaaacctacagtcttgtccagaatccactgctgtgatttaagaatgggatgaccagatagaagtcagccttctacgaggctctgaaattggattactgcctttcagcagctttgttggatgttgatgttgagacatttggaaggagatcaataatcatcagatgtctcaaattcactgaaaaaataattgcacaatatttaactagtgtcacggcatgacagaatggtctttcttcaaacatagaatagcgttatacttctatttttagcttaagatagtttataaaaagcctacttctttctctctctctatatatacacacatacactatatttataactctatatgtagctatatatagtttatatatctatacacacatgtatagatatatatatatataactgttctctgtttcatactaaatgagacaatgataaaagcatgaagcagcctgactcagagttgccatggacatttgaggtgatttcactctgattcaacccattttctaataagtaaaaatgaactgaatcatatcagtagcttttttggcagtgacttttatgctaattcagtttttggagaatgtgtcaattagcattaccagtaggggttaatatctctttttacttctttggaagattgctgccttccttctctccctcccctcccctcccctcccccttcccccctcccctcccccttccccttccccttcccttcccttccttcctccctcccttccttttttttaaaaaaaattttcactcactcttatagtaggtgtgccaaatgctttgcgaatgtgacataaaatatcaacaaaaaatgagatattgaatattttaaaatataaatgtaattgtattaaattacaaaagtataccattcattacagaaaagttttttctgggcatggttatggaggagattgaagtttgctttgaaacaggggagcatacgtcagtgacagtggtttgcagcgtagcttcactgagggacaataaagccaggaaaattctgttgctgattttatgaccacatccccttttcatggccatcccttttactgattgggatgcctactaggacttttgtgttttctacgataatactgatttttagtgagtttacaccacttgatgaaagaaaattgaatgtatagtacctgcaatttaaatgttacacatttgtaaggcatttcatatataggtaaaattactaatctgaaaaaataattggcctggtttttattcagcaaaatatatatacatggcattcaagtggcagaagcagctggaaaattctgtgtttaaacttctagggctgcgggaagaccctctctcttccatttataatgatcatttattactcactcaagtcaaacaagtattgcttctctggcttaagacgttggtgcatgtgggagaggtgaacggtcacagataatttcattggaatgaatttgtcacctgtttgactggaaacagatctgaatatgggaagatgctttgtgcacacagtggaccttggaggagtaagaaagggactcgccattgacggggtgaagtggggggcagcagagagaggggctggggtgaccaagactgattgggcagctagagaggaggaatgcctctaatcctgcgaaggccttttgtagcctatataaaattctgcataaaaataattctgcagaccatcctggctaacatggtgaaaccccaactctactaaaaatacaaaaaaattagccaggcatggtggcaggtgcctgtagtccctgctacttgggaggctgaggcaggagaatgatgtcaaccgggaggcggagcttgcagtgagccgagataagaccgctgcactccaacctgggcgacagagtgagactccgtctcaaaaaaaaaaaaaaaaaaaagttgcaaaattcatacattttgaatgagttgcaagaaaaaatgaagttactctgttgttttcatctcttttaaactgtcccaagtccaagatcagttgatataaacatgctgtggtacaactttccttgcttttcagagtgatctcaagcctatgtccttatcggaaacatatttgtctggtcatgactgactgttggaatctgtctggaagcacacatgggaaacacctggtatacctggtacctggtgtaccttgtattaccctcagggctacatggattgtgttgaaagctgtcttttaacatgatgcccatctttggttgtgatgacttattttttagaaattagtcgggttaaagtgagccacacttctccatggacattcagcatataggatgtcacagcaaggaacacaactgcaagttaggagctggcattgagtcagggcacggagcagaggctgtatctcgaggaaaaacagtcggcgtgaagttgtgtgaagggggcataaaagtgactcagaactccgtctgatcgtggaggactgagagggcaaaagttcttgcttggcggggcgtggtggctgatgcctgtaataccagcactttgggaggccagggtgggtggatcacttgagctcagaagttccagatcagccctggaaagttggtgagaccccatctctacaaaaattagctgggcgtggtggcatgtgcctgtagccccagctcctagggaggctgaggtgggagtattgccagagcccagaaggtcacggctgcagtaagccaagatggtgccgctgtactccagtccgggtgacagagtgagatcctgtctccaaaaaaaaaagattagaaagttattgctcaagtgatatttccatgaaagtacaacttagtgacaaattacccattatttgaacgctacaactttcacagaacaagttggacaatgtgtatagaagcaagtttcttaacaaacaagctatattacttaggagtaaggaaggggaatgtggcatctcatttcagactcttaacttcctcttttgagtctgacacatcttctatattttcttaaggcctcccagaagcaaacaggcaaggctggaaaaaggaagttaaatagtgatttgctcaatttgaaagaaacataactttttcacatgataccaaacgtttcccaaatgaaacactccctaccctgccccagcatgcaactttccaactaaatctggcccaagtaagtcgtctcatcagctggattaaatatactttcttcatctttggctgggtcttaccaaaatgagtgattcaacttcttaggagagattgctgcaagggttacaccaacagataaatatgggaatttctttcacacttgctcgtttcagaccaatagcagagctaggtaaacagtgatctcatcttcagtcacacagttttgctgacattacaaagaaaggtgtcaacacagatttaaggtggctgtcaacttactgagtccatcattttggcttttgagtttttcaccatagagagctaactgagaaaaacgaaaaacttttttttctactttttttttaaactagaaaagcaatggctgctccttaaatatatgtaaagaatagaaagaagagagaaaggtactaatgtatcccaccacctatatggaaacagtattcatatttctccttgattctgaaacatttatgatctttgcagggaaatttttggtatgtttcaggtaactgtagatgagagctctttcttttcaatcagttctgagaacttgatatcttaagtggttctttaagtccaaaatatttcagttgagttaaactttaaccaacctaggtgattagtgtatatgctctaaaaccttgcggaacactttgtatcaacaaataacacaaaccctgaattcctggagcatgtattatgtttatattcaaacataaccctgaaatgtgttcttactctaagtatctcagacacattcttcttatttgaaagcttcgtgtattactcaacaacctctaacatatctcagcgatgttaaagacacatagagaagaaatgacatcatgaagctgattctgttctttcagctttgtgtttagctaatgctgaacagagcggtgagtcatgcagtcctgtgaccagccaggcgcttttccaatcagagtctgttaagatctttgacaacagtacctgtagttgtttgaagaggaggtttcagtagtgacctgtacccttggtaataacaggctttataggtaacaaaatgtgttctctgcctactgaataacaaaacaccaatcatgagataacgcttagtaaagctgactcatttcctcctttacagatgaaaggagttgtccaagaaatgactatctcagagggaaattttccttcaggtcattacgtgagtctctttaaagcatggcggactgtagcattaggttttcagttattaggtatattaaaaagtaaattttattatgaaataatatcatacatttaaagcccggtccggttttatcttgaaatatgtgataactcctggtttcagatgcgattcagaagaaataggttgacttgtatcatcaggtgtccagaagattaaaatttctgttttattaaaatgtggaattcacgtttgttttcagccaagcaaggtttggtgattctgcagctgtcaccctcagcatctctgtaggacagcctcttgcccctcttcacccaggtctgcaggagggtggcagcgtggcttgggaaggctgggtggcgggagctcagagggggtgcagtgttcccaccacacagcggcggctcaactgcccaggctgtggggtttccagctgtgtcgtgttgacttgaaccgactcagcaggcggtgccctcctggagcacctgaagcctccagagaaatatgatggaaaaccaagaggcctccacctccctgacttgctgcgacctcctgggctttgcagccaggctgctttcgtggatgcagtcctcgaagctagtttggaagacatttatttttaaatatacaggaagccaaatacgttgagagaaaagccgcctaatgcattcctctgttcatctccaaagtcatagctggttttctagacccgattttcatcagactttccaaagacagaaagagtctcctctacatagggcttccttctttgccttcatctgtaatgcgagccttgccctaggttgcctctctctctccttgctccgcctgcttcggaattctcctgtcatttcaacagtggtaccaagctttttgttgttaggaaatcacaaattctgaaacacactcaactgagcagatttaaaaataacctaggcttctctactatttgggtaaggccacttgcttgtttggggttgctaatgggaataagagactatgtgtgattacctctagagcctgcttgtttgctctgaggaaagttttattgaagagccacaggctgcgttccagaacactggccaaacactttgcacatgtgtgctgttgggtcctagcaccgtccactccactcctgggaaaggaatatgccctggggacggagatctccttgcagaatgcctgtgtgggctgcatctaataaggttttttaggagtggttatggccccctgttgggttcctaataaaagcccgttatcatttttagcttctggaaatccacaggtccctaattttgtaaaaggtgctttccatgccttgcagtctgttctcccagggaaatttaatctgaatactatgttgcagggtggtggttgggaggtaattgctaatacattgtgggcccagaatagactggtcacattgtatttctcccttttcaccctaacaaatcagaaaccggatgatactgtttgtattcggagtctgagagtctcagcctcgccttatccttcaccagcccggacagcagctaggactgaaggtgcacgtgcccatgttttcctcccagccacccggttccccgctctgtccctcactgatctgtgcataaactgggcaggtctacttagatctgctttatacagcaggcttttatataagcgttcatttgaaaaccaagagatgtataaaggctttttggctttgttttgacatagataggatctcactctgtcacctaggttggagtgcagtggtggaatcacggcttactgcagcattgacctcccaggctcaagcgattctcttgtctcagcctcccagatagctgggactaaaggtgcacaccaccactcccag

SEQ ID NO: 53502 - DNA, 2935 bp, Homo sapiens
gcatgagctatcacgccaggccgttttatgttttatttttgtaaaatattcttgttgtaaattggtgacataattagtcttagtccatctaaatgctaagtgtcagtttcaactctaatctaaatgatggtctgcagcagaggtttccaaatattttgaggatacacacctcatcagtaaaaaggttttgatcatgaacatataaagacattaacatttgctgatgtgtaagaccagccccttcctgctgggtggcttccatgagcaattagacagtgataggaacaaacaatatagagacaggtaagtcttctgttatattttgagcattataaaggatacacagaaacatacacgtaataaatgaatcagataaaaataaatgtgcatagaagctctaatgttcttttacttgtattgcaatatatcattctgtacagaaccttgggtgtgtgcacctcacctgtgggacccctgagcccatctgtgagacctgaggtgctgtcacaagtgctcagggaaggagtgaagttgtttttccactgtgatgactctggctacatgagaacgttttctttatgactgaagtagagtcacattggatagcagtaactttgatatcttcatcagaatgagtcattttaatgtgtattgccttgtaatcataaaagttgaagtattactttttttttttaactagagcacagttacaagtagatgtttgccatcatcataacaagaggaagtcatggattttattttaaggcacataaactgagatcatgggcacatgatcaagtatcaatcttctatgttgggagaagacagggcctaaggtttatgcattacataacatgtgccaggcacaattctagatggtttggatatgttaaaagaaatcatggctctaaattccggtacacaatgtttagtagataataaatgctattatgtttctgatttcatcatcaaaattatccagacagctaggtatgactacactagtcatccaaaatcacctgaaaatcagagagcttcagtgactttgggtgtggtcacttcttagtaagaggcagaatagacacttctgattccatcgctcatgttcagggttttaattttttttctttttttgctcctttcactgtataattgctcatgtgagatgttccagagtgaataggctgccctttggatattgtcacatataaagacaataagagtaaatagttgcttatttgaagacatccatagaatggctcatgtgtcttgttttttgcttttgtttgtttatttgtttgtagacacagagtctcactgtcacccaggctggaatgcagtggtgcgatcatgattcactgcagtcttgaacacctgggcccaagctatcatctcgcctcagccacttgagtagctgggactacaggtgcacacacgccactgagcctagctaattttcaactttttttttttttttttcagacagagtctaaatctgtcgtccaggctggagtgcaaaggcacactcagctcagtgcaacatccgcctactcgtttcaaatgattatctttcctcagcctcctgagtagctgggattacaggcacccaccatcacacctggctaatttttgtatttttagtagagatggggtttcaccgtgttggccaggctgctcttgaactcctgacctcaaatgattcggcccaccttggcctccaaaagtgctgggattacaggtgtgagacaccacgcctggtcaattttaaacttttttgtagagacagggtcttgctctgttgcccaggctggtctcaaacttctggcttcaagggatccctccaccttagcctcccattctgccacattctatttctgtagaagcaagttacaaagtccagctgacacgcagaggagcagaattgaacctcaccttttcaaagaaggattgtcaaaggatttgtagatatattttcaagacaccacacaatgcatttgatgagattctgattatagaccctttggcatattttatgtggactgtaaggaactgggaaggatctaatattttaccctatttgtaaggtttcaagttagcctgtcctagttttgtgaatgctgacagaagatatgagtactctgggtcaaagaccaaaaggactttatgactcaagcaatagcagtaggcagagtatcagcaattttggttctcctactccccacccccagagggtgactgaaggagggtcaggtgacatttgcacatgcagtggattgcatttcaggaggtgaacctaaacttggaggatgggaagctgcctttcacaagaagcagtaggcatacctgccctttgctttgaaggacacacagtctctgtcttccaaagctgttcactatttaactatctttcacaagatactccaggacaaagactctcacggcctctactcagaagatgtgcagacatgtgagggtcatggagaattctcttccgagtttatgataaaggtggttgcattagtcagggttcccagagaaacaaaccaataggagatagataggtggatattttaaggaatttgctcatgggacagtggaggcttggtgagtccaaaatctgatgggggtggtaagcagtctggagactcaggaaaaagctgcagtttgagtctgaagacagtttcgtgcagagccagaaagggctgatgttgcagatgaagtctgaaggctgtttgctgctgaattctctctcgcttgcagggaggtcagctttttgtgctcttcaggccttcggcagatcggatggggctcacccatatcagggaaatctcacccaaaaatatcctcacagaaatatccagaataaagattgaccacatatctgggcaccatggcccaaccaagctgacacataaaattaaccgtcacactagtg

SEQ ID NO: 53503 - DNA, 2812 bp, Homo sapiens
aatgacagcgtccatcgccccctctcctgcagaaggccacgttaccatcttgaccatttttcgcatcatcagtgctaacctcctaaccaaactttctagcccgtaggccaaagctgcaccccttagttaaaacacagttaaactccaactaacctaaaaagagtattctatttgtttaacatcagggagcactaatatagcaaatatatcaggtagccatacacccaaggtctgggggctcctgggagcttcacccccgctgcaacaagaacagagcccgatcttttccatcacttgtttattattattattattattattattattattattattattattattattattattttgtaaagggggctgtgggcgctccactccagctgcgcgggaagaaggaagcaatgctgacttgaccttctgcagccgcggagggggagatggatgctgtcctggtgctgtaggctgcctgggagccccgccccgcggatctgaagagccctcctcccctcgggagctgtttaggcagcttcgggtagagatggaggcctaatcgttttcattatcttctgcatatccactctttattttctgaaatgcttacgaatttttttctttcatatttatcaccttagaatttggtagcagtattttggaaaaatgttaacgcctgtcattgttcggaaatttcaaagaacttctgacattgcctttttctactgatgacagcagtgcggccccaagctgcctgcctttgggagacagaggagccacacttgtacatgctttgaaagtgagaaacttacagaaacctagaaaaaggattttggacctcaggatctgaatggttcttggagttctttgcagatgaggtaatgttttggttaactcataggtcagacctgctgtccttagctaacttgcccgggaggtttttaacggaaggcctgtgttagcacaaatcatatttcctgatgacgagcagagaccttgatctggtcttaaagaacgcgttttccaacttaccctgggacttttttgaattagccggccacatataccagggttctcagaggattttttcccccctttctctctgtctctttctgggtttttcctattactaattatacaggcaagaaggtaatgatttctggtgttctttcctttaaacctctactttgagatcagcagcccgggacacagataaataggtcagttattactgacgtcacagggaactcctggctcagattaaccgcgcagagatggacgcctgtgagtgtgtgcaaggggtgatgaaacataaagtacagtcagttcatttaacaacaaattccagcaacagatgatagataaaaatagatcctgaaggatctatgtagatctaaatagatgatccatgagccacataattagggaataaaaggactccagtctttaccagcgaatgtaaaattgggtaggcagactcagacccttacttatcagtggattccagccctaattccaggaggcctcacctcaccttgggggcttctcttttccttaacctaactggttaagccaggaaagctgtgaaataccttagttacttggtgaagagccattattaccagattattatcacattctcaaaaagctttgctgtgagctgggcaggtgcggcggctcacacttgtaatcccagcactttgggaagccaaagtgggcttggggccaggagttcaagactcagcccagccaacatgtggaaaccgcatctctactaaaaatacagaaaattagccgggcatcgtggttcatgccttgtagtcccagctacttgggaggctgaagcacgagaatcgcttgaacctgggagatggaggctgcagtgaggtgagatgaggccactgcaccccagcctgggagacagagcgagactctgtctcaaaacaaagaaaaaaaaaactttgctgtgtttcacattttaaaaattttattttccatagtctccggttcccagacatttcctgagactcctgttcattcaagagaggtggagaaagccataaatgagaacaaacccgtccttctcactaaggggaatttcctggcaaaacggagcctggcacgtcagtgtctggggttagttactatcaccgctgctctgggactgagtcacagcttcctccaaggcttagggtgccccagacacaaactagttttctaaaacttctcaaggcattccgttcctccttcgttccagcccctcatgttattaactcacctaattcatcacatgggcattgtgtacaaaggcactctgctactcactgaggatacacattgttcttaacctcaggggacattcctcaaggaattaaccaaatcaggagatccttacctgcaggggtcagacagggagctgaggacagcccccggaggacaaggtcctgaaggcctggtttgtagcttctgtgctgtgcttatcattgggcctggcacattgatctctccataaactcgtgtaacttaaatgaatgattgagtcagagcacagggcagagagctgttttggaggccacttatcttcatgtcatagttacccagacataagaccagaggcgttccctttggtctcatatatacatatatgtattgtatttttccctaaaattattcctttgtattatttttgcaattataaatgtatatttgcaatctgaaatgctgagtttcttttttacatcaggagcaaatatccaaattttcttttgtttgtttgtttctttctttttttttttttttcctgagacagggtctc

SEQ ID NO: 53504 - DNA, 1750 bp, Homo sapiens
agctgtggaagataaaaaaaaaatcactacagtattagtggcctcaattgaagcagttatttcgaactaactgaaatcggaaaaacaatttctttttacttctgtacccagagatgaccttactgaagctgtggaaggttaaaaacatcactacagtattagtggtctcaactgaagtagttattttgaaccaattgatatgtatatattttatttgtaatttagaaaaatactaataattctgtctcttaatatatgttgggagtagcagctcttaatgaattgttagtaacgcccttcactcccatcccctacacccctgtcttacgtacaagttaaattaaaggggttgataaactcacttttctgtcgttttattcagctctaaatgctctggttatttcagagctcctggcttaaggaattaagattctcatcagatacataaacaaatgagtatttctttccaagatcaaagccaacctttgttttgacgatcgctttttataaaaacaagtggtgttgatttttgtacacattgtctctttttattgtctaacatcataaaaatattgctgcaaaaacagcagaaatgagttgaaccctgctggcttcacatttctccaggaagtttttttctgaatgtgccgtgcactgtcccatgctcagctgatacgattagaaagaattgcccccacccactctccctgcacccatccatccctcaatcctttttttgtcacagactctggccagagaggaatgttttgctttcatcttgatgcatactgtcctcaggaatgtttagcaagaagagggggaaaaaagtttcattcaaggccaggtgatctcagaggccatttcccacaaatgaccagaccttgactttagctttctctttccttatgccggccttctttgatagcctccgaatgtcctcatgagctaatgaaccatttcagtgaattttgacatcaataagacaattactcaacttctaaaccctcctctctcagcctgttgtcctcttgcctcaggaggaggctactgacaaatggacctgattgcacctgtgttttctggacacagtatcaatccacatggtgcttttttttggggggaggggggcaggttcataatataaggcaaggttcaaaactggaggactttacatacacatctagatttctatcttttcttgaaaaccctggaaatctgggaagactagatccaaatttccttgattggaacaactggccagagttgagttctcactacactttgccacagtctccagcactccctacagccctgcactgaggctgattaccacttgccagtcactgggatgcttctacacctgtgtttatcgctcccaagcttcacttctcagtacataatcttcttggcccatgttagcatttgagtttgcaacctcgactcaacatcatattttcttcataaaatggtagctttgtcagaggtgtttgaactagggcgactccatcttaaatagagagtggataaaataaggctgagacctactgggctgcattccaggaggttaggcattctaagtcacaggatgagataggaggtcggcacaagatacaggtcacgataaacctgataaaacaggttacagtaaagaagccggccaaaacccaccgaagccataatggcggtgagagtgacctctggtcatcttcacagctcattatatgctaattataattcattagcatgctaa

SEQ ID NO: 53505 - DNA, 1438 bp, Homo sapiens
agatgtcctgacttagcagtcaactccctttaacaggacagggtaaaagtgcagtctgtgtcagctctattagatttcctcttaattagcttattttcacacaaaaaaatagttacgaagaatagtgtacagtttggataactttaaaagttatgtatcaggtttggtgcaaaagtaccaaaaatggtggttggttttaacctcaattacttttacaccaacccaatgaaatgtttgctcccatgacccagtgaagagttagggcatcatcttattaggatatcgctcagaagcctggccactctctgggcatcatactcctgaaagaaatggtcttgcgacatctactgttttggaattaattgacagcaatgcataaaggtttgtgtggttgatttgttgtactgttcttcatttgagaatgaattatactatccaaggaatatgttgaaacaaactggactttttttttgtttggcaacctatatcgtcaatcattataagcacaagtacattcaagaaaccatcagtactgtctgtgaggttctgcacacactttccaggggatgcaggctcagggctgggccatcaggggtccttcatcaagaacaagggtgacctcacagaaccttttctaaaaattctctcacggaaagtcccttttctgtttacacctcttgattcctctttggcctcttttgtttcacagcaaaacagaagtagaaagaggtgctctcgtgacggcagtgccacgtcgcttcacagaccttttgtgctgacagctccctggccactaattaacttctaagtatttatgttggtgcaaaagtcattgaaagtaattgtggtttttgccatttaaagtaatttttgccatttaaagtaatggcaaaaaccacaattacttttgcaccaacctaatatttaaaaggcagaacaccagtttttgatagagtaaaataattaataacacttcactgtaaatatttttctcctgtatttcctagcactggatgagtgtctagcctctgagtcagcttttactgacagttcaagcttggtggaaaataacttctaaagaacaaggaaaccaaatagcatatgattcctaagcagaaatgaagggattttaatacaaagtagttgatgttcagagatcactgggacacagtgtgatccagaatggaagtggagttggagtcatgtatgtgaggatgggagagaaagagaggatctagagagaaggggagacagtgaaggatggcagaacaagcgcatgccagggagggtgagcacactgagatactcaggacaggggcgctttaggggtacagtagctgccaggcagcagatggagtacggggacttgaagggaagcaggagcaccagctgggggtccctactgcagtgcgctacataagaggtgatggaggcttgc

SEQ ID NO: 53506 - DNA, 2961 bp, Homo sapiens
tctcctggtgctatgaaaagggaggcgtcttgctcattttagggcattaaaaaaaaatctttccaccgtttttatttttctattttcctgcatcttcgacatcatcaaagcatgttctctgtttctgtcattttgagacaagcactaactgtactgtcttctgtagtctggcagagataatgtatctgggtttccttagtgatattttaaacacattttttttctgtcctcccatacagagcgcatacttttggtggaattcctgttgtgtgggagaccagcttagttccattcacacactcacactcccagatgtggccccatgggtttattcctgtctcgctgtttcaacagtcagacgtttgttcttcaggctgcttgctccagtatcctcgtcagacaaccgcagggagcctttgtgcatttatttatttatttgcttggtatgcttcagtgttttgggggcttttcttcccactgagtaagttaaaactctgcaaaagtttgcctccagaaaaagggagccaaactgccccttgattacttgaattgtgtaaatgagggatggcaggtgttggggcagggaaggtggcagagaaagaagtggaaatcatttggaatccaggattatcacttattgtgcccctgtattgaaaaattacaaaatgaaactgaaaggttgggcaacagaaagaggattatgtttattttcactaccactaaactttgccactacaggttggtttaattaacccgtgagatgaagtgctgaactctctgaaaagataaatgctttcagaggtgcctcagacacgagaaacacaataatatttatatttctttttgactgaggaaggtcactgtggtgacagtttcaggaggacacctgtattattctcttttgtcaacaggacttgtaatatgaacaaaacatgcagtcacttcccaccaggatgtgtccttctggacatcagcatacgtgcaagatgacaatttcaggcaagaattttttcctctaatctatgatttaatcagttgggtgtctgggagtgggttagagaacatttctgaagttaaagcttgaatgtttttcatgtggctggaggtgagggcaggcgtccaggagactcaggcagcagctgcatagctcagtgcctaagtgatctctgctcttaggaggatcaattgaaagcttaggggaaatagggctcccaggaagatgggtgcttaaaaatgaatactgtaaatgttactcagcatacaattgagggaaagccatcactcacaggaagtgagcacaattctttattatctgggccctgtcactaatgaaacattcagtgtagaagaaatcagtcccctttgagtttaggcttgtcatgatggctctgggtttccttcattcacagcaatcacacttaaaatgtttacagtctgaagacctgaaaaacatgtccacacccttgaattcgttgtagttacacatgaggtcaatgttatccatcttcatttatcaaataaagaaattgaaaatatagtctgtcagaaaataattccaattcagatcttcaagagttcacgttttattgtcctattgtactagagctatttttgtaaaacatacatctttaagctttcagacagaatcgtgaaaacgtaaacttatcacacacaacagcataatatgcaatgcagtgcagtctaggatatacgcattagtgtcaatttttaattaaaaaatgctgaattttgtttaaaaagtttttttttttcctggatctggaaaaggaaatgcttttctggagtaaaacacagaggataaggtagaattcttacctgaagtgcctgtaggagattccaacgtgaatgcatttcacacgcttttacaagctactttcttctcctttcttttttcaatcatcttagcagtcattgtttattttctggagatgagtagtttttatttatactagaaagcccatagtttttacataggttgcctttcattcttggtaagacactgagaaaaggagaaaaagaaaactttagagatagagcaatggtataattgattgaatgttacgtgaactgtcaagatcagaactttctcatactatcttaggaataaaaatatgttctggttagtaatcctcaccaagtttggaaggttagaggtgactcagcctccatgaatgtggtctggtcttattttaagaagggcttctgagtcatgtggagttgtgtcaaactatgtgttatgttatgttattttaaaaagacagcttggagagaggaaattgaactatctttttttttttccaaaaaactctgccctttaatagaagaaaagggcaagttatttcccacaaatctcactctatgtaatgtagcctagaatgtatttttaccacagatatattcttaaagtagtttggcatgaccttacttagagtattttaagtttgtgacttgaattgtttttgcttaatatttatccttagatgtggttgaatgcactgttcataactgaataaatttactatcgatccattattatcgtgattgttcacctattcaaattgatagctacacagatacatgtactatttttatcaatattcaaaatgcataatgttaagtgaacttcaattttctcaactcagaaaagtagcaatagaataaatcttgcctatctccctgagttgcaataacatgtaataaaatccttggaaaagtacatcagataatgacgggttcatgatggctcacgttgactggtaatgccatggcttacaattgagtatgaagtctgcactgcggctcagctgagggaaaggcacatccaggtgggtgagcaggtctgctacaggaactcactcttgcattctaacttccctgagcctttgggtatgtttctcgatgttataccaagaacgttctgacattttaacctcaagtcgt

SEQ ID NO: 53507 - DNA, 655 bp, Homo sapiens
caaagtgctgggattacaggagtgagctatagtgccccgccttttttcattactttttaaaaataactcttcacttgttaaatctcttcaatgattcctcttgtttttagggaaagaacccattctctttgcatggctcttgtaggaggaataatctgatttctgacatgagtgcccctccagatgaagatcacattcaccagccctactgaactaatcactatctgtagattccaccatgacatcacaggcccagttcgtcccacttaatgtttactctgtctgcagtatagtccccttcttcatctggctaactccaaagtccagactcagtacatgagtcacaccattcagaaagtcttccctgaccttcatatgagatctcgtatcccgtgcacattcatctgagtgtattcgtgctgtctgttcatttaaatacctcttctagtcgactgcatctatgtatatatataaatatctccaactcaatattgctgtggatagctgatggtcacaggttaaaattaggagcctttcaagtgtaaactagaaattgtagttctattgttttatgatgagtaatattaaatttattgttattcaaacttaattgttcagacttaattcatgtcttgttttgggggcccctgggtcc

SEQ ID NO: 53508 - DNA, 992 bp, Homo sapiens
acttaaaatcattttcacatttttccattgtttccattcagatatatattctgtactgttttggactgtgtactttattatattaaactcgctaagatattttataatttttattttatgacacatataacagcaaagtgttcccctcccaatgtgctcaattttatttagggtgattttagaagggccaaactttgccctctgcagtgctggtctctagtcaaattgtaccacagaggctcctcctagctcttactctgggcagttacagcaatatcagatgttccctgggatctggaatttcctggtacattcatagttcccagtgagtcacacctctctgtatccttgcccttctgcattcccttccaaaactgacacagccctggcatttgctttggcaacaggatattagcaaatgtgacacaagcaggcatttgaaatgtgcttgtggattggggcatgttttccctcttgctgctcttgagcctgaccatcatgacatgaagccagccccagcctgctggagacatgtagcccagcagaccaacagcacctttattagacacaaaaatgtggaccccgggtcattcaggcccagctgggcatctgtagccagctgagaggcaacggtgagaccagagagatctctacctgagcctacttccagctgtcagacactagggtgttgctttaagccacgaagtttggagtggcttttaatttggtaacagataagtgaaacacagctctaactttgatgcctttatcactctcagaagctgcccatggccctgttagttcagccctattcaatgttgatgttcctctcctggattctgctccatgtaagtcttccattttgagatctgcagccatcacaacaacaggcatgcacgtgtgctgtgtgtgtgcctatgtatataggtgtgagcatgcaggtgtgagcatgcaggtgtgtgtatgcaggtgtgagcatgcaggtgtggata

SEQ ID NO: 53509 - DNA, 2211 bp, Homo sapiens
gtttaattttttaatttttaaacttttttgttaaaaactaaaacacaaaccacacaatagcctacacctacacggggtcaggatcattatcactgtcttccacctacatttcttgccccattggaaggtcttcaggggcaacgtcacgcattaagctggcatctcctatgatgacaatgcctttttctggatagctcctgaaggaagtgcctgaagctgtttcacaactgaccttttaataatatattaacataaagagtacaatctaaaataacaataaaaactatagcatattaaactagtaacctaatcatttattatcattgtcaggtattatgtgctataccttattgtatgtgctgtatttttatatgactggcagtgcagtaagtctgtgtacacaagcatcaccacgaacacaggactaatgcattttgctacagtcttacagtggcgactgcctgatgagttggcaggagtttgccagctccattataatcttgagggatcaccatggtatatgtggtccttcgttgaacaaaacgttgttatgctgtacacgactgtatgtacttttacaaataatgctgcatttgtctttttagaaattatcaagatcctaacctgcgattaacatctgcattttaactctaaagctgataaaagcttttcctcactttgaagttatttgaagtagcaggttttttaaaagatgacatatataagttcttaaaaatcattatttactaatttcagcatttcttctgagctaagtttaatattgtaaaatctcacaagcaatttatttaaggtcagttaatgacattgaagccaaattcctttttaaaatacgctctcagttgcaattgaacacagttacacgtgcctctttgaaggaaaacgtaggcacagtgataaatgcagcgtttccttacccataaccaaatagaaatagctgcatcaacattccgagcccaggacaaatagggctgaaaagaaaacaagaaaaaatcatcagtttggcagcaaatccactgtcactatactccctggcacttgcctttggcctggaaagcacttgtcaataacggcttctttgttttctgagacgtcatctgtaaatactgaaatattgaaacctagtccaggctttgataccgcattcttaaacctgttttgaaaacctgagataattgctttaaaaatgccttcatctatctgttatttgatttagaaatacattggattaggtcttataagtcaagcagaaacttgtctttttttttttttttttttctagacggaatctcactctcaccaggctggagtgcagcgagcaatctcggctcactgcagcctctgcctcctgggttcaagcaattctcctgcctcagcctcccgagtagctgggattacaggtgtgagccaccacacccagctaatttttgtatttttagtagagacaaggtttcaccatgttggtcaggattgtctcgaccttctgacttcgtgattcacctacctcagcctcccaaagtgctgggattatagacgtgagccaccatgccaggccgaaacttgccatttttaaacatacacacttgtcctttatgtgatgttctcctggtgctgaatctgtctgccattcccagattgtggagttggggggtgaagttcctgaagtcatttctaggagggactcagtatcctatattcatcacaattgatgctgtaaccacagcatgagatgctgtgaagaacaaatgagataaataatgtgaaaaggctatgaaatgagtgaagccccatgtaaacaactggtaccaaaagcttctcactgctactgaattggaagaattaagaaagaggtggatgtcagctttctttcctcctctagtcgattcacttttccccaaacgcctggtgaaatgtgactctcgtgtgtgtattaactgcaagagtgtcacaaacactgccttccactatgcctctgtggagcaaacttaacagtaaaatttaatctaaaaatttgtcttgtcttttttatgcagctttttggattggctcacagttttcctacttttctgtcctgtcagttgagaagaatacatttcaagagatgctcttggaaaacacgtttgatggagaggttgatttttgtaacctgtatgccgtagtcaggtactcttggttcttggtataaattagaca

SEQ ID NO: 53510 - DNA, 5080 bp, Homo sapiens
caaccctgtgctaatatctccctcctcccacctaccacatgggagcccaggcaatacaatctatagaaatcagcttccctgactgaaaaattatgtaggaaaagggaagaattaatgcaggtaaatgaaagaaacccagcacacccctaatgtctactatatagctgtttataggcatcccaaaatcaatcaagaaggtgtgcctgacactttgtagatttcttgaaagatttcctttctctgcacatctctatctccctctctccctctctctgagtctcatcctcctcttcattcttttctcttctgccccttccctctccatgctatctcttgctcttctcccttccttaccctctctgtctctccccatctttactcattatggctactttgcctgactactcttgagttatttcgacttggactagaaaagaaaaaatgagagccaacaaaatggaacaaagaatttgccctttctcctgaacattagcatgtttggtgatttatgtgtagctttcctaggataatatgagactcatgtttacagggaacatggaaatctaggaaacagagacagaagtcaccttccttcccccccactccctccaattgcatcactgtactggacccatgaatagacaccaagggggcaggcgcggtggcttccgccagtaacctcagcactttgggagactgaggcaggcagatcacctgaggtcaggagttagagaccaccctggccaacatgcagaaacctcttctctactaaaaatacaaaaattagctgtatgtggtggggcacacctgtaatcccagctacttgggaggctgaggcaggagaatcacttgaacctggaaggcagaggttacagtgagcagagatcacaccactgcactccagcccaggagacagagtgagactccgtctcaaaaaaatatagacagcaagagcccactgtgggttaggctctgtgcctgctgccagagagtctcagggccaaacgttagtattcagtggcagaggtgaataagtgactcgatggacaaaagtcatattatagcaactaaactactttacatgctggaaaacaaccagattttgctcatattaccttaagagatccaagtgtttttgtgaacaaaatagccaagaacacagtgctgcaacatctcctttttagcgaatttaccaaaggtgtatgccagataagaatatgtatataaggtcactttatatttggcagtggctatgcaaataattgtagttttgatatgaattgatcaccgtagcagtgacctctcctactctgtggccatgcgtggatgtgaactctgtaaagagggagagaactaaaagcatcagggctggctgctcgacaggactcctccactccgtttgtgtttccttttctttcttgcagaagagccgtcctctggcagatatgtgaaagaactgcctatgaggagcgagaggctacttcgcacacctcgcagctcaggtccccggagacggctttacaggcacacaagcccctctcccaagccatctgccaggagccccatgaggaacacagcacagcgcctgcatcagaagcccatgggtttgcctatcacatgtcttgttttctcctgatccgtggctcacaggctcagtgtgacccaacctcctagatttccccatcagtgctatttgcagtgcccccaagcactttcctccactccagtccctgagcgcatgccaacggccctattttcagccacccctctccatgcctcttgtctgtctctagctgacaagcagattatctcttctgtccactttgtttgccaatgtactttggcaccattgaattccaacacatgaagtaaactgaactgtgtacaacgctgagcacacacgtggtttggagagcagccccttgtcaggatccaaaatgttcccaagccttgttgatatttgggtcactgcagatctctgagtcccccttcctttttaatcttcttcccctcaactcattctcaatttctctctctgaaaccacctgtgaacacacttatgcattcaaatagatgcatactgttcatgcttatatttttctgtaaccgtcatatctaataaatacttatcatccaggaaaaaaatgttgttgggcaataataacatgctaaataatggcaagtccattatcatatttttgtagcagtatttcctttacttgtcacacacacttgatggaaaacttcaaaaagttaatttgaagcagtcttttcagaaaacaaaactgagtaaaatcatttaccatcgttcaaaagagcagtccccaatattaacagtagcagggacccattttgtccacggatgtggtaggtgggggatggtttggggatgaaactgttcttctcaggcattagatcctcataaacagcaccatctagatccctggcatgcgcagttcacagtagggtttgcactactgtgggactctaatgccgcagctgatctgacaggaggcagagctcaggcggttgtgcccaattgcccaccactcacctcctgctgtgcattccttacagaccacggaccagtactagtctgtagcctggggattggggaccccagatttaaaacgcttttttaaagattggcacaagtatgcctgtttttgctgtaattatattaactgcatatctgtacactatcccgactagcctggcttttatttctgcttcttcactttggtgacttctgtctctgtttcctggatttccatgttccctgtaaacatgagtctcatattatcctagggaagctacacataaatcaccaaagatcctaatgttcaggagaaagggcaaattctttgttccattttgttggctctcgttttttcctttctagtccaagtcaaaataactcaagggtagttgggcaaagtagccataatgagtaaacacttaacagggcgtttcacccagcaactgtctgcagatagcagttgcatgaatcatgcagaacacgtggatgtctgttagtctccagggattaccaggctctgactcaagggtggagtttggttacagaggcacttcacatgcctcagcaacctgggtaatgtcagttgatcctattataggcagaggatcagcagtattcagaccaacactgtgttcattcagttccagtccaaaattacagtggcacagccaaataaatctaggtggcacagaaaaagctacttataatagaagctactggaagtccagcttagctatggctccaggcttaaacagattcccctgtcaatatcctatttgtcactccaggacggtgtgtcaaagcaacgggctaggtttcaccctgcccctgccttcagtttctttgatgtttaaatgcctctgtacaggaatctgtttgagaaacagatctatttttattcataattacttctccatctgtctcggtattttctataaacagagattaacgtcctgcgtgttaacctattttaatctgtgaactattcagagccaaaatgtctttttaaagagtaacaagatgatatgaacattctgtttcacaaggcagagctgagcgttactgcaggttcttcaaaccattcaaagaagaatggctttaaaaataaagtctaaggagcgtttcattcactaccatgaaactacatatcagcttgatttttttaagctagcaggaaaaagcgttctcatgaaatgtttaacgtggatatttgtctttgtgtgggttctccctttgatgtatttggaggtaatttaagaatgagggtttgggactggtagggcctccatcatttattacacaatcttgaataaaaccctgaagttctcatttctttaggttctccatacataaaatgggaacaaaaatgcccaagtctaactgaaatgttattgaaaggatgatataaagtaatgtgaaaaatatataaagaattgcccaaatatgtgaaatcctgttataactaaatctagagtcattaggtggaactcaaccattactacataaataaatggacattaaagactcattgacttcactaaatcaacatctgttaaacaattgtataatatatgcccttgtggattttgtggcaaagctgagggtctttgaaatataagaagtgaatgcttgcattgctcatctgaaaaataatttctatatctagacatgtccatttctagctataaatgataaaagtttgtttcctcattccacggctatatttttgtcacatactgttttttgtttgtttgtttattgaaacagagaatcgctctgttgcccaggctggagtgcagtgctgccatctcggctcattgcaacctctgtctcccaggttcaagctaatctcctgcctcagcctacctagtagctaggattacaggcgcccgccaccaggcccagctaattctcctgcctcagcctcccaggtagctgggattgcaggtgtgtgccatcacgcccagctaatttttttttttaatttttagatatgatggggtttccccatgttggccaggctggtcccaaattcctgacctcaagtgatccacccaccttggcctcccaaagtgctgagattataggtatgagccaccatgcctggcctgttttttaatacagataaaaacatactatgaaatgaaccattttaaagtgtacacttcagtggttttcatgtattcacaaagttgcacattcatcactactatataattcccaaatgtattcacacaacaaaaagaaattccatactagcagtaacttctcctcttccctcagccctggcaaacactaatctagtttttgtctctatggatatactatttctggacattttatattttttatattaagatttctagcttccttatcttcgataatgtttttaagattcagccacatgttaccatgtaccagaacttcacttattgtgtggctggataatatttcattgtagggctatgcaacactttatttacccattcactctctcttaaatggacatttggttgtttccacattttggctatatttgtt

SEQ ID NO: 53511 - DNA, 3569 bp, Homo sapiens
gcagttccacagcagaagagaaagaaaatgggacatacagacacacaattattgaaaaaaaaaaactgaactttttcaattaggtaaaagataaatttacagattatagaagctcagtaaattccaagtgtgagcaaacatcattaaaatgagcaagtatgtaatagtcaaagtatttaaagccaaagaaagaatgttttcacaagccagacaaaaatggcatattacatacatgcaaaaaatgtttcaaatatctttttcttgtcagaaattttagatgtgagaagacagttgaaaaatattataaggtaatgcaaggaaagaaactgccaacccacaattctacatccaacaaatgtattcttcagaatatgaaggcaaaatagagacaacctcatacgttccaccattgtgttttggaagcagataatttgttttctagttttacagttctgtggatgaagggactttgccccagtatggatgaaaactaagagtctcacccatacctaatttagatcatttcaatgatgagatttgtaactttttgagttgatattaatgtgacattttttagagttaacgcttaaatgggttaagaatttgggggacatgggtaaatgtattttgcacacgggagaacatgaatttggggtgccagctggtggagtttactgggttaattagtgccacccttcagccccctaaaaatgcctgttcaactggaacctgtgaatgtgaccttatttggaaatgggattttttgcagatttaatgatgaggtaatcatggattagagggatctataatctaatacatggtatctgtggtttcctcataggagggaaatttggacatggacacatagggaagacagccatgtggagacagaggcagaggtggacctgctgccgcaaaaccacagggcgccaagtactgtgggccactgagaaaactaaaggagaggaaggattcttccctggagctttggagagggtgcggccctactttcacctggatttcagacttcagacttccagaaccatgaaggaataagctctctttgtttcaaaaccactcagtcaaggcactttgttacaacagcctaggaaactaatacaggaattggtattagtaaaatcattattgttggctcatatgaccatactcatagaacttttaagataatatgtaaataagcaactaaaacaaaaagtcagaaagctttatggtgccagatcaatatacaaataaatatcattattttccaataaaaacaattatataatgtaacaataataaagtaataatacaaagaaacttcccataatagctaccaaaaattctaaagtagttataactagtttttaaaaataatatgttcagaaattttatataaacaaatataaattttaagttaaaaagaaaaagaaatggataaatacatcattaatgaagtttcaatcaaaattcatacatgaatatttcacagaatttgacaagtatatctaaaaattattttaaaggagtaaaacgagcttggaattatttgaagaagaaagtatttatccttttgtatattaagagttagcctaagtctcccgggactcaatggtatcacctctctaacaaaaaaggtcacagagatatgaaaacacatcataaaaaaatctatcgttttatcacacaatgatttgatcacctgtgcacatggaaacaaccttattttaaatccttgtttagagtcaattttaagggataatgttgcatgtgaagctccataatcattcttttgtgttaagtggttgaggaaaatatcaggctggtgagatgttaattataggtccagggaataacttgagttaataaatcagagatgagtccaaagttctgtaaacaagtttcaacatttctgggcacctgagattaagcacagctctgagaagtgctccacacgttcctaagtatatgatgcaagttttactttggcaagaaaatgtaactatatctagtacccaccttaggaacatgaatgacgaaatggagatttcacatttgccagatgaataggactaatgtagaaaaacaaatcaaactgtcctttactctcagtcaacccccttctcaataacaaaaacatccacatatccacattgtccatctattttaaggtcaatatagtatggatattataccaacttgcaaaaataaattaaaccacttaccacaggtatcctccaacatcattggcaccattaaataacattcattcagaactacttttagtgaatgtagatacttaatgtttacagacgaggaaatctgaatggtacgaaacaaacagagacttgttcaaggtctcacactgactcagcagcaaagtccacataggaagtgaatgttcctgaagtagcacattttgtttggactacaagaccaactgagttattatctttatttgaaaatgattcatgcaagtctgccacagatgaaggcaagctgtggaattcttactcaaactctttgttgttattatgggaaagcttcaagtctggggttttttgtttgtttgtttaatacctcatatttgttatccgaaaaaaacaaacagcgttcattcacctgtcaagcaacaaacgactctccacgagaatgcagattttgatcaataggagttttattacttggctcaagtaaggggagcactgggtgtattctccaaagcagtgtctccctgagggaaagtggcaggagggttttatggggtgatggagaggggagagggtgcattatcgcatgtagatgaggggtcccagcggtgcagacacagtgtcatcatggcaacacatgggttacatgttatgataacggaactacagttcctccaggatggagacgttacagtcatgaggaagattcaccagggttcatctctaagttgccagggtctgtcaggagctggtttcaaccaactaggttactatagtccacccagggtttagggaagaacaggctgcagggcaggaagctgtaaatcaggctgatggctcacgtggattaaactcctatggttcctagagaccctccttgtctgcttatatatcctagaactgaaaaataaattgaaaagtgaagtggttatggtggtcgcacttctgaattctggtatgcccctcctacctccccctactaagtaaagaaagataaatcagtcgtcttaacagtatttaaaacagcccttcccaaaaactcaatacatgaaactttctttctagttgatctttgtaccaaatgatctggccaataaaggaataaaatctttgagctcaaataaccatgaaaatgcaatacccgattttcctaaatgcacttcctaatgtgaaggccattcacaaaagcaaatatccaccccagattctactgggtatgaaacatctcaatgactgatacttcatcttatcacctgaaaattaaataattttattacaaaaagaattagtagattatattgctaaatcaagtttagcctagagctgcctccttacatattttaagttcagtctaaacgt

SEQ ID NO: 53512 - DNA, 1135 bp, Homo sapiens
acgtggagcatgaggtcacagcccagcaactccatctggggccatttcacccaagctgcaaatatagtgtctagaaaagctattagtgtcgagaatgttgaccttacaaaccagttatttaaagtgatcatagtttgcagaaaagattaccttctgaaagaggtaagagaccccaatcaatataatctgagtatcttaagtaaaattaggaaaatatctcagaaattattgttgggaaacttgatgtggttgttatgcaagcaatccaggaaaaaaacaaccaaacacacacagactaacaaataaaccctccctattcattgtcaggcccagtgtaagccatcagctaggatatgttgttttgctgatggtgaggtcacagggcaaaaagaacatgagatcattcagtaaacaagaccaactggaaaactagttttgcatccccatgcccaaccacccatcagtcacatgcttacatttaggtatgttagctaactacatctctctacaaaaaccatgcatatttcacaatccccaaatgggtcacaaagtcattcatgggtcttatttttatccagtctcccaggagcaaacatctggtgcttattactgggtacaggcacattgaatttgtagcatagaaatgtgtcttaaacacaattctaaaatgttttcatcatttatattttagatagattatgaagatttctattttataatctttccacaaattgtgtgtgtgcttgtgtgtgtgcaacaggtttttaaagaaaatcacccccatggcctcctatttagtaaagcagggtataggtgtgtgtcaacagttgaactattctgtggttacccatcacgggttatgtcaacatagtgcgtaaaaatattatggaagaagaacacgatacaagtgtgagactaatatgtcctactctgctagattataaagttataaggagtatttattaagttttacttatttttgtgtactttttgtttctcctgaaacatgcattgaatgaatgaatgaatcaatcaatcaatcaatgagtaacaaagggaaaagttcatttcccagagggcatggtgagtctagtgattggaaacattcttctctttatggagggcaaatatctta

SEQ ID NO: 53513 - DNA, 2127 bp, Homo sapiens
atttaggcagtaaaaaataatcgaaatatgtttttgagttgcgttctttcaccaatgctttcccttgatttgtaatgcaatgttatcatatattaaattcttacagatagttttggggactcaactttgccacacaatgtcttatgttcttttaccagatcaacactaataaaagtagtagttattagaggttaattgtgttttaatatttagtggtaaaatttctctcattaatctctcttttttttcaaatatttcttactgcccataacgtttcattttcaaatatcctttactatccataatgtttcatgcatctatccatgtttttatatatctcgtgttgcataattttaggtagaatgtctttattgtcaacattcctctaataagtttactgaaataaatctatgtatttgaaagggtgcaaatgtgataagaaaatcaagtttttaccatacaggtttttttcagatttattaaaaactgtataactattttcacttagtggtttgtttttgaatactggctcataaatagatattttcttaatcttgttatttctgtctacttaacagttgttttaaagaatgtaaaaacaatttcctgaatacacatttttgacacataaaaagattctctttttgtattatacattctatattttttcttattattttgtccccacgtacatatattgttagatactgaattaacttaatatttaaatattcttattaaacaaaaaccacatgctagatcatattacatactataaacactattaaccaagaaaacttttctttaaacagaggcagctctaatttagactgtctttctgtaaagaggatttcactcaaagcttctctctttttgaagtaatataagaaaattgaccactgagaatatagttgttttttagaatttcatgtgataaaattcagagtcccaaattaaaattataccagtagatctagagaatttttaaagaggccaaacttcaaaatgatattttatccaaataggtaacaacagtgaacagtcagactcagagagagaggaataaaaatatccacattgctcgagagctgtctataaatcacacaatagtaattatatttagcctccacaaagagctccttttaaagaaaaatgactctctcatagttggctttgccctagaatgatatctagcagatatctattttaaagttcaaagtctaactattcagtaatatgtcattatttctttccacattattgtgtgtcttttcactgtttgctttgactacataattccactatgactcattctaacattagatcacactgtaggtctttatacttatttcattgcagaggtgattcacaaatttaaacaagctatgtgcacgtagatcaacattttcaaatatgtaaatgtctgtccttaatagatgataaatcctcaaatacactgtgctaacacaagaccttgcttcaatttaacattttcaaacatgacatccccatacagccatggaaatacttcagctatggatcaggaaagtaaaaatttaagccatttatttttcaactgccttatatttcccaagttcaaaagtacattgccagattaaccaaccttgacttttgagatacgttcaatttagccatcctgagagtagtcgattgtgagggcacttatgataaaatatttcacattttgtaagttgcattaagttagaaacattcacttttattattggtttttagtaaattatatgagaattttaaaataaatttccaaaattttacattttcatgcatagaaaacattatctggatttttaatttaattttgtaattctaagttcataattgtgatactatataatataaaatatatactttttaaattatttctaatatattttaaatgaaactcttcaataattgaagaaagatttgaagataataaactagagggtaataatttatatgaatcctaaacatctgacaacactgctttagccgaatttaacgatatatcttaacccagtccaaaagttgttgagttcaaacacaggatatgaatcttaaaaataataaatagtaaagaaattcataaagaatcatttttattaa

SEQ ID NO: 53514 - DNA, 1690 bp, Homo sapiens
gaacagtgacatgtgatgcgaccagctctggctgggtttgggcacattttcattttatatcatgaaattgatcaagaccctgtgtcttcattgtgttcctttttcttgttatgcagcatattttcacaggactgaattcttttacgtatccatacactggggcaaatcaactatccagacctaggttagcaacattagatgatgtgacatccaccatactgtggtcattgtcactcccggttggattctgctctgggcagagagggctaatgggcgtgactctaggcccagtttccatagcctggcagtcctcactaggaggctagagctggactggaagcctgtcttcaccaactggtttctggtactttgaacacatggagaacaaggaaaactacaatttttaatgtgcacttctgtcacgtatcgcctctgccacttagaattatatccatgctccaacaccaatccctccctaacattagctagtactaactcgatgctttctgtgtgccaggtactattctataagtatgttacaggttttaactgaatcttcacagaaaggtaggatttaccattatttctgttttataaatgaaataaccaaggaatagagaagttaagtaaattacccgcaaatacccagctagtaaagtgatgtaagtagaatttgactcgggaaatctggcttcagaggctgggcttttaattacataccatgtgggaaacagttaactaggtactctttctcttggaattaatctttttaaactatgtaaataagagggtgagacttttggtgttgattcccgagaagataggacacattccaccccacaggactggcatgtggcccagtgacagtgccagaccctttgaacacacagctccgttccatgtgacgccagtggaaaatcaaacatttcttggcagtattgacgagtatttggatgaaagaaacagaagagctcattaaacctgcaaaactctattccaatggtgaccagcattacttcacctgggaaatcattgaaaaacaattactgtgagactggattggtgagtcacacgagttcaagccattatatgcttaatttacttccagccctgattttaaacagaggcggtatatttaaatcagaaggagatacggaaacagcaatttcttggctagaaaaatcagcatctctagggggaagtggaaaattctcaaagagctgaagagcatgaaaaaggctccttctcttgtcaagatagatcacggccctcattagtgaagaagattctgcaggcacaaagggccctgaacaaatgctgggcaacaacagaaactgtggtgcgattaattcttgtaaaataataagacagaaatagctccatcaatggaaggagaataccgttagctagagactacccaaaggaagagaatctctgaaattaagttagattaagtgggattgagttgtgacagctgcagggacagaccttcaccactgtgccaccccacctggtgtctaatgaatttacgctgaagcaggttaggacagtttgcaagcagaaaatacaacagagatggattggcaaggtctgctggaattgctgctgcttttttattttcattttattttgttgtttttgttctaaaaatattttattcttttttttggcttacacggcagaaatccat

SEQ ID NO: 53515 - DNA, 1301 bp, Homo sapiens
gttcaagcgattctcctgcctcagcctccggagtagctgggattacaggcacgtgccatcatgcccagctaatttttgtgttttcggtagaaacggggtttcaccatcttggccaggctggtctcaaactcctgacctcaggatccacccacctcagcctcccaaagtgctgggattacaggcgtgagccaccacacccaccccccaccagttattttcatgtgcaacactaatgaccaaaatttgtttgatctatttccctctaaaagaattttgtcttcttgtagtataactgttttttgtcttaaagcaggcaaaataaggacaaatcagaatattgtgttatgtccagaaagcaaggttggttttgaaggctgctagcaatgattctgaaagggcaaagctgctcactgaaggaatcctattagactcactgtgacatttaaaaatgaaaatagtgttaacattgttatttggaaaagtggagtctataaaaagccatgaattaataattatgctgaaaaaagcaaattcatataaagtttggagaaggtagctagaatataaaaagaggtgaacaaaatgtttaattcgttactgattttaataagttagggaagattatatgtacgagcacttttttttctttcatatgagtttcagattagagaatgaacaacatgtacttctttctggtttcggaagcagaaacttgaaagcaagccaagcagtgttgaaagtgtgacaagtacaagaataatcagttcaatcagtcatcatacaaaataaaggttaagcactccagtggaaagtaccagttttcaaacaccaataaatggaaactctaaaatgcatatcaactcaggacacacaagtttgagaaacgactaaagcttatgagaaagtcaaaaggcacagacatttgtttaactgtgtggaaagaagtgcctttgtgtgaaagagagctcactcggcctgatgattgtggccttgggattgactcatcctgggaaagggactcacgcttaggactgaagggggccagcccctccacacctgtgggtatttcgattcaggtgggaggagagactgagaaaagaaataagacacagagacaaagtacagagaaagaactgtgggccgaggggaccagcgctcagcatacgaaggacccgcaccggcaccagactctgagttccctcagtatttattgatcattatttttactatcttagcgaggggagtgtagcagggcaacaggtggggagaaggtcagcagggaaacatgtgagcaaaggaat

SEQ ID NO: 53516 - DNA, 1276 bp, Homo sapiens
caggttcaagcaattctcctgcctcagcctcccaagtagctgggattacaggcgtgccctgccaccatgcctggctaattttttgtatttttagtagagatagggtttctccatgttggtcaggctggtctcgatctcctggcctcaggtgatctgccttcctcagcctcccaatgtgctgggattacaggcgtgagccactgcacccagcctacatatatatatatatatatgttttttttttaaagaaatagttctgtattatatgagcatggggaaaatatggaagtacatattaagctgttaataaattagtgtgaggagctgctgaaaagagtgacatggaaaggaaagggcataaggagatctgaagagaaagaaaaaagttcagctacacagcatgtatatatccatgcgactgaggacaaataattgaaagaaaaagtaaaaagcagaacatggttgcatttatgcatttatttaaaattacataattataatttatatcctttatatagaaataattaaacaagtttagcaagtaatttcaaattacaaagaaagccctaagaaagcactcaatataatcacttaaaagaccaaaaagtatgcatgataatttaaagcttagtaactgggaatggtcccatattgagacaggaatatttcctgacatccagagaattgtttcctataaataaagattttggtgcttacctctaagtgatgtctaggacatgtccaatcatgaatagaaaaacactgaacttcacagcgggtgtaaagggagaaaccattgccctttagacattggaaaagttcttatgttcttgcttgccttgtgatcttttattgtgaaacttgcaaaataaattgatcttggctgttacctgctcttttatatttaaccctccctcctatgctacagttaaagtcacagaccaaattatttatcataatcaaagcagaagtgggtcaagcacagatttaataactatttaatagaatttaatattgatttaatagatattaaatttaaatttaatatcgatttaatagaatatttaatagaaaaataataacaataacatatccctaaggaccctcaggcaaacagtagcccttcctgaaatgtgagaacctggccggccatgtgcttgtctttcagaaaagtgtctgaatctgatatgaaaattcagaagttattcatacaatatattctcattggaaaacttgaaccatttggcccaacaatcccattactggctgtacaccc

SEQ ID NO: 53517 - DNA, 10897 bp, Homo sapiens
gaatgaaagctgacagaaagaagcaagaagtcaggagctcacgttctgtgttcttccccgcggagatgagggctcctgatgagtgatcaaacgctagaagggggtgaagagtaccacattattaccaatgcccaggacagatgccaagctgggcagtgatggcgtgcagaaaagcctcaggggaaagacacagcagaaggggagagggagcatttctgtctttgattccacacctgggaaggaagcagagtcaggattagtgaacaatattcagaattatgcttagttggatcccttcatgtaagttctgagaaactgctgggtgatgcccaggctgaaatatgtgctgagatcagcagccttcccttgagcaaagtaaaggattttgtttttaacaacaaaacacatttcttgtgtaccctgagtgtttcccagagactctcatgacctagtgcttactatggaggaatgttttcattcagatgaaggaaagctttccatcaatgcaagcattgtgacaagttgatagccattgcaacccagctgtccctcagaatgagtgtgttcactggaggaggtgacaacatcttcatcatattaatgaaagcaaatgtctaggttttttagcaaaagcacgaactctgaaagaaagcatagttacacattaaccagcttgccctgtagcccacttccatgtaacttcttacactttggaatcatgtagtccctatcacaaggtcctaacctcatagataacatctcaaacagtaggaaatctcacgttttccactcgagatattttctgcatcatgcattataacagttctacagatgccatccaatctacagccccctccgaggaactgactcagccccacaatgcagttaccacatccttaggctttcatagtccacaccctggccagtcagcaccccgccctgctcctcagccccctgcctgccaaaattcccttgaaacccctgtctaaaactcctcagggcagtgaattcgaagtttcctcctatctcctcatttgtttgccttcaagtattaaatcccttctctgctcaacagccgctatttctgtgtgttgatcagttactgtacaatgagcacaaacacggggatcttgtacagaggcttgtcctgtcaggtttccactggaaagctgccataagcccaaggagaaagtgaggcacagacagcgtcttcctcaacttccttccagaggatcgcactacacacccaacagcaggctctcagaagtcttaacatataaaaacgtagtagataggtaaatagacttgcagaaggataggttttcctcccctcaattcttaacatattcaccctcactcatgcacattctcatgtacagtttcccagttaccctccctaatcagatgctcttaccaaactgtgtcctgtgtccggctgtgtgcagttgggggtgaagggaagggaggaaggaaagacaagagacttggccctgatggtcctcagtcgtggggagaccaatcttaggccatgcactattccttcattgccattgtcagggccatgtttgctacttctgggactgggttttattactttccttcaccttttctgctttgcatgggaaatgcagatacccatgtaggcacaaaagggcattttcttccctctctcttctgaagttttgataattagagtgtataaaacaaactgacaagtgaaaggttaatataaaaagacagcaaatttgtatatatgtacatggacatcagattcctgccaataagagactccagggtggtcctgatgacagagggtttcatcacatcctgaggctacagagagaacaggggcttggggtctctgggggaggtggagtctcaggtaatgggggagtggaagaggcacacatggtgagccaaggctgtccccacatagatgtgagcctctcaggggctcgccaagctgacctcaagaaggtaggtggcggcctgtggagaagcttctcagtcagacctttaaagtgtcaggatcttagtctgtttttcctggaagttaatctttccttgatccaataaggcatataaaggggtcctcagagaaaggcttttaccctctgttcacttcactaatgtacatttcctcagcacttacaaatctctgcgagagaagaaagcttttcaggtctatttgtgtgtcagcagcctctctgaattgtgacccctctgaatagccacataaaatatgccaaaaaagtacattttgagtggcacattttgctttccttcgccctgtataacacgtcttaaaaacaagagtgtaccatgaggtccacagccggtggccccactcctgcctcctgaacaaaagcttcaacaaaagggataatttaaaaatgagcagctctatttcatgggccactttccaaccacctggcactaaagtaaaagaccggtgcaactcagaacaggtacaatgatccaggcttgtgactggcaggtctagaatgccatagaagtcccctagtcactgtgagtcagcaagattttccagagaaggaggttggagataacactatggaatcacttttagaggatcacgcctggtggatgtgagtgccttattgaggggtggggtagagcagacttttctgacacgtgaaagcaaatgggcctgctccacccttcagtgcaaaccagccatctgaagctgctcttatttaatcatagggaaacagtcacttgcttcagtagaaaacattttcaacttactctactatcgcataaagcaaaggcatacagttgaaaccacttgtgcttttaacatttctggaccctcctatacctatgaataaatttaaatgacttgcttattccaaatgaaatccctatgttatttaggaaacatgtttaggaaaatactggactggagagaaaaacaactcacaaagagtcctgtactcttccggtgacctacttcacatttagaagtttggttagtttttatgccagtcaaaacatcctgccatgtaactatggagcatgttcagtaaaatcaaatgttttgcccacacagacaataaaaatgaactttaatgttttttgccttggtcttcaaaaatgcacccaaaggagaaacactgcatttcccaaacaggacaaagtgatttggtgccaatctcttaagaatgaagaatgaagtgtttagctagtttgagagtcaagaaaaattgagaaatgcagaactcaagtttcacactagaatatcgttgttacaagtaacaggaggaaagaaaaacccatagtcttggcattacccatcattttttagggaattttctataccttctctgtatattgatttttcaaccttggatgccaagaaggtataaaatcccatgtccaggcatcagtacacaccctcttctctcaatgagagaaaaatacctaggacttgtggggatacaaggaaccctttggccaagtgattagtctttggtccttaacactcagcctagtacattttgggctgggagaggggaggtggaaaaatggggaatattaacctcacgactaaacaaacactaatgttccttagtggaaaaaaggttatcctgttgaaccagcaaaatgactagaggtttctgcaaacggctagaggtttctgcagacattctagttcatcaaaatattttaattaattttaataatcttagcgaggtgctaaaagagggaccctaatgggatgtgagacaaacacaaagagattttagttttatgaaaagcaaactctatgacttcacaaactagattttgtattaaggtcgcaatgtagccaagtaattctgggcatgactgtttaaaacaggaatgtgaaaccagagaaaggcagccctcctttggctgggcgatggcatagcagaccaggaactttcccccacatggtgctctatacaggacaggggtgaatcagctcagctacaccatgtgccttagagactctgaacatgagacatgtggaaaaagaccctaaaaaataattacaggcagaatgcaggaaaaacagccagatggccaggcatggtggctcataccagtaattccagcactttgggaggctgagccaggaggatctcttcagctcagaccaatctggaaaacaccttgagaactcatctctgctaaaaagaaaaaattttaaaaattagctgggtgtagtggcacctgtctgtagtctcagctacttgggaggctgaagtagaaggattgcttgaacccaggaggtcaaggctgcagggcattgtgattgcaccattgcacttaaatcttggcaaaattttttacagtggcaacacaggttatgggatggagagaagaacaagcctggctagcaaaagaggtttcattatttagatgaaatctcccaggaagcagccctcagagagaacagctgagaaatgtttttctttagacctttaaaggtatcagattctcagttaatctttcttctatccaagggagattctcagagaaagcccagctgtaacaatgcaaattttctctacagatgcaagtatttcccactaaagacagctttttgtcccttctaatatttcctgcttttctgaatagctgtcttgaaatgtgtcaaataaatgtattttagtgtaaaatgttttggttcccttgaagctcaactttgagtccaactaagacaagaggggatttataaccatagagcacggtgaggtcagaggagaaaaattactaagagaaagcacccagagatgagggtggcagcagcaaggcagaaattctggaataccaaatgatatggtttggctctgtgtccccactgaaaaatcatgtcaaattgtaattcccagtgttggaggaggggcctagtgggaagagattgaatcacgggggctgactttcctcttactgttgtcataatagaattctcataagatctggttgtttgaaagcatgtagcacctccaccttctttctctctctctctctgcctctctctctctctctctctctacctccccctctcctgccagccaagtgaagacatgcttgcttccccttcaccttcctccatcatggtaagtttcctgaggcctcccctgccatgcctcctgtgcagcctgcagaactgtgagtcaattaaacctcttttctttgtaaattacccagtctcaggtagttctttatagtagtgggagaataaactaataccgaaaattggtaccaaatagtgaggcattgatataaagatacctgaaaatgtcaaagcaaatttggaactggatagtaggcagagactggaagagtttggagggttcagaagaagatggaaagatgaaggaaggttttaaacttcctagagaattggatacttctgtagaaaatgctgatagtgatatggacaatgaagttcaggctgaggatttctcagatggagatgagaaacttattgggaactggagtaaaggtcactcttcctgtgctttagcaaaaagattggcatcatcatgtccctaccctagagatctgtggaactttgaacttgagcaagatgatttagggtacctgactgaagaaatttctaagtgtcaaaggaagcaagatgtgtcctgcctgcctctaacagcatattctcatatgcatgcccaaagagattatctgacactggaagttacatttaaaagggaagcagaacataaaagtttgaataacttgagccccaccatgtagtagaaaagaaaaactcattttctgaggaagaattcaagccagctgcagaaatttgcaagataaagaagagccaaatgttaatagacaagacaatggggaaaatgcctccaggatatttcaaagaccttcaaggtagccccttttatcacagacctggaggtttaggagagaaaaataatttcatgggccaagcccagggccctactgctctgtgaagccttgggacacggcaccctgcataccagccacttcagccccagccatggctaaaagggcctcagacacatcttgagctattgttttagaggatgctagccccagtgtgttgtgacttccatgtagtgttaagcctgcaggttctcagagtccaaaagttgaggtttgggagcctctgcctagatttcagagaacgtttaaaaatgcatgaatatccaggaagaaggctgctgtgaagatggaacccttatgaagcacctctgctagggcaatgtggaagggaaatatggggtttgagttcccacacagagttcccactggggcactgcctagtggagctatgagaagagggccaccatcctccagaacccagaatggtatatccactgaaggcttgtactgtgtgcctggaaaagcggcagacactcagtgccagccagtgaaagcagccatggggcctttaccctgtatagccacaggggtagagctgcccaggaccctgggagcccacctcttgcattagtgtggccttgatatgagacatggagtcaaaagagattattttggagctttgaaatttattgactgcctttccgggttttggacttctatggggcctgtagcccctttgtttgggccagtttctcccttttggaacagaagcatttattcagtacccatacccgtattgtgtctaggaagtaactgacttagttttgattttatggcttatagttgaaagggacttgccttgtctcagatgagactttagaattggacttttgatctaatgttgtaataagttaagactttcagggactgttaggaaggcataattgtcttttgaaatgtgagaagaatgtgagatttggaaggggctggggcggagtgatatggtttggctctgtgtccctacccaaatcacatgtgaaattgtagttcccactgttggaagaggggcctggtgggaggtgactgaatcatggaggctgacttctctcttgctgttctcatcatatggttctcatgagatctagttgtttgaaagtgtgtagcacctccctcttctctatttctctccctccctctctctctctctctctcccctgccagcaatgtgaatatgtgcttgcttcccctttgccttcctccatgattgtaagtttcctgaggcctccacagccatgctttctgtacagcctgtggaactgtaagtcaattaagcctcttttctttgtaaattacccagtctcaggtagttctttatagcagtgtgagaatgcactaatgcacaagaatacagtcacagcaaagtttccctactctcatatttcctcagtactaatcaaatatgcccatgctctgctcttggccctctatgggaaggtggggttttcaatgccttacatcatctggggacccaaggctggaactgctccctcagtgaatcactgggggtggaattgagatagatagggggtccatatgcttaggacagtggatgtaattgggctgtaccaatgaggagtctgtgtaagggagggaagttctgtgtctacagaaaacaggggaaagttatgttactacaggtagaaattatgagcccctggggacatccaatatcaatcttcttttacctaatttggtacataactgtcaagtatgttttcctttatactggagaataatgttaaaaatgaaatctcctgccaatctaaaaaactcctccataaaaatgtagaaaagaaagaaaataattttcttattcaaaaggcattaaaccacactgcaatgtgcaccacaggtaaggtctaatgagattaaaaggcagaaatgaatctgacctctttaaaaagccaaggagtacagcctttacacacatcttctcatgataaatgataactggtcctcacataagaaggcctaacaacactgttttttgataacattctttcatggcttcatcccaaattcacctggtaattgggttagccatctgtgctagtcaatcacctgtatcactaggaaaaatgacatttctccatgacaagcaggcagttgtagcttggagcaagggacccagggagataggaattttccttttttaatgtttacatttccaaagagctggctctcttacccttaacaaaacactcacatgttgcaattctggtaagaggcttagttggcttttaaaaatatttacatgaatatcaaagggactgaggtaggatttacaaatacaattttttctcaaggaaataatctaagaaatgggcagagaagaaaagtctctatccttgttggcaatagaaaaaactcagttttaacaattgacccttagagaagtctagaaacttgaacatcaagcaaacatgatttctaaacagaagtctttaagaaacataattacagttacatgatctcctttatgaagtggatattgacctgatattttaatgatcaaatataagtgcttattttgacttatgccagaatttgctatgaaattaatcatatttttaaacctctaatacttagcttgctgctcagtactagaagccagaggtaagtgtcatattagtcagccttcattctcacctgactgtagatactaactatgaaagctagaaaaaatttctgctattgctaaagtcgaacataaacaaggttgaacactggttaaaatggtgacgatggattttattagtaatccagtgttgtaatagggaagaggtccagtatggactgaactgaactttgattcatacaaggtgactcaccattttaagggagaacgggtgagagggaaaggctgagcagggactgagtggaatcagcaaagtggaaaatttcaaaaaacagaaaggggctggttggccaatgtgattattccctctgggtttgcaaacaagagctaatggaagttgggctcctgccctgacatgaggattcaaagaatagtggcctgttttcagatctttaaactattttatgatctttccgttgaaactttttgtcagtgttaagggaaatgagagaaagtaccctattttcagacatctatgttgatacataaccaagaggttaaaggaaataaactaatggtgcaccacttggaaaaagtttgtcctgactcccagggagagaaagaaaaggagctagagagtcagcagttgttaaatgtgcttaacccacttgaaactggtgccacattacttagtcaagaggtggaggaaccaccatccctggagtataaagaggctgcaaacatagtctctccctcctgaactaggcaaggcactgattttggctggagatctaccaagctggggcagggcaatttcccctctgacaatatcccatgggaattaatcagcaagggacttcagctcgatattattgggcatacaggccttttcctacatctgatgtactgaattggaaaacttccaatcctttctacagggaagatcctcagaagatgactgaattgtttaccactatttttgccagccatcaccctacttaggctaatttgcaagccctcctaaatattatgcttactgcagacaagagaaagcaagcattaggcaatggaaaggaggaagcatggtgtcttcatgaaaaaagcccagatgataccccagaccctgataagattctacatgctgacccaaactgggtcccaagtgaggaggatggggcctggacaaatcatctggagtattctaaagggtgataggtcaggggtgccgagacctaaaagtctgaaaaaagtgcaggagcttcagcagaagcctaacaaggattccctcagagttcatggatgtatctgtcaaacatatagaaagcatacagacttagacctgcaggatcctgaaaatgtcagaatgataaacatgacttttatagagcaaaatgccccagacatcacaaagaagttacaaaagctggaggggagctattggaatgaacacttctcaattaattgacattgtgttcaaggccttataatagcagagaagccaaggaaaccaaggcactactgaaggcagagatactcatagctgccatgggaggaaacctgaagagaaaggaacccccaaggtggaaagggaaagtagaaaaagatcaatgggcttactgtagggtgacagtgctttggaagaaagactgccccaagctgagtcagggggagcccaagtcacttatggctgttaagtttggaaaaaatccaaggaggaccgagggtgcccaaagttcccaaaagctccaaccctgtccagcattaggatttcaccacaggacattcgggtaaaactgacagtagggaaacaaaaattggacttcttaattgatacgggtgatactgacatcccaaagtgtggactttctgacacctatgtcaatatggttggggtgaatggagagctaaaactggttggggggggggggttgtgacccttatcctgcaaggtgggcaatgaggtattgataatagctaatcaattattttatgtgtgggactgcccaacctctgtgcttggtagagatctcttgtgtaagttagaggcattaattgtctttgaaccagagaaacgtccaatgtgcctccaggtacccccagaatccagattgcagctacaggccctcctgatgaaatcaaaaactccacagcttgaagtagagatgattccaccggaagtcctcaataaggtaaagccggaagtatgggcttccgaccaactggggaggacaattaatgtgaatcccataaaagtcaggctaaaggaaggtatctgacctgattaaaataaacagtacccctaaagaaagagactctagaaggcatacagccagtactggttcgattcttttgacatggcttaataagactttgtcagaccttgtataa

SEQ ID NO: 53518 - DNA, 1247 bp, Homo sapiens
ttgccatctgcagacggcttgagtctgcagctccatggaccctctgacttatctcaaaggcagagggccagtgtgacagctttctatatcccaagctcttgccaggcatcccagaagagtcagatcacatgtgggctcaaaggatgagggcaagattttattgagtggtggaggcagctctcagcaagatggatggggagccggaatgggggaatgagtaggaaggtgatctttccttggagtcaggctgcccagtggccggactcttctccaatcctcctaggccaaattcctttcagtgtccaatgtccctcctcttctctctttctgtgtgtcattgttctgccgtccatctggttgcctccttgtctcttcacctgctggtctgcccaggaacttaggttttgggggtttttatagcagcagaatggaggtgtggtgggccaaaaggcaaattttcggggcatgaaaactgaaatgcctgttctcatttaggggcacggctatccaggcttgaaggtggggcctttgctgggaaaccaccctcttctacccagtatttccctgtctcctgtccatatcacatggagtttaaaccattcagaaataggtttttctcacctggttttatgctaaccaaaacaactataatattaatacttttctctttacaacctcccctgcttgttgacctatccaggagtggtcgcaaggtgtgcaagctgctgagtcaccctgactgcatcaacccgagtagattgtaggggtgaacaatagtatcgagaaatagtaaaatagcaaacagtgcagacaaggcagacgtctcaaaaagtgctcagtggaattgtcactcatccagagtcaacattggtgacacagttgtttcttcaaacagagttccctctatgaaaaaactgagcaaggtggaatttactttaaatttcatgggttgtgaaatttcaactaatgtcataattaaaacttcctacatattgccttaggcacctctgtcttttccccaaacttttctccagggcatcagcagcacctcagcctcttccacagcctcccagctcttcctttttcctcctgcacggcttttggcatcccaccattttccacagcaatgcaggctaactgtgagcttccacagcctctcacagacatgacttcacccacaagcctctgtgaggctcaagtgtacccctttttgttcacatagaacctcttcaccccagagaattgag

SEQ ID NO: 53519 - DNA, 2952 bp, Homo sapiens
gggagtggtttctctgtttctttgtatagtcgaacagatatttacttcttccaagaagatacaattcagaggaatttttatggcaaaagttagtggagacggggtggatgaaatctgttgggagagtatcactgttctgatgggcggccttgagcaccacactgtaatactagacctggcctaaagagaatttctcatgtactattctcacctctgggaaaattacctgaaacgataaaatatcctcattttaagaaaaaaaaaatactagaacctaacaaggaaaatttaaattctttttctttgttaatatgggtcaaatttgtatcaaaatattgtaacagaaaaatttcttgtttctctgacaggaaaattaatggaatagattttcttttctagacttagctatttctacactggaagaaaacttgtatctcaagactgtcttgggaatacaatgtgtgtgaatagggactagttacataaaatttgggtttcacatttctgatctatacaatataaggatttacaaagggacattttgaagaccattgacaggagtggtttactttgtaatataaattgacatggagaggaagtaaagatgaggataccactaaagctccagctttggtaagcctttgagtactcatacagcaaagaaatgatcaaggatggtatgaggagagggctgtgagacccagtatctagttccttgtaattctatgggaaaaagaaagcctctgaaatactttccagataggaaaacagtttgctttgtttctgtttttgtcatttaaaagatatactttcaaatctgtatccaaatttgttacgtaagtcaataattgtaaatttcactgcaatcatatgtttcctaaaagagttgccttgaacttatggaactgaaccccattttgctaatcacttactccttgcagtctatttcttatacaaatcaatatccttagagtatacatttttacacctactatttagttctgtcatgccgacagaatggctaatggctgtgtagaaaagacttgacataatagactgctatccatagacaggcctgtttcccatataaacctgctggtatctgataaggtggatttctcactatttcctaactgataagaatggtggctgtaagtaactgcttgtgcaaactgcggagtttctgtgcacctgctttccttttggagacttttggaagttttgtgcctgcgaagcagagtgagtcaatgtaaccagtcccagacaaaatcttagtaatggagtatgtagagagcatctcttgtagacaacagttcacatacattgacaaaatatgattccgggtaaagtcagtgcattctgtgcaatatggtgggagaggaatcacaggagcttacactgtattccttcatatttccttccatgtggctatttcctcgtgttaatttctttttttgtttgtttggtttttgttttgtttttctgagatggagtctcgctttgtcgtccaggctggagtgcagtggtgcgacctcagctcactgcaagctccgcctcctgggttcacgtcattctcctgccccagcctccccagtagctgggactacaggcgcctgccaccatgcccggctaattttttctatttttagtagagatggagttgttaaccaggatggccttgatctcctgatctcatgatccgcccagctcggcctcccaaagtgctgggattacaggtgtgagccgccacgcctggccattccttgtgttaattttaccatactaaaaataattaagattatatctataactataggttgcatcctgttaatttttccaaaaaatgactgaacctgaaattgttttggggacacttccaaactagtggtcaagcagtgatttttctgggactgcagaagttcctgctgtgcccaacctttattactaactgggaaagacccagggagactgggatgggctcatgattctacatacagaactcatccaagaaaggaggaaaagctgatttttgtgaacgtcgctacttgtgcctgaactaactctcaggcacattagtcagaaaatactacctatggttactcccccaggttcctaaaagtaaagctttagaggccaccaaattggcaattgaagctggcttccgccatattgattctgctcatttatacaataatgaggagcaggttggactggccatccgaagcaagattgcagatggcagtgtgaagagagaagacatattctacacttcaaaggtactgtgcctatgatgagcttgtgtgcacatgtatttattgtgattgtgtggaggtggcagttctatgactggatccatagtatagggtgaattgtgcttatttattacgatttattcacacttactcatgtattaaaactaatatcaaaggcaggaagtgaagatggctttctcatctttgcagtgttccaattcatgccttcaaagtgcctttactttttgagctcagcacagatcaatatggtttaacatagactatagaatcagaaaaaatcctaatcatattatattatttcttacctcctgggtgagtttcttacacttgttatgattctcagtttccattattatgttgatcatagagagagaaagcaatataagcaagctctgtgagtattaaagaataacgcctacattatctcaaattgtgtccagcccaagttgacatattaaaaactctgtttgcttcctcagtttctaaaccacaaagatacttaatcttgcccattgggctgaatagatgaaataattacactactaacatgagttgtaaaacttaccaaagataattcagataatgggtatgcttatgatttgataacaacttttaccttttgagtaatttcactctttcattcaatatatgtactaactatatatccaacatattataa

SEQ ID NO: 53520 - DNA, 4958 bp, Homo sapiens
gatgtcaactatgagatctcatcaagaactaagaaaatggagaaaagtaccagatggcagatgggaggcagtgtgagcatgcctctcccacttggagattagtgtgtagagatttacattgtgaatttcttttcaagaaccaatgcagagacttaacagatatatgaaaaaatttcacatacactctgaagaagtctcaggcacaatcctactccatgaaataagaaaaaaccatcacatccccagattctgaggggagagagttcactccagagcatacatccccactggggatctggaaattcaggccacaagagaaggctttgatcctgtgcggacaagtgccttgagcagaatccacaggggagagctggaagtgcatggcagatatgagcacagaagctgggtgtccagccttgtgggcagaccgggagggatgtggcctgaaagccatggttattatctcagcgtgtaagctgatgatctgaggctggtcagagttctgtgcgcagactgcctggatgtaaacctggcactgttagcagagcactgcatgaatgaaaggaatgaaaatagccttgccaactgcataggtgctgggtgaggctcactgtggggggcgcacggcaagctattcaacattacgtacaggcatttgaggtcggggcatggaaaaatactgaggcagtgtgtgtatgttatttgtgctgagaatgaaactccttgaccttgaaaacaggacagggagtggtgtgtgtgctgtgataaggaatgctgaaaacggtctcctgagaatgcggtttgagtgcttttacaaggccacaggtgtctcacgacctgacctcataaagccatctagtggatgtttgtggcttaacaagccccttcaataagtacttggcggagggatgctggggggaccttcttagaagagctgcgccccacccccctccctggacagcccagctacaattgtctgagaactcactgcaagctgtaagcggcccactacttcccactcccttttttgaactcttctgtgcagcagaggcaattaaactctcctctggaacattaccccagcagcctgagaaccaccccttggcgctcacaggggctgcagcctgccttatccaaggacagttagagtgcagacccacctaaccctggacccactggtggtacccatccacccatcctggtagcttaacacaaagatacacttttaggagcttcatagcccctcttcccccattgcctgagaaaccactttccctgggcaacttagggcaagctcaaatcccactgctaccaccacagctggtgctcttttgcaagtgccacctcctagctggagaccaaccagcacagtccacacagcacctcaaggaagaataaatagaactgttcccaggaaggagaaaatgcctgcatgagctcagctgttaccactgcgtaccacaccctgaccagtcagaggtcttgagtcggtccgcatgacaagttcaccgctcgcataaccagcattcaagaaagccagcacactaagcctatctacagccagggagtctcagagtctacgtcactcccctgccacctcaatcagagctggtgctggtatccactgctgggagacttgtgctgaggtgaagcctgggctggatggctggaggatgaagaactgcacggaggagatggaggcacccagacagatgccccatggacatcctgaagcagagctgcctcactgccctgcacacacatgagagcgcagccaggaacagaaggactgggcaacattcaggcggagcccaggccaattttctaaacatggaatatgagttaaataaatggcttcgtattaaagcctgtatgttaagagggtttgctttatatcccaaagtattagtataatcatgatctcctatgcataaaaacaggacaaacaacccaataaaagagtcagagagttaacaagcgcttcacaaagataaaactctaagagaataaatataagaagtatatactatgtgagtatatatggaaaagaaagaaattcacaatgatttggagactaaagaacacctaattaaactccttgtttatgaaaatgaagaaaaggagatgtccctggcagagggatacaaggtaaattgtcaactcaatgctgaaacccaaatctcttgtttgggtcccatcctaattctctccacccatgctgtctttcctgtggtaaagtggaaaacccttatgatgaacacaaagcatttgtgcatagaatatgccagggaaaaggagatggcccaagggtgtcctcagaaccttacaagaagcacatgtttgaaggacactatgcaggagccctgaggcccacagccccgctcctcacctgcacgttctctctgatacgctgctcattgtagctcttggccaggaccaagaaaggagaggaggctgatggcattcacctggagagtgcttctcctgtgggggtgcaatcatcatgaattgttccaggaaggctctctataggtgcatccactctgcgctcctgtgggataagccccagctgtgtctacagtggtgcaccagcggggaacaaggactgcttctccaggacctttctcagtcacagaagctgcctgcctgttggggcagaggggcaggcttttcctactgcacccagctctgcagttgtttgtctgctgcaagaaatttcccaacagtggaaagacctgggattcaagggctgccattcaggtttttctgtcccactggtgttcccttatgtggtactcttttccctaccctcaaaatgggacttcgagagagctggactacagtgattgctactgctcttctgggcctagccgcccagtgggctcccagactccaggctggtgctggatttgtttgcaaaggatccagtgatgtgacctgtcgtcaagtctcccagcagtggacaccagcaccagctctgattgaggtagcggggagcaacgtagactcggagatgccttggatgtaggtaggctcagtgtgctggctttcttgaacactggttatgtgagcggtgaacttgtcatgcggaccgactcaagacctctgattggccaggatgtgatacgcagtggtaatagctgagctcatgcaggcattttctccttcctgggaacagttctatgtattccttgaggtgctgtgtggactgtgctggttggtctccagctaggaggtggcacttgcaaaagagcaccagctgtggtggtagcagtgggatttgagcttgccctaagttgcccagggaaagtggtttctcaggcaatggggaaagggggggtatgaagctcctaaaagtgtatctttgtgttaagctaccaggatgggtggatgggtaccaccagtgggtctagggttaggtgggtctgcactctaactgtccttggatgaggcaggctgcagcccctgtgagggctaaggggtggttctcaggctgctggggtaatgttccagaggagagtttaactgcctctgctgcacagaagagttcacaaagggagtgggaagtaatgggtggcagcgagcttcacccagcacgcatggagttggcaaggcagttttcattcctttcattcctgtaatgctctgctaacagtgccaggtttacatccaagcaatctgtgcacagaactcagacaagctccaggtcatcagctttcccacagagagaataaccatggctttcaggccacgtccttcctggtctgcccacaaggctggacacccagcttctgcgctcatgtctgcaatgcacttccagctctcccctgtgggttctgctcaagggcacgtgtcctcacttgagattatatcacaaaattcagttgggagcttcttttaccctgtgatccctctctgagctcattagctgacttcgccaagggtccctgtgacatgtagtcaggaatggcttccctgagttcacactcctgctgcttctatttgtatatttcactggctcactaaatccattcccactctgcataggatcaaagccttatcttgtggcctgaatttccagattcccagtggggatgtgtgctctggagtggactatctcccctcacaatgtggggctgtgacgttttttgcttgtttcatggagtaggctggtgcccgcttcttcttcaaagtgtatgtggatttttattctttttttggtttttgtgttaagttcctgcatcagttcttgaaaaaaaattcacaatgtaaatctctacatactaatctgtccttcaaagtgggagaggcatgctaacaccgcctcccatctgctatgtggtacttttgtccattttcttagttcttgatgagatctcatagttggcatctgttaccttttgctgcccctgtacttgttttgtcaattgtgttatctctgatttctttgagtagtttttaaatttttcttgtagagatctttcccctccctggctatctatattcctaagtatgatgttcatttactattccaacaatcctagggcccttaagatttaagctacatctacaatgcaagtgttctataaataaagcaagaaatcctagatatttaagtcacatctccttaaataatggtttactgaatattttaagaccactgttaagaagtcctgctcagcaaaagaaaaacaattttttgaaaataggactatgccgggaccagctcggtcggggagatgctaacccagcggcgctagaggaattaaagacacacacacagaaatatagaggtgtgaagtgggaaattaggggtctcacagccttcagagccgagagccctgaacagagatttaccgacatatttattaacagcaagccagtcattagcattgtttctacagatattaaattaactaaaagtatccttatgggaaatgaagggatgggccgaatta

SEQ ID NO: 53521 - DNA, 519 bp, Homo sapiens
atcactcatgctattgtttgtggcttaagaatgcctttaagcagttttctgccctgagtggaccaggtgttccttgccctcattcccctaaacccacgaccctccagtgtgggcgttatggccatcatgaacatgtcacagtgctgcagagattttgtttatggcaagttttggggccagtttatggccagattttggggggctttttcccaacaggactgccttttggcaatgtacctaatctgatagctttcttatagagaggctgaaacagattactgctgtttccgtgcctgctaatacaacgtgcattctgtttcccatgggtcatagagtaattttgatgttcttgttttatggttcaggaaatacatttcataaatatatggctaccatagtgattggtctgaagaatctgtgaaaagaaaattgaaaatcttctgaaaaagatttactattctagatgccattaaaaccattcatgattcgtgacaggagggcaaaacatttacttgaaca

SEQ ID NO: 53522 - DNA, 1260 bp, Homo sapiens
ctgtttgtcctgagatttcctgtttggttgactcaattctctggggtgaagaggttctatgtgaacaaaaaggggtacacttgagcctcacagaggtttgtgggtgaagtcatgtctgtgagaggctgtggaagctcacagttagcctgcattgctgtggaaaatggtgggatgccaaaagccgtgcaggaggaaaaaggaagagctgggaggctgtggaggaggctgaggtactgctgatgccatggagaaaattttggggaaaagacagagatgcctaaagcaatatgtaggaagttttaattatgacattagttgaaatttcacaacccatgaaatttaaagtaaattccaccttgctcagttttttcagagtgaactctgtttgaagaaacaactgtgtcaccaatgttgactctggatgagtgacaattgcaccgagcactttttgagacgtctgccttgtctgcactgtttgttattttactattgctcaatactattgttcacccctcaagctcctggggttgatgcagtcagggtgactcagcagcttgcacaccttgcgaccactcctagataggtcaacaagcaggggaggttgtaaagagaaaagtattaatattatagttgttttggttagcataaaaccaggtgagaaaaaactatttctgaatggtttaaactccatgtgatatggacaggagacagggaaatactgggtagaagagggtggtttcccagcaaaggcccccacctttaagcctggatactcgtgcccctaaatgagaacaggcatttctgttttcacgcccccaaaatttgccttttggcccaccacacctccattctgcccttatataaacccccaaagcctaagttcctgggcagaccagcaggtgaggagacaaggaggcaaccagatggacggcagaacaatgacacacagaaagagagaagaggagggacattggacactgaaaggaatttggcctaggaggattggagaagagtccggccactgggcagcctgactccaaggaaagatcaccttcctactcattcccccattccggctccccatccatcttgctgagagctgcctccaccactcaataaaatcttgccctcatcctttgagcccacatgtgatctgactcttctgggatgcctggcaagagcttgggatatagaaagctgtcacactggccctctgcctttgagataagtcagagggtccatggagctgcagactcaagc

SEQ ID NO: 53523 - DNA, 6446 bp, Homo sapiens
atcagtttagatattggttctcttacctttggacagatgcaaggctctcataagggcaatttactcagccttttgcacagaagtccctgttgggagagttcttgcagctattacctccaagagagtcactatagcctagacagcattcctccttctgttggtgactaggctgcttctgtccacaaagagcatccagtctccaccctggagggctgtgtccttcagatctggtcgcctggaagactcttgatctataaccactaggcagttgtgtactagttcctttggttgcccagtaggtgtcaacaaagtggcagggtctaaggctccagtgccctgtagtttcattagacattacctatggtgcacattgcagtgtggtttaatgccttttgaatgagaaaattattttctttcttttctacatttttatagaggagttttgtagataggcaggagatatcatttctaacattattctccagtataaaggaaaacatacttgacagttatgtcccaaattaggtaaaagaagactgacattggatgtccccaggggcttataatttctacctgtagtagcataaattccctctgtgttctgtagacacagaactaccctccctaacacagactcctcattggtacagcccaattacatccactttcctaagcatatggaccccctatctctgtcaatcccacccccagtgattcactgagggagcaattccagccctgggtccccagacaatgtaaggtgttgcaaaccccaccttcccatagacggccaagagcagagcatggacatatttgattagtaccgaggaaatgtgagaatagtgaaactttgctctgactgtattcttgtgtattagtccattctcacactgctataaagaactaaagaactacctgagactgggtaatttacaaagaaaagaggtttaattgactcacagttccacaggctgtacagaaagtatggctgtggaggcctcaggaaacttacaatcacggaggaaggcaaaggggaagcaagcatatattcacattgctggcaggagagagagagagagagaaagaaggtggaggtgctacacactttcaaacaactagatctcaggagaaccatatgatgagaacagcaagagagaagtcagcctccatgattcaatcacctcccaccaggccccttccccaacagtgggaactagaatttcacatgtaatttgggtggggacacagagccaaaccatatcactccgccccagccccttccaaatctcacattcttttcacatttccaaagataattatgccttcctaacagtcccccaaagtcttaacttatttcagcattagctcaaaagtccaattctaaagtctcatctgagacaaggcaagtcccttccaactatgagtcataaaatcaaaaataggttagttactttctagatacaatggaaatggggtattgagtaaatgcttctgttccaaaatggagaaattggcccaaacaaaggggctacaggccccataaaagtccaaaacccagaaaggcagtcaataaatttcaaagctccgaaataatctctattgactccatgtctcatatcaaggccacactaatgcaagaggtgggctcccagggtcttgggcagctctacctctgtggctatacagggtaaaggccccatggctgctttcactggctggcattgagtgtctgcagcttttccaggcacacagtatgagctttcagtggatataccattctgggttctggaggatggtggccctcttctcatagctccactaggcagtgccccagtggaaattttgtgtgggagctcaaaccccacattccccctccacactgccctagaagaagttctccatgagtgttccacccttgcagcaggcttctgcctggacgtccatgcatttttatacattctctgaaatctaggcagaggcccccaagcctcatctcttagtctctgagcaggcacaggcttaaaactacatggaagtcaccacacattggggctagcatcctctaaaacaatagctcaggatgtatctgaggcccttttagccatggctggggctgaagtggctggtatgcagggtgccatgtcccaagacttcacagagcagtaggaccctgggcttggcccatgaaattatttttctctcctaaacctccaggtctgtgatagaaggggttaccttgaaggtctctgaaataccttggaggcatttttccctattgtcttggctattaacatttggctcttctttactcatgcaaatttctgcaaccaccttgaattcttcctcagaaaataatattttcttttctgctacatggccaggctcaagttattcaaacatttatcttctgcttcccttttaaatatgagttccagtttcagataatctctttgggcatgcacgtgagaatatgctgttagaggcagccaggccacatcttgcttgctttgatgcttagaaatttcttccatcagataccctaaatcatctcactcaagctcaaagtgacacagatctctagggtaggaacacgatgatgccaatctttttgctaaagcataggaagagtgacctttactccagttcccaataagtttctcatctccatctgagaactcctcagcctggacttcattgttcatatccctatcagcattttcttcataaccattcaagtctctaggaagtcaaaaccctccttcatctttccatcttcttctgagccctctaaactcttccaatcacacctactacctatccagttccaaatttgctttgacattttcaggtatctttatatcaatgcttcactatttagtaccaattttctgtattattttattctcccactgctataaagaactacctgagactgggtaatttacaaagaaaagaggtttaattgactcacagttctgcaggctgtacagaaggcatggcacgggaggcctcgggaaacttaccatcatgaaggaaggtgaaggggaagtaagcatgtcttcacttggctggcaggagagggagagggagagagagagagaaggtggaggtgctacacactttcaaacaaccagatctcatgagaattctattatgagaagagtaaaaggaaagtcagccctcatgattcaatctcctcccactaggcccctccttcaacaccgggaattacaatttgacatgatatttcggtggggacacagaaccaaaccatatcgtttggtattccagaatttctgccttgctgttgccaccctaacctctggtgcttcctcttagcaattttttctcctctgacctcaccgtgctctatggttataaatcccctcttgtcttacttggagtcagagttgagcttcaagggaaccaatacattttgcactaaaataaatttctttgacacatttcaagacagctattcagaagggcaggaaatacgagaagagccaaaaagctgtctttagtgggaaagacttgcatctgtagagaaaatttgcattgttacagctgggctttctctgagaatctctcttggatagaagaaagattaactgagaatctgatacctttaaaggtctaaagaaaaacatttcccagctgttctctctgagggctgcttcctgggagatttcatctaaataatgaaacctcgtttgctagccaggcttgttcttctctccatcccataacctgtgttgccactgtaaaaaattttgccaagatttaagtgcaatggtgcaatcacagtgccctgcagcgttgacctcctgggttcaagcaatccttctacttcagcctcccaagtagctgagactacagacaggtgccactacacccagctaatttttaaaatttttccttttagcagagacaagttcttgtggtgtgttccaggttggtctgagctgaagagatcctcctggctcagcctcccaaaatgctggaattattggtatgagccaccacgcctggtgatctggctgtttttcctgcattctgcctgtaattgttttttagggtctttttccacatgtctcatgttcagagtctctaaggcacatggtgtagctgagctgattcacccctgtcctgtatagagcaccatgtgggggaaagttcctggtctgctatgccatcgcccagccaaaggagggctgcctttgctctggtttcacattcctgttttaaacagtcatgcccagaattgcttggctacattgtgaccttaatgaaatatctagtttgtgaagtcacagaatttgcttttcatgaaactagaatctctttgagtttgggagtctcacatcccattagggtccctcttttagcacctcactaagattattaaaattaattaaaacttttggatgaactagaatgtctgcagaaacctctagccattttgctggttcgacaggataaccttttttccactaaagaatattagtgttagtttagtgatgaggttaatattccccatttttcccctctcccaacccaaaatgtactaggctgagtgttaaagaccaaagactaatcacttggacaaaggattccttgtatccccacaagtcctaggtatttttctctcattgagagcagagggcctgtattgatgcctggacatgggattttataccttcttggcatccagggttatacaatcaataaacagagatggtatagaaaaatcccttaaaaatgatgggtcatgccaagactacaggattttctttcctcctgtcacttgttacaatgattttcaagtggaaacttgagttctgcatttctcagtttttcttgactctcaaactagctaaacacttcattcttcattcttaagagattggcaccaaatcactttgtcctgtttgggaaatgcagtgtttctcctttgggtgcatttttgaagaccaaggcaaaaacattaaagttcatttttattttctgtgtgggtaaaacatttgattttactgaacatgctccatagttacatggcaggatgttttgattggcataaaaagtaaccaaacttccaaatgcgaagtaggtcaccggaagagtacaggactctttgtgagttgtttttctctccagtccaatattttcctcaacatgttttctaaataacataggaatttcattttggaataagcaagtcatttaaatttattcataggtataggagggtccagaaatgttaagaacatatatgatttcaaccgtatacctttgctttatgggataatgtagtcagttgaaaatgttttctgttgaagcaagtgactgcctcattattaaataagagaagagcagcttgagacggctgtttgctgagcgatgtgtggagcaggcccatttgctttcatgtatcagacatgcctgctctaccccacccctcattaaggcactcacattcaccaggcatgatcatctaaaagtgatttgatagtgttatctccaacctccttctctggaaaatcttgctgactcacagtgactaggggacttgggtggcattttagacctgccaatcaccagcctggatcattgcacctgttctgagttgcaccggtcttttactttagtgccaggtggttggaaagaggcccatgaaatagagctgctcatttttaaattatcccttttgttgaagcttttgttcaggaggcaggagtggggccaccggctgtggacctcatggtacactcttgtttttaagacgtgttacacagggtgaaggaaagcaaaatgtgctactcaaaatgtacttttctggcatatttttatatgactattcagaggggtcacaattcagagaggctgccgacacacagaaagacctgaaaagctttcttctctcgcagagatttgtaagtgctgaggaaatgtacattagtgaagtgaacagagggtaaaagcctttctctgaggacccctttatatgccttattggatcaaagaaagattaacttccaggaaaaacagactaagatcctgacactttaaaggtctgtctgagaagcttctccacaggccgccacctgccttcctgagagcagcttggggagcccctgagaggctcacatctatgtggggacagccttggctcaccatgtgtctcttccactcccccattacctgagactccacctcccccagagaccccaaacccctgttctctccgtagcctcaggatgtgatgaaaccctctgtcaacaggaacgccctggagtctcttatttgcaggaatctgatgtccatgtacgtgtatacacatttgcatgtctttttatattaacctttcacttgtcagtttgttttatacactctaattatcaaaacttcagaagagagagggaagaaaatgccctttgtgcctacat

SEQ ID NO: 53524 - DNA, 1685 bp, Homo sapiens
ccggctgctcagagtgcgggcccaccaagcccctgcccaccgggaactccagctggcccgcaagcacggtgcgcagccccagttcccgctcgcgcctctccctccatacctccctgcaagctgagggagccggctccggccttggccagcccagaaaggggctcccacagtgcagtggtgggctgaagggctcctcaagtaccgctaaagtgggagcccaggcagagtaggcccccagagcaagtgagggctgtgagggcttgccagcatgctgtcacctctcactgtgacccagtcctagccaatgccacataagaaggaccaatgctaggggcttctaggaatgattcctcacttctagaaagaaatttttaaaatgaggtggcctttcttctgcaagtagctattgtcctgctgcagtgtgagttctaaatttgcttcagcagcctccacccagcccaaagataatatcaatacacagaagaagaagagtcaggagacgatgagagaagttctggactccaaggaacaacactcagagcttgccttccctcagacttcttgttatggtggtaacagatttctattaaatttatattaattataaattgttttcttgacctggttttatgctaaccaaaacaaccataaaagttaataattttctctttaaaacatcccctgcattttgtcccaatccaggattagtcagaatagatgaaaactgatgagtcatcctgagagcatgaaccccagtggattgtaggggttgactacagtattgagaaatattaaaataacaaaaagtacagaagaggcagggatctcaaaaagtgctcagtggaaccaccacttattgtgagtcaacattcaggacacagttgtttcttcagacagagttcactctatgaaaacactatgagcaaggtgggttttacttaaaatttcatcgtaatttttacattgtaaatttacattgtatattttatccagtgtcataattaaaatttcctacatattcccttaggcatctctggctttttcccaaaatttcctcccggggtatcaacagtgccccctcctcctccacagcatacctgttcttcctattccctcctgcacagcttctgctgctcgactgtttccacaacaatgcaaactgactgttagcctccatggctcctctgctcaacagccatgccctcacccacaaacctctgtgaagttcaagtataccccttattgttcacatataaacccctcaacccagagaattgagtcaacaaaacaggaaacctcctcaggacaaacactgctgccaatataaatttgtatttatttattttaaaatttattttattttcaatgtgagtgtcggctcccatctccctgtcctcatgttcctttcgtaagactgagaatttctgtggtctcctgaggtcagagtttttcaccagattgtataccagctgaggaaaatttgaattcttatcaactccacaaacctatgctagtcagacagaagcccccatgtgctaactgtcttgtcctttgagccttgggaagtgacaggagacacacctggtcactggaggaaatcatgagtagagagagaaacaaatgaggagagttttgagcctgagccctttgtgatacatgagtggttaaggcttggcacttttcac

SEQ ID NO: 53525 - DNA, 3134 bp, Homo sapiens
gaaatttatatccaatggacacattaaaaggcattccttcttcatctgtttaagccggaaatctgtcatcattagggactggcatgaatgcactgtcattagtataaacttccactgaggaatccatccatgaaacagatcgaataagaatggaaacgggacatatgccagtaggtgtaattttgagttgctgcagccccgggtatacttaccactgcagtaactaccataaaggcagccaagataacattacccatagtttttggaatccctttgtcctgtaggtgtctctcaacctcttcggacattacttttatctgacccccccacatcagcagggtggaattttagcattgggagttatagggcgaggctgtgaggcaaacttgagatataaattgtattagtcaggtgacgagccttgcgttttgatttctggcggctcttctccttttgtttctgatggttcttcagggctggagtcatggtacaaattcagctgatgggagagaacccaaacaggttgttggtcctttcctggggagacacaagcaaaacccctactccatgttattacagtgcgtaattcccatttattagtttttgtgtccttccaccatacttgcttgcctttttgtgggtcaaatttattaccagcaaagtgttgttctgctgccatgaaaggttggttcttggccaaatttaaaaattttaatgtgaacagagctaaatttatctgagcatggggagtactgacatcccctttctttttgttaccttgtttgcgaagctggtccttgagaggtttattagctcattccaccagaggctgtccttgagaattatagggaattccagtagtgtgagtaatgccccatgcttgagtgaactttttaaaggcaatgctggtatagctgggaccgttatcagttttaagcttagcagggcagcccataactgagaaacaagaaggcatatgtcatttaacacgagcagtactttctcctgtttggcatgtaacccagatgaaatgggaaaaggtgtcaagtgttacatgtatgaaagaaagtctcccaaaagctggaaagtgggtcacgtccatttgccagagtgtgttgggggaaaagcctctaggattaactctggaaggaagtggttgtaggattaactccggaaggaattggttgtaggattaactccggaaggaagtggtgtaggattaactctggaaggaagtggttgtaggattaactgccgaaggaagtggttgtaaaattaactcttggccagagggacagtgccgtactatggtttttgcctgtttccatgtgggagggaacttgcttctgagtcctgcagcattgacatgagttagggcacgacaatttcgcatgtccataaaaatggatgtggctaaagcatcagctctggcatttacagctgaaagaggtcctggaagtgatgtatgggctcaaatatgagtaatgtaaaagggggcacagtgtgctctgagaactgtctaagacttttgaaaaagtgaaagtaaactttcctcaggcaaaaatttaacaccgtttctatgttgtgggcaacatgcacgaggtatgcagaatcagaaacaatgttgacagactcaggaaaatcctcaaggacagtcataacagtgctaagttcagctcgctgtacagaaataggtcctgtgttaagaacgcgttcccatggtcctgtgtatacagcacggccattagaggaagcatcagtaaatatagtaacggctccagttaatggaatacttctggtaatattaggtaaaatccaggaagtgagtttcaggaactggaacaattttacattagggtaatgattgtcaattataccagggaaatgggccaaatttacctgccaaataacacaatttgtaaatgcttgtcagagttgttgacggtttaagggaagaataattttttgagattcctgtcccaaaagtcataaaagatgggaacaggcttgcctaatgagggtagaaatttagtcaaggtaaatagtaagtgtccttagagagctatggggaagaaaacaccattcaattatatcatgttcctgagtgatgatccctgttggagagtgttcagtgggaaaaattaaaatagtaaaaggtaatttgggattgaatctagtgacctgagaccattgaactgtttgttcaatcaatcataactcagactcagcctctctgagtctgaggtttctgtaagaaaccttttcctgtgtaaatctggatccccacataatgtggcaaaaaggtttgacatagcatatgtagggatgcccaaagaagggcaaatccaattaatatccccaagtaacttttgaaagtcatttaaagtttttaaggcgtctctcctaagctgaactttttgtggtgtaatcagcttgtcttccaactgcatgcccaaatattgaaaatgagaggtagtttgaattttttctggtgcaatagtcaaacctgcttctgaaatggcctgttgaatcacagaaaagcaggaaatcaaaatggtgtatgggggggctgtgcagaggagatcatccatgtagtaaacgatgtaacatcggggaaactgatccctgacaggttgaagcacacgccccacaaaatactgacaaatagtgggactattaagcatgccttgtggtaggactttccaatagtagcatgtagcctgagcgacattgttgagggaagggaccataaaagcaaacttttcaaagtcctgagaggccagtggaatgttaaaaaagcaatctttaagatctatgaggattagaggccaatactcagcgagcatagagcgggagggtaagccagattgtaatgtccccagaggttgaagtacagcattaactgccctaagatgagtgagcattctctgttttccagatttcttttggataacaaagacaagtgaattccatggagagaaagattcctcaatgtgtcccaattctaactgttccaggactaaattatggagcgcctccagcttattttttgggagcggccactgatccacccaaactggctgagttttcaagtcaaagggatggcatctggaggcttgacagtgactgcttct

SEQ ID NO: 53526 - DNA, 908 bp, Homo sapiens
gggtgaacagtaccagtctgtccctctgggccagtacaatgtaaaatagtggaactttcataaacctcagtggcctgaccaactcccaccaacccggtgaatgtgacttctttgggccagtgacgaggccattggtgtaaagcaataatggaaacatcagcacccaggtcaatcatgcccatgaatttctttctgtgtatatgcgtggaacaaacaggtcaggtgtcagaaattttattagcccagtaagccactttaccctgattatctgcactcctaaaacctccagttcttttatgagaactggatctgagtggaatgtacagcagaagaagaagttgagcaattcaatctcctgctgaagcttggcaaggaactgcagaactaacagtaatgtgtatttccccagagtaatcagagtcaattacaccattatgtacctgaacaccttttaaatttaagcttgagtgactgagcaataaaccaacagagccaggtggcaagggcccaaaagcacctgtgggaacagctattggtggctctccaggcaaaagggaaatgtctctaatacagcagagatctactgctgcagatcctgtggtggcgggggacaagcattgaaatgagatccttgttggggttgtgacatctatgcttgtggcatgaatggttgaagtggaaactgagtggttggatcgattggttgagctggggatgccctcatctggctgcaaggccaaggctgggagttggggaatgcttcattgtctggaggggcctggggctggcccctcttaccatttccctggttttgaagtggctgtaaagggttgccattagtgtcgaatttcgagtggcagtgagctgtccagtgattgcccttatggcatcttgggcatggtgtggat

SEQ ID NO: 53527 - DNA, 3548 bp, Homo sapiens
tgttcaagatgagcctggccaacatggtgaaacccccgtctactaaaaatacaaaaattagcccagcatggtggcaggcacctgtagttccaactgcttgggaggctgaggcatgagtattgcttaaacccaggaggcagaggttgtggtgagctgagatcacaccattgcactccagcctgggcaataagagtgaaactctgtctcaaaaaaaaaaaggaaaagagcccttccgccttctgcgcagggcaaatagtcccattcattcctaggccttcaggcaatacctgggagtgactccagccaattgccttcaattttcaaggagctgctagaaagcagttgttgagaggctgaaaatgaaagaaaggaaaaaaagagaagacccaggtcccttaagcaaactggttggtgacggttaggtgccttcacatggacacccttagttttcactggccatagccagaattctgcagttttctctgtgtttaggcactgcccaccaaggagagattcccctgtatgaaacagaaaggaaaggagagaaataaatcctaatctttgggcctagcttctgctggaatttctcctggctggctcagcaaaatatgttaccagtggagggtgtccaggttctcagcatcttgaacaaagaattcaacaaaatgcacaaaaaagcaaagaaataatgaagcaacaaaagtagatatttatggaaaataaaagtacactccacattgtggaagtgggcctgagcgtagtggctcaagggcctcgttacagaatttgtgggggtttaaatactctctagggattttcactggttgcctggtgtacacactatgtaaatgaaaagggtgaagtgaggttacaaagtcatttacctggaatataccttatggagaggacatttcctgtcatagctgaagtgtgaattggccttgtgttccctgtctccagaccctatttttctgtctcaattggatcttgagtgtggaaccataataaatgggattagtgtccttgttaaagagattcaagagagagtgcttgtcccttttgtgacatgaggatagaaagaggacagctatctatgagtcaggaagcagggcctcactagacactaaatttgtctgcacttgatcttgagcttctagcctccagatctgtgagcaatccatgcctgatatttataactaaccagtctgcagtcttttgttatagcagctgtcatgaactaagacagcctgttagaaggaggcttagacttaaccagtgttttgggggtattttaggagccctgataggtgatcttcatgtctgctttgcttctatggggtggtattgatgggctgaagtggattgtcccagctactctggaaacatttctttttgttgcctcacaatggatttccacttatttacagagaattatatggctgtatcttactgtgctttatgttgctataacaaaataactgtaactggctggttcttacacaatagaggtatatttggctaatggctccagaggctggaaattccaaggccatagtgatctcattggatgagagccttcctgctgtggtgctccatggtgcaaagcaggagagtaagagatcaggagcaagagaataaataagcaagggagatcagtggcagagactctccctgctctcatgggctctgtctattccctctctacataatgagagtaaaatccaaagagcatgaggaccaaatcaaatatgacaaagactccttagaggcgtgtcagtactggtaacacctgtttttcacaactcacggtgactaaggcacagaccaccccacacagtggcacggattctcttcttgaacagactttccccaggctcctctgagtctcttttgaaataggcctcgccttggtctgtaaggatctgaacacacccaaacataatttctaacagttcaaggctacatcaatagataaccaagccctgttaaagagccagcctgagaaaactcacggcttccaaaagaattcagtatttgttccagcaatgtctgaagaaatgcctgtctcccagtctcacagagggcaggagtccaacttcccttagttccagttagcaaacccagagggactaatcacatggcccaagcagccccttcctactttttgtaattttccgcttggctgattccactcagtctctgctcagcctttcccttctccctcattttccctttaaaatgctgagtcatcttgcatagatcatagttcagttcagttcacgctggacctcttctctactgcgatgttatgttactgataaaacctgtcctcaccatgttaatcagtacccagctttctttgtctttgactttagcaatagcagaatttgttttttttctggctcttatgatttaatagctacagacaggtgggaatgaagaccagcctatgtgacacttatctctgggttctagtactattgagcagcaatttaagtattagggatttacaaatgtgtttaatttatggccaaaccctggcataagtcaaaataaatgcttatatttgatcactaaaatacgaggtaatgatccacctcagggaggagagtatgtgactgcaattagaatctttaaagccttctgtttagaaagcatgcttgcttgaacttcaagtttctaggcaaatgtaagggtcatttgtaaaagctgagtttttcctgttgccaataaggatagagaccttttcttctatgctcatgtcttagactattttcttaagaaaaaaattgtatttgtaaactcttccttagtccctttattatgcatgtcagttttttgaaaagctgactaagcctctagccagaattgcaacctgccagtgttgtgttaagggtaagagagacaactctttggaaatgaaaatatcaagaaagataacttcctatctccatgggccccttactccaagctacaactgcctgcttgtcataaagaaatgttatttttccttgggataaaggtgactgtctagcacagaaggataccccaattaccaggtgaatttaggatggagaatgttataaaaagaatgtttgaaagaatgttataaaaaatggtggtgttaggccttattacatgaagaccagttatcatttatctcaagaagatgcatgtaaggattatatttcttggctatataaaggggtgagatttctttctgtctttgtaatctctttagcatgttacctgtgatgcacattgcagcctggtttaatgctttttaaattttatttgtttatttatttattttcgagacagagtcttgctctttctcccaggttagagtgtagtggcacaatcttggctcactgcaacctccgcctcctgagttcaagtgattcacatgccttagcctctcaagatgctgggattacaggcaggcaccaccccacccagctaatttttgtattcttagtagagatgtgatttcaccatgttggccaggctggtctcgaacccttgtcctcatgatccgcctgcctcag

SEQ ID NO: 53528 - DNA, 5660 bp, Homo sapiens
ctaatttcagtgctcatggttcttcaaaaataatttctgtcaactcgttttctttcttataagggactgtgttttcctgtttctttatataccttattattttatttgagcatttcaaaatatagacatttttctaactctatatagatttgttctgtgtcatgacgattatcaactaatatgcttggtatgttcttagtcttagcataagcccaacataaaaccctaaggccttgtcagcaattttctgaacttgtatctgcctggactgtgtgtgcccattagtagttcccccaaatacctactggcttttgaatagcttactatttcaaaaattcacaccccagcttcccctcaatgggttagacggactattgcacgtctcttcccctaatctcttgcccttggcatcatactacatttctactcagcacccccataaataaataagtttattttagtcaatttcagatcacttcttgacgcgtccatgagacaagtaggggccttttgatccaccatattgctgaaatcactctgtaaaagctttcaatgattttatattatattgtatcaatgtataataattaacttatttctcaacttactttttggttattatttgaggaaaagtaaatagaacgaaatcagggcattgcaagttctgacaactccaagatgttgataatgtattgtgcaaactacattcatcatgttctaatctgccctccaaaggaaggaacaagtgaaaactatcccacatgagaattattcatccatttatatgtaattaatttccagtttttccttacaaataatgtttaacaagatgacagattatataaaatggttatcagttttttggctagttacttcttgatagtctgtaataaacctggttgaagaacaaatactattaaggcactgcttgcatatattaaatgatgtccaaactccaaaaactgttaataattaacactccaataaaaactacaccagaatttctttttatttgcaccctcatcaggattacagctttatcaggactgcatcttcttcagaaatgaatatttctcttacaacgcaaagaaagaaaaatcaaaataaattttctgattgaaaatgtaaaaaggcaaatatttttacagttttaactttaattttttattgaggaccaactatttgaaaaattctcattagtcattcctttaaattatgtgtatgtgagagaaagacgtaagatggttaattatttcaaatgatgcagtataaagaaggggcattatcacggcagaaacgaaaaaagatatttgtagctggaggtttttatagtctaacatatggttgctatttgttctacaaatccttttgaataatttaatatagagatttagaatagaaaataatactttagatagaaattaatgagtttattataaccatatattataataatttacttaggaattctctttgataagaaacaaatgaactgaatgcaattttctccacagaccatataagactgcctatgtacctcctcctacatgccattggttaaccatcagtcagtttgcaggggtggggggaggggtttcctgcccattgtttttgtaatctctgaggagaagcagcagcaaacatttgctagtcagacaagtgacagggaatggattccaaacaccagtgtgtaaagctaaatgatggccacttcatgcctgtattgggatttggcacctatgcacctccagaggtaagaataattccttttagttttcggatttcaaaagaataaacctagtagaagtgaaacccgtattgggttgtaaggttcgtgttcctaccttactctggatgactcactggtctaggtttcctaggctaggagaaaaaagtaggcaatccttgttctgcattgaggtccattcctatggtcacgtactgcttatttttcgtttgtgcactgtttctttcttctgttcatgtctagttcccagcttggcagaatatgtaaaactcagtattgaagaacactgttggtcatctccctctggtggagattaattgcaataggagtgatttctctgtttctacaactgaagaaatctttccatcttccaagaacatacgatccagagaaatacttatagcaaaaattactggatatggtgtgcacaaaactgtcggcagagtatcactgttctgatgggcggcagtgagtgccacccagtattaccggacctggactagagtttccactgtactatttcacttttaaaaagaacttcctgaaagaaaaaaataccacctcattttaagtaaaatctagaacctaacaaaggaaagtctaaattcttagtccttttttgtatgcatcatatttgtatcaaagtggtaggagtggtcttctgacacaaaaatgaacaaaatggagacctcattttctagatagaacttgtattccaagactgtcctcaggctactaagtgtgtgaataggaactaattattgaaatttgagtctctcactttatcgataagttgtgatgatctacaaggatacattttctagaccagtgacaaaagtggtttaatttttaatataaattggcatgggcaggaaatgaaaataacgacacaactgaagctccagccttggtaaacctttgagtgttggcacacttaaagactgctctcaaaaaagatttaaaaaaaaaaaaaaagactgttctcaggagatggcggggagaccgttatctagttccttgtaatttcaacgaaacaagaaagcttctttaaatacatgtaaaaatgaaaacagtttatttatatttttgtcattaaaaaatacctttcaaatctttatccaaatttggtcaataagtcagtaattttaaatttcactggaattctgtctttcctgaaagagatagccttattttttatggcagaactgtaccttagtaaattcttaacagatttcagtgaatttttaatgtacaaatcgatatcctcagagtatacatctttacccctagtgttcagttctgttgtgtagccagaatgactatgcagaaaagacttaatagactactattcacagatgctttatttcccaagtgaaccctagttgggtcgatgtaactagcatccagtcaaaatctcaagaactgagacaccaaagaacatctcttgtagacagcatttcccaaatacgatgttggaggaagtctgagtgagcattctgtgtaatatcactgggagagaactcatatgagcttgcaccgtttcccttctatactccatgtgatttttaccatgtataatatcactatattaaaaataattaggactatttcagtcatgttaacttttccaacaaatcactgaatctgagggtgttatttggtacctccataacagtgatcaaccagagattgcctgagactgaaggtgtttctgggatgctcaacctttattactaaccaggaaagactcaggcaaactgagatggacttttcaccccacatacagacaggaggaaaagctgattcttgtataaaagtcaatgcttgtgcctgaactacctctcagccacagtgatcaccagatactacctttggttgctcctccaggttccgagaagtaaagctttggaggtcacaaaattagcaatagaagctgggttccgccatatagattctgctcatttatacaataatgaggagcaggttggactggccatccgaagcaagattgcagatggcagtgtgaagagagaagacatattctacacttcaaaggtactgtgtctatgatgagcttgtgtgcacatgtatttattgtgattgtgtggagatgacaattctatgactggatgagtagttgtgggtgaattttgcttctgggttcaaatttattcacacatactcacatactaaaactgaaatcaaaatcaaggaatgatgatcacttttcattttggctgtgttccaatttatgacctgaaagtccctttacttttttgagcttcagctgagatcagtgtgatttgacatgtgctatagaatcacagagaacaataatcatgttatggtttttcttatcgcctgggtgattttctaagatttcttattattctctcaattgctatctttatcagtgagatagaaagcaatataagaaagctctgggagtattaaataatagacacttaaattgtcctaaattgtgtccagcatagtgagcatgttcaaaacttgttttaccccccttttatgttgctttagtttctaagcaacataaatagctattcttaagcattgggttgaatggatagaagaattagactgttaaaatgagttgtaaactctactgaagataattcaggtaacatcatagttattacttaatactaatctttacattttaagaatttactcctatcattcagtagatgtacaaactatacatccaacgtataataaagtttataaggataggtcagagccaaaggaatcatgagaaggaagagaatatgtttgccagtggtcataaattttgaagcagtaggaaaatatctaaatactagatggcacaaagtaataagatttgctcaagcattcattcaaaatcacctccattctttaacctctgcagctttggtccacttttcatcgaccagagttggtccgaccagccttggaaaactcactgaagaaagctcaattggactatgttgacctctatcttattcattctccaatgtctctaaaggtatgcagtttgtatgagcataaaattgcgcttctgctgtcattataaacattgtttatctggatagttgaacagagctttttattaggaggatgtagggattatcacacagaagaagaaccgtaagtggaacacctaatttcctttctttcgagtaaattttgaatcctacttctctaatgcacacctacaagagaagagagtacagcaacctcaaagcctcttcctcaaaaacttgaaattacaatagtctctttcaaggcactgtcttagttgtggcttttgagtccatctcttgggatgttcccagacacagagtttcatgcagttgtggtgcccaataaaactgctgcacatgtgatgcacaatgagtttccaccatctctccccatttcaagctgaagcagatttggtggaagccactatgcatggttcttaaattagaaacccttaatgtggacttgcaaagctttattattctgctgcctcttctttcacaatagagtttgaagctgtatttagccaggaattactgtgtagtgtataacttttgatttaaagttacagaaaactactcaggctagttaatgcaaaagagtttactgagttatgtaaaatgggaagtcaaagacatggctacatttaaggatatgaaatagtctacaaaaatgtatcatttgtctattcttatctctaaactccaacacttttttttattattgttgacccaaactttttcattggtggcgattatggctttggagcagctcaaggctcatggtcatcaccataagacaactcctctgggtctcccaacttctgctgaccctatgtgattcacagtcctgcccaaagactatcaactcttcaggtggtctgataatc

SEQ ID NO: 53529 - DNA, 823 bp, Homo sapiens
ttaagtctttctttgactcttagttgcttgtcttttttttaagtataggagaccataattatactattaaatagagctgttaaacaaatcaccctcaacataggggtttaagatgaaaaccactgatttactcaggattctctagttagaaaattagcatggcctcagcctgaacttagtcaagttctgttcttggctgggctctctcatgtgtttgcaggacaacgagatagctctgcttcaagatgtcaatgggacatttgtctgggtgccattttctcctccatatagttcatcctgcagccatccagcccagacttcacctcagcacatggcatgaccccaaggcagtgagtggacacatgcaaagccttttcatgtctaggctcagggctgccacgccattgcttctggcaaatattacccacattacaggacaggccagactcaagggatgggtaaacagacaccaccacttattggaaagagctagaaattcatataaccaagcaagtggatacagggacatgtgagtgttggaggaagtgtttcttattaatctatgatggattaatatatgataggttaatatatatgatagattgatatatatattatagtttaataagatatatgagatagattacacatacatacatatatatattctgggtattaatcgtttagagatttagatgtattattgaagtaccacctcccaaattgcatatgtgctgtggttttctctgtagttatgtattcatgaacaaaagttgctacttttcatgtagttaaattattcatgcctctttcctgtggttga

SEQ ID NO: 53530 - DNA, 1878 bp, Homo sapiens
tatcttgattattcttgactgactattctgttatatgaaattttgaaacatcaacatccatgaaagagtacatattttagtctttggttgatattgtattgaaactgcagttcactgtgaagagaactttttgacaatattgagactttcaacctatgatgaatttccaactatttaaatggccttttaatatatatatcattaattttataacattctccattaaaccatatgtatttttaaatatttatccatagaatactgaaaattattagaacctcttgataacgttttcctttttgttttgtggattttctaatgtgtagaaatgttaaaagaaaaatgtaatgaacaccttttacctagactaattgttaacttgttcatgttttttattctctctctctcattctctgtatcactattagagtgatttagtcaatttatagatttattcaattccatgtgttagcaattagtggcatcctcttgatatttaaagtctctcaaatttagagagtaagatacacttcaagcctgtatctgtttcctttagacatgaaattgttagtaattagacaattcctgccttgaattatgttgaaaacaaatgttgtttgcattatacctgtttattaaagagatatagaaattcaacaatatctatcaaacttaatatataatcttgttatttaaaaatttgcctctagattcttgtgggccttctaggtacatgaccctatcatgtgggcacaatgtgaccctatcatgtgggcacaatgtcagcgctgtttcttctccattttctgttgaaattttctctttgtctgcagagttgcacagtttcaatacataatatctaggaatggatttctgcttatttttcgtgagctattcattgacccacctgagtgtttagagctgacttctataactgtttaaaacttaccaatattttaagtattgtctctgcaccctactgtctaatatacttggggattcacaactggcaatctaaaaataataaaagttttttatttctgataggtttttgagttccagttgactgcagaggacatgaaagccatagatggcctagacagaaatctccactattttaacagtgataggtaagtttcctttgtaaatgggtgatctaatttatttctggagaaggaatgtaggatgggtgttgagagtgacctccataccagagggacagaggccaatgtgagtcagaggtgagactggaactctcctgctggattcactccagagctctgttctctggcagggtgagtgggcagggatcagcatgggtcaacctgtgcctctgctctcctgactccatggaactttccagagcagccaacatcattgccaagtctgcacgttccatataggcctggtgtttctaccactggacatgctgtggatactgcccatgtgacttcattagatgtttccaaatctgtgcttatatcacattgtcccaaacctgctcagctccttatcaaatcaaaaacatttccatcaactttgtggtccaggtgccaattcccacctccttcatatggaattgcttgctagatcctgtcaattcagcatcttttattatttcaaatgtttttcctccttctccttgcatgtttgttcatgccccaaactctgcttttgcctccagaaagccttccttagtggagtgaataggagcgcttgtccttgatttcctgcaatatggagctctcaaggcagagaatttaaaaaaatttaaaatcaaggagtgtgagtgtggaggcagaagctccattgttgtatataatttgtagctgataaaagatctttactattccttcatggtctaaggttctaggattc

SEQ ID NO: 53531 - DNA, 2571 bp, Homo sapiens
attgaataatttattattttgaaaatactgtattatgaagccatgttcataaaggtaagaaaggcagattctacaactagtcagacaacttaacattcatactaatgacagcttcattgaaatcactttactactcccctagtaatggagtcattgcatttatattatacattattctcttttcagttttgctagccaccctaattatccatattcagatgaatattaacatggagggctttgcctgatgtctaccagaagccctgtgtgtggatggtgacgcagaggacgtctctatgccggtgactggacatatcacctctacttaaatccgtcctgtttagcgacttcagtcaactacagctgagtccataggccagaaagacaataaatttttatcattttgaaataattgaatgttttctcaaagattctttacctactctgttctgtagtgtgtgttttcttctggctcagaagtgtgtgtgtgtgtgtgtgtgtgtgtgtgtgctttcttctggctcaacagggctaaaaactgtgtgatttgcctgtaagttaggagtgggggaataataatcatttatagacatactatagtgggactgcagtagagttttcagcctctagagaaggagcaggtgacaggtgtggatcagttagtgcctctttagctctttcaggaagaactcgcacagcatgaactctggaaggtaagcgatattgacaggatgaccagcaatccacaggctccctacagcagcgcaagggtcagagctcctggagcctggggaggaggcatccctgtgagaggggtggtcagggcacccaccaaggagaaataattgaaagaagctatgggggaggttaggagaagggagtcaatcccatctctgcttggaaaatattggcactttttttgataatcatagttgtaaataaaacactgaacaatgtttttaaaaaccgcagagctgagagtcctgccttgacccccccaagtgggccctgtgacaccagtgcccttggggggccgtggtggggcaggacatcaaagaaacaatgaactatgtgtacatatgtatgtgtgcatgtgtacgtatgtatgtgtgcatatgtacacatgtgcacatgtgtatatatgtacatatgcacacgtgtatatgtgtgtacttgtgtgtgtgcatgtatatacatatgcacacgtgtacacatatttgtatataatatacaagtattttttgttttatacataaaataaggtacactatcaaatatgaaacacaaaatatcccaaagtcattacatagtactgccaaattaatattaaaatggtaggtaatacatctaatccaattttcaaaaatctcaaacatcttttgaaaacattacgtggaaaataaaaacattatgtggaaaatagcatgatgcttttaaactttggtaacttttaggaccacctcttacaaagacatgtaattattctgcagtttttaggggtataaatttcatcagctaatcatgaggatgcaaatttttatttcagatgactctttttgaaaacttgggacaatgtcatggcctattgattaaggcattttgagaagaacagtgttttttaacctgggcacactttctaacacattcattctcaactgttcttatgctgttggccaccttaaccccatcaaagccatgtctctcagctgataagcatcccctcaagtttcatagtaaccacaatcttttcttaaattatttgttcctgaaaattggaaaaagccatacactttggagttccctatgccaatttttgggtgattttctgtctattgtcattccattgataatcttacatattttctggtttacataccacttataggccgagaaacccccaaacagtgtctctagctctgcttttttccccagactcctgaatggaacatgaaattatctactctaacatccctacattagtgtctaacattcactgttggcatgcctcaaataaaactgatataaaccactgtcatcctgttccaaatcaactttttttactctaatgattatttcacatctgctgaagttgattgacgtagttattaaagaaacattcatttttttgaacttagtagtcaagtgtataaagccaaaggaaaatttttaatttcttgagcatgcagaacatttctttttttaagatgtgaaataattattagggtggttatttgtaactactaaatttgctagaggcttattccaattcttcaccctccatttccacttcctatttttaaaagaaagtttctcagaatttcataaagttcaatgcctggcttcaggaacccttggaatgtaaccaaattctacagaaactaccaatcctgttttctctacaagaaatgctggaagacgggtatttctgcatttccatctgaggtaccgggttcatctcactacggagtgccagacagtgggcacaggtaagtgggtgcagcacaccgtgcgagagccgaagcagggcgaggcattgcctcactcgggaagcacaaggggtcagggagttcc

SEQ ID NO: 53532 - DNA, 2958 bp, Homo sapiens
ttatggaaaactattcaaaataacccactctatgggttgtctgtttactctgctgactgttccttttgccatgcaaaagctctttagtttaattaggtcccagctacttatctttgcttttattgcatttgcttttgggttcttggtcatgaaatcattgcctaagccaatgtctagaagggttatcttctcaaatggaaagctttgtcactaatggtatgtctgtgattatcgggtattaagatcactcactcaggatgtactggttctaggtgtgtagagaaattagatactgtcttagtacatttgtgttgctataaaggcatacccgaaggtgagtaatttataaagaagtctctttggctcatggttctgcatactgtacaagaagcatggcactggtatctggtaggcctctggtgagggccccaggctgcttccattcatggcaaaaggagacgtggagttagcatgcgctgacgtcagatggtgagataggaaagcaatagaaggcgagtaaggtgccaggctctttttaacaagcagccatcaagaaaagaaataatgcaagaattcactcactactgcaggcagagcaccaagccactcatgatggatctgtcccaatgaccataacaatcccactaggccccacttcctacattgagaactcagcatatggtttagagggtcaaatatcgcaattacagcattcttcccctggcccagcaccaacttaaaattccaaagtacaaaagttcatctcagactcaaggcaagttcctgctggttatgagcctgtgaagtcaaaaacaagttatttgcttttgaagtacaacatcgttatcagttgtgagtaaacattccttttccagaaggtaaaaaattaaccaaaaaaaaaaatggtgtgggtaaagtcaggagaaacaggacctgtggaagccagaatcccagcaaggcagacgttcaaccttatagttccaagataatttctggtgactttgtgtcctgcatcctgggcacattgatgcaaagggccagctctcaagcatttgggcagccctgtctccatggctttgctgggcacagcccacatggctactcttacaggttggagttctatgcctgtgagacttttccaggcagaagtttcaagctgccaaagggtctgtgattctgggatctggacggctgtggtcctgctcccacatctccactaggtagaaacaccatggtgacttctgatcccacatttctgcttatcattgctcaagtagagactctgggtggggcctccacccatgcattaggcttctgcctggctcagcgaagctgccaaatctcaactactcttgtgccacagagatatcaggtttgaaactcccctcctttttttgtatttttctactcagcatttcctccagtagccaggtgtgaggcctctggcttcacaagactcaagggactaggtggctgctacgtgggggcttctgcctgaagattgtatacaatctggctgaatgagaaactgatctcaggaggccaggagaatgctcagtagtataggagatagagaggaggaggaacataggagatagagaggaggaggggagaagcagggaggaggaaagtaaaaataagaagtggggaggagagatgcagggcatccttgagtcagcaataacactcatgtgcctcaaataaataattgatcttattgtaaaccaaaaagtaacccaggcagatatcaatctattagaggtttgttttggcaaggttgaggacacacccaagaaagaaaaatgcaagtcacagtaagatctttgacctgaacttttttcaaagaggattttgggaactgcaatatctaaagggtaaagaacaaatatttgaggataaaaaaatgcaggtcaggtacagaatgaggcaagtgattacattcttgtgagcctcttattagtgctcactgaatctactatcttacacgtgaaaacaaagcagtagggaaaaaattgtgcatttgtcttgcgctcaataaatctacattttatataggatatagtaagcatgcaaaattacagatatctgtttggaaataaaaggaaggcagcttttggatgactccattaccaagcttaactttccttctgacatagtgagtatggggtccagagaatatatttttctttctttcctttcttagtaaggctcattcctatgtcataccaggaagtctaatttctaggaggttgtgaagtcttgcgtcctgtggaagaaagcagggacagaaagaaagaaaaaatagaaaaaaagatgccaaggtcagattacaacaagaaaaggaaaggaatcctggaagacagattctgtctttactactaaaaactctacagtcagtaagcacaaatatatatatagctgttatatatatttaaatgtttggtgattccaagtaaggaaagtagtagaaaaaaatgaaaacataattttgttgacttgtagccagaaaataatttaggattcagaccagataaattgtagtaagtaataaaaactgagaagcaatggacaagtgtagactctaataacaggtgtactatagtttcttttgaaacatactttttctctccagtccctagattttatcaaagacaaataatgatagaaacaatttatttgcaaaatatgtcatagtcttattattcttggcctgattatttgcatacattgcaacaagaataattattgttcaataggctctttataaattggctttgctgaagctatttaaaagactctcagattagacttttaaagacctttctatctcagccaaaaatgtatctgtgccttcagatgaattgcataaattggtttattttctcttttttgtggtctcaaaataacttgaagttactggacctgtcataaaatggcattctttatttttcacaggta

SEQ ID NO: 53533 - DNA, 3414 bp, Homo sapiens
taccaagactttgactggaaggatatatttccctttgaataatcaaacttaacttccgaaaccaataaaaacctcttagaaaaactggcctcataccttgtctatgcagttcccaaacagggttcctaacctataataaataaagaatgtcactttctaacaggctcaagaaccctatattcttgggacctcaaaaagagaaaaattgacccaactcataaatatttgagagtacaaacccatgactagactcaactttaaactgaggtattattatctgaggttacttatggaatagaattccatcaaaaccaatttaaaaaccctatataaaataattattgtaaggccaggtgtggtggcttatgcctgtaatcctagcactttgggaggccgaggcaggcagattgcctgagctcaggagttcgagaccagcctgggcaacatagtgaaaccctgtctctacgaaaatacaaaaaataagctgggtgtggcagcatgcacctgtagtcccagctactcaagaggctgaggtaggagaactgcttgaacccaggaggcggaggttgtagtgagccgagatcatgccattgcactccagcctgggcaggagagcagactctgtctcaaaaaaaaaaaaaattattcttactattctttatacagataatcagaccaaatatgaaactaaaatttattttacaaacaactcagtactatcctatcatgacttgtttttgacaaaaataagaactagagagaaaaatagtgtgtcaaacttgccatacatttgttattaaattctagtctcactaattatttttaaatgtttacctacattttagactaaccctacttattcttatgaactaaccaacaatctctgactacaacaaaaaataaaaacagtaaaagataaataatataaaatttagaacaatattctagttctgaacaattatcctacaaatcctaccaggtcataggaatatatagaatacccataatccagaggttgctttatttgagaaaagaagaccaaaaaaactaagcaaaaccaagctccatacaccgaaatcgtaacagacataactataactaccaattatcaggacgtatcaacaacctcagaatttttaaactatccttatccccccttatttcattttaatacatgtactctaatagcccaaattatttcttctcacataaaaactatcaaactctaaatggtaatactaataacaccacacataaacatatctttcttccaaagatcattaaaccaaccccaggaagaactctaactactgttccccacatgacaccaccatccgacaaaaaaatagccagaaaagtcaacacccaatctccctgacaattagggactccactcctgagggtaaaaatgagagaaaaaacttaaacagttagagtgagttcttggtaaaactcctttaaacagagaaacagcttgaaaaaaatcagactacacacacagataaggaaacttacacaaacctccagctcactcagataaaaaaacaaggcccaacatcaaaatgcctttgtcctttatgcctaagacatggcaacaactgcactcatatgagaacaagaaccaacagagaaacacatttgtcttttgtgtaaccaacagacttctaggaaagtctctttttcttttgtgggcatgtatatggtgggctccagtgggctctggtgggcactttcctttccttttgtggacatgtggaccgtgagatgagcctttatgaattatcattcagcatctgactgctcctgggccaaggtcccaggccaagctatcacttcaactcctgattggtcccagaccaaggtcccaggacaagctgagttacactttctccaagaccagtcaacaaattcttttctttcccagtccatcaaaaccctagacctgacctcatagttaacaatccatccaggccccctctctactcgagaaaatcttccttctttcacttattaaactttcactccaaccttaccctttgtgtccacagtccttaattttctcagtcataagacaaaaaacttcagataatccctcaaaatgaaagactactatatttttaatacattgatgagactgtaacagaatcgcagtggcttcttatatagcaaaaagtttggatggttgaaactctctggcaaatacttccagccccaataacctcacagcaaagctgccactaagtattcattttggcttttgattcctcctgggtccttggcccttcacatttctaaccaagagtagagtggctctgaccagagcaaaagatgagaacagtctgagcttgcatttttaaaacgtaacaaattttaatgagtacttacctaggccagttgttaaggaattaaataagataatgcatgtaaaacacctaaaatacatggaaagcatttgatatattaggtaacattgatacttttaatagaaataaagataatatacccacaaaattatcaatctcagaatccccacaatcaataacttgccatgccacttaaagcaaaaaagatctctgtgaccttgagaggagcaagttagagacagttaaatgaaatcccagatgagcccttccaagcatccactgtctacccaagtgcagggctcttgcctgatgactgccctgcaagtacagctgacctaagaaacttcagcctcctggggtccacttacatgatcaggagcataagtgccaaatcccagcactggcatgaagggtccatcattcagcctcactgaatggctttgcttcagatccgtcatcatccccagctaacctgtctttcctccttttcctcactgacagcccagtaggagacaaggctcctgcgttctttatttgcaccaaatgcaggatgggcgggatggagatgacagctgccaatgatttcaaaatgaaactggaatcagtccagtgccttttctctgattcttatgtctctgtgggagtattttacagaaaactcactcagaaatgctgtgaatgccagaggactttgattttctcctccgtgttgttcacacttgattccttagttgaaaaatgaaccacaccaatttgtccttgataagtacactagacttcctttacaagaggcaaagttattattagggtggtcatttcaaaacactaattctactacagaactgaagttaactttctcacttatatttgattgttaatccctttaaaacagcttattagaattccttgaataacgcttgaggcctagtgccagccatgcatgtaatgaaatttcttaagaacacccacccctattcccagtatatttccctcctgtgtcaagccacactccattttctctgacttgtttccttgaatgttttgcagaaaa

SEQ ID NO: 53534 - DNA, 1179 bp, Homo sapiens
ccccctgaccttggaagcaggttattcccctctaagccttcaggagaccctgctttagacttatgcctttactgcagcccattgaggatctgagcagaggtactagatcaactctgcatggctgcacacaagtcactacaaccttagcagcttaaaacctacacaaggtgacagagtgcaaatggcaattataatatagcaaggcacccaaggaaacagaaggaaacgtgcaattctggaagaagaggtagaaggagtgccagaaaatatgttgcaatggcctccatggaacacattcaagaattatatgaaagtgtatttcattcaaaaataaatagtgagtagctataacgtgcaagatactgttgtcggcattaaaaacagacaaaaatcgaagcctgcattgaactcactttcaaggagacagaaacggacaaaaaactaataattacatagaatgaaaaccatgttgtatgataggaagcactgtgaagggaaaaaagtagggaaaggtgtagagtatggaaagagggcagggacaattgaaattacaaatagcttaatagcttaagcaggggatcctcactgagacagagacatttaagaaaagacctgaaggagtggaggaagccagccttgctgacagctgagggaaaagggcttcaagcagagggatcctgaagggcatagtccctgtagccagggaaggccacgtgtgatctgggaacagcaggattaggaaagaggtcagaaaggaagggaaggccatgtttcggcagagccctgtaggccactgaaagcatttggctttcactctaggacagataagaagacactgaatgaaactgagctgctgtgtagagagtagaatgtaggttggtgagggataaaagtggaaaactagttaggaagctacttaataaccaatgtaagaaattgagtaatttggaacaggatggttgtaaagcaggtgaggagaagtggtcagattctgggtaatttttaaggtgaacatcagaggccttgttcacagattttatattggttatgagagaatattaaaaggcaagaatcactccccaaatttagttctttatgatggaaagaaaggaatcattgagactgtgaaaatttaaggtggagctaaattgcatggagattaaataaatttttttctgt

SEQ ID NO: 53535 - DNA, 4905 bp, Homo sapiens
ctcagttcttttctgaacgtgcatctgcctagactctgtgtgccctatttgatttctccaaatacccaatggttttgaataccttatcatgtcaaaaattcacagctcagcttctcctaagtgccatagatggcctattgtatgtctcttccccctaatctcttgccagtggcatctgtgcatctatagtcaccctgcatctctactgagccactctataaataaatgagtttattttagttcatttcagattgttttttgataattccatgggagatttgagagctttctaatctaccatcctgctgatgacactctgtgtgaaaatttttaaatggctctattatattccattgcttcaatgtatagtaatttacctaattattttcttttattgttccttttaggaagaagtgaatagaagaaaagagggtgttgcaaatcaaaagcacatagagatatcatcttacaccagtcagaatggctattcttaaaatgtcagacaacaacagatattggtatggattcttcacagatgttaatcatcttcgttttttgttttttgtttttttttttttttttgagacagtcttgctctgtcgcccaggctggagtgcagtgacccaatcttggctcactgcaacctctgcctcctgagtttaagcaattgtcttgcctcagcctcctgagtaactgggattacaggtatccactaccactccagactaatttttgtatttttcgtagagacaagatttcacttgattggtctcaaactcctgacctcaagtaaacctaccgccttggccttccaaagtgctggggttacaggcgtgagccactgcccccggcctaatcatcgtgttctagtctgccctccaatgggagaaacaagtaaaattatgccatgtgaggattattcaccaatttattttaattacttttttctttataacatttaataagatcacaaattatataaaatagttatcagctttttgggaagttacttttgctggtttcttataaaactgatggaagatacaaacactattaaagaactgtttgcatgttgcaaatgatgtccaaagtccaaacattgttaataattaatactccaataaacatcatgtcagaatttctgttttcttttccctttgaacctttgcaggattgccacatcatcaggaccacaccttcatcaggaatgaatattcctactacaattaaagaagaaacaaaattaatttgttggtgaaaaacgtaaaaagagaaattttctttggttttgtttaatttctttattgagggtcaccactaaaaaaaaatgctcactggtcattcttttgaatactgtctgagagaaagatgtaagatggttgattatttcaaatgacagaagataaagatgggatatcatcatggcatgaacaaaaacaagatttgtagctggaggtattttatagtctaacatgatcaccaatcattctataaacctgttggatgagtttatcagacagacagagagagagattgattgattctgaatagaaaatttcactttagaaaaaaatattttgactatataataatgtatgtaaaaattctctttgataagaaacgagtgaactggattcaattttcctcacagcctgtgtaatacaccatcacttgcttcctcctacatgccattgattagccccagggagcagtgcagcactgcctgcccatgttttacataacccctgaatataaatgccagatgttgctgaaggaaacaggatctgcttagtgaaagaagtggcaagcaatggatcccaaatatcagcgtgtagagctaaatgatggtcacttcatgcccgtattgggatttggcacctatgcacctccagaggtaataatcacattttcagcattgagcatttaaaagagcaaagctagaataagtgaacgatgacctgggttgttcagctttgtgtttctgttaccctgagtgactcacgtggtctgtcttactgggctagagctattctatgttcaaagagaaaaggtagtcaatgtttgttttgcactgaggtctgtcatatggtaatttactgcttatttttattttatacactgtttttatatgctgtttctgtgtattgcccagcttggcagaatatataaaactcaacagtgaagaacactgcctggcagttccctttctaggagatgactgcagtgagaatggtttctccatttatttctgtggttgaagaaatcttttattcttctactagacgtgatcaaaagaaacatttgtggtaacagcacctaaagatggggtgtatgaaaactgttgggagagtactgctgagctgccgcgtggtcttgagcatgacacagtaatactggtcctggacttaatacaatgccctgcacaactctcacctctaggaaaattatctgaaaggaaaaataactttattctaaggaaaacctagaacctcacaagaaaaattttaaatttttggtccgtgttaatatgcatcagatttgtatcaaaatgataggggtggccctctgacacggaagtgggcaaaatggagacattttttctagactgagctatttctacactggaagaaaacttgtattccaagactactaagtgtgttaataaggagtagtcacataaaatttttgtctaaatttgatcaactatacgttgtaagaatttacagagaaacaccttgaagaccatcgacaggagtggttcactttgtaatgcaaattggcatgaaggagaagtaaggaaaagcacaacacggaagctctagccttggtaaaccttgagtgcctgcacagcaaacagaggatcagggttggcatcaggggaaggtagtgcaacctggcatctagttccttttaatttcactagaaaaagaaagcttcagaaaagcttatattaaaatagaaaattgtttcatttacggttttgtcatttaaaaaatatacctttcaaatctttatccaaatttggtagataagtcaataattttaaatttcactgaaattatatcgtttctaaaagagttggtcttattttttagggataaagcgtaccttactaatctctcacaggtcgcagttaatttcttaggtataaatctacatccttggaatgtatgtctttactcctagtatttagttctgtcatgcacacagaatggctaatggctgtgtagaaaggagttaacacaatagactgccacccgtagatgcgcctgttttcaaagttggagcctggctggtatctgagaagttgaatttctcaccccttcctaactgataagggtagcatctataattaactggttgtacaaagtgtggggtttctgtatacctgctttctttacaagaccggaagtttggtgtgtgctatacagactgggtcaatttaaccagcacccagttaaaatcttgggaattgagtctccaaatagcatcccttgtagtcaacatttcccctatgttgccaaaatgtgatgctggaggaagtcagtgtgtttcctgaaacatcactgagagacgaatcataggaacttacaccgtattcttaccataatttcttccatgtgcctttttccatgtgttaatttcactatattaaaaataattaggagtgtgtatgcagtgactcatgcctgtaatcccagaactttggtaggccaaggcaggtggatcccttgagctccggagtttgagcctgggtaacataggaaatcccatctctaccaaaaatacaaaaacttaaccaggcattatcatgcctgtctgtggtcctagctatttgggaggccaaggtgggaggatcacttgagcccaaggtaaagaaggtgggggtgggggcagattttgtagtgagccaagattgtcccacttcacaccagcctgggtgacagagtgagactctgtctcaaataataataactatttataagttgagtcttgttaatttttctaacaaatgactgaatctgaggttgttgttgggaaactccatgctagtgattaaccagtaactgcctgggactgaagaggtccagggatacccaatctttattactaaccaggaaagacttcagcaaattgggatgggtttatcaccccacatatagaaccaacccaagacacgaggataatgtgatttttgtgaaggtcagtgctggtgcctgaactactgatagggatgtgctgggaagggaagagcgtggtccctttaaatgatacagaaagcgggaagggaagtgctggctagaggaggacgtggtccctggctacggctccaccgcctcggacctaggtgaggacaggcatttttgttttcctgcccaaaagttgcatttcccaagaccaccctggcctgccatgcccccatcctgtgcctataaaaaccccaaatcctaacaaggcagagacagaaccgggtggactttgagaggatcacatcggcagaggaatacacaggtggctagacatctagagaaatgcaccgaaaggcaccagtacgccagcgggccacctactggcagaagcagaatgacgctgagtttggctggggcagtcagaagacagtccaggctgctgagcagccggactctaggggaaaacgttcctactccatccccttctgacttccccccaagctacctccactcaatgaaaccctgcactcattcaccaagcccaggtgtgatccgatccttccggtaaaccaaagcaagaactcaggatacagaaagccctctgtccttgccataaggtagagggtctaattgagctggttaacacaagcctgtagatggcaaaacttaaagaacaaaactaaaagagcaccctgtaacacatgcccactggggc

SEQ ID NO: 53536 - DNA, 668 bp, Homo sapiens
aagtattttacatattgcctctacaccctactgtgtgatatacttggctattccaagttgacaattatgcaatctaagaataaacattttctacttctttggtaggtttttgaattccagttgacatcagaggatatgaaagttctagatggtctaaacagaaattatcgatatgttgtcatggatttgtaagtaactttggaaaatgggtttcccagtttatttttagaggaggaatgtcagatgggtgttgaaagtgacctcaataccagggagacagaggccagtgcaagtgagaggtgagacaggaactctctggaactctccttctggattcactccagagctctgttctctgacagggtgagtggacccagggtcagcatcggtcaacctgtgcctctgctctcctgactccatggaaatttccagagcagccaatattattgctaaatctgcaactttcatgtaggcctggcatttctgccgtggcctagtggacagtagatattgcccatatggcttgattaatgtttttccaaatctgtacttatagctttttcttccaaatccactcagtttcttatcagctaaaaaacatttccaacaacactggtgtccatgccagaaattctcttctcttccatatggaattgctcactagatca

SEQ ID NO: 53537 - DNA, 514 bp, Homo sapiens
ttattcttttccaagtgtgatattggcccttcaatttcccacagtggagtcgagtttcagatgtaacttttagtaagaatttaaagatagtttggagaatcacagagaacaaaacagaaaataacttagaactacccaatgtggccatgctcagagctcagtttcatttacttcaaatatttactgcacattgactatgcattaggtgagtgcaaaagtaatcgtgattgagcaattggacttggcagcctgtcttgacacaccactgtgctgagtgtttgaggaagtgtttcaacagatggctggggttagtgtgtgtcatcatatttgagcgaggattaagagaaggcaggctgccttgctgaagctatgtggtcttcaagtgagagttgcaggcaatagaactactttccttttggagtaaaaggaggaattcattttcagtagccacaagaaaagttttttttttttccagggtggctggcaaaatggccaaatagtaacagctccagtc

SEQ ID NO: 53538 - DNA, 574 bp, Homo sapiens
cttacctctttatcctttgaaatttcactgaaaatgaatgaacaaaaaaaaaattatgaggagcgaaaaggcatataagtttatttttatgtgtatagaatggaagaattgcagaagaatcatgacctaataacccaggtgaggtccaggtgcttatatacctcacttcatgggagaaggggaggtgaggaaataggcggtatgggagtcaatgattttcaggagagatgaatggacctgggaggcaaagatcatcctgtagtctatttactttggatgttgggagcacagaacaaataacaatttgggacaaagttggtttaggctgtaaatgttggtgtttaattttcagtctcttcctctgttacataagttctaatcctctttggttaatgaaatttcagggagagattgaaagcaattgtgttcctctttgtgagtccagtttctaggtaaagaaacttcagaaaagagcctaatcttgcacttcttgggagacaaagggaggaaaggtgggaggaggggaggggtatggtgggggagaccctgagcctgctgtctcagttcagcctgt

SEQ ID NO: 53539 - DNA, 3790 bp, Homo sapiens
tatatatatatgttaatatatattatattactatataatatagatgggagtttttaacacgtcttgtctacaaatatccctagaaatataaaactaagacagagtatacatttttgaactgctttttgtataattatcaaaatggtctacacaaagctttaaacttaacaatgtcataaatcatgtttgatatttggctatattggatgtttcttttaaaatcatatgttttgattacgatttatacacctcctctttctcactcctttcctctgatctggctttagtgcttaccactctggatcaggccctgcatggcttcccataacctccatgccactaaatccagccacttttatctttccctattggagtgtttgctcacagtaggacctacctatgtctgactcaagccacttcaatgctctttctttggctcccgacaccacagtctcctggctgtctccacctgtctggcagctcctgttcaatctccttgccagtgcctctctgcctcaccctctcctgtgaactttcctgcctgttccttttcattccatgaactttccctaggagagctaatccttgtctgtgagttgttaccatctatacagcaataatttcaaacactgtgtctccacctccaccccctgagctccagaccaaagcgaccacctcccaactctgcctccgcttggctgtctcataggaacttcacacccatccccaaagaactgaagtcaggctcttctactccactcaaactgtttttctctagtattttctatttctatgaaagtagctgtcatctacacaggtgatataaagccagaaacttggaagcatgattaagcaggaagtgtgtaaagagcagaaagtcagagaaggccccggtgggctaacggctcacctggttgcaggtgggcttgtacttgagccctggcttgttgaggatgagttccagcagtttgtgattgaaattggacaccccgatggacttggttaaacctgcttctttgcacttctccagggcctggggagggaggaaatgggtggtagacctttactgtagtttgtccatttcgtttgtcactgactttttataaaccgaaaatctgatttatgatatactacgattataatgaatcaaaccgttttatcccttgaataaattaattttgaatgccttttcttgttctgcgtacatatttgtctccttaattctattacatgcacactggggacaccaaataaacataaagctgcttttccatttcctcttacctatcccactctcttctatggtacctattttgctgttaggatgcaatagttaacaaactacaccatagtcaagggcaaaagaaactctcagcttttcctctagtaaagggtttgttgctacctctttctacaacgataaaaataaatgaatggtataggtgttgcaagggcgggttcactgtcctgcaccttccaccctcctgctgagtcaggccgcagctattcctcctctgtgatgtgtttctgtcccgggataaagcgctgactccttttgtgcttctctatgctgactcctctttagggctcatgtcctcaacctgatctcaggggtaaagctgcttccatgtctatgtagagccatagaagttaaaattaaaaatggaccgtaggggttatctcattccactccctcacttcaacgatgagaacacggaggcgcagagaagttccacgtctgaggtcaaacaactgctggagcaaaaccccatctcttttgacccctccttctgtgattccaacctcaccacacagtgccacctggtgtctgcagcagaacatacctcccatgtgtcacgaagatccacagtatcaaaaataatgtttccactggcatccttaggcagcaattcctccccaggctggaaaacagaggataaagaagaaggttttctatgagaattccctttctggcgcctaaggagcttagccacaccactttcagaaggctgtgattattaatctgaacatgcatgcgtgcatgtgtgtggatgtatgtgcttgtgtgtctgcatgtgcagacgtgtgtatgtgtgtgcatgtgtgtgtgcctgtgtgcatatgtgtgtgtgcatgagtgtatgtgtgtggatatggatatgtgtggatgtgcatgtgcgtgtttggggtgagggttggtaagagaagacatgggaaaaaagaaagatgagaacagtctgagagactgtagcaaaacactttttctccagttacctgcaggctccttcctccatacacccccacacttcactaagaatgccgtccctacagttgaaatttatttcatttctgaaggacaggctggtgtggaagacagcgcttaccataactattgatcagtgtgtttagcccccgtttatgctcacccaacttggataatgaggacatcagatgtgctcagccaatgtccactgtgatgagaggttggatcactgaagcccaaaggagtccagttgtgccacatgtgccatcccatgtacctctctctcctgtgggctgagggtacatacgggagagaccctcaccataaagaggtggagatttcacgttgtatctctgtagtctgtagtaacctaatagctcagaacctacactcaggaacacaagcactaagaaatgcagggcaatgccctcatgtttctagcatagaggaagtgagatcatcgaacctgcatctcgcttaaggctgggggatgagcacagacagaaaattgcaatgtcattcggctgtgaaggagactcgtgaatgatttagcaattctatgcaattcactcaaacctacccctctcggaaagaacccaggaaatcaagctggaatgagacaatggaggtgctagtaacagtgatgaaactgtttggggcataagaaggaaaaaacaaaagctgaccttcatagccaatggattgtggataatgaagagatcgacatagtccagttgaagtttcttcagtgacccttccagggctgggcgaactaattctggtctaaagaaagttgtccaaagctgcagtgaacaaaagaaataaaaagtagcttatgatttcacacacttggggaccaaaattaaacataacagaaattgacacatgagtaacaaaacactgtggtctcaaactagaagaactggggctacatttgtattattcagggtaaattacatccttgatgagatgctgagatttacttgaatgactgcaatgtaagaaaactgtgaataaaacttagatggagcaggaaaatcaactttaatgcatcaagggttaatggcatcgtcctctgagagcagtcgagaaatgtcaggacacggggaatggaatctactgtcctgtataatgaattcctcaaaacaattctgctgagagatgcattctaaaaacaagttgtcgtcagtgtaaacaggcataggctgtatcgccagtaaccaaggctttatttacattggaagaaaggttttccaccctaggaaaatgttataacattcaggaaactcaatgctgagttgaaaaataaaaaagtatttcccagtctggctcccttttctgaataacatcccaacctcacttgatacgtcctgagaacaattactgaacaatcaacggagtggccccagaatgccttgggtaatcgtataacagttacttaagtattatcgatctcatctcatatatgaataatacctgccgctcagagacattgaagaacagtgtcccacctttcacacatctcag

SEQ ID NO: 53540 - DNA, 1611 bp, Homo sapiens
tccctgtgtcactctcattgaagtagctccccagtccctactgtgtctctccatctcactcctcagttttagtttcttcagaacaattgtgatcagagcaattgcctgaattattcacaccaagtgagttatttatcagaggaataaaggatgtttgagccattccatatcaagtatcatcttgttttaaaacattttgctggacagaaagaaaagtcattatttacagcaaaactacaaagagttggatacagccccaaaactctgataggagatttaaccatacagaacaagagttcagcaaggatgctgcaattcacgaggaaaggctaacccagggttatgagagaaatgttaacattgcatggcgataaaatgccaaataccttgctgtggtttgaatgtgtcccccaaagtccatgtgttgaaagtataatccccagtgcaacagtgtaaagacgtgccctctaagaggtcactaggtcataacggccctgctgtcatgaagcactgaccttattattgcgaaaacgggtccattatcgtgagagtgggtttattgcaaaagtcatttcagccctctcttgtctctcatcctcttacccctgcgctcgtgccccctgccttctgccatgggatgacacagcacaaatgtcctcaccagatgtggggcctgtgatctgggactttcaagactccaagactgagccaaacaactttctgttttttatgagtcactcagtctcggctattctgttacacaacaggaaacagactaagacacacccatataatcctctctgaataaatgggaatccattgtcaagcaacaaagagaaatgctgcccgactctctggggaaacacaccttacccctcttttaccacccccacataagtagggagccaaaaagatcagctttcagagttctcaaaatgccttctgaaaagtctggttaagaccacaccttctgaccgggagtctggttcgttaagactgctgtgacaaagtactgtacactgggagggttataaacaaaagacatagatagctcacagatctgaaagctaaaagtccaagatcaaggtgctggcagattcagggtctggcgggggcctgcatcccgtgtcacagacagctgtcctctcactgtcctcatgtggcgaaacaggcacgcaatctctctgggggctattttatcagaagcactggtatagtttggacatttgtcccttccaaatcccatgttcaagtttgatccccattgttggagatggagtctaatgggaggcttgggggccatggggtagacgcctcatgaagagatgaatgccctcccaggggaggggggtaaggtcttactctattagttcccatgagagctagttgttaaaaagaacctggcccctcccctccttcctgcttcctgtctcaccacacgatctccgcacacaccagctccccttcaccttcttccacacttggaagcagcctgaggccctcaccagaagcccagtcctgaaacttccagccagcagaactgtgagctgaataaacttcttttctctataaattacccagcttcaagtcctcctttatagcaacaataaa

SEQ ID NO: 53541 - DNA, 1881 bp, Homo sapiens
tgtgtcatgcttattggaagacataagggctcataattagattttgctggttccctagagacagtcccgggaacacacttgcataacctttggtaattggaaatatatctcatattggccacgtgcacaataattcagtgtgaatatggccaataaacatgccttgtttacaggtcattagtttggacctctcttctcctcaaatgctaagaaagatctggtgaattaaaatgcttccagtccatttgccttggcctgtagtgaaagtcctaatgaacaatgaaggaggtaccgggccttagggactcagggatgcgctcaggagttaagggcaaattttcctaggttctttcctaggcaagtagatcccgggagcggtggaggggcgggactccacgtctcctaggaaccgctgcgcgctcactgattggctgatcgctgctcagccgccattttcaaatccccggatgacggcggtggcggctgcagtccgctgacaggcgctttctgcctggcagaggctggcgggcatcgtgcccgtccctgccggtctcccgggcacccggccaccgccccaccccctcctccgtgccatggagcccgagctggcggctcagaagcagcctcgaccgcggaggcgaagccgccgggcctctgggctcagcacggagggagcgacggggccttcggccgacacctccgggtcggagctggacgggaggtgagtgtgggggaggggagggccgaacgggaggtgagtgtaggggagcggagggccgaacgggaggtgagtgttggagaggcaagggccggggggaggggagggctggccgggagttggatgtggggggcggcgagtgggggtgttggtgagggccagggggaggcgagggccgctgggaggtgagtggggggtgggggaggtgaccgcggggttggggggggggacgggggccgctggaagtgagggtggcacaggctggagtgacagtgtgcctggccttggaccgaggtcggtcctgagaccccaaactgcgattttccctgcctgtggcaaaggggcgggtttattgagtctcctcgcctcctgactgtttctcaggggagacttaggaaaaaccacaatggttttgttctgcacacccaactggctgtaggctggcgttcccaaatgcctttgctcagaccgaaactgtcatggtgagcaccacgagaatgggcttccatgtcctgagaaagaaaagactaagggataagttgacttcgggatatgttatgagatgcctattagagagttcatcacaaccattttcgtgttttttctttttactttttgtggaagtatacattgaaatgagagtgtatgactcgtgtttggctcagtgaaatttcacaaagcgaagctcaggggatagctagtgaattaggaggaagggaaccaagtgagaacagtatccaggaggccaaatgaagaaagaatttcaagaagaggacgtggcgagctatgtcagatgttattgataggtcaaataaaatgaggattaagtaaaataagatgaggattaagctagatgaggaatgaaaattaaatttggtaatgagaagagagtattgatcttagatggtttccaagaatggttacaatatcgaacttagagtgttttgcaacaggttgagaagagaatgtgcgatttgttcagaaaataatgtgagtgccaacactaggaatatggaaatggaaaaatactcttgttactatttaagatttataatctagtggggaagaaagataagtaggttaataattattataatatgtgataaaagttattatagtgatatacacagaatgccgtagattaaaaggaacacttaatcctg

SEQ ID NO: 53542 - DNA, 4327 bp, Homo sapiens
attttgaaatctgaagtagcccagtttacccgtaacctcatgggagattttcttctggaagagaggtaacagaagtgcacctgctgtatttaccctgctagtcttaagaaaaagtgggaactatttaaagacttagataatctattttataattgtgaatatgcttgcacttctgtaaaataaaagcaggtttcctggaaaattaggcttttcttcattatatatgttgattcagccctatcgaataagaatttctatttccttatttgagttgtcaagttgtccatactgaacttattcccatgcaatagggttttatgggaaaagtctgcctgtctgtgactaagcaccagagtagataacgtaacaatttgttttacttcgggaatgcattttaaatcaggaagagaagtttctgtcctacttgaacccagcttcactctcctcctgggcgaaagctgagaggcctaggtgtgcccagctctcagttaactgaagtcacgtggtggtggaccccgcccccagggcccggttggctgtggccccgcccccgagccctggggtcggtgcttgctgcctgcggctctcagaagcctctgctccaccgcggcgagaggcatgggcacgtggctgccgagggtggccgagctctgggaagaaaagcccgtgtgcctctgcatagcgtcgctacagcgctgactcggtgtggattgattggaaaggtttgagggagtacttgggaagcatggtggcacatgatgagactggaggtctcctacctattaaaaggaccatacgagtcctagatgtcaataaccagtccttcagagaacaagaggtaagactttaagagaaacgttaggcaaaaggaatgttttctaactccacggagcttttaaaatttttaacaaggtattaacagtataattttaaacttttgatcttattattacaatgtatgttcttgatttatgtgcaagcttgaaatgtgtttagggactgtggtctaagtttaaatagtttatacatagcatagcttgagtgtacacagcttttataaaaaaggaaaagattttaaatgtatatgttactcgggttacgtttgtcacatttctgatgcttaatataattgtttttttaacttgaattgatatcatccagtcttagaaactaccttaatggagcaagaggaaaagaatcccgttcttgtaaatcaatgctagtgaacaaattgcaactaaagtttagtctgacctggtgtgcatttttcttccatctgatgagttcattgtatgccacttttttcttcagaaggaaagaggcatgttagaatatttaaaccagtgactcattatttttaccctccttgctttgtctgagtctttttttagtctttatgaacatttatcaatataaatcaaattactttatgccattttatgtaatcttgatttaacattgtgtgatattctgtttatactatatactttaatatatactacattgtcacttatatgctaggaatagtgttcctgcattcagttaactgtgtatctcttgattgtggtagtggtttccgtctctatacacacgtcaaaacttatctaattgtgcattttaaatatgtaaagcttactgaataccccagcaaagttgcttgtcatgtgtacacatacacacaccttttggtagttaaaatagctgccgtcttcaggaagtacacttttatttggtgtggtttggctttggtttttgttcttggttttggtctttgcctatgtgtcggttttctcaaaatgtgtaagtatttcctttgagtagagcagtcatccacagtcactagtgtgaatcctgcagcttatcatctgttgggcccatagaagctggcctttgtttagtatcagcatgggctgtgtttctgccttacctttatttctaagttacaagcactaggaatgttgtcacggttttagatctagtgacacagctctaaataatttgagtatttctagaaaaggaattcatcccatgtgatcataactcgtttttatctttttaaaaataacttttattttcttttgattttaaagttttgctaaagattttaagagaagattatttaactattataacccaaaggaatagacccaggtgcatactattttttttattcagtgtcttgatatgattggttatagaagagaccctcctaaaatatgttctctaactggcatcattagaagaaaaagcctttctacagaatgctgacttctcaacaggatttttccatgtcgttgcagttagctgtaaggcataacctgaaaaatactttaacttattctcaacaattttctgtttatagatgtcgagaaatttttaaggcataaaatctaactacaagtggattactaacattaattaataccctgatctgtggacagattgcctataataatgtatgtgactgcctggctaacctagtctgattaaaaattaacctaaattgacaacataaacttatgttagagagtgttggactttttttccctccaagtgaactttagccctggtgaaaggttccctgcagcagaaaattcattgagcatgtaaagcttgttggcatttttttgtttattcccatggatttttggatttttttttttttttttgaggagagtaaggttccagtattcgtatctgttctttaagcttcttgaatttgccataacgtgtttccaggactccaaagtaaaaaataaacaatcctagcagtggaactatgggtgccttccatttggtggtggtgagatagaaagcgcctgttccactcccccttcatcacctccaaatgctgtgtctggcctatctaaatattgtattaggaatctgttttgtgactgcaaatatttaggttcttaatagtcaaatcaagattattaagatagttcatgtggacctctaaagaaaactacttttggtttcggctcacatgggccaatttctgacgtgtattccgaaagacacaaatttttgtcccaatcttttaggtggcctgtgaatgcctaaaccatgtcacttttccacagaagtttcatgtatgagtctgttttcaaatagtatatgtatcctgaaattagtagcagcattatacctttacatttcataatcacacttttcgttattttagtcattaaaattgttcatacttttaaaatatatatactaaaagtttgttttgtatttgccaaacattcttcatgtatgtcctttgagtgaggcaggaaagttatccaccatcatccccaaaagcatgtgaaaaagtgcaaagtgccctcctcctttctctccctctcccaacctgtatttcctgagtaagcatcatacttcccaagacatcctagatttgataaactctgaaaagcagcatttcctttgtggagaagtgggattatagttggatttttaaaggactgtggaacatatttaaccaccaaataccacttggcataatatgctgccaccctaaagagaccacatcaacaaaacccgtgttcgtttcagaagtatgctttagatatatttacattcacttatctaaatctaaattctgtagttttaaaatatcacataattttgagttaccaggaagttagtagttgtacagtaactggtcctataaagataataaatttttatcattaatttgattttatgtgataaaatagatatcaaaaatttatttcctgctaacaaaattttcctttcatattcactgggaaaagcacctttccaaagaccttttaagttgaaattaaatattatattttctgggaagtcaaatttgttatgcatgaaacaaggaagaggagttaacctctgttcccaaaaagcggaacagaactttctgacaactgctttgttccagtgaaatgtcggcatttcttactctgtgaggtaattctatcttcagtccaacaggagactctttgtgctgtctttactaaatggaaaggaatgcctgtgctggcccctgcacacgcgtgtgtcagtcagtcagcacagatgtacgtgggggaggcatccacacatgtcctcagaagcacagcgtgtgccatcttattacatatcgcgaaggtttcttttgcagttagtttatattcaaagttttactttggagttgattatttggtatgaggggttgatctacaactctgcctcttaaagccttcagatttccaaattctttcattatctaccaagtttccttaatagttcacattcctttctgatacatatgtatacatttaggagctttaatgagtctaat

SEQ ID NO: 53543 - DNA, 588 bp, Homo sapiens
cggaccctcacgggcacccagatgtctgcagtcctcaatcaccttttgatgctaatcctcccttcttccccatatccccctcccataaaaaaaaaaaacaaaccccgacgagcctgaaatttttgagatggtataatggtttagaacactagctcaccaccatctcctttatttgctggctctccagataaacctgcttttcctcccaccagcacttgtctcttgagtccagctttcaagcggtgagcagccgaagctgggttcagttacataaaagtgctaatatttacactggggaggaaggaatttgatgagcaggtgttagggctggtggatggctttatcaaggaaaagagagagcgttcagaactactcagccacacccattccagcagggacacaggaatggaactggctaaagattggagaatcttcatatctttatatcacccagcaggagaggcacatttaaaaggacacttaacaaattcttcttaacaaaggctattacaacaccacttcatggggggaaaagcaaatcaccttgggccttctggctttagggtttctagttttcaaagaaagcag

SEQ ID NO: 53544 - DNA, 683 bp, Homo sapiens
ccctggttcacgccattctcctgcctcagcctcccgagtagctgggactacaggcacccaccaccacgcccggctaactttttatgtttttagtagagatggggtttcaccgtgttagccaggatggtctcgatctcctgacctcgtgatccgcccgcctcaacctcccaaattgctgggattacaggcatgagcgaccgcgcctggccggaggtgtcttctttatacagacagaagccagaggcagcaaggtcaaagtgcgtcctgtggcaaaggtgaatgacccctcccctcccccttggtgtttaaacacattttttttttttttgagataggatcttgctctgtcacctaggctggagtgcagtggtgcaatcatagctcactgcagcttcaacctcccaagctcaagtgatggtcccacctcaacctcccgagctcaagtgatcatcccacctcgacctctagagtagctgggactgacgcgtgccaccatgacccactaattaaaaaaaaaaaattggaggggtgaggtctctatgttgcccagtcttacccaaactcctagcctgaagtgatcctcctgccttggcctcccaaagtgctgggattacaggcacaagccaccgtgcccggccctgaatatgattgttcagtaacatcttctgtctgcccttctcctt

SEQ ID NO: 53545 - DNA, 801 bp, Homo sapiens
ttttgttggtaaaatgtggtcactccagctgccaggggtgggtgctcgcctgttggacataggcaaggggaggcctgggggctggagcaggaggaaggagccacccaaatgggcaaacagggttctccagagggacccagccctgcgggtggagctttcttccaccctgtgtttttctgtggcagagacttagaggcagttgcccaactggcatatccctttcttttcagtcattgaataacctaatttaaacaacctgccctcagcccccaaaaaggtgcaatctgactgcagctcaaaacaacattccagccatcctaggggaaaggaatttataaatattaccttggcttccatgtgctttactgagctccctcataaatcaggacttggggctcctgcactcccagactatataaagctcgcctctgactcccgtgtttccaattttaaatcgaatgcagcccagccctgccggctcctgtttatcctcaaagattccaaaggcctgttcaaaggctcccagaaccagccagctaaaaatgacccacggcttccgctagagaaatgtggtatcaaaactcgtgtatggggtgagactgctccatgaagaatggtagcaatggggaatatgagttgtgtttctccaccaaaaaacaaagctacataaagtaaaacaagaccaaaaaccacctctgagaaaggtctggccccaaaccatgtgtcaatctcctcaccatcttgcttttctggtagtcatttccatagcaacaggttctcaggggtctggactgggcaaga

SEQ ID NO: 53546 - DNA, 2658 bp, Homo sapiens
tcttctatctaccaccctcccaaggatgcagttgaaggaaaaagaagcataagacagattttctgccctccagagatgtggactaaaaatcggaatgaaaacatggatgcacaaaacagacaacaaggcaacgctttccattgttaacggtgtgagttacagagcagcagtgtgggtcagcgcctgctcagccagagctgagtcttctcctgcacttcagcaccagccctgcccacacaaagtcctgggcatcgcactgcaccaggagctctgacatgaacaatgcccagtgatatttcacaatcaccccgcccttttatgttttgtctgtccttctgggcaggtgcgggctgggcactgccctgcctgcttttaacagataaagaaatgagcccaaaggaagaaaagctcataaatgttcacaacgtcacctgctgagtcaaggcacaaacatctgacattctcccctctctggctgccaaaggagagaactgggcctggctggttagttccaccccatgagagccccccagaaatgcccacctaagagactggttcccctgcccatgagcctgcccccacctagcccagccacctaagaacacacaggctttctccagcagccagtgtgtctgggaggaggagaccttttctttttggcccacttgctggtttctctcagcacagctgggctcagtgacactggattttgggcattacaagcacgagtcttagaagcaaaggcataattgccccccacaggcattgttccatctgctggaagaatgaatcaataatattgtattaaccccagaagcagggctgccatgttcagtctgacaggttgcacactgcacaactgcaggggggcaccagccacatagtgacctgcctggaagaatttataatttaatgaggacaaacaaatcttagcatagatctcactgtactagagacaaaagggttagaatcaagcagacttttccacagctagcactagggatgacagtaaatgacaacaggctgggtacgaggggcttggtcccaagcccagctcagacagcaactaactgacctttggcaagagcctcggtcacatcacttccaacaagaaaaagcacaggaaagccctgcgggagcgtctaacttaagtactaggtagcatcattttaaaagtgaaactctggctggactaacagcccttagccgttccttctggctgggccgtggtgcaattttttgatataacaggtgggatcaccaggggcagaggactcagagatgggggagagcaggaagagtgagctgggtgagccctgcccaaacactccaagaacacggaagcaaacacacgcccttcgaccacttcgcttatttttttcaccccctctcaggccggaacaaagagcctttttgtgagtttaatggtgtctgacttactcagcaaacttttctgtctcctttgctgtgaggaaaaaaacaaagctctctgtccggtttgttaggttcctttgaagagcttgctgcttgggtttaggcaaacaggaacccagctggcaccgccctggtcagggcgctttctgggagactttccccaggcctcgtctggatccgggctgaagagggggtggagagaggtgggcacagaacaaagggtgagggcacctagcaaccttccaggacaggtgttacagctgatgctcctgagcaagctctacctaaaggagttcattgaatcctcaccacccctctgagggaaaggaccatgtccccactgcctggatcaggaaacgcagactggccgaggtcaaggactttgccagcggtcacacagacagggagtccacccccaacacctttactctttccactcactgagtccacccccaccccagagatcccccagccttcgctcatcctttcctcatcctcccagaacccaggatctgcagagcaggaagttcaatagccaggcctgatgtcgttagtcagtcctggggacaggcatcctttcctgtcccctgtgagttcaaattccaactcaagcaacatacaaacgccaaactcagctcacacctccggctctgagctgcagggtccacttgtggggaaggggagacagcccagctccctccctccctctcccttatccacacacatacacacacttgcacacacacaaagacacacatgcacatgcatgcacacacacactcgtgcacacacacacgcctcctggcatgccacagggagataacgcacacagccacctcccagtgaccacagagctctatctcagggtgacgtcacctcatacacagctcccagttcactctaagtgattcatcgagggcgtaaactctgagggcgatggaggcatcagggtacagagatgaagtcagtttagtgccatttcctatccatgggctccccagaagtaagagagaaaggaaggaaggccttttaaaagtccacattggagccagtgacttgtggctttcccttgcagaaaagaaactttggcaacagctagtagtcatcttctcctgagcccgccaatctcacagccccctccacacacacacacacacacacacacacacacacacacacacacacagagctgcagctgcagcactgcctagctggcccccaaac

SEQ ID NO: 53547 - DNA, 547 bp, Homo sapiens
gggacaaatgctgatcatctattaacccattccatcctctcagccacccctgagggcccggtgtcatggatgaggaaaccgaggctcacagaaagtggcctgcctggggtcccgccgcgagggagacctcctctccatcacatgcctttctgctgcaggacttcaccctcccctgcacctggttcatgatccagcacattcttcaggatccaaaggccacagggcagggtcccagctgcactcacaggcacctgctgctttctggcagtcatcgtaaacgcgcagtgaccttaaataatacaggctacgggacactcaaaggcacgtccacagatgcacagccagcccgtgcagacgctcggacgctgcctgcccaggtccaagctgctctcccacacccctgcagggcacagcctcctgccccacccacactgcagggaccaggtccctcttctccatgccttccttctctggaaagcctcctgcttgggcccccacatggatgtcacttgcttgtgatgagccctctctgacccgtcactcccac

SEQ ID NO: 53548 - DNA, 470 bp, Homo sapiens
tgaggaaggccccatggaggtcaaggaaggggaaggcatcccagagacactgcaaggaggaagggctggcagcattaggacaaaggggacatgtcagtcacgggcacagaagagggtgaaaccgaaaggccacgcatgctgggaagacgaattggcagctgggttcaatgaaccaccatgccctcaaggttaaaattcagaaagatctattttggtcttagatcatttgcagttttgttaggtttgttttgcccgatagggtgggcagggagggggaggttgcattcgagtcgtaactgggatgatttctgggaacgagagcctgagaaattccttctctgctcaaggcagcaggggcagaggagacaggattcccatgcttcactctcaaaccccggccagccgtgcgggcagatgtcaccagtgcctgctgctggcaataccacttggctccttaaatggtaaattct

SEQ ID NO: 53549 - DNA, 2235 bp, Homo sapiens
tatcacatgcaccacccatcccatcactctggaaagggcctgatctggacaacgaattacttgtccattctgactctaacccactacctccaggacttaaggaactaggaaagcaaagaatggaaaaccagcaagtcctcttctttgggggctttgttctatgtctgggggatgtgaagccatctccctcctagatatgaacgaagacacatgtggcctggaaggtgttggcagccactttatcaccatgagggaagcagtttgaggactcacctgacctacagggagaatcacagataactccacctgcatcttcctaagagtgagaaccttggagaaagtcaattcaaacacttgccttccctcaggagtcagttctgagagctaccaaggagagggcaggatcagggtgaaaaatgacttgggtctcagacccagaacattctactggctgcctccaggactcagtggggggctaggaagggttctccatcttccaagggtgtggagtgtgctgtgggtcactcagaacctccctctcctcttctgtgatcagcggatcttgtccagcccctctccactgctggctcactcagcgccctcccccacccagaaactgctgggctcacctactgagctatgtgatccctaagaagctgtcagagctgtacaagtctcacaattccttactcactaagcactggcaagcgcaagctccagggcgtggctgtcagcactctgcaccttcctggaactgtcgggggagcatacggtcagcagcaccatgcacatccttattgtgcagctcaggagtccaaagccaagaacaagacggtgaagacagcccaagaaggcttttcggtgcagtcaatgtctgacatttatgatgcacccactcaccggggacaccgagtcacatctgagcctcattttttcttctgggaagacatgcacactgcccgactcatatcattcacctttggacaggcaaaggagggaaggaggcaaggcaggtgcttctttctaaaaaaaaaaaaaaaagaaagaaaggataataaagagagaaagaaggagggaaggaagggaagggaagggaataaaggagaagaaggaaagaaaaagaatgaaagaaggaaggaaggagagagagagaaagaaaaagaaagagaaaagaaagaaaacaaaagaaaggaaggagaaaggaaagaaagaaagaaagaaagaaagaaagaaagaaagaaaaagaaagaaagaaagaaagaaagagagagagaaagaaagagaaagaaagaaagaaatcaagcaagcaagcacgcacgcacgcacggcccaggaagagaaaaccagtgagtcctctctaaatggtgaatcagagtccgtggcatagccagggacaaagtccaacttgcctctgcccggatctccgtctgctgccatctccggaggccacacggcctgcccctcccctgctcgctcctcattctctgatgacaggtggtatgagtggctactcaccactctgacagcctctcagcagcagactgtaccctgggtttgcaggtagagcctgagttacacctcctgaatgcattacacatcacaacactgtcaccacactctcttttgacctaaagaaaccctgcactgggtgacctccaagaagccatctgcctctgatgcttctaggttaggcagcagggctgggagagtggtaatataaaccccttctttccactggggccttttggtttcagtccttggaaatattatttgtaaaagaacttaaaatgcactcgctttggggaaatgctcagattcaggagaccccccgatgggacatggagagaagccggggtcctggggaggcaccacctgccttgcctctttctgcaccccagcacccagcccaggcctggcacacagcagggagggctggctggatgcttcctaagcgagtggttattctctaagtggatacaaccaatgtgccggccaaacagatgcactggagcctctaggtgcttaggtttggttcacggtctcgcaggcatccattgattggaatatatgtagacttacttttttttttttctttttttgagagggagcctctctctgtcatgaggctggagtgcagtggcgcgatcttggctcactgcaacctctgcctcccaggttcaagcaattcttctgcctcagcctcccgagtagctgggatgacaggtgtgcaccacc

SEQ ID NO: 53550 - DNA, 932 bp, Homo sapiens
ggaagtttagaagccctaaaggacagctacaattgtggcagctgtgagagagcagctgttgttgatccacacacgggccagaaggtttattccgagaggttctggaaatctgctgggagggatgactcccttgtgtggggaacacactcagatagttgcatattcactcatctacaccacaccatgaataaaacttagattccagattttaaacactgccaaagggcaacttcctccctttacccactgacctcacaactgccctcagcacacagtcatcccagacctgctcccacaacagggctccctccactgctgcggcccggctcagggtcaccctgggaaatgatggttaaaaaataaaaatgactgaggtgcccggttcagccttctgtgccgaatgagcgcagcagccaggtgcaaccggaatgacggatgggaaccaacagatgtccctcccacatggcaccagcagccagggcccctgaaggccactgttcaccttggccctcatcctgcaaacatgttcggagctcattctctgagccaggctgtgtgctgggcatggagctgctggggtgagggcagacaggacctggcctctagcctcaaggtccttgcagtctgggaaactttacaagcacgtgaataaagtattcgaatcaagaaagataggaactgttatagaattaaaagcaaagtgctttgggtagagttacaagcaaggtacctggaaacccagaaagagaaggattcttcagtctgggaggaaattaaggaacattcacaagggtcagaaatgagctgggccctgaaagatggaaaggaatttcctgcttaactagaaagctttctccacagtccgaaatatgtttcacagtgagaaggaggataggcagggaacacgttggcgttgttgtggtgtgttgttg

SEQ ID NO: 53551 - DNA, 2453 bp, Homo sapiens
gcattcactccattctggcttctgttgagacgatgttgataaagctgatgcatcttttatcctctcctaaatgggagggtcttaaagggaagccaagatctttgcatttcccttcccgagactcagttcagagccatgtattagacattcaacacgtgcccattaaataatagatcaatgatagatcaatagatggatgatagctcaagagacagatatattgattgattgatgatagatatataaacagatgatcaatgatagatcaatagataataaacagataaatagatgattgatggacagatagatagccagtggctgacacctgtaataccagctactcaggaggctgaggcaggaggattgcttgagtccagaagttccaagctgtggtacactacacagatcaggggtccacactaagtttggcatccatatggtgacctcgcaggatcaagggactgccaggttgcctagggaggggtgaaccagcccagattggaaatggagcaagtctaaacacccataatgatcagtagcgggatcactcccgtgaatagccactgcactccagcctgggcaagatagtgaggccctgtctctaaaaaaaaattgaaagatgatagataatagataatcaatggatggatagataaatgaatagatagatgactgatggatggataggtagatagagggataatagatgatagagagaaggaatagatgatgatagatgagagagaaagagaggtaatattaaagccatcatttctggccttgcagggaacactctctcagccgtgtttcctgactgcactggggaggatttgggtccaagctcctcctgtaatttcctgaggtcctgtgaaatgatcctgccctaggcagctgcgttcccagaggagtgtccacctgggagcacgccacaagcccagaggaacattctgatttcctaatggaaccagatgtcccagtttgggcaaaagggcctcccgggaaaacagagtactgccaaggactcagtctggcatgtccccagagggagagaaactgtccccacccaccacttacttggatggaattgctccccggcatgcagaggtatcactgtgtgaggtcagcaacgatgcgtggaggcctgtctcgaggcgaccttctggtggggaggacattctctccggttgtattttcattccactcagtgtttccgtgcagagtggagtgagcgcccctccttgacctcatgaagctgctcaagggcaaaactctacctgggactcgatttgcttagaaacaaaatacgcaaaggaaacaccaattcaaggtagcctgttattcacggccaagagagagacttctctgacactttggatctttccctccatcaatcatttacttcagtgcttggaatgtcaggaggaaaataatgagtcacacctggtctgaggcaaccaagtcacttgtcagcacagagtgcctgcaatcacagcactcggtgaccaaggcccagatgcttggctgcagctggaggcataacaagaggtgccagagagaaagaccagtgagatactttacagccaagatctgcaaagcacacatccagggactccagcttaggaagcctggctgtgaatgtttgttgaatgcaaaggaacacatcgttgtaggctggcctgggagcccaacacaaaataagaatcagtgcccagctgggctttcagtttacttgttattagaaatattattgggctttatcaagtcttgacaactctattgccctgtttgaaagtgacacagaattaatccatgggctgtcagatcatctgaggaacggccttatagaccaggccagttttagattcagcctgctggatgtgggagccacatgtggtgggacaagcacaggttgggggctggatgtgggaactcagtagcacccagcctcttgagtaatactgctctcatcaatgctgtatttaaccaaaactgcacctaaatcgtatcttacctatatttcttgaatacaagtttatactccatgctattttagaagcagcaagggacccctctgacaccaaagaagaaggaaaaaaatctaacaattagactctttgaagtcagcttgtgatggattttttttcctatggctcagtcaagttttataaatgacctatttctgttctgccgcccacagattcctagaggctcgtaggcaaaatcccacgctctccggatggccaaatcttgccttttatgatcaaagtctctcccaggtctttgaaaatcataagcataagaaggattacagtaagccctgttatacatgtaaaattccatggaattaagtctcactctcttcttcgtgcctggtagaaaaagtatgaaggaaaagaaaagtcacttcaacaaatcttctgtttcttcatcctcatcccagaagagtgctg

SEQ ID NO: 53552 - DNA, 2000 bp, Homo sapiens
taatcccagctactcaggaggctcaggcatgagaatcgcttgaaccagggagatggaggctgcagtgagcagagatcacaccactgcactccagcctgggtgacagaacgagactccatctcagaaaaaaaagaaagaaagaagggaacagatacagaggaaagaaggaagagagaaagagggtaggagagggaaagaaagtaactttgtgtgaagcaaggatggtaacataccttgaactgagaggcaagagaaagactgaggcagagacagagacacagagacagagagagacaaagacagggagccaggaaacaagcagggaattaaaagctctgaacttcgtgcttcagagaaaaggggtcaacacaggctcattaccaaaatcctgctttcaacacaaaataggattaaagtggattcagagaacccgtggccagtgacgtgacgggaccgcctaagaccttagcacgccaagactggcacaatcctggaacataaacacaaatagctcaataggtgcttgttaccacaagagaaattgaaaaaaaaaattaaatttaaaaaattataattaaaaaattttttaaaaattaaacaacaattttaaaaaaattttttaaattgtgccagggccagtgctaagaacaaaggtggaagcaggaccgtcctcagggagccgcttccgaacactcctggcagagttcaacattcactgtcagtgatcagattaaaaattacttcaccatcataaccggactttcaccctccccagccctcctcctttgcaaatacaatctggttcctggactcgcctcactgcctacaaagaacaagaacaacggtctccacgtcccccgtggggtgcaacgtggctctgcctcacagctcagctctcaaaccgcacatgaaagcacctgcactcatgtgggccccgactggttcaatccctctcccctctccacagtaactggttcaaatgatccaggcttgagccgatcagaatttggcaaagtttgggcaaagggactggggaggggtgcaggaaaagggactttccactcttctgtttttctagagacacggtccctggctttcctttggtttcccgagggatctgtgacctgaccccaaaagatcagaatcactactttttaaaaatctgtttgtgaggacgtaggggatgctgttgtttctctctcctctgtatgtttgaaattttccgcaatgaaaaaatggtttctaagaagaagatgatgatccatctgctctcacaaggggtactagaggagaccacccaagagtaggatgggaaccaggaatcccgcgtggagctgatggctggatgctacccacagcatcgagccaacaccaacagtcactgtgcggaggcttccccaagaaagccacgttcacctctaactccccaggggcatgcaaactcccggggagagctgtgggaaccccactttagggcgacagtgggcctcacagctgccccttcctttccagcccccacccccgactgtgctgccacctggtaatgtggtgggggcgggagcagacctgacttcagctccagcgtgggtcccgcctagtccaatccctctcccctgaccacagtaattagttctaatgacccaggcttcagcccatcagaatttggcaaagtttgggcaaagggactggggaggggtgtgtgaaaagggattttccactccgctgaaagagcctccagaaggcttaaaacaggaaacgtctggcgtgtaggcctgaagccactgcagccccgtgaccttgctcagggaggccggaggcttaggatgaagccaatactgaggaaagcagaatcgcaacgttcaaagaaactgaggcctgggtgacaccacggaacctccggtccagccgcccctaatcctgctctgcgtctcagccctgaagtcacctgaactagaaatgcccgccattgtttaccagtggaagtggcttcctgttactcg

SEQ ID NO: 53553 - DNA, 811 bp, Homo sapiens
caggaggctgaggtggaaggatcacttgagtcaaggaggatgaggttgcagtgagctatgatcacgccactgcattccagcctaggcgacagagaaagaccttatctcaaaaaaaaaaaaaaaaaaaaaaaaccacacacacacacacacacacacacacacacacacaaaactctaacctcaatggaaggaatgcctgagacagcttaccacgcctcccctagtgagaaagtcagaggccaggaaaaaggcaactccccaaattggcaaattttatttagcatttgtccaaattcaaattctatttgggtacacactgaaatcggttccattccaaccttttgggaagagtaaacagtacactgtcttcccttcttcctcaccccttgaactctgagaccaggtccctgtgtcacttatacattggccaggggtgtgcagggccagtgtttgccagctcgggagagctggctgccaatgtgccaggaattctgctgaccagaaacccccggtggcttaatactagccagggtgggaacatttacaccagggaaagcagcaacacagttttgtttttgttccttttttcagagagctggctggccagcatcccactgagttatcctaaagccggaaacctgctctttgggcccaagcagcagctctgcacccaggcctggctgcccctgagagagcctgtgtctaggctgcggccagcctgctggctcctgcccaccacagggctggcactcccatcatcaatttgctcaggctgccctttcttccaccaccgtgacctcctaacagccag

SEQ ID NO: 53554 - DNA, 1320 bp, Homo sapiens
ctgaaattcctcgactgaggggacccctgctccttcaggaagcctcccgagcatgcagcccacccccccacgccatctccacactattgccccaccaccagctgatcagcattctcccttccctgggccttccctaaggccatcccctgtcaccttgggaatagtaccacagctagccagcctccccacacaggctgctcgtgcaggtatctgaatgaataagcactccccagacgcatcttcccctgccagactgaacttggacccctgccgctaggttctgtcccctgctccactttccagcccaggacagtggcctgagacctaacatgatgcttgcacactctggccaagcgggggctcgtgcatccattaaatgaagaacttgtgttgcaacaagagccaaggctgcagccctggtgactcatgacccagtcctgatggctggattctacccacttcctcctctgcttcaggtcagggtcacggtgttacacactatggctcctcctgtttacctgccgcctgcaggcctgagctcatgaatagccaagcaaaagcctttgccctgaaaactagagtttcacagatgtcacctatgtatctactgcagactacggcagacgtcaccttgagaaggaatgacacgtgcttcagaacgttctctccactcttccacccacgatacgaccttactggctaggaccgtgtgccaggtgtggacctttctggaccccagctcctcttcccctctcttgcccctttgctggggccccgacaccctcccatctaaggctgtgccctgccccaggactgacctgtcctttgagattaggaagccctggctgaacaggtcaagtggctcagggtcagcctaccctcagggagcagactctacaggggcaagctgcaggaaccaccctgctcgtgagttcaaagctcgtctcacagcttaccctctccaaacctcggcctcctctctcctcaaatgggtgctgtgaagactgaagaaaatcgtgcctggccacctgtaaatgctgtgagtaacaggcactgccatggctccaggatcattgctgtcattattaccctaccagtcctgtggggagggcaggtgcgggttctaccatctcatctttgttccatagcaagccccccaatcttgcattccagctccagtaactcaatccttacctaagtcgggtgactgattgagtctctgcccaatttttctgctcagttcccgggccctctgagaccagagcccctccatcgctccctgccttgcaagccacccagcagtgtgccgggccatctcgc

SEQ ID NO: 53555 - DNA, 1733 bp, Homo sapiens
ttatttggggagaaatatattaaataaaaaatgacaatgtcaaaaataccagtgaacctcaaaagttgcggattcattagtttaaaatgtgcctttcttctacagatgcattccataacaaacgatgcagaagacatgctcagaagtgatgccatgaacagaaatattaaaatatgtgtttaaataagcttctgccgttagctattcactgcttactcaattaagctaatcaaatgcagatcacagtgtcagggtcaaagtcttgtgcttgcctggactggaatgccaagtaaaaacacatgcttattagatacctttgatcatgtcaaaggtggttattttgcaaagtcaattaaaatatctttgccttgctatgactgcaacttcctcttcagctaaatttacccttaagacttttccctcttaggtgcactactgtttttaccaggatgaatatgctttagattttttttttctttttaggctttcatagtgcttccgtcgctcatttcagtgaccatattattgcttcataggcagcaaaaaaatttgcttccccaaagagtgtccttccctcaaatccatttcattcttgggctgctcggattttggtaaagtaggctgcgaactgggatggcacttttcggagtgtgccggggtgccccaaggccaccttcactggagcggagtcggggtcacgcggacgcctctgcaggatgctcggacactgcgccacggcctcacccgcgccagtggaggggggtttagctcttaccgtgggctcgcgcctggcttccccgagagggagcaccgtgggcgtttcccaggctctcccccgccactgggcaacggccccgcacgcgtcccgcaccttccccagggcgcgcggcgctcggtgggtttgcggttgcgaaaccccacacctggcgagccgcacggactgcaaccccgcagtgcgctggcctgggacaaggcaccagacatgagagcccgtctgggatgcgcggcaccactgggaccctgctttcaccgcggcccaccccgccaaacgcccccgcccacggagccagcgcggggcgcgccaccacctccccggcgcaggccatcggatacgcggccggcctcaggagccggcgccgctgcctcgctctgacctccgcggcgcccgcacgtacccacgtcgcccaggaagcagccgtccgccgcccggggctccatgcggctcaccggcggccgcgcggcgactctgggcgccgggacctgggccgggccgcgcggggccgctgggcggggccagtctgcgctgggccgcgcgtcgtcccgaggcgaccgagccgggagttgtagttcccgccgccttggcgaggttcccggaggcgctgtccctgggtccggactccgctgtcgctgcccaccccgcttcgcccgtcgcgccgaggagtgtgtgtgcttgcatctgcaaaccgtgcgtcccgtgcacagaatacgtccggtgcaaaacgtgtcctgtgcacttgtcctatgtaaacgtgtgtgtccgtgtgcaaaacatgcatcctgtgcatatgtcctgtgcaaaacatgcgtccgtgtgtaaacttgtatccattgtaagcatgcttccctgtgtccctttgcaaagcatggatatgtgtttccatgtgcaaaacatgtgtcctgtacaaaacatgcatcctgtgcatgtgtcctgtgcaagcgtgtcctgtgcaagc

SEQ ID NO: 53556 - DNA, 530 bp, Homo sapiens
gtatttccccagcaagagccagaaaatataaattattctgttctgttctgttgttgttgctaagtctttgagtcccatctggaattcactgcaatgtgtagaatgaaaatataggagctcagttcattcttttctaaactgaaatagagtttttccaaaaatattcattaaatagtaatccacttatctatttttgtgttaatctctttttattgcatgttggttccaattaccttttgaatctattgtaagaacctctatgatattgacaaagtttctattactcatttagcaaatatttgctgattacctagcctaaggtctgtgatttttaaactaactaccacatgtggttttttgttgttgttgttttttgagacggagtctcactctgtccccgaggctagagtgcagtggcaccgtgttgtctcactgccatctccgtctcctgggttcaagcaattctctggcctcagcctccagagtagctgggattacaggtgcccaccaccacacccagctggttttta

SEQ ID NO: 53557 - DNA, 2089 bp, Homo sapiens
gccttacacaggtgtaccattatttttcatactgtatttttattgtaccttttctatgtctagatatgcttatacaaatacttaccattgtgttataattgtccacagtattcagtacaataacatatagcatgggtttgtagccaggagtaatgggctatggcttatggtgtaagtatgtagtaggttatgcttctaggtttctgtgatgttcactcaaggaccaaattgcctaatgaggcatctctctcataaggtgtccctacagttaaatgatgtttgcatgactatttatcatgggcaagggtaaacctgaatttattgatggtcaccttagctctctgtgcatgtgttataaatttctagagatgctttcctagggggtaacagccacacctactatatggattaaaacaagggcaaaatttccaaaatgtcgcattcgggccagacaaataaactgttcttgcagcagcacctggggaatgaaacgctgagaagggagaaggcgcccgaaggcgaccacgtgggccacagccacagcactgtaggtcagccgagagagcgtctcccgcctcttcccaagggcatcttccgcctcctgtcaagggtcggcaacgcgagacaccacgcgctcgttgggatcggccgcctaatcaggagcgagctgtggccttacgcctgcgcagaggggagacgcgagcgccgcgtggacgctgacctcggtccgcgcctgcgccttggtttcttcccggcgattggttcccatctctgagggagacgcctcacttcagttttcactttctttttttgcccccccctccccttttcttttcctttggccgcgaggttttgcttccggttgctagcgccggtcagagagaaagtcggcatgttctcgcaggctgccgggcgtcccggggttgcctcttgcccgtgaccctgacgggagacagagcgcgggcggccgcggcgtccctgtcagcgcccgcggcgaggaccccggggctggggcggacggcgtgcccctgaggggggtccccgcgggagcgcggagccggcgactggtgcttcccacgtgcgccggtgtcgcgagggcccgggaggacgcagagcacggccgggagaagcatgggaaggaggccgagccgggatctcaggtcctcgggggcggcggccacgccaaggacgggtaagtccctcctcggcctgggcgcccgggaaccctgcgaggaggacggcgggtccccgaggccgagcgctcgggcagctgccggggcttggctgcgagggtcgacgcgttctccttgccttttgccgcgctccgggtgagggggtgggaggggtcggcgccttctagatgactcaaccttctgtcctgcgctacaacctgtggccgcgctcggtgtcgccggcagggagatcctaaccgtgtcatcttgcccctttctgaggcgtttcgtttgcgtcgcctgtcaggggacagctgcgtcctcagggatatgctgataagttcttggctgaagtttccgtcttcgggtttgcaccggctgggaaatcatttcctgcgggttctgcgtgaagcctgctgctactcgagacttcatggcaatgcgccaccttttctttttagggtaaaacaggtctctccgaagggagggtcatttcagcagcaagcgcaagccgcgttgggataacttggtgcgagcaacacagaagtttgtctgaaggcggcgccaagcagcgtttcgtgggagaactgggttgatgactgaaattttgaggaagattactttgggaattctcaagtttctcttagtcgcttcttgtctatttgaaatctgtaactttaaacaaaccacgcttactcttccttattctccctgtaaggtacaattagaatagaaaagtttatgaaagtgtatccaaaacttaaatatgtggcgtacaagtgtatggtattattggaatggcattcgcgatcctagagtctacagtgttccctgaataaaactaggggtgagcctggcggtaatcctgcctaggaggtttatagcaaagcagtgtcccctaacggtgcaagaatacc

SEQ ID NO: 53558 - DNA, 1157 bp, Homo sapiens
gacacttaaggaaattggagcttggagtgagctttgtaaaataatactaaaaccatcctcctagtggggttactgtgtgacgtccaagaactcgggggcagttggcttgctgtcctgtgctccgttctgacgactgagcccgcccaggtctgcagggtcctggggtcctgcgggttctgtagggttccctggtgtgtggagtccctacccgctacaagctccgttgggtctacggagtgtgcggggatctcccagccctgttggctgtacgggctcagtggggtttgcagggatcccctcgttctgtggggtccgtgggcgccgagtcagggccatgcccctgggctccgctcgcggagccggcgtcgcccttgttgactttcaaaaggcgccgccggccccgcgccctacacgctcagcacgccctgcgcggagttccccgctctggcgcactggccttggctggcgggagggggccggaggggctgccggcggagcagagacacagccaccctccccaacacaccatgaggtgagtcggggaggggcctaggtctcccacatgctgttgtgggaagctctgacccccgctgtgcctggggcgggctcacccacggaggtgactgttaatacagcgctgagtgcgaaggagacccgagaaaatgggcctattctgtctagtaacgttttaccttctggtgagggtgtggggagagaagctttggcagggtcagtgaggccccgcagcagagccctggtgatgaaagacacttttgtatggtacccgaaggcttaacttcactcctgattgtgagtggattgtgtgtggtagtggtggagcccttgcagaaccgccagagagacggtgctagttgtgtgtgtgcctatgtaaacctacaatagctaaggtcatcttttgaaatgtagaacagggattgcacattgactttgcgcttcaagtatttgcaggttattaccttagtttttactccctttgtgcgtgccgtgattatcttggtttaaactcgtatgtggcaagaaattttttaatgaatgtttaagtttctgtgaaaattgtgtatttctcaaattgtattttttggcttttaatagggtcactttgttttctgggtctctgttttgacttacgggaaatg

SEQ ID NO: 53559 - DNA, 1622 bp, Homo sapiens
aagcatttctccaaggagctgtgactctttagtgaagaatggcatttagaaccaccatctaggcactgcgtgaatgaactcagtgtcacttggtgtctttgcttctaggtcctctcagcacataaagccaagaaatatacatatgtacatacgtatatctacatctctatttatgtataaaaagcaaaaacagaggagttcacactcatccccaattctagtccagtactgccaggtttgtgctagcctccttctccatgtgtggagctcccttctctgaggttgactctgtttatcctcagtgttttgacttattgtccctcccaagtccccctcccccatcctcctcccaaccccaggtataatgagacccctcactgaggcactaatcctgacctcccgaaactccctgacctgagcgcgggccagctgccctccccctacccttgcagcagaaagctccattcagatgtcagcagtcctgtttagtatctacctcagagccccaacatgtgcaggtgggggggatgttgcttttttgtcatgattcttatagtctaatgggacaaggaaaacactgattaaaagagtcacacaaataaatgtgaaatgaaagtgatggtaaatgtgacgcaggtgccacgaggacgcattgagggtgattggcctggccggggaggtctttgctcaggaagtgctgcagcacagaaagcagagcataggggcctgcaggccgcgtgcaaaactggacgtgccgtgtgtcggttccacacatgaggggcctgcaggccacgtgcaggccgtgtgtcggctccacatgcccactgggtctgtctcagacttcacttacatcacttctgctgatttcctgcgctaactccagaatgtcacgtggcgagtccatgggggctggattactgagtaacgagttacttagtaatgaaggacacgtgtcccttattgtcacagtgtcccctgggtgcagggtcacaagaccacttctcatctggagtactaaggccactgcagaaaccacagagctgcataaagatttcttggtctgccctgctcttctcatatggaggtgtgtagctggcaaacaccacagggaacagcctccttgtgccagagggctggtcagagtgagtgagccatgtcagccagaggctcaggctgggctgtgggagagaacagcctcacgcctcatatggcagtggcagggccttaagtcacactgagctatttagacttcatcctgaggtcgctgggagccactggaaaggttctgttaggttttttcctcctaaccactagaccgccagagatgaagttttctaaaagatgtttttaaaggtttttttttcaagtgaagcaggcggagtagggaaggattttttaaattctttaaaaactggttgtgatttgttgtaaaagatcctttaagaaagaagtagcatcatatttgcattttaggacgatatcttagcggatggagaagagattggaaaaatgacagtcactgccttaacgtgaaactccattgttgctagagtcacagctctgttctgcaaggtggctcctattttgagtcaactaactatgactgtaaatgttttcttcaa

SEQ ID NO: 53560 - DNA, 2623 bp, Homo sapiens
gatcaagcagcccaaagttagaatttcaaatttccccaaaaattgatagttaaaatggttttctccaaagtgaattcttttgcaagatgaacatttaaaaaaaaaaaaaaaagaacagaaaaagtacaaactacagaacctgcctgcgttatctacagattacctaaagttcccttagaaacagataaccaggaaaatcaatataccatgatattaggtacaccttgcattcatatattacaatgcattcttcatgttattatcttccaactccctgaagaaagcttcggagtacagagaacttggcttttagcaatccatcaccaacccaattcttaggggaaaacagtccagaagagacaaaggaggcagagaacccaccaaacaaaaggaaaaggcggcgaaggtcaggtgcgaaagcatttgacggacaagttttgaaaaaactcaattccaattctacagatgctcagtaagtgagaagggagggtggctaaaaggattcaataatacttctcattagcaggggggagaaaggattaaaagactaatttccacgttttcgccaaaaatataagttaatcaagccctagcagttccgaagcagtgattatccaagacttgtcaggaaaccccgtactcggctttggcagccagactgacccggggcagcggccgaggcggaataggaaatgcaaccgcgaggcctgcaccgtcccctccgcctcgggtgctggtttccaaccgggcgaggtcaccggcccaaaccggggagcgggacccttggcccgggcggccttctcccctcccctccgcttccgctgggggcaagcgcagaggccgggctcggccgtcaccccgccccgagcctcacggcccgcatctccatttccccgcctgcccctcacactgggagccgcccgctcgccccgggacgcggggcgcccctgaacccgcccgcgcccctagccacgactcccgtcccgaaaactacggctgacggcagaacgagacccccgaggagctgcgacccgcgggccgtgcaggagccgggggtgcgcccgccccggctgctcagccccggcccctcagccctggcgcccaccgtcaggccggtgcccagcacgatcacgtcgtactcctcattcatggcggggcaggcgcggacgcaggacccgagcaaggaaaaggcgcaggggctccgtgaccaccctacgaggctgggaggcgctcttgggcgcgaaggaaaggggaagagaaagagaggaaaatggagctggcgacaaggcgagaccgaccgccacctcagacgggaagagaagaactgggcggggagaggaggggagggagcgaggaggggagggctgtgactgagcctccgcagccggggcggggcctgcaggcgccgggagggccgccaatcaggcgctcccggcactctaattggttacgtccccgtcgctcgcacaactttttttccttccccgcctctcgcgagaggaaaagggcggggcgtcgccattttggcttccggttccccttgcggcctctgccacggtggttcgggaggcggcgcgcgggccggggtggaggtgcacggagccgcgggcggggactgctggccaccaccgttctgactcccgccgtcggggcgggagctcgctcggtccaaggtcccagagccggatcgccgcccttggactttgagcgggcgcgtgcggcggccacgtgggcgaggagcgcgggccgggctgcctctcgggggtggcggccttggttcctcccgcggggctgggcttgccggggcccggagcccgccgggaagagttcggaaatcacacgtgtcctttttcccgctctgtgccctccttgtttagtgcgttgccggtgggcgctttaggaaattggtaggaggaaaagcggcttcttttgaaaaggtaacccttaacagagatgaaagtgaaagccaggtttcattgggaagccgatctgcacctaccgagggctgtaacttaaagccgctgtaaacgtggtagctgatccttgtatgcaaaggtttaggccctaagcttagaaactgttccttgcttgccttctaccccgctcctctttttctagaattctcttaggaatctctggcttcattgaggacacaggtgtaagcagaagctgtgttctcagctccaagaggccgaccccacgaaagcctaagcaggtgaatttcgtaaagacgttgacagttggaaaacctgtgctttcagcacgtgataaatctgcagagtcagcagacaatgaagatttggcattcaagaactcctcaaatacttctcgatagtagctattcagagcctgccttgatagaccgaacttgctcatatttaaatcattaagatagaggaaagaatgtaacaactttttaaaatgtttcttaccccataaatacttgaagaagatatgttatattggaccatggatctttctgggggggaggggagaagaaagcaaaagtaaagtttaaatttacattcaaccttaatttgattgtatatatttgtgaccaaatgaattagtgcacagttgaccatacaactgattatgcaacagtgagtgtaactgacttttc

SEQ ID NO: 53561 - DNA, 872 bp, Homo sapiens
gtctagcaacaaattcaagtcaggtttctatttaaagagataaagcgcttcagaatcctgaccatttcagaagaatatcatgggcaatttcttccatagagatggggtcaaagaaaccaggctgcagagctactgatcaaagaagtaaggcaagcctcagggaagctcggacaacgttataagaagtaacaaaccttagctgcataatgaagtgctgtgaggtgggttgatgtggctctcacatctacatcgacgccaagttcagagaccaagaatcggatggcttcgtcctgccctgtgacagctgccctgtgcagagcctgggcacccaggctgtcttctgctgaaaggcaagcctagtgggcagaggagagaaaggagcaaaggtcaaagataagaaacagggcaacttagatctgggcatctgctggcacttcagcaaaactgagctgtttacgcacaactctctgggcagaggatatgtggcttttgtctgattttcaaaggattctttttttttgagacgaagtctcactctgttgctcagggtggagtgcagtggcacaatcttggctcactacaacctccatctccttggttcaagcgagtctcttgcttcagcctcaggtgtgtgccaccacacctggctaatttttatatttttagtagagatgggttttaacatgttggctaggctggtctcaaattcctgaccttagatgacccacccgctttggcctcccaaagtgctgggattacaggcatgagccatcacgccctgctctcaaaaaagggctctctaatcaaaaagatggttatgattcaatgttccaggctatggtgccaaaagcactatcagcagagacagtttg

SEQ ID NO: 53562 - DNA, 1978 bp, Homo sapiens
gggtgtctttccgctccacacctaccagtcggccttcttcaggcagtcgaccgctgccccccggcccagcaggtagcgcacgcagtctcggtggcccatggaggccgcctcgtgcagaggccgcttgtagtctcggttggtggcctcgatgtccatgccccaggcctcggccagataggccagcacgtcccgatgcccgtggcgcgcggcgcagtgcaggagggtatccccggccggccccgggcagcccccggccgcctgcagctcctccttcagggcgcgcagccggccctcctgcaccagcctgcagaggcgccgcgggtccccgggctgggccatcgccgcgggtcgggccgggctgcgcggggaggcggcgggcgggacaccggcggccgggcagggagaagccgagggcgagtgggactttccgcctcttcacgcaacctgccccgcgcgccccgaacccggcagaaccgcccctcacgcccccggctttgtccccggcagagccgcctcctcaaacccccggcctagtccgcaggcgggctgccccctcacagccccggcctgccccgcgtgggagaagccgcggttccgggcacggggcggtttttcctcagggacggagcggtccgggatgagcacggaggggcctggggatccgagagcgctggcgtccgccgtcctggagctgcagcggcccgtacgtgattcgggactgaacacgtaagggagtggggcgcgccgctacaccgcaaagccccaaagtggagggtccgggagggcgcgcacagcctcgcccggcgccgtgcagggtggctcctgaggcagccaggcccaagcgtgacctgccccgcacgcgtcctcagggccgccccagcctccagcccctgggggccggcgttcctgggctccgcccccgtccccgcccctcgaccgccgctgctccgcggggactcggggagctcgaaggaactctgggaaagtttcccgctccgccccggcccgagcggaagcgcggatggggcgtggcccggtagctgtggccgcgcccccaccgattgcgcatttcgattggcgttagtggccgtccgtcagcacgccccctccggtctcgcgtcccgattggtcgcgggggccgtcagtccggctccggcggcgggcgcttcccggggctgcggcggggcggagctcgcggaggaagtcggcgggcgtctcgggctccaggtcccggccagaggaggagctcgctgccgggggacgctgggctgagcggccggcggcgcgggcccggcggcggcggcagcggggtccgggtccggagcgccacagtgcgtgaggccgcagacgtggcagggagtgtgggaggggctccgccgtgtggaaaacttaacctccggggtcctgcgcggggggtccgggcccggggtggggcagcgggggccccgggggcgcgaggctgggctcgggcaagcgcgggcgtgggggctcggccgtccgggccgtgggcaggtggagggcgcggcgggggtgcgcgggggaggccagggcgctcactgaactcggtcgggagcggcccccgcgctgccccccgaggccaggaaggcgcagcgtgtgggtcctcggggctgaaggggcaagcgcggggacgtggcctcggctgctaggaggccaggctttcccgtctactctgacgttttgaccttgggcaagtcatttttcgctgccctctgcccctgtgtcatcggtagcttctctgcccctcctctgagcatgggaagcctaaggcgatgtgggaggcctggcgctggtggagggcacggcgagagctgggcaggctgtgggtgatggaagagatcagtaggtgttgggttccttacccgatctgattaggtgccagtcacttaacctctccatgttttcgattcctttagggagtagaatgggagtagctcctatttgccaggcctaaaaacga

SEQ ID NO: 53563 - DNA, 523 bp, Homo sapiens
gtattttataaatgttatcatatgtggcctctactacccgatccataattatacttttatgattgtctcagaaatgcctttttacagttgatttgttcaagtcagagtccaaaccaacatttggttgcttgtctcttaagttaaatagagagctgtacgggactccctccctgcttttcccatgctcttgtctcattgcataaactgggtcattcgtcctacagagcgtccccattcttggtttgcttcccggtgtggttgtgtaacttgttctgccatcattacctgtcctggctttccagtaactggaagttagccgtagaggcttgattcgattcaagcctgagtcttggcaggcgtgccccatgggaggccggagagggcttcgtgctttgcctcgtcacatgaggaggctcacagcctccttaggagtaggttagtttttccccgttagtgatgctgattgctcatcttttgaagaggcacagctaggaaatgtgtatttttgaaaagaaagaaaaaa

SEQ ID NO: 53564 - DNA, 1410 bp, Homo sapiens
gggcagggaaggagagaagaggaggagatgtgaatcatttagacttgtggcagctgaagacgtggggactgaaggcctcacagctatagaactttctttttttattttggactcaggagaacatgtacaggttgttacacgggtatattgtgtgatgctgagatttagaatacggtgctcccatcacccttcagagttctgtgtactctttccatttcaacataaaaataaaaaaggacggactcttcccagcacctggcagatgctgacctcctggtcattctgcccattcattcacccaaatatttgctggcatttactgagtgctgaggactgaaaggcaattgcacttcctgatggccctgaaaggtacagtggatgggtgccaaaggacctgtgttgattccttccttccctttcatcattcctggccgcttgaacctgggccagccttgtgactcgcttcgacggatagaatgccacaaaagtgatgcgtgccagtgtctggaccagcctgtcaggggcctggcagtttctatgttctttcagccagtgtgactagcctgagcccaccgtgctgtgaggaagcccaagcagccacgtggagaagcctcctctgattttgatgaaggcatctaagctgaaggcaggcagatatcggtgaaaaaaatggtcaggtgtggtggctcatgcctgtaatcccagcactttgggaggccgaggcaggcagactgcttgggctcacaagttcaagagaccatcctggccatcatggcaaaaccctggctctactaaaaatacaaaaaattaggcgggcatggtggtgggcacctgtagtcccagctactcgggaaggctgaggcaggagaatggcatggacccaggaggcggagcttgcagtgagccgagattgtgccactgcactccagcctgggcgacagagcaagactcagtctcaaaaaaaaaaaaaaaaaaaaaaaaaaaaaaaatattagccaggtgttgtggtgtgtgcctgtgcctgtagtcccagctactccagaggctgaggcatgagaattgcttgaggcggaggttgcagtgagccaagattgcatcactgcactccagcctgggtgacacagtgagactctgtcccctcccccacaaaaaaagaagtcagtgaaaaatggcactttgagaatgtctgatgacatgtggattgggcactatgcccatgccccatctcccaaatgctcacagtggctccctcttccccctggctgtacaaggggcagttggtggctggttttcagccaggactgctcccctcccgccccacctacacttcttattacttttgttttttaaaaaaattttggctgggcgccgtggctcacgcctgtaatcccagtactttaggaggccgag

SEQ ID NO: 53565 - DNA, 615 bp, Homo sapiens
gaaggagagaagcctgcagaggtgggcctgagtgttccagaaacagctccaagtggttcccacccgagatggtttggctgcttctgggacgtttatccaggtgcagacagttaaaaaaaaaagttgattcttgccaccttccctcacccctgctggacaccatgcacaggtgactgagcaaagggcagccctgctccagggcctgtgcccatccccggggctgggtactgagagaggagcagtgatggcttccaacatccaccttctcatgggaaatccaaacatttctcacactagcgtgctcatgagtgcccgcccagctctgcagccaaattctcctgccagcatcgtctcaaatcaaagcactacatgtaataagagttaatatttaccagggttcacgccaccctcccacagcccgcagtgtggatatcaagtccgttttccagatgaccagccagagtgccagaatatcacaagagctgcccaaggcctcctgggtggtaggcggcaaagccaggatttaaacccagaatcctgtgaccccagcacctgtgtgtttccaacgccaggagctgttgctgaggatcacactggtgtctttctttttttctt

SEQ ID NO: 53566 - DNA, 1461 bp, Homo sapiens
gtaatcccagctactcaggaggctgaggcaggagaatcacaggaacctgagaggcggaggttgcagtgagccaagattgtgccactgcactcgagcctgggtgacagagcaagaatctgtctcaaacaaacagaaaaccccccaaaaaccaacaaaccaaccaaacaaaaaacattagcaacaaatgccaaagtgttaagaaccttagcacggagagaattcttataaaaatcaacacaagacaaataccctaatggcctaactgggcaaaggacacagtgggtgagtcacaagagagccatcacctaagtccacacaaaaacatcccaaacctcactaacacatccctgttagaattccatgacctctgctcttgcttctgaaggatcctgtaccaggcaggctgggggcagggtgggaggggagaaatctcaaattcaagattgttctttccattcaactcccatcccaaagccttctcctctgtcacaggggcagcgctctgctcacttcctgtctcaggcatctattgtccagtggccgccactactccccattccaatgaggacacatcttctgctaagctgatggcgtgagagatggagtcgatctcacaagttgttgaggtggatttggatgctgctgttgctatggttacctgcagagccccactggctttgaggcctctggtgctatctggtgctggagtgtcagaggctttttctccatgttctgctccacactgatcttctgtccttctctacctgcctaaaccacagagtgttatttctccacacttgcccaccccatcctgccctccatgatagatggctgtgctacctgcttgctgcctgcttgtccgatggtggtggcactgggggcagttttccattgtcctgagtctcacgcaggcctcgtgtgtctggacctcatggttgaagctttcagatattctgctccttcccgccaggacagccagcctgtctcttgcatctgtaacaggttttgtacaggaagtgttccctgcccatttccagcagccgtggacctccagggctgtttgtgtaggatcctgagcaaggactaagtgtattgtgtgtgtttctggctgactcaccaatcgattccatcgatctatgtgtctgtttgttttgacaccaataccgtgctgccttgattattgttgctttgtcataggtcttaaagtcaggtagtataagtcctcctactgtgctaatcattttcaaagctgagtttgcttttctagatcctttactgtttttttgtttttaaattaaattaaattaattttttaaattaaatttttaaatttaattaaaattttataattaaaatttttaaattaaattttttaatttaattaaatttttaaaattaaaatttttaaattaaattttttaaattaaattaaattaaattaaattaaatttttccaagata

SEQ ID NO: 53567 - DNA, 1325 bp, Homo sapiens
atgccttaatcacatctttagatacttgaattatactttctatatattctctcataacattgttccctagttattcaatgtaaacaagtctcaccttgtttacaatattataagctccttgcagatggtatgtatatttcacagttctgtggtactctcactttcctacggctggtatacgatagatattttctgaatacatataatggaattatgaagtaatggaaattggagtaaacttatggctctaggactttcaaaactctgaagtagccaaaaaacatatacaacaagtcctaacgatcatttaaatgaagtcaccaaaatagtgtatgaggccacacctctttctgtttcccagaacctgtgaatcacacttccttatctatcaggttggtttacagagtctaataagagctggcagcctcggcctggttccatatccagagttcagaggttgtcgggttagcgtggctcccaatcctgtgagcagagtcagaatggactccaacattcccctcgcttacagcacctttcaaatgcctgcacgagctaagggtggtaggattcagagatgtgtcagatatggttcctgccctcaggatgctcactgtggagctggtgtacggaaaaggcaaaggcctctggcctcacagtcacccatcaccttccttccttattttccccgctgaaatgtcagccaagtcaacacacttccttttggagttcccaaaaagtacagactgtctccagctcactgcctgaaacttggcaattcttttctttctctctcagactcattaactgagcttcctgacccacctcttgtgtgccaggtgaatttctccataactcgaatccttaaataatgattattggagtcttgcaagagttgagggctacaggttgaagagcaaatgaaaggaaagtaatgaaatacattctatagttttaggactcgagaagacatctggcctcttctgtctcctgcattgacaccgcctgtgttcaggatttcatcaccacccaccagaacgatttcaaaaacctcaatgcagctcctattctctggagtctcctgactacagttcattcttcacactctgaacaagagcaacctttccaccatgcagctccagtaatgctcccctgcacagaaaccctcagggactccccactgcacagaagggaatcatgcctttccaagaagaagcattcaaatcacatcaactatgtccaatgagcaacactgatatgactcccacgatatatactgaggagtttcatatatatttattcatttagatacatattattattactgt

SEQ ID NO: 53568 - DNA, 2778 bp, Homo sapiens
caggaggcggaggttgcagtgagctgagatcgcgctactgcaccccagccggggtgacagagtgagactccgtctcaaaaaagaaaacaagaaagaaagaaaaagaaaaagaaaaaacattgagagctttgggaagggaaggtagcaacatctttctaaggtcaaagggcaaggctgtgcagctgatgagatcagagatctcacagtggtgctcccctatccactcagtcttcaaggaagacacctcctctctgctgggctttgactaaggctgcatttcactttcatattgtgtaatccagctgccccagttgccagctatggggtcctgtgacactgctagccaactgggaggaaccaaccggtcaccaactaactctgcttctcagatgtggggggaaatccaagcatcagagtctcatgaaaacgaaacttcaagaagcctcgcagagctggggtgggggtggcagagggtgggggggcgttcaggccacaccaggcagcagcaactgtgcgtggaatggctttggccagggcctgggcagactggcccgactggatgtaaattattcagggtctcgcttaaaaacacacacagatcatggcgttactaattcctatagagagtccatggatggccttcagtggggctttgaccccaaaatcatatgcacattttgtaactatgttcattcatgcatttttctgggggccgggggttcatagctttcatcagaccctccaagagctccctgactataaaaagataaagaagcgctgacaaggatagagctagaccctgctactgttttcctccttcctctggctgccgggacaaaacccctaggaatcgctcattccgtcctccctgccgagatcagagctccgcgacccgctttcttctcgaatacaccaagcgatcacagatctcttccccctttttctgcgagtgtagactccaggctggcccccactccccacccccatccggtcccgaccgcctctgctggtttcctgatcgcttaagaattggaagttgtttccaggtccccaggtgtgcaacttgcccgacgcgtttccccctgggacacagctcctccccaccctcccagctcccactgacataatttacttttgcctgggagtcgggaggagtagtttctcccggacccctccgaggaccgcgtgctatgcaacacccgccctgcagtccaggcgcctgggagaagcgcactcgcccgtgtctccaaactgctggacgccgccggctccgcgctcccgtggccaaaacgggcttctcagaactgctcctgacctcggcctcggagaccccagccaggccgcccgctcccttacgtgggtgacccgggcgcagcggcggcgctctccctgcgaccccggctcccggcacgtgtccctcctgcccggcgccgcgtcccctccccggcctgggcctgcgcgcaccgcgctcccgagggcaccgacgcccccgcacggcccggggagatggggcgcccggttccctccagctccacgtcccggcccccttccaagtcccgcccgggcgcccctgctcccagctccctaccccgcgtcgccggcggccggagcagcagcagcagtagcagcgccgggagaccgagggtccggcagccgcgcgcccgccgcggggccatggcggcagctccacaggacaccgctggactccccgggcgagcgctgcccaggccggggggaggtggcgagcgctgctctgggacctgccgccccgccagtcgcattcgctttcgcttttgctttggcccccgagggctcggagaggtgcaaagcggtgacagatccgtgactcagcgtccccacccctgctggggaaggagccccgccggccgccgcggcaccgcacagccacccctgtccccgggacgcatgggccgtgcccggtggggacccaggaccttacccacgcaagcccgggagcctcccggtcctccgcgctcgtcgtgctctgggacctccagtgtgcactcggtccggtgtccccactgcgaagagagtgggcaaagtcatcggagagcagactctctccagccctctctgcggctcggatccacttgacctcgcccggcgctggtcgcctccagctgctccgccttcggctttcctggtctccctccgcggccctgcgctcggttgtgagcggccggcctgggtgagtgcccgcggaggtgtcgccgcggtgcggaggcgcgggcacctgcctggtgcgctctggcccgggcggagcgcagcccccgccacctgctggctcccgcggcccccggcgcccgctggggccccagctccgccacttcgccgaattcctgctgcagctttgctcccctagaaaatgcctcatcttagaaggagagggggcggaggggggagaagggggagaggagccacagtgcttcacctctgagcctcgcttccttaggttcttccaggctgccatcctcctctttggctggtgggtttttttctttcttggggtctcaagtgaagcctgagaaccgggtctgtaagctcccaagtgcagattctcaggtctagcggtgacattggacaggacgagacatctccaagcctcggtcattgcctcttaaaatctcacaacgtgtttatgaggcttttgtgacatacttgcaaattctctttgaaaacgaaataatctgtacaataatcccccaagacacaggtttacctttataacaaacctgcacttataaccctgaacttaaa

SEQ ID NO: 53569 - DNA, 1238 bp, Homo sapiens
ttcctgggtttctggtccaggaggttatgatttccctgtatcagcctgtctgcctctccaatattggggacagtgagctaccctgtaatcttacttacttctacagacctaagaagagttattgactttcagtttgttcagattttcaacccacagcaaattaattgattatgcacgttgggagccagccaacacaacccctccatgaaaatcactggcaggaattcatcatttagctgaaggaataccagcgagtaaaaactgaaaccaactcacgatagttctggtgatgcatcaggaacagcagccttcctgggagctatgcaaattttacgttctcgatagaataccaaagtggagtcttccataaactttagtaatatgctaattttggtttttgaaaacaaaaattcagggtcccctgataactcacttagtagaatactaaagtcaccataaagacttcaggaggatccttctgggctgatgacccttctttgagcatcaagaataagataagcaatatttaaatattttggcctcaggatctcctttttaaaaagttgaggcgaaattcacataacacacaattaaccatgataaagtatacaatccagtggctgttcgtgtattcaacatgttgtgcaactacctcctccctctagtttcaaaacttttttaccaccccagaaaaatcccctggcaaacacttatctgctttctgtctccatggaattgcctattctagatatttcatgttaaatgagtcatacagtagtgatcttttgtgtctggcttccttcactcagcataatgtttttgaggttcatctaaatggcagcatggatcaatacttcatcccttcctgtggctaatactccactggcagggatatgccatgatttgcttatcaattcttttttttttttttttttggagagaagagtccctctgtcgcccaggctggagtgcagtggcaccatcttggctcactgcaacctctgcctcccaggttcaagggattctcgtgcctcagcctcccacgcagctgggattatagatgcgcgccactatgaccagctaattttttgtatttttagtagagacagtggagatgaggtttcaccatgttggccaggctggtctccaactcctggcctcaaatgatctgcccaccttggcatcccaaagtgctgggattacaggcatgagccaccatgcccggcctttatccatcc

SEQ ID NO: 53570 - DNA, 1070 bp, Homo sapiens
ctactaacctgtctctactaaaaatacaaaaattagtcaggcatggcgatggggcatgcctgtaatcccagctactggggaggctgaggcatgagaatctcttgaacccgggaggcagaggttgcagtgagccgagatcataccactgcactccagtctgggcaacagagtgagactctgtctcaaaaaaaaggtggttggggtgggggaatagtgctaacagtccccatctcctatggtggccatgaggaatctgtaagatcacagaagcagagcacgcagcaaggcctccctggcccgggagtgctcagagctgggatcccagtgcaggacgaggaggaggaggatgggtgccctggctacaggtcctcttgcactagattgaaaacggggccagagaagcagagcttgagagacgctgggagagggaaagtgaaactgatggtccggtgggtgaaaggtagtgaaagcccgaagtgcagtaaaccagggatcaacatctccagccaaaaggctcaccctgtggtctcagcgccacctgggcgtcagacagatgtctggagagacggctcttttattctgaaacacccctccaacttttttttttttttggtaattgtttgttttgctttccatttaatataaggagttttctcctttacaaaagttctttttgttctaaatcaggctgtaaacagaggtgctaccacaaggaccggaagcagagaccacactggtgctcagctgggttgcaggctctgcctggtttcattgtcggggaagccaccaggcctgcccccagccagcgagatgtcacgcatgcagccgggtgtcatccccaaaactcccgggaaactctcggggcaccagggcaggaagaggctgacgtcaactttaactccggggacttcaaacgaaacttttagaaatgattcctttgccctttacttggtgacgtaataaactgatctttctctgaaaagatgggccgatttgcttcaaggagctcatttcatgaggagaaaatacacacaaatatatatatatatatatatatattttttttcttt

SEQ ID NO: 53571 - DNA, 1045 bp, Homo sapiens
aataaagaaaccaatggctttcacaaacttccttatttaaaattaattatcattttaaaaaatagaggtggggtctcactatgttgcccaggctggtctcaaactcctgggctccagggatcctcccctcttggccccccaaagtgctgggattacaggaatgagccactgcacctggctgcagcttcctttttattcttttgaaacattgctctttcttcttcttttgggtaaaaggactcaattgctgctagtccaattgcaccagcttgttcttgcactgcatacagcgtgggaggaaaaagcctgggaaacggggggacatgggccagcgagctcatccggccacaccttccaccatggggcaggcccctctactggcacaggatgtcaatactcctgatccgtatcttgccttccctccacccgttcctcttcctcccagcacagtgaccttccggtcaaccccacccatgccacccacactttgttgccctggagtttcctgccacctgaacccctccttaagcaggatgcctggatccgggtcgagggctgcaggcggagctgctggtcaaaaaccccccggggaactggttgggtgtgggagtgggagaatgggctgtcaggacaaaagcactgggactccagccctgtggtgtgcacgtggctcgggctgggtcaggaaaaaaatgtggaggtagggaaacaagacccaggaactctttggctgccatccagggtcatgtggtgctggtgataagtgatcagtgacccattgaaccgaggacgtctaccggggaccaatgacacctgtagacactgcagggttgaagctgggggagaagcactcacatgctgtctgtctgagcaaaagtattcgtttttgtccgagaatctgagactcatttgcttggcacacacacacaaaacttcatgtatgttgaaatatggctcattatgtagttgtcctggcaaacccctcatctctctaattggtcagctcactactcatggaacacggtccatgtacacgactccagca

SEQ ID NO: 53572 - DNA, 1933 bp, Homo sapiens
ccctttccctccctgcttctgtcagcgacgtcgtttttaaagaccgaggctttatagcattgacattcttttctgtacccctaatcgcggcatctgtttccataatcttacgcttaacctcgtgctccttgccatccttttgcagcatctggcctatgcagacttattttcaactttttgcttatataggagtggctttgaatgaatgagatcgaggggcctggagggacttcccccacctcccctatcagaaagcccggcctcggaccacttctcctcctcaccatctgggggcgctgccgcgctccccaagccttgtggaatttcgaaaatgtgcgccagggcgacacctcttgatggtaagaagacgccggcggaggggagcgtgcagtgcggtcctcccgcgggcagggggcagtgcggcaaggcgccctcggcgcaggcgcagaggccgaagcaggcgcaggcgcaggcggggcgcaggcgcgggcgcgctctcccggcagcccgcgctccctgaccccgcgccgccgagcgccctgaggactcagcgaagggtgggcgccgccgaggcctcctgccgctggcgggtttccgcggagtgccgcccggctccgctctgccgccggcgcggctcatgggcagagtcggccgggcgggccgggtaagtggcgccccggcggccccgggtgggtggcctggcgggacctgaggcgggcgcgccttcccgggaggcgctagacgcaagcccgcggctttaggcccgtcgcgaggggcggaggccgggccagcgcagccggagcctccgagggtctcagtccccgcggcgggcgctggtctctccacgcggctgcggcccggtaccctccgcccgccgccgcctctggtgaccctggccctgaccttctccctcttcccttcctcctcctcctcctcatgtctgcctcgggctgtttggtgctgaagagcgtttcttctccgtctcgtgcaccgcatcctgacgaaattgtctggtcaccagaaccgagtagcccgtagcgtgtcccccctggccctgcacggttgcccctctctggggctcggagccggttcctcccggggtctcagaactgggagtgcagacgttggcgtttctcagactccggagctgcccgggacaggaatgcagccctaaccccggcgtcgcctcggctcgtgcagtttgagcggtgtttcagcgctcacgtccgaccccaggcagtctttgagcttcgcctcttgccccgagaatgtgtaatgatcggagaatgcaggtggaatgaggttctgcccctgcttgcaggagtttggtttctgggaaagcaggcgtgaaaacccaggcccgggttgatttgagaaacgcaagtggggtctggaaggacctctcttgagagaggaggtcatgcttatgttgagtcttgaaggtacgttgttagatgtgagaggtgggaaaaaggctgccggcggaggaagtaagtgcgaaagtagcagaagcgaagccccgtagtgcgttctggaagctgcaggttaggcagaaagaaaggtttgaggaggggctgctgtgtttccaggagtagtcaggtcagaacatggaggtttcttgagaagcagtaaagaagcgccattgagggtccttattttgctagagccaggcatatggatgggaaataggatattctagataagggcaagattcgcatatactcaaatagatgggtagatgtgcactggctccccgcagcagatggagtttttaaaaggatgcaacacaagtttccacatttttagttgtaaaggctgcagacattttgatcgtaatgacagcttttagggaatatggggtaacagtttagtgagctaaacgagagggctttatttttagagttagttaagcaaggtgctgcgtgctgtccag

SEQ ID NO: 53573 - DNA, 1049 bp, Homo sapiens
gcgttggttatttgtacttctcttgctcaattattacagttttaaacataaagacaatgatttcaagttttatttgatgaagaaacaggaatgcttcatgattgaggatcagtatgatgactgaagaccttgattctagcgtgctcagtagtttagttccttagacatgcctttggtttcagtcatttggtgagtatttagtgcctctcacatgcactgcactgtgcggagagcacttggattacaggaagcatgctctgtactctcagtggtgtgttcagttgaagaaacacataaaataactgaaagatattcagttactagactaggtagtattgactaagttcaggagttgagaaaaggattagatcagtgaaaaaatagactgccttgtgagcaatagcagatatgggctgcgctttgaaacgaacaggtgggatttgcagggaagggtattctgattgggataatggctcgtaggagacagtgaagatcaggactaccaaaatggaatggatgggcctgttggggattagcagaagtgcttaggtgggtggaattacagagggctaggaaagctagacagagctagtcaaaatgagacctgatgtgaaaggccactagggcaccagcctttttaatctgaaagctctgcttcctctgtttctttatcctgttgctgtttgttgaccacataattatttgtttacgtcatcagctggcacagggcctttatgaggtcagagactgcctagccctgtgttcctggcacctaacaatgcctgtcataaaaacaggcattcagtacgtttttgatgatgaacaaattatacttatttccttggtatttgacaactacttgactgtatatgatgataattagaatatccactctgagaaatcatttaaaagagaaaactcattcaatgcaatctcaaatgcctttactcatcacgctctcattttcttccagattcctggtgcccctgatgatgaagcagtacggatatttttagaatttgagagagttgaatcagcaattaaaggtt

SEQ ID NO: 53574 - DNA, 1832 bp, Homo sapiens
gcagatcactttaaaccaggagttcccgaccagcctgggcaacatgacaatacccgtttctacaaaaacatttagaaaaattatctgggcgtggtggcgcacgcctgtaatcccagctacttgggaggctgaagcaggagtatgggttgagcctggggaggtggaggctgcagtgagctatgatcgcaccgctgcactccagcctgggcgacagagtgagatcctgtctcaaaacacacacacacacacacacacaccccccaaaacaacaaacaaaaaaaaaaaagagaaagaaaaaattacacaatttcagtttgttcaatttgagtcagctggtgattcgagcgtgtcccctgtgcccgtaggacataaaagtaaaaataagatggaattccctcaggtctcgtccttcgggaaggatggctcggaacagcccgaaagagaaaagggagttggtttcttcccggaccagttttcccctgtcccgtggagtccacaagacaggcggcagcttcaaggccggcaagttccgcgtctggggggctgcgggccgcccctgcgggaccggggggatctgggcgggacagggcggcccggcccacgccccggcttcccccagcagcccgagggcgcccggagctcacggctggcgccgccccgcgcttcctgcctcgccgcggatcctcctccgcgccgtgacgcgccaggctttgaccaaatatgtccctttcccctccctcgcccgccccgccgcccgcaggcgccccgagtcgcggggctgccgcttggacgtcgtcctgtctgggtgtcgcgggccggccccgcggggagcgcccccggcgcgatgcccttcaggaaaggtaggagtcccggtgacgcggcccacgcccccagcgcgcgcggggacctgagcggccgcctgtgggtacccgagccttgggtcctcgccaggcgcggaagcactgtgcacccgggctgcggcggtgccgcccggggccaagcgagacgcgctccgccttgtcccctccgccctgcgctgcgccccggacccgcgtgtccctccagatccgcactgtctcctccggtcctgcgtgtcccctccggccccacgcgtccccctccggcctcgcgtctcctttccggcctcgcgtctcctttccggccccgcgtctcctctgcagccccgcattgtgcctccagacccgcgctacctcctccagacccgcgcgtcccctctggcgactccggccgccaccacgtgcccgagccgggggcggcacttgcagcgaattcccgcttcccgctgcgctccagccccgggccgcagatataccagggctccggacccggagagacccggagggcggcggggcccggggtcctgagggcgggattggtgggctcgggggcacggagaggggcagcgcggcgcgggaggtgggcagctctggcctgagtcccacctttgcccctcccgccctctgacccccgggcagtcatttcagcccccagccccagttgcctcctgggcaaaaccgacagatggctagggacggccgcgtgaggatgggagccgtccccagaaaagcaaactcaggcccgctgatgagcgcggcccggcccctcctgcaggggctgccctccgccttttccgccctgcgtgccagaaaggcccggctacctggtgttcctacccgcaccggggggtcccagcgcaccggaccccggtttacaggccgggtggttggaggcccagcactgcccagagccctgggcccctctcagctcaaagacccgggagagaagtgggagctgcagaagtgtggggaggg

SEQ ID NO: 53575 - DNA, 1409 bp, Homo sapiens
ctttagtcctagatacacctggagcctggcgtcgtggggacagaggcaggtccctgtgctgagggcggtaagacagggcgggtaggtggggacccagctgggaggtaggggggccagacgggacatcagctcccgggagccccgctctgggcacggtgcgcgcctccaccctccattgcaccccgcgcctgcttcctcccaggtgcacctcgggcgcctaagccagctgggtcccgggccccgggagcagctgcgggcccgacgggggcgtggcgggaccggcgggggcggggcctgggggtggtccgcgcggattggctgctgcctgcggcgcacgagccggtcagcgcgcaccccgcccttcccgggccgtgcggcacgccgcgttcacgtgctgtcgcgcgccctcccggcgtgcgccgcgcggccccagcctgctctgcggcgactgtccggctcgtgagctccgcgtggatccggcgctgggccccctacgctctggggacctggggttgtgtttccggcaaaggatgttttccgagaaggcctgggagcggctgtaaataatacccgagaggaaataggcccggcaggtgtttttgcgcgtcccggcgttgggtgtggctgcggcgggcgtgcaggccgcagatgaggaaacagactaggagggatttaggcatctggactctgcggggcggcccgggcgcgcagcccgtttccctgtgggttgagggcgcgggagaagtgggcggcccaccccaccccgcgcgtggatgcggggctggggcaggtccgcggtggaggcgccgccagtgagcacccggggaccgctcctagcccccagtgtgggacacagactccctgaggacctcgtatgcgttgggtctgtggctccatccgaatcttcatgaacagggcctgcggtgaatttggggagagtgagtgagcgggtgaagggtcaggaaataagtcacaggaggcatggttgaagaattggggatgtttaacccagacatggcaggactgggcacacttgacccctgtctggaagtatttgaaagacttctgaagggggccagcccctccacacctgtgggtgtttctcgtcaggtgggaggagatactgagaaaagaaataagacacaaagtataaagaacagtgggcccaggggactggcactcagcatacgaaggacccgcactggtggccgtctctgagttccctcagtattgatcattatttttactatcttggcgaggggagtgtagcagggcaacaggtggggagaaggtcagcagggaaacatgtgagcaaaggaatctgtatcatgaataagttcaaggaaaggtactgtgccctgatgtgcacataggctaagtttatgtttccctttactcagacatctcag

SEQ ID NO: 53576 - DNA, 833 bp, Homo sapiens
tgaagaccaaattggatatgagcaaaagcactcttggtaaaattgtattcaatcaatccctagatgagtattttttttaactatccaggcccaccccagatgtctgaatagatttcttctgatcttggctactctgtgatttggccttcactccttgatttacccagcagagtcaatgacattccccaatacacacacacacacacacacacacacacacacacacacacacacagctttctgaggaggagtacacagaagggaacacgatccagtctcaacactggcgatgacagaccgtcccattctctcatatgaaccctacacattgatccagcccagcctggaggtttcctaacatctcgtcagcagctagcatcgctgtccaaaacctgcccgttttttttttctttcttcttttttttttttttttttggcttgatttggctctatttttagaatgttttccactgggagaaggaagaaatatgaggggaacagagcagggagaggtgccagctgtggcttgccagcctagggttgctccgtggcatgtgtttacactgcagtcatgggccggccttgcctggcccctgcgggtcacccgggcatgcttcccatacccagcagaacgtgatctgggttccagtttctgttctccctagtcctgggttaggaaactcagttgttttgacattgactcttcccctcacccgtgtgtgtgtgtgtgtgtgtgtgtgtgtgtgtgtgtgtgtgtgtgtgttgggggatgtcactgatctgctggggaaaccaaggggtgaagaccaaatcatagagcagcccagatcaga

SEQ ID NO: 53577 - DNA, 2343 bp, Homo sapiens
tacctggactgcgcctgccccacagcgcgtgttaggaatgcagagtattggggctccatggccctaaaggagctgcattggtaggatgcactttaagcagcttcccaagggattcggctgcggggtccacggtctacactgggcaggactgcgtctctgctctcctcccggccagcacagttgaggtgaggggccggaattagtcggggaagctgtgccagacgtcccgaggggacaacgggacgaggggataacagcagccaggacccttcagcagggctgggcgcgctccaggcccggggcagggcggcgggagctggtgcaccgccgtcgccggcccgcagggggagctcgcaggctgcttcccggctcgcccaccctcctccccacgtggaagggggctgggacccaaggaatgcggcccgccccgaggctgacgtacgcgtctgcggccagcccggactctttaaaagccggcggtgcgcggggcatcccagccaagccggagaggaggcgagcagcagggcctggtggcgagagcgcggctgtcactgcgcccgagcatcccagagctttccgagcggacgagccggccgtgccgggcatccccagcctcgctaccctcgcagcacacgtcgagccccgcacaggcgagggtccggaacttagcccaaagcacgtttcccctggcagcgcaggaaacgcccggccgcgcgccggcgcacgcccccctctcctcctttgttccgggggtcggcggccgctctcctgccagcgtcgggatctcggccccgggaggcgggccgtcgggcgcagccgcgaagatgccgttggaactgacgcagagccgagtgcagaagatctgggtgcccgtggaccacaggccctcgttgcccagatgtgagtgcagctgcgcggagccgggttgcagggcgggctgcgccgggccgggccattgtgtggggcggctttgtgccgacgcccctctgcggggggcgcgcccgtgcgggtcgcgccggcggggcggggcggaggcgcgggctgcgcgtccttggccgggcggcgggggcgctgtggcccttgtcccggtggctgccccgccggcccggaaacggcgagtgcgcccggccgggctgcgtaccccgagacggagggacgcgcgcgcctgggcaggccagggaggggatccacatcctccgcgatccctgtcctcgacacccgtctcgggcggccgtcgccggagcgcagcccagggacccggccgctcgcgcctccgccccttttcaccgtccggatctcctctctctgcatgtttccatctcctctcccgccttgctatgcattcctatcccctcgcttcacttaataacctatttctctgtcctgttttctctttcgatatatatgtctctgtttttctctgtttctacctccttcctctcccactgtttctttctgcttttatctctttctctctccttctctctcttccgtgcatctccagtgccatgggggcgcccgtgctgggggcgccaggagagccacctggagccacgcctgtgtccccggctttggggagggtcggtgggttggtgagtgcacggttggcgctgctccacgcgccccgggcgcacgcaccccccggtgctcggaattggctggcagtaccctgccccgccccgccggtcgccgcccccgccaccagcgatcgcttgggagagggttacctcgagctccacctcagctgcggagcgccgccgcggaaaagggcgggtgggcagcgcagaggggcgacgctgcctctccaggtaatgcgccccggctcccatgggctggacagggagccgcctggtgcggttttgcccaggtcaggtcgtagcctgagtagtgaccgtgggatccaggtgcaaactctcgaggtggcttcgggtcatccgaaggcgcctgagcgcaggcggctggcaggcagggttgcccggctactacgtttcttaggacggcccccgcgggacttggcagctctcctggagccctgctcggtctgaatcaccggcctcgtccagacctgcccctctccccacacccacccccatggtgtgccctgggtggggacgtcagcagatccaccctggtggacttcagggttctggggtagccctcaggagaggtcttgttccccctctttgtgaggtagcccaggactgggggatgtgggtgtgttgcccagcccagtcagatgcgcttgaactggggtggcccatggttctcttgtctttgtgtaaaacctgtaagtggagtggaatgcagctcttaaatccccagggaggtttggccaaggccaaa

SEQ ID NO: 53578 - DNA, 1727 bp, Homo sapiens
tttgggaggctgatgtaggagaattgcttaagcccggaagtttgagactagccagggcaacatagtgagaccccatctaaaaagaattagctgggtgtggtggcacacgcctatagtccgagcaacttggaggctgaggtgggaggatccctcgagcccgggtggtcgaggttgcagtgagctgtgatggtaccactgcactccaggttgggtgacagagccagactctgtctcaaaaaaaaaacaaaaaacaaaactgcaataaccatcatgtgccatgaacatattatgatttttactggtgaccgacacagaggctgctcatgtggtatgctgcctatcttcataatgaaaatgctaaatattagttcctggctagtggaggaaaagattttttttcccacccaagtttacatattcttgaatttgatctgttcctggactgggtggtgtccactaggggacttttggggtctgtggttaggcgactctgggtggattgtcccatgaggctgatgcctcttgctctttgcttaagactcagtgacccttcggcacttgggggccttgtgccaggggcaggtggtcacggccccgcccctctgttgtcatggcgacaaaccgatgtggcctctggaagctgctcccttctctgtcctcttccagagccttgccgtggctccggtagatttctctgcatagcttgtctgtgactcggcgaaggaggtgtgtggagaaggtgccagttccctcagcggagccaccctcggggcctgcgcctgactcagacaggaagtagctgacactccatgccaggaagtagctgacactgcatgccgggaacgctgtccccagccttgtgatggagtcaggcctctgccggtgactcaccgccatcacccaggcgctgctcttgctgggaattttctcatgagctcatctgggcagtgcaaagaaccacacaattgttccccacacgcgttcttattgtgcaaaagggaaaccttggtttggatcttgtgggtttttttctttttttgagatggagtcacgttctgtcacccaggctggagtgtagtggtgcgatcttggctcactgcaacctccgcttcccgggattctcctgcctcagcctcctgagtagctgggattacaggcatgggccaccacgcccggctaatttttgtatttttcatagagaggattacatcatcaagaatgaaacattttttttttaatggcttaaggggtatatggctcttcaaatacacgcaggggttatgctttctccatgtggagggtggtgctccctctgcagcccacccattcggagacaggctttcttcatgctggagtatctcattcctcgaaatatgcttgctatttcatgcttgaaatcaagatgtctcccaattcatggcaccttgtatttgacaaatagactgcgtaaagacagagtctgtctttagggaatgagaggatttttggtaaaaacagaaccaaaacttctactgacccaagagaaggctttgtttgcttggagtggattatcagccaaatgctatctttattttgtgggattttggcctttgaatcaggttcatgggtggcatgctatagaaataggataacaaatgggataattcttcaaacagaaacatggcctagaatgggaggggttgttgtttatttatatgtatgtgtcataaaaatattttagatcataa

SEQ ID NO: 53579 - DNA, 2491 bp, Homo sapiens
agattacaggcgtgagccaccgtgcctggccagccactgttgatttttaaccagttatcccctgaagaccatttgggttgtttccagtttgaggttatttggaataaaatagccatctgcatagccattttaaagctaaagtggatactaacttctagagcagaggtttgcggagggcagacttttgtacacatttctatcctctaggacttagcctagtgcttgcatgcagatgctcaataaatgctcgtttaaggaatgaatagacacataggagccatttaaggagacagtgtggtgggtggtaaaatcataggttttagacttagacagactcgaatgctaggcctgactttgttactttctccctgagaggtcccatgcagaggcctctgctccttatctgtaaaacgagataggaacaggactgctgttatagggctgcggcgagaattcactgaggaaatgcatgaagccctgagtgtggtgtctgccacacagcaattgctcactaaccttcagttgtgatgattactatgaatagatcattgatgtgcataagatcataataatgcaatagctactaacttattatggcttttattctgaatgcttttatccctccaatgaggacatatcatttatatagtctatattcatgcatggttaaatttttaagtcatgtaaatgtgaatttttaaaatgtctcaactgacttcttttttaaataacaagtctttcttagtgttattatcttaggaacattagtggtcaactatctaacatcgtatgcatatttttagaaatttggaaggactgaaatgttcttttctgtgccgccaatcgggtttctatcaaccttgggaaagggcatctgctcttataaaaatgggctgagcagattttatttttcctgttcatcatattataaattcatctggaggaacaacaaggatcttggttctttggttgatgtatgagcacttagaagagagaaaggctcttttcctgcttcctgctgtgtttgctgtctgtgtgcctggggtcacgtttgggggaatgtctctccgtctctccggtgacctcctggaatgtcagcagagccctgagtcactcagaacctcccgccagacagcatgaggcggcaatcagaaactaaccattaactagctccggggacaccaggaggtgaacaaaatttccagccatttgacaaagaccagtgctatttaccattacataaatgaggctggagtcattgatcttgacttctcaaggcactcctatgcggaaggtgctgggctactctctgctgggttctggggattaattagacattggcctgaccctggctgcatgctgtgtgtgtaggaaaggctgtgaaggaaggcctcttggaagactcagagctttgcaggtgggcaggacatcaataggcagataggaccggatagctttgggagacagggttccagggctttccacgctgtccgtgtcacacagcggacacacctggctcgttacctttgagctgtgacatctttgctcagctgccccttctacctaaaaccccttctctggagacattctcttcatcaatcaagacccagtgctggcgtctcttcctccaggataactgcctcacgtctaccaggcagaaggaattggatttttccctctgtggtgacatagtcctttattaagctgtatgtagtacttgccgccttattttatttggatatgtagaccatccgtcttcctcctttgggcggatagcgccttgatggtacgattgggcatgggccatgtcatgtccctagaaacatgtgcatggccccagcctgtggaaggcatcagccagtgtttgtgaacctggctcgcctgacggtgggaggaagtaggacgggccagtggctctcagtgctcaccaatatcctgtgttcctcatccttcaggacacacccttagatcgtgtaatgtcttttgtcactgcctttgtgttagatgtgagcatagcatcaatcctggccatggaatttgtcacttttagcccagtctagaaaaaccttctctgcaggagccctgctgtcttctccatctgcttgctgaatagagaggggcatgaggctctctaggaggacagagccacagatagcagaagtcagcgtccctggttagaagcaagggggactgttccctgattgggaacactgaattgggctttatgagagtgaggcacatgcttttttttttgttttaaattttttatgtttctgtagttttttgggggaacagatggtgtttggttacataagcaggttctttagtgatgatttgtgagattctggtgcacccatcgcccgagcagtatacactgaacccaatttgtagtcttttatccctcacccccttcccaccctttccccctgagtccccaaagtccattgtatcattcttatgcctttgcatcctcatagcttagctcccactt

SEQ ID NO: 53580 - DNA, 3367 bp, Homo sapiens
ggacgtttctgagctcctgtgggaactgtctcaggaatgtttgcatttgagctggaagcttcttgtcatggatgaattacagctccttgatgatgaccctgtggagggtgtgtcaagtgatcgaggatacttttgagtaggctgacctttccttctctccatatcccagaagggtcctctttcctatctgtgggtatttctacctctgctccacacatctctagtcttgtataacaccttggcttacaggtgttcctaaagacccgtctctcttctgctgatgacttcctgggggtatcagtctgttcatctgtcaagaatgtggatgaacaaacatatacattacacttccagactgaagaggctcttaataattgggctggaaccataagtcactatgttctatttaggtatggaacttaccagaacagaaagaaggggggaggaaggagacttcttggctagcagtctgtttatcttataaatcagtctgatctcttgagcaaaagttaaagggaaaaagtggaggagacactgtgacctggcctaggaagtctaggtttaagccaagccaaacacacttctcctctgtctcagctctgtgagctgtgagttctgcttctcctagggtaacctcggattaccctaggttaccttggccaatgcccgtggaaactggctcaagaaagggaagtaggagaatggcagagtccagagtccacttattctatggttcagggcactttttttttttttttctttttttgagacaaggtcttgctctttgcccaggaattcagtggtgtgatcatagctcattacagccttctactcctggggtcaagagatcctctcatctcagcctccctagtagcgaggactataggcacacttcctggataatttttaaatatttttcagagatggggtcttgctatgttgccctggctagtgttgaacttctggcctcaagcaatcctcctgcctcggcctcccaaaatgttgggattacaggtgtgagccactgcacttggccttgttcagtgcattttcagggcatcctgaaaggccaggcctggatcttgggcagctgttcaggagcattccagctgtgaatggtcctgaatgtcttcctggccttccagatggatctctaacgcaccccaacgcaggtgctccctgaagacataccggatctgttggtgcggaaaaagaatgcagcatttggtggcttatagtgctgtgccaactattgcttaggtaatttatatgacatcttattttctccacctgattctaagctccttgaggacacgtctggttcatctctgttggctgcatagcctaaaacccatgctggtgcatcctgatttcatttccttctcggatgtaatgaaagcactcaaatgatattgattgcctcctctttaggttgacaaataaaacctttaaattctgtttttcctggtgtttcctttgtaggattggaaacgatggtcttgatagcgctgtggttagcaaagcattaatggctcactctcctaggggagacacgtcagttgataccatgcactctgcatgcaattttcagaaatggtgtttgcttttttcaacgttggttgtgttgctgctctagacgaaccagcttctattcctgtctttactcagaggtaggtaggattcttccccaggcacctacagacctgactaggatttacaggcaggggtgagtcagctgacccaggagggtggcatcccatagttaggacagagagagactcactggcacgtgctgggtccctgcgttgtcctaacgtgcctccttgcaggtagcatggctgagtcagtgtgccgtgagtcacaggctgcgggaggtgaacttgagcctcactccggcattgatctttcgcagggatatattgttagttcccgtctgttaagaccgataaagggtaataatttactggcctcaagtttgtcttctctttgatttcaccaaatcttctccttatacaggaattgcttgaccttgacttttcaggaatttacccaattttatactcttggcgtctcctgggcttagaaccccttacctccaaccttgctccctggctaacttctacccttccttcaaagctcagcagagatggcaccccctttctgaaacagtccccagttcctgggaagagtgaaggcctgaagctgtgttgagggtggcacttagcccctggtttggagctccatgtttccttcactgtctgctgaacattttaaggcgtcgatttggactttcctaggcttgcattcccagagcctagtgcagtgcctgttcagaagacttttttttttttttttttttttttttttagtgaagagggaggaatgttaagcctcaccaagtctgattatgctaagatcacttaaattttttctgccttttcagaatacccattgtagttagggttagtacccatggtttggcacttactggttctgtggttgttgggtgccttgtttgtctcttcgggcgagatgcgagtcactccagggcagcatctgttcctcatattcctctcacattctttaaagcctccctgtgtgcactcaagccacacaatgaaccttcctgcctttgcccacaaggctgagaactcttcaaagtgagactgtgtcttacgcattttcacttcctccatcatttgacacaggacctggcacgtaacagatgtttaataaatacttgtatttattgaataggaataggtagtagattctagagacatagtgagctcagctcaagttcagttgcatcagggaaggctcccccatgcccccggcagctccctctctctgtgcctatgcaacctttagcagcatgagctgccttgaaaagtcaaagccagcttttccagaaagcaactcagcaactctctcctggggccagaactgctccgaaacgggaacagctgtgtatattctttgatcgttagcaggaaacgatgtgtcgtgtctcaaagcaccttttcatgctgctttcttattaactccacccagaagcccttgccttagcaaagccagtctcgcgaggcaccgtggaagtccagagttgagtgcagctgggtttgattcattcctgggcttgatttctggaatcctcctagattccttcctgggtttgagttctggaagccttggtttcttgaggcgattatgctgtaggtactagagagaagctactgcctttgagagaagggtaattacgcaggatttgaaaggagacaggaagctgtgggtgccagaaatagaggaatcttgttcttttatttttggcaacatccagcaaggtgggaggacacctgaggggagt

SEQ ID NO: 53581 - DNA, 707 bp, Homo sapiens
gaggaaagtctaattttaaaagttgggttaggttttggctataattatgttatacaacaaataactgaaatctcagaggcttttaacagtagtcatttatttcacactcattggtcagctggtcattatttggctgaccgtggaaccagaacaaagccaaagcggtgttctccaggggtgcttttttaggccacagtgggagcccagccaatgccttccttcagtgattggtaaaaatttctccccgagatcccatgctgttctatcctgaacagctttggatgtttatttttctgattctatctctattatctctcttctgttgacacattcctaacatgaagacattgcagccctggcaggggagaacaaatatttcccattccaccctcctaggttcaatgacttgggcccaagaatcaaactgataaaaggcagattaacaagaggaaaaaaaaacaatttaaattatgtaggcatgtacaaaagcttacaaggaaacacatggctcaaggaggcggccagttgattgaggcttatgtatcatcttagactaaacacagtaaaaaggggtcttgggcttctgagtggggaggcaagttatgagaaggggaggggaggagacgtagggtaaataagtttgccttgttatgcaggtaagtcaggtgatgagagttgttgtcttggagagtagctctcttcgtggt

SEQ ID NO: 53582 - DNA, 942 bp, Homo sapiens
gaccgttctcaagctctgtactcaaataaaccccatacttcatcatattttctgtatcaccttatttaaggtcaacaaactttaaggacataattaagtagacaacctcatgacttgaacacatggttaatagtaataattggattgacatccatatagttctcctctgttttaggagagggctggttttttttttttaaatattgatccattttcgtgctttgtatagtaacccaatgaggtagaagtgattaccgccacccttttactgattacaacacctggggttctgagcgccagccacttggtgaggattgcggggccagggcactctggtcccaaagctctgattcccacgggctttcctgctgagtcacgctgtctgctgggagctgttgacccgccgtctctttctctgacttccacccgataattctacatggctctgcaataagcagcttttttcttattatttcctacaaatacataggttacactctgattaaaggcagaatacacatcttgaattaaggggaaggctgaagcctggaattcttcccatctctaatcctgcctggtcactgaagttcctgagtcctcagctcaggtctgaggcagccctgcccagcagggacggaaactgcagctttttcatgttcctctgcctccctctagtgactcaagtccaaaatagtgcggctgggaactattggaagaacacagacgctgcaaagaagctggaaaccatcattctcggcaaactaacacaagaacagaaaaccaaacaccgcatgttctcactcataagtgggagttgaacaatgagaacgcatggacgcagggaggggaacatcacacaccggggcctgttgggggattggggactaggggagggatagcattaggagaaatacctaatgttgatgggtgcaggagaccacc

SEQ ID NO: 53583 - DNA, 1104 bp, Homo sapiens
cgcttggttccatttcctactccgcctgctcacccggcagccctcaccccttcccggaggctctccgaggggcccgggtagcccttctcgccacgggtctcggcccctccagcccgctccctcccggcggcggcgcggggcgcggggccctacctggagcgagcacggcgccgctgctgcccggtggcgctgggactgcgcggggactgcgcggggactgcgcggggactggcggggctggcggggctggcggggctggcggggctggcgggcccggcgcactgcgggtgcgcctagaaggcggtgcccgccagggggcgctcgccagcctccccgccagcccggcctcccgggacccggcacctctagccagggacgcgcgctcggtcccccgccgtgcgcccccggtcccgcgcccaggctcccgcccctggcctccttaccagccacttgtcgcccagctgcgaactggagcgggaggcggcggccggagggcccaggacagccccgggagggcggcgaggcggagcaggagcgccccggctccggccacattctcagagtcaggaaaaggggcgagaggccacatgtctccctctcgcccaactgaaaacgaaacggcgctccagcagattgggtggaaagagctgggtctcttttctctgtttttcacgctagaaagggcttgtaaacattgttccttttaaaatgacctaccccaggcatttgtttgggcacacttctgtcctggggtcatcgttcctaggtggcttcggacctgggacttttcctgtatctgcacattgtcgttttatacacaattgccaaggtgggactgctttcaactttactgtgcttgaagctgcaaaggtaatgttgccgccgtgcgtgtcattttaggactttttatgccttgcgggtaatactaatgatggtcacagggaggataaacggggtggtttctttttctatactccatgtaactaatttctcattcaggttagaaaattatatgtctggttactaatattcttactgaatggtttccttgcaatgatgacaccaaataattaaaacgtacttgattaagacttttgttgctgt

SEQ ID NO: 53584 - DNA, 2709 bp, Homo sapiens
gcctctgtttagacacttcaatagcagaaacactaataataataatattattaatagctatttaatgggaatttgttctgttccagttattataaagatctttacatgtgtcatttctcatcatctttaataacataatatttgttagatgatgattttcatttttgactcagaatctctaaaaccccatttccttatgccatttccatgccccactttccttgtagtggattaaagatggtcccaaattccttgccattcttctaatcagaggtggggtttattgcctgcccctccccttgaatcatggctgtccttgagactcgatttgcccaacagaagtgcaacagtgtaatttccaaatgatgggccttgcaagatagacaacttcatttctgcacactgagaatgccccttcttgaacctcagccatgtggggagaaggctaggtcatgtggggaggccatgcagaggagaaccgaggtgctctggtcagcagccccagctgtgctccctgtcaacagcaccaatggccagccatgtgaactgagttggatgttattccctagccgaacctctgctgaccatgggcccagccaacagaccatgcagcagaagaaccatccatctgaaactagtcaacccacagactcaggagagagattaaactgttgctttgaaacactaagttgtgcagcagtcaataattgaagcattctagaggcaataaccctctagaaatacagtgattaagcccagcttcacagggcagtttggcccaactgactaccaggagaagcttgtcctggcccaatgaatcctgcctcactgcacctcaaaggaatgtgctggcaggtgcccagcactcatggggtgagttccagaacggccagaatggcctggcttcactcacttgaacgccctctgccacagccttgtttgcacagtgtggacctcacgcattcttctgccacatagactggcacattcttcaaacttctgatttcttttcccagattctgactttattccttaattccagcctgaagtctccatagaaaaataaccccgtaacgaacctcctcaggcctcgcacgtggatcattgccatacttacctcaccttctcatttttcttgaactgtgtattaatagcatattcttgtgcaacagttttgaatctctatcctgacccaccttcaatggtttaatttagtaaaatcttttatataatattccactcagaattgaatgtgatgttttaggtatggtctacactggagaatgcactgagacttttctgtagcacttctagaatttatattcagcataccttctttttcaccattcatgtttatttcaagcatatttcatttgaaccactttagtgaattctagggccctgtttcttaccactaaattaatttcttcaagttaacatcattgtagtcatcaatgcttttctggttggatttgttcaaacaactggttctataattaaccagataaaaattcattccattttcatttcctacctcatccatgataaacacattacagtcgatctatgcttatcgaatctggatctgccagtttagaaacagcacagcaaagaggagtaaaattagctcaacttaatgttcaaccaagcactgtgtcaccaccaattcttcaggcagtaaatggccccttgccatttgcaagctctaaaatccaagggaagaatctggctatgacatatgggaagtgtttatgggttatgtgtgtgttaccagctcctggggctgctgacaagttagtctccctctcaatgtctgacgaggactgggcccatgtctcgggcttggactcaatatctgacgaggactgggcccatgtctcgggcttggactcaagcccgatatctgctatgcctgaagacgtggttcctgttgcctcctgagacccttatgaaggccttggcagcatggagtgactcatgcctgtaatcccagcactttgggaagcctgtgcaggaggatctgttaagtccagaagtttgagacaagcctgggcaacataatgagacccagtatctacaaaaaaaacaagagggtcttaacaccatcttctctgcctagctttatttccagactctgccccctttgcccccacctcctggactgtctttcctctgtcctcattggtgtgaggaccctcccactgcacacctattctcagtgcccagtgagcttccactttgtccccatcccatagctagtgagcctcagtcgtcaaacccctcccatacacacgtgtcaaatttcttccttttcaaaagttttctcaaaccatctttttaatcactgcatgtcattttttaaatcaagtctactataagctcgccaatctatatttacagaaatctagattttttcctttttgaaaactgaagtaatctaatagtcatcatttacaagcattttcaattcagaacttctttctgtgccctgccgtgtaattagtctgggaaacaattcatttaaatgacttcaggccgggcgtggtggctcacgcctgtaatcctagcaccttgggaggccggggcgtgtggatcacctgaggtcaggggttcaagaccagcctggccaacacggtgaaaccccatctctactaaaaatacaaaaattagctgggcatggcagagtgcacctgtaatctcaggtactcg

SEQ ID NO: 53585 - DNA, 2737 bp, Homo sapiens
ctgtatcttgaccctactccacttctctagccacagcctggcatggtacttaatgtggagaaagtctgttttctatacgtatttgagctgtgataccttccttctgattgtaaagatattttcttatagcttcttcaaggattgtctatttgaatttccaaagatgacattcaattactctgctacatcttttcccctctcttggccacatgacttaaccactctgagcctcactttcatcatcttttaaattagaggatccagctagataacctctaacatccctggtggctcagatatccaaacacactcttcgccctgtttacaccttggagggagccacaattactcatatgaaggtgcttcccagcctgtacctgaaataccagcaccagatcttagtgtgatcgtgagaccacttccagatgagaccccttcctcgccagaaaacacccagacaccctgggaggaacagcaaaagctgctacactggaattgacctatcgtggctggtcacatgtctactctactctcgatttctctactctggcaatggatttgaatttgaacttcagaggtaaggaacacagaataggaaagaactgaaatggctcaacagcaaagccacgtttccatggcttaagaaccaatgagagaatccgttccatgctctctaacttcccatttttggcttgtgatactgctattcagtttcaaatatttttcttttgaaacatctttatgttctggcctcaaatgatacaaacccacacctggccaggcacagtggctcacatgtaatcccaacactttgggaggccaacatgggtggattacttgagtccaggagttcaagaccagcctgggcaacatggtgaaacctcacatctacaaaatatacgctcacacaaaaatcagctgggtgtggtggtgtgcacctgtagtttcagctactcaggaggctgagatgggaggattgcttgagcccaggaggttgaggctgcagtaagccatgattgcatcactgcactccagcctgggtgatagagtgagaccctgtctccattaaaaaactaaaacaggctgggcgcggtggctcaagcctgtaatcccagcactttgggaggctgaggcgggtggaccacgaggtcaggagatcgaaaccatcctggctaacatggtgaaaccccgtctctactaaaaatacaaaaaattattcaggcgtggtggcaggcacctgtagtcccagctgctcgggaagctgaggcaggagaatggcgtgaacccgggaggcggagcttgcagtgagccaagattgtgccactgcactccagcctgggcaagagagagactccatctaaaaaaaaaaaaaaaaacagaaccaaaaaaaacacacctctgcattacagaggacaaaaaaatgtagcagagtaatcaaatatcatctttggaaattcaaacagacaatccttgaagaagatgtaacaaaatgtcttcacaatcagaggaagccatcacagctcaactatgtgtagaaaacagacctgctccatgttatgtgcaacctgacccaccaaacaagcaggtcagggtcaaatatagctatttttctggtgaattcatccagctttgactttggacttttacaaacatgctctttcacaatgacagggctggagctgaatgctataaatgtgaggcagctattgttatactgtcagctaaaccacaatgacttacactcagtgatgaatctcaagtttgttgatatttcccagagttcccaatgagtactaaatgttatctctttgttcaaacattatgaaatattgtgattttttttcttgtagatttcctactgattttcacatacgtgaaagtgaatattcttgtggcatttatggtagtgatttccatcctagaaatcagtggatatattcaattcaccacgtcacagctgcccaggcatgatgggaggggttggcagtggggtggggagtgcaaggggaaagggtctcaggttcaagactcagtagcctgaatacacagcctacgcggtcgtgcttctgaacattgagagagagagcaaatgttgttttgttttgttttgttttcaagaatttgggatcaggctgagcacagtggctcacgcctataatcccaacactttgggaggctgaggcaggtggattactcgaggtcaggagtttgagaccagcctgaccaatatggtgaaaccccatctttactttaaaaaaaataatacaaagttagttgtggtggtgcacgcccgtaattccagctacttgggaggttcaggcaggggaatcgcgtgaacctgggaggtggaggttgcagtaagccaagatcatgccattgcgcttgagtctgagccacagagtgacgctccctctcaaaaaaaaaaaaaaaaaaggactttgggatctgaagacagagtatcagcatggaaaaaagtccagcctgcttttggtttggtttattctgagataattctgaatatcagattaaaataatcagaaaggaaatgatcaatggaaggaggtatgattttgaaagtcactgctgtttttgggagaacatgccattgggttttttattatttatttatttttttcttttgagaccaagtcttgccctgttgcccaggtggaatgcagtggcgtgatctcagctcactctaacctccgcctccccagttcaagcaattctcatgcct

SEQ ID NO: 53586 - DNA, 7025 bp, Homo sapiens
ctatgttggccaggctggtctcaaactcctgacctcaggtcatccacccgcctcagtctcccaaagtgctgggattacaagtgtgagccaccgcgcccagctgccattgggtcttaattctccagaaacagtatctcagtcaagaatgcaaagctgtggcaggatttttccatgaggggtccactgaggcactcactggccaaggtgggcgctcaactagtccaacctaggcaagggaggggagaatctgttttctcccttccattatttcagaagttatgtttctccagcagacacacggctgtgcaatttcgaagactgaggggaaactagggaggaaaatgcagaaaactctctgttgcatgccctgtgaattgggctttaaatgtagcaaggagctccaggatcccagaagttggcctggggtgcttggtcctgaggataagacaacctcccttgtattgtaattctgcccacagctggagcttcctatttcagtgttgcatccaagaagttacatttcctgtttgttgcaagaaaaatagaatctgaccaggatggaggctaggcatgggggctcacatctggaatcccagcagtttcggaggctgaggcaagcagatagcttgagcccaggtgttcaagaccaggatgagcaacatgatgaaatcccatctctacaaaaaatagccaggcagtgtagtgcacacctgtagtccagctactctggaggctgaggtgggcagattgcttgagccgggggaagttgaggctgcaatgagctttgatctcaccactgcactccaattctgagactggggagtattgatttgccactgacctgagcccggctgataggggcagcaggacagacactgttaccttaatcaaagacattcacgaagcattctcactgaagatctgccctagtatcctgcacagccacttgcctgggtctttataggtaacaggtagacagtcatcaaagagataggggaaaacatgcacaatgaattctttgctcagaaaaacccttctgtgtcttctcccactttttctaaatttttcctgctttcatttagatcaaaggattttgtttcttggaatagttctgcacttggtcctttagaaaggatgacaattatctgtaggtctctctgattttaagatcaatagaaatcagcaaaagccaaaaaataaaaaataaaaataaaataaaagcacacaagcacattcaagcacatccatctgcccctgacttgtcctcacagtaagcaactgcttctgactttgctgtttgaataacctctgggtgttcgatccacccacacagctcaagtttgagctccagaacaaatatttgtcccaattttgaacaaagttagagagttttttcttcttttttcttctttcttaaagcgaactgtactcctctgctgttcctttgaacttggttcagtaggaagaagtgatatcctccccagaccatctgctttggggagcttggcaaaactgtccagcaaaatgaaaagactcacgtgctttttcatctgcttctttctttctgaagtatcaggcttcgaaatccccataaatggactttctgaagtaagtacttacagatcactccttgctgttggcttgttcatgagctcagtaaatcatctattggaatcgctattcaatggccttattctgtgtgtaatggaaacttaagataaaattcatctgagtgcaagtgtttactgttataattactggaatgtatatttaccttttaaagcattaacaggttttgcatgaaaattaagtcaagatcaatgggcaggcatcagagcgtagcatttatggagcagagctgctcactcctcacctaaaaaattgggggtaagaatagacctaacccaatggtttgctttgagaattaaatgacacagtgtaaactcttctagcagagcgcctggactagtaagtgcttaataattactagctgttatgatgatgaagaaatattatcactcttttactaagagtataagaaaagtcattatcaaagcacactgtttttcatatctaagtgaacagtgatatttgtaataagagcactttaagtattcctattaaagcggaagatagcaggcagggtggaaaagtacaagaataattcccatggagtacaggtctccacttttgtcccttagccatctccaatgtaaggaaagtcttggactgaaagtctgtttctgaaagtcatacaagagctatttttatgccagaaaagcgaagcatgttatgggaacatcccagcaaatgcaaaggcttataatacttgcagagtggattacctataaaaatgccagagaatatgacggcatatttacaaagggaaaatatcactctgtctgctttgaaactatcatattttccaacacttaaaagccaccagagtgtgttagaaatctcaaattgaagccaagacatccaaatgtgtttgtgctttttcagtcatttctaactggcatttccttttagaaaatacctacatttttaacttggggagatgtatggttcatgtctgtccagtcagacactgcaaatgcctccagggtctacccagatacttccccagacacccacctaatcactgggttgttttgatctctgtcttaccacctgctggcaaactcaaaaatgaattcccatgtccaacaaatgcgaaggtgttgttaccctccatttggacacctctgagacgtaaccagcaaatagaaatatactaaagaaatcattttatacaaaattgtgattgcccagaggtagaggaaagaatataaaataatgaataccaacagctatctctttggctctagatcttttggaaatcatcattctcagcaaagtaacacaagaagggaaaacccaacaccgcatgttctcactcataagtgggagtcgaacaacgagaacacatggacacaggaaggggaacatcacacactggggcctgtcagggggtggggggctaggggagggatagcattaggagaaatacctgacgtaaatgatgagttaatgggtgtagcaaaccaacatggcacatgtatacctatgtaacaaatctgcacgttgtgcacatgtaccccagaacttacagtataattaaaaaaaaaaaagttaaaatcctaattttttttaagtttgtagactatgaagatcttgtggaactggccccaggcaaatttcaattggtggcagagaaccggagatatcaggtatagtaaggtttactcccaaaagggggaaaaaaagtgaaagagattatggcagaagaagacaagtgttaagatgccttctgctagattttcttaagagtttgttttttagcacagaagagtccagacttcttacaccttggtggaagagatcacccaggtgaaataaaaagagaaactcacacaactgctcagcagccttcacaccataatgctcaatttagtcccttaaagagtacacgactcagcacagtggctcccacttataatcacagcattttcagaggccaaggagggaggatcacttgaggccaggagttccagatcagcctgggtaacatagtgaggctctacctctgccacccagctaatatatatattagctggcatgcacctgtaatcccagctatttgagaagctgagatggaggatcacttgaacccaagagttcgaggctgcagtgagctatgattgcaccagcctgggcaacagagggagacgctgtccccactccatttaaaaaaaaaaaaaaaaaaaagaatacatggctatgtgttttcttcaaaacttaagattccgaaattatttcctgccttgccggaaggatttcctgttaggaagacttttcttattttagcgatgacagacactcccccttgcagcctcacaatctccttcctctggtcactctgagggcacctgagaaggagaattggccacattggaagttgcaatcctggcggccaccagcagcagtatagacaaaaccctctaattaagggggtgagttttccagaacaccaggaagggcttggcttcttccccacggagcccacatgctgagagaggaggtatttacggaagcagcaaccctaagctgatcaatgtcttattttgtatgggtgtgaattttttactttctgaaaatccaggatttttttttgtagactaataatattaaaatccaataagcaagacttcatgtcacaatttatttagccacaagagagaaaaatttgtcattgagcattgcattcaagaagtctacaagaagaggtcaaccattgacctcaccatgtcacacagcacagaacctcagttcaccccgaatcaggcaagctgagcttatatccaacacccgacttcttggatctattattaacagctcaccaaacattacatgttcacccaccacccttaagccattcactttcaaaggcaagggaatcgcctttgttcatttcctcaggacagtcaagtgtatggataatctcctagcatggtggttaaaagcatagaattttctaggtgccagtcactgtgtttgcctcaggggttacactgtggaggaaatacatgaaaatccctgcttttatgtagcttagtttaaaggaagagacagactttagtcaaataatccctcaaatagaatgaatcattatgaaacaaggtgagcactctgcaggaaggaatatgctgctgcaaaaacacttagtaaaggaaaccgacctagtcttggggtgttagagattttcactggaggaattctgctggagctgagatctgaagggtgagtaggagttctccatatgggggttgaggaacctagcaggggcactgcaaacagtgggaacagcatgcccacagcctcatggccgaatggaggatcaaagtctccattcaactgagtaaaaaatagagcaaatagcatcaaggggatatacgctacccaggatgcatttggttgaatatttttatttaaaaattacttgttctagcattatatccaagaatgacacacacgccaccagaactggttgagaaacttattgagaaactcaccagtgggaaaatagttttcaagaatattcaatatttatgtctcaactccagtgaatgaataacagctcagtattgaagaaaaataaaatttcttttttgactgagaaaacggttttggctctcaaggtaataagtgacatacagttgaagaatgattgtctaacttcctttcacagagaagccttccaggagaatcggaagaaatgatggtaagttgacttgatgttgttacagattgaatgattttcctgttaataattaccaggaaatcaatctgggtgtctcttttttcttcatcaccgagtatttacctgactttcgaaatactgccttgcccaactgtttgcaagtgtttctaaaattcagcattgaagagtgcagtctttacagacaggagagaggccaccaagagctgaaggggcccttctcttcattttcttgagttttgccatatatcataggttccttcccactgtataaatttatgtatttattcctactcaacctttttgatttatgtatttatttttacgttttcatttttatttttatttttttgagacagagtttcacttttgttgcccaggctggagtgcaatggcatgatctcagctcactgcaacctctgccccctgggttcaagagattctctgcctcagcctctcaagtagctgggattacaggcatatgtctcctcgcccagctaatttttgtgtttttagtagagatggggtttcaccatgttggccaggctggtctcgaactcctgacctcgggtgatccacctccctcagcctcccaaagtgctgggattacaggcatgagccattgcttccagcaccattttgatttaaagtatgacacctgacagctttggaaaataaaagagtgcccgtggaaaggaacttttaaacacaaaacggcccagttccctgagatgttcagagtagaccatcctgtggcaagaaaacagcctgaggacaagtggcttatgttgtgcttcctgccctgaattggcagaaactgccagaagtgcacacttcagggggaggaaggacacatagattagcctggattttattttagcttgaggtgagttgcatggttaattagtcgaaaggtttaatgttggactacaaagtttggggaatgagacctggtattgagataagtaaattcttttggagaaaaaagcaaaatctaatgggtctcatagttgtccatagacctgaaggagcttgcagctctcagtcacctcctgaaaggtgtgggtttctaggaccttgcctttgagcacacttacatatgtgattcttcacacaggagctgctttaaatcagtagtgatcgggtaaggaggtccagagtgttggaccaatacttgcatcagaatgccctgtccaagatcaatgtctcttgcttacacccgtcactgttctcctagcttgttttgacttgggggaggagaaaaggactgcagatgaaattgtaatagaggagattaaagaaggtagagagctgtaagggggggttggtggaggccatatgtgtgtttccaccccacagcacccctgtgtgacccctactaaagatacaaccaagttcctctttcaacctcgcaatccagtatcctctccccagctgatggtcttgcatttggagttattacctggacttcctcaatccaatctggcttcccacaccgttttctacttgtattctaatttttgaaaaatcattatttatagactcatagggctgaaaaatgccttttagctcaaagtatcttgaaaccaaggcagacttctgctcattgcgggttccaagaagttaggagaatgcttaaccatacatgaattctgtccttaccaaggccctggaattgttctgctagtaaaacaagtaaaatgta

SEQ ID NO: 53587 - DNA, 801 bp, Homo sapiens
aatcagtccttttatctttaagaatcattttgccagccaggcgtggtggctcacgcctgtaatcccagcactttaggaggtcgaggcaggcagatcatgaggtcaggagaccgagaccatcctggccaacatggtgaaaccccgtctctactaaaattacgtaaattagctgggcgtggtggcgtgtgcctgtaatcccagctactcaggaggctgaggcaggggaattgcttgaaccagggagttggaggttgcagtgagtcgacattgtgccactgcattccagcctggtgacagagcaagattccttctcaaaaaaaaaaaaatcattttgccatctttgtccatcattttgaccacatcacccattcatttatttgtttatccatcacacaaatacttacttctaccagaaactcttctaggcactggagatacggcagggaacgcagagctcccatcctagtgcaccctcaggtaaacacggtgtctcactgcaggctctgtctcaaagctttgcacgaggccatgctcatctttttcttcaattatttgatatcgcaagctgactatccacaacaactccccaatcccttaggctgattgtgcaacatctcaccttgcttacttatttatttcttttcttttgaaatgaaatttcactctatcaccctggatagagtgaagtgcagtggcgtgatctcgctcactgcaacatccacctcccaggtctaagcaattttcctgcctcagcctcccaagcagctgggattataggcacccaccaccacacctggctaa

SEQ ID NO: 53588 - DNA, 2279 bp, Homo sapiens
ttattattccctctttacagataagtaaaggggaatataagtaaataacttgcccaagaccacacggttggtaagtggccctgcttgactttaaattttgacagtctgatatatccataaaccagataaatccataattttaaccacaatattattctgtgcccggtacagtgtaggtgctcaataaatgcttgctagatgagtagtgtggaagagcttagctctcctttttcacctgatcccaaaagaggagtgaatcctaaccaccctgtttctcttaagagtcaagtcaagtaagagctgatgactgttactggcattgcccgggcgtctagtattgcagtatccccgcccctgtgaggggtgcaaaaccttttctgatttcatttctttggtggtggggatcggactggggaggaatgaggggtcgcagaacacaggctgcccgctgggcccgggggctgcggggagggacggctctcgtgcgctgagtagttgactcgcccactgcagacctcagaagcctcacgacccggaccccgggagccccagccccgcgccctcagccccgcgtccaggacctgatcctggattgccaggggccctcctgggaagacggggccactccgggcccactcacctcgtcccggcactgcttctggcacatctggcaataccagcgtagcttctgcagccccttggacttgatcctgttggcgatagccttgggagtaagaaaatccgacttccccatggcgaccacggcagcgatcactttctggaccccagtactcagccagccggaaacggaaccgggctggcggcggtgggcgggacaaatcccagctgagaggcggaaggaggtggggcctgggaagactgggttgcaacggtcgcgagactcccctcgccgtagcgcgaagaaacgagactgaagaagagagcaaggtgggaggggcgcgctggggagcttcggcgcatgcgcgctgaggcctgcctgaccgaccttcagcagggctgtggctaccatgttctctcgcgcgggtgtcgctgggctgtcggcctggaccttgcagccgcaatggtatggcagcttgcgggaagatcggcaggaccgcaagggatggaagagcttgggcacggggcagggaggaggagatgggcgcgggggcagatgtggggtcgcagggcctagctgggcccctggcccgtcggaggcgccgggtagcgggggctgcaggaagcggctctgaggtcgggcaaggtgtgcgcagggccgggctccggcggagcaaggtcccgcccggttccctgaggtcggagggccacctgggacctcgggactgcggcctgagtccaaattgacgtctgggcggtcttgagttccctcagctaatcagcacttcctgagcttccacttccactgcaagccaggcccccagtctcagggcctgcaaggtgacgggagcctgagcaatagcccaggggaaggttaagtcgtgctttttgtccttgacgccctttgaaaccctgtagtgctggacagagtgaccctttaagattcgatcgagtcagagagcgcggccgtcgagcacctcccgtgttgcagacgctttgctgggtgctgcaacagcaaaggcgaacatcctagatgcctctgagggtggttttggtgcagaagggaccgtacagatctgtctgagggcggggaagggaaggacacctagcactaccttgaaaccacttgctgaaaccgtaaccctgcaaggtcatgaaattgcccccaggtcctgggggaggagttcggtgggcttttaagtggcatttgttaactgacatgcaactaaagggtgccacgagcctcgagaattttaaacattagttccgggtagggggacctgggctgggggaagtgcatattagaaggcccgggaatgggcaggtaaaagttggtttgtgggtggtgctgttcagttttgaagcttgacggaatctggaagaattccagacacgctgctaaggggattctaggctgtgtcgtagcaattccctgctcttaacagtgtggaggatttctaaggcgctacagtgctaaactagattttcgtatcctaatttatatgaagggaccataaagcattagttgaaataaataggtttttcattaagcaaataactgatagtaatatacgagattttcagaatgatatctgatgtgaattagccacataaaatttttggtggcttggccttggaagtcagatttttttttctctaat

SEQ ID NO: 53589 - DNA, 1632 bp, Homo sapiens
ttggcctctgtaggcagccgaggtccccatcccccgataggtcacagccgcgatgctcaaatcgcacactatagcccacaggcagcttacctgttttttttaaaaaaaaaaaaaaaaaaaaagttttattggaaccagggctgggattagaatgacatgagtgagtcaggagtttatggcatggatttggatttttttaaaaaaactgttaaaatattatcgatcttgatgactgagttttttgaggcccccattaatttggcacagagtcctcctagttcctgccctattgcgaagggctttgaagggcatgcggaacagcttggactttatttaatctttgcagtggcaagcagctcaatacacagatttttagctgaggcaacaccagcgcaggtctgcgtttggcgagctccgtaagttcccacgccccaaacttctctctagcacataactctctaatatgactaacgttattagtgctaactctctaacctgtcaatgtcgtatcccagatccctcgtttgcctctaaaacactggcgttttcgtcaccgctgtcccccaggtgagcgccccagcacctgccgccctgggcgcctcctccacctgcgcgccccacgcccgcttccggccggcttccaggcctcagaggcgatcccgaggaatcgttccgctcccaaggggcggagctttctcatcgccgcgctcggcattcggcttatgctgcctcgccccggcggccgtccagcgggaggcggagcgagtccaaaatggcggctctcaggctggcgcgctccgtgctgctggggctttgaggtggtcgccgggggtccgggggaccctttccccgccgcggaagccctagaggatgaatcggggaccctgctaaggtctggcggcggggctggagagcagtggcagcaagggctgcggtggcgtccacgcagcgggatgtgcgagagttactccaggtcgttgttgagggtctcggtggcgcagatctgccaggcgctgggctgggactcggtgcagctcagcgcctgccacctcctcacggacgtgctgcagcgctatctgcagcagctgggccggggctgccatcggtactctgagctctgtgagtaccgggctgggtgcgggagggctgccccggcaagtcaagggtgacaccttcgctctccctgtccctccgcgtccccggggtgtgcatcccgcaccccgcctcgagatctgctgtttcctcggcctcccacgtccctgggcttccactgccgctccaaactctagtcatccttcgggtgcctcttccttatccgctaacttcccgccaccagcccgggagtcgggtcttcgctcccagctccacaccctcctaccgctcctccgctctgaattgtgtctggatctctctcattgtctcctgtttgctgcgggtagatccacccccagcgtgccctacaccctcttttacctcggtcctttttctcccttgcccgcaaactactacaactagttgtcacaggcgctccgtctaccggccgtttcttacaagactggccattcctgggctcctaactacatagactcgttgacagctctgctccgttagggacactgcctcgtctttctg

SEQ ID NO: 53590 - DNA, 700 bp, Homo sapiens
agaagctgatctcaaacatttttcaagccacaaaaccctttcttcaacaaacgtttacagggaaacctgatatgtaagacagattagtttggatcttctgtgtttgaagtggttatgaagagctgcctgtctcccagagcagtgcttctcactgcatcagaagcctttagaggccttgtccaagcacaggtgcctgggcccagccccagaggttctgagtcagtggccctgggatggagcccagaacttgcatttctagcaagttcccaggtgatgctgctatgctgctaagggctgggagtccacagtgaagaatgttgtgctggtggcttagcaggtacaaaggtcaggagggagacatgtcccttaccagccgtcgctgggcctgtcacctctcccgtggaggcctgccaggggccattgctggaatgtgtttggtcgtctagaccaagtgtgggcctctgacctgcagtatcagcctcaactggagcttgtcataaatgcaggttcataacccattctaggcttactggatcagagcctctggggcccaggctctgggtttctgagagggctctagttgattcttgtacatgctgaagtttgagaactgttggtgtacatgcaccctagtcaggaggtggaggccagcttaagaaaccacctatggatagaaccatattcactacctcagcacttg

SEQ ID NO: 53591 - DNA, 1125 bp, Homo sapiens
tctctgggcggttattgtctttctctaattgctccaacaatggcctctattaaaatggagacacccaattaaaggccccgccgggccgctctcggctgccggcaaagctctggcccccggcctgcgacgtgcagaccgcggggccgcggacccggctggtgcggggtactggcgccggcctcgacacctttggcctccacttcctccccagactcacagcgacagcggccgcttcacaccgtttttattgaccgatcgcagcccagcaagattgatcgagctggaatgggaagggacttctcctcccccaggcccagctcgccagggcctcgggccgtgctgcagtttctggcctttggtgtcgctccccgccccccagccccgcagattcccggcttcttttctgtctgcgcggccgggaccgcccaggcaggcgccggggctccggggctccggggggagggactcggcggctcggctcggctccgcttctttcttctgcctgcaaatatttgctgcctcgctggaaatccgacgatttcgcgcgcgctctgcttgcaaagtctttaagtaaacacgctcaaatgaccgccccgggcggcccgaggcacgctctctccccctccgcgggattagtaactttaggacttcgaccccggggctccgctttgcctgttacccaggtcgggcagcgcgcgggcgcccggggccgcttctcccggcacctcggccccgcggagctcgcctggaagcgccggttgcctggctctggtgggtggcccggccgcgagcatctccgcgccctgggtctgtagccctagggctgagccccagaaagccgcgcctccgctctgcgccatggcctctgctttctgtacccgactgggtttccccacttccactgggacagggtctcttcgcccctgggagggcgggtgggagggacttgcacgtgggcatgtgtttgggggtgtgtgtggtagcttaacccctaccgagtggagaaagtccggctccatttctcacctttttcccaagaggacacacataccccgctcaacttgacgcctaaagcagccgcttccaggcctggggtttcggataggccaagccggctgctgccga

SEQ ID NO: 53592 - DNA, 808 bp, Homo sapiens
atataaaataaaaacccaaagtggaaaaaaaatcaaatttcaatgctaaaatctaccgccacatacagagagagctgtaagctcctaggacatttgtattgaattcttcatagcttttgcttttaaatgatatccttttcatctttagctaaatccttaaccttatgcacatcgcaggagagttacctggaacttgatggatctgtacagaggagaagactgagttggggcatcggcaaagacagtgtttctccatgctcccgttattcttccagagctgtcaggagtggaaatcatttcacctttgcacttagaataaagcaactcggcattaacagtaaattggcttcggcatactcttaggtaagcaagtgcttctgccggccgagtccagttttctagtctgcaggtcagggagcaggtttgcgtaatcgtggggaaggtgaatgtagaggaggcgggagaggcagtcaggagagattcaggtaagtcttggcttggctacgaatgaactgtcttttaggggatgccaacttccctcttgaagcaacagttcccttattgctataaagtgaaggcatcagggctgatgatctctaagctccttttagccctgacatggctgtgtgccaggcctcttcacacctacccactgtgtgtaaatggcggagtcacacacaagctcacaccaccaggcactggctgactgaagggggtgatctgagatgggcctagatttaagctgggatcacaggcttccaatgtaggtgaattatttttaagcagctcctatattttagggacaagt

SEQ ID NO: 53593 - DNA, 624 bp, Homo sapiens
aacaattagaaaaagtgtcatcagcactcatgtcaaaccaagcatggttttctgcaacaattgggagtaatatttggagggttttttctttccttttacttcacattatggccaagaagtcggcattagcattttcatgcaatctgcgggtggtgttgcttatctctgctgttatgtaaccctcattactcattaggatgtggtgttcctatcgtgtggcctcaaacatttctcagacaacagaattggatgtaatatttggtagcagagtattcaagcttaccaaaaacttttcacatttgtggatttaaaaaaaaaaaggtatacgctactttcgctgggttttgttaaaatgtttcttctgttttggcaggttttggtttgaagacaatctaattgtttgaaaaatataggttagcataccacctaggaaagtccctccctgaagcacagtagacagaacaggaagtcacaagtggctggcagagattgctgctcctagcttctcagtgttctcccagcatgcacatctcttctgattggtttgaaatccacagtggataatgagcagggagaggcagcattgatttgttctccttgggtttctagattacagtaattttc

SEQ ID NO: 53594 - DNA, 1129 bp, Homo sapiens
caggtacattaacatgtggttaagttctaaccacaagtcttacaaggcccaacttcccaggcctgttccattttactttttctttttttttgtcgttgcagtttcttgtttgtggccacgaaactgcattggcattaatgcacctcatcagagttacaggtttcatgagaagtctttaaaaaactggatgagaggctgcagccccttccagctgcagtagaggcgtgattcacccgaggaccgggtactttccacaaactgagggcggggagactgtccttgcatgcttcaggccctgacgcaggcctgaaagccaaactcctcccggcccacccatttagccataggcttcagaaacctgtttctgtgtggttgggaaagagcagagggtgggattccttgaggatggctcactgctttcctctgtgacccttgaatacttttgtcccaggtttaaactggtcaaacctttcttccttaacccatgaagggaaagccaggccttatctcttctcagttgggaaagtaacattgacgcgatctgtccacattcactgagatatctcctctgcgcagccaaggaatgagactgaaatgcattttgtgattcactgtacaaatattgaacatctgttccgcgtccggaatgtggcggtcactgccgataccaaggtgggaaaccatctactctccagccgttcacagcttagcctagaaaacaaaactgctcaaaaccatgaagacaaggctgaaaattatgtgtcataaaagtaacataggtaaggcgctgtgggagtgagaggaggtgtacttggttaagaaggctgagagtgaggaatgagagaaggcttcatggaggcggtgacctttgagctggcacttggaggatgtccagagcttcactgtcagagaatcagtgacctggcttttcaagttttctgagaaaacagaaagtgtcactaaagcacagagtgtgaggagaggagacagctaggtgaatttaatggagtcaccatcttaagaatttttttttttttttttttttttttttgagacggagtctcgctctgtcgcccaggctggagtgcagtggcgcgatctcggctcactgcaagctccgcctcccggg

SEQ ID NO: 53595 - DNA, 724 bp, Homo sapiens
tagaaaatgtgtcatttttaggagcagtaaaacattaaagatgaatatccttactatttgaatcctaaagttacatttaggccttttctattttattgggcacagtagaaagttcaggtcaaatggtaactctagaaagaaacaatatctgtgcttttaaatgttttaagtagaattttagagatagatatttaagtaattaagtccattctgcccctgggcttagcatgcaggcaacgtccaaaatgcccattcccttgcctcctcgtctctattctaacgcggcagcttgtccccttctcccacacacagaggcagacacacatgcttcctgtagcttcctgtaaatgacaatggccccagtaggttaaaacccttccaagaaaacaaacaaacaaaaaaggtaaaataaagttcagaaatccaaaggtcaaagagtagagtgaaaccaaaagctatgtcaggaaattaaggggaggttaaaaacagggtgaaaacatactgttaatctccatgattacaacttcatcttacagtttgcttctcatcatggatgaggacagtttggtgaaactgaggttggaattatatatgtgtagcatggatgcatatatgtatatatatgcacacacacatagaaacaaatacactgttgcacatgtttaatactgtatgagctttcatgtacacctttgcataaaaactaagattatgcattaaaaac

SEQ ID NO: 53596 - DNA, 498 bp, Homo sapiens
aggctctctttcattttgttttgctctcaagagcttctttcacagggaatataaacacacaaaaatcttgtgtatctttagacatttttttttcaattgtccagaaaattattctctgaagagtagcttccttgctttgaagatgcagctcttttgaccttaactcttttcattacccactttttggcagtgacccccctaaaacaagaaaaacgatgaagatgaacaacctgaactggactcctgccaagtccacaaaccgattttgcaagtgagatgactcatcgccagaagaattgtagacctattgaccttagcatttatttattttttatattttgagacagggtcttgctctgtcacccaggtggagtgcagagatgcaataatagctcacctcagcctcccgagctcaagtgatcctcccacctcagtctcccctgtagctgggaaccacaggtgccaccactacaccctgcttattatctttttaaattt

SEQ ID NO: 53597 - DNA, 811 bp, Homo sapiens
tgataaaaagtatgagaatgagtaccaatctactttattttttaaaaagcggtgagcttagctatcttagtacgtatctcaatagcagtgttcatttcaaacagtatccttctctttaggtcctcgttttccccctttaaatttctttctaggcatttcaaagcacttgttctgtatttctcttatttaaaatacaagaaagcagcaacaggcagcatactgtagcagttcagaatgcaagttctgcaggaagactgccaaggtccacaccctagagctgacgctcactgtcaatacaacatcggcaagttacttgacctctgtgcttcggtttcatcgcctaaaaagaggaagacaaaaacagtacctaccccaaagagcttttcaggggaataactgagttattccatgtaaagagcacagaacagtgctcagcacacagtaagtgcacaataaatatttgcactttttccccactagagccaaatggaccttagcacagacagtgaaaacataaatacaaaagaactgattgcaatattcagattgccaaatacagactaggctcctgggtcagaatcacttatttcatggctgtaatagttcaaacatggttttatacctagaaatgcttctcaatagacaagagtcagagagactggatgctttcactggggaatgtcttcccacccaactatcacaagtgtggaaaaatcactggatccacatttgcaggcatatttcatgaaatttagctggcacctatattcattattttacaatttcagttttgtatacctttcagatttgt

SEQ ID NO: 53598 - DNA, 704 bp, Homo sapiens
tgagagggggaaaatttctcaagccatataccaaggaataagaattagactggtgccaaagttctaatcagctagaagataatgaaacactatttccaaagttaagagcaaaaaattatcatgaacttggaattctataccaacctgaggaaaaataaaaagatttttagatattacaaggtgtggtaagctgaagactgaccttctgccctgccagggatgtccacatcctaacccctggaatctgtaaatgttgcctcataattgcaaaagtgattacagatgtaattcagctaaggatcttgagttcagagattgccctgcatcatgcaagtgggtccagtgtggtcacaagaatccttctgaacaggaagcaagaagattaaaggaaggaggaggcagtgtgatggtggaagcaagacatcaccagctaaggaaagcaggcagcctttagagcaagaaaaggcaaggaaatggattttcccctagtggctccagaaggaaccagccctgctgactctggcccagagaaacttgatttcagacttctgacctccagaacccattaaatgatacatctgtgttgtttaagccaccaagtttgtggtaagtcatgtgctgttacagcagcatgaaaacacaggattcaaagtttactgcctatgaaatgtctctttgaaaaaagaatttgagagtatactaca

SEQ ID NO: 53599 - DNA, 1686 bp, Homo sapiens
ttattccatttattctatttcaagatagcatttaaatttttatgaagactaaaattcagacatgagaagtcacaatctagttacctaaatttgtacttctggttatctaaaagtccttcacctgcattttaaataacatagggggctccgggaagatgaagtgctcgagagactcatctgctgtgtttgtgctccaaccctctcttcactctgctcttcatctctcctactcgcagagctgcacaggctccctttcgttgtggaaaggctctgctcatgtggctgggtgtgcttccatcacgcttcaagtcacgtggaggaaatgcagcgagggcagcgctcctgaactctcccactctcctctccaaggggcagaaggacatgtggggtcaatggtctgaaagaagcacctgggcaagacaggctcacctcctgctctctctcagcccctgtccctgggtgcagccttctgtccctgagtgtcccctggtctggtctctctaatgggctctccatgcaggaaggtgcctgctctttgaggcccaggcttgttggctgtgtcagtcacccagtgggcaggtctaagtcaagcaggctaataagcccttttcactccagatctgatgccatgtcctccaatcagtcaacagaggagacaatttgatctccatctggcagtctcctgcgccttacttctcaaggaaaagaaacagtatcacttagtgactccctggaacccaccaaatcagactagtaactcctacatttatgtgtaagatgagtcacagcttaaaaggatatgaagtgatgtaacaatatttaaataccattactactgaagagaaacataattactagctgttgcatatgagtgcaatcccacatttggggacagggttgaatgacaaaattgccaacaacagatatttagaaccaagacaaacatatgagtcactttactcacttcaacccgcctacagttgctgacaaagtcaagattatattttagctgcttttgcagcagtatgattgttttaacagatgacacaagactggtttgtaacaactccttgcttgtggatattttataaactgtttattgagaggttactatgtgccagacactgtgctgagcatttaacatgcataatctcacttaaacctcacaaaagcctatgttagtttttatgactatctccactttacatatgtggagactgaggcgtggaaatgttaagtaattcaggccatatgggaagtaagagacagggcaggacttaaaagccaggctgtccaatttcaacttcaaagccatgtttctaaccatcaagtgcttttgttgaagtgtaagtattaatagttgatcttatacatttctgctcacttctgctagtccttacatttcttcccacagaaacaaatctatgtgattcctgtgaattctaacagctgtactttctggattctagtagccctccaatctcattacatgaaattgtcaattatttgtgcaaaatggagatgaatggtattctgaagaatccaagaacaatttatatgaaatattctttgtggtcataatcaactggacctgctatattatgttttaagttgtgtgttttaggataataacaagaaatgatctggaaacatgtaaaaatttgacacaataatcatcaaatgaca

SEQ ID NO: 53600 - DNA, 2016 bp, Homo sapiens
aaaggaaaaaactgctgataacacgaaacaatgcaaataaaagaagtcaaacacaaaagacctcatactgtagaacttcatttatatgaaatgctagaaaatgtatgtttgtttacttgtttattttggtccactgaaccgacagatcagaccatgtcatttaccactgtaaccagtgcttaggacagtgcccgacatctaattggtggctcaataaagttactgaaagactaactgaatgaacaagaattatctagtttaatcgtaatcacaaccatagtgataaagataccatcgcagcgatgagaaaaatgagacttagagagatcaatgttggccccagattacatggctactgagtggtggtgccacagatcaaactcaggcctctctgactctaagtcctgttcacttaactatgtttaacgtctatatagtgtagcaaagctcactgacattctacaacttcagtttattcacctaggatcttaagttaatggtcagattccatcataagttttaaggactattcaaattatttcactgtaattttgtatcaaattattctttgaaatagttggggcagctcaattgttttgttaagcagagacagttaccaggcctgatggtacttcctaaaatgggctttagttggttaggttacaactaaatttatagtacatacctaaatagcaggtgcatatttccactaaagtaaataatatagtatttatatattcatcttattaacaaggaagtctgtttcactactcttaaacattgctaattcccactacactatacttcctgccaagactaaacattgaagtgacagccatctttagtaaaagatttgaatgtgcttagaggcgtggcatacacacaccaattaagaaaaaacaaaggttatattcagcaatgtgagacttaccataataattctattcactggggtaaaaatgaaaaccagaaaaagaaaagcagaatgaaagagcttctgaatgacagtgaacttaaacaagtgagtcaggatagtgagtcatccttcagtgcatgcctcaaaaatgtgaacagatactaccctaagtcctacaatgttaatcataatccttttaaaaatcaggaaataaagctgctttaagctgaattcctgttttcaatgtggtcatagttttgccacatgcataacaattgataagtggttttaagattagtccttgaaatcctgcctacggataggggtggctgtggaatgtgtaagagtataactaactgcaaccacgggtttcgtgaagttctataacatcctttagggtgggaataagatcaaggaaactcttttatattggtgtaacacaattcacattatgcagaaaattcatacacaccaatgggaaacatatccactaaacatattcttagctttaggtaatgaaacacttatttccttacaaggaacccctttctaatttgcctatttctaccaacaccatcacaccatctcaggccttaaatacaaaagctttgctgctttattatttttttaatagatttgggggacggtgggtaccagcacagttttgctacatggatatattgtgtagtggtgaagtctgggcttttagtgtacccattaccccaataaagaataatgtatccagcaggtaattttcaaacctcacccacctcccacctcccaccttttggagtctccaatgtgtgttcctctctctatgactatgtgtacccattgtttcgctcctacttataagtgagaacactggcatcatttttaacattttatttatccttcacccctctacctgtaatttctcactaagtttttaatattcttttcaatcatccttccttttacatttgctccactatcacattaatccacaaccatattttggctactgaattgttgaatgcaaagaaaaagctgtttcaagacagtgtacgataatcccaagtgtgatctattgggatcatttggcaggcatgtcgcaagta

SEQ ID NO: 53601 - DNA, 881 bp, Homo sapiens
ctaaggacattacttacaaacacccaaggtagtgcaatatttatttaacacctatttagtgccaggaacagtgtttggctctaggaatgaaatcatcttttctcctcaaggagcacacagattagagaaacatacaagcaaataagcagatgatttgaatacagcttgatgggtcccagaaggaggcaggcagagtgctatggagaagcagcgcacagggctcacctcccaactggagtgctgtgtgggtgacaggcagtggctctaggaactagcagactactcagaagctgatttttttaaaagaatctgaagtgggaagtaaggcgttaagtccccgatggcattgttctttctctgtagcttccccttcttcacacaaacacacagaaataacaggtgaaagagaagcacaagtcactaaaatggcacagctatgccccaaacatctctgtagatcagacatctaacaggaacataaagggtgaggcacactgaaggcacaaggtcagctggactctgggcccagggcaggacagagcagcaggaagttttgtcctatggggaaaactgtaaataaaagttttccctaggaatcagggtcaagagccaggctctgtgcctaaagccagagactggggtggcacttttccttaattatgaaactagattgaaaatgcttctactaactgtgctgaggctacagcttataagaggttgctgacctaatgccagctgactcagtgactgaatctgtgatgttctcaacgtcaccatggggccagggctctgacccactaacacagacctgattctgatctgggaactccaaagccaggcagagacaaatatgaatctgctagaccagcatgaaaaaaaca

SEQ ID NO: 53602 - DNA, 532 bp, Homo sapiens
cattagaaattatttcagttaatattaaagtcattattcactaacagagaaagtctcaacactgtactttcacagttcttatgctttccctaaagaatgctcttgctgcaaccccgtgaaacataacgtcacatttctacagctttaagtattttctcagcgcaaaagtaaagcaaatcttctgtcattgctagagagaaaggaggtttgtttacgctattcactaaatcaacaaagtacttcctgctaataagatcaaagaatgagatgggcctaagagcaaaatgagcaatcatctggtttcatcggtttctttacacttgtatgttaatgaggcatgagataagaatgaggtcaaatttccccttccacaggtaggtttccagacagacttatcaaatccgagtaggtttatactggtcaacatgacaacttcaggtatttaggaaaacaaatgtccattccaagtcttccctacttctatcagttacagagtcagggccttttaaaaatgacctataattagtttaca

SEQ ID NO: 53603 - DNA, 2540 bp, Homo sapiens
gtcttaccagaaacaagtacaacaaagagtctggctgcatagctaaaaactaagtaggcaccaaaactgaggctcagggcccaaattcttaatatttggcaaaggatgtttctttgagtgcctttgtaacaactcattaattctctatatatatataatcagcaaaggaatttctgttaactaaggatacctgtacttgcaattaggatttcttcctttaaaagttaacttatacttttattagtataattttttttctatttggacattttaattgtctacgtagaatacaacatggcatcaacatccattttaagtaatgaactacactatgtttacaaatgttgttataaaagaatggcaaaccaggaaatatttttgttaattttagggtctgactgaaccagaaataaaagcaaataaaccactgttcacttgctgctggctaatttattcttattcagatgacttcaggaaagaaaaaagaacactgacttccccctgaaggaacttgccagagactcaatataggagggagttggccagggtgatctctaaagttctgtgtaacttttctaagctatgaaatattaaatatctatcccaaaggtgtaattatttttataaaaggattaatacaggattgaaaccattttctttcaacaagcaacatacttaagacggcgtcctcactttttttttttttttccattcgtctcgcactatttccaatcactgggtacggccctaattcaacaagccttcccagtccaaagaaggcatgctgaagtctacggtctaaaaagcatctatctgcggattaaatgttgggaaagaaagggataagggttgggggtggggagagacaacattttcaaattacagaaacgtgcacccatggattcctacgcgtcccgcattttctagcagtaaaacacctgcgaggaaccgttttcacgcattacaaatgccgcaccagcctagggttgtgagcgccaaactattttgcaaactttgcaaaggcgcacggatttccaagacttgcagatctctcattcgccccatcctcccctcgcctggtccaaacaaagttccgcggcatcaaggcagtcatttaaaggcacgaagtttgcccgggtcctgcccactggggctcgggagacgcgaccgaaacttgcgagggagacgcgcctggccgggatcgcggctcactcggggaggcagtcgccgggttccacccccgggcctccccgcaccccgcgcggcgcccccagcccgcccatcgccccgcggaccccacgctccgggcgcggggacacacaggcagcccccgcactgtgcccgagccgccccccagggccgagccgcgaaccgcagccgcgtcccctcctccaggggccgggaatggcggcgtccggctccccggggccaactccgagtcccggcccggggaggacgcccgcggagcccgccgccgccggcccctcacggcgggagctgaggaatggaagttacctcagtacggtcccgactgctaggctgtgggcagcggacagagctggcggtcccgggcggccgagcagatccggcgcggcgcggcgcggcggcggcggcggctaccgcagtgccctccgccccattgtttcccttccaagaggatcccggcgaagccgagcccgggaaccaggaagttccccggcgcgacacctcctgccgccgctatggaaacggcccccgcctcccagggcggctcgcccgggaccccgcctccgcgcctccggccccgcccgcctcaccggccgccgccaaccgtcaccgcagcggccgcagccgccgccatattggcgcggccccttcccggcggcacgtgcgctccgctcccgcactcccgccgtgcgcgctcccgcccgcctcggggacgcgcgcccagggctgcaggtgcccggagcccctcggcgggaagcgggcgctggaagcccaggacccaaagcggggcttcggggcacgcaaacgagcgacattggcgtgtccagccggcaggtcagaggatagcagagacgtagggaggtcagctgagtagggggcgagaggatggtctccggagccagcctggcttttttttttttttcatttctgcctcaactacttaccaggtgtcagcccttggacacttttccctgtgcctcagtttcttcatctgtaaagtggaatgataataggacctgcctcatggggctgtcctggaacaagcgagtgcttggtagtaagtgcaaagctcaataaaatgccattgctactgacataggtgacactgctgtcatttttcaggaacttaggctaagcgttcacatcagcactactttaagtaggctactgtgtagatcccattgctgcttcaagcttctcaaatgttcatcactgtcccatctttctgtaggtcaactttccttttttacatcgtggaaattgtcaagagttttaatctccaaagcctcccattaaggggtgccataaaaagatgaatgatgtaaacttcccaa

SEQ ID NO: 53604 - DNA, 1081 bp, Homo sapiens
gtctacgataaacagcagaaacttcttcctcacagttctggagtccggaaatcccagatcagggcagcagcatcattgggttctagtgagggctctcttccaggttgcacatggccgccttcttgctctgtcctcatgtggcaaaaagtgcagagagagctctctgggttcccttttataagggcactactcctattcatgagagctctgtcttcatgacctaattgtctcccaaaggccccatctcctaagaccatcaattaggggtaaggacttcaacatatgaatttgtgaggcacacaaacattcaattcctagagcccattgtctttgaccgccatgtgccctttgactctcccttccattaagataactttccttgtggatttccggctctctcgtaggcttgctaaataccagggtaaacacaatttgtgtgtgttgctcaaacgttgcataattctacaccctcgttatagagagattaagctcatttgaaggttgaggtcagtccctggtctgctaattacccaagatagaactgggtcactcaggaactaaaagtacaggagagggaactgggggttgggtcctgctgtggtgtctgcagatagcctgtcaaaagagtaacctggaggaacacaaggaggcttgaagcaccgggtaagtctagctatggtacaggctcagtggccaaggcaaaaaacagtccagattggaactatcacaaatacacatccacatacaaacacacaccaaggcccagggccaagaaacacattccaaaacccagggcatcggaggcagtccaaactgactaagcaagatggcacatcagtaagtcaagctgatagaacactgagatgaagagtcagatatccaagtctagaagagtgtctcaagccagggacaaatccaactatccacattaagaagtcctgcaagtcattagggacagcacttaaaaaggagacaagctgggggcagtggctcacgcctgtaatcccagcactttaggaggccaaggcgggtggatcacctgaggtcaggagttcaagagcagcctggccaacgtggtgaa

SEQ ID NO: 53605 - DNA, 888 bp, Homo sapiens
atgagtcaccatacccagtcctcctttttaaatttatttttttattgcagtaaaataaataacataagatttacaattttagccattttgaagtatacggttcagtggcattaagtacattcacagtgttgggcaaacatcactcctatttctagtactttctcatcttttcaaacagaaactctgtacccattaaacattaacctcccattctcccctccccatgccctggtaagatgcttctgctttctgtctccatggattggcctgttgtgggtacatacctcatataaatggaatcgtgcaatagttgcccttttgcgtctggctaatttcccttagcaaaatgtgcaacagcctcttgactggtctccctgcttccttccaccttttccctcctaagttcattttcaagaaaactgccagagcaatcctttgaaaatgcaggtcagaacttctcactgctctgcccacatctgccagtggcttctcatctccctcagagtaaaatgcagtctacagtatcaggaactcatcttctgctctgctgcccctgctcccttgttttatccgcagggcctccttgcatcactcaaacacacaggatgcatgctcacctcagggcctttgcatgggcagcgccctctgcctgggactccctgtcttcctctagatggcgacatgacttaatctcacctgctaccctctgctcagttggcacctgggtgacacctgcccccaccccactccttatttccttttcccacttaatttttttctaagcactcatcatttggaaagtatatgacatgctacgtcatgtacttgttttgtttattgaggatctcctcttaaattctagtaagtcctccataaagacagggattt

SEQ ID NO: 53606 - DNA, 997 bp, Homo sapiens
ataccactgcactgcagcctgtgacagagtgtgaccctgtctcgaaacaaaacaaaacaaaaccctgacctctaggacaacaataacaaatagaatatctggtggtgaggtctgaagatcagtatctttttctttacatttcctaggttattttaatttgcagcttgcattgaaaatcagggttttacccaaacacatctctaatgacaaatattaattctcagaagtaatatgtgtaaacccacaatgaggaagtgacattttcgtaacagcccccataatttacagtattgcctttcacagtggagcaggccacacattctgtttcctccccactccatgtcaatcaagctcctatacctgctataaatcaagaacaggcctagtgactactggaatagatgcagccagactaggatattctgctaaaatgtagaagtacttctttgtaagggtcagagtaacttgagagtcagtggtcatcttccctccaggcctctgtccaaaagtggcattgagcagggaagtagtcttgttcttctagttccttaatttaatttttaaaacaactgtacaaggtagccgatcatctcaatttgctgatgggaaaaaaaggctcagcaagataaactcaccagggtcatacacgaataaatgtcaggattggagacactaactcagattgttggactccagagctcgttatattttaaccaccatgcccttggcctctggggcacggggcagcagatgatatgcggttgggttcccgggagcccacgctgaaactggagggaccacatggcctaatcactcaccttctagaagtcttttgtttgcagaccagttcaagctctaacccagagagatcagccaggaagaggatcaaaagcaagaggcgtgcctgggcgcagtggctcacacctgtaatcgcagcactttgggaggctgaggcagactgatcacctgaagtcaggagttcgagaccagcctgggc

SEQ ID NO: 53607 - DNA, 1590 bp, Homo sapiens
tcagagggttctctaaggttctgagtcttcaagggtgcctcctttctctgcctgggtttggagggcacttggcaggaaccgaagcacagtgttttggtgatgaatgggggaggaggtcgttcctgtttgttgttgttgttgttgttgttgttgagttttgttgtgtgagttgttgattctctctgggggaaggagcctcacctcctgctaccccggaggctgtggaagcccctgggctggccgtgcctgcctggcaggtgccacggtgtgcgcacaattgaattacttggaatgggccaagtttgggccacaaaatcctcttactgtctacctggtaggcctctgggcatgagtaaggggtgccttccccatctatcattctagaagagacccatgctggggttaggaagcaaaggcagagagggaggtgggagaaagagagaaacagcaaaacggcttccttcctctggtccctgccaggtgaggaagtggagctggactgcaaggtcaaagtcaggacggttcaagggtgagtttgttcctgcctcacagaaccctgatagacaaagagtcattcactctaggcctgtgggctgacagcgtagttcatttattcagcaaatatttacccagcactgctccgggccactcactgtgctgtcattctctgtggaacagtctcttaaaaatgaagtctcactgaaagttaccactgacttgaaccgtgcccacacttgggcgaaagccctggaatttcttgttccagaaactgtgggaggcactcccgcgggaaggggagggagccatggctggcggtggccaaggcacacctcagagtgctggagcaaatagcagggtgagcaacaaccaggatagggtgtgagacacgctggcatcctcggatggtcccagaaacgctcaggaggtgaccccgggaaaggggcttacttacttttatagtaaagcaagataaaaacgtagccaggcagcagtgtcagtatgaacatacatgcgaccccactcagtgataagtgggatacagctgcagtaacaaacgggataatttgtttcagaaggaataggagaggggacgagcaatacagtcaaatacagtattgttttttagacctaccttccgaccaaatttcaaaaaatctcaaactttatgtcaggatccatcacagacaaatctacaacacttgaaccctgtaaaatggagaagggtctgtactggcaggtgactcagaatgttgtttgcactgagctcctttttaccagttagctttcctgaggaagtcagtctggctgagaccagctgaagaaaggaagtgactctcaaagtagtggccagatggctgagctgccgccatcttgtgaggaagcctgagcgctgggtgcaaatccagccatggctctgtcttcttctggtgtgtgttctgttttctcctgaagtgtgggttttatggtcatccgtggtgtagctcatggcagaatttccttcttttttaaggttgaataatagtccactgtatggatagaccacgttttgtttatccattcatctgtcaatgaacatttgggttgcttctg

SEQ ID NO: 53608 - DNA, 2150 bp, Homo sapiens
ctttccatttccagatacctggaggcagaaacttaaagtgtggacccccagcgtctggatgagaggacacaaaggattaaaaagtcaacatccgcgcagccaggccccccacgtgctcgccctccaggctcggggcgtttcccaggcaggtaggggagcggttgctaacagtgcagcgccaatcacccctgacgctcgttttcctaatgcaggcaaacgccacattcccggtgttggtgcaaaaagaaatcatcctactcctcccctcgcttaaactttcccacaggccttgtcaaacaacccctggagccggcctgcaggttttcaatgcgcgcctttcaccgtgcggggcgcggcggggagcggcgagccgggggcgggcctcgtgggggcggggcggggcgtgccggggcggggaggggcgtgccggggcggggcggggcgtgccggggcggggcgtagtacggactgggcctggcctggggcgtccccgcgaagcctgggcctgtcaggcggttccgtccgggtctcggccaccgtcgagttccgtcgagttccgtcccggccctgctcacagcagcgccctcggagcgcccagcacctgcggccggccaggcagcgcgatcctgcggcgtctggccatcccgaatgctatggccgccgtcgccgtcttgcgggccttcggggcaagtgggcccatgtgtctccggcgcggcccctgggcccagctccccgcccgcttctgcagccgggacccggccggggcggggcggcgggagtcggagccgcggcccaccagcgcgcggcagctggacggcataaggtcagccccgggccgcgcgggctcctcgcgttggtgccgagtcggggtcagggcgccgccattgacccggggaggacccggggaaccggagccccgtttacgcccctggggagggaactccccgtgtcccggacccgggcctggcagcgagacgcgcaggtgggattgtagggccgtcggtgggactgcccggggctccaaagccctcagggcagcctgcggggtcactgggcctccagtcgctgggcctgcggagaggcctggagaggagggctctgggccccagacccggccctaggggaagtgtgggcttggtcgagctgctccttggccctcacacagaggcgcggggctgggggccaggacagtaaataggacaaagtgcacagcttcctgagcgctgcccttgtggctacgggcccaaaactcttaaaaatgtgcttgtacgccaactggaatctgggcgatggagtcatgaaggtggagggccctaccccctccaggcctgagccgggtgcttgcctggccggggcaagggtgcaaagggaggcctgcgtaccgtgtttcagcatgtttcagttctaaatcaagctattaaataaaacgtcgtcttctcctaccctgagatgttcaccttccgaagaagacctagaaggccgcctgtgaactgataatcctcagatgaccaggtggttccccgcaggggtagagagccagcccgtggcttcagcgttttccttttctcctcaccctcctctcatcctttcctacctttgcacccgtcctttctgctgctctgcaaggggctgggtgcacagatctgcagacacccttccagccctcatgctctacagacagctgctcttggccacctttgggcttggggtgcccacagcaggggcagggaattccagggtctcagtaatggccgcagggtttggaaaggggatggttcccttccctgtggaccccttgctcatcaactacaggagcacaggccagagcagggcccaggccagggtctttcttgcccattgctaagtttctgcttctgtaaatctggtcacatctggttggaagcctgacttctgggcatggcggccagatggcaaaaaggaggccggtcgagttctccagaattaaatatgaatcagcaaaggtggtgactgaaacactctcacatgaatgctagggtttgtttagtaggaaaggaaacttcttaaccaagcattaaagcagcattatgttgggcactaagcaggtgaacttgagcaagaacttgagcgacccaccactcttcaagtgtcccttttccatgctcctcctc

SEQ ID NO: 53609 - DNA, 1629 bp, Homo sapiens
tctcagctcactgcaatgttcaagggattctcctgcctcagcctccatagtaactgggattacaggcacgtgccaccatacccggctaattttgtatttttcgtagagatggggtttcaccctgttggccaggctggcctcaaactcctgacctcaagtagtccgtccccctcggcctcccaaaatgctgggattacaggcgtgagccgccgcacctggcccattcagtaaatatttcttaagactctactttgtgtataacaaattgattgtcagagcttattcataaactatcttataatggtgcaaatcaacttacaaggcctttgtctaataaaagacagctgtgctgacagctgcttgtcctcttcaacacctgatgcgctggaaggttccacagtaaagcacttgaaaccttgaagtcagccctactgtctggataagaacccattctctcttaaacttttgaaatcaaggcttattaaatttgattcctagaaacttaacgctagaccatatttatcaagttttaaattgataaaatttaaagtttttgagaagaaaagggggaaaatatgacaaaaacaggccttaagttccaaggaagcccagtcttcagaaaccccatttcataatcacccagttggatgaaccaaagtagcttttacctcccaaggacagagcttctcagaaaatggggcaaaaaatctccagacagccctactcaggttcctggtctctgttctcatgttctgacccccagaaggcctctaaatcactcaactggagactcgccagttttttctaatcagctgcctgaaagcggttcagagttctgtcaacaagcccttgcacgctgggcttattaatgctgggccactcagagccatgactcaggaacatggcttggggtcaacactgaaaagcagaaatcacagtactgataatgggaattttgcaggaagaaacaggcttttggaacttaatgcctttgttaggtttctggatttgcagatctaattgtgtgggcctgctttaggaggaaaagctgggattcataacaatctaataaacctgacccaaaccacctgcccgttgtctttgctgattgtgcgcatgtgaacccatccacggacatccatgcacaggcccaccgagtattttggggggtgggtgcgtgtccctcatacacccacagggaagctagcaggtactttgcaaactggcctgggcaggaagttgggcctgtctcacactggataagacaacatgtatgggtcactagtgccctctcctggccgccgcagggacctgcttggctgtgctggagactggggcagaaactatgcaatcaagcctgtctgttcaaatcagaccaagcctggacatgaataatattccccatttgtaaagagcttctctccttgggcatgatctaaataatgcatctttctggcaccctataaaacaccctgcctggcgcagctgctccgttcccaggcagagctggccttgctcagaccctgagccagtgcctcaagcagccggcctcactggagagcacgtgggaaatgagaagcccttcctcccagaacagtcattttcttgaggcaggcagactctgatttc

SEQ ID NO: 53610 - DNA, 747 bp, Homo sapiens
gttgtttctctcattaagctttgctcttgtttcatgacttctgtgcttacagagaaggaacaggaataactaatcattatcaaataacctctgaatgtatagggtaccacaacagaaggaaattggtcacataagccactacactccccgcccttgtaatcaatcacatgttcaaaggaaaaagtcagtggtcccagacattctgttaagttagaacgacctgaaacaattatttctcaacacttaatgcagcagttataaaattctccagcagagggcaatgggtatttatctctagataaaaaagttagctgtgtaacctgctgctggttcctttgactggaaaatgatactggcttttcagccctgaaactaaaagtagctcgtttagcaacttacatagcaaagttagctagatgtcagttcagctgaggcagtggagagaaagaagttcctatgtaactgtttgcattttattttttgaaatagacccggctgacctcatagcctgctatgaaatcgctgatggttctgtcctggactccagggtagggtttctcaaccttggccccgtggaccttttaggccagatggttttttgttgtgggggctgtcccaggcctggtaggatgctgagcagcgcccctgacctctcccctcaccagccgagacagccacaactgtcaccggacattgacgaaagtcccgtagagagaaaggctcccccgcaggtgagaccactgtcct

SEQ ID NO: 53611 - DNA, 1723 bp, Homo sapiens
tgcctcggctgccaggcagggaagggccccctgtccagtggacacgtgacccacatgaccttacctatcattggagatgactcacactctttaccctgccccttctgccttgtatccaataaataacagtgcagccagacattcggggccactactgggctccgtgcattggtagtagtggtcccccgggcccagctgtcttttcttttatctctttgtcttgtgtctttatttctacactctctcgtcgctgcacacagggagagacccaccaacgctgtggggctggtccctacaggtgtgtagcttttttttcttttcttttcttttcttttcttttcttttcttttcttttcttttcttttcttttcttttgcagctaccttctttaggaataaaatgagaggcaggtctgcctgactgcagttcccagcttgactttgccctttggcttagtgattgtgggtccaagatttattttcctttcacaaccccaaggcttggtacaaatccccaccacttgtgttgatcagaaaccagcaaacatgggaaccaggatgagaagaggaaggcaggctgggccgatggtgtccgtgggtctgtctgataccaggatcagggaggctgcagggacaggccggggctcccaggagcagtgaagggctggcacccggcaccacccagctgagtcacctccgtccacactccagagcccactaggccaacaaggatgagctcaagaggaaacgcaaggggcttctgactaaagatacacgcaccaggaattcctgcatgctttgatgggtgtgcctgagagtcattctccctcccgctgccggaatgataacattccagaggtgtcactgaccactgtcctacaaccagcaggggccaagaaagctgtgagcctctgagaggagccaggtgggggaagcggtgccagagcgcatgaactgtgacccctgagccaagcctcccctgtcccttcccagcactgggcaaactaacaagaataatggcagcagcactttggcaggctgaggcaggtggagttcgagactcctggcctggccaatatggtgaaaccctgtctttactaaaaatacaaaaaaattagctgggcatagtggtgggcgcctgtagtcccagctactcgggaggctgaggcaggagaatctgcttgaaccccagaggcggaggttgtagtgagcggagatcgcgccactgcactccagcctgggtgacaagagcaagactccaactcaaaaataaaaaaaaaagaataatggcagagcctgaagtcagagcttcctgagatcaccaaggacgtctctggcaaagccagttgagaaaaggcttcatgataactagaggttaatgaagactcgttagtcatctaggaggggggtaataattaaccaagagaggtcctcttcagtcttagccctgcaggggcactagcaggttctgagggccggtttcaggggcttgtgacccatgcagtcacagggcctcaagcttggtttaatggtctgctgttgccatcttgaagtaatcaattattttgtttgtttttaaagacagggtcttgcttgatacccaggctggagtgcagtggcgtaatcacagctcactccagcctcgacctcccaggctcaaactattctcctgtcccagcctgtagctgggaatacaggcatgtaccaccacgcctggctagtta

SEQ ID NO: 53612 - DNA, 5347 bp, Homo sapiens
gaataataaaaagaaaaataattctaggaagcatttatcaacatttatcaaaattatcatttatcaaaatcaagggaaagttttttttttctcttgatctgatttccttaaagggccgggcgtggtggctcatgcctttaatcccagcactttgagcggcccaggggagaggatcacttgagcccagaagtttgggactaccgtgagaattagaccctgtctctacaaaaagaaaaataaaaaattagccaggcataatggttcgtgcctggagtcccagcttgggaggctgaggcaggagaatcacttgagcccaggagttggaggctgcagtaagctacaatttcaccactgcactctagcctgggcaacagaaccaggccctgtctcaaaaaataaaataaaatgaattccttaaagacagcagctgctatattacctgtcacctataggtagatgtttaatattaccatttattatgtcacttcatgataaatgcgttcatatttaacacaacatgagacaaaaatgtaagagggaaaataaaagaacataaccagaaagcttaggtttattattcactgaggattaaggattgtcagagttgattgtctcctggattttgttcagaaagagaggataataatactgacccaattaagtagcatgttgggtagattaaagtgctttgtaaacattaattaaagatgcagggagttaggtgaggccaatgtgttattagaggaaaagttttcttccctttaatcaggtatctctttctggggagggcaaagaaatgacctcaggactaaggcattggggctcaaccctgagtggggccagtgactcagtcattctgtgcaaccatttccttcttagttttctgtaaaatgggaagcaacacaaacattttgggaatctaggttgttacaacgtttgtcatttgagtatataacaaatcctacaattaatacaaccccataactcttgctttctccctgcctactgagttaaacccagtaacattaacttccaccaacttacaaaagccttccgcaaccagctattaaccttcggagatatttccacggtgatagcctgaagaagaaaatgcaacgagccatggggtcaaaaattctcccatgagtttcttcagctgtctgaacctcagctttcctgctctgtaaaatggggttaagaaaccagaaaaccattttaaggattagatgaaataatgtatgtggtgtatgcacattaaatgctgtgtctgagggtacaggtatgcaataagttgcatcagcattattaagtataaaatagcctctcaaagctgaccataataaaaaacaaaagaaaaaattaaaggccaggtgcagtggctcaggcctgtaatcccagcactttgggaggctgaagtgagaggatcgcgtgagcccaggagttcgagaccagcctgggcgatataatgagacccccccccccacccacccatctctacaaaaaattttaaaattagctgggtgtggtggcatgcacctgtggtaccagctactcgggaggctgagatgcgagtatcacttgaacttgggaggtggaggttgcagtgagccaagatggtacaacgtgcactccagcctgggcgacacagcaagaccctgtctcaataaaaattagattaaattaatgtcccatctcttgcaagcttcagacacacatccctattgcttttctccgcgtgggtcgctcggcgatggggttggggattttcacggtgctgtcccccaactcgaacttcacaccttgaccgaggacccccgggaggcggccgcgaggtcccccagcgcggcggggcccggccctttaagcgccgcgggcgcgcgcagtgcgtgcctaaggagtgcgagttcgggcggcgcgagcgcgcggcggcagtagagcgcgcgcgggtgggcgcgcacagggagagcgcgcggcggggcgtcccggaacagtctgcgccagacgggcggcggcgtgagggctccgggtcgctggcggcgtggacacctgagtcccggggtaggggtctcccgcgaggtgagtggggccctaggactccgggcagggctggagcgacgggagggcgtcctggcggcggtggcggcgctgggctctggctgggacgccggcgggtcgggcagagagggggcgccggaccctgccttggcgcgctcctcgctctgactaggggagcccggcgccgccgccgcagaggccacccggtgcccgacccccgaccccggggcgtcgctgcctcctcggggacctcggagtcggggcgcggcggggagcgcgctgggttccgagtctggggctatcctgggggctcaggggtggaggcgggtttcccagccttgggcgcagagggtccccgctgtccccaccgtccgtcccccaacccgggacccctgtcctttgcgccgtgggaccccatgcggcctcggggagagggtgcgggtccgacacggcgggcggagccacctgttccacccgggcccccaggtcctggaatcacgcggggatgtgcagggtctgcccagcccagcgcggcgggagggactaaaatagaggagaaaatgtggcccgtgtgatgaaattgaacaaaaggcagtaaaataaactccagtatttctccaaggctttgaaagtttcccagtattgttttacggagtctaaatttaagcatgtagttgtttggtgtattttttttttccttaaccacaggaactaacctcagaaaacttttaactctaccagaacctagtgcgtgcagagcagaaaagttaaagtgagtgaaggaaaatgagtgtgtgtgtgtttttccaccctaaacagagtaaaacgttcagatctgtaggaagaaggttctttctggctccaattttaacggagaacattttttaaaaatcggtatttctgaaaggtatcgaaagaccaaaccaggcgtacgtggaaacttgagggaaatactcataggagaaaactttattaaaaatactttttacattattttttaaaaacactacataaaagtgccccagcatgcactaaaaagtttgccctccaagttccgtgtctgaatgttactgattgtttttctaggtggaggaggtattttcgttcatgaagccaatgtggaaatacaaacaaatgccctattgacttgggattgggtgggaaggatggaagttgtctaaaatctttcttgccaaagttgacagcgtatgtatggaatcttgtgtgttttcttgtccagactagtaatagccatgttaaagcgactggattatattccttggtaacagcacttcaaatgagctttctttgaaaattttagatgctgatgatttaaaagtaacacattttctccattactagaaatcagaaatccaaaattagagtgatatagtggagcgaaggctggaaagaggagcgatgcttttaggaaggtctgagcgtgtttgaatctgtggttgccgggggtgggggagttgcccattaattcattcaggaatatttgtagactgaccacctacagcgcgcagagccgtgactggtcgtccagcatacagtcatttctagataacagccacatggcccaaactgattaaaaccagatcaagcaagccttcatcggcagctgaagagatacctggccttggttccaaagttcttagacacccaaggcgcccagagttggcactgtgtgttgatttggaagatcatctcagataactccaggagtggagcctggaaacctgaagggggagagaggaagggcctgcgtagagcagagctgagaacaggggagcctctagaacttagaagttcaagtgcatcttatctgcagtgttgtggggcagctgccggtggcacagaggccattcgggaggtgccaggggaatcctaggagcatcccagaacctgagctctttcctttgacggtgaaggccatcgttgcgtttcactttcctttgcacttggtggcttgcttcctaggtgcctctgtgctctaagaagagggccttgcaactccgcccctgattgactgcagccgtccccgctccactctgaggggtctcctggccaccataggaaagcctgtgttcatggaggcactgccctctgcacgggttatgtccagccagtggcatcaacagcctctgtctgcggaactcacagtgaaggtgccgctttccataatgcccttgtcccctttctagactggcagcattcatcttgaaacctaagagtattttaagaaagttggtgctaggtttctaatctgtgcattcaggattggcagggaaggactgtatggggagagcattctgccttgtcggacagggatgggagagctcttcgtgaacgtgtctcttcggactaggtattgccagagactgtagcactgtgaagagttcatgctgtttatcttttttattatagtcaaatacatagaacataaaatttaccgctttaaagtgcacaaatcagtggcattaagtacattccattcccaatgttatgcaatcatcaccactatcaagttccagaactttttcatcactccaaaaggaaacccattaagcagacgattcccattgccctctcccaacctctggcagccactgatctccttctgtctcggtagacttgccccttctggatgtttatacagatggaatcttaaaatctgtggcctcttgtgtctggcgtctttgacttagcacaatgtttttcaaggtccgtccgtgtcgcggcgtgtatcgttgcttccctcctttttatcgccgaataatgttccattgtgtggacagatcgcattctatttacccattcatcagatgaatgactttgggttgtttccaccttttggctattgtgaatagtactgctatgaaccgttgtgtacaagtttttgtttgaacacctgttgtcaattcttttgggtccgtacctgaaagtagaattcccgggtcatatggtaattctgtgattaacttgctgaggagctgccaactgttttctatagcagctgtaccattttgtgttcccactagcaacgtgtgagggttctaatttctcgacatccttgtcaaccacttgttattttcccccgcctttttatttatgtatttatgtatttatctatttatttttttgagacggagtctctctctgtcagccaggctggagtgcagtggtgtgatcttggctcactgcaagctctgcctcccgtgttcacaccattctcctgcctcagcctcctgagtagctgggaccacagatgccgcccaccaccacgccg

SEQ ID NO: 53613 - DNA, 2674 bp, Homo sapiens
ttgcattcatttttatggctgagtagtcgtccgtggtgtttatataccacattttctttatcctgtcgtctgtcgatggacgcctagattgattctgtgacggttactgtgaacagcgccgcggtaaagatgcaagtgcaggtgtcttttgatgtaatgatttctctccctgtaggtagataaccagtagtgagattgctgggtcctgtggtagttctaggtttagtccctgagaaatctctattctgttttccatagtcgactctacccttgagctacttaaaggtgtcctgatttctctgagagaggttgatagccattccttggacttctgaaaatagtaacatgggaactgttagttggaatcttccagttttttcaacaaacatttggtggtccccattgcttaaaaatgtgctaaaaacccctgctttctctctgccctattaaaactgggtaatgcctttgtgcccacaggcttggattgacttgaggaatttgctagcaggttccccagaggtataggaagagcgggaggagaagcagcctctagctcctgcccagagaggaggtggttactggcctcaccttactgacatcatccatcatctggctcgcaaagggactggtggaagatgaggttaaaagtttcatgctttggattcccaccaggaggtcttgtgtgagcttcttccaccctggtgtggatttaaatctgttcaacttgagataagatatgtaaatcagaccacggctgccagtctaaccaggtgttataaataccagtgctaaatgaacatgctctaagccagctttcttttcactgggagcatggattaaaaattcagccaagaattttgagcttcttggggtgggggtgttgggggagcactgtagaaccctaaacaataaggtgtaataattccttcctagcaagaagtactacatttatctcattagtgaagcacatattgggtgctcggtaatatttgctaagcaaataaagacaaagcacacaaacttgtttcacaaaagtagaatgacttcaactggaattttcttctatccataaataatttgctcaggaatccagaaatgtaatagacataccagctgtccatttttcaaaaatgagctgagtaaaaaacatgcagtgtctctcttcacaaacatttcttttttcaattttcattattttccaaaacctcggagattgataccagtttgcaaacattgcatcagctagaactgttccccagctagactctgctctggttgacctcccctcgccttccttctgggtcattcctttttgttactaggacccaatcagatgtctggtcaagattgttttcaggtgagattttactttaggaaaatctggttttggtatctttttcagtgatggcgaaccgacactaggaaacttcttccctcgaggcctgttaaaacccagcctctctaggtaaggcgacctggtgaacttgtttgctttaagtgtgggcgaaatcaattacttccatgtgatgtgtggctgggagtaaatcactgctcctattaacacagctgaaactattcacaacagagacagtttgaaatcaacctcgtttttgtatattgttcagaaagtgctttttattttaaaaaaataaatttaaaattaaaaaaataagtgaaagcatgatcattcttccaggaagtagaattactagccttttaaaatctgtgtttaaggttctaagttcttacgtaaggcatttcagaagtaagggaaatcccagtttggaggaaaagcagaatcataggaaaagggtgctaaaccgtgaccgcatcaatgtttcaaactccagaacaaaactgcccacactcccagcagccaacttccacctggatctttctttgatcttcagtgctgggatatagtcctcgtttgcttagggagaatttttggaagcattcttttctttccaaggtttttttcttgaaattgagaaatagcgcagactaaagagtagttgcttcatatgcttcatatttattttactgcagcctctgtatttctgtggaggcccatttttaagattaattttgttcatggattacacgtgtagagcatacacattcatattgacatggattacctgttaatattgggaggcgttactgggttagcgtgtgtaatgtttattggtgtcaactttttaatacatcgttatttatgaagctgggttaaacgtcctttctactgctgtgtgtttaaactcactcccctccaccgccccatgtcccgatttaaatgtataaattggatgagattaatttctcctaaattggaaggacttgatctataaatatggtggagagggagggataataaccacactgatgttaacatgtctgaaactactcttaagtatttaagcttttcttttagatccaaggtctgtttttagggtgctcttttttttttatttagatggttttagagttttgttttgtttttgagacagggtgtcactctgtcacccaggctagagtgcagtggctcagtctttgcttagggcatcctccacctcccaaattcaagcaattatcccacctcagcctcccgagtagctgggattacaggcacacgccaccatgcccggctaatttttgtattttttggtagaga

SEQ ID NO: 53614 - DNA, 796 bp, Homo sapiens
attcattttcattagtggttataagacttcagattttttattttattcttgaataagctttaacgagatattcttccaggaatttgtccatttcatccatgctttcaaatttactagcataaaattgttcataaaaaccttttcaacacccatggcacctacagttatgtccccactttttattctgatattgttcatccatttttcccctcagttctgttgaaagtttgtcaattttattaatattttcaaaaaccaattttttgttttatttttctctactgtatgtttttctatttaatttcatgttctttttcttgttgattttgtatttattcttttgggtttttcctaacttaagttagatgcttggttcattaaatttcagccttcttgcctaatgtcacaggcatttcagtgatgtttgagctgcatcccacaggtttcgataggtagcgtttctgttatttacttacgagtatttctcaattcccaatattgtttctgagagttatttagaagtataaattcctagtgcctacacacatgggttcttccagttacctttagtctattgatttctaatttaattgctttgtagtaaacaaatatatatttgataccagtctcttaaaatttgctgagacttgctttctgaccccatgtcatcagttctcctacgtattctgcatgagtctgaaagaatgtgtattgtgaagctgttgcgtataatgtgttgtaaatcttgatgagatcaaacttcccattatattgtttaagtcttctgtattctcag

SEQ ID NO: 53615 - DNA, 559 bp, Homo sapiens
aacctctcattggttttcacatctctctgtgctacaatctggacaaatgataggtttcttcagatcatttttctttctgtcattctctctctagctatatttgatcttctgtttatgccatctgtcgagttttttctttgttatcaattttttcttcataaaaagttgtatttggttgttttttacattactctgcttattttttaggtcgatagcatttcctcctgcctgtcgctggaagcagggagtcacaggtgttttatatttcatccagcactgaaacagctttgaacaggccggccaggccatggagtctgtctaactgccagagaggaaagtttctgggatttggtttgggttttgtttgtttgtttgttttagagatggccagctctgtcacgcaggccagagtgcagttgtataatcatagctcactgcagcctcagattcctgggctccagccatccacccacctcacgagactacaggcacgcaccaccacgcctggctgattttgctatttttggtagagttggggtggggtcggggggcatctcta

SEQ ID NO: 53616 - DNA, 903 bp, Homo sapiens
tacgctttaattagattcaccaatttttaaattttttccacattttaacatgcgctctctctatatacacaacacacgcacactttattttttctgaaccatttgaatgtagttgctacataatgctcccctcaatactgaagtacattttaaaaacaaggatactattctcttacgtaacttaggcagttatcaaattctgatttctgaattttttttttcttttttttttttttgagacagagtcttgctctgtcacccaggctggagtgcagtggtgcagtcttggctcactgcaacctctgcctcccaggttcaagtgattctcctgcctcggcctcctaagtagcagggattacaggtgcacaccaccatgcccggctaatttttgtatctttagtagagacaggattttaccatgttggccagcctgggctcgaactctggagctcgagtgatccacccacctcggcctcccacagtactgggattacaggcgtgagccaccgcacctggcttctgatttctgatcttttgtatgtgacctgctttttcactctgggaagctttccagatcttttcttggctttcagtattctgaaatgtcacaatgatgcataccttggcatgggtctgtttgatttttattcattaggttgtacactaaggacccctttcagtttggaaactcacctgttcctgtttaggggcatttccctgaattattttattttataatttcttcctctcattttctctgatttctctctctggaactctcattattcacatagtggccctcccagatccatcctttgattttcttatccttttttttcatagttttctgattttacaactttatcttttaggcttttatttagtttttcatttttttgtgct

SEQ ID NO: 53617 - DNA, 3798 bp, Homo sapiens
ttacttttatcgagaaactcctgccaggcgccgcggctcacacctgtaatcccagcaatttgggaggccgaagtgggcggatcacaaggtcaggagatcgagatcagcctggccaacatagtgaaaccccatctctacgaaaatacaaaaagtagccgggcgtggtggcgggtgcctgtagtcccagctacttgggaggctgaggcaggagaatggcgtgaacccgtgaggcggaggttgcagtgagccgagattgcgccactgcactccagcctgggcgacagagtgagactctgtccccaaaaaaaaaaaagaaactcctaactgctgtgctgttttcccgatggtgactcccctcaggaaggcactgtttctctgcgtgtatttatcgctgtgacgtggcgagattaataaacttgttttcccctaaactgcttccctgagttcttaaacttctgtcatcaaagaatggtgaactctgagggagcagtcgccttgttttcctgtttcttctcatcttgctgtggtccccgccagggctgctggggggaggaggagggggaggaggaaggggaggagttgggagtgctcacctggagaggtttgtgttttcattgaaaggacaagtcaccaaacaggttttgtgtcttctcttcacaaggcttttctctcccctgcttttaagtagggggaacaagttccatctccttttctaatctgctagttggacaagccctgctttcaaatagttgaggaaagaagacagagctgcaagcctccgtttcctgggaaatcacgtgctctgtcattgaatttgaagcggaggcgtggctgggaacccagctccacgtggcctacctcccccaggcctctggggcttctccctcaccgccagaatcaccactttctctcggcatgaaagccttgtggggggatccagccagccacagaagaaaaagccctggggccctcccaccccacgcttttcaccatggcaacagtccgccctggcgtttgacagataaaggctttctgaaaggcctcttccaaacaagatagcagaactcagccctctgcattccaaatccacaagacttatgaaatgcccatcactcagcgaagcagacttcatgcttcctcctgcgtattgtcctggggggagacggggagccaacccccaggagcccaaaagggtgtcctccaggcttgctttttatgtagactgtaggagcttcctatgcaacaaccggctaagaagccgccgcatggtgactcccagtaatgacctaaacagcctcaaaacggcaaactccagcctaggggagaagcaccccaatcaccctgcagagtgcagcagggtcacagcgccccagcattgcctggatcccactgcaatccccagatctgagtgcggggtccacagccagacctctccgccctgggcacaggaggatctggagcaaggcggggtcgggctgggtcccctcttgcttcactgcttgggtttcaggcaggttttcctcgctcctgaggctgctttaaagccctggtcgccctgttccccactgacccttgcttttgaagttcgggagcatctggaagtacaacccgctctaggcatgctcaaagccccaggcctctctgctgcaggctgggtagacagcaggaaccccaggccagcatgcgacccccacccccatatcccctactgcagtcagagctgtgaccagcccaccctagcccaagatcagaattcacatttgcaagcggaggctgctggaactcagtggttgataaacaggtcacccttcataaactttaacctcagagtgtttgtgtatgaagcaacgctgccaacagtagtgacctaaattctggaaatgcctttcaggggtggggctgaatgaacaagggagctgcgtgccgggcctgcacagcctgcgcacatgactaagggacagctcccattcaggcccaggctcctttgactgtggggctggcacgttgcctttcaccccatgaactgcctgtgagtgtgaggatggcagcaagggacctgcccttgttcctgaagacaccctggccctctgtggcccttatgcaatggcccaagtcctcatacaacccatgtccctgacaggttacggtgccagcaatgccacctggccaccttcagtttccaactggttctcggactgtacaagcttcctggtccttgaaatcagacagactgtatcccttttacctggctattcacttggtgtctggtgtattgaatttggggaaaataatctctgcttgggaagatggttttcaaagagtaagaaggcttaagaaggcctggccatgcccagatatcggagcagctgaggtgccccatctcctgcgcctgccttcccaactcaggactgaggggctcacatggccgtgacttccctaattcatcacccatgtgactgtgaagctttctgtgaggctcttcattcttcagcccagtctttgtgtgtgtgtgtgtgtgtgtgtgtgtttttcttttctgagatggagtttctctctgtcatgcaggctggagcgcagtggcgccatctcacctcactgcaacctctgcctcccgggttcaagcaattctgcctcagcctccctagtagctgaaactacaggcgccctccaccacgcctggctaatttttgtatttttactagaaacagggtttcgccatgttggccaggcttgtctcgaactcctgacctcaggtgatccacctgcctcggcctcccgaagtgctggaattacaggcgtgagccaccgtgcctggcccttccgtccaatcttaaaagccacaggaactgaatttaaaaacatctatcatgtaaaacagttggtggcagtggggagatgccagatatgacagtctcattcgttcattcatgcattcagccaatctttgcgtcccttccatatgccgacactgagcagtgctagatggtggctccttcctccctacggccacctaacaggtggggccgtcccagcagcttacacatggaacagggaggcttcacttctctcctcgggtcctctgggggctgctgcgggtgccctgccctggcggccgggctgcaccctccagtgtgtcctgccctcttgcttcccttctttccttgccacccacggagtcacttcctgaacgaaactggcccccttctccccatagctcctcctgatctttaggtaggcttcaggggcatagtaatagggacgaggccacttagaggggtgacaaggaaaggcagctgaaggctgggccatttgagggcagccttggcaggaagagggagtgggggcaaagggcagtttccaagaggaaagggaggtgggggggtgagtctgggcctgagaagggcccccaaggcagtgggtggggaaggtccttgatatctggtgcctgtgacctcggccttggggacccagctccaggcaggtcctttggtggcctctgtctcccttcccccacttaggagctggttctagaaactggaattgcctgtaggagtttccagcgccccgacctgcaggactgccacgcacaacacggctacacaagctcccggggttgcccgatcagctccttggcaggcctttgaagccgtggttgttgctagaaaggcaaggaggcttccgtggagagtccaggggcctggctccgacccagtatctgggaagcactgcgttgcccaggcctgcctctgcctccaccccgaccccagctcagggggcagcagggaccaggtggtattt

SEQ ID NO: 53618 - DNA, 3685 bp, Homo sapiens
accagctcctaccagaaacaaccagcccccaccaggaacaggcagccccgaccagggagaggcagccccagccaccctgcatcgtgggcccctccctgatagtcagtggggacttcagcagagcagccagttttacgtataaatttcaccaccccctgagaaacagggctttcccactttctacaaatatgtgtccagagtttatttttcttccccgaggctgggcaggcctggcttcctgctcagagacaacacgggaggaagccgcccaccccagcgcaggtttttccacgttccctcccttgcccgtggaaatacggagctcttcgcagagccaggccctccctgtgcctccctcccagcctcttctgatgagacagcactgaacctggaccagcccggcccagtccagggacactggaaactatgaggcccagagtcccacggccacctgggctggcacagaggaggtgattgtgtgaactgcagcgccacaggccccagcctggccatcacgcacagcaccctcaggccaaggctgccctgacctcccgctggggcctgcgcagaggtgggatgacccaggcctaagtcccagccgccgagggagaggaggaccgcccagtagggagcgccacctgcccctcctctgccttctaggtaggggcctggggccctgcccacgagccgctctgcctccgcccatcctgccaagccagtgctccttccagaacggaaaggcaacccgccacactgcctcccagatatggcctcctctggcctttctctgggaagcctccaccaattccccacagcttcccttggccgggccccacagctctcctagaactctgatggcactagaaactgttcctgtaccacccggtgccgctaggagagggcagcgtccaacaggaagacctgggcccgagacacaacgccgactctcccctgctgtgtgcactgaagttaccaaggagagggagactgaaagactaagtgattaggtcgtggatgtgtaggactcgtgaaaactgccagcctagcacagtctagggcagggcttctgagtgcaggcccctgatggcagagcatgcaccggggaatctgagaggcacacacatgatcagactcgcctcacgcctgatggatcagaaactctggggtgggctccaggaaggtgtgatctcaatgcactgggctggcaaacagaacccagcgcgctcccccgaggtgcacaggaggagatgcacgctcaggcgcagcacaggcatggggctgtgacctcctggaggtggggccccactgtgctaatctctgcacccccagtacctagcatggcatctggcacatagtaggtgtttaataagtagctcttaaagtgaatcactgtgtgaacactgataaacaagagtggctcagaagcgtcaccgtgagcatatgtcacaatttaggaagcagagagtccagctcagatgacagaatagtaggcccaagccactttcttggtcctgagcatgaccaccgacgaccggagcagcttcaacctgacacggagccaggccacacttcctgcacctccgtacgtgacctccgggtgtccctcgagtagctcacaaggccacacctggctgtggccagctattcctttgttcgtccttctagcatgtggcgcctgttatgtgtgtccaaggccatcctgaggatacagtggtgagcaggacagacagccccacactccccaggctcgcagtccaggggaggggagaggacagacaagtgatcaagctacctgcaagaaggtgtggcagcactgtgacaggggagacgtggggctgggagaccaagtacggggcagtggtcagggaaggctggaaggacgccaaggggaatattctaggcagagagcacagcctgtgcagagacctagagccagtcaggagtcagaggcgtgaggaaggtgggggctacccacgtggcgctgtcagtctctaaagtccctgtatagagcactgtgccatgagtgggggcaccctgcccacacaggcctcacagtctagcagtcattcaacaaatactcgggcaccatcctagatgctggggatacagtataacaaaagcaaaacacgaagcaagactcttctcttgaggagcttgcctactctcgtggtaaagacagaaagcaaagccaagaatagtgcttcagggtcaagcagaagtcatggatggaatccctgcccaggagagactgggtggggccaaggaagttgaaggccagtgtcatcaccaggtaatcaggagttaggaatgtgccagctcacccaagtcacagccctgatctggcctctgtgactccaacctgatggtttcagcctccccgtttgcaatcaaagggaaggtagccaggctttcaggagaggaaggaacaaggcagagaagactatgcgaattaagcttattatactgtaccaccatattgtaccatgaatattatgcatattgtactgatctatgacattatactggacatgtattagacttatactgtactataattatgctacacatattgccctgtactaggctacactatatgtactgtactacagtaaacagcctcatgcccgactcgtaatccacatttaaacgttcgtgcaactaagctgaggtttttttcagctgagaataaggagccgtttgtcctgcttggcatttgggacccgagagagtgtcatgtccaaagctggttttccatccgcccaagtaccagatctggtctagataaagcaaaggaagtggtaaatgacaaggccagggaggctgtttgtgggtgaaacctcaccgaggctaaggctaataacacttaatgggagactgaatcccagacgtcagccgccccggctgatcctctaatgacaggctgtgtggcgagtgtgcttcctgggttggctgccattggaggcatcaccatgcgtgggtcctaaccaggtattgtctgaaatagggcttagaacaaaacccacctcacattcacactttcttctgtatttccaaaaaagtgtttaggagggaggaaatgggcagaggtaggaggtagaatgacaatgaagatgggctctgggttgggcctgccacttaacggaaggtacggcccggcccaagtcacctccattgctgggcttcagcgtcattggattagtcaggatggatgaggctatgcagtggtaacaaacagaccctgtgatctcagcggcttaacaaaataagcttattttactcacactttgtgggccaggcatcctttttctaccctgtagctacactagcaggaacacgtggcctctgatgctcccagaggctgtagggaaggagagggatttggagggtctcatggattcactggagggcaggcctgaagctggctggcatcacccttccacgtctcactcaccacacagccacagccactgcagagggaccaggaaatgcagtcacctctccaggaagcagcaatgccatggggagagcacgatccagtcctcaccccctcagctgttcaaccccttcattcgctcagtttggggagggcacctagtatgtgccaggcatcatgttaagtgctggagccacaaaggtcactgtgtcctcaataagttcagtaagtgagacacacgaagcggtgtca

SEQ ID NO: 53619 - DNA, 3396 bp, Homo sapiens
tttgagaaatttctaatctgctttccatagcaaactgaacagtttgcattcccaccagcagtgtacacgtgtacccttttctccataacctccccagcatgtcattttttggctttttaataacaggtcttccgactggtataagatggtatctcattgtggttatgatttgcatttctctgttgagcattttttcttatgtgtgttggcctcatcttttgagaattgtctgtttgtgacctctgcctgtttatttctccttctaaatatgagaagtagtttggagcagataagggtgcagaatgaggcctcaagcaagggtcagcacagggtccctggtggtgaagtgggtcccgcagtatctgtgacagctgctgtaccctcccatcagctcctgggcataacctatctgatgtgcatttctcctggcttccaggcactttttttttttaaataaaatattcttagtccccccttcatggtccttgtagaattttgtccttgtggcctgggctctcccccggtatattttgctgactttttcttgtgatttctcagagttttatacttggttcagtcctgtctttacttcttaaaactttgaatcttttaggtaaagagatgcagaacattctgctgcatgccctttgctccgggttaggttcataatgagtaacatggggtaacactgatagaaatgttaacatttgatctttgtttactgtgaggtaagcaaaaaaatgtttaattaaaataattttaaaaagaaattctaaccttaatttcaaaaatatgatgttagtgtttagaaaagcttatgtctggtataccagcagtcgttaccaaaccatcacctgtaatccaagattacaagtgaccagccgggcatggtggctcaggcctgtaatcccagcagtttgggaggctgaggcaggcggagcacctgaggttaggagttcgagaccagcctggccaagatggcgaaaccctgtctctactaaaaatacaaaaattagctgggcatggtggtgcatgcctgtagtcccagccactcgggaggctgaggcaggagaatcacctgaacctgggaggcagaggttacagtgagcagaggtcatgccattgcactccagcctgggcaacaagagcaaaattccgtcttaaaaaaaaaattataagtgacctagagggctgtcataggatcacaggatacttctacccatcaggggctgacgtgatctggagtgatcgtcagggagctgtgttcctcccagcctggaagaagcagatttaaccggcatatagagagaagactttctgttttgtctttacagtgatagcaacttctctctcctctacaacctgtgtttgttttggtaattgttgtcttatctaataaaactgatgttcagaaaggtgtaccatgctatcctatggctttgtctagcccccagcacatcactaggtaaacctagagatttgcgatccttgtttcagaagcccaagatgaaggccatgtcaagcttgttaaaataacagaagaaaggagatggcagagcagcgaagtgctgtcagtcatttacactacagtctaaactcaccccctttcctaaggaaaggtttgagatgaggggagaggagaaagaccaggatgagtgagggcagcagcagatgaaagggagggaagaagctggggttagcaaactcagccttcacctctgtgcgtctggcccagggccagccccaattcctctgacatcactgagcaagcatttgtagcactcattacacacctgttggtcccagaacattccattctgagtcccgttgccaggaaaggactgcattctctgaccgggaatgaagccccagggagacagagaccccactgggacctggctggagttcgtgccactgtaatcacagggctgggcagcttccgctgagggccgcctttatctctcatctttcatctccaggcttttcgcgctcctcagttagtccgcccccacagctgcctggactccaccctgggggaagaagaggccctgggatggggtgaccaggaggtgacttacagaccaggccggaaatggcatcatggcccccggccttgtgaattcgcggtctcccgctcccaccctcaccttatcctcaaggcccagacaccaaggcccactaaggcctggaggaggggaagcccgagtgtctctcccgtatctctgcgccaacatcacctctgcccgcccctggcgccactccgggggctgtctgcattgtgtttggaggtgtcttagggaagtgggtcaagcagcctctgcccagggcttgtctgagttgagagcagccaagaccccagggagtattcggctgagggtgcccttgaacctgtggggaactggtgggctttctctaatgccacatggcctctgtctgctaaaggtgtggccatggagtccataaattcaagccgtgtttttcccttagggaaaatgaagctctctgtaaggtgagatggtgactgacaaagccacatccccgtgactcaacttgacaaggcgttgtggccccctcacgtccaacagccccaatcaatgcacactcactgttttcaccaccaaggaaaacagcgggcctctgggactccagccgactccaccacgggatgggcgaagggggaggctcaagactaacagtcaatagaggcaaagtgtgggcctctatgcaacagttacctggccaagggccgcgtgctaattaccaattcattcgcgtgacaagttcatgaagcagctcccattgctatctccgctgcaggatggagaggctgaaggtcagacaccacagagagaaggcataaaccagtggccccactctaccagccccaaccccatctagaccatctagatccagccaggtacagcgagcgtgccccgggaccacgcagtatgctaaagcccactgtgttgttgagccgcacggccactgcccaggccagacggcggggtccctggcatcgtccacatgccctgtgctcatctgggtaggcactgaagaggtgatgagaagccatcccgctctccaccctcacagcccacgaccctcagccagcaccccaacagggaggtgaagactcaggggctcacgggagcctgcaagtcctaaagcatctgcatcgagcccacgtccacatcaagtccatcctaagaacaggagcagatcctgccccgccaggaggcaggtgggctgccttctacaaggtcattcagttctttttttttttttttgaggcagagtcttgctctgtcaccaggctggagtacagtggcacgatcttggctcactgcaacctccacctcccaggttcaagcgattctcctgcctcagcctcctgag

SEQ ID NO: 53620 - DNA, 2676 bp, Homo sapiens
ttgtagtagagatggtttcaccatgttggccaggatggtctcgatctcctgacctcatgatccacccacctcggcctcccaaaatgctgggattacaggcgtgagccaccaggcccggccggccattcagttcttaaagactcatttcctgagtgagcccagtgcctgcagaacgaggcctactgaccacatctcccaactccgccatcaccaaccaggagctgcctccagggacagcaggagtaagtgtctcaagttaggaccaaacaaagcctgggtcctgtggtccctggacatgacacgctcctttgctatttccactcgcttcacccacccacaagaggtgggcatggccaaaacgcacaggagtcacactcccgccagccccagctcttcctggcgcggcaccaccactggctggcaggggcgcaggagtggcgcctctttgcaggtgtgatttgaggtggagccgcagagattctcacaacccaaaaagtcagagccggctgggtgcggtggctcacgcctgtaatcccagcactctgggatgccgaggcgggcagatcacaaggtcaggagatcgagaccagcctggccaacatggtgaaacccgtctctactaaaaatacaaaaattagccaggtgtggcggcgggcacctgtagtcccagctactcgggtggttgaggcaggagaatcgcttgaacccggaaggcggaggctgcagtgagccgagatcgggccaatacactccagcctaggtgacagagcgagactgtctcaaaagaaaaagaaaaaaagaaagaaaaagccgaagcccaggaaccgatttgtgttttgtaaaatgccttttggaatctctaatgagacgatgctgttcactgtggctgtccactgtggcaggcgtggcgctgggggtgtgaccacagtagcaggcagccgcccggtgacagccttcttgactttccctttctttcctagcgttctgaaggggggcaatggccttattacactgagccagaaaatacccagcaaaggtcacaataaggctatgtcgagaacaaaccagctttattgttacgtgttgatgtggcttctccaaagaccatgttctgttgccatttgggcgcggccgcacccagaaagacaatagccactattacactgccaagacaggtctcagaagttccattttcctaaaaatggcatttctggctctgaaagggattgcccaaaatttgttttttgataaaaacatgttttaataagaacatttttcttggggttcaaaaacatgtctttttggcctaaggcagcccagaaacagcaggggggcatgcagtggggagggaaagacaagttccatccagtaggcggaaggcagagggcagaggcccctgcagtggagatgggctcttgcccgccctccccaccctttcaagaaccatctcccaagggcggatcttgaccaaggctgtggttcctgctgtctgctctgaccttgcccaccaaaactttggccccgtctgcaaatacaaacagaacggatgacttatctgtgttgcctaatgaaggcaggttgcccttcacatgcccaggttcctgcccaggctgagctgctggcccacacacgtgcccagggagattctttttctggcggctatttcctcctgtcaagaattctcctggattcaggaagttccgtttaagagtttcctcactgccatcatagaaacctaagtctggaaggatctctaagcagttacgaagtctattcccaaacatcgccacactccctgccgttttcagaggcggaacccccccatcccccgacagctgccggccacgctgtgactcacttcttccaccacttcgtgaggtctcagctaaggtcttcaggtttctggggggccctgctcccgtcggctcttgtctctcaagtgaacagaactgtttctgaagggcatacgtagggcaggtgtccccacccacactgtccttccagttctggctgggccagattctcaaagcccaccccagacccactgagtcagaatccacattttaacaagatcccaggtgagttgcgtcctcatgagagcccagggatcactgctgtaagagagcccaaaagcgcctgttaggcatctgctatcaaaatcctatacgtcttttagggctcagcttgactgtgccctgctccatgtcacctcccacttgccctaatctcactgtatgtgtgcgcgcgcgtgcgcgcgcacacacacacacacacacacacacagatgtactgctgcctttcctgcagtgaccacatcgctgggtctcttttagcccagagctcaccctctttcctgaagtgcatttgagactctccctctgctgtcaattatagccgtgtgctgagtgagggccttgttaatctatagcatcccgtgccatgccttgagagatgctgtggacagagcctgaacagcacagatgcatgaagcaaatgaatggaataatggagggaggaacaaacagaggtcaggctctcaacacaggaaggtctgcaggattccaccggcagcactgtaccggacactctggggtgagagtttcacaagcttggccccagctttcttcccttgagcagtggggagcaccttagtttgcctgcccccatcttggagtg

SEQ ID NO: 53621 - DNA, 426 bp, Homo sapiens
aaaacaaaaagttatcataaaaggaaaacaaaacctatgtcccaaatattatatatcatcataagaattccttcttagggtgacttacacagagctgattataaaggaacttgagctctacccccacttctcctagactctacataagcttagcactaccacaaatctcacgttaactattaactgcatgatttcataagatttaccttctcggtggtaaccttagagagatccttgtacaaaagtttccggacatattcctggagaggaggacgtttctttttcacggttttttcagctggaggtgggttgcagtagtaatatgcattctctaccattgtgacgtatctcgcatcaagatgcattgcttgcttctttctcatcatttgctcctgaaataaaaagtccaaattaatcaaaacacgt

SEQ ID NO: 53622 - DNA, 2512 bp, Homo sapiens
cagtttctgactttattttttaaagaacatccttagtataaaggacgtattaagaactgttagaaattgtaccagctcacaaatgaggagactgacgatgttaaggaacacctaagaactatggaaatgagataaagcgtcagcgagggtttcactttgatctgatgcatcgtttcgtgtcgtgtaagtcctctaagatgagcaagagagctgaaggtccgatcaccccagcgtggacccagctggctctgctctgccaacctggggaccaaatatcctgtgatcacttccttagtccaacagtcctagcaagaagagagtgcttggcgccttgaagaggtgaaggtaaagtgaagaatcaaccagcctatgtgattaaaaggaagtcaaccaaacagcccatgcccaccatccccagatacaccccaagccccttcccctacacatacctctcctacaaacccctgctctggtggtgtaggaacctctaaacccaccacacttccccgacacaactccccttcccacaggtatccacggtcaccttcgcggaccatcgctgccccaaccccaacttctcgccccacactccctcgccacagaagccttcccggccggtctccccactccgcagcctcccacacacgcgccctccccactttctcgccctcgcttccctcccggctctcgaggagcttcccccgacctcccctcgctctcctccacgcccccgaacactttcgcccctccaccgcgggctccccgcctccagtctcgaggcccggcccaggcatgtggggcaggcacctcctccaccgccccccaagcatggcccggcccgggggctcccgcgttgatgggagcctcggagacagggggtctgaggagaacgacgccggacccgcggtccctccactgctcgccgaccccggagagctggagtgtggagtcgcctctggggtcccccagggagtaggagtctaggccggtgccccccagccccatttcctcccgatcgttggagcggaggggaaggaggatccccgggactcacctcgagcctgttgtcaacattagccccgggtttcccagcaccaactccagcgctcgggctctcccctcccctccccccacctatctcgcagccgagggcccgccttccctcagctccccctcctccctccgcccgccagccctcccgcccgccactcaccagcgcggccgggctgagagtgggggcggggcggaaggaggcgagagggaaaaggccatccgcgcgactgcccgattaaaaacagtcctgatcgtcttccctgcggcatgccgatgccctcagcttgactctggggtggcgggtccggggcaaaggctcatatgagtgccattcacttaacagctctttcaaattccccagtcgatgagaagagcgaatttttcagactggcaatacgtaaggtagccactaccagcacctcaaaccagggccccagcggaggggtggagtgttccgaggacccgaggcaggaagtggattggtcgccaggaaagggaaagcgcctgaattggagctgcgcaggcgcaggcgcttcgcgggggatgggggtgggaagcgcgaatggggcggggcggagctcacgggaggcgaggaagtgtggtggaatagtgggagggttacggagcgccattaaggacaagcccggccacgtgattctcctgggcgtttcctggtgcgaacctaaggaagaggtctaagaagagaaagtttgattggactaattcgaggggagacgttgaagatttagaaaattggaaactggagaaactaaaccatatggctggtttgggaggtgggagtcgcttaggaatgggtctagtcttaagaatgccctaaaagacatcgaaagtcctgcggggggatttccagaagcacttctaggtgttcgacgtaaaaaccacccagggcgaagaagaatcaaggctttttccatacacttcttagaaagtacctggttctagcaagcaaacttttaaaaattacagtggcaagacttccctgagttatcaaatcacccattttaaaaaaaaaatggctagcgtcgacatttcttctgaatgcgaacccaggccgactttcaaaaatgggtatcagtttatccacactgcttatttcctcctgaattgctgaaatggtgcatctggcctcgaaacagtactgggttctgccaacatgatccgagtaggtggctctggctggtccggagctagaggaacaagggtgcgaaactggtcttgacgtttgcttgacttgagggggccccacctggtgcccaagcccacgtaatgaactactaccaaccacaaatacttgaggcaagtccaggttccctatgactcaacctttgcccatttgcctctatttactgtttgcttccccatttactcttagcacgcaaattatcctctcatactgagtgttgctgcttcctgtatttaaaaatatatattttttata

SEQ ID NO: 53623 - DNA, 724 bp, Homo sapiens
agccaccaaaagcctgatgtgggaatatcattgtaatctcttaactagaaaaaacaccccgctctgaagaggccatcatttttttattcggataataattcaaacttcatgattttctgaaaatacattctcaagatgaatttttgagaaaagtctcaaaaatgttcattgttatttttgcctgctccaattgacagaactgttctatatggggaaaaaagagaatgaaactatttagtttttatttagacctacacgatactactccctacttaaaacctacctagtggcagcttcacagacgaaagcaaaggccaggcaaagagattacaattacggagcaggacaaatcctgagtttaaggaaaagaaaaatgcatcagatgaagccaaccagctataactacagcctctgcccactgacctcagagaactgggagtgttctgttccatgaggaaatccagctttgatcttttagaagccgatgtttaactaacctagtttaagctgctttttaaaaaatacccacctcttggtatatctctggtagaaattttttcagcgttccctctatctgcttaacagtttccaaaagtaaatgtgttgaggtgtgtcccttcaatatgaaatataagcatcggccgggcgtgatggctcacgcctgtaatcccaacactgggaggccaaggcgggcggatcacctgagggcgggagttcgagacca

SEQ ID NO: 53624 - DNA, 1601 bp, Homo sapiens
ggttgaatggacacctctaagtatgtgtcaggcattaatccatctaatgcttctatttgataggtcctattttccctatttttacagatggggggaacgtgcttagcatagttaaataatgtgcccaggattacatagctactcaactcaggctgtgtgatgacaaagttcacactcttatataagatttccttccattctaagatgtttcccccaccttatacaactgactaccacatacagtggtaatacagatatccccattaacatcatcagaatatggaataagaaaagacatgattttacagcactctgggaggccgagacaggtggatcacgatgtcaagatattgagaccatcctggccaatatggtgaaatcccatctctactaaaaatacaaaaaattagccgggtgtggtggcgggcgcctgtagtcccaggtactcgggaggctgaggcaggagaatggcgtgaacccgggaggcggagcttgcagtgagccaagatcacgccactgcactccagcctgggccacagagcgagactccatttcaaaaaacaaaaaaaaaaaaaaaaaaaagaaaagacatgattttataatctagttcaaacaagacagaccaatatatataataacacaagaatgtctgcctgggtcacaccagtgtgttgctaaatctataaccatgataatacaaaggaaagaaggctgaactggaagtgaaagacgtttgtctaggcttagagcccagacagggcacgtgcaacccagcgaaactagggcaagtcatttgtaactgttccgtgactcagagccctcgttttacaaatcaatggattagacttcaccgtccctaaccttattactttaatttaattttgggatggagtctcactctgtcccccaggcaggagtgcagcggcacgatcttggctcactgccgaggctggagtgcagtggaacgatctcagctcattacaacctccgccttctgggttcaggcaattcccctgcctcagccttccgagttgctgggattacaggtgcctgccaccacgcctggctaatttttgtatgtttagtagagacggggtttcaccatgttggccaggctggtctctaactcctgacctcaggtcatctgccccattggcctcccaaaatgctgggattacaggcgtgagccaccatgcccaactgcttccaaacatttcagagtccaagcgaaaagtggttgcatgggtagggcgtggctcatgccgctacttccccacatgcctaagttccggccataacaaataacctgcatacacaggacttcctcttcccttagtgcacattcacttcttgtgtcagttgctaagagtaatcatgtaaagaaataggtgtcatttttgatagctgattctggaagtttctagtttcttctggaaggtatactgcagacataataatatatgcataatatatccctaaagtttctccgtggaagcttgaacccgggaggcacaggttgcagcaagccaagatcgcgccattacactcctgcctgggcgacagagtgatctcttggttcgctgcaacctcccctcccaggc

SEQ ID NO: 53625 - DNA, 4593 bp, Homo sapiens
caccgcgcccgacctaatttttgtatttttagtagagatgggttttcgccatgttggacaggttggtctcaaactcctgacctcagatgatcctcccgctgtggccccccaaagtgttaggattacaggcgtgagccaccgcgcccggcctctgttaatgtttcttaagaaaacaaaaaaattaggggtattgattttgtagctgcgctaagtaacctttgctttttgcgtcccttggtctcagtcctagccatttcctatccaccctgtggctaatttgtcctttctgtaacagacaccctagactgtgtctatgcggttgggcagaggcgtgatgggtaaacactcctggcgggagactacaggcgctgcagctacatcctgtttcgtactgggagcaggtgccgccccgcggaacacttacttgccccgccctgcggtggagcagggcggtctcagccgccggaaccgccctggaagcccgccccaatcctgggcgtcgcttcgctgtgagtgccgctgccacggattggcttccagggtccggcccgtcggccaatcaggcgcgggggcgttgtctgggggcggggctccggccgcctctgacgagtcccggatttaccagggccggtgggatcccctcgggctcccgccttagcatgctggccgggacatctggtgaacatggcctctgctactgcggcagcagcacgacggggcctcggccgggctctccctctcttctggcgtggctaccagaccgagcggggcgtttacggctaccggccgaggaagcccgagagccgcgagccccagggcgccctggagcgccccccaggtcggggatggggcccgggcggtgggagcgggggctgggacgcagaagcctcccctggccgatttgcggtggggtgtcggggtcggggaaccggctgccggcctgaacgcgcggccggtggggaggagggggaggtgaggggagcagagggtaggtgtgggtgctcagtgttggggtcatcccccgtccatcctctgtaactgaggatctttgaggtccacgcttgggtggtcttcccatcttgctggtccggacctggtttcggaagggcttttctttcctttgttggaaacgtgtgagaaactctttttttctttctctttttgtttccttttttttttttttttttttttgagacggagtctcgctctgtggcccaggctggagtgcagtgctgcgaccacagctccctgcagcctcgaactcctgggctcaggctatccttccacctcagcgtcccgagtagctggggacacagagggatgaccacgcccagcttttttttttttttttttttttttttcatttttagtagagatggggtcccaccatgttgcccaggctggtcttgaactcttgagctcaagctgatcctgcagcctcggcctcccaatgtgttgggattacaggctgagccactgcacccagcctagaaaaccagctctttaatgaggcggagctgtgggagaagtaaagttttaaggtctcccaaggatacatttccaggaccatctctgaggcttcttttatgtgagcaggtgggggggtccaagactgcattgcttgggagaagtgggcagttagttccagtcttggaagacagcatgatatttattatgtatttgtctccttgtagctagtctgttactttaatttcagagtttaactcttaactctgctgaatttggaactatgtgctggtggggtttctttcttttccttttagccactctattgacaccttgatatgtgctggtggttttaatgaattaacagtcatgaatatcagcttttggaacttctgttgcatgctcatttgcgagactaattttgagtatttggtttacgctccaaaattattgtatcattatttatcctcacggagtagaagataagtacagattgcttattagaggaaaatcatttggcatctttgatctgatcattagattaatgttgaagatccccttcggcatctgggcacctgaccttggaatgttccatcaatcacacactagaacttcaatattttgctcttcacttcggagggcatttaaaataaacctcatatctctgtctctctctctttttttaatcctaaaatggagtctggctttgtcgcccaggctggagtgcagtggcacgatcttggctcactgcaacctctgtcttctgggttcaagcgattgtcctgccccagtgttccgagtagctgggattacaggcacctgccaccatgcccagctaatttttgtatttttagtagagatggggtttcaccatgttggccaggctggtcttgaactcccgacctgaagtgatccactggccttggcctcctaaagtgctgggattacaggcatgagccaccgtgcctggccaagagggaacctcctttttgcagagccgaattccccttcctgtctacttgctcattagggagctccaacttgacctcatctttcttcttgggccttcctgaaagtgacaagatacaatgaacatacgctcctgagctacaggcttcaagggcatgtagtctgcctcagtcctgtcctacaggacaaaaaccaaatgttttgtcctgtagcataacactgcccatcagctttctaggtggaaatacctgtgtccttggtacccattgcctggctgctaatccaatgccatatatatttttaggctctgttagggcagcaacccacctctggtaccaaattctgtattagattggaagagttcaggtgctgtgatatacaaagagaagggatatcttctttccttccccttacggtcatgacccagaagttgcatacattgctgctacgttcccattgtccaaaacttagtcacatggccaccaggttatggggaaggctgggaggtggctctttgttctgggtggccatatactgggctctctattactatcaaagagagggttcagaatggaagttaggaatcgtagcagtctctgccacagaggtatagtaatctgagatgagcaatccacctttatctttttcacctcatatttcacatcaaatctttttagtttttattttttaaattttatttattaggccgggcgcggtggctcatgcctgtaatccctgcactttgggaggccgaggtgggcggatcaccaggtcaggagttcaaaactagcctggccaacatggtgaaacctcgtctctagcaaaaatacaaaaattagctgggtgtggtgcagacgtggggccaggcacagtgactcacgcctgtaatccccgcactttgggaggccgagacagacagatcacttgagacagggtcttgccatgttgcccaggctggtctcgaactcctgtcctcaggtgaaatgcttgcctcggccccctaaagtgttgggattataggcgcgagccaccgtgtccagccccaaataatttatacttcctaaggaatgaaaagagggttctatatacgcaatttatttgtgacatatagtacatttgcattttgtatgtgcaaacgtaacattaattatcaagtatctttatatgttaggcaacatattaaactattaccgtgttttatttttattttttgagatgagatctttctatgtcacctagtctggagtgcagtggtgcagtcacagctcacttcagcgtgcgccgggttcactggccttctttcttcatatgtttatcttggctaaaataaatgtctacataggatgaccacatcattcactaagacttcccttgtattaaggctttaaagagatattgagcctgggtgtggtggctcatgcctgtaatcccagcactttgggaggccgagctgggaagatcacttgaggccagaagttccaggccagcctggctgacatggtgaaaccccatctctactaaaaatacaaaaattgacctggtggtgtgtgcctataataccggttactcgggaggctgagtcaggagaatcacttgaacctgggaggctgaggttgcaatgagctgagatcaagccactgcactccagcctgggtgatagagcaagactctgtctcaataaataaataaataaataaataaataaataaataaataaatacaaataaataattaaatagatattgaatttgcctctagtaaccttttggatggcagtggtttcactagttacaatttgacccatgatgagtgttctttgtaactaggtatttgtaacagcttgtactttcacctctgtaaaccttgatttccaaggaaacttgaatttatttatcaacaatgccaatttaaaatggaggtgggtttaggagtagtgattcatgggtgttcttccttttttttttttttgagatggagtttcgctcttgttgccgaggctggagtgcaatggcacgatctcagctcaccacaacctctgcctcctgggttcaagtgattctcctgcctcagcctcctgagtagctaggactacaggcatgtaccaccacacctggctaattttgtatttttagtagagacagggtttctctgtgttgg

SEQ ID NO: 53626 - DNA, 1460 bp, Homo sapiens
tttggagaagacggaggggactagcttacgtcgagacagaggagttcataactattaactatacacaacgacgtgtcacaaatgtttacaaacttccaagagataacgataagaagcggccgggcgcggtggctcacgcctgtaatcccagcactttgggaggccgaggcgggcggatcacgaggtcaggagatcgagaccatcctggctaacacggtgaaaccccgtctctactaaaaatacaaaaaattagccgggcgtggtggcgggcgcctgtagccccagctactcgggaggctgaggcaggagaatggcgtgaacctacctgggaggcggagtttgcaatgagccgagatagcgccactgcactccagcctgggcgacagagcgagactctgtttcaaaaaaaaaaaaagaaggaagcaaaatacgattggttcggtcccgtccgctctcagcggctcagtcccaggcctcggggccagaaccgtgttccccgcgctacttgggcggcgccgagatcgcggcctccccgaagggtgcccaggaggcctgggtcggacgtggggcgcgaggaaacggcgggttttccacactgagccgcgaaagcctgtagacgacgaagaaccccgcagccttggcctctgcgcggcttccacgccccacggctgcccgcccgagccctgcccccaggcgcgccagccccgcctcccgggtcccgggtcctgggaccgggcccgccctgccccggcgcccgtggtcaccatggcaacgcagcggacgtcggccaacggcccgccctgggggcggggctgggccggtcgggcgcgcgggtcaggtggcgaagggcggagtctgcgcggggttgggcggagcctgcgcggggccggtaggatcgcgtcgggagccggtaccgaggcccgagccgcgggagtcgagcgaaggcagcgccgaggccgcggtttccccctgggcctccccagcagcagccatgggcagtgagtagcggcggctggagcggggactctggctgggaacgcaggccccgcctgggctgcgggcggtggggctggcgctcgctcggagtcgtgggggccagggatgcgcgggccgctccgggcctcagcggagggcacgggccgggggcctccgccgaggctcccctagccgtgcgaggccttgcccggcgggtaccgggacccggaggcccggggtttgcgtttgatagagggcgaggatggcgctgggaggccattggttttgggggcggggagttagggcaccgggtgaacctggaccactttttaatttttcaggagttaaagaaatcccgtgtttttattccctcgtcatctttccttggcatgttgcattgaagaaagctcccctaactcgtttaattttaaaaaaagtgatgcatggcgtgtgttttagggaggaaaggagtgtgcattggtaac

SEQ ID NO: 53627 - DNA, 1141 bp, Homo sapiens
cacctggagcactcctactctgctgctcttctaattggctttgtaatagcaccaaagttttgaaatatttcattctctctttccccttcctcatctccacttctaacagatactgtcctaagtggttaatacctaaactctgatcccagccttaagaaaactgtaatgatgattaatgttcttggtgcggtaaacttcgaggcaggctcgatagagtgacatctgtctcttattctgacatctctgctctgcttcgctgctgtttatttttcctaaaaacactctctcccttccctgaagtagaggagaggcaaatctctatgaatgaaattttgctttggtaaattttacgttgtatgttttcttcaagaatagtctcttgagaaaacttcggatttatgctataaaaacatagatttgcctcaatgatctaaatatttgtagaacctgctcacatggctatatcataaagcaaacattggcgaattcttttgacccatattttctgctgtatactggactttcacggttagttgtttgagctttgggacagctttggacgatgagtccacaggtcgtgtctgtcttgattttacaggtactgagtttgagggtgcagtcatagctctgttccatttgttggccaccaggacggacaaagtccgagctttacgggaggctttttatcggcagaacttacccaatctcatgaacctcattgctacagtttttgtgtttgctgttgttatatatttccaagtaagtataaccttttcaccaaagtaagtgggatgtagatttttattttgctcttaaagagaatgccatctgacatgctgttgtttaacaagtcagggtttaagatcaagggaaataaaattttgcaattagagtctccagactctgattttaaggtgtgaaatattggagtctctgtactttttttgttttttgttttgacccatcagcaggaagcagactctcgacagtttaaaaggcagaacgtctttgttagcattgtcttttcttttctttttttttcctgagacggagttttgctcttgttgcccaggctggagtgcagtggcgcgatcttagctcactctaacctcctcttcccgagttcaagtgattctcctgc

SEQ ID NO: 53628 - DNA, 1527 bp, Homo sapiens
tttttaaattctatttttaaaagataatattctggccgggctcggtggctcatgcctgtaatcccagcgctttcggaggccaaggcaggtggatcacttgaggtcaggagttcgagcctaaccaacatagtgaaacccccatctctgctaaaaatacaaaaaattagctgggtgaggtggcacacgccagtagtcccagctacttgggagactgaggcacgagaaaagcctgaacctaggaggcagcagttgcagtgagccaagattgcaccactgcattccagcctgggcgacagagcgagactctgtctcaaaagaaaaaaaaaggataatattctgatgtatccttcttttgtgccatttatggtaaaaaatttgggtacccacaattgaattcacttatgggtttttttttcattctcttcaggtgtggcagttgggtgggcagggagtaattaacgtttactgaaattatgctacttggtgatctccaggaatcatttagcaggtggtttaaaatcctcacatttaatgctggttgagcaagagtgaactgactgtaatgacccttgggaaggtgaattggttacagacgtatagtaacgacactgtaaagatagtccaggcaggagatgacaggtctggagtagagtggtagccgtggcaaagtgacatttaatttccacgaagacagttttaagggagactgggacatcggaagaaaaaaggggtgatgcagagctcaaatctgtacacgcttgtttgaggtgatagcagacatccagatgaagaaaaccagcagacaggtgaaaatcttaatctaggatgattagtcatgctatggattcagagaaagaaatgtgttttttcattacttcattaggaattgcacaataaatctcctcccccataatcacatgactactgacttttcagcatgcaggagaaaaagcaaatatttccactgttgaaaggttttattggagaaacttgatgaatacaatgacttcatggcttagtgaagacaaccacggtggttaaaatacagtgaaccctcatttagctgtatccattcaaagtatttgagcatctcctatgtataatgtcaatttatttgatgctggttaaatgtgtaacaagttacttaaaaccaactgtaataccaaaaagtcattgaacacacttctaaagtatactgcctgaataaaaggtatctataaaaattccttccctgtagtatctatatatttaagcttacaaacttagctgcttttctacacacaactgcaattctatattaaagctttgcaactgccttaatctctacactcttttttttttttttcccgagacggaaaaaaaagagtctcgctctgttgccaggctggagtgcagtggcgcgatctcggctcatcgcaacctccgcctcccggattcaagcgattctcctgcctcagcctcccgagtagctgggactacaggcatgcgccaacacgcccggctaatttttgatattttagtagggac

SEQ ID NO: 53629 - DNA, 2949 bp, Homo sapiens
gcccggcctatgctcaaatgtttcttgggctgttaaagtactgctcctcgcagaagggctatgttcccgggatctattctcttccgtacattcattcctatcttcattagaaaacatctgacctaaataaatcccccatcgatgctaacatctccttccgcgcaattttttactttctaagtcaaatcaaaacaattatttgagcgactgctcctgtctgccattaagtctttctggcaccaccctccagacatatatacaatattgcttctttccctcaaatcagaaaggactgcatagttccggatcaaggcataaatgatgaatcatgactgtccatccccaccaacatactctgcaacattataatctatttacctctgctttgaaaatgtattctttaaagcactgcttccaactagccacttagccagtaacatttttgagaaaaacaaaacacaacccaaaacaatgtatatattcctggggggaagagtttctaactcaaaatacgcagataattgtttattattctaaggaacacccttctgaagaggcctgcagtcggtggggctgtttctaatttaaaactacttaggtgaaccaggaagaatgtacatttaaggagatacttttagacgcagatgcctcgcgcaagcctaaagctcgtgtggtaagcgacacgactaggggttaaaagcggctggttggtaggcccggggccgtggctcacgccttgtaaacccagcactttgggaggctgaggcgggcagatcacctaaggttaggagttcgagaccagcctggcaaatatggtgaaacgccgtctctactaaaaacacaaaaattagccggcgtagtggcgcgcgcgcgctctcagctactcgagaagctaaggcaggagaatcacttaaacccaggaggcggaggttgcagtgagccaagattgcgccactgcactccaatctgggcacagagtgagactccgtctcaaataaataaataaaagcagctagttacttctcattcttttaacgaaacaaacaaaactgaactttgctgggtgacaggagtgaagcaaaggaaaaaacgatagtacaagttcgattcgaattcttccagtcttatgattcgatcatcgcaggaatactgataaaaatctgcgttttttccaggttgacaacttttgcgaggccagactaaacgaattcagcgctccaaggagactcctctttcctctgctttctcacatttacctctcgccttttacctcccaaagtcgaaccctccaggatcgtacaggcggtattccctctaccaagcattctactcctctgcagatgctgcaatctttacactggaactaacacttagctgtggtgttccccgctttctttactcggagtagcccaggctcttcctctccaatccacaatttccctccaatccccagtttccctcttgggcgcctggacgcgtgcccagccgcagcctgggagacaccgcgcggctgcacgcaccatgcagatgtggtccctttccccttcttcttctcctccccaaagaggttttgtgctgtgactggcttgccccggttacttactccaaggtgtaggggtgaagaacggaagaggacgaaataactagctggaggcagcagtgtcagccgatgccggtgccacggctcgaaacaccggcgcctctcgcggtgctaaaaggatgggcgcgcaccctccttccggcatccgtagaacccccgcctttgacctagcttcaggagattactttccgggtcagcgtgcgtttagggcgaagacggagttgtaaacttcttaaaattcctctctcgacacttcggtaattcctctttcgagactaaagctctttttgtatgcgtgtgtgtcaagcgtatgccccgggattctcctccgcttccttttctcggtcttccttcttgctttagggaccggaagagtccttgaaccaaaatagctcggcgggcacttccggggccggcgcccagagttccgggagggtgcaggcaggagagggaaaggcagcagcggcggcagctggaggatgaagaaggagcatgtgcttcactgccagttctccgcgtggtacccgttcttccgaggcgttaccatcaagaggtgagatgggagggggttcgcccggtcgaccggcaaaagggaactgcgacttctgagcgaatcttactgctatccaaaaaaatgcaggccttctagcgactgcatgggagggagtgtgtcgagagggaagtacatcagcaattgtctgcgtcctgttgcgagccagcgagtgtgctggctaggagggtcagttgtggttttcagtgagggtcggaggcgggaggaatagtggattaacctagtttaggcttgggagttcaccaccactacttttagaatggccccaggcgcaaggtgatcactgcctaagtgcactcggagaattaattgcttttcgccatcaccccagaggatggagattgggaaggtgaaaggatacgtaattacagttagatacgagaacaagttcacagatatgtcgtacagcatggaggctatagttaatgacgatatacgtattcttgaaaaacggagagtggatgttagtgttctcaccacaaaaataactatgttaggcaatgcatttgttagctaaatttattccacagtgtatatatacttaaaaacatcaggtaggcggcaagtattaatatatacaatttcatctctcagtttttttaaaggcgttgatagaaaatctgggctttgcacttaactgattttctgagccaacatttcagtaattgctgattcattatatgatggtttcattcaataaagatcggatatgtacttgaaaatgtgtaactggcttagaatggttaaaatgtataagaaaagtttcaagttcttaaat

SEQ ID NO: 53630 - DNA, 703 bp, Homo sapiens
ttgtgcggatctcctatcttatcctgtgacttagaatgccttaaccatctgggaatgcagcccagtaggtctcagccttattttacccagctcctgtttaagatggagttgctctggttcaaacgcctctgacaaagggacagtcatttcacctcacacatgaaagcaaacctaaaattttctctattggaagttcaatcttggctaagggcatgatttagaaatcaaaggagtctgaccttcacgtggttttgaacacttgtggaaaggtagctgtgggaagggacgtagcctttgtaatgcaagaggagagaatggggtgtggggcgtgtggcccagaaatgacacagaactctgacagcactgcccggttgccatgtagctaggtaaatatttgcaaagcacctactgcttctccggactcggggcaagtgtctactgggcatgaaaccatctccgtggggaagtgagccttacccagttcttatctccctcttgaggccaagttcacagaatatgacacaacttccagaggaaaggggggcctgccagttcttatcttcctctctcagctggcattgggacattttagtggccaggaccaatgtgttatctgtaggagccctgaagagaagaggtgggcccagaggctttttttttttttttttttttttttttttgagacagagtctcgttctgtcgc

SEQ ID NO: 53631 - DNA, 1330 bp, Homo sapiens
tgatatagtcacttaggtgcagtttatcactcatagggagagcacacccctctctcatttgtaatgtctctcttggtcactttgttctttcatcattttgacccgtagaactgtctagaagattagatgaaactaagatgaccagattgccctggttattttggccactccttttttgggagactgagggctcctgcattttctgctgcagtcctccaggcatctcaaatagcttagagtcccaattcctccactgctccaggcccaaggttaatggatgaggggagaactaattcattgatttagatgttgggtcagagccaggcttttgtttgtgctcaactgcactcaggactcagaagttctgccaaaaaacctgtggcaatgccatccaatgtgagactgggaccagtaactggaaacaaaataagctttttttttttttgagacagagtcttgttctgctgcccaagctggagtgcagtgacgcagtctcggctcactgcaacctccacctctcagattcaagtgattcttgtgcttcagcgtcctgagtaaccgggactacaggcgcatgccaccacgcccggctaatttttgtatttttggtagagatgggtttcaccatgttggccagaccagtcttgaactcctgacctcaagtgatccacctgcctcgacctcccaaagttctgggagtacaggtgtgagctactacacccagccaagaagcttttctagaacgtttctcagctccatccatgaacatgacagcgggtcttccccgttattcaaaactgtaaacactgagtgtctgatgaaaactgggccttatgtaattgtatgagtccatttttacactgctgctaaagacatacccaagactgggtaatttataaagaaaaagaggtttggccaggagtggtggcttacgcctctaatcccagaactttgggaggccaaggtgggcggatcacgaggtcgggagatcgagacatgtcctcctggacaacatggtgaaactctgtctctactaaaaatacaaaaattagttgggcgtggtggcgcgtgcctgtgatcccagctactcggcaggctgaggcaggagaattgcttgaaccggggagtcagaggttgcagtgagccaagatcgtgccactccactccagcctggcaacggagtgagactccgtctcaaaaaaaaaaaaaaaaaaaaagtctaatggactcacaattccatgtggctggggaggcctcacaatcatggctaagggcaagaagcacgccttacatggtggcaggcaagcagagagtgaaaggaaagcaaaag

SEQ ID NO: 53632 - DNA, 692 bp, Homo sapiens
agctgggcatggtggcacgtgcctgcaatcccagttacttgggaggctgaggcaggggaatcacttgaacccaggaggtggaggttgcagtgagctgagattgtgccactgcaccccaacctgggtgacagagtgagactctgtctcaaaaaaaaaaaaaaaaaagtcggtaacttaaaacaaaaaaccactgtggccaaacaagttgtgtgtatatatagcagggagtgaactcgtggactgccaatctgtgacttctggttatttgagttcagaggaattacagaattgccaaattctgtcatttggctccatggcagggtctacctgccctgtgtcctctgcccgttagaacatgtttggataggtctctgccagggagctttgatcttttctgtggctgcagccaacagccagacatcctctaaatgtcagccactagtcacaaggacagaaagccgactgagggtgcgggtggacaaattggtgtaaattcatttccacagtcggcaaagccaaccaaagcacgtggtccactgacagtgatgtggcagcaaagtcacttgaacatgtgaagacaaagtggggtggctgttgttcttcccgggcactgattaatcatgtaggtgggtaactgtgtcgtgctcctccggagggctgcagccaatgagttcaggggagatttatataac

SEQ ID NO: 53633 - DNA, 793 bp, Homo sapiens
caagctttgaacttggactaaggtggttccagaatggtgatgccccaaggcttggcagatacagctaaaaaaaaaaaaaaccccaaaaacaaaaaacaaaacaaaaaaatcccaacatgtatttaaagataaaaccatatcagaaaactgcactcttggggatcaagatcaaatcttcatatcagcatctactgtgcagaagatcctgtttccctttgttagtttctaaacctggttgttagattaatacaatcattcttacttcattttaattttttacttgatatgattttttttttgagacagagtcttgctctgccacccaggttggaatgcagttgcacaatttcggctcactgcaacctccacctcccaggttcaagcaattctcccgcctctgcctcctgattagctggaattacaggcatgtgccaccacacccggctaatttttgtatattttagtagagacgaggttttgccatgttggccaggctggtcttgaactcctgacctcaggtgatccgcctgcctaggcctcccaaagtgctggggttacaggcgagaaccaccgcgttcggccccttgatatgattttgaacaggatctttatcttcagtgaaaggctgatattccatttctttatggaaacagtcttgactgtttgggcacttgggctgtttccagttttgggctattagagataatgccagcttctttgtcagctgacgtcagtgaaaatggtgaaatgtgtctattgtcaaaccttgacactgtgttcaggcccatttcag

SEQ ID NO: 53634 - DNA, 1844 bp, Homo sapiens
tacaggggagactttatctcagcttttatatccatacaatagagttttatgtctgggcatggtggctcatgtctgtaatcccagcactttgggaggccgaggtgggtggatcacctgagttcaagagttcgagactagcctacccaacatggcaaaaccccgtctgtactaaaaaaatacaaaaattagctgggcggagtctgcagtgagccaagatcgcgtcattgcactccagcctgagggacagagtgagactttatctcaaaaaaaaaaaaaaaaaaaaaaaaaaaaaactgagataaaatctcccctgtgtgtaaggataccaattgaaattagcaaccaaagccaaaattggtgtattttgtttttctgagtgtacaaaacttgggattagaggttggaaaataaaagatgtgaaactacccttggctagcatccatctgccccttctctcaaccctgcgtcatttgtcacttgcagggaaggtggagagaaggacgagatggcagatggaggaagagaggactcagaaaccctcgtttcttctggtttgcttctgacttgaactgaagctcatgcctccttgaacctgggaacagtttgatttctggaaggagctgcgtgcagaagctcctttaaaactttgggatcaaattaaaactttgggttttaggtaggcacagccacaaaaaagttgaagctggcatgtcttgtgcaaggctacctatcaagacagaaatagaagtggatctctggcctggccgtctgggactgcgatgtctcattgtggggcctgcctgtaactgaaggttccgcatgagtcacggacttccctggtgcagggcagcaacccaggggcttggtaactgggttgagggaaagagagaagtttttgtttatgatctcattccaatcagaatgtgtccagacgcccaaatatttgatttgagcctggttgctaagagacctcccactgggacccagctgcctgcgggcaggaaggcggtattggcatcatttcagatttctgccaatttattttgaaaccagaaaacctagaacctcggcctcctcaaggcaaccagggggagaggagagatctgagtcagccaaactagagagagaaaacccccgctaaccttctgccagggagctgtaggaaggttcgggatagaatagaatgatgacattgtgcttgtttacttcctgggaaataggccggtagggtaatgaagaagaagttggagttctgtgcttagaaatgcaagtgtcatcttgaagaaacctcagggattccagaacaatgctggatttccgggtaataattgggcgttgtgaaggctgccctgattggatccacacacccagcatcttgggttttaattgcccggtgacttaaatgccttagggaaatggcatgagtaacattgtcataggtgagcgtgtgcggggtcggtgcacatgggacaggtggggaaacctgcttctggcttctctcctttctcagcagaaggcagatagctgaagggaaaaggcttcacatctgtactggtatcaaggaacactgggctttcccatgctagtagcagcagaacagaacctctggatgtgatctctgtcctcagtgccactctcaggaccaagtagtgataaatacagacctagacatttttccaaggttttttttgttgttacctaggctggagtgcagtggtgtgacctcggctcactgcaacctccaactcccggattcaagtgattctcgtgcctcagcctcctgtgcagctgggactgcaggcaagtaccaccgcacctggctagtttttgtatttttagtagag

SEQ ID NO: 53635 - DNA, 2900 bp, Homo sapiens
tcagggagcagattttttttttccttttacagtgaaattggaacagtcctgggaaaatgggacaggtgtccccagtcaagagacagagctgtttacccaactacgaggagaggccctgagggaggcgaagtgttgataccaagaaatctaaaattttccgatcaagaggtcgcccctgcaggttggggaccagggaactggagcacgtgggctgccctctgacaggtggacaccaggagtggggcgggcaggccaaagtacagctgggagatgggagtccggagggaattctctgggttagttttggcagtccataggaaagcaggtgcctgccccgcaacccggacaccctactaagccagccgcgggtgggctcctccttcgaggggactgcggggcagacgatcacttctttccactgagtctctgggaggagacagggagatgccagaaggggccaagcgtgagccagggcaaccaggccggccaggcccgccggccgctccagcccagcaccagggcgcccgcgcggctgccaaacacccccgggagttttgctcgcaaagggaccacgaggcagctgctggcgcgtcctgcgcgtacccgcccagaggctccccggcttgctcctcgcgggtctgtcccgaaactgacgtgaaaccgatttggtgcaatgcgaatgagctcccgcccgcctccgcctccatcccagccgccgccgccgcccgtcgccataacaaccggcccccaccccccccaccccacgccttgcccctcgggtcccccgggccacaggccacagcgcgggaaggcgccccgccctcggcgccccgcatccggccgccgcgcacccccgcccgcccggcgcttccgagccacgcagaggcgccccctcccgccggagacgggaaagccccggcgcccccagactgggctccgtttccagctcccggaggggctggggctctcccgcgtgcgccccgcacctgccgggggcccgtacccgccctcgccggggctccagggggcacgacggccgtggcccggcgctcttgggaggggagcgggacatccccgaaggcggcgcgctggaggcggggagcggccggggcgcacggagagggcggggagcccgcgggagggggaggagggggaggagggggaggaggcgcgaggtgggggggagcgcggcgggcggcagggagggagcgggagggaggcaagaaagtagcagaaagtgaggctggcaggcggcggcaaaggagccggcgcgcggcggcggcaggaagtctgtgcccgagaacagcagaaataagagccagggagggaccgcggccgcggcggcggcggcgagagcgaaagaggaaactgcagaggaggaagctgcgccgcagcccgagccgcccggcatccccgccgcctctgcgcccgcgccgcgcccccggcgccccctccccagcgcgcccccggccgctcctccgcgccgcgctcgtcggccatggcccgggagaacggcgagagcagctcctcctggaaaaagcaagctgaagacatcaagaagatcttcgagttcaaagagaccctcggaacgtaagtggggaccggggaggcgagggtggaggtggccgcggcaggggctgcacgggcagctccagctgccgccgccgccactaccgcggcagaaacccagcctgtcaccgcgtcctcattgtcccgttctcggcgctgcggagcccccccgagcgcgcccgacgcgtgggcctgcgacccccgggtgggcgccgttcccgggagggggagggggcagcgccgggctgtcagggagcagcccacgcgggcgcgcgacttcccacttctcctgccaccgccgccctctccgctgccttctccccacgcgtgactgtgggctgagcatggtggggatggctgtttaccggctgtgtgcgtttactcgccgtgtgcatgggcgcaccgcgttggcgagacgtggtcacgagaagatcagcctccagtcgttcccatttctgtccttacatcatgtatttctatggaattggcatctgcacgtacgaggtgtaggcaagactttgggtggccacgcgaggatggaagggaagggcttcgcagtgctcagggtcacacgtgggcagagcctcaccggagggtctgtgcatttcacgcgggctcggccgcacgcgccggggagcgcgtctccaagggagggtctgtgcgcgtcgctgcgcgggcggtgctctctccgggctgcatcgagtcccatgctgatggctgtgtctcaagaaagcagaaataatccgaagtcgatggcaggaacgctccaagcatgtgctgctcagctcagctgctgttccctttctgcccaggagttgggtcttgtttgttttgtttcggagcggctcagaataggtggggaggctgatagtgaaagagaatcaggacctgccgaatgagtctgaagttcaagttatttccttccctcacacaatcagtatttgctctgcatcagtatctgtcagtgtggattcacgcacaggtgtgcagtcagaaatgcccattttgcaggggttcatggaggtgttgattaggctgggaagagaaaggggagctatttcatgggataaatcagtgcgttgttgggtgccctttctttccttcctcctttttttccgtgtgcttgtttttgtgcttggtttcttttttccagcaccacattacccagcttgtcttcacctccaggctcggcgtctgctgctgttcagtcatttcccctcacccccacgcagatctgcagggggtcccccggagagaagttgtgagggtggctttcccagtcctgcttctgattcccgggaaggcgcacgctgaggactagagtggggtct

SEQ ID NO: 53636 - DNA, 1877 bp, Homo sapiens
gagtctcactctgtcacccagaccggagtgcagtggcatgatctcagctccctgcaacctctgcctcgtgggtgattctcgtgcctcagtctcacgagaagctgggactgcaagcatgcgccaccacacctggctaatttttgtatttttagtagaaatggggtttctccatgttggtcgggctggtcttgaactcctgacctccatccgcctgcctcagcctcccaaagtgctgggattatagacatgagccaccgcgcctggctggaaaactgtatttttgagcattaagtaatttcctttaaatttttgttgataaaggagagacccagctgccaaagaggcttctgttctgggggtaagactggtcactgcatgttgaattgacatcattcaaccaaatgtggtttagcctgagccatcgtattgtgggtaaatgtgtagtttctgttgtgtctttggaaattctaaaaataggcactccccatacctccttctgggggtttccacagctggcttcagcccagccagctcattttgcagacctaaagcgtttaagttccatgcccatggtcagagatgtggggactttgtaaagtaatatttcatctctagtgcagacataatgcccaggaaacagttgcactcatcagcgagcctcggagtcatgttctttatgggtgacacagtgatacagctgtaatatgcaccatgttcagtccagagacaggcagtgaactaacgagaaaactccgctgtttgcttagactttctgtgtattgactcaatgcccacattactaagcgcccgtctttaaaaattagccacagtctagcacgtataaacagataggacaattaacacctgaaattgtcttgttatataagtgaaaccagtgaaacgtcattaatcaagaccctcatacatttggaatgccaagtgacagtcaacagggttagaccgaagttggctggagccagtatctatgagacaggagtttgttgagcaaacccgtgatatcagcatgacatggtcatattgtttaatctgctttacaagaacaaacacttagctttaatattggcatgcgttgttaaacatttattacaagtacttcttatcaggaccaacgagacttctgcttagcaataatttgccagccctttaaagttgtttatgaatttcagagcacttaaatggcgtttttatgtgaaggttttgaaatcgacgggagaaagggcaaatgcgagcatctgatttgtttgtaccagtgctgcttggaagaggactgggctttgaggagacactcagcatttcttgtcgcgtgtaggattgaatgggtgcatcaatcaaatggtgctgggattagcggttggcttgttgggaagaaaacagctcattgtgtttctcagtggcagttccattggcaccacagccaagatgatctttccttgctcaggtttgtgctgtgcactccggacattcagcttccctgactcctaccccgtggaagtttgtttctgacttgtttccagatacccctggggaaacagctccctccctggttcaggaccgtcatgtcgcgccaaacaccaaaacaaattccaggtattagaaagttcagtgtaaaaacccataaaacaagaagaaaatactagttaatatctggcaaaagctttttattgttattgtttttttaattaagctgttggccagatgtggtggctcatgcctgtaatcccagcactttgggaggctgaagtggatcatttgagctcaggagttcgagaccagcctgggcaacataggaagaccctgtctctacaaaaaacaaaaaacaaaccctccacaaaaattatcagggcatggtggtgcaa

SEQ ID NO: 53637 - DNA, 900 bp, Homo sapiens
ctgcactagtctttcaggttaactttggaatccccttggccaagaggaaggtcctccattcagtcagttgagggggtttagaatttcatttttggtttacaccaattagagttcatgtgagagttctgaaatgaaacctcaccttggagaatgagtagaatttagtcagacttagctttggttctgccattttgttttggcttcctttcacatgaagacaggccattgtcctgtttgctcttgttccttggctggtttcaatgttagcattgcccttacagactgggcagaagagtagacagacttttctttgggtattcaaaatatcaccatcaagtactgttaacgtgcttttttagactggaaactttcccaaggccgttttccccacccactgacttgcctttagccatgatcatcattgcttttgtcctgtctgtaagaataaaaagaaaaagtccttttaatgtaaaagtcataaaccatgtcctgacaactgcagagaattatattgctcatttgtttttattgttagtataacttttaattgtcttccttatctttgtgcctgactgttgtttgctggctgaagttaactatgttttgaaagtcagttcagaggtgaatgaatggtgaggtcatcatagcagatatagacatgttggcgttttttttctgaatgtcaaatgctaattttagccataacaaattttgaaaaagaatgaaaagttcccagcgagggaaataaaggtattctgtgtgggaggcacctgttatttgcagatagtactgttcatttcttttgcagatatgaaatacagtctctttgcctcaattattacttcatccttcagcctgctagtgttacagaaaaggggtcatgatccaggccccaagaga

SEQ ID NO: 53638 - DNA, 780 bp, Homo sapiens
aagtttaatagggaaggtgaactcagaccaccagtgggggatgccgcattgatttaaattttaaaagatcccgtgttttatgaaagtaaagaaataggttaacagtccccgtgacaagaatggaaaacattctcaggacctataccacacatatacatttaaagtatcactcagcctgggcaacatggtgagggcctgtctctacaaaaatttaaatcttagccaggcatggcggcacgtgcctgttgtcccaggttgaggcgggaggatcacttgagcccaggaggtcaaggctgcagtgagctatgattgcgccactgcagtccagcctcggtgacagagtgagactctgtctcaaaaaaaaaaaaaaaaaaaaaaatctctacctttttatagcacctaacagtacttttaaacaaccctacaggaggggcatctggtgccatgaactaacattacggatacatttaccctttgacccagcagtcctgtttctgggaatctttactgcagatacacccccacatgtgatgaaatgacatttgctcacaattatcattgaagctttgtgacaccagagtgttggaagccgccaagtggccatcagtcaataagggactggttaaaggggtgatggtgtgtatcgacagtggaacgctatgcagctgttaaagagaatgataaaaatctgtgtttctgtccaggcatggtggctcacgcctgtaatcccagcactgtaggaagccaaggtgggcagatcacttgaggttgggagttcga

SEQ ID NO: 53639 - DNA, 879 bp, Homo sapiens
cccggtcgtgtgtggtttttgaatcccaagaaaccatggcttgaggtgtgcttatggcccagtgtactgccaccacctctgtactaaaccaagccaccttgtgtgtgtgtacgtgcgtgcgtgcgtgtgtgcgtggtggggctgtgctccaggagccctggttgatttgccttctttttgttagagccgctttatgacttcccctctttcttttttgctccttttcctccttcctccctttgtgtctttttcccacattattttcctccatgcttttttctagttctactttcttgtgtgcctgtatctgtatcgatctgaagcttgaggctgagtggccactactggtgactgattcccccaccccagcgcacatgttcactgcaggctgcaggaaacaggctttgtcccactttcaaagtgggaatcagccctgctctggatcagcccctggtctggatcaatgtgtctgggtccatgtgggagtggcttcctctatggttctctttcatgtttacctttgggcatgagacccaaatgctgtctgtgttgaccgctgactgtaaacagcacctcgttcaaggtggtgaacctgtttcttagtggccagggtagggctggctgtgtgctggctgtgtacacatcaggtgaccatgtgaaccgtgtccgaggtcctttgactagagctcagcagcctaaaacctgaggaggaacagggcaggagctatccaggttgacagggtattggccaagggcctttcagctcattccttcctgagaatcaagaaaggcagggctagaatgcctgccccttcactcccacccctcctggttctccactgagctccctgcctgcagaatggatctgatttcttcctt

SEQ ID NO: 53640 - DNA, 1095 bp, Homo sapiens
ggagaattacttgaggtcaggagttcgagaccagcctggccaacatggtgaaaccctgtctctactaaaaatacaaaaattagccgagtgtgatggcgggcgcctgtaatcccagctactcaggaggctgaggcaggagaattgtttgaactctgggaggtgaaggttgcagtgagccaagattgtgccactgcactctagcctggaagacagggtgagactctgcttaaaaaaaaaaaaaaaagttgagattgtccaggataagacaattaatttgaacacaggcttcaaggaccctacatgtgaggcttctcctgtggaaaataaaccaggcagcatatgccttcacagagtttttattcacatcagtattcttgctttgagttttcatggagagaccatcgcagtttgatgatgatatgctgataacttgtttgtcttcagaaatacgtagtatatattaaggacctagttaggcacacagcaaggctggctccaagaggcttcccagagtgcattcatcccccttctgccctgtcctgagatgagataatggttgccaggggcacgtggaaattaccaacgtcagaaggttctagtgcctggaccttactgtgtgcatcatatttgcttaaacatactgtctgtgaacaaagtccaattatttggaaccaagttactgatgataaacataatgattacagcgtgtaccatcatgaactgccacggagcaggagagactccagggaatcatcacagtggaacggatccaaaccacgcctcccattttgcacagaaagagcgtgggatggtgctcactccttcgaggcctaacttgcgtgctccaatgagaagtacaaaatgcagactaattataactgaggaataagacttaaaactgctgtcccctgacatcgcccggcctgtctctgttttctaagcaataatgttctcatcatgttctctctgggttggtcacaaactgaaaaattgcttttgctggtcttcctacctgggtggttggtacagcaaataactgctaaatgatgaggctagggaattgacagtaaagtcaaaggagattttctgtctcta

SEQ ID NO: 53641 - DNA, 1324 bp, Homo sapiens
gtgtatgtgtgtcaaagagagagacagacacacatatatacaccccttggccagaacttcactactgtggcagatagtatttgcatccgtgccatcttccaaaagcatttagccctggctgcccacccctgcccagcacctggtgattccaggccactcaggggcccactctgaccctcggtggctcttcgccaccctcttctctgtgatccaagcagaacttctgcagtacagtttgtgcccactcacttcagagagatgatacaaaacacttctcaggagtgagcaggtgacagttggggaggaaggaggggagccctgggggctgcggtgccactggcagccccagaaaacactgccgcattgcccagctctgcctcagccctgggctgtccttggacagggccatgggatgccacttccctctctctccctttggcagagagccctcggaaacaggagttattgagaaaccaaaagtaaacagctcagcctctccccggggcctgtggagcctgttgccccggatggatggggttagtgccagcagctgctcagatgatctgtggggcatgttctggggtggagggggctgggagccacggggcagaatttggccgtgagagaagcattgcaaaggtcatcgtaggcctgacttctagggcacatcgtcagatcgaggtcggagaaaaggcaaaactgcaagccccttcctcatgcttgcttcacagccacgccgcttggagttgaaagcagccagaataaccgtttcctttgagttaacaacgcaggtgccgtcatcctcctgtgagccgcggctgctcagggaccacaggggagggagcgcggggcctctgaatcgggcatcactttctgctctgccccatgggcccctcacacacagcacctactagggacagacagttcaggagtcagagacagggatgccaggcgaccccggcacagagtcggtcacgcacgtttcctccactgtcctgacctgcctacttccgcctaacccatttggctgagctggtactgatgttcttaagatggcaaaaatcagtcgatggggcttgggctctgagatctgcctgatagttgtaggaaccacggacggccctccctgggcagggctcagaatggatggctggattttaactcgtggtttcctgatggtttgggaaggacatttgaaacatcctcctctgtggagtctccctttgccccatgcctagaaccaggggttgcacgtgctcatttctctcctgccgtatgtataatcagggctctcatgcgttgatccctgtggcgtctcgggcac

SEQ ID NO: 53642 - DNA, 668 bp, Homo sapiens
tggatttttaaaattattaaaaattacattttaattttaacattttaatttcaagatagttgtagattcacatacaattataagaaataatatacagtgagatctcatgtaccctttaccaagtttccccaaatggtaacatcttacaaaactgtagtacagtattacaaccaggatattgacattgatacaagcaggatacaaaagcttctggaattcctcatggtgctcttttgtagcaaacccacttccctcctgcatgatctcaccccctgcctaacctcaggtaacctgtagtctcttccccatttctatggttttgtcatttcaagaatgttatataaattgaatcttacaatatgtaaccttttgggatcttctttttcactcaactttcactggagatttatcgaagttgttgtatgtatcagtagttgttctatttgataactgagaagtatttcacagtttgagtgtaccactttgtttaaccattcaccagttgaaggacacctagtttgtgtccagtttttgactattaaaaaataaagctctgcagtccgcagtccggcctgggcgacagagcgagactccgtctcaaaaaaaaaaaaaaaaaaaaaaaaaaaaaaaataaagctgctataaacgtccatgtacaggtttttgtg

SEQ ID NO: 53643 - DNA, 1561 bp, Homo sapiens
tttcactgctatacaaatcctgttttccacctgttcttccctcccttccccttctccttccaatctttggctgccactgaccttttcaccgtcttcatagttttaccttttctataaggtcatataatgggaatcatacaatatgtagtctttcaagattggcttcattcacttagaaatgcacagttaagtggcttgatagcttatttctttttagcactggatactagtccattgtctagatgtaccacagtttacctgttcacctactgggggactgtgttgcttccgggtctgggcagttgtgaataaagctgctgtaaatgtctgtgtgtatttgtttggtggggacagaggccagctgccagcattctgggagctgagcttgggtgaggcgggagcttttgttcagtggcttattttctctaaagtgctttaatctccactccactgtatgcagtaatcttcttagagagcaaacctctgggctttcttcaggacaggaggggaatctgaggatctgaagagtccttttaaagactgatccagtcctggttttagccttaccttttggtttctaaaactatgactatgcaatcaactttgcactcgatgtagtaaaaacgtttcatgccaaggtgttgaaaggccaaaatgacaataaacacgtttacataaaaatataatgtgcatccggtgaagatgcagagctaaaggtgagtcctttcttccagattcttgtgtgttgtccccatgtcgaggttgtcagactattacagggagcaaagttagaggccgtggtgtggctgtgaagtgaaaagctgattgtgtgggagggtcctgattatagtcatcgcagacaaggacgtgttctccacctgtgattttgtttcaacctctacattatctcccagaagtgtgccaaactgtaattctcacaatatccaagctgatgttttttagtagtaggtttcctgatagcattataacattcatttctctgggctcaagccattgtttcctcgtagcatcctcaaaagcaaggggttctggatacagaaggaggagaacatccattgagaccttcgagtgggtcctgaccctgtgattgtcttggatcatgtctgttgatgcctcccagggcagtgaatgaacagcaagaggggacagtgatgagttcagtccagtgatgtatacgatagactgcagtggatggaggcagggctgcagctctctgagagatggtctgttccggagaggctgaggtcagaaggacagtgggacagggaggcacctgagccccgtagggtggcctcttggcttggttttgggtgtgattggacgagatggcctctacagttctttctagccataaggatgtaggatactaaaaatgaagccccatctcttcaccctgatattcgaagctgcttataacctggttacttcttacctaactttcatgctccgtcttcttcccagcatcttctccctagtgagcgcatctttgtcctcaagaccttctctcttttgtttccccttaaatcccccttctgcccac

SEQ ID NO: 53644 - DNA, 2219 bp, Homo sapiens
atttattttattttattttgttttgctttgttgttttattttattttattttattttctagaaatgaggtctcactatgttgccctggctgttcttggattcctggcctcaagtgatcctcccaccttggcctctcctcccaaagtgctgggattcgaggcgtgagctactgcccctggccctttgctctctttatcttaccagtggagctttccttgtgacctcacgtcctccgtacctcccttctttgagttcctattggacctgcttcctgcactgcacaatgtagcaacttgtaaaatgccatttttagggtgggaggctgtggacttcagagggtgcacccagggatcagtgagggacaggaggaccagattgccttatgatcctcaggattccacttgagtgcttggtgatgcattatcttacgacataaacacacaaacagaaggtaggagaagctgtctcaagggtgcagcctttccttggaaagtatgcagtgatttaagtgttcagagattggcacagaccctttgaatctatgcacggccattctcacagtgatttttgtgtgtataaaatattgaccatgaaactgggtaatggagttgagaatagatactttaaggagggtggcgctgcttaggaaaaaaaggtttcagactattgagtgtgacttttgtgagaaatgggaaagttcttcaaagattataaaaagtcactttcttactataagattgctatccactattagtacaaatatatgtattccaaatcagctgtcctagcttgctgcagcatgcctggacagaactagacaagctccgcccatagtgcatgccattccttatttggagatgctcccttaactatccctgggcaacttccctttctttctttgttctgttctccttacctaattaataaagttttaaactaatagccaatcaggtaaagtgtaaaatgtgagatcctattccagccaatggaaactggacacagcagtagggtagacgtgtcaggttataaataactctgtctcctttgttcagtgtgctctcgtggctggacagctattgagtagcaccctttctgcagaaagtaaagctctccttgctgagagatcacttgttcccacgttaatccttttttttttttttggtgacatcaaaagcttcattcccaacactttgaaaagccaagacatggtccttcatcatgtaggggctgtcattcagaattgggaacaattctgatcgtgtaagtgctccaggcaaataaagtgatatgacaggatagagcgtgaggaaagcactttccactacctgaaagtttctccaggaggctgcaaacacatgagagcagaccgtgtttctgtctctcttcccagccctggcacacaggaggtgctcagtaaatatttgttcaatgagtgagcgaatgaaccgagctcttaacgcaccacaccgtgcgaaggctggtgttgtcactccagctaaacccatccctctgtgctgaatgaaggccccgttgctttggttgatgggcagtgtctccacctaaccaacgtctcattcaactcactacaggcttcctggtttgcagactttgttgctaagattcgcatcccttcttgaaatctttctcccaaatctttctctcccatttaacaagtgattattttagatgagggaaggggagtcagagactgtttatgagcagaaactggaaattcagggagccagccatgcaggatctagggaatgagacttccaggcaggggaataggaatgtcacggccctgaaagggtaagaactttggacccagttggagaacagcaagagggcccgtggctggagcagagggagggagttgagtggcagaacagctgatagggtcggatcagggtgggcccttgcaggccattggaagaagcctggattatattctgatggcagaatatgacctttcagcatcattgtctgatttagctgttttctcctatatatatttgaaccttacagaagcctggggtaaataagtcaggtgtatttatttctgttttagagatgaagaatatgaaactccaagagtttggagggctgggacccagatctttggactgctcatgtgttcagtgtcttgttttttgtttttgttttttctttttttagacagtctcactctgttgcccaggctggactgcagtggcatgatc

SEQ ID NO: 53645 - DNA, 571 bp, Homo sapiens
gtttcccaggaacgatttcaccgtgttcaacttcagcatctctgcaagagaaaacaccgcctttagtttttctggagctgaagttttacacttggcatattactttttagttcctttaggataaaacccgcacaggtgaccttggtgacaaagcccctcacagcagtccctcctctacccttggaggggctgccgaccacgtgagtgttctgtttggctgtagtgccctcatgcttctctgcccttgctgatgtggttccctctctctgacatgctcttttcctttgccttcctgtgcagggctcaccagcccagactggagcgcagattgatcctggggagcagcccgaccagcgtgccaggggcagggtcagatgccagggcagggctgtgcccgcatagccctgtgtctggctctctggcaggacattggtcgtgctgtgtcatgatgtttacgtacacttctgtcttctcacactggcctgggagccacctggtttcagggactgtgttttatctatcttcagggccctgctgcctagcctcatgcctggcactcctgggtcccttc

SEQ ID NO: 53646 - DNA, 480 bp, Homo sapiens
tagtgctccacccccaggcctatgtgcacaaaactaggtaaggacaggcatttctgtttttgtgcccaaatgttgccttccccaagaccaccctggcccaccatgtccccatcctgtgcctataaaaaccctgagaccctagtgggcacacacacaaatggctggacatcaagaggaatgcaccggcagacccacaggcagcagaagacaccatcaggccattgaccagcagaaggacgtggagtttggctggggcagttggaggagagcccagccgctgggcagcatgactccaggggaaaccaccttcccactccattccccttctggcctccccttccacctcactgagagctaccactccataagaaactttgcactcattctccaagcccacgtgtgatccgatttttccggtacaccaaggcaagaaccccaggatacagaaagccctctgtccttgtgataaggcagagggtc

SEQ ID NO: 53647 - DNA, 1295 bp, Homo sapiens
taaaaagaaatcagaaggagccaaatcagagctgtaagggggatgcctaatgatgtcctactgaaattctccccaaattgcccttgtgtgatgagaggaatgagcaggagccttgttatggtggcgaaggactctctggtgaccctttctcaggcatttttctgctaaggctttggttaactttctcaaaacactttcataatagggagatattattttatggccttccagaaagtcagcaagcaaaatgccttgagtgtccaaaagaactgtgatcatgtcttttgctgttgaccggtctgcttttgctgtgactcgacctcttctacttcttggtagccattgctctgattgtgctttttctgggaaaaagcgttgtactgggaaagccgtgttttgtttcctgttacagttcttcaaggaaatgcttcaggatcttgatcctacttgttgaaaatttccgttgagatctctgctcttgtctgaagctgagctgagctcagtggttttggcgcccatagagtggaaagtttactcagctttaatttttcagtcagaattgtgtaagctgaaccaattgagatgtctgtggtgttggttgttgcttctgctgttaatcattagtcctctacagttagggctgtaacttgaaaaaaaaaaacaagatgattttttttttccttgctgattgatgaggacggtttgccgccgtggacttcatcttccacatcaacttgttaaaacaagttattcatttggaaactgctgatttctttggggcattgtccacataaacttttcataaggcatcaatgatttcaccattcctccacacaagtgtcaccataaatttgcagtttgttcttgcttcaattttagcagaattcatgttgctctgataggggctcttttcaaaatgacgtcttttccttcttactgtctcaaactagatcctgtctaaacatgttgtagcaagctagtacacatttattttggtgcaaaaaaaaaatggaaattcatgcatagttttttcgtaatactcattttccacgaactttttgaagtcccttagtatatttttgattcatttagcatcgagttcacagccaacagcacaatataacccacagctgaacaaagcttacataacacacatattttctctgtaaggcgtcatagattagtccattctcatgctgctaataaagacataccagaaactaggtaatttataaaggaaagaggtttagttgactcccagttgcgcaggcctggggaggcctcaggaaacttag

SEQ ID NO: 53648 - DNA, 630 bp, Homo sapiens
cgcccactgggccctcccaccacatgtgggaattaaagggaactacagttcaagatgagatttgggtggggacacagccaaccaatattactcagcctttctgagcttaggagcactaagtagctctgtagcactgtgcctgcggcctgtttcaaacaaaatctcaagcaaaaagcaaacatatatgaaagacatggcacgaaatagcccagagaaaggacccttgttgacagtaggagagctgaagcaggaaggcacagtgtcatcttgtttgacctcagcctggaatgtgcatgtccagtaactcgaattttctcccctctgctcccatgtccaggaatgaccacaaaattgccacaagtattgatttctaagtttcaaagaaattttagccagcaggtgaatttgtaaatacagatcggtgaataatgaggactgaccatacttacattctaatgttcttaactaaatatctttctccacgtatgtataaagcataaaattttctcctttccagtctaaaggtcagtgcctaaaggagtgaaatggtgagaaggggctggatccaagctgttattggctatgattgaaaatttactgctatttaaaagtgcatatttccacttttaa

SEQ ID NO: 53649 - DNA, 5613 bp, Homo sapiens
tgccagagagcattgttcctctcagattataatgccagtaactgggaccagtggggattttataatcatacagtccccattacagagaaactgaggcttagtatgtaaaagggatgcccagtgttacattacagtaggtcagagttgtttccaaagaagttcatctgattgtttttgttgtttttccatccaagccatagctggttactattaggaagatagctaactagttgtcaaatacacccgggatttttctgaagtttaaccactttaaaaataaatgtgtcatttgtcacatatttgtataatgagcagctttggtcaataccataacctcagtctctccagaatttaacacaactgtggtgccattcctattggacctacacactcaaccacagaatggagtcgggtgaaagattgggtgactggatttgccatttcaccgagtgctgtgaatgggtctcactcgcagggctcggaacagaagccaccagacccacaggccatgggagtccagtcccacagctgtcttggctcctggtgaactaggtcaactgctaataccttagtaatagacactgccattgcacagaccaggcaatgaggcatagttaacggctctgtcaaacagcagcagcacctttcatatgtcgcccagatactttcaagacaaatttgagtgggccgggcgcggtggctcatgcctgtaaacccagcactttgggaggccaaggcaggtgggtcacctgaggtcaggagttcgagaccagcctggccaatgtggtgaaaccccgtctttactgaaaatacaaaaattaaccaggtgtggtggcatgcgcctgtagtcccagctactcaggaggctgagacaggagaactgcttaaacctgggaggcggaggttgcagtgagccgagatcacgccactgcactccagccaggacgacagatcgagactccgtctcaaaaaaaaaaaaaaaagacaaatttgagttcaataaaggagaaatgaaaagctgtcacaaaataagctctcatatttattcaaaggtttgcattccatagatgaatcatgcagggttgcatacttgagtcactcttcttggtgagccaaaagtcacccaatactgggaataatttcccagctgtttgaaacgtgtgtgtgtgtgtgtaaatgtgcaaagggtaagttattcaaaagacccaattagtggagtttattaactcttactgcaggtgtgtccatagctgtgctatattcatccctttttttccagctttttaaatataattttaagaagaagcctcattagggcaaggttaaaaagtagaatattgtttatgtaaaacccttggctgttatcagcatttcatataaatgtagctaattacagtcagcaggctgccatcattgctggaatagaaatacgacttcattgtaaccatgatcattattatcttagttttgtaggagacatagagtgaaaatggctagggaccagtataaatgtgggcatgttgagacatttatctgctatagctggccctcccagatgataccctgttttcaagagtctcatgttttccatctctaaggtgataacattcaaaaagaagaggttgtttgatgttattgtgttatattttttaaaaagaggaaaaaaaaaaagaaagattaccccaagaatgattcatcaagttttgaaactcaagggaagtggatattatggatgattgacagtttataaaatgacaactgggaatgaaatgggttctgtcaagctttgtgagtggggcgtggggtggtgcattgcaatctgcgatggcaaacattgtggtttctgtcattcctttaaatgtttgagaacaactatttactgcatctcccatggaaagtctatttcttattgtatgagtataatgcaagttaaagatcacttatttttctttttgttctattaaagtgttcccttgcagcggtggtattggcaataatattggttctaggaacatgaaataaaacctggtaaatatcattgggcagaatcaaaatatagaggcagtggctaggctctctttcatagtctagtgttccttctctgtagtgatcagggatcagttaagttagttgacatacacactgcttatttaatgggttttagactgtaggtttcttcatgcctgggtcttgacccatcactggatactgaaatcaatttggtgagttatgactggcttaaaacaaaaagaaaatagaacagaatagaaaataataggctgggcacggtggctcacccctgtaatcccagcacgttgggaggctgaggcaggcagatcacctgaggtcaggagtttgagaccatcctggccaacatggtggaacctcgtctctactaaaaatacaaaaattagctgggcgtgatggtgaactcctgtaatcccagctactcaggaggctgagggaggagaatcacttgaacccgggggtcagaggttgcagtgagccgaggttgtaccactgcactccagcctaggtgacaaagcgagactccagctcaaaaaaaagaaaagaaaagaaaagaatagaataatagtgtaccatgcatcataacaataataaacatcttgttttatgcacctcttatttcacttccatgaacggtgtgttcgtataaagtatgctggttcagggagaccagcctggtcctcgattgtgagtatggctccatgtagacaatcctactcaaggtaaatgcaaccagaaacaaaggacattgcccctaacaaggacttgggccagaattccattgttcggccttcttgccaagggctgagacatgctttctgtcagtatcattgaagtatgatggatggttcgtgctagtctaagaggagcaatatctcacgtcgctggagtgtctagggacaagaatgcttttattaaacagctaccttaactaaaagtgatgctcactgttaaccattggtttcatgatgccaggcagtacttgaacatcttcatgggatgtattataataacttagcatccctatttagcactgagttatactgaattcatttaatccttatccatttagataattacagtgcagtagtcctgctttatctgaggggggtgtgtcccaagaccccagtggatgtagaaatggcagatagtaggtgtacactaaggttttttaatccaataactgagatggcttctaagtgactaactggcaggtagtgtagacaacgtttggatggatgggctggacagagggatgattcatatcctgggtgagacagagtaggatggcacaggatttcatagctacttggaatggctcgcaatttaaaattgtttattaactgtattaattgtttatatgtggaattttccatttaatattttcagaccgcagttgacggcaggtaactgaaactgaggctaagggggctaccgtgtcgtccttctgaaattcagtaccacagcacagcagtgtagatggagatagaatgtggaaagggctgggtgtggtggctcacacctgcaatcccagcactttgagaggtcaaggcaggaagatctcttgagcccaggagttcaagaccagcctgggcaatatagtgagacctcatctctataaaaaatttttcaaacccttagctgagcatggtgggtacacctgtagtcccagctacctgggaggctgaggtgggaggattataatcatgtgtttttgttgtaaacaacttgagtctgggaggcagagattatagggagccaagattgtgccactgcactccagcttgggcaacagagtaagaccctgtctccaaaaaaaaaaaaaaagaatgtagaaaagatctctgttttccattcattccctcagttattctttgaaacaagcaacctttgagcatctgctttgtgctgtgctcttggaacacagaagtaggtgataactcggcccttggtccataggaggaaacagatatatcagcatgatggccatttagggtgggacgtgctagaatagagggagatacatatgaaggtatctgggattttaaaggaagacggacaaactgtgcggtttgggaagacattacccatcacaaagatatttaaaatacaacttaacaggcacataaaagagttttccagctggagagagataggagttacggaaggagaggtggacagatcccagccccaggacatagcctggaatttgctcctttcagccagcagtggatgtactttagctgtctcttgcttcttttgcttaaaaacagaattcagaaaaaattaattccagttattcagcgtgccagttagtggaggcctgactaattaaggtttcactgtaagcttggcatatcagaagtagtattataatcatgtgtttttgttttgaatatgttaagtttttgttgttctatttgtgttgactggggtaaaatgtgatctgtgtcattttgattttgagttctcacttagtaatccaatttggcatcccatatcctcttcccaacaagaatttaaagtgtttattaaaaaggagaggagaggtagagggtcaaataaaacattggcagcaaggcaggtggccaaagcctgcggaggaaggacaggaaatgtctgctggagcttgttatagagcagacgcagaatgagcacagtcagaaaatagagagctagggaagggaaggcttgctcagctctggggaattccagaacttagagggcagaggccaatttattcaacatgatagtttcttgtctctaatctctcttggattctttgagtatgaggaggacaagtaaatgttttgaggaagcatggcatagcaagaacaccagggggcctcgcatacctgcctttgaagtttattatgtttggcaagaccctctcagagcctacgttcatagctgtgaaattagccataaacatgctccctccaaggccttctgttgggaggatttataaggatttaaatatgcttagcacagagtgcaggccataggagatactcagtaaatgggatcccccctctgcccgacctgtaaccctacgtggaatcctatgatagactttgcctaagagtgaccgaggcagcattgtcattgccacggctagagcccccattgtatttagtttaaccttcgctctctaaaggtcagaatacatttctacaacacaatacattttatttagtgctgcacacacagtggttttagtgagggccttaatagtccccccagaggttccacgtatgcacctcttgcactctgccacctgtgctgtggggctagtatcctgcaatgacagtgcactcccagcttatgcctgggagacgttcttaaagtcccagtggcgactgatacgtttacatgctgtttatgaaagagatggagtttgggtggtgatgggagggagggaaggagaagaaggaagcgccgtaactccatctgatgggcacagaagcagaggaagagtaacgcatatgctgtgcactcccccttcccttcttgccacccaatccctgatcccagctggatctcaatatagaataataaaactgtgattaagatcacgtaaacaca

SEQ ID NO: 53650 - DNA, 4108 bp, Homo sapiens
gtgggaggattgcttgagcccaggagtttgaggctacagtgagccacgattgcatcactgcactccagcctgggcaacagagtgagaccctgtcaaaaaaaaaaaaaaaagaaaaaaaaaagatgcaaagaaagaaatttcagcattgaaagatatagatactatactgaaatcattaactagtgcagtgtgtcattatagacctgaaagggcatatttcatactaaattatttttattcacaatgcttaggagttgaaattttctttttctaagtaggagcttctcttctaccattcttttctgaccccttacaaagtaagggcaggatccaaagctcgtcaaacccgtgtgtcatttcagcaagccgttgactcatgttttttggatcgatttctagttttgtaatgattgggttgtctcatgttaaaacatgcagtcttgaaatagggttcgaaagacaacttttaatgattcacagacactatttggtttcttttaagcaggtagaaaaaataccagaattaccactcaccttgaattttggcttgatttgtctaaattgcaatatttgatttttatacagcataagaaagtttctcgtcaactctggtgtatcttacgccatttgcttcagtgacggtacccacaaggtgggaatcttatggctaaaaggattttaattagtagacactcaagccaccagatggctcccttaggtttaaaaatctccacctgggggaaataaatggacttttcccgagtaaatttagaataatgccctaaacttgtaatgtgagcaggtcttcagagtttcgagctgaagttacaggtttagagttgtccgttggaggtttttgtttcttcgtttaatgatttaaaaacaggttatgatacaagatcttcaaaatggttttaccacatgcatcatgacttagaatcttcgttggctcttttggtttttttcattcaaagttgaaatgcctcacctcttctttctttttctctctactaaccattttctactgagcacaccgtaccttatcagtctcataactgggccacctaactctccctaagacagcactaggagttgacacccagagaatctgtaagtcatgtactgctcatctaacgaacagtccctgctagccttgcctgcttcttttgcatagaccccactcttgggcacttccacatctgctaagtccactgaaacccagtggggtagattcatctcatcaaaaagaaatagagacaaggtacgacaattacacgatttttgaccgaaggttctcatgggaagttccccattaaaattgttatagaggccgggcacagtgctcacatctgtaatcccagcactttgggaggctgaggcgggtggatcacctgaggtcaggagttcgagaccagcctggccaacatgatgaaaccccgtctctactaaaaagacaaaaagtaaccaggcgtgatggtgcatgcctgtaatcccagctacttgggaggctgaggcaggaggatcacttgaacctaagaggtggaggttgcagtgagccgagatcacaccaactgcactccagcctgggcaacagagtgagactgtgcctcaggaaaaaaaaaaagaaaagaaaaaagaaaactgtaaaaagaatttccctcatttcatgaatgcaccaccctaggtctcttgtatcaagagaaatctgggaggaaacactttcctggcgcctgtgggcaggggtgaggcaggaaggagtgagtaggctggattgagcaatcttcaacagaatcctgtttcactttttagggttagagccactttgcactaacctttccactgacagaaccactcactaggaaactgaaggaactcaggaagaacccagtgccagcactgaaccactgcgtccctgccactcttactcctcctccttcagggagcactttttacctggcaaggctgtttcacagttatcccaggatgaaacctatggataacactcttttagcaggtgtagagactagaaaataattgctcatcgcatcccagcctttagattccagtcctctgggaagtgtggttgagaaggggacagttgcgagcaatccagctcgagttttagcacacagaagaattacctgagggtatcactaaagcaaaggttgctgggccctgccttctgagatgctgattcagtgggtctgggtaggaaaggaggcatgaatttgcatctagaacaagctcccatgtgataccaaggactggtccaaggacaaccctttgagtagcaagacctttaagaacatgcttctaatacccagctgttgtcacctggaaggagggatgcctttggaggtgaacaacagagccactcaaacgcttttccatctgaaccacagaggactggatgtcactcaggactcatgacttgaattagggtataaaagaacccagcctggtccgtctgcagaattcctagcgaagagtcactcttggggtatcagtgagagaagaggctgggcatcagagcatcatggagacaatgtgcctcttggtcttaggccttcatttacagatgattttagacagtcccattaaagacacagttcccttgaacttcacagacatgctgagtgatgacaaaccttggcaggtctgtgaccagtttcttccaacaagttacttctaggcattcctactaatctttcaacccactcattgcttaagggtaataagatctagagatgacgtggtagataagactgttgacacattctctaatcttagctaagcaaacagagactcattgtcccaagccagtggctggcacagtgccctgaatgtcttaacagagtttgacagggaaataggagcccttcaacccttttttgagattgaaactacaagagtgagaagattatttttccctctcgaatggccccgaagaatcaataaggattcaagggttttcctctccacggtaaggagattgttcttggcaagttatgctgagaagcctgttgtgtgccttgtcctccctcagtcatttcagccttagaattgaattaactgcaggcccaaggacataaatgaaccacgtgagtcatttttcaaaagtgaacgacagggcacctgtcttctggaattggtgaatccattcagcggagactcttgacaaggctttgtgtgagatgatataaataggccctgacctgcagggcttttgttgtctttgggtgagatagagacatttgtacacaaataatcacaaactggctaaactgtgccacgtgattagcaaacatgcgcatgcccaatcagcgagatcttcacggtcaaggggctaatgtctagagaagcttggacgtacagaatagcgtggccgttagtcttatatcctgtcgtggttccccacacatttcaattactcgataagtaattcgagaccagtcacaggcttttttctcacttaatggacagccttgatgagggctagcaatttcttcacttcttgttccaaatataaccaacttataaaaacaccttctggaactccatacagggaagaataggatttaatcacaggaaatgtatcggcgggctgtgcattactcaatttagcactgttgggagcagatcaaaatctgggatccatggtattagatggctccaagcttcaaaattttgtgttctttcactggctaccatccaccatccatccatccatccatccatccatccatctatccatccatccaaaaaatatttactgagcagctactaggtgccagggcctttgtaggcatcaggaatatagtagtgaacaaaatagacaaggaccctgtgctcacagagcttattacctagcagagggtaacccgtagtaacaggtacacacatgcatgaactaggtgcctccagatagtagtcattaggccacatggctcgatgggaaatgactagggggagattagggttgtgtggaccagtgcctcctttgatagacaagcactggttacggacatggccctagactccaggtgtcagaattaccactgtagacctaatgtctataacagaggttttagacagtaggagtttttaa

SEQ ID NO: 53651 - DNA, 1086 bp, Homo sapiens
ggagccgtagacaccattagaagagctggacttttgcgaccaccatcctgtacaaagattgtttctaggttgaagaagctgtaagtgagctttctactttccagaggcaggcagtaccaaacagcctttcccagacgggggaccccatgaatctctcaccagagaccccacacaggcacctgggttagagtgcatggaagagttctgtggaaacgctgtctgggatctaacaccaccagacattgtccagccatgtctcatcacaagccagaaactccccctgctcctcaagctgtccctcccccacatcagccacagagggggagactggagagactgggtggtggtcccggatgtgccactagcgtgctatgtgatcttgcatagttcattccaactttgtccttctgtgtctcactcatataatgaggggtttgacaacaagatccctgaggtacctgcttgctctttaaaattctctggcacccagacacagcccaagttccagtgaaaactgcactgaggtccaaacccctgctgcattttgctctttgcctggaaaagggtgttgccgtgtcagccataccctgtttacttcctgagaaacatggagaaaagtctcccttgaatctgtgaatttcaggttttttcagagttggatcccagcccggagcagggaagagcgtgaggtaaaattgttcgagtcgtccagaaatgcacatttcctgcagtttctttccaagtctggtgctaaatgaacaagctcgaatgtgaacatgaacaaggatgactcaggcgtagagaatgttggtagcacgacactggctgtaaataatggcaatgaagggacttttctgacccatttgttgacaaaagatggtaagaggtattaatctagttcagggatatctaaacagtttttgttgtgcatccttatgataaaatatttttgaacattgtgctctgaatagatgaatatttatatttctggaaattataggcatatactatacctacttatgaacatataaaacatacacaaagaaagaaaattagaaggacaagaccaagataaaagaaactgtt

SEQ ID NO: 53652 - DNA, 420 bp, Homo sapiens
cgccattgcactccagcctgggcaatagaacaagattctgtctcaaaaaaaaaagaaagaaagaaaaaagaaaaagccactctcatttattgctagtagaaatccaaaatgcacagttgctatggtgtggaatttggcaatatctagcaagagtacacgtagactgcccttgacccagcaattccacctcccaaacaaagttcatgccaggacttttgcataaggcagcactgtttgttgaaagactggaaacaaccgccgggcatggtggttcacgcctgtaatcccagcactttgggaggacaaggcaggtggatcacgaggtcaggagatcgagaccatcctggctaacacagtgaaacctcgtctctactaaaaatacaaaaaaaattagccaggcgtggtggcgggcacctgtag

SEQ ID NO: 53653 - DNA, 947 bp, Homo sapiens
cagatcttacatccgccaaacagcacgctcccagtacagagctttctccctttgacatctgagcagtttacgtttgtttgttttgagacgaagtcttgctctgttgcccaggctggaatgcagtggcgcgatctcaggtcactgcaacctctgcctcccaggttcaagcgactctcatgcctcagcctctccagtaactgggattataggtgcccaacaccgcatccaactgatttttgtatttttagcagagacgggggtttcaccatgttgaccaggctggtctcaaactcctgacctcaagtgatccacctacctcagcctcccaaagtgctgggattacaggcatgagccaccacacctggctggtttccatttgttacatccatgccccctgcatatctcatttcactaaacattggctctgtttttgtgtctgtgaccattcgttcttctcttatgattctgaaagtgaccttctgtctccttccagttgcttccctcccaggagcccagggcagatctctgctcgtgtggctcttctcccagttacaatctcagctaaggggagattttgtctctcttttacataaaaatctcctcaaatctacgacatgggcagccttccacactgctcaaagtgttgtctctgccaagagacaaacacggaaatcgaaggtaaacatctagaaagtttttggcaaattgacactgctgtaacgcccacggaggtgattctgaacatgacatgatattgccagacaccagccctgcttctgtagtagggggccttggagctgctaaggcagcatggtggtgacaatgacccccgtgacatgcaggtgaccgcaccatagctcaagatgtaggagacagaatggccttatgtcttggtttgcctgagacagtcctcttcatcactatggtctcagcataatttgatgatg

SEQ ID NO: 53654 - DNA, 605 bp, Homo sapiens
aacggcagagagggaaaaatatccaaattctgttttgactgttgcacttgtccagcaagagagaaatgaggaaggaaaaatgtccttggctggtgtggaaagaaatctgccagtaaatctggtggatgttccaacgtgccaaagatatccccccaagtcctattaacaccatgacaccgaaccagagaggcggtgaacacgtactaacactgctgacatcttggcagcttttgaaagaaagatcccgttgctatttactaatgcgtgggtgggatatttgaagatggagaggtgctggaaaggaaccagagtgtgggaggactttgctcccaaggactgagttgaatgtcaccctgcatatgctttgcaaaagtttccctccgtaagatttccccctcttccatctcctaccctccaaatcgaccctagagtcccagatcctccaacagagagaaagtgagaactatcagggaagagaatgaaatgtgcccttcatatctacagtccagatccactgtccaagctgaatggaaacttaaagaacagcagcatcaacagcatctagaggtggggcatggtggctcacgcctgtaatcccagaactt

SEQ ID NO: 53655 - DNA, 3807 bp, Homo sapiens
attctctatttctccccactcccacccccaggctcactccttataaagcagcctctagcctcatctgcccctcctacaccacaccaactcgagggcccggaattgggtctggggcagtcgctgacttgcttgcttctctgccctgctcttggggttagcctcaggggcagggttgagagtcaggcttggccaggcagcaggaggtccagacagcgaagcagaatccttcggagataccaggagagggcgcatctgcctttttcctgtttcagattaggttttgttgttgttgttttgttttttttctctccctctctccctccctccctctctccctccctctctccctctctccgtccctccctctctctctctctccccctccctccttccctccctcccatccctgcagcgctacccgggtactctggatgcacatagggcggctctcgctcctaccttgtcatcctgctgtctaatccgggggcagcttccctcctccacaccagcagaggctattcttcagcaacaagaatagccgagcctattcgtccgcaacaagagcccaagaagcatcctgcaggctttctgctttttgagtgtattttaaagcaaaaacgagtggaaagctatgtatgctcagttaactatgtctagatgttaaccttttttcaaaaaacacagatggaggcctccctccgaggatgcctggcattctcctctttctgtgggcggcagcgaccccctgcggctccagcctccactacgggatctgcgggaagacacggggaagacgaactccgcacactgcatttgattaatgatttattttgattaacgccgtcacagtgacgccttagagcagtccctgttcacccgggtcccagcctcgaccccgcacggacagcgagggtgggtagctgggggcggacgcaggaaagaggaggggcggggccttggtcgggtggggtatggaatgggcagggtgggggggatgggcggggtatgggatgggcggggcccgggaaattccccggcgcgggcagggagcggctggctgtcagctgagccgcgctgggcggggtcgccaggccgcgcatcagccctaggcaccccagtcccggctgccccctccgccaccgccgccgcccgccggcaggttccctggtcagcgtcccatcccggtcgggagttctctccaggcggcacgatgccgaggaaacagtgaccctgagcgaagccaagccgggcggcaggtgagccagggcagggggctgcagcggtgggcgagggggcggcggctccttcccggcgggcgcttccgcggcctgaaaacggtacccgccgccctgccccgcggcccggagcctgtcggggtgagggtggcgaggggtggggcggccctcccgcgagacggctgccctgggaggatccccaagcctcggcgggtcctgacctggtgggagagggtgggtagtgaacacagggtgggcccaagaagggtccagggccggcctcttggccgcaggtaacccctctacaagtcacccagagacttggaggtgacgtcctcccgcaggctgggaaggattccgcagccagttcctcgccataaggaggtggttacagacacgcctgtgggagacatgggaccactacccgagctgaatgaggtgcccagggtcggtgggaatccacatagactgctgtgtctaggagagtgtgtacactctatatagagagaatatttgatgaggccgagaaccccaaaggaattgtttttgccatcgaaatgcataagctacaggaagtaaacatcgctcaaagaaaatgaaacccaggttccgacctggcctccaccagcaggaaaactgttgtatggaaatgtacaccaaggaactgtttgtaaggatgaaatggaaaatgaaagcatagaaaagtaaggcaatgtgaggacctcagaagcctttggatctggttagcaaggtgcaggctgtgtgaacagaagaacccaccttgctcttttgacccagggagagaagagttagtggtgccaggctgcctcccaggacaggcccagttttggggcgggggctggagaagtcccagggcagaccccaaggccagggattgccctggagtggacaaggcaagtttaaatgtgacctgtagacagaggacgatcattgatttaagtcctggcataattcatctgtttttccactgggccaattttaggcgttctttatatattacgtacaacacaataaaagtaacagcttctttttttataaactaacctttaggttgcatattatgctaggaatataactaacctaacctccacccccccacccccccacccacccccggaaaaccaaactttattctcgagggcaactggacactgtattatgtcctgccgaacccccgcccttacttaggtagaggcgcataagtattctggccatgaaatacaccttctgttttatagagatttggcatatttgatatatgttctttggaatttatgaaatagaaaacccaaaggaaaaagaaaaaaattaaacttttttttaaaaaaatatttcatttagaaagaaaaaattaaaagtttttgttatttccactttgacatgtgtatgaggagcattagaatctgtgttatgaagtgatacccagatggctttgcagtgacagaaaacacttctaatttttcaaataagttagaaaggaggattttgagaatctggaagtgaatgccgtggaactgtggagaaactcctaacaatactggcatgctgagtttgtcacctacacagcagaaagcattttacaggtattagacttaaaaatacctcattatgctatattttcatttcatttcaaccaacatttactgcaagcctgctatgtgccagtctctagtaagaataacatggagagaaaatagacgggcagacgatagcagtaatttcagaatgggcggaggaggtggaaatgcagagtgttcttgggtgctcggagtagggaacagttcatatgacacaggacatcatatttaagctggacattgatctgtccagtggaagtttgccaggacacaaggggagccagacatttcgggcagagggcagaagggaggcaaggacgcagagacagaagaatgcagggaaccgtgagctctttaacgtgccttgggtacgagtgttttggtggcaggaggtgactctggtgggtcagttgggcctgggccctgaaaggccacgtttgtcttgttaagaaactgaaagtctgtcgtgtatgggaagggtggactcaggggaatgacctcatattgcaaaagaaaccatgagggcaagaggactgaaattgacagggctgaaagccagtcatttaggaggctgttaaaatgtattcaacagatatttaccgagtcctgccttctatgtggcaagtaatgttctcagtcctggggatacagcagtggacaaaataggcagaacccctgtcctttgtggaggtcaacatggctgtggtacagacaagataagggcctgaactaagcctgtggggatggagaggaggcagtggattttagaaacacttagaagggccaggcatggtggctcatgcctgtaatcccagcacttagggaggccgaggtgggtggatcacttgagatcaggagttcaagaccagcctggccaacgtggcaaaaccctgtctctactaaaaatacaaaaattagctgggaatggtggcatgcacctgtaatcccagctacttgggaggctgaggtgggag

SEQ ID NO: 53656 - DNA, 1108 bp, Homo sapiens
aggttgcagtgagccgagatcgctccactgcactccagcctgggcaacagagagagactctcaaaaaaccaaaacagtctttttttttttttttttttgagactctgtcgcccatgctggagtgcagtggcacgatctcggctcactgcaagctctgcctcctgggttcacgccattctcctgccgcagcctccggagtagctgggactacaggcacctgccaccatgcttggctaattttttgtattttttttattagagacagggtttcaccgtgttagccaggatggtctcgatctcctgacctcgtaatctgcccgcctcagcctcccaaagtgctgggattagaggcgtgagccaccgcgcccggctcaaaaacaatcttctaacagtaaacatcctggaagtaaataatatgctttttcaggcatgtctctggactttggccattcttgacctttgtagaatgcgtgtgtgggccatgtgtacacagcgtcagcggggaggagttgcctttgctatgtattgctttataatctatccccatcagctcttgaagaaaatacatcattttcaccaagtgtgaaggtggaaatttgtgctgaaacatgtttgcctgggtggttggtaacacagaagcagagtggggatttactcattggtcttgcatttctatgtccacatggatgcctctacaaaacaaaatgatatgtgtaaaaaaatttcagaccatgcaatacctaaagatatcttagtcttttcagtatgcattgaaaaatagactattaaagcctaagtactcagtaatataactttgttgttttacaaggtgtggctttgatagctggtggtgccacttcctggccttggatgagccgtacgcctctgtaaacccaacttcctcacctttgaaacagctgcctggttcagcattaatgaagattagtcagtgacaggcctggtgtgctgagtccgcacatagtaagcattcaaagaatgttaattctccctttcttcttaaccaaaaacacaataaactaaatataggttttaaaacagcttttttgagatagaattcacttaccatgcaatttacttgaaataagga

SEQ ID NO: 53657 - DNA, 725 bp, Homo sapiens
taacctattaaaatgtgtgggattcagagaaaacagtgttttgagggaaatttgtagtattgaatatatagaaaagaagaaagactaaaatcagtaatataagcttccacctaggaaactaggaaagaatagcaaagaacaaaataagcaggagaaaagaaataataaaaattagagcataaattaatgaaacaaacaaggaaatcaacagagaaaccagaagctggttatctgaaataaatcaataaaattgatgaacttctagccaggttaactaagaaaaagagacaaggtacaaatcaccaataccagtataccaacaatgaatcattgccccttgatatataaaaacatagtactactaacattagcaccaaaaaatggaacactttggtattccaaagtattcatttaagatctgtatgaggaaaactacaaaactctgatgaaataaatcaaataggctgggcgtggtgactcatgcctgtaatcccagcactttcggagtctgaggcgggcaggtcacctgaagtcaagagttggaaaccagcctggccaacatgatgaaacgccgtctctactaaatatacaaaaattagccgggcatggtggcaggcgcttgtaatcccagctacttgggaggctgaggcaggagaatcgcttgaatccaggaggtggaagttgcagtgagccgagattgcaccactgcactccagcctgggcaa

SEQ ID NO: 53658 - DNA, 855 bp, Homo sapiens
aagctaaatgttattctgcatttagaaactatgttcttagtattatgtacaaacactattttttagaatgtaaatacataaagaggcctgaattttactgaaaaaaaaatctgtgaaagatatggtctgctgataagttctcttcagccctgacgccccttagaagtcccaaaatctatggaacaggaattactcgggaaatggtggtttcagtgtaaaagatgtcatctaccctttccctcactgcacagatggtgaaggggaaactcagagagataagtcacttccccaaggtcagacagggtaaaagtggaccggatctgtttggtcctgagcccaaacatttcgaatggacataaggctgacaaaggaacagtcggtcccagagcgtcaggagttgaggtgggatgggaccgcagggaaaatactgggtgggatgacttaaacttcccggcaccagggggcgccagacactctattttacctaaaggagactggcttctaccgacaggaaggtcccttgcccccaacaaagagggcgtccaatgacgtaaaccaatccgattgctctgtgccagggccgggattcgctggcgtagccagtcagtgctgccccacagccgcgtgcgtctgacgtcaaggcaggggcgggatccggttggaattttggcgggttcagctgtgaacgaagaaggcgtcccggcatcgggtgaggagcgcgggccccgggcgtgcgtgtgaccctcgggcggcggggccggggccgcctcgcacgtctctgcgcgggttgcaaggggtccgaggctagaggcgcggggtcccgggagctcgggtgggcgcgatctggatttggcg

SEQ ID NO: 53659 - DNA, 639 bp, Homo sapiens
cacacatgtatatgcacaaaacagcagtgaaaaggctttctgccctatgtattgcttttcttttattgccgggagacctaagacaagatgggcctgataaaacatgggttggaggacacagcattttattggctgcacgtgtttggaaaagcccctttgaatagcatgggtctgtgccacagtcgtagagaactacttccgcctgagtgttcacattaatctgacagcaagttatatattcagatatccattcaggagtagcatccatcccctcaggacctttggcattactagggtgttgcattaggtaatgtccaaagtttggttttaaggggtggggaatgggcctggcctctaggttctaaagttctagggtcaccctggcccccagtgtgagagcagtgatccaaagtccctttgagggcaaacaacaatcttatgaaagagagagtgatattttattaaggaaaatacccaagcatctgactttcaggagaattatcaaacacttctaaaatatgaaaagtaactccatcagggatatttaatgaagcaatagtaaatagaataccagacccctaactttccttggtcccacaaataaaatggaatggaatgaaatgaaacaagaaagaagaa

SEQ ID NO: 53660 - DNA, 2031 bp, Homo sapiens
gagggagagtgaggtgcaacgcacttttaaacaaccagatctcaggagaactcactcactgtcacgagaacagcaccgaggggaagttgctaaaccactcgtgaactcggcctccatgatccaattgccttgctccaggcccatctccgacactggggattacaattcaacatgagatttggtggggacacagatccaaaccatatcactgggataggccctaatccaatatgactgatgtcctataagaaaggaaatttggacccagacacagagggaagatgatgtgaagacacagacaggagacagccatctacaaacccaggagagaggcctcagaaggaacccactgtgccaacaccttgatcttggacttccagcctccagaaagttgagaaaataaatgtctgttgttaaagccactcagtctgcggtattttttatgacagcctgagccaactcctacagtgtgagtcatgatctagactagtggacttcatactttttgactacacccaacagtaacaaatttattttgcgttgtgatcccaaatgagcatgcacattggaaatcgaagcatcactttctcttacgatgtgcaagtctctctcatcttttgcatttttttcattttattctattttgttctttttttcaaaactgacgttgtgactcactaaattaatatcaatgatgggtcaccaccgggtgggtcccagagtttgacctaacaccaggtgatgagtctgtgtcatgtaggagccgagacagggtgacaggccaggactggggaagtggacgtttgctcagggaagactcccttctcctggtgcagtgaccttcatcacagcccttcccttctttcttctcagaattgattttaccctctccatgcagctaaactatgaaattcaggtgtgtgggtcaatgctcggtgcacctgtgttgcagtggacacagtgtttggggctatcttcttcctttttgtaacctgatcttgctttggggcaatctcgtttcctctgatgtgtgatttggggggaggtggtggcatattctcacccatattccctctccccacctctgcggccaccaggaggcagcatgtggctctcactgcctgaaagagcctgtccccggtgctttgactacgaatcaggaggcccagggacaggggtgggggtagaggtcatcttatccccaaagccactggcctagcctgcccctttgtgctgtgccctgccccccagcgccactcatagcacgtccccgagccccagagagcctgctgacaccatctgttttctgtttctcacggtcaagggcagtttctgtttctcacggtcaagggcagtttctgttgctcgcaaccgagattctgactgctactgataggtacatttaaatggaatccatgaaaatatcatctcccaccacagcccaaagtaggtccttcgtgggttgcaagttacactagagagatctggtggggtggtggggtgggcttaacacattgccgtaaacttaatccagattaaacactggccacatcgaggaaacaaaacaaacagctgcatgtcacaggtaagcaagctcttctccgcaccaaggaagggaggatagcagaaacttcctgcccgtctctcagaagctgcgaggtgtgaggcccccaaagcatcgcttcagtggtgcaaggtgcctcctgccaagggacaaggcacgtgttggctttactgaatttgtgcattcatctagagcggagtgggcaaactagcgcctccgagccacatctggcgggatgcctgtttttgtaaatagagctttattgggtcccagccacgcatgttggattacatgttgtctctggacgccttcctgctccagcggcacagttgagcagctgcctcagagatggcccagctgcaaagctgaaaatatttactatctggctcttgacaggaaaaaggttgcatcttctgactgaaggcagaaatacccaaacaggctgggagacagtgtggcctgtcctg

SEQ ID NO: 53661 - DNA, 1046 bp, Homo sapiens
tgatgaggctggtggaaatatgaatgaatggaagacgaaatttggcccctaacccatggcctcaggagacaacagtgattttttcttttttagtagaagtggggtctcgccatgttgcccagactggtctagagctcttggtcccaagtgatcctcccgcctcagcctccggaagtgctggaattacaggcatgagccactgcacctggctttcataatcaatttttttttttttttttgagacggagtctcgctgtcgcccaggctggagtgcagtggcgcgatctcggctcactgcagactccaccccctggggttcacgccattctcctgcctcagcctcccgagtagctgggactacaggcgcccgccacctcgcccagctaattttttgtatttttagtagagatggggtttcactgtgttagccaggatagtctcgatctcctgacctcgtgatccacccgccttggcctcccaaagtgctgggattataggcatgagccaccgcgcccggcccataatcaatattgacaaggttaggatcctgaggtcacctggcttcttactgataagagcacagaaagcccaaggtaagcaaatatatttcctggtaaataaactggactaaagtccaggttggttaaaagccacaaatctttaaaatgttaatgcaatttaattaaaattttattcaattaatttgaattcaatgaattgaatacaatttttgtttctaacccacacttctgcagcaggtgcagcaatgtgaatgcttaccttccggaatccctgggttttattctgaccagatccgtggatgagcaaaggatggaagaaaacagtgtcgcccttctccatcaccaggtgcacccgggccttgttttcctcgtagtcctggatcccgtggaacattttgttaactcccccctagaacaagaggcaagtgaagtctacatttgagggagtaccataattaaaaacattgtcaatggttcatcagggaaagcaaacatcagggaaagaaagcatttctctctcccaag

SEQ ID NO: 53662 - DNA, 2066 bp, Homo sapiens
aggcggaggttgcagtgggccgacattgcagagtgcggcactgcactccagcctgaccacagagcaagactccgtctcaaaaataataataataataataataataataataataataataataacaacaataacaacaacaacataaattcgcctggcatcgtggcgcaaccctgtagtcccaactacttaggaggctgaggtggaaggatctcttgagcccaggagtgagccgagatcgtaccactactgcactccagcctgggtgacagagtgaggccctgtttcaaaaaaaaaaaaaaaccaaaaaagcaaaaccctagaaattccttttaaagatctcctttctatccggtaactgcagagagttgacatagaattgcattgtttctttagcttaatcggttactttcggaatgtcactctcatcaattaacatgttatcctttctttctctctgtttctctcttttggaacgcactggccatcacggctcactgtaaccctggactcctggccttggcccccagaagagccgagacaacaggcaaggcgtgtgccgccgcgccagtcctcacccgctgtccttccccaaatagtgtctttatataactcagtggcaatgccgtagtccagcagggaggccgccctgggcagcgcctgcctggccagctcctgcccgggagggcaccgtcctctcccctccggagaggtcccggtcactgcctgcctgggccggttccaggcagccctgcgcgcctgtgcaccgtgcgcctgtgattggacatctctgggtctctggacagctgccggggtcacgcgccgccggtgaaacgacgtctccacaaagagaggagcagaggcccccagggatcccggagggcagggcaacgcggcaattgccccgaccccagggcggccgcgcgtgtcctcgggggacgcagcctcttccccgctccccggctcctggaagagacgcgacccaggcggggacgcggcgctgagcgaggaggcgctggggctgcgaagcgtgcgaccccgaggcctccacccggaccagggccaccactcaggcggcggcgccggcgccggatccagcccgagccccgcgcagcccaaaggatacgacagccccggccgaggggcggccgaggtggcccagaacaatctgcagacgggcggcggcgcgaagctgctccatggctgcggcgcggggaacccccacccctcccggcctctgccccatttagcccagcgggcggctccgcctccaggcgccgccccggactggacgtaagcgggattccgggcggtgccagctcgcgggccgggctgctggggagccctagtccgctagagtccgcgcgccgggcaaccgcccggggctgaagtcctccccacaccatgatccttccgtcctttattttctttctttttaaaaagaaacaagatcttgctctgtcgcccaggctggagtgcagtgcgcgatcatagctcactgcagccttgaactcttgggctaatttttattttttgtagagatggggtctcgctacgttgcccaggtgggtctcaaactccccccgcctcccgtctcgacctcccaaagtgctgggactacaggcgtgagtcattacccctgccccgcaccctgtttctgttccatcaccaggaccctccctgccgcaccgaagctcgggggcccagtgaccaggccgaggtcacacagtgacaagtggctgggctgggacctcactcactctcctaacgtcatggcttccatctgtttaaccctacgtgactgctccttccactgacagctgaaagaataaaatctccgatttaaacaaaaagtttgccgggcgcggtggctcacgcctgtaatcccagcactttgggaggccaaggcaggcggatcacggggtcaggagttcgagaccagcctggccaacttggtgaaaacccgtctctactaaagatacaaaaattagctgagtgttgtggcgcacgcctgtaatcccagctactggggaggctgaggcaagagaatcacttgcaaccgggag

SEQ ID NO: 53663 - DNA, 1931 bp, Homo sapiens
ggtttttagccgggtgcggtggctcacgcccgtaactccaacactttgggaggccgaggcaggaggatcgcttgagctcaggatcgctatagatcgaaagcagcctgggtaacatagtgagaacacctgatctacaaaaaaattagccgggcgtcgtggcgggcgcctgtagtcccagctactcaggaggctgaggcaggagaacggtgtaaacccaggaggcggaccttgcagtgagcgagatggcgccaccgcactccagcctgggcgacagagcaagactccgtctcaaaaaaaataaaaaataaatcaataaattaaataaataaaaattccagacattgtatgaggaagcattgcaaaactttctgttctgttagctgttgcctgtagcccccagtcatgttccccacgcttgctcgatctctcactaaactttcacgtagacccttagagttacaagcccttaaaagggccaagaatttctttttcagggacctcggttgcaagtctgccgaagttcccggcctaatacagcccttctttaatccggtgtctgagttttgtctgcggctcgtcctgctgcaggaggatcacctgagcccgggagtttgaagttgcagtgagcccagatcgtgcctctgcactccagcctgggcgacagagtgaggccatgtccaaaaaacacaaaaacaaaaaacaaacaaaactccaaaacatcaatgaagttttgaaaataaaaataaaaaaataaaaatgctaagatgcatccctaaaagtcatatgtgccattcaaaaggggtatttcatttagtgggactccagcccaaaatattagaaagttcggttggtcataaaaaaaaaaaaagtgaataaaataaatgacctccagaaaagtctgatgcacacaggccagtatggtgtaaatttcttagataactccagcatctctttgtaagatttattttccattccataactacggatattgacatagcatctcattgtttctttagtttcattttttcattgattttttgttcttttttagcttcgagttacttccagaacgtcgcagcacacgttatcacttcctgcatgacgtctttatagaatttggtgacaatgtcgcagtccaggagggaggcccgcagccagcatcaccagccccttcctgtttgcacaggcagggaggagaacggcagctcccaggcttccactggggagtccctccggctttctccgggattccgcccgccccagggtctcagaccaacagaaggacccgggatccctcagcagctccggacctcatctgccccacttcggcatcccgcgcgggaatatgaccatgtaggagtaacccggggctctcaaggactctacggtttgtcacggtttgaacgcaagcgcagggcctggggcgggtgcaggtggagggtcggcctctttctgcccttgggaacgcccctttctggatgtggaccggcgaggcggtctctcctttctgccctcgcctggtgaaatgtgggcactgctgccaggagaaaaaaaactgaagctgtgaattcagttcatcacccttcccttgtttattaaaaaatcggaccttggccgggcgcggtggctcacgcctgtaatcccagcactttgggaggccgaggcaggcagattaggaggtcaggagatcgagaccatcttggttaacacggtgaagcccggtctctactaaaaatacaaaaaagttagcagggtggtggcggtcgcctgttgtcccagctgctcgggaggctgaggcaggagaatggcgtgaacccgggaggcggagcttgcagtgagccgaggtcgtgccactgcactccagcctgggtgaaaaaataaaaaaaaaaaaagatcaggacctttacccgcgctgacggtgattggttttc

SEQ ID NO: 53664 - DNA, 3260 bp, Homo sapiens
ctagaattacaaacaccccaagttttaaggtcggtttcccctataaaatttatgattaagaacataattcccatttatagagttttccatcccttgggacgcacatcgctcatataaatctcacgaagcccgagtttgggcagtaatccaaaccgtcttcacaaaaacacggtttgggatgagcaatgatttcggtgggaaacgtaacaactgagcaggagtcagccttcgaacacgattccaagaagtctccctgcccaaaaagagcaggcgctggccgcaagtgacaagagacgagaattttgaagccatcttagagttatgggaaagtttgaataccactttgacttggaaggcgttttcaacaaaaacaacaaagtcctttcctcaaaaaacacctcgcatttaacacagcctcacccctaccaggaaaaaaaaaagaaaaagaaaaaatccaactcacgaggcatccagttattttcctacctcctatctattcctctcctggctcccaaaaaggtggggaggggaattgtgtggctatcacttccttttaaattactatcttctcaagagttttaagggtggaaaaaagtttaaaacaccttgtatcaggaaggcgctcagatttaaaattccaaatggtactaaggacacaaatcagcctcacatcctaatgaaaaaagtactagattcttacatttttggagggcatgggaagggggagggggttctgggggaaatgtgcagtgattagggaaccagggggatccatttgcattaataagggacggtgcccggcgaccccgcagccacatgtttacgcctttaaaacaatggcatgaatatttaaagcaacgtttagccctttccttcccgggcacatttccatggtttggtttttttttttcttccaacgagcgtggggagccggggagccggtcagcggggtgggcccggcgcgctgccccgccaaccccggacctacctccccgccggccccgcacaatggggcgcgctctccaggacgcccgcgtcggaggcggccggggaggggagcaaggaacccggggacaccttcgggctcaggctcaggctcaggccctcgccgccgcctcggaaggcccagcaggcccgggctgcgggccggcggcggggcggaggcggcagctcggggccccggccgggccatccctgttcgggccggcgggaggcggcgggagccggcgggcaccgcgcgtgcggcccaggagccggggaggacgccgggacgcacccgccccgggtcgacagggcccgcgcggagaaaaggggaggcggggaggccccggaggcaccccgcgaccccaggccggccgctcccgccgcgcgcacgggccgccgccgccgccgcgcaaaaatgtcggcgggcgaaaaaattaacccctgcgtggccgccgccgccctcccctccgctcctccccgccctccctccctccttccccggccccgcgcggcggcggcggcggcgcgggcggcgcttcttttttaaagcggccccaccaagcccggcgctgcccctctccaggcagggctggcggggccggcggcgcgcggctccccggcggtcccgggcggcccggagggggatttgcaacggccgccgcgggcctgcggacccagattcccctttaagcctgcgcctcccccccgcgccgggcccgccgcttaccggctcgctttgcgccctccgcctcctcccgaaaacgggccgcgggccgctcccacaatgcaccgggcgcggccgggctcccttaagcgtcgcctgaataaaaatgccgcgcccggcggcggcggcggcggcgggggcccgggcccgcgcctgggcgccgcgggggctcgcctgcctcggcgcggccctgcgggagccgggccgccgcgctcccgccggctgggcgcgcgggggtcctttaaggccggccacctccctttaagaggcggccctggctgctgggtggcggcgtgcggcccgggaagggggcgggggcgccgtgcagccccgagcgcggcaatgattggtctcgggggaggggtggggggttgcaaacccgaggagcggtggcatccgttgcatgatgcaaaaaaggattgatttcaaaagttgcgagttgcattggcagccgcccttggcgcccgggccacctttttcccgggccccgctgcaagggccgggaacgtttccgccacctggccgggctcgaccgcgcggcgctctgcggggcgctgtccccgctccccgagtgcgcagcggagcgtcctggaagacaatgaccatgggaacaatttgcacaggaggctaggagcccaggaaaagccgcctgggcgccaggcagaggttttttgaaaacacaaacggcgcgttagatgcttggggactcccagcatctgtccttcctattgtttagctcggctccggagttcacgggagcctcgtgaaatgtggagacgtcctgcaaagtttcttgaacacttcatgtgcgtggtaggaagtcgaggaaaaaggtttacggttccccgctggttgcattgtttgtcctgcacatgttcgagcgaacatggcagccgcaaccctggatgtgttcgaattgacatcgaggggggagcttcacgtcgtgaaataacttttttctgggctttcgagattctaaagcattgctgatgaaaataaaccaaatactttcagatatcgtttagggcttctctctaaaacagcagtgtgcaggaatgccgatcgaacttttctaggcagtaggtcagcattttccaaatgttatttgggagcagaaatgttttgggtcactggaccgtgctttacgtggcacggcaggttggcacgctacgcagatgcccttttcgttaacatttccgcttgccagttgctccgggttttaatcctgggctggatgcagaagtgatgccacctcgaagacaggctgctcctgtctttgtgtactttcttcataccctgtagtaagtttgcaaagaacgtgttagtctgcattcttttattttatatttatttatttatttattttgagacggagtcccactctgtcgccaggctggagtgcagtggcgcgatctcggctcactgcaacctccgcctcctgggttcaggtgattctcctgcctcagcctccccagtagctgggattacaggcgcctgccactggaggatggcttctcccagaggggaagacagggtcacggttctcattaag

SEQ ID NO: 53665 - DNA, 1856 bp, Homo sapiens
tctacaaggtgggtctgttgctctgcccatcttaacacataaggaaagtgagacagaggttgggaaactcactccaggtaacacagctagtaagtaacaatgccaaggacatgagtcgcgttaatgtctgggctattcgtctctttgctattaatagtccaaacataccatatgcatcgatatgagctaatttcttaaatcttcgagttctagttcattttatattttggcaactttctttacatgtataattgcttttcatttagttataacaagatcagttttgggtataaactgaccttccttttgtaattcagctatcctccctttgaaaaaacaggcctatgcaattatgtgctttagtaagaacagaacatatataaccaaaaaaatatatagatgattatatataaatcagaacacgctagctgcatgaataggggctgagagtcaaggaggaaggcactgttgtgttactcaaatttaattataacatctatctgcaacaacaagctcacagtctttcttccccggtgacaatcaagttggtaaatttggaaaagattgagcaagtccaataaacatttaacagcagtgacatctttactctgagatctaacacgatatattgtgatttcagctctgagaaaatcatctgatggcaatgataaaaatgcacaccaggaaaggaatcactggagctatagaataaaaattattccatgtgacgacagccccaaatgaatttctatttggatttgcataacggcctttcaaatctgtgtggggcacttctttttttctagaggcagtgcaggcttccttaagtggtagccaattagcttgtggagtcagaatctctacctcattccaggaatggagccagatatgacaaataaggtggaaattgtgcaatctctatgagacactgtttgtattatcatttagactgaaaatcagacaaaaagcatgagagcaggtaatattattgatccagacctctcggttcctatcggcatcatggaaggaaatacaagtggttctagtttcaatttgctggggccccacttctgtgccctagaggagaatgatgtggaacaggatttgacaaaatggggagacaaactgtatttggcaggtcattgctgatgtgctgtcatttgggtctgcttgtcagggttggttttgtcttacagccaccttctacttctcagttgttaatagaacctgctaggaacgcagaagagaagggccaagggagccgatcacaagtatctgggcagatcatctaaaccagtggtcaaaagttacaatgtccaacatcaaatattctgatgtctaaggggcaggagcgggcaagtgagtggggactcctcgaggaggggaggggtggggagcaggctgtggcttgggtctcatcctgtagaagtgggcaaacctggggggaaatgggcatttgtgatgggaattattaatagaaatgagacatggttaggggatgtgttccctggccagtctgcttgggggaaagagaagagggatgtggcggcacatccctactgcatgcgtgcctgcttgctggtgggacaggggaagggaatagagaccagaacttataataatcggtctcagcatctgacaatagaaggaaactaaggtgtgtttatgtctaaaatgtgcagcatggggaaggcagcagaacatttacactgtgtttcttactcagacacatgatccactgccagcaaggtctttctgggtccctgagaatagccttctacagaatttctccaccttttttttttttttaaagaaacagggtctcgctctgtcacccagactgtagtgcagtggcc

SEQ ID NO: 53666 - DNA, 419 bp, Homo sapiens
ccccttggaatctgaataacagtatatttctgcatgtttgaaaaacatgcaataccaagaaaacaattttatagattcttatttacaaggatattggttgtatggaatactgaaagaaaatgtctctcaactttgtaatgatttgaaaacatattatgaaatatgcgtgcaataagctatcctttgtagagaaatgaggcacagtaacctgacccccagtggaatgtgccctttgacctctctctcctaactatggtcacgcggccaaaatgttcagcacagcctctcatccgctcccccttcatcctggcatctgtgagacaatggacgagggtggtgtgttcagttgatggcaatggaatagtttttttcctgtttaaagtcaaattgccttcaggatgactgatcccacaaccctg

SEQ ID NO: 53667 - DNA, 3398 bp, Homo sapiens
cacaagtgactctttcgcattcagctactgcactttatttaatatgcaagtttattttctaaaactgcacctgcagagaaagagaagaatcagacctataattaaaagaaaaagaaaaaaggaaaaaggaaaaacttgctacgtcagtcaaagtttcaaatacagtattttacaagcttctctatggaggctactgcatttttgcttctatttttgaaaagcagggtcactaaggcatgaaaatagaggttcctccttaacacctagtcccctttctctggccttagacctcacaggacaaagtcaacaaaactactctcacttttaagataaagcagttaagttctctgaggtcatcaataagaaagcagcttacattcctgaatgaatcagatagcaccaacagggcaatcacccagacagagacttttaaaagtccaagtaactgagtaatcaacacggatgtggaaaaaaaaatttactcagaaagtgggaagagccaagtattttgaatgcgtgaaactatttcaggcctctttcattaaacagtatccaaactaaattaggggaggcagataagaatggatcttcaaaatgcctataatcaaagcattttcagatgaaccaaatccacatcttagctagcttagctcagtttgaaaaattcgattacttgcaattgtccacgattttttcactaattttcatcagtttacacgtgacttctgcaggttgttggagtttctaccctgatgccaatgctagagaaaacgacagaggaaaagtggacaggttggggtttggctttgacctcaacttgattaaaagacgacatttaaacagagcgggtctaaactcaatatgaggacttgtgacattacaatgaaaaaagtcacctgcccctaattaaagatgacaatgcattttgagatatattttcacgatggctcttgagttatcatttttttaaaaaaaaaagtcaaatcaggaagataaagactcttaacaagtaactgaacacagacaagactgtattccactttcccctccctgacaaaatacaaaccctagagtgtggtgtacacctgttaattcgtcagaaactagatggatttcttttctttcttttcttttttcttttttttaaaggatgcttatctgactgctatatgatctagtctaaaacacctttccaacccaaatcagctagctagagatgttggatgtcaacaattccgccttgggcttggacacggcgtgagcttctttctccttcttaaaaagaacaacaacggtcatcctttttcctccttctcttggcggggggaagggggaagaccccagaaaacaaaaacagcaaatctcaggtccgagggtccacgctcggcctgatggccaggcaggtccgcggccgccccagccctgccccggaggcgccccgaggagggctcgggccccccggtgtcattgtttgctaatttcctgagctgccctccgacttgtttacgttaaataacatccctgctccccccgcacaactttccccgccgcccggcgtgtgcggccgcggccctgcctgccagcccggcggaggcaccgggggaccgggaaggaccgggggctccgggagggcgcgccccccagcgtggacccccgcgggcggccgagggcgcggcgcccgctgcctgcccccgccgccccggcggccgcttacctcggctcaccagtttgaagctctgggatttcctgcttcttttcctctcggagaactccatggtgcggggaaggcggcggcgggggctgaggaggcggcggcagcggcggcagcggcagcggcggcagcggcagcggcggcgcgggctcgtgtcaccgcggcggagccgccgggaccaaggtccgcgcctggagtcggcgaggggaggccgcgggacgggaggaaccaccgcgagccggctcggggctgcaggcgcggggcccggcggcgtgggctcccgggcgaagttgcccccgcgcggcgccgcctcccggtgccctaggcgcccccgcggcccccgctcatgccggcccgcgggttccagacgccgcccgccgcagcccaactttccgttgggagcgggccgggccggggcgcggcggcggcggcggaggcggggggcggctcggggcggccggcccgcctgggctcagcctgcggtcgcggcggcggcggcggcggccccgaagacgcggcgggcgggctgcggggagggcggcggcgggtgcagagccggccggggcgctgaccgcccccgcgggaggaggggcgccggcggagggggcggtgccgctgggaccccagggccacctgctggcggagcccggccgccgccatccccgggggccgccgccggcctggccgcgcggcgccccgaggaggcgcggaggccgcggcgcagcgccctggcccgggcccggccggcctgcctgcccccggggacgacgccgccgcccgggcctccgctcgcagaccccgctcgctggcctccctccgccgcttgctgggccgagctaactccgtgcacctcgccgtgggggcgcggaccgccccgacaaccacctccccgccctcacatcccgggcgccccggggcccgacgcgctgattttaagcaagttttagggggaaaaaacttacccatttgcgctctctctagaaggacagagaggaggttttagaatattgtggagaagaatatagtagagagctcccattccctaacccaggctgggcggattgtggaaagagccgagtcacattcaaggagagcacttggaatggggggcttggtggccctggggactctcaggaggccatggtcaaggcaggtgcagggcactatgcttctccacgtcatatgtcggaatcatggacccaaacacaaagcgcttagtagttatgtgtaatattcttttcgggggatcagagagcgcacttcaggcaccatttctttctcacatctttcgagtgggccaggaaaagaatttcacactacctgggaatggtaggacaggaacatgacgggacatgcgtgaaagtatctgccaaacccaaccaggaagagggtaaagagtcgggggatgggggggctacctctccggcacgggacaaaggccagtggccccaaaagagtagagaggaaaaaggggaggttgacaaatgtgatgagtgtcacgtgggtctcacccaaatgaggcagccgctgaggaaccgctcttatttcagggacacagagtaggacaactgccgaggaagggggacattgaggcagcttgcagaaacacacatggagaaacagaaccaaagagcagggtaaccagcaaaccaggcagtggaggcagggatgggtacccatcccgaga

SEQ ID NO: 53668 - DNA, 1068 bp, Homo sapiens
aacaggctagtaatgaacagacagccctttcactctattgttacaagttagtattattgtttagatttttctcatccttttgcaaattttgcaagcaagtaacttcagaaaccctaatgtaaatttccagttaataaagatcttgatttaactggcattattgaggtgttcttcgagaggcttttggaactcaactagcaggtgcagagagtactacaaagacccgggtttccgtccacgttcacgtaaacctccctacgaggggaaactacaggcgcgctgccggagggcgccgccagtgggcactcacgcacagctgctttggccaccacaggcgccccgggccactctcttccctcatctctctcatcccagcttccgccggaagcggctcctgtcagttgttctcaggtgtttgggcttgttgttccgtatactcagtgggttcgcggccgccggcccagtgaggctgggttcgaggagctggagcgggaaactggagcttaaattctggcggcgagatggacattctgaaatcagagatccttcggaagcggcagctggtggaggacaggaacctgctggtggtgaggaccctgcggtcgtgggggtcgggatgtaagagtgagagtatgtgtgtcggggttttggggtgagggtgacgatactcagaggattcggggcggggacggggcttagcgagtgtcctgccactacccctggtaggcccccttagatccaacccttggcgtctcactgttgaggctggagaatagggtctgagagcagggaacttgagtacaattcgtgctgacttcccaaagctggatcaaaaggaaaacacctgggtctgggggcgggaacctgaggccaattaacgcccacgtccaaaagccaaaccaaaagaaaaatcctcatcttcccaccaccgagtagcaaaggcttcaggctgcggctctccccgcatccctgcctttccaccacctctcagatgggaagggaacgtgccctgcattggccgtgggccaatcacgggccatcccttcatctgcatagggcgccagttca

SEQ ID NO: 53669 - DNA, 521 bp, Homo sapiens
tggatgtgtggccttgggtaagttacctgccctccttaattcataaaggctgaatgagaaaacacatctccagcactttgcactgggcctggaataggtcaaccctcaaactagggcaggttgaacatgagcatgtgtgcgcacgcgcacgcacacacgtcctagtagaattagaaagagaaatcattgcaactgcctcttcactgttgctcaatgaagtatcggtcaaagagcttcgtacccaattcagtgtaacacttgaggtccaaagctcacctttagaaaggaacaatacgaactaggcagtgttttctttaaaaaaatttttttaattggcacataatatggggtgcacattgatgttttggtacatataatgtatggtaatcagatcaggataattagcatatccattatccaaacattgatcatttctttgggttggaaatactcaatatcctccctctagctatttgaagctatacaataccctactgttaactattaacatcctacagtgc

SEQ ID NO: 53670 - DNA, 770 bp, Homo sapiens
acacacacacacacacacacacagtgttcacaaacgatgtttcctgagtccctgggttagcagctaggtctttggggcagctatggttggaggtggggtcaaggaggttctgtggctattcttatcctattccactccacgttcctcaaaacagagcagctccccgtgaacctgctgcatgtattcaggttgccgtattgtaacgaaaagaggttcccattgccttttttgtctttaggaaatccactgttctggggcaagggctcggagctttcaccgctgctctacctcagggcttgtctgatctgagcctgcgggctgctacctgcaactaagcaaacgtggccaccaaggcaagaggtggccgagtgcccagtgacacggacacaccagcaacattccacagaagcagctcaaagggcgtcaggagagggagcccaaaatgccctctgatattgatctgctttcccacgtcctccacaaatgcccactaggcatccactgacccagcaggttggttttaaaagggaagaaggaaagaagctacaagacagggagaaatcaagaggtggaggttcactctcactgcctgccttgatgccctcaagtgacagaatgactccaggaagaaattgaggcagggcagagccttagggctcagggaaatgggactgtcaaaaactaaaagctggtcacagtggctcacacctgtaatcccagcactttgggaggccaaggagggagcatcccttgaagccaggagtatgaga

SEQ ID NO: 53671 - DNA, 952 bp, Homo sapiens
ctctgatggtggtcagagccccctggaccaagatgcatggaatgtgccctcttgaagagctagtctcatccctcccatctgtagccctaagaggcaagcctgtatctgtgcaaggtatggacccgggcaagggacatggcgcctcccccacccatccgatcctcattcctaaactaagagaggcagacaatggcccgggcttggtgagaggtctggtcactcaccttactctgctttctgtccagatagaactggtgttggcttatggccatagcccagatggacttgatcaatgccggacatgcataccacgtgtgcactgcaatgccgctgtgcccaaacgtcctccttgtcactgaagccctggggaagcaagaatcacaaggttcaatcccatttctgttgagagaaaccatttctcagtcaacagcttctgtagagaacccactgcgtcctagaagccctggcgtaaagatgatagatgagctctcacatacacctaggcgtacacacacacacatgcgcacacagcttacagacatcattggctgggcaaaggccaccttctgattttctgactccctagagttcagaatctggccaagcctcggccttgtctgggataagatgggtcattctaggtcaatggatggtcctttttcgatcctggacttggcactgggccaagacaaacttcgcagacaggaaaaccttcaatgatgctccctatgagacaggaaatgtgcctacggtggggatgagtaaattattttctaatcaccacaggctacagcgtcccagggaattgggacttcttatataactaacccaatgttccttgaagatttggtgatcaatttccaatctattcagagggcagggagggtataaagaatcaggagaagaaaggcagagagaaatgtgcccagccccaattcccccaacgtctgtc

SEQ ID NO: 53672 - DNA, 477 bp, Homo sapiens
tgaaatattggcccagcctggagaagctcagaaatgaagctaagcattgagttaggatgcccagggggagaaagtgcacagtgttgtccagtgccccacagggaatggtgcaatcacacctgagcccatcggcccagaaagcagcctctgccctgaatcattcccatcgattacatcttcattaaatgaccgtatctggcgttgcccatcctattactgcagttctgactgccttcctggcttgggggaggggctgagcccggaacaccaaactaacgtgaggccaatcacattcctcttccctacctcaaataagcaaggccacaagcaataggatgacacattcaacttaaaaagcaccgcgaggttcacttcaaagtaactggaagagaggacttgcaatgataccaacataaaaatagtaaacactgaggcgggtggatcacgaggtcaagagattgagaccatcctggccaa

SEQ ID NO: 53673 - DNA, 1392 bp, Homo sapiens
gctctaatgagggattcttcagactcttctatagcaaaagtttcctatggggacttactggtgtgtgttacaaagtgctataaagcttccttccagtgccccggcaggtaagacaaacacatacactgacacacacacacacacacacacacacacacgagccagggacacatgtggccagatgagacagtcaggggattgctacttacacacacgtgcgaacccactgcatttatcaacacatgtaattgaaaagaaagtttcactgtctgatttgagctccattccccaggagcccccaccctcgctccctgctccaaactgaccatgaacaacgacagccccaaaataatatccataacacgcccggccgagagccacgccatcccgcaagaaaaggacttttcaagcttacctgcgtgggtcatgaacttccacggaaaacttcttttctctgaagtacaggttttccaactgtctccattggaatatctggacagaaaacagtgtagtttaaaactcaggaggggctggctcctgggccatcttcccctctctgctggttaactttcgacagctggcagtttccttatcaaaacagagaccgtagtctgtgcctcctccgcctcttgcttgacacacacacacacatacacacacacacgcagctctccagttcaaaaccaggcaatgtgggtgtggattttcctgcaggttccttaactggaacaaaacaagttcttttcaagttctccgccttcggtcggcctttgttggtttggtcgtggcagtccccagcttggcagacttttcccttccaggagagggaggagaggtggagaccggggagagggacccagcagggaaggcggcgggtgaggggagaggagcgagaggagcgagcgctcaggagggagcggtagccatctgcgtggagtgctgaactgagcttcctcccctccagtgctgaaatgggaaggcgttcaaattcccagcctcccatcgggactccacttcctgctcactaatgtgtaagagccttgcaaagggcggaggaggctgggaccttatttcgggggcaggcaactcaagatcacagtgtgagcctgtcaagcccattcttcttgctgcagcacaaagaaaaccaagagttctgtcgcccggaaggacgctgcggccagagtctctccctcaagcttggccagggagggtgagaagtggaatgaaggggccctggcggtcattcctccttcggaccagtgagctcgttaactgagaagctgactgtaatgtttggaagtaattagggctgcatccaattgctccaggaacggggttcctttcattggatgaaaaagaaagttactttaaccctctgggaaatatcacagg

SEQ ID NO: 53674 - DNA, 875 bp, Homo sapiens
ttttccaggggtggcggggggggttggcagttggcatttctcttatgcctgctccagctctatccagagacgtggcatcatagagacatcccgatctcctctgtggaggtcatcggactgtacggaagatggggatgggatagaagaaaatggactggcaaccagctctgcagggaaatacaggcatacactcacaagaaacaccgtgctttatcacccataacaaaaagaaaacgaaatgtcaatactctgccctagcgatatctgtgcgaggcaaaaaaagaaaaaagcaagcaagcaaaccagcaagggctttggcgtttgggaataattatttaacagcagcttgtttgcactttggaacacctcgtgcttccagagccggcccatcctgctggggaggggagaggtcccagcgctgctgtctggcagaccttggtttcggtgggcaccagaagcgaggcagattgcttgctgctgcaacttcacgcgtgagctccaggctcccctggttggaaggtgccagggagtgaggcgggtgagcaggcatcaggccaggggtttgtggtttgcttttcaagtcaggctgctgctgggagaaggaacgcttgcggtctcgccagctgctctgcaattgtggcggcagccagcagagataggaggcggtgggcctgccccgctccagcctggactttccacttggagggcctgacttctccgcttgacccgagacatgcagggggctgcggctgggccacggtctctgcagctggggcctttctctctacggatcctcttgcgggagcaatttggtatctgctctgcgaggtttccttccagaaagaagtgaggacttcagatctagactttctgtc

SEQ ID NO: 53675 - DNA, 731 bp, Homo sapiens
ccaccatgcccggccgattcatggattttgtaattattttttgagaggtccagaattggctcctgcaatttaaaacaatgcattcaagcacacctggatcttttgaaggagagatatctttcaggctcctttgggcctgggaatttcacagttggatactaatatttgccctggaaccaccttagaagtacgggttaaaagaactcatgagagcctacggaagaattggggacaataattccttacgtttaaccagctgaaagagctttacggcggttggaattgatagaggctgtcggtgctgggatgcggaagaatgtttggaattgcagttccgggattagcaggtcccatcagaatgtaaatcatttaacagtgtacagatggcttcacagaaacactgtccaggatttccacaatagatggtttctactctcactctgtgcgtttccattcccacctgaatgccttggggtgcacttgttagcgtgctgttgtatgtgtgcttttctgtcaaacatttacaccttatgttacagccaatggtcgactgcgggctaatatttaacatctgctgagaggcttatctgatgcgcaactcaaaaccaaccatcagaaaataacacttttaagtgtgaacatagcttttagtttgctatttgattcatccgctaaacgaagatgtctctacctgcgcggaggcgggtaacacgaaggaaggtcttttattc

SEQ ID NO: 53676 - DNA, 689 bp, Homo sapiens
aaatgtgccgttcagtggcattaagtatattcacagcgttgtgcagccatctccagaagtttttcagattgcaaaaccgacctctgtacccattaaacagtaacttcctattcctcccctctccatcttctggtaactctgttttgctttctgtccctgtcggtttgacaattcttcgtagctcgtataagaggaaacatattatttgtttttttgtgactggcttatttcactcagcataaggtgctcagggttcatccgtggtgtagcatgtgtcagaattcgcttcctttttaaggctgagtaatgttccattgtatggagagaccacattcatccatcagcgggcacttgggttgtttccactttttggctactgtgactcacgttgctgtgactaagagtgtgtaaatatctccccaagtccctgcttcccattcctttggggatttacccaggagtgagactgctggatcccatggcaatcctgtgtgtaatttgggggaagctctgtgctgttagatactgatctttcccacctactatttctgccacaggcagcgcttgctccactcctgaagcaggcagggacgctgcccacagacatgcctgctgacatctaggagtggcttagcctcatgagccctgctggtgtgggcttcaggtaaccctgtgctcctttgactccc

SEQ ID NO: 53677 - DNA, 1548 bp, Homo sapiens
cccagctacttgggaggctgaggcaggataatcgcttgaacctgggaagcggaggttgcagtgagctgagatcgcaccaccgcactccagcctgggtgacagagcgagactcttgtctcaaataaaatagaatagattagaatagaatagaatagaatagaatagaatagaatagaatagaatagaatagaatagaatagaatagaatagaatagaaaataaaatgaaatatggtgggagtaggatgggcctgtaacaacaaagtgtcttattggcaaaatgtggaaaacccacgtgtagcacaaaaagcaggatgcttggaaggattgcagccaccagagttctgtgttcaggaactccagaggcttggagaatcatgtaataagaagttgagaagtaagtcactgtgggaaaaaagtcttggctgtgtctactgctgtactcctgatctagggatgtggcctgttcagttcattacagaaccaggataagagcagctgagacttttctcatacctttttcagataaaaatgaagatggtaataaacagagcaattaaaccgattataattacatatgcacagtggggatttgggggatgaggagatcattgtccatgtaagtaattaatggtgaggcatagaatttcgcactaggtggggttttccaaacaggttgagaacaggaagtcaggagcaatgcactggcaagtattcaagatctttagggaccagaggtggactccgaccttttaaaaactggaattccccacagtttgggtttcagtgtattaggaaagaggtcagcccaactgtgtccttccatagctgcataattcataatgtcgtaaagtaaatatttttttcctctcaaatttcctcagaggcagttggattttatccgtttcagagttgagtcttactgtggaaagatttgattaaaatgaggaaaacggtcaggagtttgagaccagcctggccaccatggcaaaaccctgtctctactaaaaatacaaaaattagccaggcatggtggcgctcgcctagaatcgcagctacctgggaggctgaggcaggagaatcgcttgaaccgtggaggcagaggttgcagtgagccaagatcatgccactgcactccagcctgggcaacagagtgagactccatctcaaataaaacaaaataaaataaaataaggaaaattttggcttttacgcgttgactgtctttttgcagttgtctgatcctgcacacttgccgcacttccgtctagttcatattctcacgtcgacaatatttactgagcacctacgacacggaggcaagagctgcctttgactgtaggctttggcaccatcacttacacactgcatgatgttaggcagtttcctacctttgctatgcctccgttttttccatctataaaatggggctaatgacattcttctcactgagttatcgtgaggattaaatgaattaatacacataaagcactcaggacagtgcctggtagaaagcaaagacacattaagcagtgactgctctcactca

SEQ ID NO: 53678 - DNA, 670 bp, Homo sapiens
gatgtatgctccaaggttgtgcccactcggcacgacccaggttccatgctacaggcctctacttgtccagacctgagggtcagattcagatggtgcaaatgtttaagacctgggtcttcaacgagatgaattatcagctatttcatagctgcagtgttggatatgccgagacgataaaagcaacagcaatcagaatcaacagttgaaacgacatggcagacgctgtgaatgctatgaactgctgtgctgagcagcaggattcctgtgtcctggcgcaatgcccatggggattcatgctttcagagggtcacgcctcaggaacacgtagaagggcaagcatttcatctggcagggcactgatttaatctgcacgcatgtttggctgtaaaactagctcctcccccttaccatttttgagtcgctgccggactcaaattccacagattctggaaggtgtccaggaactcgttgatttgtcaaacttatggctacacacagctggaatggagacggactccactgaggagactcatacaggacaggagggaattttaagaggataaccctggtaagccatggtggattgggtgatgggaggctgtgtaagaaaagctctctgaccttgacttccaggaatttactcttagatggtttaatctagatactacca

SEQ ID NO: 53679 - DNA, 829 bp, Homo sapiens
aaaatcaactgcagtttccttctagttaatcatagaccaagaaggctacacacttccataaaaggctccgtatttctgcccttcaccatagataatctccacgatgccaaacccaaacagacaactgcctctgaccttgacctcgttattacatttggggaggagctggagggaatgtgacagaagagcgggccgtgatcagcagcgagaagagcgcatgcaaaggccacagggtaggagggtgcctgggggggatgaggaatggcaaagcgcgaggctggctgcaggggagggagggatggtgaggatatagagcgtgggaacttgaacaccagtgctggcattctggtcttcaccctgagggccatggggagtcatttccaggttctgagcagagtaatgacggtatctgactcatgagttaaaagattactccagctcccaggtttagaacgggctgcaggcaggcagggcggcagatgcaaaggtcatccaggtgagagatgctttagactcacgcagcagcagcataggtaggcggagagcctgattcaagatgtattttaaaggtaaagtctctgggacttcctgaaggactggacacgaggcgtgaaaagcactgaggaatcaaggatgacttggaggtttccggcctgagcaaccagaaggctcaagttgccatgacgggaggctgaaagagcaagtggatctaggacgtgtcgagtctgagacgtctgatcgacatgaaagaggtgacattgagagggcaagtgcagccagcgctcaagcctgggtgactcgctctcctttacctgactgactcgctctc

SEQ ID NO: 53680 - DNA, 1226 bp, Homo sapiens
tggaaagtctaaaaaggtctgtctatcacactgccaaggtgctgcatgaagttctgaatggctccagtcgttcagagtggggcaggaaacagacaggcctgatgacaagggcctctcgtgctgttctgaatggaggggactcactgaaagattttcaagctgttgagtaataacagaattgtatttcagacagacacactatgcactgaaaaatgctgcctgatgagaattctacctttaatttccactgagcaacacacggaagtcattatttgactctactatcccagagcactgggaaatcccatgcttacagatggattttgagtccttgcttttcatgtttttccctttccaaagttcactccgggcccagctctctggctatcccaggtacttctgttgactgctttccagaggtgaattaccattccctcggaaaactttcacaactgggctgataaaacaaacccagaccgtagctggcttgccccagcagactgctctggttccatgtctgcatatttctacatcaaagagatgaattcaaaacctaatcctctaagatttaaaaatcagaatttacagattatgctagttttcatgtttacctaaatatataagacctaattctatctagaagcactaatacttgaatcctttctaaaacaatctcttggcacgtggcaacgtgtacagtttacaggtgcgctaccaccaaccaaagtgaaacaaccttttgaactgctaaaacgtctggaaagttaaaagtaattccaagatacttttggagaatctgtttcctaagctgtctctaagattctgccaaccctctggcaataccctgagaaacccaagttacgtaaggtggaggcggcaaactccaggccgggtcagcctgaaaagggaaagacacctcttagatccaaagcctctctctcagcacccacagttcccagacaggcaggagcctgagttccggtaagaatttttcccaaagtgcagttggtttcatcacaaactcctgacttgcctggccctaaggcaaacctaaaaatttccatcttagaccaggcaacagacaagtgcccaggggatttctgtggccaccaacctggtgcaccaaggcttagaaacgacgtcccaccagagtcatcagcgtaagtgcagagacgttattgtttcatactctgccaagctccactatggctacgggacagtcctct

SEQ ID NO: 53681 - DNA, 848 bp, Homo sapiens
aattgataaattacacttatcaaataacatttgatagatgactattaagtgatttggagtttctctctcctatgtaaagtagcttgatgaaatctgaaattcaaggactcttgattttaccagcaaagcacgttctgtggtctaacagtgtcacccagtggtaaaaggcacagtttggtgttcaggggagctgttgctttttaaaagaaataacccgtcatacgtgtttctttactaaaaggaaaagaaaaaaaacacttttttgaattgcaagaagaaaactagtacgtaaattctaaaaaacatgactggcacagaagtgagcagctcttcatccaaggccactctgaagcctttggagaccactcaggaaggagcatgcagtcctgagctcggcctcctgagctcgggagagaggcacggtggtgtaggacccgtgactcaggagcagtgcaggaggagttgaaatcagcccgttctccaggccaaacgagagaccacaggccaccctcgctctcagctgcactgtgtccttcctgttttgcctgtctaccatgcagccacaattctctaaagttcagcacttccagaaaaaagaaacaaaaagcagccaattctgttccaaggttcactatctgatcctaaaaactttaaaaaaaaaaaaaaaaaaccaaaaactctcatatggtgaagcttaactgaaataataaattatttagcttccttatctgcaaaaagagaaggctgtgccagatgacccttgagatcccttattagtgaaatgttctgataataaagaagagtttggctcacctgctggtctccaccacacaggtttataaccaaga

SEQ ID NO: 53682 - DNA, 944 bp, Homo sapiens
agtgaagtgatccgatttatcttgactccaacaggatgcttttaaggatcatttaggactactgcagtaatctcatgtctactttgtaagcgtccatcctcaagtcaattctctgtctgtctctctcaaaacaaagccttaatagtcactccttccccactacacaagtctgtgagaacaaccaccacctaccactgagtctgcagctctagtcctcggctgtcaggtatgaggacttttgccccaagaaccaatacatatcctccatcaagttactcactctggcaattcattgcattgcaatcaagtctgttactacctaataactctatggtcaagtgatgtttgcccaaagtctcaacacaccatcgagggatttaaatcctacagcagcagtatgactcagggaaagaacagaaaaaggtggcgtggcaccccttaagtaaatgctccacctgatacgaagtccacatgaaatggagaaatcggcttctttccctgagttacccaagttgtcatgctttcatttcttttgttgtaacaggattcattacccaagaacccagcatcctatcagctttgacttcactcacagctcttatcacaaaggtcagaactttttttaacagtacctttttcaagttcacataaataggagctactggttactttaactaaatgaaaaggacaaggacaaaggacacgttaacatactcataatgaaaacttgtcttttactgacagctggttatagaggaaatcactcatcacttcgagaggaacaattgtaaaataattatgtaacaagaaaatacagatcatcatagctaactacttcctttatgccttaaaaaaattaatctgaacagcttaattacagtaggatagttttacctccttaaatggattaagtacttaaaaatgtagcacaaaggccatgaaaa

SEQ ID NO: 53683 - DNA, 2094 bp, Homo sapiens
ttaagtagtgatgacattatgaacttggaatcatactcccactgacataatttaatgcctgattataaaacaaactattctaaacattttacttctgtctttaatctagttttattttgctcactctcatttttttaaataagttgttcccacgccattagcaagaaataaattttgttttctcttaaaatgttcacttctgagataaagatttgattcagtgacttggaaaaattgggcattatttgtttcctcactgcatctgctgcagaaccattttctccacaattaaacatcatggctttatcaaagaacacaggtctaaacgtcagaaacgccaggcccagtccttgctctgccacccaggaggctctgtgccttcagaaggcaagtttacccctcagcatcaaagtattctcacctgagccctggcctaggcaatcagaggtcctcactaatcaggacaggccagtgctaaacttgcagacatctttaacacacacacacacacacacacacacacacactgggcagtgcaatcaggccacacgtgacaggcctttcaaatccacacaccccacccccaaaaggggaaacaggagaaatctgattttacctggctgcaagtgcaatgcagaataacaacgtgagccctaggacacctctgatccataggaatccacattaaagctgcactgctgcctggggccctcaggactggcaggtgacgaagcagagagagaagacagaccaagcacattcccttctcaatactcgatatacaaaaacagcactatttgactaacaatgactagcttaaagtgactttccagagccctcgtccttcctgtcatcagaaccgactgactggaaggccagtaatttgatatcggaaatttacaattgataaagtcatcaatggtgactcctcccaaatgcacagaagatctagaaatgctgacctcagagtttctggactgttcagggcttgaccaggattctctggctgaaaaaggaaatacaccagtcagcactcagcatgccagagagcagcccaggccacaatattcatatttgtcaagccccgacctaacgagagctcagctctggacaaaacaaagccgtgcgcaacgtttagacttgactgacacctactgtgtgctccgtgctactgcccctcacttgagatctccctggtccatctaggccacaagccacacctggcttcacaaggcatcctgccatggaacagcaggcaaagatttagaaggccacctcagcaagtgccacttctcaaagatacccagatagttttgtggctaaaacaaatatagcacccaggttttcgttattgaatagaaaaagttcaaagcaggaaacgtgcactaagaatggactttccccccatgggattgtcagggcctctcaatagcttctccaatgccctggcagcggccctcactccccacctgatctgacctgggcctgcttctcatgcctcatgccagtctctccgccaccttgctccctgcgccttagccacacaggcctgccttcattcctggaacacaccaaactctttctgggctgcatgtcttggtgcacatgatgtccccacctggagcgcatgaccctcccaagccagcccccttcccacacttctcctgacccctggctcttcctcaccttctcagtctgtatttcaacatcaccttctcggatcaacaatccaacacgggtccctccgtggtcagtctctgtcctaagcttgtttcccaactctcaccatctgtaattgtttaatttattgccagccccatgtgtgttttttatcttctcccctctagatatttagctacctaggggccagggccatttctggtttgtacctcgctggatcttcaaggctaggaattctaaatgttcaattatcatctgttaaagtgatgaaatacctcaataaattgtgcatggagaaaagatgcagtctataaacatttttatttgtactaaactggtcacagtgcgaaaacagctgttcactggtattgggcataattattaatttctagcctctatttctccctactaagt

SEQ ID NO: 53684 - DNA, 2719 bp, Homo sapiens
gaaaacagatgatcatcaaatttggaggcctgtccacaaaagacaaaattctggaagtagcaatcctttacgacaataccacgtcagccacattattagttgcaaacatcctttctaaatccaggggtaagcagggaactaatccccagatgtgagctgccctttgcatttctgaagccacttgaacttccagccataaaactgtgacactcacaccactggcaaacagctcagacacaataactcagaagtcgattgcatgctaatttccatgttatttctcaaccatgagagtagctctgttatcccataggacaagatattcttttgccatttcacttagataagaaatagaacttgcctgagctataacagaaatgagaaaaagcaaattatgtctctgctacatgtgaaagtttaatttatgcaacttttcttgaacaagtcaaaacttgtctattcaatcaatgaattactactgaaataaagcggaaaaactgtgaagcttaaaacagccacagaaaggttacgatagtctgttaaacaaataaaaacttgagggagaaaacagatctttgttaccactcaaattggaaatactggggttttacacgtagaaggcaacctacagatgagggaaacagtttaacagacatttctctcgtaacaaaaaatacttattttttttcttctgattttaaaagcaatgtgctgatcacacaaaatttggaaaatacagaaaagtataaagaaaatttcccccatgaatgcatcatttaaaatatttatattttgatacatttcctttcaactaatacaatacacacctcttttcattttttagcaaaattgggatattaaatagataatttattacatttgtaagcattttacctgtaataactttttcaatatatggctgcaaaatctgccattacatgaatgtattataggtgacttaactattcctctatcgtcctattcaaaatgcaagatagacaaattttaatgtaacagagtaggaaagatcattgctatggcttcagaatattgtaactaacctttcagacactaccactcatcaggttttggtgtggtatcaaggaagaatgtccgtaattatctgaaaaggttatttcaattctctggcctttcccaatgatgtaactgtgtgaaactagattttctgcatacatgacccccaaaacaacctaccccgacagactgattacagaagcagacatgagaacacagctattttctatcaaagctggttatgaaacagattcacaaaaatggaaaacaatgtcgctcttctcactaaatttttttttggttttcactttaaaaaatcactaaagagataaataaaacaatgtgaaacattcatctcatacttttttttgttttagtaaggttattcttcattataaatggcctttttattagtatgtaacaggtttattattgtttgttatttttgagtgaacttttaaaatttctcagtttcaatttttaacatagtaaaatatcaatagatataaccaaaaaaaagttctttaagattctcaaatacttttttaaaacagtgtaaaggggtcctgaggtcaaaaagattgagacccagcaggtaacagaatgaagagtttaacagattaataaatccattgacattgtgtttgcttgttactgacttctgcttaaaaaaagactgctccgagacgttgagcagatcagcggcagctttcttgggtagaattcttcctcttccggccacatttagtctctgaataattaggcccccaaatacttgatccatttcaccattctatatcaaaatagttttcaaagcagatactgcaggtttgtgaggaaacagtgcccccaagaatcagagatgcagatctctcaccatgactacctcaccacttatttgtttaaaaaaaaaaaaaaaagataaaatattataaaaacatttttgctgtggtaagggcaaactgattcagatgacagtatctgaaatacactcatctccatggttaatcatcacctattttgacttcctcccacccaaattgcacaagttaattctgtgaattctgcagggcaaatggcaccagtttccttccacctgttagtgcccagatcgcaacagaaataaggaaacacccatttatttcctgttacagctttactttctaattactaacaatccaactgaaaggcccaaacctattataacattacagatatttctaatatctcaagaacaggaatcctactataccattgtcctactcttccatatatagtattttctacactttcgttctaaaacaacaaaatggtcacacttgaaaaattgggctgggctgggcatggtggctcatgcctgtaatcccagctacttggaagtctgaggcaggaggatcacttgagcccaagagttcaagaccagcctgggcaaaatagcgagaccctgtctctaaaaaatcaatttaattctttaaaaaattgggctgaaaattaaaacaaactctttcattaaaacacgtatttattgagtgtacagcttgtgccaggcatatgtcttgacactgaggataaagcagtaaaactccctgcctcgtggacttatttatcatagcttattttctactgggggaagcaggcattcgacaaaggagtagcaatgaagtgtgctgggttttaacagagg

SEQ ID NO: 53685 - DNA, 909 bp, Homo sapiens
ttttgggaaagatggaaataggccaggactggaggggtggagccctcacacagtcagctcacaggtcagcagaagtgacaggtactccagacttaagaccttgagggaaaccaaggttcctctgtctcttctctgaaataatcaagttctttcttcccttctccctcctcaatgcaaggccgtgcttccccaaacaagatctgggactctcgcgcctactgagatggacagagagcttcacaggtgtcaacagtttcaagaaccttggccagcctcagccaacagccaaccaggcaggctgggcgagcccagaggttcccggaaaccagaaactagggcagaaacacccagcaactcagtcgcttttctaaaacagagctaccaataaatatataaatcactgtcatgagccatagaaagggaaagcttttataaattaaagcatccaaatattaagccaatattacttaggattgcatttatcattgctacagaaaaaaactgtatgtaaataaatgtgaatgcatacaaggtaattgagtgtcctatgttaatataagggtagcccatattttttctgaaatgaaacgacattgaaaacgtacctaccaaaaaaatgtggtgggtgtgtgtgtgtgtgtgtgtgtgtgtgtgtgtgtgtgatgtttatctaggtcaacattagatttttacccaatatctgtgtacaccaaggcccagcagggcagggtggttacacagtgtatgtagcaagacaagccatagccactgtgagaatgactgcccaagaggaaggagagcattaaatctccttagacaagtaccgacaggtactggaaatgctgtttccacagtggccacccaagacattctctccctaatcctaaccaaggaataagaagcaaatta

SEQ ID NO: 53686 - DNA, 1766 bp, Homo sapiens
aaaagaagtaaattaaactcagcacatatcagtgttttgttgtggtcatgtgttcatttttttttttttttaatccacaactgtgaaggaggaggtgatggcaatgagcagaatgctttcaaatcaagtgctattttgctaaaatcaaatatgtcttagctcaggctgctataacaagctgccataggctgggggccttaaacaacacttgtctatttctcacaattctagaggctgggaagtccaagatcaaggtgccagcagatcgggtgtctggtgagggctcccttcctgactggcacacagccaccttctggctgtgtcctcacatggtggacagcagggagagtgagaaaaaagctctcctgtctcttctcctggaagcactaatcccattctcaggactccccaaggcccctcctcctaaaaccataacataaggggttcaaatttcaacatatgcatttttgggggtgacacacacattcagatcataacaagtacttcaaaatatattatcaggcctacaatcttcactagatagtcaaattttactggaaatagatatcttcagagaaaatgcataattatcaggatcctagacacttaatagagcatggataaaataatgcagataaaagttagtgaatccaaaaagagttcttaaaaagctaagtaaaaggcgactcatccagagtttgacagacatggttggcatctgaagaaattttaggaaaaaaaaatagttcacaactacacaagacacagcctattacaaagctctcttcctggcaaagacacactattcaataccactcactataacaacatataatttttatttagtctcatacaagtctgctattgtgttaacaagtctaagttcacacaacattttctagagaaggactacattattcaacagccatagaaaagtcccagtgtttattcttacctcagatatctattttcttgtttatgttttaatcatgggcattcaaggtggtgaaaaatcatcctttagcaagagaagagttagcccaggaagtcatccccatccatgtcacccatcaaggcctaagtgacgaacggttacagagactgacctaacctcacctcagtagatataggcaggctccttaagcccaaggtagcaaataaaaagatcgcagtaagaatgcaccttctgactgtggtagttccttagagcggtgaagaaaagcacccaaaacaagaattaaccatccccacaaagaactctctttctggatatcaaaagagccacagttcaagttcaaagagaaacactctagcaacttctgaaagcaggaactgtatgcaactgaatgacctcatccggcacagaagccagagcaaacaatgaaaaacaaaccgtaccaactctggtaccagttactgaccttccagaccaagagaacgtgctggcagcactggtgaaatgtacttgtctgtacaaaaatcagctcctctacttgtaagcaaatatgcacgcagactctccagccctgggtgggtaccaggttgcaacactcacacaacctgactgcaggaagcatgcgtgagtcaacctccaattggaggaggacaagttctcgcacttcttagagcatcaccacaacacctacagcatggaggcctgagaccaatcagaatggccctcctgaggctgggattcatggcatcacagcccactttataaaatgtgctaagaattttctatggggaagggttatgtttaacatggc

SEQ ID NO: 53687 - DNA, 2256 bp, Homo sapiens
gccaagccttgaaactcagatctgtaaacctctgcttataacgtaacaacacaggtccacattaataaccatgatgaagcaggcccaatgtttttaacccccaatgtgaacaaaagtatttacttataatctagttttctgtgcattctctaatactgaagtcgtttctctttaagataaacattttaggacagttaatatttctgtaactgcagccagccaggaaatacattgagttacacgaagttttttattaaaggtggtatggctaatgccacctaaaaatggctcccttcccccagttcttcccagtggaacttagtcctaaagctgacacccattttcatgtttaaataagagcttcacagggctctcaacctccacatccagagccagggcgtgcgggtacaaagctttctttccatttggaaaagttcattaaatgaaatggtaacgaactccgcttccaagcagaatgagcaactacgctaacatttctgttaactgcaagcaggtgccagcctccctaatgacaggaagttccctgagggcgaatatcctgcacttatctgtgccctggatgctggatccttcatttggagttgaacaaacatcagttgaattaatacattccataaactcaatccagtctcactcatctgtcttcactctgccaaacctctttgagtaatttcctcaacgttagaaatatagtgaagaaaagtctagaataaacaagttgcttccctatcacggaggcacatttccttcggagattctgaaataacactactggcttataaatatgacaagccttcactggggaaaaaaaagagatccatcagacttgccgagagaggggaccttgccaaattgctcactttctggtcctgtttatagagtgagtgatagcagtcttcatttgcgacatattttccggagtccggaagcagctactggccattcagaaggcaagaagacctcaccaactgcaccctcggtcacaagaaagaattatttacttgggaattcctgttcagcaaaagaaaaacagaactatttaagaagagattagaacaaggaagaatggggcagaagagaagtatgcataccattcctggcaaatcattgttgggaacaaacaatgacgatcaaattttaatctaaagaatgccgcaagttagctcacctgtggtttatcactaccccaagtactgattactcaatcagggtctccaaaaagtatagcatgttttcgttcaaacgcaagctaaaaatgacagccttgttcacacattgtaagactttacctaaattataacgaagagaaaaaaaagctacactccttttctattaatatatacaagcctctcaggaaaattcccggtgacaaacacctagaaaaaacccattcgttgtatgaagcactcggctcaagtccataaattgattttctaagatgttatcttaatttgcttctgaaataattaccaatttgacataccaattgtgaaaattaatttttttaaatgtaagcttctccaaagaagggtcggccagctaagcatcatttggaaacacccataccaattagtagaattccttgaacagaggaaggcactaagtcaatgaatgaaaacaaactaaactcttttggaaacagcaatgctgaagaaaccgtatattcaatcttcagaagccagttacccggttgctgtaaagcagtgcatatctaaaccctctattgcaaagtaaccaaaatctcacaattagaataaacagaggaaaccagtgagagggtcatctcaaaaccgttcctacctctctacctggctggtaactgccctaaaattgcaaccctgggctttatcaagcaaagaaatggaaattctacttaagcaaatccagaaatttctgttagttgcattacccaagtaaaagcacacaagggcaacagaatttcaaaaccaagtttgttactcaataccccatattaggagataagaggaggataaaactgttctgtcattcactagttccttccaaaaaagatttggagtgtgttaaaagtcatacatgtctcatgcctgtaatcccagcatttgggaggctgaggacagatcacttgaggtcaggagttcgagaccagcctggccaatacggtgaaaccccatctctactaaaaatacaaaaattagccaagcatgatggcaggcacctgcagtcccagatacttgggaggctgaggcagaagaa

SEQ ID NO: 53688 - DNA, 2333 bp, Homo sapiens
ttagatcccagagctccagtatggaccctctacccccaccaggttcctaacctgtctctgtattctaccactgcttatcaaactaggctacatttcaggtggagaaggcccaagaggatgatataggtgaaacattcaccccaatcctgggacaaactctctctcattgagtcctatgagaatggaatagtctcgcccatcaggtgagagtgtaaacaatcacgtatgacatcacatcacaacaccaccttgggggagcagacactaacctctgttcacacctgtgtacaggcactgtgccaggtgcttttcctgcctgataatagtcacactgcagagatgagaaaacttgaactcaccaagataaaagcacttacgacatgccacctaggtctatctagcaaaaagttcatcgtccttctaatgcgccagtgtcggaactaataaatgacaacatacatctgaaaaaagcctgaggataatgacagtgtaagacacaatgcaggtactcatgtatttattctcatgtatttatgcacagaaatatattctcatatatttatttagaaagaactcccatatttatccaatcgcgggaagttgcttagccctagaagtcaaaatgtggacaacagacacagtcgacaaagatagttctcatacatttaaataaatgcctaggcttattttcatggtatgaacaactatttttcatgtttaatgtttttaagactttccattagtatgaataagaatttgtcttacacaaacatccaaaaaaagacagtttctttaggattacatatcttaaacattattttcttttctgctataaaatcgtcaccacaaccctagcaactaggaagttttgtttcctgtccttgtttttattcttttgtggtggcaagtgccagcatgtggggtaggtagggtgaggcaaggtgggtgacagtaaaggacactgtgctcaattcgaagctacgggaggagagagctctagtcctagatttgcaccaaggagctttgagctctcagtaattcagcaaccctgggctgtcatttcatctataaaatcagagggttaggtgttctccacagcctcctcctgcactcaatcctatgataactgctgaaaactccagcatgggacaattaccagtgtgacacccttgagagaaatggtgggatgtatatttaaaaaagactatctaatgactcacccatgagtaaaaaataatttacttccattttaaaatccatattaatcgacgtgacgttagtagagagagtgcctaatgtctgacagcgcttctgaagaggatataaataggcggtttttgaaattagtcagccatgtgctcacgtccaccaagaagcacatgcaggcaacatgctccaggctgtgcgtgcaagctgttctgtttccagcacaaatgcagaaaaggggaaaaaagcagtcctggtagagtcagtcatcacatatttcagctgtaagtaggaaacaggaagctcacaaagaattgtaatttagaagcatttaaaacaaaacaaacaaacctactccaggcacaaataccagatagctgcaaagccaactgtggtatttgatgacaaattgtttaaagtcaccagtgggtcagagtacaaaccacgcccacgtgaaagtctccctggacgctaccagggtctacccattctcccctctctgtaagccagcttcacacaggtaagtgggtcccataaacccccggaggcacccacatctggctctttgtgggcagcgcaagtagagaaaaagacagtcaaccaaccgtcctgagaaacaggaggctgacactcagaaaatcaacatcaaacatcctctcccatgccacagggtgacttctcacctccactcctccccacccatcaccccacacacgctgtctcccaaaaacacatctgatctttatgaaatctcagcttcagagctccccaggatgttactgttactgaaggggagtgaaaaggaggaagaagagagagaaggagggctccaaacccatcccaagttgattccttcatgatgtttccaagaatttaaagaataagtggtgaggctgggcgcagtgactcacgcctgtaatcccagcactttgggaggccaaagcaggcagatcacttgaggtcaggagttcgagaccagcctggtcaacgtggtgaaaccccatccttactaaaaatacaaaaattagccgggtgtggtggtgcatgccggtggtctcagctacttgggaggctgaggcaggagaatcacttgagcccaggaggttgcagtgagccgagataacatc

SEQ ID NO: 53689 - DNA, 562 bp, Homo sapiens
gcacccaaatccagaatgtggaacattctacggaacaagtgacctgattccttcaacaagtcaatagcatggggggaaggggtgggggtaaaggaactgttctatatgtatacagctttaaaaggcataaccatcaaatgcattggacagactttgttcaaatcctggtccttaagaaaagccatttctaagtgaataagggatgaaatcaatgctggggaggtgggaagttcagcagatccctgggcttccccgatcccgtgccatctgatttcccaaactgcatgcccagccatccccgagttgaaaggtcagggcccagcacagaaactaggctatgaatggctgggccacacccagctcaggaccaagaaaccctcaggtaagatgattcagctttggcaaaggaagaggcagttcctggggctactagtgcggaaatgtacaggttcctttgctggaaatttttgccagcaggttcgtagcaactctgaggcttcatgggaaagccattcacataaaaaagcataaaatcacaggtctgtccagagtcaatttatca

SEQ ID NO: 53690 - DNA, 1131 bp, Homo sapiens
cccaaagaaaatcagtaaaactcttttccacctttacttgtgagattttaaacaattaacagtcaaaggaaagattcgatgaatgaatgaatgaatgacggcgtccatcctcccacatcaggaacaagatttcacatgtcagtttctcagaagcgcaaatcaagtccatttttaaccacccaaggaaggggatctccagtcccctggggtaggagattgtgacatttcctattggagcttcgtttgacttttgcagacagaaacacatcacgactcctgaaggaatgccgatcatcagagcagactgcatgcatgactcattcactcacaggctactactgcaccgcaacactcccctgagcgtgtgtgcagattaaagcgccccgagtgtcaggaactgcaacaaaaatgcacctgagtggacacagccacaacttccttcttgtagattcttctaacttcaaaatgtattgcatcatcctaatgatcaacctacttctaaacggttgtctcaaagacctctattttgcatattagagaattcaaaagtccaaaaatgttacaagaggaaaataaaagtatgtaatgacaaaagcgtccagtggccaaatctgtggctaaagaacgattttattttaaaagaacatacacactcaacacaactcacgattctcaggaaaacccttattttactttctcagtgcaaggtctttaagaagccagcatgcacccggttgtacaatcactgctattccttgttccacaaacaagaattcctttccatcacatatttcttatgaatctcagaacacaatgttacctttaaaatatttttaaagcttaaagatttcatttaaagacaaaagtcaatcccaaatgactcctgaattcaaaaatatagtccatgaaacttttttgtcagcccattcttccaaataaagtggaaatttacattgtttttcctgtttctttcttctcccttctgtacaggtggttatatgcaaacctataagaaaatatatttcaaaacaacttgtccgtattaatcttggatgtaagtggcataccaatattgtagaattatcatgattaaatatattttaggctgatgtggctggtcagtaatgctct

SEQ ID NO: 53691 - DNA, 3716 bp, Homo sapiens
gtgtttgggtggtgagcatatgagtggtttttttctatatattttcaattttttaattaatatataaaattttctcatgaaaagttttaaaccggaaaccagcagcgctaagaaatcttctctggacaggtagcccagacactatttcaacttaaagccacttggatagatagaatttccaaagtgatgttaggaaaacgtggctggaggagaaaaccgatgtacttgatagcaagaaatcgcaagtttaagaatgtgaagtccaacagccctcattccgtttttctttgacccctcaaaatcgcacccatcctatcaagtaactttgctccgctgtcattgcctaaaatctttgggagggaggaaggaagcaggcttggtaccttgcagcagagaatgaaatctacagtttaccctctcaacctaattcctcttgcagatttcacaagtggtggacaccatcccctacataacactaacacttggccatacccatcagtgccacctccaagggacctaaagatgcctgggggaaattacggaacccaaattgaattaggactccttgtgtgtgttacaccaccccatatgctgggttcactggaacaggggagaaagagaagaggcaaaagaggaaaagttacttgcagactggagtcagtgtcacggccaccgtcggcgcggggcaaacctccccggccccggctttgtctgcctggcgggggctggcgtcggggcgcgacccggtccacgccgggcgccgcggggcgaggggcgccgagggcgggcatacggcgcacacggccaggcagtgcacaccgcgccgggtagggctcccccgcggcagcgccgagaaggcaacaatgagccgggcggccgctgggccccttccccgcagcggcccccgcctccgcggcgccccccgcacggccccgccgcgtgcccgccctgagccccggcacctcccgggcgccgcgcggggtgacccgtggtccccgtacgcccgctgccctcccgcgcacggggaccccccacccgcccggccgcccgcccgccgagagggtccccggagccggggtcgggcagggccgccgcccgcctccccgcgcccctcgtctttgtgtggaaagtaagtgcgggaggcgaacctacctcggcgcgcgcacaaaggcgcgcggctccctcccagctcgctcccggcgcccgcggcggcgcccagcggcccgactgctcggcggcggcccgaggcggcgcgagggcggctccgggggcggcggcccggcccgcaagccagtccggcgcagggcggctctcgctccccgcggccccgcgcgtccgaattaagcggcggggcggggaggggcggggcggcaaggccacgcccccaacgcgccccgccctggcagccccgcccccgccttccttccacggctcgcgcgcgtcgggcggagatccagaaaggccgggcatccgcgccgggaggggcaccagccggggctgcagcgctcggcctccgggactcggtgggagcgagggctggagggaaagcgcggcggccccggatgaccgggaaagtgggaaggcggccgcgtgggtcacagccacaaagctccggggcgctcactctccttttttctcactccctcgttccctcgctctctccctctacctctctgtctctctcacacacacattctctcttcttttatctctttctctctcccttaatctctttctctctcattgtctctctttctctcattctctccctcattctcattctctttcattctttctctctcctctgtctcattctttcattctctttctctctctgtgctcacccccatctctctctcttattctgtctcacacacaaagtacccaagagcgtctcgctcctgggtgtccgggctccgtctccccggcaagtctgcgatgctaagaggccgtccccatagaaatcctgccagttcctcttggaagaaaacgcagacagaatcagggaggaaaaggagacatttgttgtaattgtacaaatttacggtcaagccaggacccaaaacccggtgacctggagattcacccattttcctcccctcccttcatcaaagggtaattggaaatttaaatatgcaagaaagaaagggtttattccgcctctttgctctctgatctccttttcttcagctctcttacaagtgcttttctggccaaccctaaggctctgagattacaatctacttgaatcacagcaggtacaaaatcagggactgaaacagttatcggtttcagcgtagcaaaaaggacaacaggttcgtggattttagatcaaaagctttttaactgtcttggcaacagatgactaagggcttatttatggggaaatttttctgactaagacagtttgggtcatagtcatactgaaaagtcacatcagttacggattttggtaaacaaattacttattccaaagatacctatcacacaccatgctctaagccacagcctgccagccaagtaagggtctggccatccctgggtccctggaacccactgaggggtggaatccctgccagagaacttaaagaaactccttcccagctgaggaagctgaattccatgaactttatacatggtgtttcctatgattcttccttctctctcgtccttgagttgtgtttctgttcttaacaatggctccaccagtcaccaaaccaaaacctaggatccagcctaaactctctccctccccacattggcatcaactccaaggtttgtgcagtgtgcacaattcctggctatctccctccccctctgctggcaccgccactgttgcctttgggctcagtcacaatatggtggcaggggtttcctaactggccccagcctctggtctaacacatgcttttcctctcaactttctggggtgcaagtgaactttccaggtgcaagatgctcagtttcctcctctgcttgaaacactttagtggatgcctgcttcctgctacatgatcaagtcgaagctccccagcaaacatccaaggctccactcagccagagtgccgtatttgctaagtggccctgctctgtgatgaagactggatgaaataatgaatatatggccttgtcatgctcttccacgggcttcccctctgcctagcagaccttcaccaatccccaagagctcctctcctctctgagaatcagtcttctctggaaaccctttcctgacctgctcacactaaatggatcttttctgcccctcccatacccgacatggtattggcgttattgcactgtatcgtaaatatgtgcctctgtgagcccagagttgatgcttgacatatatacatatctttataccctcttgcctaatgtaatatctggcatatgggaagtgttatggactaaactgtgtaccacatacccctataattcatatgttgaagccctaacctccaatgtgactgtatttggagacaggacctatagggaggtaattaaggttaaacaaggtcataagggtgggaccctaagctcataggtctggtggccttatataaggaggcagagacaccagatccctccttccttctctcttcctctctccctccctccttcccctctgtccctttccccactctctctttctctgcccaaacacagagaagaggccacatgaagacacaatgaaaaggccgccaactgcaagc

SEQ ID NO: 53692 - DNA, 1264 bp, Homo sapiens
ctcggataagaaacttatccaaagcttcagtttcctctggacttaacagtaaatgaattcatagttatttctgtagtccagaagtggcacggctgcattctctgctgaaggcctcccaaaatcaaaatcaagatcttggcagggctcatagttcatctcgtctggagctcaaggtcctcttctaagctcattcatttataaatatgtataaaaatatatatgcataaatttttccttgctagttattagctgggagtcactctcagccacaaaatacatatatttatatatttatatcctcatacatataaaacatttatatgtccttatacatgtgtgtatatgtgtatgtgtgtgtatgtatgagtataaatatatatacatgttatatacataagtccttatttatataaaaagttccagctttagttgttgtgctccccaggcttgtctggaagagagagctgtgtgatccactccaatcttagaagtaaagttcaaactgcagctaatgttaaatcgtgccagagaaggtttacttattaactctgcttagagaagtgtgtgacccacacatttgaactgctaatgattactggacttttaaaactgctgttcaagtaataacattcttctatttgttccaccaaatttaacatgaactaaaatcctaactaatgttagtgttagctggataatattaataaaagttggaactttataaggaaaaagagagaatgaatgcatgatggaaggacagagtccttgggcagctgagggcagtttctggaaaggttttgcaattctccttgttcgtctctcagttgccatcagcactcagaacaacctgccctgtccttccttacttaccctgtccaagattccagcttgttctggtggcctcctttttctaagtccacagctaacacacattgcaggaaactgtactttgacaggcacctgcttttctcagctcatttctctctgcaacaattgcttcagccatttgctatcatttgtatcatttcatacacaaataattacaaggacaaaataaagaaatacaaagatatgatagaactgtccttgtctttgacagaccaaagaaaataacagacctttgtccaaaatgataagtgacaggctgagagacaaagacacacagagaaagaacaagtaaaaaagactgggaataaaaatggagacataactgtagataccccaaaactaaaaacagcatacaaaaccatgatgagcaactttg

SEQ ID NO: 53693 - DNA, 829 bp, Homo sapiens
gtagttttcttgtaatgtctttgcctggcttaggtaccaagcatcctggcctcataagatgtgtttggaagtattctctctagctctattttttcgggggaggtggtggggggtaaagaacttaagaagtattggtataaattcttccttaaatgtttggcaggattcagtcatgaaatcatctggtcctgggattttctttgttgggaggtttcgattacttcttcagtgtttgcagtgtgtttacagtaacaaaatatccatcgatctccgtcccttgttaacaaatctcagaaaggtgtctatctcaaactcagcagatgcttctgaatgtggattgtgcctgtctactcaatctgactttgcagagaagggtgggatgagggagcagaccccgaggtcccgtaggctgtgcccagggacactgtggttcaatttcagtgatttgctcctttagcatctctgaaaagtgtcaaaggtctgctcctctctgttctgtttactgtggccctgaatcaactgtgtccccaacccccactactacgcaaccaggcctaacaactttattcagatgatgtctgatacattgacagtctagagagagagaaaaaaaatggggaggcacagggagaaaggtcattagagtgcacgctttttggctcaaagcttggatggggagccagttctgtgcttggggctctggctgaggctatggagtgcaaggacgtaaaaatctcagccccttaaagaggagctggaaagggctgccacattgcctctgccgcttcatcagctcatagccaactcttctttcgtcctctcctcctct

SEQ ID NO: 53694 - DNA, 1144 bp, Homo sapiens
gacaggaagtcattaggtcaaagtcacaagtcaggagacaggcagagctgaagaaaaacacaggtagaatccaaaattcatattctactgggttgcttatgaaagttaaaagacacaatatgttaacatcaacttgtcagcctatttatagcagacctctggtgatttgagtagttcgcctcaatctaagggacaagccaaactgtttgggatggctttcttatagactcataattaagactctatccttagtgtactcttcagcctattgcactaaagtgaatactactttatgtaagaacagtaagtccattaccaaaaaataaaaacaagaaaaacacattatcactcaatctccttcattggtcctataaatcaatgctattttctgagtccaagatccatgaaaaaccttcactaagtataaacatcataaatcattaactgatcatttccaaaaagtgactttaactctggccaggggtaaatattcctgggatttatgtccaatcacaagcaagcagtattatttcagcacattcgacagtagaattttgaaagggtcatctaaaaatagattctcaatgactgcaatgtgaaatcatgcaaacagaacagcagttgaatgttgtggtttagagctgcagagagacccactgaagccttgataatgttgtcccccagcactcagataggaagccgacaccaggcggccttgttggcagtctggggaaaggccacacagcagacctcactgcctgaggaaggcggggagtatgaaggcttgagagcccagagacagacaaggaaaagggaaggagaaatgaaggaagcaaaaacaagggagctaagaggatttctcggagcaccaccaagccagagatcttgtcagcgctctgagaaaaagcagagagattccattcatctctgccttacagtgggctcttttgttaggcttgtagggcttctcttttattcatatattacagagggggagttgggatgatatggggagaaaaaggaggtgagagagaaagagaggagtggagaggggagaagaagggaaaaaagcatttcctctccatagaaaaaacattttaggccaggtgcagtgactcatgggagcacttcagaacgtcgaggt

SEQ ID NO: 53695 - DNA, 1682 bp, Homo sapiens
atctgtggcattagctctgacctgacttcttacaatctgaggtatgtccccaccccaagactgaatgggaagctagcagcttaaagtagaagaactggaaacagtggccactaagcaaatttgcattcttggcccgacaacagtggtctggtgttgccagccagcagaatcagaggaccaggctgcagcctctgaggtcaaagttgcagcagagcggtcaccaggctgggtctgcagcagtctggggtgtggtccctggatgtcagcccagagcctaattctccagtgtcctggtgactccatttctattgcttgcaactacaaaccctgactaataccgagaggttttgaaggtacagcttgtcaccaagatgtagcacaacgaaaaccaggtaaaattccagggccctcaaggcctgagcaacccccagagggaccatgtggcctccttgcttaagcgcccactggcctggattttacccacttcttcctcaaagcagggtgtaagaatagatctgattatacctttgggatctagagtaactttcctttaaaataagaaaaagagccagaatgcttctcgtagagcccaagcctctgtgttctctggtgtgctcggagttcagcaccagatgagacaatccaagggctgcgagaggctggagcttagtgccagccaccctttccggaagggatgaattgccaaggtggaaaggctatgtttataagccaggaaacaatgccacttagaagaaacaaaaacccagactgtgtgatctgccagactcttaaaagccagcttgtctgaggatccagggcctgattgagactctgaggggtgactgccggatggaaggctgtgccctccgtgtgacctaatgcactgtcagctccgccccaccagtgaggtcctccttccccttccccctctcaatcaatctggcagtgccttgttccttcttcctggctaaaatctactcagcatatcaaagctagaatgtgagttcatccatttactaaaacacatacttcattatataataatttcccctggccctagcaccctttctccctggtcaaatgaataatgtaacagccttactagaaccaagtcatgaccaaagttcacatcccagccacagcgaggccttcgcagagatgggaaccgagccagcagcccaggagctgcttattccatatccctctatctggaccatctctccccattgccctcttccatcccagggagcaggggcaccatcctccctaccatcccgctgaagtccctaaaattgccagcaaccatgtcttttgagaaaaggcacagttccaaaaccacattatgccaacacaaatgtgttatggaggggtcatgagagccactagcacgtccacaaagagttcttgagagaatgaaacctaaggtcagaaacagggaaggaaagataggtctaatcccacctgggaacgccaggaaggctgccatgcaggaggcacctcagaggccatcttgaagagcgagggggtggggcctaaggcacctgggaactccggaagttggaagcgaacagctccagcgaggagggcaccaggaaaaaatcaccctgggccagaagaacaatatggaggcaaagccaggatgaaaacccattggtagcatcctcaaggctttcttatggaag

SEQ ID NO: 53696 - DNA, 977 bp, Homo sapiens
gaccatcctggctaacacagtgaaaacccgtctctaccaaaaatacaaaaaaaaaaaaaaaaaaaaaaaaattagccgggcatggtggcatatgcctgtagtcccagctactcgggaggctgaggcaggagaatcacttgaacctgggaggcggagcttgcagtgagccgagatcgtgctattggactccagcctgggcgacagagtgagactccgtctcaaaaaaaaaaaaaaaaaaaggctcatctagattccttagaatctaggcttaagcgataaggccctgggttccctcgctctcctaagagccaccttgctagtcatttcctgccccaagatgattaatgctgagaacatcctctgccctaagggaagaccgacctttgctcccaggccttagccttggtaccagcaggacagcacgcacaacggagttcaggagtcccacatcagtccctgaaagtaacaggaagcatcatttctttctcagtgtggaggaaggaaggtcacctaaccaagacaggaggggcagaggaaggggcaggaaacagatctggggtataagacccagaaacacagcagtggttgtagataaggccaggatcagtgccattgtctgatttcacatcctctcccttcccctatatttacactcatgcactgcgtaacaatgtttcagtgaacaagggcccgcatacatggcagtggtcccataagataataatactgtattttaggtttcgatacacaaatacttacttgtgttaaaactgcctgtagtattcagtatagtcacatgctgtccaggtttgtagcctaggagcaatgggctataccctataccccaggtgtgctgtggactctaccatccatgcgatatttgtacagtgaaattgcctaattttacgtctttcagaatgtatccctgtcgttaaccagcacatgactatatttttaaatcaaagtgaacttaaaat

SEQ ID NO: 53697 - DNA, 2241 bp, Homo sapiens
actgcgagttcacagctgagataccgtgaacaaaaaggaaccactcttttgtattcctctctttcccaaggagtcagtgtactcctttgcaaagcaattttcacctacagagtcctaacaaatattagctatgtcctctgatttaagctactcaactcaatgccatgttttgttttcctttggggagtcaccaactagcttggacttgaaagacgtcttctgtgcaaggggaggcaaatcttgctggttggaagcagcagaatcaatctggcgccagtatcatctgaatctagcattctttgcacaaactctaatccaaatacaaacccaccagcttttactgctgaagtttaatattcacagcaaaaccacaacgtggcctcacgttaccaccaggcccggcttgagctttttactcgagctgggcttgggcgatctaaaacgagggacagggcctgcatttcctgggcggaatgttatttatagccagggccaggagaagccaaagccgacagctgctgcgccgcagcgcggggccgccgccatgcaagcagttgtcacaccgctcaccttcacagtcggcccctggccgccccccggcctcctggccctgcgtcagcaccgggtgagagaccaaaagcccggcgcaaaaggccaccacagcaactgggctcgcgcaccacatgctgggccagcagcttcaatcgcctccgccacccgcgcccaccgcccaccaagctgccaaagcgagctgagcagaattcgaggttggaaagaatctgccagtagttgccaggacaaatgacgcaactgaacacagagtttccattggctctcaaggaagggataggaagggggcggagtgtaggagccttttcccgtccctccccggttgcgcgtgcgcactgtgcagtttccgcggagcgcagagacgcgctgaagctactcgcggactgcgcgtgaagaaaggcggaaccttcacgctgattggcggcgacgcgggaggctgtagcggccgaccggacgcagggggctggcgggaacgtgaagctccgcggtgcctgatggggccgttgggcggccggtagctgttgctgttgggggaccccctcattcctgccgctgccgtccctgctgcctcatggcggccatcggagttcacctgggctgcacctcagcctgtgtggccgtctataaggtgaggggctgcggagctgggctagggcttcatgacggccacccggttttctggcgctgggtcatccacaggcttgagagcggcgtgtcgccggcctagggatgtcgtggagtggcgttgccgcgaggacactccggagcgaagggccgggcaggcccggcctcgcgcctggcgattcctccggaaagtcgtctactccgcggcggaggctcgcggcgatgtagacgcgcggggtcccagggcgtcatggcggcgggatgcccggaggggtcccagggacgacgtagctgcagggtgcccgggggggtcccggagacagcggggccgctgggtgtcccggggggtcccggggacggcggggctgcgagcattttgggggaggtcacggggacgtcctggcctctggatgccggaaggggtctcgctgacgtcagggcctcaggattcccgcgggtgggaggtcctgggaaagttgtggccgcgaggtacttggaggcggtggtctctgggacagcagggccgcagaacgcgctgagctgggcccgaacgtctaggtcccggaggggcggggaggctgcagtcgagctggggctgatggtcccgcaaagctgcctggctgtgaagccagttgatggtgcgtggtctacagaggtggcctttctggaagtgagagcctgacaggacttgtggcctttctctcatcagtggggaggcagaagaaacgataatcatgaactccgttgccactagtcccgcgtttaaatgtcaaatgacttgttaggaaaagccaaagggaataatactacttcatttgtagaaatgggaagaaaggggcccagcgcggtggcttacgcctgtaatcccagcactttgggaagccgaggcaggcggatcacgtgaggttaggagttctagaccagcctggctaacatggtgaaaccccgcctctactaaaaatactaaaaattagccgggaacgcctgtaatcccagctgctcaggaggctgaggcatgagaatggcttgaacccgggaggcggaagt

SEQ ID NO: 53698 - DNA, 2233 bp, Homo sapiens
tatttcataatggaatcaaataattaactattcctttaatggtctgcgttcatttccagtatttcaaatttatacatactgctttgaaacgtttatgtaattttttacatgaattttttaaggagatatcaaatggccttctgccagttttcgttatttgctctaagatttctgctttaggttgtttagaacaatcatggatgcagcgtcaagaatgggtgggggaggggggtggagaccaggtgggaggcccctggagtcgtcctgcagcttccttactaacgtgtccttctcctcccggcccccacccgccaccaggccgagctcaggagcttggcaacaacatgggaggggagctcgggtccccttacagacctacccaatcccaatttacattaaagttgagcccaggaggtctagtctgcagtgagccgtaatcgcgccactgcactccagcctgggtgacagagtgagacctcatctcttaaaaaattccaagtccagctcccccacccccgacgattcgtaagcccctttaagtgagaagcactgatgtggaccggtggtttccgctgtgccgcacattaggatcagctgggagctggatagcacaggccacaccccacaccaaccagtcggaatcccggcgactgccccaagccagcggaacctctccagccatgcccacgtgcagccgcttccgaagcccggagctctagagggagcggtgtcggggggagactaaccatggcccacggggctgcggtagctgcggaaccgtacccgacaggcagcgtccccggctccctaggtccccgctgcccgtgtcggatctcgcagtgtgcgagtgctgccgaagtaagacgtctccaaagcgcaaagtcctggccgacgtcttcccgagtgaaggcgccaaacgggcctggcgaagggaagggggcgccggacactgccgaggatccgggagcacgcgcgctcgccccgccccgctcctcgcgcttggggccgggcctagctttggggcgcaggcgcgctggccgccgcggcggggggtcggccgccagtgacgtcaggacgccgtgcgggttccgtcccccaacaagccccggcccccaagtcccgcgcgggccggccaggggcggggcgtcgggccagctgagctatcccgtcagaccgcgccagtttgaatgaaagctctacaagatggcggcggtcggggccgaggcgcgaggaggtgaggctggagcgcggccccctcgccttccctgttcccaggcaagctcccaaggcccgggcggcggggccgtcccgcgggccagccagatggcgacgtggcggttccccgcccgccgcgaccccaactccgggacgcacgctgcggacgcctatcctcccccaggccgctgacccgcctccctgcccggccggctcccgccgcggaggtgggcactgtccgagcctggggcacttcggaagtggagcgtggcctctccgcccgctcggcccggccccctccgcgtctcccgtggcggcctcgggcttcgaggccgctccccggcagtccccggttggaggtccggggggcacggctgcgactggctcctttgtggtggttcgagcgcggcgtgcggcatgcgcccgggcctttgaagtgggaggcgggaagcgacgcccgccggcgtgaacatgaccttaatatcagagggggagagtaaatcggggcgcctgtgtgctaagaaaggggataagcgaggaatcccccccaaggcggacacgctaggaggttgagtgcctcgttggagaatcgcccagaaagtgggtatttgaggttgcagcctctggcttacggtaactctttcacccaccgggagcttggtgttatttctgtggacgctggggaattgggcaccggggaactgggcaccgagcgcgcgtgggtgtgggcgtcggggggtgttggtgtcgcgcacgctttgagagcctggaacttttccgtgcgttccggaatgtaaaggtgttttcaagctcgtctcctctccgctgggattatgacctcattatccctgaatttttctccttggagaatgtcaggggttactgtgaaccagcggaaggtgtttgtggtggtcatgaactatttaattttgtcagtgaaatctttttctgcattactggagactgtcgagagattgtctttctttttttaaccacgtgtttgcagtttttcatgttc

SEQ ID NO: 53699 - DNA, 989 bp, Homo sapiens
cagtgcttgaccaagccggcccggggcgcaactggcaggcgccgttacgccgcgttgaccacatccgaaaatagatgaagcctttgagaggctgaagagcccgactgggacaaggcgtgtgctggccgccccctcgctggcttcccacaggctgcagctccttgctccagggccggccccctcctgtcctctctccagcccccagcgccccgggagcgggcgacgcgcagccctcactcacctttgtggcagtgggacaggaagtaggcgcgggccctcaggttctccctatcgaagcggtctatggagatagttggatactcggccatctgcccctcgaaagaactcatagcgccgccgatcccagagtccgggaccccaaaaccgcagctgaagccaaggccagccctgaccgcgccgccacttccgggaagccgcgcgctgcctcgccattgggcggccgaacgcagccacgtccaatcagaggagtccggagaccgggggcaaagtcaaggagcatccggtcgggttctaggcgcccgctgcttgggtttaaatcacccgcgcttcgctgcacgcgatgggccctgagccctgcccagtgcaaggctcattcccgcccaacaaacacaggtgttgctctggtaaggcgttgcccatgtctgtggaggtgcagtcgcgggaagggaaatcgaaactcccagagcaggtggccccagccgacgaggtgagtgggctgcggaactgcgcttagaaatcattcttcgttccgcttcctgcttgtctgctgctagcctgaaacccgagctcagttccccgccctctctcttctgttcccaatttctaaccttgtgggattaccgtgagggttgtatgagaaagtttgtatctgactcatggtagattcaggaactattaattccctcttccgtttatataatctacaaactgaataaatcatctctgcgtgatcttggggcaaataagat

SEQ ID NO: 53700 - DNA, 1834 bp, Homo sapiens
caaaaaaccgtatatcttgaatctgatcacttttcgcttagatagtactgtaatatagtaatagataatgctagaaaaaataattaaagctatagatatcatctattgtaggtttactgattgtcaggcactatggcgactctctggaatggttcattcctcgcaaatgaatagataggagatatctactatcaggaactacaaacacagtctccgtgctgtgatccgctttcacagggaattttgtctgggattcaagtagcggcaagtaaccctttttcgccctccatctctgctcaggggtgagccctggcagcgctcctacctgggacctacattggcttagtaagatgggccggcgcccaccccagccctcgcgcatgcgcataaaagcccactcccgggggcggggcctgagctagctgggcggggcctgaaggagccgggagctcctgcagcttcatcgcgttactaagagacgcgagggtcgcgaagggcacaacacttggcctctcgctggccctgctcgcggatcccgagtagagaacgcaagcacccacgcccgcctgcaagctcccgggcgcccccggcctctcctgctcggcggaacgaggataacccagtagagccggacccaggggtgggtggatgcgtcgctggaggcgagggccctgcccgccaacccctgcgccccggccgtagccccaccccggaagttcttgccccgccttctcggctccgcagttctctgctgtctcctgaggtttgccagggagatcccgtggttttcatgtctcttccgtgatttttagggaagagggtcactatttggcccttccagaatctcagggtccggttctcccggaagtttccgggccgccccggaccccattggctttaggggccgcgtctccgagggctccgatttgggccctagattttggaatactgtgttttgtccgtcccagccttcaccaggcggatttcatctcccacacagttagtgatttatggcagaaaggaagctggagggatggggactgcaggttagctgtgagggccggaagggagcggttttgtgctgcacacaggcaggtcagcactcccagagcagggaccgccgggcgtgctttcggaaccgcttttgtctttcaaatgaacgcccagcgacagcagacgggagttccaggaccttagagaccggctaatgcttctctttaagttaggaaacaggcgcaggcgtgttcatggccttgcctaaggttacgtgctggttacagggctcctcctgctgcctcttaagaacagaaataatctaataggaggaataaaagggactattagggaggctaatgctcttgaagttttaatactactaaaagtaaaagcgcttttcagagtgaaagggaagtgaaaagggaatttgggtggctggctacatcagaagcttctgttccaactttagattgtcagggagttgagatggtgttttttgtttttatttttgttttagttttttgagacggagtctcgctctgtagcccaggctggagtgcagtggcgggatctcggctcactgcaagctccgcctcccgggttcacgccattctcctgcctcagcctcccgagtagctgggaccacaggtgcccgccacgatgcccggctaattttttgtatttttagtagagacggggtttcactttgttggccaggatggtctcgatctcctgacctcgtgatccacccgcctcggtctcccaaagtgctgggattataggagtgagccaccgcgccgagatggtgtgtttttaaaataacgtgcccgaggccggg

SEQ ID NO: 53701 - DNA, 1938 bp, Homo sapiens
acagatccagattcctgagctttaaaatgttattcggccgcttcatcacttgtccccgactttgcagcgactccgatggtagcctgagtctccattgcttggagcagccacagtggacactggacgggatattctgtgcagctgttgctgaactcaaggcaactcttactgcctttctcttttcgggctcaagattccctgcattattgcccataggcatgtgttttaccccatactccttctcccttttatcttgattttcgcggtgctggggagtctgcagggattccatggcgacgggctcactgggacaggggctggggttgtgcgtccctgaggcaaggcaaatacagaaaagcgaatagagacagagggctaagattccaaagcactgaaaggtagaaactgggttagaagagagaggggagcacaaacgcccggagagagcgagccctcgggataccattggctataggctggcctccgaacaactggacggtccaagtcctgagcgtctggttacccgggcaaccgcatggtctcgcgatacatacctcgcgcctgcgcactgcccctgtagcgggggtggggggacccggtccggagactccaccccggggcctaaactcgagtctaaaagattgggcctcgttgtgtcgtttccgggtcgcgcgacgctgtgggccgctttcccctctccggagtgacctaacacaggataacgaaacctgcactgctccgagcgcttcctccccggcccgtcgcgtctgcgaggcgaggccgggaggcgagggctctgcgcacgcgcggcgcaggcgcactgggcgccggtgctgttgccttcaggtgaccacggattcgccatcgtgagttccaggtgggcgcgcggggcccacgtagggcaggaggccagccccggggggatcgggcccgggactctgcggaatctggaggccgaagcccgcgcgcacgcagggtctctgctgcttccccaacgcctgttgcgtggccgcaggacccgccgccctcccggttgggccgcccagtcccgggccgggcgcgtgcacccagagcttccgcgtttctagtccggctcctctgctggattgcagcgccggctgggcaccaggagtacaaagcgaaaacccccgccggcccttctgttctccacggtctccaaggagacacggacaacagaacaacacttccgtgtgctaaatagtaaagcaccaaggtactcgatccaggggcggcgtgcagtggggaggtgagctttgggtcggccgtcgcccctcggctaccggcgggatccagaaaccgggagtcaccaccaataccgttctcaactttacttccagctggtcactactgtgtcgggagattctaccttcttttccgactaacatgtatttttctccagtcctttctgcggcgtctctagtgcaggccaccgtcatttctaacctggacgactccaggagcgtctttgctgctcggggactcttcctttgcccagatccacaaagatctataacgtctttctaatcacgacacctctgctttagatgttaaagttgcttcacactggaacgcttgcaaaggtcttcattatctggtccttacccacctttcctagtttctcaccgctttctctagcatctctgccccagccacattgaacttatttgaacgtgtttttttttttttttttttttttgagacatagcagtcgcccaggctggagtgcagtggcgcgattccggctcactgcaacctccgcctgccgggttcaagcgattctcctgcctcagcctcccgagtagctgggactacaggcgcctgccaccacgcccggctaattttcgtatttttagtagagacgggtcaccacgttggtcaggctagtctcgatctactgacctcaagtgatccgcccgc

SEQ ID NO: 53702 - DNA, 1073 bp, Homo sapiens
acggagtctcacgctctgtcacccaggctggagtgcagtggctcgatctcggctcactgcaacctcacctctcaggttcaagcgattctcctgcctcagcctcccaagcagctgggactacaggcacacgccaccacgcccggctaatttttgtatttttagtagagatggggtttcactatgttggccagaatggtctcgatctcctgacctcatgatctgcccaccttggcctcccaaagtgctgggattacaggcgtgagccaccacgcccggcctcaggctctttcagagagcacagtgagtgcttgcacaaaactctgcttttgaagcaatccactgacctggtaaagatcaaagtacaaacttgcatgtttattgattcggcaactctgcttatggagaaatacatgtactagtcaccagtacattttaatattgctctgcacttaaacaaccaccacctgtcactgagctacagaagtgttgattccataaatgttcccagtgataccatgtaaggtgataccagtaaaaaaaatttccaaatggatcttttgttctgttacatggacaaatgtaccatcacttaagaaacagaaatgcagcaatttctctccacacaatagcaaagattttcttacatgactctgtaacttctacttagtccatagaaaaacagtcccttttctaagggtgaaaaaatacctcttcaagagacaggcaaaaatttgaaaattacaagaatgtgctctttgtagcctttcatccctcccacaaataggtcaacagtaaaaaaaggatgaagtttaacattctagctagaaacgtacaaatgtcacatgtggacttttgtcatcttttctgattatcgactacttcaatttcacttgagttgtgcttttattcttctttggaatggcagttccagaaatcattaaatattaacaaatgatgatgtcagagttctagaaataaaaatatccatctattgtagtactagtccaacctgaagggagggaagaaatggaatagtaagaaaaattagattgcaatgtagtacaatagatctg

SEQ ID NO: 53703 - DNA, 1230 bp, Homo sapiens
tcaaagccaatattcccgccagctcttggagattccccagttcttttttttttttttttaattcctcaaataacgtaataatacatggaacatgagactacttgaaatgagaagacagcgcagaggactgaatatggaaatcaatgacttttttcaatatgtaaaattactgagacattgtagaactttgataccatgcaaagaatattcttcgctgtaattcagaaagtggttagaagtttcaagagcccttcggttttgctgtatgtcaacacagggtggacaccattgaaaggtacaatcgacccttagaagtttataaacagcaactttggacttctgttccacttggaatctgaaatctgtggtgtggagcaataattttaacttgggaagcttactcatcgtacacagcacagaacagggtttgtttcatacaaacactgtcaagaaccctaaggaaacgaagttctgaagtccagctggaggcaggtgaaagtctttttgtctctgcttggaagtctcacagcacaatccaagatggccacagtttttgtaagctgtttatcttacatttgtttaacatcaaaatcataaaggtcctatcttaatgacacatacaaatttaacaaaatacttttccggttctcattattatatctttggatgacttcttttccttgggtgtcttttaagtccccaacattaaaaggagcaaatttctagcaaaatgaaattcatgtgtatctgaactccaacaacaccatctattagaagaccttacaatttaaataggaattgagatcacagcatatttcaactaataatgcttaactgtgcatcagtttagcttaaaatggcaaagtagagcccagtcttataaaaatagaactacaatgactataatgaatttgtcatggtactttttctttcttgatttaattttttgttccttgatttctttcctggtttctgagttaaatcttctaacagtaatatatcaaactcaaactattttgcaacagacatgaatcagcatctttgttccacatgacccaatgaccaaaatgaccaactccatgaagaagacttcagagtgatttattccctacctaattagctcatgggttgaccagcacacctctacatgaaatgtccctttgcgaaacattgatatcccaatgttcactatttaaatgctttctttcttcttcttcttctttttttttt

SEQ ID NO: 53704 - DNA, 1090 bp, Homo sapiens
ggtgaaaccccgtctctaccaaaaatataaaaaactagctgggtgtggtggcacgcgcctgtaatcccagctactcgggaggctgaggcaggagaactacttgaacctgggaggcagaggttgcagtgagccaagatcgtgccactgcactccagcctgggtgacagagtaaaactctgtctcaaaaacaaaaacaaaacaaaacagaagttgtaatactcaaacgtagaaatgagatagcttgatccaaggctgtgatatgagcctgtgatatgtgtccaagggcaaaggccagagatgagagacggagaaaacaatttctatgagcaaagtcaaaggtcaaagacaagttggtgaggctgtacaaatggcgcttttcaccaggaagcacaaaggtgaacgtggagtcctcaaacacaaaaggaaatgcacctcccagattcaaaagggagccagaggtcatggtccactctgggatggtagaggaaagaaacaaataaattttttaaaagcagagaaataccacagagctctgagaagttgtctacaagacaaggagcaagtggcagtgtctagaagggatggcttaaagctgggacaagcaggactggggtctctcctttgccaaaacgtatcttttccccttttccttaggaagtgacagcaaaaagtgaactcaagaagaaccctggggtctgatgagtccctgatacataaagtctgtggttttctcagagctattccctctcagaaccttccccagccttctgttatccctgaggatggggccaggcccaggacaaagtatgtacttgtcaaatcatgagttttaaagacaaatggctccttttaagcagtttttttcatttaccaataaagacactcatccccagaggggttaactgacttccaaagtccaagggagggttagtgaaggaagcttcttggttcctggtttaaaactcatctcaacacaccacactgccttcctaaaacttaactgagaaagatttttaaatattcatcaggaaatagtctggagaggtgatacatgtacaaggatattaacttcagccctgtgtactagcac

SEQ ID NO: 53705 - DNA, 1569 bp, Homo sapiens
attttataatgaattagaggtcagtcaaaagtccctttctataataaatcttaaagtagacaagtagaatgcaaatgatttacactttcaatgatcaatcatttcaagaatctctctacgaactgagtaaaccatctgtgactcaggcctccctatcatgttttttaagctgacccacttctccatcactcaccatggttcgaaaaatctcacttctaagggtgtagcaagaaccgctctgtgccagcgcatagtttgaatccaatagggtaaaagggtaatgtaaacagcactttaaaaggacaccagtttttatttaaaatgacccactgcctctaaaaagagagcatcaacaccggccttcacctgaagcaatccttttctccaacagaagagcaaatcaagtctgcagggttcgggggcaaagggaaaggattaagaaatccgatcaagtgtgaaaatgcgtggtgcatcgagttttggagatcaaataccagctttgcaaacaggatacggccaggtcagcgggagcccggttcaggggatcggccctgctctgaagagctctagggacaggcgaggcggtgcaaagcccagtatccccagcaggggccgggcccgggaccccctcggcgccagaactttgcgcagttcgccgcctgcggccccgacaccatcggggcacctccacgccgctccacccacgtctttgcccattcttttcgggtggcggctgcggagagggagtctgaagggacttaacaaggatggcagggagcagaggagggcgacctcctaccccaggctgcggccgccacaaagggaagggcgtagcgcctctcctcggcgcccaccggagccacccgcgggcgagggcaacaggcgcctcctgggccaggccgccggcggggatgggcgaggctggccgggggcgcgcggcaagtgacagtagcgtctccccgcccgggccccagcctccccgcccaccccgggcctcgcctccccgcgcactgcactctcccgcgagccgcgcgccccggacctcaccatgggctccgcgccacggagaagccatcgcggggcggagcggccgaagaacccccagtcctgggagccacccccgaacgggagaccgtggcgcgcgcggtccccgccctgtcgcgcccggtgcgccagcgcgccgcccctaccctttggcgtgctccgtctcctcctcattgtccccgtctatcccgcacgtgtcctggtcgtccagttccaggctctgctggctggccgcagactcgctgtcctccgccatcgcggcggcgctggctggggaggcggtgctcggggccgggccggagcggccgcagctccctctagtgcctcccgccgtactgcttggagtcggagcccgggcgctacgccccgccccgccccgcccgcgccccgtcccgccctccgtcccgccccctccccgccctccgtcccgccccgccctccatccccgcccctcaccgtccgcgcccagcccgccggccccgccctgcccgccggccccgccctgccccacgggcttgaaccccg

SEQ ID NO: 53706 - DNA, 625 bp, Homo sapiens
atcaaaatatctcatgtaacccataaatatatgtacctactatgtgcccacagaaattaaaaattaaaggaaataaagaaaattttcctcataaaatattaagggaaaaatccaaaaaatgtaaaaaatcaaccacgcaaaccctaaactcattaatgaaaaaataaactactactttgcctgaacttgatcaattcaggttaacaaatgttcaggagtgctgagctgcaaatccacacttcactaggttcagcttcctaaaggtcaaagttccagcaggaagctctccctagaaaccaagcttcaggaataaaaagccagaagaagggaaactgtaatttgggaagggtagttccatctgatctacagccaaaccagccactcgcaaaatctagaacaagcggcagttctctggtctcaggtcacagcaaaaaatccttgcaaaattggaactatttgctaaacttggcattgctctcactgaaaggtaagtgaaacaaacaaaaaaaaggtgatttttatatctagtttttccatttttaacaataataactactgtttaataaagtcccctggtatattagacatctgttttacacatattattttaaaaattctccctctt

SEQ ID NO: 53707 - DNA, 595 bp, Homo sapiens
tagccggcaatggattctgaaaataattcttctcttccctccctttccctttccttgtcttctctcttccatcctccctccttcctccaccctgtcgccagaaaagcttggtatttgacacttttaaatgtctagaatggtgcattcatctggccttttgaccgagtgagttggtctttccaaccagagctctaggttgaggaatgtctagctgggcttggggagaatgtcgggaaatggatgtgctcctgcagtgttctggaagtgcaaactggtgcaaccttcctggaaaacaatttagcaacgtctatgagtaagtcaccctttggccatactctcaaaggctcacaaagatagacgtgcaaggacactcattacaacattgtttaacagaatgtcaatgggacatttcatgttgtctccaaaatgaggctgcagccctaaagctgagaataagaggtgctaaatccccatatttaaaggaccacctatgagctggcaggagcagttcattgaccaatagtcccctctccttctccccatcttacaataatagaagtccaggcattagaaaatcactcaggttcaaggtgag

SEQ ID NO: 53708 - DNA, 3678 bp, Homo sapiens
cacacctggctaatttttgtatttttagtagagacagggtttcaccatgttgcccaggctggcctcgaactcctgacctcaggtgatccgtccaccttggtctccctaaatgctgggattacaggtgtgagccactgtgcccagcccagactaacttattcttaagacagtgaaggctgaagtttgtagttcagtctgcactggacctccctcaggtctctgaactctttgccacatgtggctgaaacattatttagcaagaggcatcccccactctgtgttgtgtggcctcttcagcaaagaggtgcctgacagtcccctctgaataatgacatagttttctctaacaaccagaatttgtctttcaaagatgtttatgctaatctcagctgtaagatctcagacagtcctaagagaaaggcatgttgaatccatccattacctatccccacaatcttctagggttccagggctttcatcctgagtgaaacctacactgcttgttcccttttttcattatttagtgtgagtgaagccaaaactcagtcattctccgaggtggagaaatttcatacagattttgatgtctgatattctatctgcttgcactgttaaatttctcaaatatgtatatttgttttctcagcaaaatcgtaaatttattggggaaatgaggaatcatagttcatctttccatgggaaggagccagctgccctgggatctcagcagcttcactggtgaagagggtgggaacactgtccccctgagcagaggctgcggctacaaggcttgttggtgacaaggacaaggataagtcaagacttccataaacttgaagcaaggaggtgaacaggaagctcctggtgaatttcctattcacatcttcaaaacttttattggccaagtgcagtggctcacacctttaatcctagcactttgggagactgaggcaggaagatcttttgaggccagaagttctacagcagcctgggcaaccatgtgaagctccatctctacgaaaaataaaaataaaataaaaattagccgactggtatggcatgcatctgtggtctcagatacttggggggttgatgcaggaggattacctgagcccaggagtttgagggtgcagtgagctgtgatcactcccctgccctccagcctgggtgacagagccagaccctgtctcagaaaagaaaaaccaaacttttttattggggcttgatattacttggaataaagaagccacaacaatatcatcactctgttattatctagactatcagcatactagcgatatgaatcataacaaaactataatacgattttatctatagagtcacacattgaaacaattgggagtaaccttatcaaaggaaacagataactgataatgatcacacttgtgaataatttcacaaagaatgtggtgacttcattcaccaaggatttctggaatcctgaattccaggtcagtggtaaagcctcagaggacagagggaggaaaaggattgagtcataccaaggcattttttaattattccaaaggtcattctcaagttaaaaaaatcacaacatcattgttattatgatggtattcctgaaaatcaagagattctaattcacacaagatattccatcatttgacagctgtcaccaagggtaaaatttttttttaaattattcagttgaaataattaaagtttggttgaaaaagtcaagatgttatatgggggtcagttcagccctatattttctaagtacgtcaatctgaagtttcaggcacaaagaatagacatccaaagaaattcaacttgcagccaggtgtggtggctcacacctgtcattccagcaatttgggaggctgaggtgggaggttgcttgaggccaggattttgagaccagcctgggcaacatatccattgatgctgtcttatcccggtgatgatctgaggggagctagctgcagtattatagaaaaatgacatctttaaaaaatgactatctttcatatgagatcctcaaaaatgctctatggccaagaattgtctctgttctctattgctacttgtctgaagatgtgcctcttcagcttttaccctttaatccagaaaaggcaaacctcatccctgagaaagaccttatattccttttcacttactcaagaaaaagaagaaaatttttctgtcctctgtccaggaaaaatgtaactgatcttcaatgcaatttgagcttttctctgtttccaagtagatattttttatttgccatcattatgccccatttatgggtctcatcatctcaaatgtgaaatttcccactgctgggcatctgatctcattttaaccttctctcttaccttctctggcctttgaagagtgactaatgtactaggactccaaaataaccaacctcggagagtagctatcaagttatttttctgaggctcgcaggatcatttaacattactattactgtgtttctggaagacatttataattatgttatactgtttataaaatggttagcattctgggaaacaaagcttttagctttccataatgaaagcagctctattgaataagcattgcaaagtggcagagagcaccgttcataaatgaagttactctgcttctttatttgtctgtgaaatgacagaagaaataacctcaccagttgactgtaaggaccacaggacacgtttagagcccttctggaaatgtgggaggtactaagtgttagccgtggttcccagccctggaattcatctctctaaggcagctgtgtggggtagagagaatactgcacttctgaacacagcatgtgagtttcagtgcaaatcctgggtcttcgccactgttttggtaagaatttatttcagtgtctttgaatgcaagtgtggattaacatcacctgccttagctatacagcagggtagctgtgagaatcataacacaataatgtaatatgaggccgggcgtggtggctcacgtggtggcttacgctggggctgtaatcccagcactttgggaggccgaggctggcagatcacctggggccaggagattgagaccagcccggccaacgtggtgaaactctgtctctactaaaaatacaaaaattagccaggcatggtggcacacgcctgtagtctcagctacttgggaggctgaggcaggagaatcacttgaacgtgggaggttgcagtgagccgagattgtgccactgcccaccagcctgggtgacagagcaagactgtgtctcaacaaaaaaggaatgtattatgaaagtggtgtgtaaaatgaaactctttagggagttattattatactttgtcttttacagttggttccctggttttgaacctgccttggcaaaaactataacaggaaatgatgacagtgaaagagatctgatccaaccaacccccattttgcttttagcttccaagctgcccatagttattcctgggtttgggccaagctaactttgggagagacttagtttacagtttcaatgataacagccctttccccaaactaaagcacctttgtaaagctaatgaaagacaatcaggttaggagactgataggaagctgagttctgctagggtgtagacagaaatggttaccagccattgttccggaggccacaagatgtacaacttccccaatcac

SEQ ID NO: 53709 - DNA, 634 bp, Homo sapiens
cagccctaaacatggacatgcaaatgaactcgcccagatgtcatggcttcattattctggcctaagactaggacttctctttacatatccccttgaggagtgatttaactgccattacccttttctctagcccccattcccctttcaaatgagaaatagaaaaacagaaaacatcctctaaccttgggtttttgaccttggctctgggatgaaagaggagataccatcatctccttgcatgccatttactggctgggaaatactccagcatcactgctgctctgggaatcaggagatctgagggtaaatgatttacaaaaacttcaatgaatgaaacatttggtggttaaccgctaaagttattaaccttacttttgtttataatctgcaggaatggttaactaaaattaacccaactcaacatgtgcttgcagaacattcacgctatattgaaagaagccaaacaaaagaaagatttccaatcctcaacatgggtttcccaaactgccttcataggacatcaatagctcctagagcagggggaaagggtgtacaaacacatctgagggaccctgagttaaacaaagatccttttcttggaggtggcacctctcagagatttcaatacaccgat

SEQ ID NO: 53710 - DNA, 771 bp, Homo sapiens
aacagtgttctcattactttgtaagaagaaatataatttaataaacttacatgaacaaatgctgctttcaaaaatctgtttaataagtgtgcacaaaagaaaaggttttctggtattaaataaccacaatccgaaactgccttatcaggattttcaaatagaagaaaaacaaaacatgggccaagggagattattaaattttaaacagcaatgaaacattttacaaatagtgtgcttctatttagcaataatgtcgagatttgacaaataaagatgctgaacttgtttgattcacagcctgaaagtgacaggggactttcagccttcttcattttcaggctagactccagaacacattctttgtgcgttaggttcacttttcagcagaggcaaacagtgtgtacaatcacactttatctttgtttccatgaaaatggagtaaaaatgtgtgtatactgatgccctgctttttttctaatacagattaaaaagggaaagaggaagtaggaatacatccttaagattgataataaagatgaggctcatttttatcttctacctagagtcaagtttctgacttgtctaagctttcattatttaccttgcaaagaattcttttaatccctgcaagtgacctcagatttttttttaacccaataatcaggaacttaatacagcatgtggtgtcagaggtccttatgagtgacaactgtgaaatgtttgatttatacacaagtcaacaatgttgtattctgagagagaagagaataa

SEQ ID NO: 53711 - DNA, 1674 bp, Homo sapiens
tcccctcaaaaaacgctgattttaaaaacaaaagacaggctcgtggccattctcagaggcgaccacgttactcccagggctggaaagcagatttgtggaggccaaagacgagacaaaaggcacgagctggcgacaaactgatctggaaaggatttttcttttttttttttttttttttggtgagcgatgagggcctcccagttcaattctttcttcccttacagagaagactcatgggccgctgagcaaatcccttatggtctggaagagacgtcagataggcagggggagagaaccccccaaactttcccaaactgcggcaggctagtggctagtggcggcagcggacctcggggccccgggacacagggggcaccccggggcgtcagccaccccctcccgccacaacaaaaggccccagcgcagcccaggagctgggacttcccagacccgagcccggcgtggggagccgggagcgcgatcgggcggcgcgccctgggcggcccctctgtccgcggcgacatgggagacagagccgcgtgtccgaggcgcggcataaaggggacccccgggcgcatccagacgagcccccgccgcagcggcgacagcagctggagctgcccgcgcccccgcccgacccagcccccgatccccggcccccgaagcctccgcccgggtcaccccgcgtcgccggcccgcgccgccccctcgggagcgcgttgcgggtgctgcaggcccggaggctcccgatgcggctcgggctgcgtcgccaccacgcggcccgggaccctcccgccgccgccgccgccgccgccgcctccgcgccaggcccggcgcgacacaaagcccccggccccgccgccgcccactgaccttgggctccggcgccgggctcccgcagcgtcttggtcaccgccttccagacgtggcagcccagcaggcacagcagcagcgtcgcggacctgctcatctccgccgcggggccggcggcggctcgggctcgccgagagcgggccgggcggcggcgcgtcacgggcggccgggcgccgcgcccccctccatgtcgctggctccgcgcgccgggcccgccgcccgattggcccggccccgccgccccggccgctccctcccgcgccccgcgccgggtttccccgaagagccgcggcggcggcggcggcggcggctgctgctgctccgccagctccttaaccccttcctgcctcgcccgccgccgccgccgctgcccgcgcccaggccccgggcccgtggtgccacctggcggctgcggcgccgagggcgcccccgcccggcgccgctgcgtcgcgcccccagcccgacccccggcgacactgccccggcgcgccccatccccgcagccccgcagaagagccagacctgcctttcagggcggagcccttttcatcacaccaggtcacccaaggggccgcaggagacattgtatctgggtgtgacccccccaccaggtgccatcctaatgtagttgtgtcccccaacgtagatttcacacccagtgttaaagatccgcaaaaacactccccaagccagtatagactgcagtaggcctgcagtacctacgtgttggcgggtggacagcttcaggaggaatggtacttggatggttctaggggttagggtggggaggaaatccacatc

SEQ ID NO: 53712 - DNA, 634 bp, Homo sapiens
gtatgtaagtgtcctgttatttgactcttcatgatagaaggtaggttcaaagtttcacagtatgaacagtctctttaaaatgtataaaaagctgtatttgtactctgctctcaaggttacataatctgtgaacattactataccaaaaacttgagaacacgattgtgtgtgtgtgactgagaaaaaaaaagtttaatactaaacaaacagaatagacttatgaaacccaacacgttcacaccactcaattccactctcatatgaagacagaaactttaacttaaaaatgacgaatcttagcaatacaatttgctgcattttcctttttcttacagactgcctataattggggaattccaagtggctgtttgtggcagtcaggccaaaaattctttcctaatcagccagcagcccctgcttcaaccaccaccctggccctgtggaatttattcttatcactaggagggaagtggaaaataggtactcttttgtatccatggacagagaaactagtatttttgtcctatgatgggagggatgagttagatgtgctaatgtggcaatgttgagccagtaaagtaggaaggatggtttgggaacagcagagaagaataaaagaaaaggaacaaagaaa

SEQ ID NO: 53713 - DNA, 496 bp, Homo sapiens
gtaacagataaagaaggaaacaaagctatcaaagaaaacaaaacaaaataagaatcgtgagacattatagaaagaaaactcacacagtgatttttcaaaaaaaaaatcaagaaatggaatcaaggtcaaaaacagcttccagaaggggttaaggggtcaagtgctacacggaaggatcaaaggaaacacaatttggaagaaaggacagcatttcacaaccagaacattattgataatctctgtagtccaaaagagcagaggtgaaactgcttaagcaacgagtgagtgctgaggaaacagaaattaactcattttcaacgtaaaagatttttattctaagaatttaaaaacaccatcaggaataaaattactcatcactgcaggaaaaacagcactgaacaacattaatcaaaggcagaaaaatcatcttcttgaacacacctttgtcagtaatacagaatacagaaaaagcaatactccaaatttatttccccac

SEQ ID NO: 53714 - DNA, 2253 bp, Homo sapiens
gaatattatcttattctactttgtaaaatgtttaataaatgttaactgattacaatggaagtaaattttttcttagtctttcacagtattttagagctgcttactattagaataagtaagtcaaagtgggaagtgttaaaataaaatctccctctaagaagcccaagattaggtaactgacataattgaatgtgaaaaaaaagagcccaagtcattacatgtagggtttgggaactcaaaggaagataatgaaaacagaggtatattaggaatcgagagacctggaatccactcccagttctatcgatttgtgcaactttggcccagtcatttacctttacaactaatttttttcgcctgcaaagcaacagtgagggactaaatatcccaacttaacaatacatcgtaattgtaattttaccagctcttaaaacaaacatgtgggagggagggagagattacgtaaatcctgaatttttgttacaaaatacacgttttgaaataggggtttatatttactatgccaaaattccgcccaatctatttcgggaacaggtgttccctaaatagatgttttaataataatagtgttttacatacataaattattgatccttctgactcaaggttatgttttaacctcatcatcatctttcctaagtcacctttaggaatgtgtcagttgtttgcctatccaaacttaagaattagggatagttactagtataaagcgcccagcctgttacagtgcaagaattcaataaatgcttattttatttcattattatttgtactaagactcttcatgtaagtaaaagtcctgtctgggttacaagcataccggccgaggaagtactatgatccatattccttttttaaccgtgacagataataaaccatataaaaaacggggatactttgggccaagagtacactttttagcaaataacagtgtttatacacagactaccacgcctaaccacataatgacaatacaaacaaaaaactgctttttggaattagccacttggactttcccttggacgtccctccttctcaccaaaaatagaccaaccaccaccaatagacagctctgttagggggtaaagatgcggaaggccacagcaccccttgagaaagtgacaccggggcacggggcgcatcttccgtgtcacgccctgcaacccagcaaggggccaccctctcctcctccccagccgaagggcagcccggaggatggaaagagcgctgcgggtatttagtggcagctgtaaccattctcctactcaaactctccccaccaaggcaaggcagggcgtgtctagaaagtccagcttcagcgctgagcacggcgactggggcagagagcggggcacgcgaggggctggagcgagaggcgtcacaggcggactctcgcagggcaaaagaagcagcggctgcaagtgtgagagccccgccagggtaccttgcgtccagcggcagaaaatggtgtccgagagaccggggctgctcttggtgccccacaccagctccatcagctctttagtcagttcggacatgatgaggaaccggcgggcggatcttcgctttgcggactcctgccccggaacatggggaaggggcaactccggaaacagcagctgcgggacggcggcggcaaacgaattggaaggtgaggcaggaaagaagaaggggctgagagccacttgcagagaccaagcctgtcaagccaggttggggcagcagcgagttttccgtaccggaagtgctggtgccacttccgactcctctttaactcccgccccttaaggctgagggcccggaagtcccctccccggaagtgaaattggaggcggaaacaggcacggaaagcggtggaagtagcttctgacctttctgaactgtctgggaccctttggtggggtggtagtttttgtattgggaaggggcgtcggcgtgtttctaaactccaggaataccttcttcctctacgcactgctctgggctaagctggaggctctgaggcccaggcactaggaattagaacatatgcccattgcttgtatttttcaatattaattttgcaaaactagaactataaggcaatagttgagtcacagtgcggtaacatccgtgcctttgtagggcgcttctcataagctggaggctgtccgcctctgtacttcaataaatcaaagtcagaccaactattacctaaaaacatggcaaagaatgtggcataatgtgcattag

SEQ ID NO: 53715 - DNA, 808 bp, Homo sapiens
acaaacttaaatacaatttaatgaattttgaaagtgaaattttagagccatctgaaactacccttagtccatcaagttctttggcaaagaaatagatgtgttaaagaaaccttactaaacttacctattaaaaggcttcttttaataaggaaccttattttaaaagagtgcaaaggttcaaaacaactgtaagctaatgtttatgtccattttttggacttgtacatgactttctgcaccttggctccaccagtggttttaacctagcccaaatggttgacctttatttgaaaagtacacaatcatctacagaagttcttgattcagagatgactcattgatgactgctgttcatgagcactgaccggtacagatggacacctgctttatgattaacctttgtcatggtctcagttgacgtggagactgagaaaatgattaatgagtcaagcatttgttttctcctttgcttcttatagtgtctgcaccaagggagaatgctatcacaaccagaatgtagacaaatgatgaacggatgttgctgagttatgacaacaacattttgcaggaactactgaagctatgggaaaatgaatatgaaacagaaattaagttttagaaagaaaaagaatcaaaaataaaagaaagaggaggccaggcatggtggctcacacctgtaatcccagcactttgggaggctgaggtgggcagatcacctgatgtcagcagtttgagaccagcctgaccaacagggtgaaacaccgtctctaccaaaaatacaaaattagcccagagtggtggcacatgc

SEQ ID NO: 53716 - DNA, 977 bp, Homo sapiens
agggtgtggccaggcaaaaacgcggggaacggccccggaccagggtggggcgtggcaagggtttgaagggcgtgtcctacgaagaggtagggcttggcaaggacccacggggcgtgtcctaggactcggtgagggcgtgacctcgggccaggggcggggagagaaccagagggcgaagtgggagggcacaggggagactaaaaaggccagggaagttggcctgccggaagttcccagggagaaggcagcgcgttgtacccgaggtaaggcttcttggagtcagagcaggagccggaactgtgggcccagtaggaagagtggggcccgacggcggaggccgcgcggccagggttcgctgcagagctccacgcgagggtcctgccggaaggaaggattttctagccgctgcgcttgggccctgccgcctctccttaagtgcttgagggacgttgcaaagagcgccagtcccgtgtggcgccagctccctgtggctcgacagcaatgcccgggggcgtcatcgggtagctgtgctaagcctcctttaataagcttttttttttttttttttttagattcagggtctggctctgcttcccaggctagagtgcatttggcgcgatcacagctcactgcagcctcgacctcctgagctcaagcgaacttcctgcctcagcctcctgagcttcctgagtagctgcgactacaggcacgtgccaccatgtccggttatttttgtattttttgtagagagtgtctcgccatgttgcccaggctggtttcgaactcctgggctcaatcagtctgctgcctcggcctcccaaagtgctggcattacaggtctatattttttgacagtttataaaagccaattaccagcggtcatatgtctgagtcctgtgcactcttgcttaatccactctgcagccctgtgaaggattctagtgataacgacaaagctaaggtacagaaaaattagg

SEQ ID NO: 53717 - DNA, 1053 bp, Homo sapiens
cctgcatcagcctcccaactagctggaaatataggcatgcaccaccacgcccagctaatttttttgtatttttggtagagacggggtttcatcatgttgatcaggctgctcttgaactcctgacctcaggtgatccacctgcctcagcctcccggcatgagccaccacgcccggcccttaataacacttttataacaaaaggcttctcattcatagacatcatctcttaaaaaaaagaaaaagaaaaaagaataagaaaaataaaatatctggttccatttggcataaactggctctgtggttgtacctattttgtcaaaacaataaccacctgagtacaaatacctctgtgcctgctcagcgtgagagctgtgaatgttagccatttccctgtctccttccaggcaggtatgtccacgtgacttgtttggctaacgaaacgcaagtggagtgacctgtgtcacttccaggtaaaactgtgttaaaagccagtgaaagatttgtcacaatcactttccctctgccgcagtgaccatccagatagaggcagtggtctcagcctgggtcatagaggacagtgagcggagccccctgccttcctgtgttagacgtattcgatgagctagaaataaacttttgttgtggtcagaccctgagattcggggatttgagtgttactgtggcctagcctggtcaagcctgcgtaatgaatattatcagataagctgcatgtatgcggggatttctggctctggtttaccagataccttgggagctgtggggagggccctgaaagaggcttgtcctatgaatcatgctccttttactgtgtgggagatggcaggtgtgctgttcccatcatgctccagtctgctttgtgattttaatcaagagtggcaaaaatggcgtttagatgtttaattgcattctgtaagggcagaccatgttaaagtgtaaaataggtaaaggctgtatgcctggaagggataagaatcaaggctttcatttttactttgaaaaacacaatttatatatttttaacaattttcagtg

SEQ ID NO: 53718 - DNA, 1844 bp, Homo sapiens
aggtgacaaaagcctgaaccaagttcggagaataaatactcagaagaatgtaaagattcaagaaatgcttaaaacgctccaggcacaagaatgcttattaaccatggaacttttctgtgtcatttgttcatggacaaagactgtattaggagacaggaagaaggactcaaaattaattttcaatttataattaaagtgactattaagcaaactgtggaaaatccacctcaatgccatacagcagagacaaccgatgaggcacagctgtctgtgtgattctcatcgtggactctcaggatcgttttccaggtggaacagaacaaatcctactgcaaaccctctgcgcgaagcccctgacaagtgaggtttacaagcaggggctggggtctaaaccagtacaatcgctcacagcaggaccagcagtgaattggcaaacttagaaagccttccagctcatccacgggagagtcctgcccgagaactcacagaggccgttgacatccagcatgttggagatgccccggtcactcatgtccacctcgggctggttcttctcccggctctcctccaccaacttcttcagagacttggacatggtctgcaccgaacaacaacaaagcacgtgggcgatgacagcaagcgcagaggcggaaaggcaagaggccttcgctgccactctgaggcttccccagggttggagcgggtgggcgtccgagggcgtcccaggggctggtccgggtgcggggaggggatggagtgggaagggttcagccccgctgcggccacgcagcgagaagcaaccccaagtgcaacaccgcacacactcaccacggaaggtagcccctaagacgatgggcgtgcaaccacaagcttcggcagaacgcactccagctgccctcactccctgcaacaccggcactgaacagcgaacacgccctgtctcggcgccccgcgcaggcgcacacagcgccgctgccagctccacgcccgaccctacccatattaggagaacagctctccagacgtgtctccagggccaggctccgcccttaaaagtctgtggaagaggctggctaatcacgttcgttattcggcttcgagaccccgccccacgctgaggatagtttatcccggtggcgtccaccccacggtttgggacgctgattgggccgaagttggcgcgtgcgcagtagacttggcgcaagctcagttgatgggtcgaagcccagagggctgtgggcggaagtggggaagtttgtggcgtgactgtgtaagggagggtggtggctcagggtgggtgttgcgaaagctggaagtaaattgcttccgaatgtttcgcttgtgtaatagccgctccactcgccagaagttgctaccctgagcccgtctccacaatgtgcctctgagggaccttgtggggcacgcagtttcccgccctattaagagcttctccaggcggggattccggcgcggtctgcgtttccccagcgccctgctggaaatcttttttgacaggtttctaaggctggcttttagcctttttacttgtagctagaacctacaagtaaaaccctactattttaaaagtcatttgaaaacaccactaaagcgatgtgtctttcccaactaggacttttacatttgtgaaacatgacgttctggcttccaggaatctcttgctttctcttccaaaagcaaccaaattttaaattctagagaaactgttgccctctgcctccctatttcctgacccagtctcagtcacccagcaacatcctgtgcttctctcaccaaaaaccctgtcctgagagactattttatactatggaataaaaattggcacc

SEQ ID NO: 53719 - DNA, 2483 bp, Homo sapiens
atgaaaaatccaccacagtttgatgatagccctgaattaaatgttactagctgttatatgcagttcatttagagcgtttctaagagctaacctagacatggcaaaagcaatggattctaagacgggactcagttgtttagtctgactttcaaaccaatcagctatgtattcttgggaggataaattcaacatcctagacttctatctccctcatttaaaaattaaggtaactggaatagatttgtgcttcaaactttcttgacataccctaaaaaatacatttacgttagccacccatgcgcggagatactacaaacagttctcatgaagcggcaccttactttgtatgataaactctgatactttctctcctattcctttctatcctactccatacttttagcaatcacaagtagcaaccgaataaattaatttcatgactcacgaatgagtcatgaattgcagtttgaaaagcactggactagatgttacataggttttcctctaatattaaagttgaaaatgaatccggtacatttatctgtccctgtttatacttttaaagttccctcttagcaggattatatattaatgtatatgcaatacatgttaatagaatataaaattttactttaaattgataacattagtcaattatagtctctcaggattcaaatattttgtagtttgaatgagcaaaatctaatacgttaaattaaagcttagtcttgtagtttctaagaacttcgtaagagttttaacctgttaaacctgtacttgttagttcttttctttctgttttcccaggcacatctggataaaggcagaaacaaagtaacaagggaggaagtcccagtaatcacaagaaaccaatcttttttctcccaaacacatattttggggctgacatcatagccacatggcacaaactacagatggaaaagtatctgaactcaaatccggaaacttaacctttatcagatgaagacaagaaagacttcagcaggcaaactcacacctgttgggctgaggagctagaaatcaacaaccaaataccaacattactgctctggaaataacttctgttagaacaataaagtaagatgagggcaaatgactgagcttcccttgatgcttttccctgatgctattttattctgcagaaaatatccaacatacgatgacacctgaaaagaatgagtcctagcatctctgtgtttccacaccagcagctcactctgactctggctgccttctaggtctagccactgccttaaagtactagcccaccacctggtgtcaccagcccaacaccagctcagtctcctgacaccagcccttccctaaaaaatgctgcaggaccccccctcagcaatgcatgagagccgatctctcaggtcttgatctatgggaaactgtgacaggctccagaattataaacagaaggtgtgttgtgtcttcctggatctcgtcatctgattgctatttagaatggcttgactgtgttagtcagacctatgagttcatccaacaacaagcgggcacagtgaccagccgggctcagcccagggacagaaagcaaacactccctcgtctgtgatttcagccttatgcagaccaaatagaggccaaagtaatgattatcacacagggaagccagctggagaatcttttgagtttctatgaaaacatcgtctccccttcacttttattgcttgctttttcttctctctttctttatagtttcctttcctgtccagtttgcttctatctcttttcctgactcatttttattttacgtgtatcttatctttctgaaaacttttagaattaaaatctaatatcctccctgcccaattattttaactgctctgggttctttctgcacaaaatattgccttacaagctaggatggtaatagaattgttttacaaaggtatgtcttactttgcatatcattacaaagatttccacattttcaggaggccctgcctgtattatatgttatctaagatacagccagtttattcatgcaccaaattaaaattatgttcatagatgattaaagccagaagtcatctctcgaagattaccaaatccaattccttaattttacagatgagaaaactgtggcctagagagttcaagtgacttgctccaaatcctgatctaatattcagtgtgctttggggccaaacataccagacagataaaactacaacagcatgaaaaattgtgtgcaccctataatttcttaagaaaccaattttggtcactggatgttaaccacctgaatgaagtccagtgaatacgtcaatcacacaccatagcctattgtaactgccagggattccatttcgcatgtgcttgcacttgagctggataatgaactgctcctgcagaggttcctacctgggagaaaagtattgattgattctctcacactcaggattctggagcaaatctaaagccatgcttttgaa

SEQ ID NO: 53720 - DNA, 509 bp, Homo sapiens
gtctcttaatatcaatgagaaaaataattcaaattacaaatcaacgatgttaacttggaatcgtcagccagcaatgcaaatttactgactggagtctcgggagaaaatcactctgctgtgctccaagtggtggattgagtaaatacaatgttggtgaatcacaacttattatctggtaagcctagcactataaattcttgtgttatcaggtcatcaaacagcattttcaaaggtcagatgtgtataagccaaaggtaatggagttagttcaagaaggtaaagggagagatcagcaaatccattcatcatctgtccaattggacctgccatgaagcacaggcaacgtgggctacactgataactctgaatgctctctaggattatataaccccacacgcaatccagtgtccacacctcacagtctatgatcattattattatcttacaaagggcaatatgtcttctatccataaaaagcgtagttatataatataatacagtggcatttc

SEQ ID NO: 53721 - DNA, 1655 bp, Homo sapiens
tcttagtaatttaagaataaacatgcaccttcaaagcctgtttgtcattctgtatccccagctcctagcacaaaatctggcacagaataggagctcaataaataattttgagtgaatatcaccaaaagtaaaactttcagttccaactcagcatgaaagaaatcaaaaacctcaaaatcaaagacgtgcataaaagtaatagtttgcttgataatatctcgtgatgtcgttttaaagtaatagtgataataatgtataatatttggagtggttacaatgtatcaggcactaacaagcacttgacagactttaatccttataataatcattctcttttaaaaccaggaaacaggttcatcactgttcacgaagtagcccaacgtcacactgccaccaagctggaactcagttctctggcatctaaacgcagaactacagaagacacgtttctttccaacgatcagacgtccaagttcttcaagcttcctctaccatcctatttagcattcgcaaacttctaccttgaattgtagctattatcccttccaagatccatctctcaccaggggagcccctgacactccctccctccccagctgggaagccccccaggatgaaggaccgagtctccatgcttctcggtggctgcacacttagaatgggggcttggcaccaggcgagggtctcgcccctttgataccctttgaggttgatttactgccttgcgaatcccgactcccaactgggccctttgaggcgccatgtgcggcccctcgagccagactcggcgccaggagaagggagtcagcgtctggaggggtggacacggcggcgcgcaggagctgtttccaggacaaccgagggccgccccacagtgtccgccccacagtgtccgccccttgcgtctcgccgctccgccccttcccggcgcgggtgctccaaccagcccccgtgagcgaatagagagaggggtgctagatggactctcacctctcagcgcgtggtgcatgccgcccacgccgctgtatagctccagcacccgcaggggctccatccccgcgcctcagccgccgcagccccggagctaggcctgccggtccgtcgctcctcctccctccatcgcgccgctccctcagcctctggttccgcggcgtttcagttcccccgtctcctaccgctccaggctcagggcttcagagggcctcgcggcctggggattggcaagggtctagaggggaacaaaggacggaaaacaataaggcttcccgaatgaatggcagccactctgtagcctgatttacgctccatttccttctttggtgtcaggggccttgattggaaaagaaatccagagttcagtaaaggggagaaaactgccttggtttccaagtgaattaacactggttagaagccagaaaaaaatcatttttcagacaagctgcttttctgtcacttagaagcctgaacattcaaacattctttccacagtgtgccttgtttcctgcctgccctgggtcaatagagagaaattagaccagcctctcccctagagaagattccagaattataagtaaggacacaagtccactcgcagcagagaaagccctgtgtgcgtgctgataatacagaggatgtttgttgtgtctattagtggg

SEQ ID NO: 53722 - DNA, 1016 bp, Homo sapiens
tatggcgcctctccaaaggctgcagaagtttcttgctaacaaaaagtccgcacattcgagcaaagacaggctttagcgagttattaaaaacttaggggcgctcttgtcccccacagggcccgaccgcacacagcaaggcgatggcccagctgtaagttggtagcactgagaactagcagcgcgcgcggagcccgctgagacttgaatcaatctggtctaacggtttcccctaaaccgctaggagccctcaatcggcgggacagcagggcgcggtgagtcaccgccggtgactaagcgaccccacccctctccctcgggctttcctctgccaccgccgtctcgcaactcccgccgtccgaagctggactgagcccgttaggtccctcgacagaacctcccctccccccaacatctctccgccaaggcaagtcgatggacagaggcgcgggccggagcagcccccctttccaagcgggcggcgcgcgaggctgcggcgaggcctgagccctgcgttcctgcgctgtgcgcgcccccaccccgcgttccaatctcaggcgctctttgtttctttctccgcgacttcagatctgagggattccttactctttcctcttcccgctcctttgcccgcgggtctccccgcctgaccgcagccccgagaccgccgcgcacctcctcccacgcccctttggcgtggtgccaccggacccctctggttcagtcccaggcggacccccccctcaccgcgcgaccccgcctttttcagcaccccagggtgagcccagctcagactatcatccggaaagcccccaaaagtcccagcccagcgctgaagtaacgggaccatgcccagtcccaggccccggagcaggaaggctcgagggcgcccccaccccacccgcccaccctccccgcttctcgctaggtccctattggctggcgcgctccgcggctgggatggcagtgggaggggaccctctttcctaacggggttataaaaacagcgccctcggcgg

SEQ ID NO: 53723 - DNA, 1451 bp, Homo sapiens
aacttttcctcgcgtttacataagttaatacttcgagtgataatgggaaaataacttttttaaaaggcagtgcaattgagaaatggaaaagcattttcccaacaggttttgagaagcagttgacacaaaagtcactttgagagctctgcgaagagcgacagtcattgtgtaaccttaacttgcaaagtcatactcaaagccaaaaatcaaggtccagcttatcagccacggagcctgaggccataaagatgctgggcaggagctccacgctgggataagtggggtggttatttcaaaatcgtcccaagtgacaagctctaggacgtgctgtgctttaaaaaaaaaaaaaaaaaaaagtcgcggtgaaattaacaggggcgaaaactctgcccagcgatcgcagcatgaagctctgcgctcccgagaccatcgagtggccagggctgggcgctccttcaacagcagcgaaggcagcggcgccggggcagcagccacctcccccgcgggccggcaccgcattcctgcccggttctatacttaacctccggccagcgccccgccgtgcaccgtattaggcaatgccaggcgcgcagggcccggcccccccgcccgctccattcaaccccggcggtggccgcggcgacagctcccttcccccacggccgctgcccgcaccccccgcgccccttacaccccggcccgcgccccctgaacccggaacctccgcggaccgcggcgcggggagggcccgagggtgccccgcggcgcgcgtaccccgcggtcatggcgatgtcgtagaaggtgagccaggcggtggccaagacccccaggcgcctccgctcgccgggagcctcccggtcctcgccggcctccgaggcgccgccgttggtgccgtcctcgtcgctggacgccatggtggccgcgcacctgggggacgtgggagacagcggcaggagcgtgggaggggaccctgcccagcctgcagcccgagagccgctgcccgctgccgccgcttccgtcaggcgccccatgtgcagcgcgcagggggctcggcgcagccagctctaccgaccgcgagggggaggagcggacgcccccggccaccgcccgtcacgcccccgccccgccccgccccttgggagcgcgcgccactcgggggccagaacgcctggccctggcactggggatccaggacccgcgagccccggcacgctttccaggcggcgctgtagtttccgctcccgaggaaagtgcacccgcctcgctagctgcgggcgcctcttcatagagagacgcccagacgccttgcgccctggcgatgcgcaccctgcgagtgcatttagtggggacacagggaacgcacctgaacttggcgtggctctgccctgcctggccttttgtaaggcagtttctcaatacgcaggcagggagcgggatcttcccgccactca

SEQ ID NO: 53724 - DNA, 3702 bp, Homo sapiens
tacacttcatccaacagtatgtgagtgtctgactcctcacatccctgattctttgcaatttttttctttttttgagacggagtttcgctcccgggttcaaacgattcccagcctcagcctcccgaatagctgggattacaagcgcgcaccaccacgcccggctaattttttgtacttttagtagagacggggtttcaccatggccaggctggtcttgaactcctgacctcaggtgatctgccggcctcggcctcccagagtgctgggattacaggcgtgagccaccgcgcccggccgattctttgtaatttttacctaaatgacaaaacattatctaactgctactttaatttgcacatttcacttttagaggtgggacttcatttttaatgaatttttaagcactctttgattactatgtattaatcctgtgttgacatgtcaatattagtttccacgctacatttggagatgccgtaatttgcgggataatttccatttacgtacaagatgtgcttactaagtttgttccaagtgggacgcaacatctctagtagatgctccttaaaacttctccatcacacagagaataatttttattggttaactaaacttataagtaaaataaataaaccaacattttgggttgctaggaatcactcactgatcaacttttagctccagtttttttctgttttcttttttttgctcagtctagggaggctatcttgggctgtgaaagacatgtcaccaaccatcacagctgctgagtgattgcacggttagtcagtaggtgccaacgccctgctagaagagctgtctgcagattccaaagccgggcgttcagggactcccgggaaggagccagcgttacctcagcctctccgagggacacgcgcgccctgaacactcccctcttgggattcaggccaattcgttcagctcccatgacttcatccgagcaagtttgtcacctcacgcagctaattaaactgtttacctagaagatgatccaaaggaatttccatttccttccagagggaatacaaggttatgataaccgagagagcgagaggaaaaaaggcgcacagctcgacccgaactcaacctgctttctttctcctggctctcccagtcactcctggggttgttagtaggcttcagcacgcctgaaggaccccgtcctacggagactcctagccaagggaaaagcagaaaacacaagaactaattccactcttatgtgtgactaattaaaagaggagtcaggcagaggggactccctgttcagcctttaccgatggggcaggctcggggcagctttgagacaggcagcgccaaggtcgcccagattcccgacaagctccgcgcgggggcttcctcggctccttgctgttgccgccgccgcagctgctgccgcggttggtggggttgggtgagaggaggagctgtcgcggaccctgtagagtcggtctctgttgctctttttgcctgaggagtcttccatcctacgtcgagctctgactcccgtgctgtcgagagggagtccccggggacacctcggcacgcagcggagatgcctctttttgccaccaatcccttcgatcaggatgttggtaagtgtttttgcctctccctgcccattcctcaccggactgcacgctcactctgccagcccctgcctgcattcaggaccctcgggccagggccaaggaagagctcgctcttcccctttcctgaggctccctccttcagagctgggaggaggttgagggcttggcgcatcctctttgaaagaaatgggactcatcctgtgaaatgggccttgagctaggactgtaggttgccaaagaactgctgaatgggttggtgtaaagggcctgggaggagcagctggtgtagcatctggtgcagggactgtgcttctggaagaacagcgaagggcttaaggcgtatgttggctagattaggattgtaaaccctgtaccaaaagtgcttgcctagacaaataaatgttgagcgtctggaactggcagaatgttttaggtaaggttccttagaggattttaaaatcttttgtaacggtaactgaaggagggagctctggttaagggtagactctcaaacatgttaggagcgatgaagatgaaatacttggcaacgactgaaaccgaattgaggacctgagcctttgggatgtctctcttaggctaggtctctgcactttaaaaggtgtaaagaagtgtggaagaagttgttgaatctggaaagagtttgaaatgctacatttttgttgttttctgaatcactggtattaggtactgatgatgtcaattcaataggtttgcttttggtttttaattttattttattttatttttttctgacttgaagataataattatgggaatttgagtttccggggagagaattttggtttaatttgaacgcacgtaggaactaccttggcacacaagtgtggaatgaaagcaagccaaataccatttccaaatcccttatggcagaatgtaatcattactgtgaataaggacaaccttatgaatttacttgtctttgtgtattttaattatgaaaggtggatgttgaatttttctttttaaactcttccttagagcatgtcactgaaacttggaagtttatataagagtagaaaaaagttcactccttacctctgccacttctcagctcacggtgaaatcataggcaagttaaattctttgagttccagtgttcttgtctttaaagaggggaaaacacatcattccattctgcagttaaataatatgtctagagggcctgctacagtacctttatgtggttggcacttactagatgctaccttttttgttccaccttaaatgagtgtcctgaatcttagcagtggacagaaccttggagatcaccgattatacttaatgaattggaaaattgcatttaatttaataagcagttagcacacactacaggacacagcagctcagtgacataagagatacagtgatgagcaaggcctagttgctgttctcaagcagttttacatctcactacatgaatctctaggggaaatacttaaaacagcttcttaatacttgcttcttctgtttacagcacctttgtctagttttcttggtcctgtataatttagctagcaactacccaatcacctttatattctactgactttgtgaacacatatttgcattggattcaggtaaatttcttaatgtcaaacccgttcctagtagctgtaccacccagttcaaacacaggcaccttcttgcctttatgcttttgtcctacgcttatgctttcttttatctttcaacatatccttgtgtgttaaggccaactcagaatccaacttgttacacctgagtcatttcctgattactgtagcaaagggtttctcagtagcaacgttattgacggtttgggccaggtaaatatctttgtcataggagtttgtcctgtgcaatgtagggtgttcagccttatccctggcctttatccactagatgccggtgacacccagcccccactcatgattttagaagtctcaggacattgctaaatgccccctggaaggacaaaatacctcccagttgagaaccgctgcactagtccactctaatttccaccttcttacaaaatcctctaacttattttagcatttttgccttt

SEQ ID NO: 53725 - DNA, 956 bp, Homo sapiens
tatttgaatgatgggatggtggggggaagaaataccacggagtttgacaaattatagataggcgcagaggctaacactaaatcctattttgagcagcttcagaaaaatagtagataataatcactggatggatgacacagctgttgcaacagctttatcatcctgtgactctttcactgaaatagcccttatttcatggccctgctgtgttttgcaaaatggctgtctgagtattaaattctacaaggcaggctcacacaaatattgaagtgtatcactacttaacatgattggatgctaattgcaatatgctgtgccttacactagccgaccagctccgagcaagcgctggcttgattttcatactccttttgcgagcagctactctattttcaggaagggttgtaaaagggaacaggaggtttatgcaggctgggcaaactgcagtgctgaattgcttaacactggtttgacattcctgactgcaaaacaaatagaaaattgacaaagcaagctaatcaatacttaaagtattgaaggtaaagaaacccgtgaccttggaaaattggccacagaaaagagatatatgtgagacttacaggacaaacaaggtcaaaatctgatatgatctcaataataaagttggaaatggtgacggggtggggtgggagggcagggagagataactatactgtcaaaccttaaagagagtattcaattttattaaataagtaaaagcatgaaaaaccccttttatttaaaggtttttgcagttgttacatatttggtgccatttgtcttttgaatgcaacagttgacatatcagaaatcaatggaggagtcaggtagccagccaagatttctaaagacgacatctgcagggatagatggtttttatccagtcaaaaaattaattgctttttaaataagatttgggaataagtgttacaaacttt

SEQ ID NO: 53726 - DNA, 535 bp, Homo sapiens
caggtcattcagatccctaatctgctcttttctgtcttcatacactgaattagatttggcctttctttagcttttaagatttatgtgtgccttttccatctaactctaaatacctttgataagtcctgtctcctttgcctgtattttttaacacttaggactacagaactcttgggggcgggggcattcaaatggcatccagagttttagtgcgttctcctgacattgacttttttagccacatttcaaggtcatgctactgacgattacggaccaagagaagagcaagtgactgctgacctctagaggatactcaatgcaataaatgattgtttttctgtgctaataatagcactgacatcatatggttgtaataaatttgaacaggatgattgaagcaaatgtacagcgcctagcatgcactaagaatttggtgactgtgatcattttttatagttgcatttagataaagaactgtccctaaaaattattcatcgttagatgagaaagaaacctttaagcagatatttagata

SEQ ID NO: 53727 - DNA, 825 bp, Homo sapiens
ctctcacctcagcctcctgagtagctgggaccagaggcgcacaccaccatgctcagctcatttttgtactttttgtagagatgtaattcctccatattgcccaggctggtcttgaactcctgggctcaaactcctgggctcccaaagctgctgagattataggcatgagccactgtgcctagctgaaacctattttttcttcatgttgattcctacggtgttagtcctatgctaacctgactctgttgtcttctattttcaagataaatcattaacagaagatatgagctactacagttattcagagttagtgtacagaaacagaaaaaaataaagcagttttaaaaaggaaaaaaatggactgaatgattaggaataaataaaacatgcaaatattaccttgagtcaaaattggaattccaaaatgaataattagtagatgtaaggcattcctccagtgtacttcatggcttgaattcaaaatcatgttccaaggtaaataaatctgctccatcttgtttatccaaagggcagtttggtgttgacttagttctgctcttttttggtaacttattcaagaaaagcaaagagcagaaaattcgtggtgttttaatccagggagaaggagcgggtggaagtaaacagagttcctccttcatcagacttcgtcagaactgctatgccctctgactgcattagattaaatactgcaaataaattggatcccatttggtacttaataagcacagctcacttggaagaagttttacttcaagatatcttcacttttctttggaatatgacagtttacccctctgaccacat

SEQ ID NO: 53728 - DNA, 2650 bp, Homo sapiens
acatggagaaaccctgtctctactaaaaatacaaaaaattagccaagcgtggtgacaggctgtagtggtgacaggtgacaggtgaggagctgtaatcccagctcctcaggaggctgagacaggagaatcacttgaacctgggaggcagaggttgcagtgagccaagatcgcgccattgcactccagcctgggcgtcaagagtgaaactccgtctcaaaaaaaaagaactctttttattaaacaacaaaatacataaagtagtcctgtgaattgtttttgaatttttacctgcagaatacgaagccatcagaactaaaaaggaaaaagttacataaatttttcatttaagcacaaatgtgtttctgtagagatttgaacagactaaaaagcaaataccacctcattctttactacttcctgtcagctctttatagaataattgcctggtactgacacaatcccaaggataaccttttccacctttgtcccattttaggagtggcattgaaaatgatcagagcaggaagggccaggactcagatggcctggtggagaatgactcatcaagacaaacatcacaatctcagagatgttgtcagaggctactgaagcagagaaagaacacgcaaatcctgtcagacaaagccaagcctggccttgtgtgtcaggccaaagcagacaaagcaagcgaaaggagaaacatggagaaattcaaagagttctggggattaggacggcacagaaaaaagtatagtctcattaaaagggaagtataaaaatcaggatttaagccggcacagtggcttatgcctgtaatcccagcactttgagagactggcacaggaggatcacttgaggtcagaagtttgacagcagcctgggcaacatctctacataaaatttaaaaaattacaaaggcatggtggagtgtacctgtagtcagtcctggctactcgggagactgaaatggagggatcccttgaacccaggagttggaggatgcagtgagttagcatcccgccactgcactccagcctgggcaacgagcacccaaataaataaaatttttaaaaaaattttttttaaaaatcataacttatacctagtttaagggtacaatccaaggagagtcccattaggactccattaggatgagcaaagataaagtcttagaagcagtatggcagacaagttcatagctagcttatggaacagtttatgagttgatcttggcagacatgcatctacatgcatgtgtagatagatggtgtgtactctatctaatgttggcaggataagtttatgttggtctttagagtaaaataacgtcagtagatacccgtggactattactgaaatggtatgactataaactcccctcggttttgttgttggttttatttatttattttcagacacagggtctcactctgtcacgcaggctggagcgcagtggcacaatcatagctcactgcagcctctaactactgggttcaagtgatcctcccaacttagcctccccagtagctgcgactacaggcacacaccaccatgccaggtaagtgtgtgtgtggacagagtctcactatggtgtgtgtgtgtgtgtgtgtgtgtgtctgtgtgtgtacagtctcactatgttgcccagactggcatcaaacacctagactcaagtgatcctcctgccttagcttccggagttcctggaataacgggtatgagccaccatgcctggcgccctcagttctaacagcatttagcatacaataaatgctgactccttttcttcctcttctcatccctttactaccttactcatttgtttaccacttgaaatccatgaatgtacacttttaatcagaggtaaaactcagttgctgctccagtcaggaccaaatcaaaccactgtatccacttccaaggcaaatatcccctgctcctgagcagaaaatatacaaacgaagcttctgaaatgtcactgactcacatttgaaagccagtcctggctgggtgtggcgtctcatccctataatcttagcactttgggaggccaaggtggagaactgcttgagaccagaattcaagaccagactgggcaacatggcaagacccccatttctatgaaaaaaaaattaaaatatcagctgatcatggtgtcatgtgcctatagtactagctactcagaggctgaagtaggaggatcacttgagctcaggaattcaaggttatagtgagctttcatcacaccactccagccttaatgacagagcgagaccctatttctaaaagaaaaaagcaaagtcagtcctttgttgtgacacctggtactcttaccttgatcaatacccagaatctacaactattattgaaaatcttgaattccatagtctgatcactccataatttaaatgactttctgacttgcaggactccagtcctctaaaaaatactgaaacttgaaaatgttcatgcctgtcttcctaactcagttcctaactactactttagattctggtgctcttcgactatctccttctgaccacgcctaccagaacaagtgagtgctataaatcactgaacttaacataacgaagaataatttaagccaattattattcaggtatgagattacatgtttctttaaaaaata

SEQ ID NO: 53729 - DNA, 1219 bp, Homo sapiens
cacaacattttaaaaaggaaaaaaccattcttagcttatgggccacacataaacagacatgagccagacttggccaggaggtagtagttgacccaattctgatacagatcaaattattcatttcaaggacaccataactgaggcccagagacggaatacgttttctacagatgaaagcaattgtttcttgatttcaagtccaataaggtaccactgaaccacagtgactaacttactaagcatatgcaacacaggtatgtcgccaactgggtgaatacattaagagtatcaagtttcatcccaatgttcagagtccaggttctggatgttctctcactaatgacacaacagctttctgaggttttaaggcaatgcagtcaagaaaacaaaacagaagttcattgacgtactctatcagtaatgatccactaaaacaaccatcatcaaatacatccttatttggaaggaaaaaaaaaaaaccatcagaaaaccttatatgatgactagtttgttagtccttactggataaaaccctaaatgcaaagctggaaaaatacccgaccaagaaaaatttggaatatatcttagtgacaaatcaataaattttccatttgaaaatgcacataaattttagagaaccttaaagacaaatctaaacattatacttacattgtgatgctgacacaattcctggggcatagacatgggctcctcttaaaactgcattgccacactgggctccaacaatggcttcacactgttgttttttaatattctttctagaaatgtaagacacaagaagtttaatagtaacatacctccaatgcctaccaatttttcccgtgttctatctgaactctaatgcctctttagtcttaactgtcctgaatacataagaaaacgctgaaaagagaggcatacatatagaggaaacaggaaaaaacagcaacacgaagatgggcacttgagaggaagaaaaaaatcaagaggtccatctgctggaaggcaataaagtggcaccagaaattgcttaatcatttaacaagcattactgtttatcatagcattaggagaaaaatagactttctctgtcttcaaagactaaaatagaaaaatacacaaggaattacaaaaacatttctaaagtggtaaattgttgcatggtaaattatgaataatttaaacaagacaggaaaagaagataagtcttttttccttc

SEQ ID NO: 53730 - DNA, 607 bp, Homo sapiens
ttcaaaaacatgttttgtggaagtgaaatctgtagtgttagattttatgaaaataacatggaggggaaaggatgaattctggaacagagaactgtgcagaaaaaagttaacatagtaggcctgatctgttatctttgaaaagcctgcttacaaggctggcccttgactgacatctgggaactgagatttcaggaggtttacttattaactgctaagagtggctcactgtgcctgaattattgaacaaactatgatttatagtaaataccagctttccttctgagaatccagaatgtgggtatgtaccaggcagtgggaatctacatgatgagccctgaataggaatcctggcagtgagtctcatgtggtcacagctcagcactgggggacttcctgtgggagtcctgtgtgactcccctggaagaggactctggaagcttgtgatggttttccctttgctgattgtgcttcatattctttcactgtaacaaatcatagccgtaagtacaagtatgtgctgaattccctaattcctcttagagaatcacagaaccaaggaatggtcttggggatccatagacaccaggactgacaatataaaaacaca

SEQ ID NO: 53731 - DNA, 790 bp, Homo sapiens
accagtacctgaaatctcgtcttaagtaaactgaagaaaccaaaattttattttaaatctcatttcaagtaaactgaagaaaccagtaattcagtgatgcattactgttaaaattgtttactgtatataaagtttaactgattcatttgtattttaaataactgtgatatcgagcttttagtaaaaaatcagaggaagaaaacacccttttctaaatcccatggaaatgaaaaggggagaaaaaagaataaaaatctgaggagaagaataggaacagctccggtctacagctcccagcgtgagcgacgcagaagacgggtgatttctgcatttccatctgaggtaccgggttcatctcactagggagtgccagacagtgggcgcaggtcagtgggtgcgcgcaccgtgcccgagccaaagcagggcgaggcattgcctcactcgggaagcacaaggggtcagggagttccctttcctagtcaaagaaaggggtgacagacggcacctggaaaattgggtcactcccaccccaataccgcgcttttccgattggcttaaaaaccggagcaccaggagactatatcccgcggctcggagggtcctacgcccacggagtctcgctgattgctaacgcagcagtctgagatcaaactgtaaggcggcagccaggctgggggaggggcgccagccattgcccaggcttgcttaggcaaacaaagcagctaggaagctccaactgggtggagcccaccacagctcaaggaggcctgcctgcctctgtaggctccac

SEQ ID NO: 53732 - DNA, 3728 bp, Homo sapiens
actacaacctccacctcctgggatcaagcgagtctccttcctcagcctcccaagtagctgggattataggcatgcaccaccacacccagataatgtttgtatttatagtagagacagggtttcaccatgttgctcaggctggtctaaaactcctggcctcaggtgatccacccccctgggcctcccaaagtgctgggattacaggcgtgagccaccacgcccggcctcttttcaggaatgaaatgtaggtatgtgaatttacaatcctaaataattttttcaagcttccctgcaatagctcaccatttgtattttatacattcacttatgttctgatgagtagcctagatcactacaaagaacagaatgaaaggatgattaaagccacataaaagtaagtattgaaaataatttaaagttaaatcatccatatattttagagaactaaaatggccagtactggcaagaatgaaagcatcaaaatctctcatatactgctgaaacaaactggtaaaactttgtagagggtaatctggtaatatgtctccaactaaaataagcacagacctttgaactggttattctgtgtcatatcagtttgttctgcagacatgcttatgcaagtccacaaatattgactccaacacttccggtaataatgaaaaacaggaaaaaactaaatgtctatcaatggaggatagaaaatttaaactgagctaaatgataaaacatactgttaatgtagccattagaaagaatgaaatagtgttatataattgtgagacgatatccattatatatttttaagtgaacacaaaacaaattgcagaatattatcatcttttctattttctaaaaatgagtacaaatgactgtacatgtgcattcatgtatgcagatgtaagcacagagacagttcagaaaatatcaaattggatgctcagagaaacaaaattgggaggtgggacaggagacgtaacagatgattacttttatatttatgtacaactctagttttcacttgcttctataaagaaaaacctaagtgaactatctttaggaaaactaaataaaactaaagaataaagaagaggtgtttaacataataagaaatggcaaaagttggccaggtgaggtggctcacacctgtaatcccagcactttgggaggctgaggtgggtggatcacctgaggtcacgaatttgagaccagactgcccaacatggagaaaccccatctactaaaaatacaaaaaattagctgggcatggtggcagctgcctgtaatctcaactactcgggagcatgaggcaggagaatcacttgaacccaggaggcggaggttgcagtgagccaagatcgtgccactgcactccagcctgggcaacagagtgagcctccatctcaaaacaaaacaaaacaaacaaaaaagaagaactaagaggaaataatcaaaatcaagcattacactggccaaatgtctgaagttcagtaactaaaaatcccacaggtctctaagcaaaagacaaggtactgttacaaggaggaaaagtttttggtgggccttagatttcttcacaataacatttgatgccacaggttataaaaacaatgtctacaaagtgctaagggaaatactatgtggcctgaaacaaccagactcagccaacttgttgtataaacataaaggcaacaggcagacattctcaagtaagaaagtaacgcagtacataaaaggcacacttagggaaagggcagggggtgcgggaaatctgctaagtgactgtactcaccaacaacgacattaataaagataagaaatgagaaactgtgccataaggactgaaagcaagcaccacatgtatgtgaattatacttgggaaataacaatgttataaagcttgacaatgttaaaaaaaaaaaaaaaaaaaaaaactggccggccatggtggctggcacttgtaatcctagctctttgggaggccgaggagagtagatcacttgagctcaggagtttgagaccagcttgggcaacacggcgagacctcgtctcaaacaaacaaacaaacaaaaaacaacaacagtaaatacaaattagctggtaggaattttagggaaaatttaactccaggaacctcctcatttctcataatggaaagtcaaaaagagacttaataggccgggtgcggtggctcacacctgtaatcccagcactttgggagggtgaggcaggcggatcatgaagtcagaagttggaaaccagcctggccaatatggtgaaacacagtctctactaaaaatacaaaaatgaagccaggtgtggtggcatgcgcctgtagccccagctactcgggaggctgagtcaggagaactgcttgaacctgggagggggaggttgcagtgaaccaaggtcacatcactgcactccagccggggtgacagacttgagactccgtctcaaaaaaaataaaaacaaaaaaattttaaaaacagatacttaataaaaatcaggagttaaaaaaacaaaaagtaattgacttattctttttaagaatgaaaggtgggtatgtgaataattttttcaggcttccctgcaatagctcaccatttgtatttatacattcactcatgttctgatgagtagcttagatcactacaaagaacagaatgaaaggatgattaaggccatgtaaaagtaagtattgaaaataattaaagttaaatcatccaaatattttagagacctaaaatagccagtattggcaagaatgaaagcatcaaaatctctcatacactgctgaaacattaactggtaaaactttgtagagggtaatctggtaatatgtctccaactaaaataagcacagacctttgaactggttattctgtgtcatatcagtttgttctgcagacatgcttatgcaagtacacaaatattcactctaacacctctcgtaacaatgaaaaacaggaaaaaactaaatgtctatcaatggaggattgaaaatttaaactaagctaaatgataaaatatactgttcatgcagccattaaaaagaatgaaatagtgttacataatcgtggaacgatatccattatacatttttaagtgaacacaaaagcaaattgcagaacattgtaatcttttctattttctaaaaatgagtacacatgattacgcatgtgcattcatgtatgcagctataagcacagagacggtctataaaaaatcaaatttgatgctcagagaaacaaaagtgggaggtgaggtgggacaggagatgtaacagatgattacttttatacttatgtacaactctaatttttacttgcttctataaagaaaaacctaatttaactctatctttagggaaactaaataaaactaaagaataaagaaaaagtgtttaacagaataagaaatggccaaagtttgaacctaaataagtacaattttgcatcctcataaggagtgtagtaacctccaaagatctgtgattatggtctattatagtagcagctaactggtccaaaactaagagatgatagaaatcagaagagcagcttcctggtagggtagctgagtacaagagatgtttctgggataatggaaatgctctatcttgactggggtgggtcttggctgcacagttgtacatatttgtcaaaacccaacaaactaaacatttaagatctcttcgtttcactgtatgtaactttcacctttaa

SEQ ID NO: 53733 - DNA, 3099 bp, Homo sapiens
ctttctcaaggtttagtcttatcaaaactgaacattcagcctgggcaacatggtgaaaccccatcactacaaacaatacaaatattattagccagagtggtggcccctgtctgaggtcccagctactcgggaggctgaggtgagaggatcacttgagtcccagaggtcgaagcagcagtgagctgtgatcatgtcactgcactccaacatgggcaacagagggagaccctgtctcaaaaaaaaaaaaaaaaggcataaaacttaatattcctttcccttcagtacttttcacaaaggcatagcttttcattttgtaaaaccataccactgatgagactcgaggcagaggcagtgtcaaagaaagacgtttggatcttctttataaaacgacgttctccattttaaaatctgctgaaaaaattgtggtatgcccctacttctcctaatatgtgccttatattttaagtcccttgaaatcaacagaatatattttctctttccatacagtctagtacctcaagctaatctttggaaatgaaacgtagaaatcaaatctaaaaggcatggcttcaataacatattcaaaaatgagtaacatttaagtggtgttactctaactaagaaaactaaagatttcaaaaaaaacaaagttgcttagaggcaacatggtaaagtggtagagaggacaggctttgcaataaaagacaatcaacatttactgaggacttctgtggcaggcactgccaattgcaaacaaaattaacattttttgaagacttacatgccaaaacaatgcaagttgttttcatttacgtttaatatcctaaaacaacctggtaaaatatttttaacttgactaaaaaattaaagatttgaaaaaaaacaaagttgcttagaggcagcatggtaaaatggaatagacaacaggctttgcaatcaaagataatcaacatttactgaggactttagcaaataaaattaacattttttgaggacttacatgccaaaacaatgctagttgtattcacttacgtttaatatcctaaaacaacctggcaagatatttttaaccattctcaatttttcacagaagagaaaaatctaggttaagccacgtaatttacaaagcactagaatgcaaatcatgtgcctgagattcaaaagctgtacctttgttcattacacctgaactctttccctccagatttcaatagttacttgatagctgtgtcaacttggatcagttacacaattccttgagcagttttctgctcaagtctattaaaagaggaaaaacctctaagaaaaaaaagattgtgaagattaaagatgcaaatctcctagcacaactgctggcatttaagaggcactcaacaaattacagaaaccttttcacctgagtgccagagccagcgctcttttaaaattcgattcgagttcttgaagacagggaccttttcttgttcatccttgtaaccctttgtgccatgcctgacaggcacatgccttttttcccttcttttccactcctaaatgttaaaacatataccttattcacttcgtatctcagtaagctttaatacctgtagaaacatattggtatttttacacttgatagacaagtagtaaggaacgacggctgtcaagatttccctttatacttatttctatttctctcgagtgtgcgaatatttgagtttttgcaaaatatcaactaacatctttacttgacctacctccttattcataaagccttccttaagatagttttcaacctcaggtctcaaagatatcttagggaaaatagacatttttcctgttgtttagttctccaccaagagaaatgctggaaaacggtgttttgtttttttttttctttccgaattaatagtgacgagtgtcttgacaccagatgctgaggaaaatcttgccgatcacgctgagttaatttcggaaatgcagaggtacacgctttctcaagcctagccgattagaaggggctgccgggcttccaccacacctcatcgaggcaatgttttctggtagagatgctcatggaaatcactgagccaatgccactcacgttgcaaagaaccaaaaaaagaaaaaaatgcttagtaactgaatccgtggtgaaacggacgcagatcagtaagccaggctgacagcagctcggtccctttatcttttctatcaatttccaaacacgcgccccctatttctcggcggaaagtcgcttccggcttacgtcacgtccggcgcctgcggcccacccctccctttccggtcccccaatccacagccgcaagtttccccaacactgcgttacgctacgccacgcccccggaggttcctaaccctgcgtgaggctctttcacctgcctcaggttaagtaggcagaccccgcgggcgggatggtcaaagatatttagttcccggtaccggagggctaggtgccaggggcaatggggaaacagccaaatggcgtgggttgagtggaagatgttgctggactgaaaaaaggcacagcccagttgctgtcctgccagatgtcctccagttagaggatgaggccagaatttgggcgcatcagccaccgtttgatttcatgacatgattttacctctctcaggcatacagatctgacttcagttgtgaagttcatagggttcatatttttgaaagttgggctaatggtctgttaatatccaatgctcaggtaaaacttaaaacccacagacagtgtttacagttagttataaggctaactgctacttgtatcatagttgacatattctttagagtttggaagaccctcgccattatttttttttcttttttttcatcataagcagacaaggatatagattcaaagaacgaggatatctaaccaaactcactgagtcattttataactgtacaggaaagtcaaaataattctatcaccttgacatatgttttttgcagcacaccatggtaatttacacataagtataggaaagggttttttattgtttttttctctttaattttcacaccgaattatacacacagacacacacacatagaacaggtactttccatgacacaccaactctt

SEQ ID NO: 53734 - DNA, 3933 bp, Homo sapiens
ccgtgcctctcctaatgtaattgaaagtattttttctaacagatcgataggtacatcagcatgatatctgtttagataatacacaactatattctgttaatcaatcatattacttttgataattgtggctatttttctttccctccagtttgtaaaaattttagatttccaaatcagcaaacaaaacttttaaatatgaaaaaatatttttaaaatattagaacagtctcattgtcaggtaaattgttcataagaaaggtgttaaaagtaagttaaaagtaaattttaacgaactgaaaacttcaacactaaagttttctgaaatttcaaagaaacaaaaccaataaaaatatcaagagccatgttcaaataaatacattcattccacttagttaaaagtagaagtataattcaaacttactgtctctaaaatatcataaaaatgtttaagaaatctatagttttttttgcttcaaatctctgcattttctttattttatttttatttttatttttttagacggagtctcactctgtcgccaggctgaagtgccctggtgtgatctctgctccctgcaacctctgcctcccaggttcaagcaattctcctgcctcagcctcctgagtagctaggattacaggcgcgtgccaccacacccggctaatttttgtatttttagtagagacagggtttcaccatgttggccaggatggtctccatctcttgacttcgtgatccacccgcctcagcctcccaaagtgctgggattacaagcatgagccccagcgcccagccaaatgtctgcatcttcatacaaaaatgctttgttcttttcagaaatggtttcttagaaatccgaaagccagaaaaaaaaaaaaaaagcagaatgtggtttacatccatgtctaacaattgaagaagctgttacggaatctaaagtttgttttgtgataatgaagctaggactaaaaatgtccttttaagccattacttacacaaacacaaaattattcacatttatggtccaactgatagtcatgaaagttaagtttgcatagggtcagtacattctttttcctctacataggaggttgaaacttgcctttaatgttgtaacgttggagcatattatcctgcatctaagtcttaaagggtctttaaaccatagcactgggaggacgtaagtcatacattctccttgtacaggttaactcaagagtttggcatgttaaaaggccacgttgccaaggttaaaatccaaccatctgactgaagtcagagtctaaaaaaattttaagcttgctcctccgtcaactggtttcaaggacattcagtttcgtttcatgccaggctgtgaagcttttcttttcaatgctagaacctaaccatggaaagtggaattgaaaacaattacacagcgaattggcttatgcgtggacttcgatctgggatccacgaacatacctaatgcttggcaaaatggagaggggtgctatgtgttattattatgtgttattattaatcacataactgaactctgtggctccaggccttccatggctcgtctcccaatcaattcttttcagaactaagaatcacgacaggggccgggcgcggtggctgagcctgcaatcccaccactttgggaagtcgaggcaggaagatcgcttgagcccaggaaattgagtccccctgggcaacacagcccgacctcgtctgcaatcgatcaatcaatcaatgagtacataaatgcataagccaatgaatgaatacgtgaatgaatagattaataaatgaatgaagaagaatcacggcagaactcctaacccctagcacgcctgcctaggggaacaggaataagtcaggaaagaaacactcttcacttctgtgagttttctaagagcagcaaacggcggctgctcacttagagaacctatggtctttcctggttttagaggtcagggaagcagctgctagcagcagagactcaaatcaaaggggagtcccacaaacgttttgaaggctgacatcagaaggagcacgcaccaagggaaatttcccacccccccgcgataccgcaaattcccagccgctggccgtttgggactctcctaccggaagtgaaaccgaagaaaacgccacgtcgaaggcgtgggttgccgtaagtgcgccgtcgtcacgcgcctagcttccggcgatgggtggtcctgggatccggaggggaggcggggtggaggcggggcttggggctgtggagaggctgtggtaggtaggtgggtacagaccgaggggactacgggtcggcgttgggctcagtgggctcgaaacaaagggctgtccggtggggattcgtcgcggcgccttctgagtggtcgggtcgaggcttctcggcctagcagtgccctcgctgcgcgatctcaggcgggttctcctcggctccgcgcagcccgcgccgcggtgggggacccggcgcagcggcacctgctgccgagggaccccgcggcccgccccggtgctcgtgatggggctgatcttcgccaaactgtggagcctcttctgtaaccaaggtgagaagaatggagctgcgcggcggctcgaatccgaggcagagggtcccgccgccgatggggacaccggagacaggggacagagcgttcggagacgcggaggaggaagggacttaggccagggggcgggcagaaactcagtgttttagacctggaggacgtacaggagagacctgacgtgtgggagaaatagggaggcagaagagaaggtatttggcgtcccagaatccaaactgagaatgtttggatattggcgaagtaaagcgggatacagctaatgatgccaggaggcgtatggagggcctttctcgtctttattgaagcgtgcttgtgtctatgtgtatccccaggataagtgtccgcccagaaacctagaacttttttttttttgagtaatgtaggtgctttgttttcccgccctgcagtttgagccgtaagccagtgcactttcactctgatttcgcctcctttcctctaggacttgggaatgagttgtcctattcagatgcacgagttttccagcatcttcattgtaaacttttttttttaaagcatttagttcagaaactaaatgcttttcggttttgtgtaagacgttacgtgtccgtaattagtctgtaacaggtaatgagacacctggaagtggcaggtccaaagggccgagaagttgcaaaacctgttctgaatcagaatgagatgtgatgtcttctgaagagagaaaacacccagaccaaaaaaggggccgacgataagttaaagtttgaggcgtcctttgaacagaatggtttcttagtaattgaaaccagttttgaaaatcaactcgtttcattttacatttaagagccgggcatcgttaataagccagttttatttccttttatgttggtaccaatttgttactgctaatgtaggtatctaatctttttctggatttaagaagttgtggaggtaatggaatggctttagttgacttgttctgtagattgataagaacactaaagcagtctttttcaaggttataaatatagatacaggcacacacatgtgtatatatatgtatatgcctgtatccagtaaccacagataatattacttatcaaatgatttcaaagtgagcagagcttcacactttgtgggtattatccatacatttaaaatattatttttatttatttattttttgaggcagagtctttctctgtcgcccaggcttcagtgcagtggcgcaatctcagctcactgcaacctctgcatcctgggttcaagcgattcttgttcctcagcctcccgagtaactggtatttacaggcacccgccaccacgcccggcctatttttgtatctttagtagagacagggtttcgcc

SEQ ID NO: 53735 - DNA, 907 bp, Homo sapiens
aggtgtgagccaccacacctggccttctaaatatatctatagttaatttaaatttttacttgcccatggtcatctttttaggactactttagattaatatgcctgaattaatttttgtgactaagtctcaatttagacagtcttcaaaattatagatagcctgctatccaatatttgctattttgcaatcacctagaaacttgcttttcaggatggcatgggacattgggtcttatctaactgataacagggcatggtggtattggaatttttggccacagaaatgcaaattcacaccacactgtttcctttcttttccatcaagcttgcaattccttccgttaaaaaaaaaaacaaacaagaaacaagtctttcttctggagttgttatctagatattgatttgcgcaagtgttctccaggtttataattttcatgctaatgatcaccatcattggtgcagaaggttgattgatcttaaaaatacagagataaaagttgcttcagattctcaagatttacaagagcttttacggtgtctgtttttcaacagcttaatgaatgaagtggttcatacttctccaaccataggaagcaatgttgaagaaatagttgtgaagaacactcattttcttatgtgggatattggtggtcaggagtctctgcgatcatcctggaacacatattactcaaatacagaggtatgctaagatgaattttgaattttaatccaaaggtccctagagtaaacatagaaagtaattaggctgcacctgggcgtattgacagttgccttttttttttttttttttaagacggagtcttgctctgtcgccaggctagagtgcagtggagtgatcttggctcgctgcaagctccgcctgctgagttcaagccattctcctgcc

SEQ ID NO: 53736 - DNA, 1814 bp, Homo sapiens
ggaacaactggatttgtagaacagactgagactagagactggaccatttaggagcaagcaggaagttaccttttttcctgctcatctgtttctgtctttcacctgactggatttctctgtttcctgatccacataacagataatgtcccaagtccagtagcctcctaaatttgtacaagggagaagtcagattattgttagactttcaattacaattccatattccccagggaaattgttcattagcctgcattgggtcatttcctctctctgatctaaacaactggccaagtggaaggtgcatttaccagagaaggggaatccctggcctgggaaggtgatccggattggtgtgtactccattgtggggtataattgggatcatctaccaaagttgtgtccttgtaaaaaataaaataaaattgagatctaataatgagtgggataacattttcactatgttcattcttcacattcctctaaagtggttttaactccaccgtttttgctcacagacctctttgggaatgtgataaaagttgcctacgtagaaaaatgactcataattacagagttaggaattttgagtagaaggttaggaatttcaggtacctaggcttaagagttctgctacacacggaacactcagatttcttctgaaagacaccagaaactagtaagatttcattctgcctgttattttttaatcagtaaacttaagattggtatcttttttaaagcatgttttatgtaggtatttttgtaggtataatgaatgcattaaactgttcgtggttaaagtgtacaatttgaaaagctttgatgtgtatacatttgcaaaatcttcaccacaatctgggtaatgaaaatacctgtcactccaaaagtttcctagtgtcgctttgtaatcctcccttctgctccactccccatccgcagataatcactggttttgactaattatccccaattttgtgatttaaaacagtctaaaattaaggtgccagcagggctgtgtttctcctcaaggttcaggagagaactcatcctcacctttttcagcttttagaggctgtgtgcatttctcggctcatggccccttcctcacatcactccaccatctggcttctgtcaacacatctacccattctcatcatcctatgcttttctcatattaaggaccctagtgtttctaactaggttttccttgataatccaggataaccttcccatcttgaggcccttatgccaggtaaggtaacacattcacatgtcttggggaattaattctactgcatgtgagctaaaagagcatcctgaacaaaaccctcacatgctggcaggtggccacttgcgatactggctcactgcaacctttgcctcccaggctcaagtgatcctcccatctcagcctcccgagtagctgggaccacaggcatgtgccactacacccgcgtaatttttttgtactttttgtagagatgtcccgccatgttccccaggctagtctcgaacttttgggctcaagccatctgcccgcttcgacctctcaaagtgctgggtttacaggcgtgagccactgtgcccggctcatacactgattcttgatttaacctttctttgtttaaaaaacccttcctactaagaaatatgtatactcctcagcaaatttgaattcacatctgagatttttgacctgacatttttgtgaggacttggagatttgatgttgctatacttgaggattattctgcaacagaaacaaatgtagtttcagtttgataataacaatgaatgcacgtcttccaaaatgg

SEQ ID NO: 53737 - DNA, 825 bp, Homo sapiens
aaatccaacaggaaaaagaaaagaacttttttctttctgattttgactgctctctttaagattgtccatgttctgtgaaatgaatttgatcaaatgcattacttaattttttttcaagtattacttatggctgaacatactgtatttgtttcaagctctccattcctggccattctgtttatttaggatcatctgtaacatattcacatgtgaggaaagttgagagcttaagcgctcaaagtttaaacagttgtgtaacagattctgtggcagagataatgtttaattttcagtgtggatgttaatcaaaggagtcactcaaaattcttgcaaaaagtatcataaagccacgtgtgtgtctgccctttgatcttggaaactttcattctgaaacttgagtcaaaacacagtcttttactaatttcatcccagacaaatgtgagagccactaaaatgttctattattctgtctgcactatgtaactctgtttgccagtagcttggaaatcaatcaattggaacattttagaaataatctctttgcaaaagcaaaccatagaatacactagagtgtattctttgatgacaatcagtggctggcaaagcaatgtggcctgcaaaagggaggcttccaggtgccatcagccacgtcctaggtgccaagagagaactgtggaatgacacttctttctttgtgctcagctacatggcgtggcaagacaccctgtgctggcagctcatttatcaggaagtagcaccattcacatcagtaatgtttgcaattagagcctattaagcctgattgaaaatgaagcatcagaggtg

SEQ ID NO: 53738 - DNA, 672 bp, Homo sapiens
ctaatctttataattatttttgttctgctaacttcggccttagttctttttcttctagttttctgtcaaataaagttaggatgtttatttaagatctttcttttttaacgtaggtatttatcactatacacttccctgttagtactgcttttgctgcatctcacaagttttgctctgttgtgttttcatttcataaaatattaataattaaccaaaaaaattttgtcatagacagagtccatggttgaagcttattttcaatggcttcataatacaaagtccacctaattaggcaacctcaaacagttcaggaacagcataacactcaaaattgccagaagccttcataatacgtttcctctccagtggcttcaatgtggcattccattcatcttcatcttctactctcttccctcttgaccatctattgtctaaaatgtgagacttatccaggaggtacaagcttctatatgaggttgtatcaccagccgtttccagctcccagaaaaccttataataaatacctgaacttcatcccctacctctgacccacatcaaccctcatctaccaggtaacttgcctccagaggttcatgtggcagggtggggctaccacctttgaagtaaagcaaggagtgatgttatcagctcctctacctggaagaaggagaa
